United States Patent Application Publication US 2021/0199660 A1 - sequence listing, part 12

SEQ ID NO: 159453 - DNA, 120 bp, Artificial Sequence
  ENSG00000106852_24 (sequence is synthesized)
cagtggtaacttgtgcccagccctgtgctaggcgctgacattaacaggagcaaccagggcccaattcctggccttggagctcaaatctttcctttgatttttgctcctgatcatcaaggc

SEQ ID NO: 159454 - DNA, 120 bp, Artificial Sequence
  ENSG00000106852_25 (sequence is synthesized)
cccagtggcaaccatgtggtaagtggccaaccaagccctacccagggtcacccaacacactctgccttgagcctctcctcagggtctattccttgcgtggattatgtggccgtagcatgt

SEQ ID NO: 159455 - DNA, 120 bp, Artificial Sequence
  ENSG00000106852_26 (sequence is synthesized)
tacagttcaaacatgtctccactaccctgttaagagcagcctgggaacgtacaggccatcaagactatttatttaaatacaaaaaaaggggaaaacacacacacggaaaaaaaattgtaa

SEQ ID NO: 159456 - DNA, 120 bp, Artificial Sequence
  ENSG00000106852_27 (sequence is synthesized)
gcactttttttgtaaaaccaatgtctgttttgttacatacctttcatgtcgtgctttgtaaatgtcttatttgtgtaataaagttaatgcaagtagaagtgctggcactgaaatccagaa

SEQ ID NO: 159457 - DNA, 120 bp, Artificial Sequence
  ENSG00000106852_28 (sequence is synthesized)
acttccaaatcctggctccactgctgcccgactgcgaagctttgggcaagacttagggtctgcctgagcccccgggttccgtctgaaaaataagaagagtttatttccatttccctgagt

SEQ ID NO: 159458 - DNA, 120 bp, Artificial Sequence
  ENSG00000106852_29 (sequence is synthesized)
ctcagtattacgggagaaaaataggggaatcgcatgcaccttctgagcttcagcgcctctgactgtaaatgagaccgggaaggctggggcccggagtgaaagaggcccgcgctgagccga

SEQ ID NO: 159459 - DNA, 120 bp, Artificial Sequence
  ENSG00000106852_30 (sequence is synthesized)
tttagtaaagacacaggcgaatcaagaggaggcgaggccggtattgtccgtctgaataggcgctgatagcgccgatgcgccgggggttgtgccggcgcagcgctgagaatcccgacgcgg

SEQ ID NO: 159460 - DNA, 120 bp, Artificial Sequence
  ENSG00000106852_31 (sequence is synthesized)
ggccggtacccggcgcgccgaggggctggagggtgctttttcctccccttgagcgcctctcttttctctttttggtcccgtttcgccccgatctcgctctctttttgctccgggtttccc

SEQ ID NO: 159461 - DNA, 120 bp, Artificial Sequence
  ENSG00000106852_32 (sequence is synthesized)
tccgactggccctcgaaaggcgcctgaatccgtgtcaatatagctgcttcaatttcgccgcgcgtgtcaggcgggcgggcgggcgggtgctcaccgcgctcggggttttcttttcttcaa

SEQ ID NO: 159462 - DNA, 120 bp, Artificial Sequence
  ENSG00000106852_33 (sequence is synthesized)
acccatctcttttttattttctttctttctctcttttctcctttttgcattttgtgccgagaggagaagggagcgaggaaggggagtggggtgggggggcgggtggagagagaaaaaatt

SEQ ID NO: 159463 - DNA, 120 bp, Artificial Sequence
  ENSG00000106852_34 (sequence is synthesized)
cgatttttaattactaccattaaaaaatcaaatttgcaattctttgggcggcctgatggatctcactgattgacagttggaattgacactctggctacctcttatcttgggcattcacga

SEQ ID NO: 159464 - DNA, 120 bp, Artificial Sequence
  ENSG00000106852_35 (sequence is synthesized)
caatttctaattgcaggtgatggcccagccagggtccggctgcaaagcgaccacccgctgtcttgaagggaccgcgccgcccgccatggctcagtctgacgccgaggccctggcaggagc

SEQ ID NO: 159465 - DNA, 120 bp, Artificial Sequence
  ENSG00000106852_36 (sequence is synthesized)
aatcccttccaagagaattcagggaaactaccctcccgtttcacctcagtccctgggagctggtgcactgtctggttcttatagagcagaggtatctgtgcaggtgtgtgagagtaagtg

SEQ ID NO: 159466 - DNA, 120 bp, Artificial Sequence
  ENSG00000106852_37 (sequence is synthesized)
tggtgcctcgtgcccgtgtaaatgatgtgaacaggtaatcacttacattagtgtgtacacaaatgtaccaggcatgggattgcatcaacacagtgtaataacgtgtgacctcctacggaa

SEQ ID NO: 159467 - DNA, 120 bp, Artificial Sequence
  ENSG00000106852_38 (sequence is synthesized)
gtgcacgtggccatccttctccaggaggcgacgaggcagtcccgcctggggtctcccggcggcgcgtccgactcttttcctcgaggctgaggctgccgaggctgtcgttccaggtgtggt

SEQ ID NO: 159468 - DNA, 120 bp, Artificial Sequence
  ENSG00000106852_39 (sequence is synthesized)
gatgtgtggctccctgggtgatcttgcaacacttaggcaggagtgacctcagaggcctgtgaatggagcacctttgtcaatatcaggtcactgcggtccctggccctcctgccttctgac

SEQ ID NO: 159469 - DNA, 120 bp, Artificial Sequence
  ENSG00000106852_40 (sequence is synthesized)
aatgggagtggggagtaaagggttaactgcttcccctcgtgtttatgggggtgggggttcagtgagtgccctggaggctaaagttcctcttcccagctaggcccaaacgacttcatgcaa

SEQ ID NO: 159470 - DNA, 120 bp, Artificial Sequence
  ENSG00000106852_41 (sequence is synthesized)
gcccctagccttctctggccctccgccttgagcccaagctctgtcgcgggctccagcgggagaagcctaccccctcccgcaaagcgagggtcccaggggaagcgcagagcgggaagcggc

SEQ ID NO: 159471 - DNA, 120 bp, Artificial Sequence
  ENSG00000106852_42 (sequence is synthesized)
cccccaccgcggcagagagcggcccagcggcggccagctgttgggggacagatgttgggggagccgagaggggagctgggggaggagcctcggggccgggacctccgagaagcggtcgtt

SEQ ID NO: 159472 - DNA, 120 bp, Artificial Sequence
  ENSG00000106852_43 (sequence is synthesized)
ttaacctcttaattgctggttctgggttttttttccccctctggcttcttcccctacgggtttacctagaagggaaggagcagagagaataggtagggccccacctccaacccaccttgt

SEQ ID NO: 159473 - DNA, 120 bp, Artificial Sequence
  ENSG00000106852_44 (sequence is synthesized)
tcgcctcacaggatctaaagccttcaagaaggtcttgaacctaaaataagtgaacctccgtttgagtttcggcctctcggctcaatagcttgccgattcgggaccaagtgtgcccggtgc

SEQ ID NO: 159474 - DNA, 120 bp, Artificial Sequence
  ENSG00000106852_45 (sequence is synthesized)
gttcggcgccggtttatataacaggcgcggggaggcgctgggctcaggctgtgcggagccagttcagcagccgccgccgcctgcgttccctccccccctcccccaggtgatggcccagcc

SEQ ID NO: 159475 - DNA, 120 bp, Artificial Sequence
  ENSG00000106853_0 (sequence is synthesized)
gttccttggagagcttggagccgcgcgccggagggaataggaaagcttggttacaacccgggacacccggagcttcaggatggttcgtactaagacatggaccctgaagaagcactttgt

SEQ ID NO: 159476 - DNA, 120 bp, Artificial Sequence
  ENSG00000106853_1 (sequence is synthesized)
tggctatcctactaatagtgactttgagttgaagacagctgagctcccacccttaaaaaatggagaggtcctgcttgaagctttgttcctcaccgtggatccctacatgagagtggcagc

SEQ ID NO: 159477 - DNA, 120 bp, Artificial Sequence
  ENSG00000106853_2 (sequence is synthesized)
caaaagattgaaggaaggtgatacaatgatggggcagcaagtggccaaagttgtggaaagtaaaaatgtagccctaccaaaaggaactattgtactggcttctccaggctggacaacgca

SEQ ID NO: 159478 - DNA, 120 bp, Artificial Sequence
  ENSG00000106853_3 (sequence is synthesized)
ctccatttctgatgggaaagatctggaaaagctgctgacagagtggccagacacaataccactgtctttggctctggggacagttggcatgccaggcctgactgcctactttggcctact

SEQ ID NO: 159479 - DNA, 120 bp, Artificial Sequence
  ENSG00000106853_4 (sequence is synthesized)
tgaaatctgtggtgtgaagggtggagaaacagtgatggttaatgcagcagctggagctgtgggctcagtcgtggggcagattgcaaagctcaagggctgcaaagttgttggagcagtagg

SEQ ID NO: 159480 - DNA, 120 bp, Artificial Sequence
  ENSG00000106853_5 (sequence is synthesized)
ttcaaaagcttggatttgatgtcgtctttaactacaagacggtagagtctttggaagaaaccttgaagaaagcgtctcctgatggttatgattgttattttgataatgtaggtggagagt

SEQ ID NO: 159481 - DNA, 120 bp, Artificial Sequence
  ENSG00000106853_6 (sequence is synthesized)
tttcaaacactgttatcggccagatgaagaaatttggaaggattgccatatgtggagccatctctacatataacagaaccggcccacttcccccaggcccacccccagagattgttatct

SEQ ID NO: 159482 - DNA, 120 bp, Artificial Sequence
  ENSG00000106853_7 (sequence is synthesized)
atcaggagcttcgcatggaagcttttgtcgtctaccgctggcaaggagatgcccgccaaaaagctctgaaggacttgctgaaatgggtcttagagggtaaaatccagtacaaggaatata

SEQ ID NO: 159483 - DNA, 120 bp, Artificial Sequence
  ENSG00000106853_8 (sequence is synthesized)
tcattgaaggatttgaaaacatgccagctgcatttatgggaatgctgaaaggagataatttggggaagacaatagtgaaagcatgaaaaagaggacacatggaatctggaggccatttag

SEQ ID NO: 159484 - DNA, 120 bp, Artificial Sequence
  ENSG00000106853_9 (sequence is synthesized)
atgattagttaatttgtttttcaccatttagcaaaaatgtatactaccttaaatgtcttaagaaatagtactcataatgagtttgagctacttaataaaatacatttaagtggtatgtaa

SEQ ID NO: 159485 - DNA, 120 bp, Artificial Sequence
  ENSG00000106853_10 (sequence is synthesized)
aaccagtcacctcactgttcactacagcttcttctgagttgtggtagaaaataatggctttgaagtgtgaaaattttccaaacactgtatgttttcattcataagtgggagctgaacaat

SEQ ID NO: 159486 - DNA, 120 bp, Artificial Sequence
  ENSG00000106853_11 (sequence is synthesized)
atggacatagggaggggaacaacacacgctggggcctgtggaagccggggtgagggagggagagcatcaggataaatagctaatgccttcgggggctaatacctaggtgatgggttgaca

SEQ ID NO: 159487 - DNA, 70 bp, Artificial Sequence
  ENSG00000106853_12 (sequence is synthesized)
gacaggtgcacacaattatcccggaactgaaaataaaataaaattaaattaaaaaaaaaagttagccggg

SEQ ID NO: 159488 - DNA, 120 bp, Artificial Sequence
  ENSG00000106853_13 (sequence is synthesized)
actaagacatggaccctgaagaagcactttgttggctatcctactaatagtgactttgagttgaagacagctgagctcccacccttaaaaaatggagagtggcagccaaaagattgaagg

SEQ ID NO: 159489 - DNA, 120 bp, Artificial Sequence
  ENSG00000106853_14 (sequence is synthesized)
gccaagtaattatttccatttgtcccagtgcttggaaaatatgtctcctctttacctcctgctgggtcctgtctctgtccattgctcctacaatttcttcagcctatgttgttgactcac

SEQ ID NO: 159490 - DNA, 120 bp, Artificial Sequence
  ENSG00000106853_15 (sequence is synthesized)
tgtgtgatcttggaatcaacttgggaaattctgtctccttcctaactagctggaaaggagggaaggatgtgaaattgtcattttttcagcttcactttgccatccttacttttaattact

SEQ ID NO: 159491 - DNA, 120 bp, Artificial Sequence
  ENSG00000106853_16 (sequence is synthesized)
acatgcacataggcacacagagatacgcgcacacacacacacaaacgcactcagatttcccggaccctggttttcctcctgtgaccctttcggggccgggctctcaccctaaagaagcag

SEQ ID NO: 159492 - DNA, 120 bp, Artificial Sequence
  ENSG00000106853_17 (sequence is synthesized)
ccccgccctggggtggccccaccctctcttgggacctgtcataagtcggaccccgggcgcccggctgcgcagtcccagccgccttccccaggcagtggaaccttcgggctcctgagcttc

SEQ ID NO: 159493 - DNA, 79 bp, Artificial Sequence
  ENSG00000106853_18 (sequence is synthesized)
aattactaaaaaaaaaaaagtatttgtccaggtcatgatttattgcgggatctggccagcagcccacaatgcaacaggg

SEQ ID NO: 159494 - DNA, 74 bp, Artificial Sequence
  ENSG00000106853_19 (sequence is synthesized)
aagatagtgaaagctgggtccaggggcgtcaccgccttctggttccgtggtgccaccaaagcactgaatatacc

SEQ ID NO: 159495 - DNA, 120 bp, Artificial Sequence
  ENSG00000106853_20 (sequence is synthesized)
gtagaaatcgtctatggatctttactggaatttcagtgaccttacagatttatttagaggaaactgacatctttacaatttctctctccaaacacaagagttgtggaaagtaaaaatgta

SEQ ID NO: 159496 - DNA, 120 bp, Artificial Sequence
  ENSG00000106853_21 (sequence is synthesized)
gaaaaacttgtatcaggtaactcaggtctctatataagaccccttaaaaaaatctgaaaatgtaaattagttcccattagtaggctgtgccttgtaggagaaagagaaatgaagaccctt

SEQ ID NO: 159497 - DNA, 120 bp, Artificial Sequence
  ENSG00000106853_22 (sequence is synthesized)
tctcactaacatgaacccttccttcccacactcccagataaaggttaaacacatgttaaaagaaccttggcttaaaggggagacagattattagactgtcctgccatttatatttcctga

SEQ ID NO: 159498 - DNA, 120 bp, Artificial Sequence
  ENSG00000106853_23 (sequence is synthesized)
ataggacctgcctcttcaggggccagaggtaatgaagggtgctcttttctctgtctatttgtacctcctctgagatcattgtgttattaaactttactatgcatcttatttagaaattgc

SEQ ID NO: 159499 - DNA, 85 bp, Artificial Sequence
  ENSG00000106853_24 (sequence is synthesized)
gattgcttaatcactgccttatgacatttcgcactatgatccgacacctattatttcttcttaggtgtactttgtaatctttttt

SEQ ID NO: 159500 - DNA, 120 bp, Artificial Sequence
  ENSG00000106853_25 (sequence is synthesized)
acctattatttcttcttaggtgtactttgtaatcttttttacatgtactgtgtaagtggatcttgccccaccttgacttcaagttcatggaggacaggacttccatctcttattttcaag

SEQ ID NO: 159501 - DNA, 120 bp, Artificial Sequence
  ENSG00000106853_26 (sequence is synthesized)
gtttccaatgatgtacctgataaatttgttgctaggatgagaacagtatatcattgagaatattaaattaagttttaaaatttgttgttgctttgatacagggtaaaatccagtacaagg

SEQ ID NO: 159502 - DNA, 120 bp, Artificial Sequence
  ENSG00000106868_0 (sequence is synthesized)
gaggaaggacccgcgctctgcggcctcccggggaccccgcagcgccccccgcttccctcggcggcgccggaagccgccggctggtcccctccccgcggcgcctgtagccttatctctgca

SEQ ID NO: 159503 - DNA, 80 bp, Artificial Sequence
  ENSG00000106868_1 (sequence is synthesized)
gaccggcggcggcatgggccgggggccctgggatgcgggcccgtctcgccgcctgctgccgctgttgctgctgctcggcc

SEQ ID NO: 159504 - DNA, 120 bp, Artificial Sequence
  ENSG00000106868_2 (sequence is synthesized)
tggcccgcggcgccgcgggagcgccgggccccgacggtttagacgtctgtgccacttgccatgaacatgccacatgccagcaaagagaagggaagaagatctgtatttgcaactatggat

SEQ ID NO: 159505 - DNA, 120 bp, Artificial Sequence
  ENSG00000106868_3 (sequence is synthesized)
ttgtagggaacgggaggactcagtgtgttgataaaaatgagtgccagtttggagccactcttgtctgtgggaaccacacatcttgccacaacacccccgggggcttctattgcatttgcc

SEQ ID NO: 159506 - DNA, 120 bp, Artificial Sequence
  ENSG00000106868_4 (sequence is synthesized)
tggaaggatatcgagccacaaacaacaacaagacattcattcccaacgatggcaccttttgtacagacatagatgagtgtgaagtttctggcctgtgcaggcatggagggcgatgcgtga

SEQ ID NO: 159507 - DNA, 120 bp, Artificial Sequence
  ENSG00000106868_5 (sequence is synthesized)
acactcatgggagctttgaatgctactgtatggatggatacttgccaaggaatggacctgaacctttccacccgaccaccgatgccacatcatgcacagaaatagactgtggtacccctc

SEQ ID NO: 159508 - DNA, 120 bp, Artificial Sequence
  ENSG00000106868_6 (sequence is synthesized)
ctgaggttccagatggctatatcataggaaattatacgtctagtctgggcagccaggttcgttatgcttgcagagaaggattcttcagtgttccagaagatacagtttcaagctgcacag

SEQ ID NO: 159509 - DNA, 120 bp, Artificial Sequence
  ENSG00000106868_7 (sequence is synthesized)
gcctgggcacatgggagtccccaaaattacattgccaagagatcaactgtggcaaccctccagaaatgcggcacgccatcttggtaggaaatcacagctccaggctgggcggtgtggctc

SEQ ID NO: 159510 - DNA, 120 bp, Artificial Sequence
  ENSG00000106868_8 (sequence is synthesized)
gctatgtctgtcaagagggctttgagagccctggaggaaagatcacttctgtttgcacagagaaaggcacctggagagaaagtactttaacatgcacagaaattctgacaaagattaatg

SEQ ID NO: 159511 - DNA, 120 bp, Artificial Sequence
  ENSG00000106868_9 (sequence is synthesized)
atgtatcactgtttaatgatacctgtgtgagatggcaaataaactcaagaagaataaaccccaagatctcatatgtgatatccataaaaggacaacggttggaccctatggaatcagttc

SEQ ID NO: 159512 - DNA, 120 bp, Artificial Sequence
  ENSG00000106868_10 (sequence is synthesized)
gtgaggagacagtcaacttgaccacagacagcaggaccccagaagtgtgcctagccctgtacccaggcaccaactacaccgtgaacatctccacagcacctcccaggcgctcgatgccag

SEQ ID NO: 159513 - DNA, 120 bp, Artificial Sequence
  ENSG00000106868_11 (sequence is synthesized)
ccgtcatcggtttccagacagctgaagttgatctcttagaagatgatggaagtttcaatatttcaatatttaatgaaacttgtttgaaattgaacaggcgttctaggaaagttggatcag

SEQ ID NO: 159514 - DNA, 120 bp, Artificial Sequence
  ENSG00000106868_12 (sequence is synthesized)
aacacatgtaccaatttaccgttctgggtcagaggtggtatctggctaacttttctcatgcaacatcgtttaacttcacaacgagggaacaagtgcctgtagtgtgtttggatctgtacc

SEQ ID NO: 159515 - DNA, 120 bp, Artificial Sequence
  ENSG00000106868_13 (sequence is synthesized)
gactgattatacggtgaatgtgaccctgctgagatctcctaagcggcactcagtgcaaataacaatagcaactcccccagcagtaaaacagaccatcagtaacatttcaggatttaatga

SEQ ID NO: 159516 - DNA, 120 bp, Artificial Sequence
  ENSG00000106868_14 (sequence is synthesized)
aacctgcttgagatggagaagcatcaagacagctgatatggaggagatgtatttattccacatttggggccagagatggtatcagaaggaatttgcccaggaaatgacctttaatatcag

SEQ ID NO: 159517 - DNA, 120 bp, Artificial Sequence
  ENSG00000106868_15 (sequence is synthesized)
tagcagcagccgagatcccgaggtgtgcttggacctacgtccgggtaccaactacaatgtcagtctccgggctctgtcttcggaacttcctgtggtcatctccctgacaacccagataac

SEQ ID NO: 159518 - DNA, 120 bp, Artificial Sequence
  ENSG00000106868_16 (sequence is synthesized)
agagcctcccctcccggaagtagaattttttacggtgcacagaggacctctaccacgcctcagactgaggaaagccaaggagaaaaatggaccaatcagttcatatcaggtgttagtgct

SEQ ID NO: 159519 - DNA, 120 bp, Artificial Sequence
  ENSG00000106868_17 (sequence is synthesized)
tcccctggccctccaaagcacattttcttgtgattctgaaggcgcttcctccttctttagcaacgcctctgatgctgatggatacgtggctgcagaactactggccaaagatgttccaga

SEQ ID NO: 159520 - DNA, 120 bp, Artificial Sequence
  ENSG00000106868_18 (sequence is synthesized)
tgatgccatggagatacctataggagacaggctgtactatggggaatattataatgcacccttgaaaagagggagtgattactgcattatattacgaatcacaagtgaatggaataaggt

SEQ ID NO: 159521 - DNA, 120 bp, Artificial Sequence
  ENSG00000106868_19 (sequence is synthesized)
gagaagacactcctgtgcagtttgggctcaggtgaaagattcgtcactcatgctgctgcagatggcgggtgttggactgggttccctggctgttgtgatcattctcacattcctctcctt

SEQ ID NO: 159522 - DNA, 120 bp, Artificial Sequence
  ENSG00000106868_20 (sequence is synthesized)
ctcagcggtgtgatggcagatggacactgagtggggaggatgcactgctgctgggcaggtgttctggcagcttctcaggtgcccgcacagaggctccgtgtgacttccgtccagggagca

SEQ ID NO: 159523 - DNA, 120 bp, Artificial Sequence
  ENSG00000106868_21 (sequence is synthesized)
tgtgggcctgcaactttctccattcccagctgggccccattcctggatttaagatggtggctatccctgaggagtcaccataaggagaaaactcaggaattctgagtcttccctgctaca

SEQ ID NO: 159524 - DNA, 120 bp, Artificial Sequence
  ENSG00000106868_22 (sequence is synthesized)
ggaccagttctgtgcaatgaacttgagactcctgatgtacactgtgatattgaccgaaggctacatacagatctgtgaatcttggctgggacttcctctgagtgatgcctgagggtcagc

SEQ ID NO: 159525 - DNA, 120 bp, Artificial Sequence
  ENSG00000106868_23 (sequence is synthesized)
tcctctagacattgactgcaagagaatctctgcaacctcctatataaaagcatttctgttaattcattcagaatccattctttacaatatgcagtgagatgggcttaagtttgggctaga

SEQ ID NO: 159526 - DNA, 120 bp, Artificial Sequence
  ENSG00000106868_24 (sequence is synthesized)
gtttgactttatgaaggaggtcattgaaaaagagaacagtgacgtaggcaaatgtttcaagcactttagaaacagtacttttcctataattagttgatatactaatgagaaaatatacta

SEQ ID NO: 159527 - DNA, 120 bp, Artificial Sequence
  ENSG00000106868_25 (sequence is synthesized)
gcctggccatgccaataagtttcctgctgtgtctgttaggcagcattgctttgatgcaatttctattgtcctatatattcaaaagtaatgtctacattccagtaaaaatatcccgtaatt

SEQ ID NO: 159528 - DNA, 120 bp, Artificial Sequence
  ENSG00000106868_26 (sequence is synthesized)
cctgtgcagtttgggctcaggtgaaagaaataccttgtaactgtaatttcctgaggctgcatatccacagggccaactcaggggacacacagattcgtcactcatgctgctgcagatggc

SEQ ID NO: 159529 - DNA, 120 bp, Artificial Sequence
  ENSG00000106868_27 (sequence is synthesized)
atttgatcatttgtgtgcaggagagcacttcctagggagatttctcatttatgtctcctctaggggtttaatattcactgggctgatcagactttatcagcagaccaggtttaccttacg

SEQ ID NO: 159530 - DNA, 120 bp, Artificial Sequence
  ENSG00000106868_28 (sequence is synthesized)
aatgctccctggctgagcagcacagtataaaatagaatagtaggagaatgggctccagcaccacaaatcctggattgttttgactggagtcagagtgggttctcttgtcttttcctctca

SEQ ID NO: 159531 - DNA, 120 bp, Artificial Sequence
  ENSG00000106868_29 (sequence is synthesized)
gtgattactgcattatattacgaatcacaagtgaatggaataagcatcaagttcatattgatgagatctgtttatataattgtcactggtgaccagaacccaattcatactactttaagc

SEQ ID NO: 159532 - DNA, 120 bp, Artificial Sequence
  ENSG00000106868_30 (sequence is synthesized)
aaagagcttcatagctgaaaaaaaatgggaggagggtgagtggatgggagcttatggaattatacaaagagctaccccaccaagaaggctccaggaactgggactggggactcaacacca

SEQ ID NO: 159533 - DNA, 120 bp, Artificial Sequence
  ENSG00000106868_31 (sequence is synthesized)
tttaccattcttttgctcaatattttcttttttataaatatgctcattctttgcctgccgagcacaattttcctttccttccctctccttctttgtagaatcattttgcagtttttcccc

SEQ ID NO: 159534 - DNA, 120 bp, Artificial Sequence
  ENSG00000106868_32 (sequence is synthesized)
cccattctggattacttatccttggaagataaaagttctgtctaggtctgatatttccttcataataaaatggatggccttccctttgatcctccttttcattggataataagttgatct

SEQ ID NO: 159535 - DNA, 120 bp, Artificial Sequence
  ENSG00000106868_33 (sequence is synthesized)
cagaatcacagttgccagagaaacatcagcgggctttagctggggcagagcttagcaagtgttggggtatcagcagttagtcactgtttgcctggaaccacaggatgtgaatcctagttc

SEQ ID NO: 159536 - DNA, 120 bp, Artificial Sequence
  ENSG00000106868_34 (sequence is synthesized)
ctggattccaaggaatcctgcatccaggtgtttattgtgctttgcagagtcaacatcaagctcaggagctggttgcagacatagatgagtgtgaagtttctggcctgtgcaggcatggag

SEQ ID NO: 159537 - DNA, 120 bp, Artificial Sequence
  ENSG00000106927_0 (sequence is synthesized)
agttcacagctgccctgttgcagggaggcggtggcccttctgttgctagaccgagcctgtgggatataccaaggcagaggagcccatagccatgaggagcctcggggccctgctcttgct

SEQ ID NO: 159538 - DNA, 120 bp, Artificial Sequence
  ENSG00000106927_1 (sequence is synthesized)
gctgagcgcctgcctggcggtgagcgctggccctgtgccaacgccgcccgacaacatccaagtgcaggaaaacttcaatatctctcggatctatgggaagtggtacaacctggccatcgg

SEQ ID NO: 159539 - DNA, 120 bp, Artificial Sequence
  ENSG00000106927_2 (sequence is synthesized)
ttccacctgcccctggctgaagaagatcatggacaggatgacagtgagcacgctggtgctgggagagggcgctacagaggcggagatcagcatgaccagcactcgttggcggaaaggtgt

SEQ ID NO: 159540 - DNA, 120 bp, Artificial Sequence
  ENSG00000106927_3 (sequence is synthesized)
ctgtgaggagacgtctggagcttatgagaaaacagatactgatgggaagtttctctatcacaaatccaaatggaacataaccatggagtcctatgtggtccacaccaactatgatgagta

SEQ ID NO: 159541 - DNA, 120 bp, Artificial Sequence
  ENSG00000106927_4 (sequence is synthesized)
tgccattttcctgaccaagaaattcagccgccatcatggacccaccattactgccaagctctacgggcgggcgccgcagctgagggaaactctcctgcaggacttcagagtggttgccca

SEQ ID NO: 159542 - DNA, 120 bp, Artificial Sequence
  ENSG00000106927_5 (sequence is synthesized)
gggagcaggaaccagagcccatcttaatcccgagagtccggagggctgtgctaccccaagaagaggaaggatcagggggtgggcaactggtaactgaagtcaccaagaaagaagattcct

SEQ ID NO: 159543 - DNA, 120 bp, Artificial Sequence
  ENSG00000106927_6 (sequence is synthesized)
gccagctgggctactcggccggtccctgcatgggaatgaccagcaggtatttctataatggtacatccatggcctgtgagactttccagtacggcggctgcatgggcaacggtaacaact

SEQ ID NO: 159544 - DNA, 120 bp, Artificial Sequence
  ENSG00000106927_7 (sequence is synthesized)
tcgtcacagaaaaggagtgtctgcagacctgccgaactgtggcggcctgcaatctccccatagtccggggcccctgccgagccttcatccagctctgggcatttgatgctgtcaagggga

SEQ ID NO: 159545 - DNA, 120 bp, Artificial Sequence
  ENSG00000106927_8 (sequence is synthesized)
agtgcgtcctcttcccctacgggggctgccagggcaacgggaacaagttctactcagagaaggagtgcagagagtactgcggtgtccctggtgatggtgatgaggagctgctgcgcttct

SEQ ID NO: 159546 - DNA, 120 bp, Artificial Sequence
  ENSG00000106927_9 (sequence is synthesized)
ccaactgacaactggccggtctgcaagtcagaggatggccagtgtctgtcccggggtcctgtggcaggcagcgccaagcaacctgggtccaaataaaaactaaattgtaaactcctgaaa

SEQ ID NO: 159547 - DNA, 120 bp, Artificial Sequence
  ENSG00000106927_10 (sequence is synthesized)
atgtggggcttatgggaagaggtgaagcaggacagagattagggttgggagacattcagaggcttgggcacaaggagagacctggactggggcaggacactctcctatctatgggaagtg

SEQ ID NO: 159548 - DNA, 120 bp, Artificial Sequence
  ENSG00000106927_11 (sequence is synthesized)
ccctcaagaccctgtccctccagtaaaccacctgcgaattgaaaaggtagctaacagagggcattccagtggtagaactccaggcggtttcctgaaatcttaggaattccacctttggat

SEQ ID NO: 159549 - DNA, 120 bp, Artificial Sequence
  ENSG00000106927_12 (sequence is synthesized)
gtggaggacctcgggcaaatcattttcttcctgtgggccccagtttccccatctgtcaacgagggatgaggtgttctagatgagcagggccctctggctcagcagtctcatgtatgtctg

SEQ ID NO: 159550 - DNA, 120 bp, Artificial Sequence
  ENSG00000106927_13 (sequence is synthesized)
acaggcaggaccattcatgaagtggactaaggcacgacaagttcccagcacgatgctcaccaaagatacaaatccgggtctaggatggcccctgggcctggtcctgttattcactcctct

SEQ ID NO: 159551 - DNA, 120 bp, Artificial Sequence
  ENSG00000106948_0 (sequence is synthesized)
gcaactgaagacggaggtgcccaaggtcagaaggaagcaccacacagagggcacaggcaggatggccgatgctgacaggaaccagcggtgactctggggcccctggcagcagctctgtct

SEQ ID NO: 159552 - DNA, 120 bp, Artificial Sequence
  ENSG00000106948_1 (sequence is synthesized)
cctgaagatgaagtggcccaggtgaagcccaggccagccccaatggccagctcggagactgagatccgctgggctgagcctggcctggggaagggcccccagcggcggcgctgggcctgg

SEQ ID NO: 159553 - DNA, 120 bp, Artificial Sequence
  ENSG00000106948_2 (sequence is synthesized)
gccgaggacaagagggatgtggatagaagtagttcacaaagctgggaagaagagagactctttcccaatgccaccagccccgagctcctagaggacttccgcctggcccagcagcacctg

SEQ ID NO: 159554 - DNA, 120 bp, Artificial Sequence
  ENSG00000106948_3 (sequence is synthesized)
ccgcccctggagtgggacccacacccgcagcccgatgggcatcaggattccgagtcaggagagacttcgggagaagaggctgaagcagaggatgtggacagcccagcaagttcccatgag

SEQ ID NO: 159555 - DNA, 120 bp, Artificial Sequence
  ENSG00000106948_4 (sequence is synthesized)
cctcttgcctggctcccccagcagggccgtcagctggacatgactgaagaggagccagatgggaccctcggaagtctggaggttgaggaggctggagagagctcctcaaggttggggtat

SEQ ID NO: 159556 - DNA, 120 bp, Artificial Sequence
  ENSG00000106948_5 (sequence is synthesized)
gaggctggtctcagcttggaaggccatggaaacaccagccccatggctcttgggcatggtcaggccaggggctgggtggcttctggcgaacaagccagtggggacaaactttctgaacat

SEQ ID NO: 159557 - DNA, 120 bp, Artificial Sequence
  ENSG00000106948_6 (sequence is synthesized)
tccgaggtcaacccatccgttgaactcagcccggcaaggtcctggagcagtgggacagtgagcctcgaccaccctagtgacagccttgattctacctgggaaggagagaccgatggcccc

SEQ ID NO: 159558 - DNA, 120 bp, Artificial Sequence
  ENSG00000106948_7 (sequence is synthesized)
cagcccactgccctggcagaaaccttgccagagggccccagccaccacctcctaagcccagatggcagaactggaggcagtgttgctcgggcaacccccatggaattccaggactcctca

SEQ ID NO: 159559 - DNA, 120 bp, Artificial Sequence
  ENSG00000106948_8 (sequence is synthesized)
gctcccccagcccagagtccgcagcatgccacagatagatggaggagagaaacgaccagattcttctgccctcagcccaaggaacacatctggaagcagacaaagacgtcacctaagcca

SEQ ID NO: 159560 - DNA, 120 bp, Artificial Sequence
  ENSG00000106948_9 (sequence is synthesized)
ctcccttcccgattcattggctccatcagccccctgaatccccagcccaggccaacgcggcagggcaggccgctgcccagacagggagccactctggctggccgctcctcttctaatgcc

SEQ ID NO: 159561 - DNA, 120 bp, Artificial Sequence
  ENSG00000106948_10 (sequence is synthesized)
cccaagtatggccgggggcagttgaactacccactccctgatttctccaaggtagggccccgggtgagattccccaaagatgagagctaccgtccccccaagtccagaagccacaacagg

SEQ ID NO: 159562 - DNA, 120 bp, Artificial Sequence
  ENSG00000106948_11 (sequence is synthesized)
aagcctcaggcccctgccaggcccctcatcttcaagtctccagctgagattgtgcaggaggtgctgttgagcagtggagaagcagccctggcaaaggacacgcctcctgcccaccctatc

SEQ ID NO: 159563 - DNA, 120 bp, Artificial Sequence
  ENSG00000106948_12 (sequence is synthesized)
accagggtaccccaagaatttcagacgcctgagcaagccactgagctggtccatcagctccaggaagactaccacaggctcctcaccaagtacgctgaggccgagaacaccattgaccag

SEQ ID NO: 159564 - DNA, 120 bp, Artificial Sequence
  ENSG00000106948_13 (sequence is synthesized)
ctacgcctcggggccaaggtgaacctgttctctgacccaccccagcccaaccacagcatccacacgggaatggtgccccaggggaccaaggtcttgtccttcaccatcccacagccccgc

SEQ ID NO: 159565 - DNA, 120 bp, Artificial Sequence
  ENSG00000106948_14 (sequence is synthesized)
tctgcagagtggtggccgggcccggccgaggacccccaggcctctgcggcctcagggtggccatcagctcgaggagacttgagcccctcctcgcttaccagcatgcccaccctggggtgg

SEQ ID NO: 159566 - DNA, 120 bp, Artificial Sequence
  ENSG00000106948_15 (sequence is synthesized)
cttccggagaaccgggacatctctgaggaccagtcctcagcagagcagacccaggcactggcttctcaggccagccagttcctggccaaggtggagtcctttgaaagactgatacaggca

SEQ ID NO: 159567 - DNA, 120 bp, Artificial Sequence
  ENSG00000106948_16 (sequence is synthesized)
ggacgtctcatgccccaggaccaagtcaagggcttccagcggctgaaggctgcccacgcggccctagaggaggagtacctgaaggcttgtcgggagcaacaccctgcccagccgcttgcc

SEQ ID NO: 159568 - DNA, 120 bp, Artificial Sequence
  ENSG00000106948_17 (sequence is synthesized)
ggctccaaggggacgcctggaagatttgatcctcgcagggagctggaggcagagatataccgtctgggaagctgcctggaagagctgaaggaacacatagaccagacccagcaagagcct

SEQ ID NO: 159569 - DNA, 120 bp, Artificial Sequence
  ENSG00000106948_18 (sequence is synthesized)
gagccgcccgggtcagactcagctctggacagcaccccagccctgccctgcctccatcagccaacgcacctgcctgctccttctggacaagcccccatgccagccatcaagacctcctgc

SEQ ID NO: 159570 - DNA, 120 bp, Artificial Sequence
  ENSG00000106948_19 (sequence is synthesized)
cctgagcctgctaccaccactgccgccgccagcactggcccctgcccattgcacgtaaatgtggaggtgagctctggcaacagtgaggtggaggacaggccacaggaccccctggcccga

SEQ ID NO: 159571 - DNA, 120 bp, Artificial Sequence
  ENSG00000106948_20 (sequence is synthesized)
ctcaggcacaaggagctgcagatggagcaagtttaccatggcctcatggagcggtacctcagtgtgaagtctctcccagaagccatgagaatggaggaggaggaagaaggagaggaggag

SEQ ID NO: 159572 - DNA, 120 bp, Artificial Sequence
  ENSG00000106948_21 (sequence is synthesized)
gaggaggaagaggggggaggtgactccctggaagttgatggggtggctgcaactccagggaaagcagaggccaccagggtcctcccaaggcagtgcccggtgcaggctgagaaaagtcat

SEQ ID NO: 159573 - DNA, 120 bp, Artificial Sequence
  ENSG00000106948_22 (sequence is synthesized)
ggggctcccctggaggaggccacggagaagatggtatctatgaagccaccaggtttccaggcatccctggctagagacgggcacatgtcaggcctgggcaaggctgaggcagcccctcca

SEQ ID NO: 159574 - DNA, 120 bp, Artificial Sequence
  ENSG00000106948_23 (sequence is synthesized)
ggccctggcgtgccaccccaccctccaggcaccaagtccgcagcatcccaccaaagtagtatgaccagcctggagggaagcggcatctctgagcgccttccacagaagcctttgcaccga

SEQ ID NO: 159575 - DNA, 120 bp, Artificial Sequence
  ENSG00000106948_24 (sequence is synthesized)
ggcggtgggccccacctggaggagacctggatggcgtccccagagacagacagtggctttgtgggctcagaaacaagcagagtttcacccctcacccagactccagagcaccggctctcc

SEQ ID NO: 159576 - DNA, 120 bp, Artificial Sequence
  ENSG00000106948_25 (sequence is synthesized)
cacatcagcacagcaggaacattagcccagccctttgctgcatctgtgcccagggatggagcttcctaccccaaggccaggggttctctgattcccagaagagccacagagcccagcaca

SEQ ID NO: 159577 - DNA, 120 bp, Artificial Sequence
  ENSG00000106948_26 (sequence is synthesized)
ccccggagccaagcacagaggtacctctccagcccaagtgggcctctccggcagagggcacccaacttcagcctggagcggacactggcagccgagatggcggttcctggctcagagttt

SEQ ID NO: 159578 - DNA, 120 bp, Artificial Sequence
  ENSG00000106948_27 (sequence is synthesized)
gaggggcacaaacggatttctgaacagccccttcccaacaagacaatcagcccacccccagcccccgcccctgccgctgcgcctctaccctgtggaccaacagagaccatccccagcttc

SEQ ID NO: 159579 - DNA, 120 bp, Artificial Sequence
  ENSG00000106948_28 (sequence is synthesized)
ctgctcaccagggcagggcgagaccaggccatctgtgagctgcaagaagaggtgtcccggcttcgtctgcggctggaagacagcctgcaccagccactccagggcagcccgacacgccca

SEQ ID NO: 159580 - DNA, 120 bp, Artificial Sequence
  ENSG00000106948_29 (sequence is synthesized)
gcatctgcctttgaccgccccgcccggacccgcggccggccagcagactccccagccacctggggctcccattatggcagtaaatccacagagagattgcctggtgagcctagaggtgaa

SEQ ID NO: 159581 - DNA, 120 bp, Artificial Sequence
  ENSG00000106948_30 (sequence is synthesized)
ctccgactgtccctgagttcagaatctgagctgccctccctaccactgttctctgagaagagcaagaccaccaaggacagtccacaggcagctcgggatggaaagagaggggtgggcagt

SEQ ID NO: 159582 - DNA, 120 bp, Artificial Sequence
  ENSG00000106948_31 (sequence is synthesized)
gctggatggccagacagggtcaccttccggggccaatacacaggccacgaataccatgttctgtcccctaaggcggtcccaaaaggcaatggcacagtctcctgtccccactgccggccc

SEQ ID NO: 159583 - DNA, 120 bp, Artificial Sequence
  ENSG00000106948_32 (sequence is synthesized)
attaggacccaggatgcgggtggtgctgtcacaggggacccactgggaccgcctcccgctgatacccttcagtgtcccctgtgtggtcaagttgggtctcccccagaggcagatggtcca

SEQ ID NO: 159584 - DNA, 120 bp, Artificial Sequence
  ENSG00000106948_33 (sequence is synthesized)
ggctcagccacctctggggcagagaaggccaccacgaggagaaaagcatcttcaactcccagccccaagcagaggagcaagcaggcggggtcgtcgccacgcccaccccccggactgtgg

SEQ ID NO: 159585 - DNA, 120 bp, Artificial Sequence
  ENSG00000106948_34 (sequence is synthesized)
tatctggcaacagcgcccccagcaccagcccctccagcctttgcctacatctcctcggttcccatcatgccttatccacctgccgctgtgtactatgcgcctgcaggacctacctcagcc

SEQ ID NO: 159586 - DNA, 120 bp, Artificial Sequence
  ENSG00000106948_35 (sequence is synthesized)
caaccagctgccaagtggccgcccacagcctctcccccaccagcccggagacaccggcactccatccagctcgacctgggcgacctagaggagctcaacaaggccctgagccgggccgtg

SEQ ID NO: 159587 - DNA, 120 bp, Artificial Sequence
  ENSG00000106948_36 (sequence is synthesized)
caggctgccgagagcgtccgctctaccaccaggcagatgagaagctcgctgtcagccgacctgcgccaggctcacagcctgcggggctcctgcctcttctgacttcactgggggcccaga

SEQ ID NO: 159588 - DNA, 120 bp, Artificial Sequence
  ENSG00000106948_37 (sequence is synthesized)
ggcagatgggtgggtgggtgggcaggtggcctgccaggccaggagtgggctggagctgctgaggcccagaaggcccgcatagttcctcaccaggagggtctccctccagcacaggtcccg

SEQ ID NO: 159589 - DNA, 120 bp, Artificial Sequence
  ENSG00000106948_38 (sequence is synthesized)
cctgctcagtccctgtgctttccaagtggagggggtgtcagctcggtcaccaagagaagtgacttcccaggagcaccagtcccctcacagaggtgctgtgagcgaggcctccttcggtcc

SEQ ID NO: 159590 - DNA, 120 bp, Artificial Sequence
  ENSG00000106948_39 (sequence is synthesized)
aggcagaacctcaggcagtctctcctggtcctgcatgtgtgcaactccagctaataataggtattttatatacagatggacagatatttttttaaactggggagttttcctgatcttggg

SEQ ID NO: 159591 - DNA, 120 bp, Artificial Sequence
  ENSG00000106948_40 (sequence is synthesized)
tcctctttagggggccagacaagaaaggcctacggtttctggagcaaacctgtcccccacctgtgaccagtcactctggggcaagcatcactgggaagggcatagccggagacctttctc

SEQ ID NO: 159592 - DNA, 120 bp, Artificial Sequence
  ENSG00000106948_41 (sequence is synthesized)
ctagtgactggtagtcagtggggcattttaggatgtcagggccccagggtgacatgtgtccagcttttctatggcagcagaggcctttccctcagacaagctacaaagtgcccaggatgc

SEQ ID NO: 159593 - DNA, 120 bp, Artificial Sequence
  ENSG00000106948_42 (sequence is synthesized)
catccaccatggtccccttcagtacctcacgcatggtccccagcttctcctaggatcccagtggcgtttatcagtggccagctacctgccaggcccgggctggggcacggtctgcggcca

SEQ ID NO: 159594 - DNA, 120 bp, Artificial Sequence
  ENSG00000106948_43 (sequence is synthesized)
tgaggccaggccgcctcccgcacccctaccccgtggcagcagcatacctctgcatttctggaatgtgtgtgcatcaatgatgtttgtatatttgaggcatttaaaaatctattttcgtta

SEQ ID NO: 159595 - DNA, 120 bp, Artificial Sequence
  ENSG00000106948_44 (sequence is synthesized)
cgagggcaaatgaagaatgaatattgatcttaaaaaaagaaaagaagacaaaaaaaatacccaaagccatccgtgtctctgctgtatgtcattaacttttgccttcaatgtcaagtttat

SEQ ID NO: 159596 - DNA, 120 bp, Artificial Sequence
  ENSG00000106948_45 (sequence is synthesized)
ggggtggtaggtttgatgcccagccaagccctttcccaggggacctgttgggtgctctgcctgcctccctctggtggcttctgtttctccagttttccccctttgcctatctcagaacca

SEQ ID NO: 159597 - DNA, 120 bp, Artificial Sequence
  ENSG00000106948_46 (sequence is synthesized)
taaatctttcaactgcggagggccttgaggtggggctgcctagccaagtcccttttgactgaggccagagatgtaaatgaggcacacagcaagttgctgtctacaagagtatgcacctgg

SEQ ID NO: 159598 - DNA, 120 bp, Artificial Sequence
  ENSG00000106948_47 (sequence is synthesized)
gtagcaaacagcacctgccatttagggagcacctgctagaccctgattccggtgctaagcactgggcattgtctgcttcacacagtccatgtgctaaccctcaggaccctcactctgccc

SEQ ID NO: 159599 - DNA, 120 bp, Artificial Sequence
  ENSG00000106948_48 (sequence is synthesized)
cccttttactgatgaggagagtggggttccaatgggccatctgcccaaactggtttgggagagaacctggatttaaactcacattggtctgacccaaagtccacattctttgttatgtgt

SEQ ID NO: 159600 - DNA, 120 bp, Artificial Sequence
  ENSG00000106948_49 (sequence is synthesized)
gttttttgcttcctctacctccatgattctttttctcttgacctctggtttcttcctcacgtggctttttcttccatgttccccacttctcgtctcccttgcttctccctgctctgccca

SEQ ID NO: 159601 - DNA, 120 bp, Artificial Sequence
  ENSG00000106948_50 (sequence is synthesized)
tcatgactcatttctgtttcatttttcagcggatcctcctgagtatggttgaaaatggtgtctcactgaaagtaacactgaaatggacaaacttcctgtaggttctgagccttcagttcc

SEQ ID NO: 159602 - DNA, 120 bp, Artificial Sequence
  ENSG00000106948_51 (sequence is synthesized)
aggacattgtgggaccccagaggctgtcctgtccacttgccttctgaggacatcagctcggtgtccccagcctccgtgctgtgggcacagctgtggtttgggtgctgagcaaaggatgct

SEQ ID NO: 159603 - DNA, 120 bp, Artificial Sequence
  ENSG00000106948_52 (sequence is synthesized)
gtagtcttggccctgtggagcttggctgttgggacaggaggtacaaaggggagtggtgcctgtggacacaggactagaccccaggacatcagggcctcgggctcatggtcctatcaccct

SEQ ID NO: 159604 - DNA, 120 bp, Artificial Sequence
  ENSG00000106948_53 (sequence is synthesized)
ggatggtatacgcagctgcacacgtggaattgctcaaacaattcaggcccaacttttctgccacggaaggggtgctgcttccctcacgtaacaagaggctgtcaatcacgagcacccagg

SEQ ID NO: 159605 - DNA, 120 bp, Artificial Sequence
  ENSG00000106948_54 (sequence is synthesized)
ttggggtgaggccggccctttgtggcttgtgccactgagtgggctgtgcctcgggcttggctccacctcagggctccacatttgcaggatgtcagctgatttccagggaccagcctcacc

SEQ ID NO: 159606 - DNA, 120 bp, Artificial Sequence
  ENSG00000106948_55 (sequence is synthesized)
cttacgtgttatctccttcttctgggtctcccaggtgagcaccctaagaacacatccatggagacacccagcccctctggcctgggccccaagccctctgcatcaccccagcccttccct

SEQ ID NO: 159607 - DNA, 120 bp, Artificial Sequence
  ENSG00000106948_56 (sequence is synthesized)
gccctgccctgtcctggcccaggcaaccgcctcttgcctagttgcccacagcagccttcactcaggccttcctgcctccagcctggtccccacaacgtgcctcccccgatggccatggta

SEQ ID NO: 159608 - DNA, 120 bp, Artificial Sequence
  ENSG00000106948_57 (sequence is synthesized)
gtgcctcccccgatggccatggtaatactggaataaggtccttgtgataggcaccacatgcctgaactctccccaccccatccaccttgtatttgtctgttctcacattgctataaagaa

SEQ ID NO: 159609 - DNA, 120 bp, Artificial Sequence
  ENSG00000106948_58 (sequence is synthesized)
ccagggcgcaatggagacagggggctccctgggtttggaacaaagaattcacaggcaggtcccctgaaactgggtcggcaggacggtggtggagcccgagagagggcacaggcaggatgg

SEQ ID NO: 159610 - DNA, 120 bp, Artificial Sequence
  ENSG00000106948_59 (sequence is synthesized)
gtgatgaggaaatggaagccagagagttgaagtgacttagggtaagttacaaggtgggtgcagagctggtatatgctaagaagtgaatggcctgtctttccagaggctgaagcagaggat

SEQ ID NO: 159611 - DNA, 120 bp, Artificial Sequence
  ENSG00000106948_60 (sequence is synthesized)
ggccaatacacaggtaggtcaggagggagggccgggatgggtgcagctcctggtgtcagcgggggctcctctgttatgagaagccctttccatatacccagtgggccattcaaatatcat

SEQ ID NO: 159612 - DNA, 120 bp, Artificial Sequence
  ENSG00000106948_61 (sequence is synthesized)
tttctatcagttctgtgatatgaaaaccagcagggagcattgcctccatgaatctcggtgcacttgttcattcattcattcattcattcattcagcaaacactttctgatgcttcccctt

SEQ ID NO: 159613 - DNA, 120 bp, Artificial Sequence
  ENSG00000106948_62 (sequence is synthesized)
tgccagggcccatgcttggttctgggaagtctgttcagctggtcaatcctaaagaagttctgatcacctgtgcttttccggctcggagcatacagggtggacactgaattggatgtccca

SEQ ID NO: 159614 - DNA, 120 bp, Artificial Sequence
  ENSG00000106948_63 (sequence is synthesized)
tttgcacctggcttccttcaggttctcatttccagagggcccctgtgtctcaggaaacaggacctggcacagagtaaagacttgagatgacacatggtagcatttcaagtgcttataaca

SEQ ID NO: 159615 - DNA, 80 bp, Artificial Sequence
  ENSG00000106948_64 (sequence is synthesized)
ctgagatcagtagttcaagaccagcctggccaatgtgacaaaaccccgtttctactaaacatgcaaaaaaaattagctgg

SEQ ID NO: 159616 - DNA, 63 bp, Artificial Sequence
  ENSG00000106948_65 (sequence is synthesized)
ctgagatcagtagttcaagaccagcctggccaatgtgacaaaaccccgtttctactaaacatg

SEQ ID NO: 159617 - DNA, 90 bp, Artificial Sequence
  ENSG00000106948_66 (sequence is synthesized)
gacagtgagactccgtctcaaaaatacataaggttctcaccttcatgaatctgactgtagcagagaagatgataaccaataggtaattat

SEQ ID NO: 159618 - DNA, 120 bp, Artificial Sequence
  ENSG00000106948_67 (sequence is synthesized)
ctgactgtagcagagaagatgataaccaataggtaattatagtaaaggcatcatctctcacagacaccttgcagaagagggagggctgctgacctcagattctggggacaaggcaagagg

SEQ ID NO: 159619 - DNA, 120 bp, Artificial Sequence
  ENSG00000106948_68 (sequence is synthesized)
ccagaggcacattctgctccatggaccataacgagggagtggacagaggccaaggagttagaaacgacagtagcaggaacacctccaagctcaccggacaatctctctgtggacttacta

SEQ ID NO: 159620 - DNA, 120 bp, Artificial Sequence
  ENSG00000106948_69 (sequence is synthesized)
gcaaaaggaaagagatgatatcattggatgaggttttctgtagcctttaaaggtgatcttaacccttaatagtgagcttaacctggagaaatgcttccaacacaatgagaggaagagagt

SEQ ID NO: 159621 - DNA, 120 bp, Artificial Sequence
  ENSG00000106948_70 (sequence is synthesized)
atagaagtcaaaaccaaagactctgaagtcagtctcacagaaaatggctctgagcctctctgaccctcagattcctcatctgtcgcgtcgggaaaataagagcaattacgttcagctcca

SEQ ID NO: 159622 - DNA, 120 bp, Artificial Sequence
  ENSG00000106948_71 (sequence is synthesized)
catacacaaagccagaacagcacaggagggaaatgagatgatgagaccgctccacagtggcttcaggtgtcacccagaaggccttatttgaaactcaggggtgggtaaggcaggaggtgg

SEQ ID NO: 159623 - DNA, 120 bp, Artificial Sequence
  ENSG00000106948_72 (sequence is synthesized)
tggggctgggtgaggaggccacagtccgcccagctttctcataacatcaactgctttccatctgccaggcactgggcggagcacgacacggatacggccccgttcagttctcccaacaag

SEQ ID NO: 159624 - DNA, 120 bp, Artificial Sequence
  ENSG00000106948_73 (sequence is synthesized)
cctgtgaaatgggcgctatgtttatccccatgttacagccgctcagagcatggggagaaaacaccactgaccctgtgcccgagccattcagaaccaaaccagcaagtcggggtgtgggga

SEQ ID NO: 159625 - DNA, 120 bp, Artificial Sequence
  ENSG00000106948_74 (sequence is synthesized)
ctgctttcaaatcctgacttagcctgggtgtgttggttgctactggatgtcagctggttctaggatctgagatgaaacagaataggagtctggagaaagcttacaataaacagacacaaa

SEQ ID NO: 159626 - DNA, 120 bp, Artificial Sequence
  ENSG00000106948_75 (sequence is synthesized)
gatgttcggtgacgtatatgtgtgtatgtgtgtcatacttaaatatgtacatattttacacatgatgtgtgtatgcacactcaccgtgtgcacacgtgagagagagacagagactattaa

SEQ ID NO: 159627 - DNA, 120 bp, Artificial Sequence
  ENSG00000106948_76 (sequence is synthesized)
aaccatttggaggaagaggagatcattattccagaatcttcctctattttgcatccatccacagggctgatactgacagttctggtttctttccccaggccacgaataccatgttctgtc

SEQ ID NO: 159628 - DNA, 120 bp, Artificial Sequence
  ENSG00000106948_77 (sequence is synthesized)
agtgccttgccctaggtcacacagctagaaggtggcagaaccaggctgggcagccagggatgtctgactccagagcttgtgccctgggctgcttggctcccaggacaggccaacccctgc

SEQ ID NO: 159629 - DNA, 120 bp, Artificial Sequence
  ENSG00000106948_78 (sequence is synthesized)
ctggggcacagccaggaagaggcctccactccttctgacacagtcatctgagcgctcatgtctgctggaggcggcaccaggggatactcacccaggagtccaggggccaccagccaggcc

SEQ ID NO: 159630 - DNA, 120 bp, Artificial Sequence
  ENSG00000106948_79 (sequence is synthesized)
tgtttgtttccaccctaaaaccacagggatgatcactgtcagagtgaataagacagcgcttcacagtttagacatggcttacctgtcctgcctcttcaagtgtggaatgtataccactga

SEQ ID NO: 159631 - DNA, 120 bp, Artificial Sequence
  ENSG00000106948_80 (sequence is synthesized)
tgtggaatgtataccactgatagcccttgaaatgattttgggtagtgtgggacatgattttcagtaggacacatgcagtattaaagaacattattctcagctgggcacagtggctcatgc

SEQ ID NO: 159632 - DNA, 81 bp, Artificial Sequence
  ENSG00000106948_81 (sequence is synthesized)
gatcacttgagtccaggagttcaagactagcctgagcaaaacggcaaagccccatctcaacaatagccctagctatttggg

SEQ ID NO: 159633 - DNA, 67 bp, Artificial Sequence
  ENSG00000106948_82 (sequence is synthesized)
aaattagccaggcatggtggtacacgcctatagccctagctatttgggaggctgaagcaggtgaatc

SEQ ID NO: 159634 - DNA, 120 bp, Artificial Sequence
  ENSG00000106952_0 (sequence is synthesized)
ccaagtcacatgattcaggattcagggggagaatccttcttggaacagagatgggcccagaactgaatcagatgaagagagataaggtgtgatgtggggaagactatataaagaatggac

SEQ ID NO: 159635 - DNA, 120 bp, Artificial Sequence
  ENSG00000106952_1 (sequence is synthesized)
ccagggctgcagcaagcactcaacggaatggcccctcctggagacacagccatgcatgtgccggcgggctccgtggccagccacctggggaccacgagccgcagctatttctatttgacc

SEQ ID NO: 159636 - DNA, 120 bp, Artificial Sequence
  ENSG00000106952_2 (sequence is synthesized)
acagccactctggctctgtgccttgtcttcacggtggccactattatggtgttggtcgttcagaggacggactccattcccaactcacctgacaacgtccccctcaaaggaggaaattgc

SEQ ID NO: 159637 - DNA, 120 bp, Artificial Sequence
  ENSG00000106952_3 (sequence is synthesized)
tcagaagacctcttatgtatcctgaaaagggctccattcaagaagtcatgggcctacctccaagtggcaaagcatctaaacaaaaccaagttgtcttggaacaaagatggcattctccat

SEQ ID NO: 159638 - DNA, 120 bp, Artificial Sequence
  ENSG00000106952_4 (sequence is synthesized)
ggagtcagatatcaggatgggaatctggtgatccaattccctggtttgtacttcatcatttgccaactgcagtttcttgtacaatgcccaaataattctgtcgatctgaagttggagctt

SEQ ID NO: 159639 - DNA, 120 bp, Artificial Sequence
  ENSG00000106952_5 (sequence is synthesized)
ctcatcaacaagcatatcaaaaaacaggccctggtgacagtgtgtgagtctggaatgcaaacgaaacacgtataccagaatctctctcaattcttgctggattacctgcaggtcaacacc

SEQ ID NO: 159640 - DNA, 120 bp, Artificial Sequence
  ENSG00000106952_6 (sequence is synthesized)
accatatcagtcaatgtggatacattccagtacatagatacaagcacctttcctcttgagaatgtgttgtccatcttcttatacagtaattcagactgaacagtttctcttggccttcag

SEQ ID NO: 159641 - DNA, 120 bp, Artificial Sequence
  ENSG00000106952_7 (sequence is synthesized)
ctccttctgtctcttggaaagatacagctccagggttaaaaagagagtttttagtgaagtatctttcagatagcaggcagggaagcaatgtagtgtggtgggcagagccccacacagaat

SEQ ID NO: 159642 - DNA, 120 bp, Artificial Sequence
  ENSG00000106952_8 (sequence is synthesized)
cagaagggatgaatggatgtcccagcccaacctctaattcactgtatggtcttgatctatttcttctgttttgagagcctccagttaaaatggggctccagtaccagagcagctagcaac

SEQ ID NO: 159643 - DNA, 120 bp, Artificial Sequence
  ENSG00000106952_9 (sequence is synthesized)
tctgccctaatgggaaatgaaggggagctgggtgtgagtgtttacactgtgcccttcacgggatacttcttttatctgcagatggcctaatacttagttgtccaagtcgcgatcaaggac

SEQ ID NO: 159644 - DNA, 120 bp, Artificial Sequence
  ENSG00000106952_10 (sequence is synthesized)
tctctcacacaggaaacttccctatactggcagatacacttgtgactgaaccatgcccagtttatgcctgtctgactgtcactctggcactaggaggctgatcttgtactccatatgacc

SEQ ID NO: 159645 - DNA, 120 bp, Artificial Sequence
  ENSG00000106952_11 (sequence is synthesized)
ccacccctaggaacccccagggaaaaccaggctgggacagccccctgttcctgagatggaaagcacaaatttaatacaccaccacaatggaaaacaagttcaaagacttttacttacaga

SEQ ID NO: 159646 - DNA, 120 bp, Artificial Sequence
  ENSG00000106952_12 (sequence is synthesized)
tcctggacagaaagggcataatgagtctgaagggcagtcctccttctctaggttacatgaggcaggaataagaagtcagacagagacagcaagacagttaacaatgtaggtaaagaaata

SEQ ID NO: 159647 - DNA, 120 bp, Artificial Sequence
  ENSG00000106952_13 (sequence is synthesized)
gggtgtggtcactctcaattcactggcaaatgcctgaatggtctgtctgaaggaagcaacagagaagtggggaatccagtctgctaggcaggaaagatgcctctaagttcttgtctctgg

SEQ ID NO: 159648 - DNA, 120 bp, Artificial Sequence
  ENSG00000106952_14 (sequence is synthesized)
ccagaggtgtggtatagaaccagaaacccatatcaagggtgactaagcccggcttctggtatgagaaattaaacttgtatacaaaatggttgccaaggcaacataaaattataagaattc

SEQ ID NO: 159649 - DNA, 120 bp, Artificial Sequence
  ENSG00000106952_15 (sequence is synthesized)
aaccgtcattttcctacgcgccctctgacatcagccaccttctctgtagctagtttctctgcacacaacttaatccctggcaatgaaaaatgaacctctcccccacccttgctgccgcct

SEQ ID NO: 159650 - DNA, 120 bp, Artificial Sequence
  ENSG00000106952_16 (sequence is synthesized)
ctgcagacaagaactgcttctaccctgggtcactgtcactgctaagtggaaagtcatgaacttgatggtaccagtcactctgggcctaaaccgacatagccaggaaacggttcacccccc

SEQ ID NO: 159651 - DNA, 120 bp, Artificial Sequence
  ENSG00000106952_17 (sequence is synthesized)
acaaacagaatcatctagacctgtccatgatttggaatcgtggcccaatacttcctggccccagagagagaaaaaagtctgaccaccccctactcaaagtgccaactcatttccttccca

SEQ ID NO: 159652 - DNA, 120 bp, Artificial Sequence
  ENSG00000106952_18 (sequence is synthesized)
gaattaatcacttcccaaaatgtatgactgtgtgaacatcaattcccttcaggggaaaaccccactcccacctctcaggctgtcatcttaccctatgaccccaacctgacaatcatgcaa

SEQ ID NO: 159653 - DNA, 120 bp, Artificial Sequence
  ENSG00000106952_19 (sequence is synthesized)
cagcccattattggtaccttttccaatgtttaggtgactcattcttatctacaatcactttgttgttctaggaaagtttttgacacagcaggcatttgatatatatttcttgattaaatg

SEQ ID NO: 159654 - DNA, 120 bp, Artificial Sequence
  ENSG00000106952_20 (sequence is synthesized)
aaagattaaatgaataccatcttagatgtctgcatagtgctttaaagtttacaccactattctttcaaatagtacaagagagaactaagctgtgtactcaactgggaagaagcagaactg

SEQ ID NO: 159655 - DNA, 120 bp, Artificial Sequence
  ENSG00000106952_21 (sequence is synthesized)
agagtgggagcacctggtattctgatttcttgtctagaactatactatattctgagatcactaaactacaacctcaggcgactctgcctacttttgtaaataaagttttattggaacaca

SEQ ID NO: 159656 - DNA, 120 bp, Artificial Sequence
  ENSG00000106976_0 (sequence is synthesized)
ggcagtctgggcgcgcggctgcagcggcggagccggagtcggagccgggagcgctagcggcagccggatcgcagcctgcggggcccgccgcagccatgggcaaccgcggcatggaagatc

SEQ ID NO: 159657 - DNA, 120 bp, Artificial Sequence
  ENSG00000106976_1 (sequence is synthesized)
tgggcaaccgcggcatggaagatctcatcccgctggtcaaccggctgcaagacgccttctctgccatcggccagaacgcggacctcgacctgccgcagatcgctgtggtgggcggccaga

SEQ ID NO: 159658 - DNA, 120 bp, Artificial Sequence
  ENSG00000106976_2 (sequence is synthesized)
gcgccggcaagagctcggtgctcgagaatttcgtaggcagggacttcttgcctcgaggatctggcattgtcacccgacgtcccctggtcttgcagctggtcaatgcaaccacagaatatg

SEQ ID NO: 159659 - DNA, 120 bp, Artificial Sequence
  ENSG00000106976_3 (sequence is synthesized)
ccgagttcctgcactgcaagggaaagaaattcaccgacttcgaggaggtgcgccttgagatcgaggccgagaccgacagggtcaccggcaccaacaagggcatctcgccggtgcctatca

SEQ ID NO: 159660 - DNA, 120 bp, Artificial Sequence
  ENSG00000106976_4 (sequence is synthesized)
acctccgcgtctactcgccgcacgtgctgaacctgaccctggtggacctgcccggaatgaccaaggtcccggtgggggaccaacctcccgacatcgagttccagatccgagacatgctta

SEQ ID NO: 159661 - DNA, 120 bp, Artificial Sequence
  ENSG00000106976_5 (sequence is synthesized)
tgcagtttgtcaccaaggagaactgcctcatcctggccgtgtcccccgccaactctgacctggccaattctgacgccctcaaggtcgccaaggaggtggacccccagggccagcgcacca

SEQ ID NO: 159662 - DNA, 120 bp, Artificial Sequence
  ENSG00000106976_6 (sequence is synthesized)
tcggggtcatcaccaagctggacctgatggacgagggcacagatgcccgtgatgtgctggagaacaagctgctccccctgcgcagaggctacattggagtggtgaaccggagccagaagg

SEQ ID NO: 159663 - DNA, 120 bp, Artificial Sequence
  ENSG00000106976_7 (sequence is synthesized)
acattgatggcaagaaggacattaccgccgccttggctgctgaacgaaagttcttcctctcccatccatcttatcgccacttggctgaccgtatgggcacgccctacctgcagaaggtcc

SEQ ID NO: 159664 - DNA, 120 bp, Artificial Sequence
  ENSG00000106976_8 (sequence is synthesized)
tcaatcagcaactgacgaaccacatccgggacacactgccggggctgcggaacaagctgcagagccagctactgtccattgagaaggaggtggaggaatacaagaacttccgccctgatg

SEQ ID NO: 159665 - DNA, 120 bp, Artificial Sequence
  ENSG00000106976_9 (sequence is synthesized)
acccagctcgcaagaccaaggccctgctgcagatggtccagcagttcgccgtagactttgagaagcgcattgagggctcaggagatcagatcgacacctacgaactgtcagggggagccc

SEQ ID NO: 159666 - DNA, 120 bp, Artificial Sequence
  ENSG00000106976_10 (sequence is synthesized)
gcattaaccgaatcttccacgagcgcttccctttcgagctggtcaagatggagtttgatgagaaggaactccgaagggagatcagctatgctatcaagaatatccatggcattagaacgg

SEQ ID NO: 159667 - DNA, 120 bp, Artificial Sequence
  ENSG00000106976_11 (sequence is synthesized)
ggctgtttaccccagacatggcctttgagaccattgtgaaaaagcaggtgaagaagatccgagaaccgtgtctcaagtgtgtggacatggttatctcggagctaatcagcaccgttagac

SEQ ID NO: 159668 - DNA, 120 bp, Artificial Sequence
  ENSG00000106976_12 (sequence is synthesized)
agtgcaccaagaagctccagcagtacccgcggctacgggaggagatggagcgcatcgtgaccacccacatccgggagcgcgagggccgcactaaggagcaggtcatgcttctcatcgata

SEQ ID NO: 159669 - DNA, 120 bp, Artificial Sequence
  ENSG00000106976_13 (sequence is synthesized)
gctggcttacatgaacaccaaccatgaggacttcataggctttgccaatgctcagcagaggagcaaccagatgaacaagaagaagacttcagggaaccaggatgagattctggtcatccg

SEQ ID NO: 159670 - DNA, 120 bp, Artificial Sequence
  ENSG00000106976_14 (sequence is synthesized)
caagggctggctgactatcaataatattggcatcatgaaagggggctccaaggagtactggtttgtgctgactgctgagaatctgtcctggtacaaggatgatgaggagaaagagaagaa

SEQ ID NO: 159671 - DNA, 120 bp, Artificial Sequence
  ENSG00000106976_15 (sequence is synthesized)
atacatgctgtctgtggacaacctcaagctgcgggacgtggagaagggctttatgtcgagcaagcatatctttgccctctttaacacggagcagaggaatgtctacaaggattatcggca

SEQ ID NO: 159672 - DNA, 120 bp, Artificial Sequence
  ENSG00000106976_16 (sequence is synthesized)
gctggagctagcctgtgagacacaggaggaggtggacagctggaaggcctccttcctgagggctggcgtgtaccctgagcgtgttggggacaaagagaaagccagcgagaccgaggagaa

SEQ ID NO: 159673 - DNA, 120 bp, Artificial Sequence
  ENSG00000106976_17 (sequence is synthesized)
tggctccgacagcttcatgcattccatggacccacagctggaacggcaagtggagaccatccggaatcttgtggactcatacatggccattgtcaacaagaccgtgagggacctcatgcc

SEQ ID NO: 159674 - DNA, 88 bp, Artificial Sequence
  ENSG00000106976_18 (sequence is synthesized)
ctcgtgtggggaccagaacacgctgatggaggagtcggcggagcaggcacagcggcgcgacgagatgctgcgcatgtaccacgcactg

SEQ ID NO: 159675 - DNA, 120 bp, Artificial Sequence
  ENSG00000106976_19 (sequence is synthesized)
acagcggcgcgacgagatgctgcgcatgtaccacgcactgaaggaggcgctcagcatcatcggcgacatcaacacgaccaccgtcagcacgcccatgcccccgcccgtggacgactcctg

SEQ ID NO: 159676 - DNA, 120 bp, Artificial Sequence
  ENSG00000106976_20 (sequence is synthesized)
ccgtcagcacgcccatgcccccgcccgtggacgactcctggctgcaggtgcagagcgtaccggccggacgcaggtcgcccacgtccagccccacgccgcagcgccgagcccccgccgtgc

SEQ ID NO: 159677 - DNA, 120 bp, Artificial Sequence
  ENSG00000106976_21 (sequence is synthesized)
cgtgccctccaggccgggggcttcccctgaccctttcggccctccccctcaggtgccctcgcgccccaaccgcgccccgcccggggtccccagccgatcgggtcaggcaagtccatcccg

SEQ ID NO: 159678 - DNA, 120 bp, Artificial Sequence
  ENSG00000106976_22 (sequence is synthesized)
ggtccccagccgatcgggtcaggcaagtccatcccgtcctgagagccccaggccccccttcgacctctaaacagatccctcctcttctcggagacctccctttccaagcctgcctggacg

SEQ ID NO: 159679 - DNA, 120 bp, Artificial Sequence
  ENSG00000106976_23 (sequence is synthesized)
aaagccagcccccttcatctgtgacttaatctgttgtagtggtgagctgatacattcaggtgtgaccgttggtgaaaacttgtgccccttctgtggtatgcccttgccctgttctataaa

SEQ ID NO: 159680 - DNA, 120 bp, Artificial Sequence
  ENSG00000106976_24 (sequence is synthesized)
ccccttctgtggtatgcccttgccctgttctataaatatctataaatactcatatatatacacacctacacatggccaaccgcctcgcctctagcgctgggaatcagtcactgtgctatc

SEQ ID NO: 159681 - DNA, 120 bp, Artificial Sequence
  ENSG00000106976_25 (sequence is synthesized)
cttgtggagtcttgtggcccaactaccagagaacgctgtcccccgacatcccactccaaagtgtgccacctccagtgagcctccttgtcatgcccggcctgtggacagccagcccccgcc

SEQ ID NO: 159682 - DNA, 120 bp, Artificial Sequence
  ENSG00000106976_26 (sequence is synthesized)
atccctcccaccccctaccaagcatgggggtgctgtgcaggcagccgtgtggcctgacagtttctaccagtcctgctgtccctcggctgagaataaaacccatttctggatgatggggaa

SEQ ID NO: 159683 - DNA, 120 bp, Artificial Sequence
  ENSG00000106976_27 (sequence is synthesized)
cgcgcacctgggacctcagagccaggctccccgcccctcccttctgcagctgcagacttgctctttcctctttctgtccttgtgccgctggctctctcacctcccttccctgcgagcctc

SEQ ID NO: 159684 - DNA, 120 bp, Artificial Sequence
  ENSG00000106976_28 (sequence is synthesized)
gggactcagtgccactgcccaaggcctccatggctgagcctggaggctcttggaacaggctccgcgcccaagctggcagacatgggtgctctctggagccgtcagagagggcagagagct

SEQ ID NO: 159685 - DNA, 120 bp, Artificial Sequence
  ENSG00000106976_29 (sequence is synthesized)
cgtggtttatggtgtaaaggctgggagcttggagggggtcgtgtgtggggctggactctgaggcggccagaggcctaggaacgttatcctgggcacaccgtgcgtggtgtgcagtctgag

SEQ ID NO: 159686 - DNA, 120 bp, Artificial Sequence
  ENSG00000106976_30 (sequence is synthesized)
gcctgggagtgctgagagccaaatccaccgtagagcaggggtgagagtcagggtcccacctcctctatctgccggcaatccagtggtgacctagggtaaaagcttgagagtcccatacac

SEQ ID NO: 159687 - DNA, 120 bp, Artificial Sequence
  ENSG00000106976_31 (sequence is synthesized)
acctagggtaaaagcttgagagtcccatacacacggtcatcccacgacatacctcacaggccaggcagggacacacagcccccttccctccctcccaggtaccgtcatagctgctagtgt

SEQ ID NO: 159688 - DNA, 120 bp, Artificial Sequence
  ENSG00000106976_32 (sequence is synthesized)
gactgaaggcagtgtccctggccccagctgaagcaccgtagccagccagcgggctcacgcaccttggcctgttgctcctagggtcacttgtgccattcagccaaggggacgaccgtgcct

SEQ ID NO: 159689 - DNA, 120 bp, Artificial Sequence
  ENSG00000106976_33 (sequence is synthesized)
tgtgccattcagccaaggggacgaccgtgcctgctggcccagctgagctccgcccagtgagcccaccccccattctcctgccactgactctcgctcttctgcttttcccagcaggaaggg

SEQ ID NO: 159690 - DNA, 120 bp, Artificial Sequence
  ENSG00000106976_34 (sequence is synthesized)
gaccagctgaggctcccctcttagacttataagtctatggccactggcatccggctgcctgccctccctgcctcccccagggtcccttcagagggtcctgggttttctgaacacccagag

SEQ ID NO: 159691 - DNA, 120 bp, Artificial Sequence
  ENSG00000106976_35 (sequence is synthesized)
gggcctccggcgctccctccagccatcccttttagtttcaccctcctggttcaagcagtgttctttctctatcaggcctggtggctgttgcatggggctccccaaggcaaggggtggccc

SEQ ID NO: 159692 - DNA, 120 bp, Artificial Sequence
  ENSG00000106976_36 (sequence is synthesized)
caggccagtgggttggaagacagggtgaccagagaagagggaagcccgagggggccgagcatcagcctgaattgcgggtgccctgcctgggtgccgtgtgagaggccagcgtgtgtgggg

SEQ ID NO: 159693 - DNA, 120 bp, Artificial Sequence
  ENSG00000106976_37 (sequence is synthesized)
tggggagggccgccacagcccccaggcgctatctgtgaagctacggctcctccctccatcttcctcccctttcccttccagccccttttccaggaaccttgccacacccacacctgcagc

SEQ ID NO: 159694 - DNA, 120 bp, Artificial Sequence
  ENSG00000106976_38 (sequence is synthesized)
ctcccctccccggccctcccaccactgctgcggcgcggccggccccggccgtgtgctgcgcttgccttaccagctctctcctcgcttttctctcccgttttctctctgctttctctccaa

SEQ ID NO: 159695 - DNA, 120 bp, Artificial Sequence
  ENSG00000106976_39 (sequence is synthesized)
aggtgagtaggggctgaatgcggctggagaggctgccggacgggcgtggccgggagggaaatggggctggattccagagcatcggacctggccgccagaaccggccgtttctatcccagg

SEQ ID NO: 159696 - DNA, 120 bp, Artificial Sequence
  ENSG00000106976_40 (sequence is synthesized)
caatcggactctgggtgccggagccacgccacgtgtggccgagggctggcggagcctgcccccgagggagcgctgagtcccggaggtggtcgtttctggggagggggctgtggggctcgt

SEQ ID NO: 159697 - DNA, 120 bp, Artificial Sequence
  ENSG00000106976_41 (sequence is synthesized)
cccacctgcccccttctttccagcacttgcatggcgcttccctctattttcactcttggcggccgcccacacgttgcattcctcctcctttcttcttcttgctgtcctccatcctccatt

SEQ ID NO: 159698 - DNA, 120 bp, Artificial Sequence
  ENSG00000106976_42 (sequence is synthesized)
ccgtccaattcctctcccagcccctggggagcctaccttaggtctgactctgaaccccgatctgctctgagtgtgtggatttccttcagctaccctgatgtccccacttcccagccctga

SEQ ID NO: 159699 - DNA, 120 bp, Artificial Sequence
  ENSG00000106976_43 (sequence is synthesized)
ctcctttgagccatcccagggggtgtccagccactggcccacaggagcagaggccaggctgtgactgtgtgactagaaaggtgtgtgatgtgtgtgtgggcgtgcacacgagtgtgagag

SEQ ID NO: 159700 - DNA, 120 bp, Artificial Sequence
  ENSG00000106976_44 (sequence is synthesized)
tgtaagcatggcacccaggcccgggctaggacaggagcagctggggaagcagcctgggccgtgggcaaactgatggcttttttcctccccccaaccaccccctccgcgacttctggccct

SEQ ID NO: 159701 - DNA, 120 bp, Artificial Sequence
  ENSG00000106976_45 (sequence is synthesized)
acccagtctaaaccaatgtggtaggggtggcggcaggggcagggatgggagtgcttgaagcctgcttcattcccaaagatttctagggaaaagctttctactacatcctttggcttgacc

SEQ ID NO: 159702 - DNA, 120 bp, Artificial Sequence
  ENSG00000106976_46 (sequence is synthesized)
ttcttgacccatgactctctttcaaggaagttcactccaattcccagtctgccctgtttccactggccacattctctaaggaagaacacagcagaacaatagcatctgttttgtttctgc

SEQ ID NO: 159703 - DNA, 120 bp, Artificial Sequence
  ENSG00000106976_47 (sequence is synthesized)
atggctggagggtagggctgtcggtctagcacccataaaccaaaatgaggcagggattggggcttgccctatgatgctctgatgaccaaagcagatgcgtagaggcaagcagcatggtat

SEQ ID NO: 159704 - DNA, 120 bp, Artificial Sequence
  ENSG00000106976_48 (sequence is synthesized)
tgggcaagaggactggactgggagtccagagatgctgcttcaccctgggcctttagacacgtctctttccctcccagagcctcagcatcccttctatcaaatgatgacattctgcctttt

SEQ ID NO: 159705 - DNA, 120 bp, Artificial Sequence
  ENSG00000106976_49 (sequence is synthesized)
tcccagggcggttgtggggatcgagggagacagtggctatagggatgctgtgttaactgcagatgcagccgtaggagcactttgctaactgccaacgtgagttcagattcttcagggtat

SEQ ID NO: 159706 - DNA, 120 bp, Artificial Sequence
  ENSG00000106976_50 (sequence is synthesized)
ttggcacccaggtctatggtgcggtgtgagatctgtgatgtaaggtttgatgcctgccccaactccagtcttgctaacacacatgaaacatttggcaaatcatgaccctaccttggggaa

SEQ ID NO: 159707 - DNA, 120 bp, Artificial Sequence
  ENSG00000106976_51 (sequence is synthesized)
aagagcagtctgggagagcttcttcaaggcaacctgacttcagtgcagtctgaggcatggctgagataggcttacgtggcaaggaatcaggagggtatctgggccaagagctgcagtgtg

SEQ ID NO: 159708 - DNA, 120 bp, Artificial Sequence
  ENSG00000106976_52 (sequence is synthesized)
ggcagaggtgtagtgtgggctgcaacgaggacagccactggacaaagcagagaacagagacagaatgaggaagagctctgtgggcagggtggggcgcaaggtggagaaccttcaaagtct

SEQ ID NO: 159709 - DNA, 120 bp, Artificial Sequence
  ENSG00000106976_53 (sequence is synthesized)
gaaccacagaaggctcttaggtggagaaatgacagctggactttagcgagcaagccctatctccatgagcagcacgggtgatcctctaagcacaccaggcacgagtgtgcagggagctgg

SEQ ID NO: 159710 - DNA, 120 bp, Artificial Sequence
  ENSG00000106976_54 (sequence is synthesized)
ctctgcccacacgtgtgcttcagtgtgctgagtggctgcatgccccagatccatgctgcacgcgccgccggccagtgagggtgctgggcactgggaggtggcggggaaggaggcgtatgc

SEQ ID NO: 159711 - DNA, 120 bp, Artificial Sequence
  ENSG00000106976_55 (sequence is synthesized)
gtgttgtttgtgggcatgtgtgttagcgtgtgcatgtgggccatggggcctcacagcatgtgtgtgcacgcccgggcgtgtgcgtgtgtgtgtcccccacccccaggccggccccacccg

SEQ ID NO: 159712 - DNA, 120 bp, Artificial Sequence
  ENSG00000106976_56 (sequence is synthesized)
cgcagaggtacagcagttctgtccaagccaggttctgctgcaaaacctcagggacttcttgcctcgaggatctggcattgtcacccgacgtcccctggtcttgcagctggtcaatgcaac

SEQ ID NO: 159713 - DNA, 120 bp, Artificial Sequence
  ENSG00000106976_57 (sequence is synthesized)
cataccctctgtcccgcgtcctccgcatcgcgaaggggaggctcggagaccaagggacttcttgcctcgaggatctggcattgtcacccgacgtcccctggtcttgcagctggtcaatgc

SEQ ID NO: 159714 - DNA, 120 bp, Artificial Sequence
  ENSG00000106976_58 (sequence is synthesized)
cctatcaacctccgcgtctactcgccgcacgctccaccctgccgtgattccgcccacttccggccacgcctccaacagactgccactttcgccctgagatttcctagtcccacccacctg

SEQ ID NO: 159715 - DNA, 120 bp, Artificial Sequence
  ENSG00000106976_59 (sequence is synthesized)
cttgcctcctgccaggcatctgcagcctggcaccagctccagccaggttttcaagcaagggacctggagatgttcttttctaatttctggattggggccaggcgcagtggctcacacctg

SEQ ID NO: 159716 - DNA, 82 bp, Artificial Sequence
  ENSG00000106976_60 (sequence is synthesized)
agaatcgcttgaacccaggaggaggttgcaatgagccaatacattctcaaaataataataataataatttctggattgggaa

SEQ ID NO: 159717 - DNA, 120 bp, Artificial Sequence
  ENSG00000106976_61 (sequence is synthesized)
tttctcaaaataataataataataatttctggattgggaaattgaggcaaattctaggcactagagtcagaaccaagacaaggctgaatcaggggagtctagggtcctgagaggcacagg

SEQ ID NO: 159718 - DNA, 120 bp, Artificial Sequence
  ENSG00000106976_62 (sequence is synthesized)
gatgcggagccaggtatgtattcaggccagtcgcttctctctgtgcctcaatattctgggtacccttggaggggctgagatcctggggatgcctggagcctggctgcatggcctggccac

SEQ ID NO: 159719 - DNA, 120 bp, Artificial Sequence
  ENSG00000106976_63 (sequence is synthesized)
ctgggagggtggctgaaccccagaagtagggggtctgggacagaggcacagggagtgatgaagtgggcctccctcaggaaggactgaaagctctgttccccagtcctctcgaccccaact

SEQ ID NO: 159720 - DNA, 120 bp, Artificial Sequence
  ENSG00000106976_64 (sequence is synthesized)
ttctggctccctgcatgacaggctccagcttggggaggtggacccgggccaccccgcctactgcaacttgctgggccaactgggcacagcccagggcgcaggtggccggggaaacaccct

SEQ ID NO: 159721 - DNA, 120 bp, Artificial Sequence
  ENSG00000106976_65 (sequence is synthesized)
ctggggctgggcccatccccagggtgagatagctcccccagtgccacccaggtaaccggacaaagatgtccaaaccactacgagggcctggggtggagcatctaagtatgaggctgtgtc

SEQ ID NO: 159722 - DNA, 120 bp, Artificial Sequence
  ENSG00000106976_66 (sequence is synthesized)
cttttatgacggccggggactttgcaatcctccacaccctcctgtattcacagtagcccagagtcagtcccattccaccccaccgccctccttctaggcaacccgtggagtaggaaacag

SEQ ID NO: 159723 - DNA, 120 bp, Artificial Sequence
  ENSG00000106976_67 (sequence is synthesized)
gattgggaggtggaatctgttccttaaaagcttagatccccttcagggacccagatctatgctgtgttcatccaacaaatccactgggccggaaaatttaaagcacctaccctatgccaa

SEQ ID NO: 159724 - DNA, 120 bp, Artificial Sequence
  ENSG00000106976_68 (sequence is synthesized)
gcagtgaacaagacccagtgtccccttgctctcatgcaggttcatttccaagatttggcatggaatttacttcctgataactgcactggccaattcacagaaaaaagatctctttcctag

SEQ ID NO: 159725 - DNA, 120 bp, Artificial Sequence
  ENSG00000106976_69 (sequence is synthesized)
tcttaaaacaaaacactctattcctggaaaggctcttatggagaaccacgtttggcaattttcaagccatttctggccatagaacttcctatatgcacagacccttacgaggaagcagga

SEQ ID NO: 159726 - DNA, 86 bp, Artificial Sequence
  ENSG00000106976_70 (sequence is synthesized)
agaacttcctatatgcacagacccttacgaggaagcaggacttacatatcagatactcaaccaccttgtcttgccccaaagagcct

SEQ ID NO: 159727 - DNA, 120 bp, Artificial Sequence
  ENSG00000106976_71 (sequence is synthesized)
tggcccctggacaggacgtggagacctgggcctgctggtagggcccagctaaggcccctgagagctccatgcagggtgggagttgggagagcaggaggtccctggtgcagggctgcagag

SEQ ID NO: 159728 - DNA, 120 bp, Artificial Sequence
  ENSG00000106976_72 (sequence is synthesized)
agggcttaggatgagcagagaggagttcagggctgggtgtggccaagggggaggacaaagactacaagttagggtggggagcaggtggcaagatctgctggtcacatcgtgggacacagt

SEQ ID NO: 159729 - DNA, 120 bp, Artificial Sequence
  ENSG00000106976_73 (sequence is synthesized)
ccagcggccatcagaggggtccttagagagccacggagaaagctggtgggatctgggccccaagctagagacttcactgactatggttgtcctcttgtcaaaggaatgtctacaaggatt

SEQ ID NO: 159730 - DNA, 120 bp, Artificial Sequence
  ENSG00000106976_74 (sequence is synthesized)
cagtacccgcggctacgggaggagatggagcgcatcgtgaccacccacatccgggagcgcgagggccgcactaaggagcagacggagcctcactgttgcccaggctggagtacagtggca

SEQ ID NO: 159731 - DNA, 120 bp, Artificial Sequence
  ENSG00000106976_75 (sequence is synthesized)
aggaatccagaggctgtcccctgcctgattccccatctagctgtccctccacgcctttaggaaggcacagggtagccctgagtatgagggaacaccttgggagctaacggtccccagagg

SEQ ID NO: 159732 - DNA, 120 bp, Artificial Sequence
  ENSG00000106976_76 (sequence is synthesized)
ccttaacctaaccagtctgcggggcaggctcattcccatggcctttctcccacgggaaccacccctctgccctgaagttgcccaggtaggccagtgaagagggcccggaaccaggaagac

SEQ ID NO: 159733 - DNA, 120 bp, Artificial Sequence
  ENSG00000106976_77 (sequence is synthesized)
ccttgaatcaccatttggaacccacacttgggggaaaggggtggccgtggcttggtgccatcagcgtcctgggaccctaggtctctcttccccgcgttgtgggcattctgtgtgtgcctc

SEQ ID NO: 159734 - DNA, 120 bp, Artificial Sequence
  ENSG00000106991_0 (sequence is synthesized)
cctggggccaggactgctgctgtcactgccatccattggagcccagcaccccctccccgcccatccttcggacagcaactccagcccagccccgcgtccctgtgtccacttctcctgacc

SEQ ID NO: 159735 - DNA, 120 bp, Artificial Sequence
  ENSG00000106991_1 (sequence is synthesized)
ccccagaaggctggagcagggacgccgtcgctccggccgcctgctcccctcgggtccccgtgcgagcccacgccggccccggtgcccgcccgcagccctgccactggacacaggataagg

SEQ ID NO: 159736 - DNA, 120 bp, Artificial Sequence
  ENSG00000106991_2 (sequence is synthesized)
cacaggataaggcccagcgcacaggcccccacgtggacagcatggaccgcggcacgctccctctggctgttgccctgctgctggccagctgcagcctcagccccacaagtcttgcagaaa

SEQ ID NO: 159737 - DNA, 120 bp, Artificial Sequence
  ENSG00000106991_3 (sequence is synthesized)
cagtccattgtgaccttcagcctgtgggccccgagaggggcgaggtgacatataccactagccaggtctcgaagggctgcgtggctcaggcccccaatgccatccttgaagtccatgtcc

SEQ ID NO: 159738 - DNA, 120 bp, Artificial Sequence
  ENSG00000106991_4 (sequence is synthesized)
tcttcctggagttcccaacgggcccgtcacagctggagctgactctccaggcatccaagcaaaatggcacctggccccgagaggtgcttctggtcctcagtgtaaacagcagtgtcttcc

SEQ ID NO: 159739 - DNA, 120 bp, Artificial Sequence
  ENSG00000106991_5 (sequence is synthesized)
tgcatctccaggccctgggaatcccactgcacttggcctacaattccagcctggtcaccttccaagagcccccgggggtcaacaccacagagctgccatccttccccaagacccagatcc

SEQ ID NO: 159740 - DNA, 120 bp, Artificial Sequence
  ENSG00000106991_6 (sequence is synthesized)
ttgagtgggcagctgagaggggccccatcacctctgctgctgagctgaatgacccccagagcatcctcctccgactgggccaagcccaggggtcactgtccttctgcatgctggaagcca

SEQ ID NO: 159741 - DNA, 120 bp, Artificial Sequence
  ENSG00000106991_7 (sequence is synthesized)
gccaggacatgggccgcacgctcgagtggcggccgcgtactccagccttggtccggggctgccacttggaaggcgtggccggccacaaggaggcgcacatcctgagggtcctgccgggcc

SEQ ID NO: 159742 - DNA, 120 bp, Artificial Sequence
  ENSG00000106991_8 (sequence is synthesized)
actcggccgggccccggacggtgacggtgaaggtggaactgagctgcgcacccggggatctcgatgccgtcctcatcctgcagggtcccccctacgtgtcctggctcatcgacgccaacc

SEQ ID NO: 159743 - DNA, 120 bp, Artificial Sequence
  ENSG00000106991_9 (sequence is synthesized)
acaacatgcagatctggaccactggagaatactccttcaagatctttccagagaaaaacattcgtggcttcaagctcccagacacacctcaaggcctcctgggggaggcccggatgctca

SEQ ID NO: 159744 - DNA, 120 bp, Artificial Sequence
  ENSG00000106991_10 (sequence is synthesized)
atgccagcattgtggcatccttcgtggagctaccgctggccagcattgtctcacttcatgcctccagctgcggtggtaggctgcagacctcacccgcaccgatccagaccactcctccca

SEQ ID NO: 159745 - DNA, 120 bp, Artificial Sequence
  ENSG00000106991_11 (sequence is synthesized)
aggacacttgtagcccggagctgctcatgtccttgatccagacaaagtgtgccgacgacgccatgaccctggtactaaagaaagagcttgttgcgcatttgaagtgcaccatcacgggcc

SEQ ID NO: 159746 - DNA, 120 bp, Artificial Sequence
  ENSG00000106991_12 (sequence is synthesized)
agtgcttactccagctgtggcatgcaggtgtcagcaagtatgatcagcaatgaggcggtggtcaatatcctgtcgagctcatcaccacagcggaaaaaggtgcactgcctcaacatggac

SEQ ID NO: 159747 - DNA, 120 bp, Artificial Sequence
  ENSG00000106991_13 (sequence is synthesized)
agcctctctttccagctgggcctctacctcagcccacacttcctccaggcctccaacaccatcgagccggggcagcagagctttgtgcaggtcagagtgtccccatccgtctccgagttc

SEQ ID NO: 159748 - DNA, 120 bp, Artificial Sequence
  ENSG00000106991_14 (sequence is synthesized)
ctgctccagttagacagctgccacctggacttggggcctgagggaggcaccgtggaactcatccagggccgggcggccaagggcaactgtgtgagcctgctgtccccaagccccgagggt

SEQ ID NO: 159749 - DNA, 120 bp, Artificial Sequence
  ENSG00000106991_15 (sequence is synthesized)
gacccgcgcttcagcttcctcctccacttctacacagtacccatacccaaaaccggcaccctcagctgcacggtagccctgcgtcccaagaccgggtctcaagaccaggaagtccatagg

SEQ ID NO: 159750 - DNA, 120 bp, Artificial Sequence
  ENSG00000106991_16 (sequence is synthesized)
actgtcttcatgcgcttgaacatcatcagccctgacctgtctggttgcacaagcaaaggcctcgtcctgcccgccgtgctgggcatcacctttggtgccttcctcatcggggccctgctc

SEQ ID NO: 159751 - DNA, 120 bp, Artificial Sequence
  ENSG00000106991_17 (sequence is synthesized)
actgctgcactctggtacatctactcgcacacgcgtgagtaccccaggcccccacagtgagcatgccgggcccctccatccacccgggggagcccagtgaagcctctgagggattgaggg

SEQ ID NO: 159752 - DNA, 120 bp, Artificial Sequence
  ENSG00000106991_18 (sequence is synthesized)
gccctggccaggaccctgacctccgcccctgcccccgctcccgctcccaggttcccccagcaagcgggagcccgtggtggcggtggctgccccggcctcctcggagagcagcagcaccaa

SEQ ID NO: 159753 - DNA, 120 bp, Artificial Sequence
  ENSG00000106991_19 (sequence is synthesized)
ccacagcatcgggagcacccagagcaccccctgctccaccagcagcatggcatagccccggccccccgcgctcgcccagcaggagagactgagcagccgccagctgggagcactggtgtg

SEQ ID NO: 159754 - DNA, 120 bp, Artificial Sequence
  ENSG00000106991_20 (sequence is synthesized)
aactcaccctgggagccagtcctccactcgacccagaatggagcctgctctccgcgcctacccttcccgcctccctctcagaggcctgctgccagtgcagccactggcttggaacacctt

SEQ ID NO: 159755 - DNA, 120 bp, Artificial Sequence
  ENSG00000106991_21 (sequence is synthesized)
ggggtccctccaccccacagaaccttcaacccagtgggtctgggatatggctgcccaggagacagaccacttgccacgctgttgtaaaaacccaagtccctgtcatttgaacctggatcc

SEQ ID NO: 159756 - DNA, 120 bp, Artificial Sequence
  ENSG00000106991_22 (sequence is synthesized)
agcactggtgaactgagctgggcaggaagggagaacttgaaacagattcaggccagcccagccaggccaacagcacctccccgctgggaagagaagagggcccagcccagagccacctgg

SEQ ID NO: 159757 - DNA, 120 bp, Artificial Sequence
  ENSG00000106991_23 (sequence is synthesized)
atctatccctgcggcctccacacctgaacttgcctaactaactggcaggggagacaggagcctagcggagcccagcctgggagcccagagggtggcaagaacagtgggcgttgggagcct

SEQ ID NO: 159758 - DNA, 120 bp, Artificial Sequence
  ENSG00000106991_24 (sequence is synthesized)
agctcctgccacatggagccccctctgccggtcgggcagccagcagagggggagtagccaagctgcttgtcctgggcctgcccctgtgtattcaccaccaataaatcagaccatgaaacc

SEQ ID NO: 159759 - DNA, 120 bp, Artificial Sequence
  ENSG00000106991_25 (sequence is synthesized)
ggcaggcggcctggcccagccccttctctaaggaagcgcatttcctgcctccctgggccggccgggctggatgagccaggagctccctgctgccggtcataccacagccttcatctgcgc

SEQ ID NO: 159760 - DNA, 120 bp, Artificial Sequence
  ENSG00000106991_26 (sequence is synthesized)
aaggctgctgtgaggatcaaatgagttcactcgtgtaaagctgcctaggctcccagtaagcatgatgggagcatctgcagtgattattggtggtctgcaaatggggaaactgaggctcag

SEQ ID NO: 159761 - DNA, 120 bp, Artificial Sequence
  ENSG00000106991_27 (sequence is synthesized)
cccacctggcccaggggctgctgctgggccggggcctcttcctggcctgggagggagcaggcctcgggaaactcctggcaagccatgtgtgtctggaatgcctcggtctccccttctgta

SEQ ID NO: 159762 - DNA, 120 bp, Artificial Sequence
  ENSG00000106991_28 (sequence is synthesized)
tgaccggagcaggactgctgagggtgacgctcttggtctctcaagtcagagggcttagcacatactggctgtgtggccttgggcaagtcactttagttttctgggcccaaaggtggccta

SEQ ID NO: 159763 - DNA, 120 bp, Artificial Sequence
  ENSG00000106991_29 (sequence is synthesized)
agaaaggactctgcgccacagggtgcttctgggcagccaatgaggtgctgtgtggaagctcttcacacagcctggcagctggtgcctccttgataaatattagtttaaaaaaaaaaaaaa

SEQ ID NO: 159764 - DNA, 120 bp, Artificial Sequence
  ENSG00000106991_30 (sequence is synthesized)
tctccaggcatccaagcaaaatggcacctggccccgagaggtgcttctggtcctcagtgtaaacagcagtgtcttcctgcatctccaggccctgggaatcccactgcacttggcctacgc

SEQ ID NO: 159765 - DNA, 120 bp, Artificial Sequence
  ENSG00000106991_31 (sequence is synthesized)
ggggagcacccatcacatgctgggtgtcagggtgacgctggcatgtcaggatcctgtgatgggcccagggcccagcacaaagtcagacaaatctctctcagtgcgtactacgtgtcaagc

SEQ ID NO: 159766 - DNA, 120 bp, Artificial Sequence
  ENSG00000106992_0 (sequence is synthesized)
gggagtttcgaggggagcagctctgcagttgtgtggccgctgtttatgtccctcggtgccatcctcactgtcccagcccctccagcgggaacccaggtggatgggagggggctactgccc

SEQ ID NO: 159767 - DNA, 120 bp, Artificial Sequence
  ENSG00000106992_1 (sequence is synthesized)
ttctgtgacagagcactgacacggctcccgggacctcggcaggatggaagagaagctgaagaaaaccaagatcatctttgtggtgggtgggcctggctcagggaagggcacccagtgtga

SEQ ID NO: 159768 - DNA, 120 bp, Artificial Sequence
  ENSG00000106992_2 (sequence is synthesized)
gaagatcgtgcagaagtatggctacacccacctctccaccggggacctcctgcggtccgaggtcagctcaggctcggccaggggcaagaagctgtcggaaatcatggagaaggggcagct

SEQ ID NO: 159769 - DNA, 120 bp, Artificial Sequence
  ENSG00000106992_3 (sequence is synthesized)
gccatggtggccaaagtcaatacttccaaaggcttcctgattgatggctacccgcgggaggtgcagcaaggagaagagtttgagcgacggattggacagcccacactgctgctgtatgtg

SEQ ID NO: 159770 - DNA, 120 bp, Artificial Sequence
  ENSG00000106992_4 (sequence is synthesized)
gacgcaggccctgagaccatgacccagcggctcttgaaacgtggagagaccagcgggcgtgtggacgacaatgaggagaccatcaaaaagcggctggagacctattacaaggccacagaa

SEQ ID NO: 159771 - DNA, 120 bp, Artificial Sequence
  ENSG00000106992_5 (sequence is synthesized)
cctgtcatcgccttctatgagaaacgtggcattgtgcgcaaggtcaacgctgagggctccgtggacagtgtcttctcccaggtctgcacccacctggacgccctaaagtagcaacgctgg

SEQ ID NO: 159772 - DNA, 120 bp, Artificial Sequence
  ENSG00000106992_6 (sequence is synthesized)
attcgaggtcctcctggcctgagcgcagcgcctccaccctgccctgctgagcacagacggaggaagccgcttatcctgttttcatggacagctgagcactaaaggaatttctaaggacat

SEQ ID NO: 159773 - DNA, 120 bp, Artificial Sequence
  ENSG00000106992_7 (sequence is synthesized)
ttggttttactgctttttctctgcttccagttggagttgattcatgtgcttgtgcctacctggccgcaagtccccagcccctcaaccctccgttcctcctcagcctccctttgccagcca

SEQ ID NO: 159774 - DNA, 120 bp, Artificial Sequence
  ENSG00000106992_8 (sequence is synthesized)
cccctcctctagctctggtgggaggcccggggcccttcctcgcacagggcatgcctggcctgaggacccggcgctgagtggcggggcccctgctccgaggggctcatgttcaggcagaac

SEQ ID NO: 159775 - DNA, 120 bp, Artificial Sequence
  ENSG00000106992_9 (sequence is synthesized)
ctgtggccttggccctgacccccatcgctctgagcatatgttccatgcctggcccttgccggggcctggactgcacaggcagcaaggtcatggtctgagtggggcttcctgggcagttgg

SEQ ID NO: 159776 - DNA, 120 bp, Artificial Sequence
  ENSG00000106992_10 (sequence is synthesized)
ggcggcccacgccagctggcccagtgggtagtgaattggcttccttgacgcgagaggctctgagggtctgaaaagggcatctcaatggcatgggtgggtggggagtcagtcatgtcactg

SEQ ID NO: 159777 - DNA, 65 bp, Artificial Sequence
  ENSG00000106992_11 (sequence is synthesized)
ctcaatggcatgggtgggtggggagtcagtcatgtcactgaaattgaatgggggaggcccaaccc

SEQ ID NO: 159778 - DNA, 72 bp, Artificial Sequence
  ENSG00000106992_12 (sequence is synthesized)
tgggggagtcatggtcaggggtgagacctgaaggacctccccctgtgtggccctggacacagcccaccctct

SEQ ID NO: 159779 - DNA, 120 bp, Artificial Sequence
  ENSG00000106992_13 (sequence is synthesized)
ggacctccccctgtgtggccctggacacagcccaccctctgtgagccgtttccaattctaaaacagactcaatgtccccctcacccccacctcaaggtcaggatgagaacacactgagtg

SEQ ID NO: 159780 - DNA, 120 bp, Artificial Sequence
  ENSG00000106992_14 (sequence is synthesized)
aggagtggacgctgtccattgccacggccatgagggctggagaccagaacagcatggcccgaagcgtgcggggccccggatgacttggggacaccccagaatcccctggggagaaccctt

SEQ ID NO: 159781 - DNA, 120 bp, Artificial Sequence
  ENSG00000106992_15 (sequence is synthesized)
cctgcgcgctttcattttttgacctcatcactgagaaaggctcaatttggtgctcacgtgtccttaacacctgatctggcccaagctgggctccctttaagccaagagagcctcttgtgg

SEQ ID NO: 159782 - DNA, 120 bp, Artificial Sequence
  ENSG00000106992_16 (sequence is synthesized)
accccgcctgcccgaatgaaatccgaacagttggggctgttcatggcaagtggggctggtttttcatttccattggttatttaaagtttcctttaaaataaacgattttaagttataaaa

SEQ ID NO: 159783 - DNA, 120 bp, Artificial Sequence
  ENSG00000106992_17 (sequence is synthesized)
acgggcagggcacgcactggccccggcgcccacccgcacccctccccagagcactgacacggctcccgggacctcggcaggatggaaggagcgccagcggtgtctgtccctccgcctggg

SEQ ID NO: 159784 - DNA, 120 bp, Artificial Sequence
  ENSG00000106992_18 (sequence is synthesized)
gcccagcacaggcctgggactccagaggtgcctctggctgtgggtccagcgagtgactgagccctgctccccttttctctcccgcagagaagctgaagaaaaccaagatcatctttgtgg

SEQ ID NO: 159785 - DNA, 120 bp, Artificial Sequence
  ENSG00000106992_19 (sequence is synthesized)
gctaagcccccactgccgggggaggcgggtgatgggccggcccagggcctgagaggggaagggcagggtgcacaggagacacggcaggacgggaccatgggctgctgctcctcgagtgac

SEQ ID NO: 159786 - DNA, 120 bp, Artificial Sequence
  ENSG00000106993_0 (sequence is synthesized)
cttccgccgtccgccggtggcgaggcccaggctgtcgccgggtgtgcagcggcgtcgcggccagtagagggattctgggtaacggcccggacccccggctgggcttctggctcggcgcag

SEQ ID NO: 159787 - DNA, 120 bp, Artificial Sequence
  ENSG00000106993_1 (sequence is synthesized)
caggttccattcacgccaagtctgttggcagtggcagttgtagggccaagggcggttgtaggacccggagcagccggacatggaacaaccgtggccgcctccgggaccctggagcctccc

SEQ ID NO: 159788 - DNA, 120 bp, Artificial Sequence
  ENSG00000106993_2 (sequence is synthesized)
tcgggccgagggtgaggctgaggaagagagtgacttcgacgtgttccccagttctccccgctgcccgcagctgccaggcggcggcgcccagatgtatagccatggaattgaattggcttg

SEQ ID NO: 159789 - DNA, 120 bp, Artificial Sequence
  ENSG00000106993_3 (sequence is synthesized)
ccaaaagcagaaagagtttgtgaagagctctgtggcgtgcaaatggaatcttgctgaagctcaacagaaacttggtagcttagcactgcataattctgagtccttggatcaggagcatgc

SEQ ID NO: 159790 - DNA, 120 bp, Artificial Sequence
  ENSG00000106993_4 (sequence is synthesized)
caaagcacaaacagcagtatcagaactgaggcaacgggaagaagagtggcgacagaaagaagaagctctagtacaaagagagaagatgtgtctgtggagcacggatgccattagcaagga

SEQ ID NO: 159791 - DNA, 120 bp, Artificial Sequence
  ENSG00000106993_5 (sequence is synthesized)
tgtttttaataagagttttattaatcaagataaaagaaaagacacagaagatgaagataaatcagaatcatttatgcaaaaatatgagcaaaaaatcagacattttggtatgttgagtcg

SEQ ID NO: 159792 - DNA, 120 bp, Artificial Sequence
  ENSG00000106993_6 (sequence is synthesized)
atgggatgatagccagagatttttgtctgaccatccataccttgtatgtgaagaaactgctaaatatcttattttatggtgttttcacctggaagctgagaagaaaggggctttaatgga

SEQ ID NO: 159793 - DNA, 120 bp, Artificial Sequence
  ENSG00000106993_7 (sequence is synthesized)
acaaatagcacatcaagctgttgtaatgcagtttattatggaaatggccaaaaactgtaatgtggatccaagagggtgttttcgtttatttttccagaaagccaaagcagaggaagaagg

SEQ ID NO: 159794 - DNA, 120 bp, Artificial Sequence
  ENSG00000106993_8 (sequence is synthesized)
ttattttgaagcattcaaaaatgaacttgaagctttcaagtcaagagtaagactttattctcaatcacaaagttttcaacctatgacagttcagaatcatgttccccattctggtgttgg

SEQ ID NO: 159795 - DNA, 120 bp, Artificial Sequence
  ENSG00000106993_9 (sequence is synthesized)
atctataggtttattagaatccttaccacagaatccagattatcttcagtattctatcagtacagctctctgcagcttaaactcggtggtacataaagaagatgatgaacccaaaatgat

SEQ ID NO: 159796 - DNA, 120 bp, Artificial Sequence
  ENSG00000106993_10 (sequence is synthesized)
ggacactgtataatttggttaagactgctgaggccaagtgctattttgttacaagaaaggaagaacttggctattttcttgacacttttatgggtgctgcactttatttttgttcggttt

SEQ ID NO: 159797 - DNA, 120 bp, Artificial Sequence
  ENSG00000106993_11 (sequence is synthesized)
ttgatgggagggaaagagtactgaaatgttttgtaaattttttttaatgtgctgctaggttttttgttttgttttgttctgaagagaagagtggtaccatatgttgcaggaagtcaaact

SEQ ID NO: 159798 - DNA, 120 bp, Artificial Sequence
  ENSG00000106993_12 (sequence is synthesized)
ggactttttgtggctactaaatttgcttttaatcttattgttctcaattttggaatcaagtatgaaaatctgcacaaatgcaatgtttacaagaactggttgattctgggaggcatctgc

SEQ ID NO: 159799 - DNA, 120 bp, Artificial Sequence
  ENSG00000106993_13 (sequence is synthesized)
tacagtctctttttatatggatatgtacatgtcctattctacaaaaatgattaaagataaaaacatacttgtatcccactgctactttagctgtcaaatttggtgtttcatcacattaaa

SEQ ID NO: 159800 - DNA, 120 bp, Artificial Sequence
  ENSG00000106993_14 (sequence is synthesized)
taatgtactttactaaataagttggggggtacaatttttaaaagtcttaactcttaaatacttgactttcggcaccatcagttaaatccttgactataatacaaatttgatatatacatt

SEQ ID NO: 159801 - DNA, 120 bp, Artificial Sequence
  ENSG00000106993_15 (sequence is synthesized)
acatttaccctcaaattattctcaaaactatattccttagaatttgattttaccctgctgactttaagagttataataatatcaaatgtgatgagctaatatagattttctttttaaata

SEQ ID NO: 159802 - DNA, 120 bp, Artificial Sequence
  ENSG00000106993_16 (sequence is synthesized)
agaataacttcaagctcactctttcttaacatagtctgggatctctcagggagtaagttttaaaagaatactaatggcttgtaagaacaaacaggaataataatctgatttttaaatttg

SEQ ID NO: 159803 - DNA, 120 bp, Artificial Sequence
  ENSG00000106993_17 (sequence is synthesized)
tagttattttactcatgttgccttttaatttttgttattttggtttattttttgatgtagccttttaaaaaaggagtcttaaaaatgattttttttttaaaggcaagagaaatcttgtag

SEQ ID NO: 159804 - DNA, 120 bp, Artificial Sequence
  ENSG00000106993_18 (sequence is synthesized)
tgctaactgccttgagctgccaattacctatttctgagaatttggtgactcttattggtaatgatggcatttacaacatttggcatttcccctttttcagctcagttaccatagaatact

SEQ ID NO: 159805 - DNA, 120 bp, Artificial Sequence
  ENSG00000106993_19 (sequence is synthesized)
tccaagctttactacttcctctgtaagtcatttcagttatgccaggatatttgatgattttgtttatgtagaattaggtaacaaagccaattatgctatccttattattgaaggattaat

SEQ ID NO: 159806 - DNA, 120 bp, Artificial Sequence
  ENSG00000106993_20 (sequence is synthesized)
cttatgacttaacataagctttggttatatttgggtgtagtctttggctaagtacccattaaggctagtagcaaacacttggaaggtggctaactgggactgggaatacgtgtctcaact

SEQ ID NO: 159807 - DNA, 120 bp, Artificial Sequence
  ENSG00000106993_21 (sequence is synthesized)
tgagaaaccaaatagtgcgaagggactcagggtggccagacctgtgaccttggcctcatttgtatcttgttttcgctgaggtgatcagacacttagtaccctagaaatggactggaatta

SEQ ID NO: 159808 - DNA, 120 bp, Artificial Sequence
  ENSG00000106993_22 (sequence is synthesized)
ttgaatcttcttctgtaacatcacaatcttcctggttttcagaataaacgtttttgtgcttttgatataaatatatactctataataaaatgtttgactaatttatatagtagtgtttgt

SEQ ID NO: 159809 - DNA, 120 bp, Artificial Sequence
  ENSG00000106993_23 (sequence is synthesized)
cagcctgtactttttttttttttaaacccatgacctagtcgtagacatttttttctttttgttctgttctgaagcaagctcttatttttccctttctaccaaattgagagaatgggcaga

SEQ ID NO: 159810 - DNA, 120 bp, Artificial Sequence
  ENSG00000106993_24 (sequence is synthesized)
cacaggagccatattcctagtttcacagaaatgttacttgaattattattttcccttctttcccaggatttgcctgtaagcattcaaattgttttgaatttcattttgccttctctaagt

SEQ ID NO: 159811 - DNA, 120 bp, Artificial Sequence
  ENSG00000106993_25 (sequence is synthesized)
tagaggtatttaatgactgaagactggcaggagagaaagtatcaacaaactgagtaaactattcttgaggggcactgaaaagatgttctttgaaacttgatttatatatttttacttgca

SEQ ID NO: 159812 - DNA, 120 bp, Artificial Sequence
  ENSG00000106993_26 (sequence is synthesized)
aaagaatatactgtgttttgagtatgaaagtgtgattgggtctgttgtgggaaccactgactgatgccataatttgcacttaaaggctataaattacatagttagccgtactttagtact

SEQ ID NO: 159813 - DNA, 120 bp, Artificial Sequence
  ENSG00000106993_27 (sequence is synthesized)
agaaacagtaaattgacatccttgaactaattcctaccttttttttgtttctgaagaaataaagagtatattaagcaaagggataatttatatttcaggttggacaatttaccctaaaca

SEQ ID NO: 159814 - DNA, 120 bp, Artificial Sequence
  ENSG00000106993_28 (sequence is synthesized)
aattaaaccatggaaagtgcaaacacatgaatgaaacatttttttacatcaaagtatcatcaaagattcttgtttcatttgataaaattaatatttgaataaaaaaatttttaaatcaaa

SEQ ID NO: 159815 - DNA, 120 bp, Artificial Sequence
  ENSG00000106993_29 (sequence is synthesized)
caaagcagcagaatcccataaacagtgttcaattttgacagtttatgaaaggtgcttgaaaagtttatgaaagtcaaaaagtctcaaagctcttgctgtagagctgcagactccaggcag

SEQ ID NO: 159816 - DNA, 120 bp, Artificial Sequence
  ENSG00000106993_30 (sequence is synthesized)
ttaagtgaccagactgaaatacatatttatataaatgtactgctgaacaaatattacatatattaaaaaacattcacaagaatttgatataaggatgggaaaatatatcagttatgaaat

SEQ ID NO: 159817 - DNA, 120 bp, Artificial Sequence
  ENSG00000106993_31 (sequence is synthesized)
ccaagattttaagaccagctttagccagtttaatctgttgtctacattgtgagaaggaaagtcttattcaaaagacaatgtgaggagagtcctatatttagttttaaacctcataaagtg

SEQ ID NO: 159818 - DNA, 120 bp, Artificial Sequence
  ENSG00000107014_0 (sequence is synthesized)
caaaagaccgcttgagccgggtagggaaagcagcctaaagcccgggacaggcacacaggcccaggtgtgtaggccacagcagctgcagtcctgaaaggctgcaacgtcccgacctccagg

SEQ ID NO: 159819 - DNA, 120 bp, Artificial Sequence
  ENSG00000107014_1 (sequence is synthesized)
agagaccaggcccaggatgcctcgcctgttttttttccacctgctaggagtctgtttactactgaaccaattttccagagcagtcgcggactcatggatggaggaagttattaaattatg

SEQ ID NO: 159820 - DNA, 120 bp, Artificial Sequence
  ENSG00000107014_2 (sequence is synthesized)
cggccgcgaattagttcgcgcgcagattgccatttgcggcatgagcacctggagcaaaaggtctctgagccaggaagatgctcctcagacacctagaccagtggcagaaattgtgccatc

SEQ ID NO: 159821 - DNA, 120 bp, Artificial Sequence
  ENSG00000107014_3 (sequence is synthesized)
atgcagccagcattaccacagctacaacaacatgtacctgtattaaaagattccagtcttctctttgaagaatttaagaaacttattcgcaatagacaaagtgaagccgcagacagcagt

SEQ ID NO: 159822 - DNA, 120 bp, Artificial Sequence
  ENSG00000107014_4 (sequence is synthesized)
ccttcagaattaaaatacttaggcttggatactcattctcgaaaaaagagacaactctacagtgcattggctaataaatgttgccatgttggttgtaccaaaagatctcttgctagattt

SEQ ID NO: 159823 - DNA, 120 bp, Artificial Sequence
  ENSG00000107014_5 (sequence is synthesized)
tgctgagatgaagctaattgtgcacatctcgtataatattcacacatattcttaatgacatttcactgatgcttctatcaggtcccatcaattcttagaatatctaagaatctttgttag

SEQ ID NO: 159824 - DNA, 120 bp, Artificial Sequence
  ENSG00000107014_6 (sequence is synthesized)
atattaggtcccatcaattcttagaatatctaaacatctttgttgatgtttagatttttttatttgatgtgtaagaaaatgttctttgtgtgattaaatgacacatttttttgctgaaaa

SEQ ID NO: 159825 - DNA, 120 bp, Artificial Sequence
  ENSG00000107014_7 (sequence is synthesized)
gcacctggagcaaaaggtctctgagccaggaagatgctcctcagacacctagaccagtggcaggtgattttattcaaacagtctcactgggaatctcaccggacggagggaaagcactga

SEQ ID NO: 159826 - DNA, 120 bp, Artificial Sequence
  ENSG00000107014_8 (sequence is synthesized)
gaacaggaagctgcttcacccgagagttccttggtgccctttccaaattgtgccatccttcatcaacaaagatacagaaaccataaatatgatgtcagaatttgttgctaatttgccaca

SEQ ID NO: 159827 - DNA, 120 bp, Artificial Sequence
  ENSG00000107018_0 (sequence is synthesized)
actggttgagccgggtagggaaagcagcctaaagcccgggacaggcacacaggcccaggtgtgtaggccacagcagccgcagtcctgaaaggctgcaacacccagacctccaggagagac

SEQ ID NO: 159828 - DNA, 120 bp, Artificial Sequence
  ENSG00000107018_1 (sequence is synthesized)
caggcccaggatgcctcgcctgttcttgttccacctgctagaattctgtttactactgaaccaattttccagagcagtcgcggccaaatggaaggacgatgttattaaattatgcggccg

SEQ ID NO: 159829 - DNA, 120 bp, Artificial Sequence
  ENSG00000107018_2 (sequence is synthesized)
cgaattagttcgcgcgcagattgccatttgcggcatgagcacctggagcaaaaggtctctgagccaggaagatgctcctcagacacctagaccagtggcagaaattgtaccatccttcat

SEQ ID NO: 159830 - DNA, 120 bp, Artificial Sequence
  ENSG00000107018_3 (sequence is synthesized)
caacaaagatacagaaactataattatcatgttggaattcattgctaatttgccaccggagctgaaggcagccctatctgagaggcaaccatcattaccagagctacagcagtatgtacc

SEQ ID NO: 159831 - DNA, 120 bp, Artificial Sequence
  ENSG00000107018_4 (sequence is synthesized)
cgcaataggcaaagtgaagccgcagacagcaatccttcagaattaaaatacttaggcttggatactcattctcaaaaaaagagacgaccctacgtggcactgtttgagaaatgttgccta

SEQ ID NO: 159832 - DNA, 120 bp, Artificial Sequence
  ENSG00000107018_5 (sequence is synthesized)
attggttgtaccaaaaggtctcttgctaaatattgctgagatgaagctaattgtgcacatcttgtctaattttcacacatagtcttgatgacatttcactgatgcttctgtcaggtccca

SEQ ID NO: 159833 - DNA, 120 bp, Artificial Sequence
  ENSG00000107018_6 (sequence is synthesized)
ctaattattagaatataagaaatctttattaatgtttagatttttcatttggtgtgtaagaaaatattctttgtatgattgtagtttctgtaaatgacactttctatgctgaagtctttt

SEQ ID NO: 159834 - DNA, 120 bp, Artificial Sequence
  ENSG00000107018_7 (sequence is synthesized)
tgtctttttattaacagtataattgtgttgattctttttaatgctgttaacttaaaattacaataaaacctttgccactttaaccatacataataacaatacagtacctaacaacagtta

SEQ ID NO: 159835 - DNA, 120 bp, Artificial Sequence
  ENSG00000107018_8 (sequence is synthesized)
ctggtccctaaagtttgggcttttcctttgccaggtgattttattcaaacagtctcactgggaatctcaccggacggagggaaagcactgagaacaggaagctgcttcacccgagagttc

SEQ ID NO: 159836 - DNA, 120 bp, Artificial Sequence
  ENSG00000107020_0 (sequence is synthesized)
gaggtgcgtcatctactgtgtctgggcgccaatcccgacgctgggcggagcgaggcccggtccctgcagcgggcgaaaggagcccgggcctggaggtttgcgtaccggtcgcctggtccc

SEQ ID NO: 159837 - DNA, 120 bp, Artificial Sequence
  ENSG00000107020_1 (sequence is synthesized)
ggcaccagcgccgcccagtgtggtttcccataaggaagctcttcttcctgcttggcttccacctttaacccttccacctgggagcgtcctctaacacattcagactacaagtccagaccc

SEQ ID NO: 159838 - DNA, 120 bp, Artificial Sequence
  ENSG00000107020_2 (sequence is synthesized)
aggagagcaaggcccagaaagaggtcaaaatggggtttatattttcaaaatctatgaatgaaagcatgaaaaatcaaaaggagttcatgcttatgaatgctcgacttcagctggaaaggc

SEQ ID NO: 159839 - DNA, 120 bp, Artificial Sequence
  ENSG00000107020_3 (sequence is synthesized)
agctcatcatgcagagtgaaatgagggaaagacaaatggccatgcagattgcgtggtctcgggaattcctcaaatattttggaactttttttggccttgcagccatctctttaacagctg

SEQ ID NO: 159840 - DNA, 120 bp, Artificial Sequence
  ENSG00000107020_4 (sequence is synthesized)
cagccttcctggtcccgattgttccattaagctttatcctcacctaccagtatgacttgggctatggaacccttttagaaagaatgaaaggtgaagctgaggacatactggaaacagaaa

SEQ ID NO: 159841 - DNA, 120 bp, Artificial Sequence
  ENSG00000107020_5 (sequence is synthesized)
agagtaaattgcagctgccaagaggaatgatcacttttgaaagcattgaaaaagccagaaaggaacagagtagattcttcatagacaaatgaaatcatgcttaccaatcaaatctcaaag

SEQ ID NO: 159842 - DNA, 120 bp, Artificial Sequence
  ENSG00000107020_6 (sequence is synthesized)
aaagcacagaattattgacttgaatcatggtttttacagttttttaaatgctcaagattttgatattatagattttattttaaaatattaaaatgcaagatagttttgagctattttaaa

SEQ ID NO: 159843 - DNA, 120 bp, Artificial Sequence
  ENSG00000107020_7 (sequence is synthesized)
aatttataacattcaacacaaaatcatggaggtgctctaaataacttttagatttcctctctctgtgtgcattaccaatatctaagtgtaaaattaataaattgttttgaattcctggaa

SEQ ID NO: 159844 - DNA, 120 bp, Artificial Sequence
  ENSG00000107020_8 (sequence is synthesized)
aaatcagggagcctgactacagaattggaatgcttatctcctcctgcttcacatattcatgagacatatgcaaaagccgagacatgctaatgtgagaatgtgagttagccttaagcaatt

SEQ ID NO: 159845 - DNA, 120 bp, Artificial Sequence
  ENSG00000107020_9 (sequence is synthesized)
tgctttatgaataactgtattataattgcacaataatgatacagtgaataggaagtgttagtagaagttttaagacacaattaaagataagttgtagaaataaagaatacattcctctgg

SEQ ID NO: 159846 - DNA, 120 bp, Artificial Sequence
  ENSG00000107021_0 (sequence is synthesized)
gcgcagagccccgcgtccctggggggcggcggcggcggcggcagcgcaggcggcagaggcgcaggcggcggaggcggctggggggtccggaagtcaacaccatgtcaagtctgcacaaga

SEQ ID NO: 159847 - DNA, 120 bp, Artificial Sequence
  ENSG00000107021_1 (sequence is synthesized)
gccgaattgcagatttccaggatgtcctgaaggagccctcaattgcattggaaaagctgcgggaactcagctttagtggcatcccctgtgagggcggactgcggtgcctctgctggaaga

SEQ ID NO: 159848 - DNA, 120 bp, Artificial Sequence
  ENSG00000107021_2 (sequence is synthesized)
ttctcttgaactaccttcccttggagagagcctcatggacctccatcctggccaagcagagggagctgtatgcccagttcctgagggaaatgatcatccagcctggcattgccaaggcca

SEQ ID NO: 159849 - DNA, 120 bp, Artificial Sequence
  ENSG00000107021_3 (sequence is synthesized)
acatgggtgtgtccagggaggatgtgacttttgaggaccatccactcaaccccaaccctgacagccggtggaacacgtacttcaaggacaacgaggtgctgctgcagatcgacaaagatg

SEQ ID NO: 159850 - DNA, 120 bp, Artificial Sequence
  ENSG00000107021_4 (sequence is synthesized)
tccggaggttgtgcccagacatttccttcttccagagggccactgactacccttgcctcctcatcctggacccccagaatgagtttgaaacccttcgtaagagagtggaacagacaacac

SEQ ID NO: 159851 - DNA, 120 bp, Artificial Sequence
  ENSG00000107021_5 (sequence is synthesized)
tgaaatctcagacggtggcccggaaccggagtggggtcacaaatatgagctccccacacaagaactctgtgccatcatccctaaatgagtatgaggtgctgcccaatggctgtgaggccc

SEQ ID NO: 159852 - DNA, 120 bp, Artificial Sequence
  ENSG00000107021_6 (sequence is synthesized)
actgggaggtggtggagcggatcctgttcatctacgccaagctcaaccctggcatcgcttatgtgcaaggcatgaatgaaatcgtggggcccctctactacacctttgccaccgacccca

SEQ ID NO: 159853 - DNA, 120 bp, Artificial Sequence
  ENSG00000107021_7 (sequence is synthesized)
atagtgagtggaaagagcacgccgaggcagacacctttttctgcttcaccaacctcatggccgagatccgggacaactttatcaagagcctggatgactcgcagtgtggcatcacctaca

SEQ ID NO: 159854 - DNA, 120 bp, Artificial Sequence
  ENSG00000107021_8 (sequence is synthesized)
agatggagaaggtttactccaccttgaaagataaggatgtggagctctacctgaaactgcaagagcagaacatcaagcctcagttctttgccttccgctggctgacactgctgctgtccc

SEQ ID NO: 159855 - DNA, 120 bp, Artificial Sequence
  ENSG00000107021_9 (sequence is synthesized)
aggagttcttgctgcctgacgtcatccgcatctgggactccctcttcgccgatgacaaccgctttgacttcctcctcctcgtctgctgcgccatgctcatgctgatccgggagcagttgc

SEQ ID NO: 159856 - DNA, 120 bp, Artificial Sequence
  ENSG00000107021_10 (sequence is synthesized)
tggaaggggacttcactgtgaatatgcggctgctgcaggactaccccatcacagatgtctgccagatcctgcagaaagccaaggagctccaagactcaaagtagcccggcggcaagaggc

SEQ ID NO: 159857 - DNA, 120 bp, Artificial Sequence
  ENSG00000107021_11 (sequence is synthesized)
ccatgttccggagagaagcctcccgaccctgtgccctggctcccgggacacatagaaacctgtaggaacccagcctgaggggaagccacaggatcggcccgagacccaggccatgcccac

SEQ ID NO: 159858 - DNA, 120 bp, Artificial Sequence
  ENSG00000107021_12 (sequence is synthesized)
tggggacacactgtgccgtgctccttctgccgccacgcccagctccccacctgccctgcactctgccctctttgcccaggatactgaggagggctggagctcgggaagttgtccttcctg

SEQ ID NO: 159859 - DNA, 120 bp, Artificial Sequence
  ENSG00000107021_13 (sequence is synthesized)
ggccagggccgtttctggcactgggaggctggcaggggcccctccctgcctcggctctgccgccccagcctcagttcctgcttctggtcttctcctgggctccactcaggggaggtgctt

SEQ ID NO: 159860 - DNA, 120 bp, Artificial Sequence
  ENSG00000107021_14 (sequence is synthesized)
ggccaatgggccagaaaccgcttctgagcggggcacttcggctgctccacagggaaggcgacactgaaagctgagtcctgccgtctgtctcacccacagatgtctgtagtcggtcggtgt

SEQ ID NO: 159861 - DNA, 73 bp, Artificial Sequence
  ENSG00000107021_15 (sequence is synthesized)
gtgagggtctctcaggcctccaggtctcccagcccctccttctctgtctctacctctctgcctgtctccttcc

SEQ ID NO: 159862 - DNA, 120 bp, Artificial Sequence
  ENSG00000107021_16 (sequence is synthesized)
tctacctctctgcctgtctccttccacctccttcccagagtgggactgtgtcttgcttcatgattcctctctccattactctccctgcccttctctgttggggtgccttatcctgagcca

SEQ ID NO: 159863 - DNA, 120 bp, Artificial Sequence
  ENSG00000107021_17 (sequence is synthesized)
cctcctctccccgcttgcctctgctcccctgaacctgggagacagatgaggagactggctcagcaaggcccctggaggtcaagcttggcctttgcctcctgttcccatcccccagccctg

SEQ ID NO: 159864 - DNA, 120 bp, Artificial Sequence
  ENSG00000107021_18 (sequence is synthesized)
gctcctaggtcctcccaactgggagggagtcctccgtgcctcacttagagggttctgaacccgttccctacacagaaatcttggaaaccaaatgctgctgagtaaggatgaagctttgag

SEQ ID NO: 159865 - DNA, 120 bp, Artificial Sequence
  ENSG00000107021_19 (sequence is synthesized)
cctcctgcccctgctttctgcccagggagggagaaggaagagggggagctggtttttctggaggttcccccagaggccctcctgtccgaaaagaaaaggaccttgattctgagcccaggg

SEQ ID NO: 159866 - DNA, 120 bp, Artificial Sequence
  ENSG00000107021_20 (sequence is synthesized)
tcggaacccattgcttcagaagagttgtcattccctcggcttccaggtcccaacccagggttgggttgagtgagtcccacaaagggcaagtggggcccgaggaagcctctctggggccag

SEQ ID NO: 159867 - DNA, 120 bp, Artificial Sequence
  ENSG00000107021_21 (sequence is synthesized)
gggtagctgagcttaaaggccctgggtcctgccagttccaggagggccatgtctgtgcctctgtgtacccctccacccgctgcgggctgagggaggtgcagggccttctctgacccctgc

SEQ ID NO: 159868 - DNA, 120 bp, Artificial Sequence
  ENSG00000107021_22 (sequence is synthesized)
ctgagctgttcccagggctggagcaggtgtaccctgagcaggggcagctggccactcccagttctcaccaagtcacctccctccttgtacaaggtttgcgtccggaagccgggtgccata

SEQ ID NO: 159869 - DNA, 120 bp, Artificial Sequence
  ENSG00000107021_23 (sequence is synthesized)
gtgaggaccctcgtcctccagactggctggcaggagtcaggccccagcagccctcctgcccccaaagctttccgagtctggtgggcaggacttctcgctgcccttccaagcccggctttg

SEQ ID NO: 159870 - DNA, 120 bp, Artificial Sequence
  ENSG00000107021_24 (sequence is synthesized)
ggccaggaaaggcttccccaggtggctcttctaccaggcttttcctttgatgccgcctggatttccgcacctgcctgtctcctctcccagagcacagtatttgggagactttgactattt

SEQ ID NO: 159871 - DNA, 120 bp, Artificial Sequence
  ENSG00000107021_25 (sequence is synthesized)
attcagactcctggctatgtattgcacattggcaagtgctctggggatgaggcatgggtataggaagggagaaaggagttggagacaagatcctcttcattttccaagatcaaagtcagc

SEQ ID NO: 159872 - DNA, 120 bp, Artificial Sequence
  ENSG00000107021_26 (sequence is synthesized)
ctcttctccccatgcttctaggaactgcctggttttcgagcaggtcctggctgagcgggctctgagttctgtactggaattgagtgtaaagatgggaagagaactgggctgactccagga

SEQ ID NO: 159873 - DNA, 120 bp, Artificial Sequence
  ENSG00000107021_27 (sequence is synthesized)
cctccaggatgaggcagaggcatgatgcttcctgctcacctgggccaccctctctccaggacttgtcagctggtggttcagccccttctccaaccccttcataagcttgggccactgcct

SEQ ID NO: 159874 - DNA, 120 bp, Artificial Sequence
  ENSG00000107021_28 (sequence is synthesized)
gggacccagcagacactgcccaggactctttagtgcactcactcttgtctgccccctaccttccctcctggaaccacactacttgaatcaccattactttgcctcgctggcagagttggg

SEQ ID NO: 159875 - DNA, 120 bp, Artificial Sequence
  ENSG00000107021_29 (sequence is synthesized)
tcaagtgccctctccttgaccttgagatgaaggtcaagagcacagggaccaggccttggttaggctgagctcccagcaggacaccgcctgcagaaaggacctgccctgataatgtccctt

SEQ ID NO: 159876 - DNA, 120 bp, Artificial Sequence
  ENSG00000107021_30 (sequence is synthesized)
ccccagattctcaagcagatgcccaagggaggtccccacagagccagagtgcctgaggcttcctgcttgagaacctgccccctggatcttggacacttacagattgagctgtatgaattc

SEQ ID NO: 159877 - DNA, 120 bp, Artificial Sequence
  ENSG00000107021_31 (sequence is synthesized)
agcgggtctcactccagagggtcagaacgtttgctttagttttttcatctgttttgttccttgagtcagtgctgttgatgacgagttgtcttgaataaatcatgtgttctttgcaatggg

SEQ ID NO: 159878 - DNA, 120 bp, Artificial Sequence
  ENSG00000107021_32 (sequence is synthesized)
gggggtccggaagtcaacaccatgtcaagtctgcacaagagccgaattgcagatttccaggatgtcctgaaggagccctcaattgcattggaaaagctgcgggaactcagctttagtggg

SEQ ID NO: 159879 - DNA, 80 bp, Artificial Sequence
  ENSG00000107036_0 (sequence is synthesized)
acactcggccccgtcagcttgggggtgccttcgtcgcgcagccttgcgtcggcccggcccggccaggccagcgggcagat

SEQ ID NO: 159880 - DNA, 120 bp, Artificial Sequence
  ENSG00000107036_1 (sequence is synthesized)
ggcggtgtgggaggtgggcgaccagcccggggccgctgagtgtgacggacgcaactgggggcgccgggggctccgcacggaccatgtattttctgagcggctggcccaagaggctgctgt

SEQ ID NO: 159881 - DNA, 120 bp, Artificial Sequence
  ENSG00000107036_2 (sequence is synthesized)
gccctctggggagcccggccgaggcgcctttccacgttcagtccgacccgcagagggctttcttcgccgtgctggccgcggcccgcctcagcatctggtacagccgacctagtgtgttaa

SEQ ID NO: 159882 - DNA, 120 bp, Artificial Sequence
  ENSG00000107036_3 (sequence is synthesized)
ttgtaacctacaaggagcctgcaaaatcatctactcagtttggatcctacaagcaagctgaatggaggccagatagtaccatgatagctgtatcaacggcaaatggatacatcttgtttt

SEQ ID NO: 159883 - DNA, 120 bp, Artificial Sequence
  ENSG00000107036_4 (sequence is synthesized)
ttcatattacatctacaagaggggacaagtacctttatgaaccagtgtatcccaaaggaagtccacaaatgaaggggacaccccattttaaggaagaacagtgtgctccagcattaaatt

SEQ ID NO: 159884 - DNA, 120 bp, Artificial Sequence
  ENSG00000107036_5 (sequence is synthesized)
tggagatgaggaaaatactggatttacaagcacccatcatgagtttgcagtctgtgttggaagatctcctggttgctacttctgatggacttcttcatcttattcactgggaaggaatga

SEQ ID NO: 159885 - DNA, 120 bp, Artificial Sequence
  ENSG00000107036_6 (sequence is synthesized)
caaatggaaggaaagccattaatctttgcacagtacccttttcagtagacctgcagtcatctagagtaggttcattcctgggcttcacagacgtacacatcagagacatggaatactgtg

SEQ ID NO: 159886 - DNA, 120 bp, Artificial Sequence
  ENSG00000107036_7 (sequence is synthesized)
ccacacttgatgggtttgctgttgtatttaatgatggtaaagttggatttattacaccagtgtcaagtagatttactgcagagcagcttcatggagtttggccacaagatgttgttgacg

SEQ ID NO: 159887 - DNA, 120 bp, Artificial Sequence
  ENSG00000107036_8 (sequence is synthesized)
gaacgtgtgtagcagtaaataacaagtatcgactaatggcatttggctgtgtgagtggttctgtgcaggtctatacaatagataacagcactggagccatgctgctatctcataaattag

SEQ ID NO: 159888 - DNA, 120 bp, Artificial Sequence
  ENSG00000107036_9 (sequence is synthesized)
agctaacagcaaaacagtatcctgacatttggaataaaacaggagctgttaaattgatgagatggtctcctgacaatagtgttgtaatagtgacctgggaatacggaggcctttctttat

SEQ ID NO: 159889 - DNA, 120 bp, Artificial Sequence
  ENSG00000107036_10 (sequence is synthesized)
ggagtgtttttggagcacagctgatttgtacacttggaggagattttgcttataggtctgatggcaccaaaaaagatccccttaagatcaactctatgagctggggtgcagaaggctatc

SEQ ID NO: 159890 - DNA, 120 bp, Artificial Sequence
  ENSG00000107036_11 (sequence is synthesized)
acctatgggtaatcagcggatttggttctcaaaacactgaaattgagtctgacctcaggagtgtagttaaacagcccagcatcctgttatttcagtttattaagagtgtactcactgtaa

SEQ ID NO: 159891 - DNA, 120 bp, Artificial Sequence
  ENSG00000107036_12 (sequence is synthesized)
acccttgtatgagtaaccaagagcaggtgttgcttcagggtgaggatcgcttgtacttgaactgtggagaggcttcacaaacccagaatcccaggagttcttcaacacactctgagcata

SEQ ID NO: 159892 - DNA, 120 bp, Artificial Sequence
  ENSG00000107036_13 (sequence is synthesized)
agcccagtcgagaaaagagcccatttgcagatggaggtttagagtctcagggattaagcactttacttggacatcggcattggcatgttgtacagatttccagcacctatctagagagca

SEQ ID NO: 159893 - DNA, 120 bp, Artificial Sequence
  ENSG00000107036_14 (sequence is synthesized)
attggcctatacggttttcagctattgataagcttggacagaatattgctgtggttggcaagtttggttttgcacattactctttactcaccaaaaaatggaaactttttggaaacatta

SEQ ID NO: 159894 - DNA, 120 bp, Artificial Sequence
  ENSG00000107036_15 (sequence is synthesized)
cccaggagcaaaatatgatcgtgacaggtggcttagcctggtggaatgattttatggtccttgcgtgttataacataaatgaccgtcaagaagagcttagagtatacttgcgaacatcaa

SEQ ID NO: 159895 - DNA, 120 bp, Artificial Sequence
  ENSG00000107036_16 (sequence is synthesized)
atctggacaatgcctttgctcatgtcaccaaagcacaagcagaaacattactgcttagtgtcttccaggacatggtaatagtatttagagcagactgttcaatatgcctttacagtattg

SEQ ID NO: 159896 - DNA, 120 bp, Artificial Sequence
  ENSG00000107036_17 (sequence is synthesized)
aaagaaaatctgatggtccaaatactactgctggtattcaagttcttcaggaggtttccatgtcacgctacattcctcaccctttcctggtggtatctgtcactctgacatcagtgagta

SEQ ID NO: 159897 - DNA, 120 bp, Artificial Sequence
  ENSG00000107036_18 (sequence is synthesized)
cagagaatggaatcaccttgaaaatgccacagcaggctcgtggtgcagagagcattatgttaaacctggcaggacagctcatcatgatgcagagggacaggtcaggcccacagatccggg

SEQ ID NO: 159898 - DNA, 120 bp, Artificial Sequence
  ENSG00000107036_19 (sequence is synthesized)
agaaggacagtaaccctaataaccaaaggaaacttctgccattctgtcctcctgttgtactagcccagtctgttgaaaatgtctggacaacgtgtcgagcaaataaacagaaacgtcacc

SEQ ID NO: 159899 - DNA, 120 bp, Artificial Sequence
  ENSG00000107036_20 (sequence is synthesized)
ttctggaggccctctggctgagctgtggtggtgcagggatgaaagtttggctccctctcttccctagggatcaccgcaagccccattccttcttgtcccagcggatcatgctgcctttcc

SEQ ID NO: 159900 - DNA, 120 bp, Artificial Sequence
  ENSG00000107036_21 (sequence is synthesized)
acatcaacatttacccgctagctgttctgtttgaagatgctttagtccttggtgctgtcaatgacactttgctctatgattctttatatactcggaacaatgctagagaacagctggagg

SEQ ID NO: 159901 - DNA, 120 bp, Artificial Sequence
  ENSG00000107036_22 (sequence is synthesized)
tgctcttccctttctgtgttgtggagagaacctctcagatctacctccaccacattctacgtcaacttctggtcagaaaccttggggagcaagccttgctcttggcccagtcctgtgcca

SEQ ID NO: 159902 - DNA, 120 bp, Artificial Sequence
  ENSG00000107036_23 (sequence is synthesized)
cattaccttacttccctcatgtgctggagctcatgctccatgaagtactggaagaagaagctacctcacgggagcccattcccgaccctctgcttcccactgtggcaaaatttatcactg

SEQ ID NO: 159903 - DNA, 120 bp, Artificial Sequence
  ENSG00000107036_24 (sequence is synthesized)
agttccccctcttcctgcagacagttgtccattgtgccaggaagaccgaatatgccctgtggaattacctttttgcagctgttggaaaccctaaggacttgtttgaggagtgtttgatgg

SEQ ID NO: 159904 - DNA, 120 bp, Artificial Sequence
  ENSG00000107036_25 (sequence is synthesized)
ctcaggatttggacacagctgcctcttaccttattatcttacagaatatggaagtccctgcagtaagtaggcaacatgctacccttctattcaacacagcactagaacaaggcaagtggg

SEQ ID NO: 159905 - DNA, 120 bp, Artificial Sequence
  ENSG00000107036_26 (sequence is synthesized)
acctttgtcgacacatgattcgatttcttaaagccattggctctggagaatctgagacacctccatccacacccacagctcaggaacccagttcaagtggtggatttgagttcttcagga

SEQ ID NO: 159906 - DNA, 120 bp, Artificial Sequence
  ENSG00000107036_27 (sequence is synthesized)
atcgaagcatcagtttatcccagtcagctgaaaatgttcctgccagtaaattcagtttacagaaaacactaagtatgccatctggtccctctggaaaaagatggagcaaagacagtgact

SEQ ID NO: 159907 - DNA, 120 bp, Artificial Sequence
  ENSG00000107036_28 (sequence is synthesized)
ggttaaaggaccttggctgctttgcagcccagctgggctttgaactaattagttggctatgcaaggaacgtacccgagccgcccgggtagacaactttgtaatagccctgaagagactcc

SEQ ID NO: 159908 - DNA, 120 bp, Artificial Sequence
  ENSG00000107036_29 (sequence is synthesized)
acaaagatttcctgtggccacttccaatcatcccagcctcttctatcagttctcctttcaaaaatggaaaataccgaactgtgggagagcagctgttaaagtctcaatcagctgacccat

SEQ ID NO: 159909 - DNA, 120 bp, Artificial Sequence
  ENSG00000107036_30 (sequence is synthesized)
ttttgaaccttgagatggatgctggcatctccaacatccagcgaagtcagagctggctcagcaacattggccccacccatcatgagatagacacagcttcatcccatggaccacaaatgc

SEQ ID NO: 159910 - DNA, 120 bp, Artificial Sequence
  ENSG00000107036_31 (sequence is synthesized)
aagatgccttcttgtcacctttatctaataaaggtgatgaatgcagtattggttcagccacagacttgactgaaagtagctccatggtggatggcgactggacaatggtggatgaaaatt

SEQ ID NO: 159911 - DNA, 120 bp, Artificial Sequence
  ENSG00000107036_32 (sequence is synthesized)
tctctacactcagtttaactcagtcagagctggagcacatttccatggagttggccagtaaagggcctcataaatcccaggtccagcttcggtatttgctacacattttcatggaggcag

SEQ ID NO: 159912 - DNA, 120 bp, Artificial Sequence
  ENSG00000107036_33 (sequence is synthesized)
ggtgcctagactggtgcatcgttataggcctgattcttagagaatcctcaataatcaatcagattttggttattacacagtcttcagaggtagatggagagatgttacagaacataaaga

SEQ ID NO: 159913 - DNA, 120 bp, Artificial Sequence
  ENSG00000107036_34 (sequence is synthesized)
cagggctccatgcagtggaccgatgggcctctacagactgtcctggatataagccatttttaaacatcattaagccacaactgcagaagctcagtgagataacagaagagcaggtccagc

SEQ ID NO: 159914 - DNA, 120 bp, Artificial Sequence
  ENSG00000107036_35 (sequence is synthesized)
cagatgccttccaaccaataactatgggtaagactccagaacagactagcccccgggcagaggagagcaggggctcctccagccatggaagcatcccccagggtgaagttggaagcagca

SEQ ID NO: 159915 - DNA, 120 bp, Artificial Sequence
  ENSG00000107036_36 (sequence is synthesized)
atatggtcagccggaaagaggaggacacagcccaagcagaggaggaagaaccttttcaggatgggacttacgactgttctgtgtcctaacagtgaggttccatcacaaaggggcagtatt

SEQ ID NO: 159916 - DNA, 120 bp, Artificial Sequence
  ENSG00000107036_37 (sequence is synthesized)
aattagcagcagcgtgcagctcagtacgttgtaacatagttggatgatttaacaggagaactcagttcagagactcttcggtaagtattagtagattttaactaattctttcttgtctaa

SEQ ID NO: 159917 - DNA, 120 bp, Artificial Sequence
  ENSG00000107036_38 (sequence is synthesized)
gaaatctttttgactccataaaaatgtgatataaagcatctttcataaaaaaattttaagctgcagtgaaaagtaaatattgtacagatgtacatgagaatattttggttttactcaaag

SEQ ID NO: 159918 - DNA, 120 bp, Artificial Sequence
  ENSG00000107036_39 (sequence is synthesized)
gttggtagctcttaaaccacaggaattgttttgccccaggtgagcttactttttcactacttacatcttctcacatttcccggttctgcattatgtccagattgctttttaaaaaataaa

SEQ ID NO: 159919 - DNA, 120 bp, Artificial Sequence
  ENSG00000107036_40 (sequence is synthesized)
tgctaaggtgcttgctatagtctgtcaggtacttgagctacctgtttgctcccttggatacagctggactctttaatcagtcctcctgaatagattgctaccctggggcacaatatgtgc

SEQ ID NO: 159920 - DNA, 120 bp, Artificial Sequence
  ENSG00000107036_41 (sequence is synthesized)
cagtgtgatggaaacattctccttggctttactagccagtcaaatcccagtccagaattgatggaagctatttacctgtgagttaatgtgcttgttttagcaagcttgattcccattaga

SEQ ID NO: 159921 - DNA, 120 bp, Artificial Sequence
  ENSG00000107036_42 (sequence is synthesized)
ccaatgtgggcagaggtctgagggggttcttctcaattttgctgttagataccactaaactattttgtattaaagaacagtatctttttgtgaatactcttgtgtaaatatattcaaagg

SEQ ID NO: 159922 - DNA, 120 bp, Artificial Sequence
  ENSG00000107036_43 (sequence is synthesized)
cactgttcatattttagggcttgtattataatttgcaaggttttaatgctggattctgcatgtctacacatacaaagacagggcttgctcctctgcaaaactgaggaagacaggtttatt

SEQ ID NO: 159923 - DNA, 120 bp, Artificial Sequence
  ENSG00000107036_44 (sequence is synthesized)
ggcttggtcatgaagtaacagaaatggtcacactgatcatgaaatgcagcaagttttgtgcaaattaacatagtctcttatttattgcttttgtaaattgaataaagatggacttctatg

SEQ ID NO: 159924 - DNA, 120 bp, Artificial Sequence
  ENSG00000107036_45 (sequence is synthesized)
taaatagactgctgaatcctgtattaccacggctactaaaaattagtgtgtaaagaatgcattcttcattgtaaacttaaagtattttatgtacttctagaaatgacttaaatttgtttt

SEQ ID NO: 159925 - DNA, 120 bp, Artificial Sequence
  ENSG00000107036_46 (sequence is synthesized)
catacattatgaaaacaactgcatactccttaattgctttaaacacccatccactgtatgtaattctaattaccttataacagtattaagacagcttgtttgtactgtgcaatttgaaca

SEQ ID NO: 159926 - DNA, 120 bp, Artificial Sequence
  ENSG00000107036_47 (sequence is synthesized)
aggaatgcaatgttattttttacaaaaaacaaacttgtttatttttataataacgatgtatttgatgtggaccaaattcgtaccactatctaaaatagcctcttttctcatagtgcagtt

SEQ ID NO: 159927 - DNA, 120 bp, Artificial Sequence
  ENSG00000107036_48 (sequence is synthesized)
gtagtttagaaacaaaacttggtcctctctccttgctttttaaagtaaatggctagatttagttgtcttagccaggtttcctttgaagagaaactcaaaaccattttgaaactgcttagt

SEQ ID NO: 159928 - DNA, 120 bp, Artificial Sequence
  ENSG00000107036_49 (sequence is synthesized)
tcagaatacatcgaagtatttaaaattactgagttgggtaatttactatcatttactttttacattacaagtgcaataatatttcacaaaatgaaactcccgaatgggtggagtatgtga

SEQ ID NO: 159929 - DNA, 120 bp, Artificial Sequence
  ENSG00000107036_50 (sequence is synthesized)
ttattggtacctggtccttctggtgctatttttatttaagtctttgtttcaaaccacctttccctgaatcttaaagataatgttttgcatgtgagtacatgcagcccagcaagaaactaa

SEQ ID NO: 159930 - DNA, 120 bp, Artificial Sequence
  ENSG00000107036_51 (sequence is synthesized)
actgaactctcttctcctatcctagtccattaaggagaagaaccagcattgcttttgtgtttggtgtgaatattcagtcaataaaaatgatttaccattataaagagctgtgatcttttc

SEQ ID NO: 159931 - DNA, 120 bp, Artificial Sequence
  ENSG00000107036_52 (sequence is synthesized)
aagtatctgaaataaaacactgtgctgctgagttcatctcaaacattcttgaaagcagggcaccagtataagttaactgtattcctgtgggttaggccgtgaatgaatcatttcttttat

SEQ ID NO: 159932 - DNA, 120 bp, Artificial Sequence
  ENSG00000107036_53 (sequence is synthesized)
acaatattcttttacaactaatagagataggaggcccccaggcaagaagtttggcaggtttacagaaaatttggtaatttatttgttatataccttaatttttaaaaacccatttttatt

SEQ ID NO: 159933 - DNA, 120 bp, Artificial Sequence
  ENSG00000107036_54 (sequence is synthesized)
gtggtgtttggttcacatatcaactgtttaagccataattttagccaatgaatttaaatattcagtataactatttgaggtttactagatgcatttattaataaattatttgctgaaacc

SEQ ID NO: 159934 - DNA, 120 bp, Artificial Sequence
  ENSG00000107036_55 (sequence is synthesized)
aaaacaagtcattgggggtgtgggaataaaatcaacctttgcttgtaattaaagttgctgctatttctgtaatgtgtatttttctccccttggtaaagggcaataaaaccattacacaaa

SEQ ID NO: 159935 - DNA, 120 bp, Artificial Sequence
  ENSG00000107036_56 (sequence is synthesized)
gtgctgctttccttaggcttggtgtccttccatgtcttttggtgaatcctgtcctttcacattaaggcctagttatggttcatgtgttacattttatttatttattatatattatttatt

SEQ ID NO: 159936 - DNA, 120 bp, Artificial Sequence
  ENSG00000107036_57 (sequence is synthesized)
aaacattagctagtttagtcatttagacttagaaggaattaagtaagtactccagttcatagtagtagcaggatagaatggtaataaatcaccacaaaactttataagaaaaatagtctg

SEQ ID NO: 159937 - DNA, 120 bp, Artificial Sequence
  ENSG00000107036_58 (sequence is synthesized)
taacaaaaaaataagcaaaaataagtaagaaagaaaactaaaaaaatgagcatcaaaatatatttcccaaagccaggaactttgaaagctattggacttgtttgcctctttgtgcatatt

SEQ ID NO: 159938 - DNA, 120 bp, Artificial Sequence
  ENSG00000107036_59 (sequence is synthesized)
ttaatagtatcgacaaattataggaatgtacttgactggaaagggagagatgacatcagcaggctaattgttgccacaagtgatagctgatggtgagagacagataactgttaaattcca

SEQ ID NO: 159939 - DNA, 120 bp, Artificial Sequence
  ENSG00000107036_60 (sequence is synthesized)
gcacaggcactgaagaagatactggtctaccatgccatgtggagataaagaatacaaaacaacctgtagtcctttgaagggtcgtgtgtgacagttcagttaagttggcattgacccagc

SEQ ID NO: 159940 - DNA, 120 bp, Artificial Sequence
  ENSG00000107036_61 (sequence is synthesized)
actctactgcagctatttgatgccagggatttaaaattttaggtatttagctacttattactaagtaacttgtgaaacatctcctaattgcacccttgaatttcaccttaattctgattc

SEQ ID NO: 159941 - DNA, 120 bp, Artificial Sequence
  ENSG00000107036_62 (sequence is synthesized)
acacccaaagaataggaatgaaggataaggtgtggagtaagtaaagatgaagccacacgatttggatcactgggacagatactgtatagaatgatacttttttccatagttgtccacctt

SEQ ID NO: 159942 - DNA, 120 bp, Artificial Sequence
  ENSG00000107036_63 (sequence is synthesized)
agaaagggccctcaggaattttaaacaaaatgcctgttggttctctttagagttagttcacttttatttcaagtgggtttttttctcagattctctgctcttcttcccaccctcctaaca

SEQ ID NO: 159943 - DNA, 120 bp, Artificial Sequence
  ENSG00000107036_64 (sequence is synthesized)
caaattacattggtcaaacatttatttccaattgataagtagataatgtctgctataatagaatttaagtctgtttttcatttgagaatctgaaggatgaatacctgatttgtaagtttt

SEQ ID NO: 159944 - DNA, 120 bp, Artificial Sequence
  ENSG00000107036_65 (sequence is synthesized)
atttcatttactttatttgattgtatgtgtattagccacagaatggaggcaaattcagcatctttctttaactctatgctgtttgttttagaggaagtccacaaatgaaggggacacccc

SEQ ID NO: 159945 - DNA, 120 bp, Artificial Sequence
  ENSG00000107036_66 (sequence is synthesized)
atttctctgctattttcatttccccatactttgaactattcattctacactgacctagcatcaatgccagttctgcctagccaggtctgtgttaccagagagccaagtagagcagaggat

SEQ ID NO: 159946 - DNA, 120 bp, Artificial Sequence
  ENSG00000107036_67 (sequence is synthesized)
cacattttgctattagttgatattcaaggaattattttcattccaaacttaggaatggataaaagccaactttttgtacatgagttggaatgcccactgtttgaccaaagatgtaaataa

SEQ ID NO: 159947 - DNA, 120 bp, Artificial Sequence
  ENSG00000107036_68 (sequence is synthesized)
agtagaacctatgtctctaagtcttgtgaccttgaagtctaattcaaaaatctaatcatacttggattataaagaagttgagaactgcctgaatataaaagctaccatgcttatgttatt

SEQ ID NO: 159948 - DNA, 120 bp, Artificial Sequence
  ENSG00000107036_69 (sequence is synthesized)
gtgggaaggagttctggaatcagatagacatggacctcaaagtaagctgacagaactcattccaggggaacagtaaggccaccttctaaactaggagaggacaaactgaaagtgtatatt

SEQ ID NO: 159949 - DNA, 120 bp, Artificial Sequence
  ENSG00000107077_0 (sequence is synthesized)
cggcgcccaggaggacgtgtggcgcgtggactacatcaggtccagccctgcgggaccccagccagcgcttccgggcaaggttctgtgcacctgttttctccttctacgcgagtatctttc

SEQ ID NO: 159950 - DNA, 120 bp, Artificial Sequence
  ENSG00000107077_1 (sequence is synthesized)
ccctccggaaagaatgggatatgcctgtgtccaaaggacaagaagatgcgcgccagcaagcctaagttaaccacagcgcggaagttgagcccaaagcaagagcgtgccgggcacctttaa

SEQ ID NO: 159951 - DNA, 120 bp, Artificial Sequence
  ENSG00000107077_2 (sequence is synthesized)
gctgtttgtaagcccacgtgactcaccaagtgcgggccccagcggtcacgtgacggcgcgcgcgccctcgcgcagggagagccggcggtgcgcgcgccttcgccgctgcctcccacccac

SEQ ID NO: 159952 - DNA, 120 bp, Artificial Sequence
  ENSG00000107077_3 (sequence is synthesized)
cccctcgacgggagggtgaggcgcggcgcagtgatcgggcggccggggtcctgtgcgcgtgcgcagcgaacagctgtcacctagtgcggaacaagtctcccaaatttcccaaatctccct

SEQ ID NO: 159953 - DNA, 120 bp, Artificial Sequence
  ENSG00000107077_4 (sequence is synthesized)
gggccggaggccactgtcttctcttcctcctccaccgagtcgtgctctcgccccaacccgcgcgccagacactgccctaaccatcatggaggtggccgaggtggaaagtcctctgaaccc

SEQ ID NO: 159954 - DNA, 120 bp, Artificial Sequence
  ENSG00000107077_5 (sequence is synthesized)
cagctgtaagataatgaccttcagaccctccatggaggagttccgggagttcaacaaataccttgcatacatggagtctaaaggagcccatcgtgcgggtcttgcaaaggtgattcctcc

SEQ ID NO: 159955 - DNA, 120 bp, Artificial Sequence
  ENSG00000107077_6 (sequence is synthesized)
taaggagtggaagccaagacagtgctatgatgacattgataatttgctcattccagcaccaattcagcagatggtcacagggcagtcaggactgttcactcagtacaacatccagaaaaa

SEQ ID NO: 159956 - DNA, 120 bp, Artificial Sequence
  ENSG00000107077_7 (sequence is synthesized)
agcgatgactgtgaaggagttcaggcagctggccaacagtggcaaatattgtactccaagatacttggattacgaagatttggagcgcaagtactggaagaacttaacttttgtggcacc

SEQ ID NO: 159957 - DNA, 120 bp, Artificial Sequence
  ENSG00000107077_8 (sequence is synthesized)
tatctatggtgcagatattaatgggagcatatatgatgagggtgtggatgaatggaacatagctcgcctcaatacagtcttggatgtggttgaagaagagtgtggcatttctattgaggg

SEQ ID NO: 159958 - DNA, 120 bp, Artificial Sequence
  ENSG00000107077_9 (sequence is synthesized)
tgtaaataccccatatctctattttggcatgtggaagaccacgtttgcatggcacaccgaagacatggacctctatagcattaattatctccactttggagagcccaagtcttggtatgc

SEQ ID NO: 159959 - DNA, 120 bp, Artificial Sequence
  ENSG00000107077_10 (sequence is synthesized)
tatacctccggagcatggaaaacgacttgaaagactagctcaaggttttttcccaagcagctcccaagggtgtgatgcatttcttcgccacaagatgacattgatttctccatcagtatt

SEQ ID NO: 159960 - DNA, 120 bp, Artificial Sequence
  ENSG00000107077_11 (sequence is synthesized)
gaagaaatatggtattccctttgacaagataacccaggaggctggagaattcatgatcactttcccatatggctaccatgctggttttaatcatggtttcaactgtgcagaatctacaaa

SEQ ID NO: 159961 - DNA, 120 bp, Artificial Sequence
  ENSG00000107077_12 (sequence is synthesized)
ttttgctactgtcagatggattgactatggaaaagttgccaaattgtgcacttgcaggaaagacatggtgaagatttcaatggatatctttgtgaggaaatttcagccagacagatatca

SEQ ID NO: 159962 - DNA, 120 bp, Artificial Sequence
  ENSG00000107077_13 (sequence is synthesized)
gctttggaaacaaggaaaggatatatacaccattgatcacacgaagcctactccagcatccacccctgaagtaaaagcatggctgcagaggaggaggaaagtaagaaaagcatcccgaag

SEQ ID NO: 159963 - DNA, 120 bp, Artificial Sequence
  ENSG00000107077_14 (sequence is synthesized)
cttccagtgtgctaggtctacctctaaaaggcctaaggctgatgaggaagaggaagtgtcagatgaagtcgatggggcagaggtccctaaccccgactcagtcacagatgacctcaaggt

SEQ ID NO: 159964 - DNA, 120 bp, Artificial Sequence
  ENSG00000107077_15 (sequence is synthesized)
cagtgaaaagtcagaagcagcagtgaagctgaggaacacagaagcatcttcagaagaagagtcatctgctagcaggatgcaggtggagcagaatttatcagatcatatcaaactctcagg

SEQ ID NO: 159965 - DNA, 120 bp, Artificial Sequence
  ENSG00000107077_16 (sequence is synthesized)
aaacagctgcttaagtacatctgtaacagaagacataaaaactgaggatgacaaagcttatgcatatagaagtgtaccttctatatccagtgaggctgatgattccattccattgtctag

SEQ ID NO: 159966 - DNA, 120 bp, Artificial Sequence
  ENSG00000107077_17 (sequence is synthesized)
tggctatgagaagcccgagaaatcagacccatccgagctttcatggccaaagtcacctgagtcatgctcatcagtggcagagagtaatggtgtgttaacagagggagaagagagtgatgt

SEQ ID NO: 159967 - DNA, 120 bp, Artificial Sequence
  ENSG00000107077_18 (sequence is synthesized)
ggagagccatgggaatggccttgaacctggggaaatcccagcggtccccagtggagagagaaatagcttcaaagtccccagtatagcagagggagagaacaaaacctctaagagttggcg

SEQ ID NO: 159968 - DNA, 120 bp, Artificial Sequence
  ENSG00000107077_19 (sequence is synthesized)
aggaggaagtggaagaaacagagtcttgggcgaaacctctcatccacctttggcagacgaagtcccctaacttcgcagctgagcaagagtataatgcaacagtggccaggatgaagccac

SEQ ID NO: 159969 - DNA, 120 bp, Artificial Sequence
  ENSG00000107077_20 (sequence is synthesized)
actgtgccatctgcactctgctcatgccgtaccacaagccagatagcagcaatgaagaaaatgatgctagatgggagacaaaattagatgaagtcgttacatcggagggaaagactaagc

SEQ ID NO: 159970 - DNA, 120 bp, Artificial Sequence
  ENSG00000107077_21 (sequence is synthesized)
ccctcataccagagatgtgttttatttatagtgaagaaaatatagaatattctccacccaatgccttccttgaagaggatggaacaagtctccttatttcctgtgcaaagtgctgcgtac

SEQ ID NO: 159971 - DNA, 120 bp, Artificial Sequence
  ENSG00000107077_22 (sequence is synthesized)
gggttcatgcaagttgttatggtattccttctcatgagatctgtgatggatggctgtgtgcccggtgcaaaagaaatgcgtggacagcagaatgctgtctctgcaatttgagaggaggtg

SEQ ID NO: 159972 - DNA, 120 bp, Artificial Sequence
  ENSG00000107077_23 (sequence is synthesized)
ctcttaagcaaacgaagaacaataagtgggcccatgtcatgtgcgccgttgcggtcccagaagttcgattcactaatgtcccagaaaggacacaaatagatgtaggcagaatacctttac

SEQ ID NO: 159973 - DNA, 120 bp, Artificial Sequence
  ENSG00000107077_24 (sequence is synthesized)
agaggttaaaattgaaatgcatcttctgcagacaccgggttaagagggtctctggagcctgcatccagtgttcctacggtcgctgcccggcctccttccatgtcacttgtgcccatgctg

SEQ ID NO: 159974 - DNA, 120 bp, Artificial Sequence
  ENSG00000107077_25 (sequence is synthesized)
ctggggtactgatggagcctgatgactggccttatgtggtgaacattacatgctttcgacataaggtcaaccccaacgtgaagtccaaggcttgcgagaaggtcatttccgtgggtcaaa

SEQ ID NO: 159975 - DNA, 120 bp, Artificial Sequence
  ENSG00000107077_26 (sequence is synthesized)
cggtcatcacgaagcatcggaacacccggtattacagttgcagagtgatggctgtgacatcgcagaccttctatgaggtcatgtttgatgatggctcctttagcagagacacatttcctg

SEQ ID NO: 159976 - DNA, 120 bp, Artificial Sequence
  ENSG00000107077_27 (sequence is synthesized)
aggatatcgtgagccgagactgtctgaagctgggcccacctgctgagggagaagtcgtccaagtcaagtggcccgatggcaaactctatggagcaaaatattttggatcaaatattgccc

SEQ ID NO: 159977 - DNA, 120 bp, Artificial Sequence
  ENSG00000107077_28 (sequence is synthesized)
acatgtaccaggttgagtttgaagatggatcccagatagcaatgaagagagaggacatctacactttagatgaagagttacccaagagagtgaaagctcgattttccacagcctctgaca

SEQ ID NO: 159978 - DNA, 120 bp, Artificial Sequence
  ENSG00000107077_29 (sequence is synthesized)
tgcgatttgaagacacgttttatggagcagacattatccaaggggagagaaagagacaaagagtgctgagctccaggtttaagaatgaatatgtggccgaccctgtataccgcacttttt

SEQ ID NO: 159979 - DNA, 120 bp, Artificial Sequence
  ENSG00000107077_30 (sequence is synthesized)
tgaagagctctttccagaagaagtgccagaagagacagtagtctgcatacatcgctgcaggccacagagcagcttgggttggaagagagaagatgaagggacatccttggggctgtgccg

SEQ ID NO: 159980 - DNA, 120 bp, Artificial Sequence
  ENSG00000107077_31 (sequence is synthesized)
tgagttttgctggcataggtgacagggtgtgtctctgacagtggtaaatcgggtttccagagtttggtcaccaaaaatacaaaatacacccaatgaattggacgcagcaatctgaaatca

SEQ ID NO: 159981 - DNA, 120 bp, Artificial Sequence
  ENSG00000107077_32 (sequence is synthesized)
tctctagtcttgctttcacttgtgagcagttgtcttctatgatcccaaagaagttttctaagtgaaaggaaatactagtgaatcacccacaaggaaaagccactgccacagaggaggcgg

SEQ ID NO: 159982 - DNA, 120 bp, Artificial Sequence
  ENSG00000107077_33 (sequence is synthesized)
gtccccttgtgcggcttagggccctgtcaggaaacacacggggacctctctctctagctccagcaggtggcacctcggtacccagcgggtagggcgataatttatatattttccacagtc

SEQ ID NO: 159983 - DNA, 120 bp, Artificial Sequence
  ENSG00000107077_34 (sequence is synthesized)
agggaaggactctcacttatttgtttcaaattgcagtttttataaaacatttttaaaacacaaatggcatgtatgctaatgagatttacccgtgtgctatctgtatttcccttgtacaga

SEQ ID NO: 159984 - DNA, 120 bp, Artificial Sequence
  ENSG00000107077_35 (sequence is synthesized)
acttttacatttttgaatattcctattacttttgattgtgtctgatgggaactgagttgttggcctttgtgaaatgaaatttttggctcttgagaaagaattcttatgaattgttatgcg

SEQ ID NO: 159985 - DNA, 120 bp, Artificial Sequence
  ENSG00000107077_36 (sequence is synthesized)
aattttatatatttaaagagggagatctggggctgttatttttaaacactttttttcataatacatattccgagtagatatttataaaatatatgtttctttcattatgtgtttgtaaaa

SEQ ID NO: 159986 - DNA, 120 bp, Artificial Sequence
  ENSG00000107077_37 (sequence is synthesized)
ttagagtttaaataaatatgctttgatgcatagttttgaactaatgtaacatgatttttcttttttaaaacagcctgaaaatgtactagtgtttaaaaataaagatttccattttctcca

SEQ ID NO: 159987 - DNA, 120 bp, Artificial Sequence
  ENSG00000107077_38 (sequence is synthesized)
catacttgggcttttggattaattctaaaaaaagccaatgcaacattttccttagtggaacctattgaatgcaaacttcaaattcaaccaaaatcggggaaattaatgcatgtgctttac

SEQ ID NO: 159988 - DNA, 120 bp, Artificial Sequence
  ENSG00000107077_39 (sequence is synthesized)
ttttcttctaatgaagtcacatgatgcttctttgtgttgacatttattggtgcacaaaaatacttactgaatgtgtgctctgtgtaaaacaccaggagcaaacaaagataccatcaaggc

SEQ ID NO: 159989 - DNA, 120 bp, Artificial Sequence
  ENSG00000107077_40 (sequence is synthesized)
atttgcaatcttgttagtagaagcaacattaaaagtattcaggagtagatcaaaggggactcggcataattgaatgtctgtctattcttttataggtttttcatggattgactaccttct

SEQ ID NO: 159990 - DNA, 120 bp, Artificial Sequence
  ENSG00000107077_41 (sequence is synthesized)
gtctcagaaagttactgatgtttgtgtcagttcatcattaagctaaactctgactttcataataaaagggataaacaaagcctaaatgctagttgtgggaatactaaagcagttttttaa

SEQ ID NO: 159991 - DNA, 120 bp, Artificial Sequence
  ENSG00000107077_42 (sequence is synthesized)
aaaggaaatagtagtttcatgccctcacataccattaaaagatgaacaaacatggacaaatattcaaaactgcagtcattgaaaaatataattcacaataatttagacttcatattattg

SEQ ID NO: 159992 - DNA, 120 bp, Artificial Sequence
  ENSG00000107077_43 (sequence is synthesized)
tatcataaaatattcagtggaccctgaaatgaagtcagttttattcatttagaattatatctattgtgtctgtgaaatgataaatcctaaatagagaaatttgaatggatggggtttttc

SEQ ID NO: 159993 - DNA, 120 bp, Artificial Sequence
  ENSG00000107077_44 (sequence is synthesized)
tgactaaaatgaaattttttttctgaataattcagtttagtgagtgcttatgatatacttgtctgcagtgatagagtcactatagattatttggttattttggaaaaaccaagggttttc

SEQ ID NO: 159994 - DNA, 120 bp, Artificial Sequence
  ENSG00000107077_45 (sequence is synthesized)
ttaaatcagggatgtccaatctttttgcatccctgggccatacttgaagaagaagaattgtctttggcctcacataaactacactaacaatagctgatgagctactaaaaaaaaaaaaaa

SEQ ID NO: 159995 - DNA, 120 bp, Artificial Sequence
  ENSG00000107077_46 (sequence is synthesized)
ctaagaccgtgtctggattttctcctgttttagactacctcccagacataatgtgctttattctgtaatatgactcattgttgacatgtctagaccgtgagttccttgagggcagggatt

SEQ ID NO: 159996 - DNA, 120 bp, Artificial Sequence
  ENSG00000107077_47 (sequence is synthesized)
gttaaaattgggaaggctgggaatctagacacagcaacagtaacaacaacaacaataacaatgaaggctcactgtgaaaacatcaattcattaggaaagttacatcccctccgccactgt

SEQ ID NO: 159997 - DNA, 120 bp, Artificial Sequence
  ENSG00000107077_48 (sequence is synthesized)
ttcagatgctgtttctcattctccatgggagcagccagcatcgtgtttaggatggggatacaatagcctgagctcctgattgagtcagaccctggactttcccttttgtatctgtcattt

SEQ ID NO: 159998 - DNA, 120 bp, Artificial Sequence
  ENSG00000107077_49 (sequence is synthesized)
tcctctggatcctcacacctttgtgtttaatttttttaaatttcatttgttgacttcctatgtggggtaaaatgacttcctttgattaatgtactttctgtatcctagagtttccctttc

SEQ ID NO: 159999 - DNA, 120 bp, Artificial Sequence
  ENSG00000107077_50 (sequence is synthesized)
cctttgtgatttagtccaacgtgtcctactacagcctcaaaaattgtcattggaatcaaaagctttccaaggtgcatcaggttaatgatttggatgcatcctgaggttgtctcctgtagc

SEQ ID NO: 160000 - DNA, 120 bp, Artificial Sequence
  ENSG00000107077_51 (sequence is synthesized)
atggaggcattataataggagtctcagaagttacaccatttttctacagcacatcacaggcccagaggcttgaatctaagagaatccactctatgtctgtcagcctgaatccttccttct

SEQ ID NO: 160001 - DNA, 120 bp, Artificial Sequence
  ENSG00000107077_52 (sequence is synthesized)
tgctgcacaacaaagcaactgaacgtattttgagtttaggtgaaaactatcactcattcatcaaagttctatctgggtgatatatgctatcgaaacagatgtggacactgggctgacaga

SEQ ID NO: 160002 - DNA, 120 bp, Artificial Sequence
  ENSG00000107077_53 (sequence is synthesized)
tgttgagaacggacctgttgctgaagctcatgttatcacacatgctgtgggaagagaggtcattggcattcaagatgcaacacctacaatatggtgaattaaagatgccatttgcatgga

SEQ ID NO: 160003 - DNA, 120 bp, Artificial Sequence
  ENSG00000107077_54 (sequence is synthesized)
tcactttcccatatggctaccatgctggttttaatcatggtttcaactgtgcagaatctacaaattttgctactgtcagatggattgactatggaaaagttgccaaattggagggcaggg

SEQ ID NO: 160004 - DNA, 120 bp, Artificial Sequence
  ENSG00000107077_55 (sequence is synthesized)
catgcatgcagccatgtgaactgagagtgagagggaaatggatgagatgcttaatgtcagatctatgccactgccctcatgcttgacgttgtggcagccaagccagagatggccatgcgc

SEQ ID NO: 160005 - DNA, 120 bp, Artificial Sequence
  ENSG00000107077_56 (sequence is synthesized)
cagtactgtgttgacgaggaagatggcagcctctttgatatgagatagggctcatctgcatgttacgtgtagtggcatgtcactgctgccactgctcttctgctaccaggatggcttgaa

SEQ ID NO: 160006 - DNA, 120 bp, Artificial Sequence
  ENSG00000107077_57 (sequence is synthesized)
tgcaatataggctgttccatgtgtgctttccctccgttatgaaacttcttcctgtggggtgagatgctgcagtgtgtgtcactttattcacttgaatcagaattcagctttgtatattga

SEQ ID NO: 160007 - DNA, 120 bp, Artificial Sequence
  ENSG00000107077_58 (sequence is synthesized)
atcccaatttttatggttacatctgaagagataatcacctatttgatattaactgtagaatcagtctttgaaatttataatctgaagcattactaactgcattaaagaacattaactgtt

SEQ ID NO: 160008 - DNA, 120 bp, Artificial Sequence
  ENSG00000107077_59 (sequence is synthesized)
tgtaagtttgaaattattcttcaatattaagttaaaaattttttttttaaatcttggccaaataaatgattgtttttcaaatgaatattttttattttacgtcctttcttttcctgttct

SEQ ID NO: 160009 - DNA, 120 bp, Artificial Sequence
  ENSG00000107077_60 (sequence is synthesized)
gctcatgctgctttcaatctcctggcatcaagcagtcctcccaccttggcctcccgaagttctggtacaagtgggagccaccatgcctgggcagaccctcagttctaaaaccgtcttggc

SEQ ID NO: 160010 - DNA, 120 bp, Artificial Sequence
  ENSG00000107077_61 (sequence is synthesized)
cgttgtaacctggcaaatgttcaggcttctgagaagaaggttgagctgatgggtcatccagatcctggcctgaaagttgcatgtctgagtgcttgaaaataaaataaaactcaatcttaa

SEQ ID NO: 160011 - DNA, 120 bp, Artificial Sequence
  ENSG00000107077_62 (sequence is synthesized)
tcctcctttagggcacagataaataacattttacatttatgggtcttaatcatattcattcaataactgggaggtaagcctcctgtgagctgtggctcacatagtgataatttagcacat

SEQ ID NO: 160012 - DNA, 120 bp, Artificial Sequence
  ENSG00000107077_63 (sequence is synthesized)
gacagttttgttaccatttaagcagtttagaagtgttcttttgttgtgcttttgggtgatccataattcctcaaaggacaacaggaaatattcatcagtaggatttctgctgctggtatt

SEQ ID NO: 160013 - DNA, 120 bp, Artificial Sequence
  ENSG00000107077_64 (sequence is synthesized)
tttcaaactgaagctagataatcgtacaaatacctgaaattgttcagtagtaacatggtatgtggttatctggctgatcttttcattacattaaaactttttaaagcaaaaatacattat

SEQ ID NO: 160014 - DNA, 120 bp, Artificial Sequence
  ENSG00000107077_65 (sequence is synthesized)
aaaaatgtttggaaaacaggaaatatgatgcatcatactgacaccttaaagcagaagcagtattttagatatatttttccagtactttccctcaatcattaaaaaaatgttatatttgaa

SEQ ID NO: 160015 - DNA, 120 bp, Artificial Sequence
  ENSG00000107077_66 (sequence is synthesized)
agtctatgaaactgtacactgtggtcttgggctgttattttatctcctttagaagaaacaaagagcagcagcacagtaaaggaagagaagtccaaggcttgcgagaaggtcatttccgtg

SEQ ID NO: 160016 - DNA, 120 bp, Artificial Sequence
  ENSG00000107077_67 (sequence is synthesized)
attctggttattttagtaggaaccctacgatcctgtgcagcatttatttattcttcctcactggcgccatgtgcctctcaccacagcaattcacttcaggctcgatacatttattttaca

SEQ ID NO: 160017 - DNA, 120 bp, Artificial Sequence
  ENSG00000107077_68 (sequence is synthesized)
tagccaatattaccaattttagctgaatttgtctgttttgagattaatgtggagcaatttaccctgataggtaatttgatgcgacgtgtgtttgctttttatcttgaggcctccagttgg

SEQ ID NO: 160018 - DNA, 120 bp, Artificial Sequence
  ENSG00000107077_69 (sequence is synthesized)
tgttttgcaagattttccagtggcatcatgtggctccatgttaggtagactcagatctctccctgtttgcgatcagtttgtggcttagaaaacagcactttacagaagggagtgtctgat

SEQ ID NO: 160019 - DNA, 120 bp, Artificial Sequence
  ENSG00000107077_70 (sequence is synthesized)
atggctgacatgatggtctgtgacctgaaagttgttgaatagttggagtgttctgcattcatgtggaagaggctaaaggatgtttgatgaagcactatgggctgccctggaagaggactg

SEQ ID NO: 160020 - DNA, 120 bp, Artificial Sequence
  ENSG00000107077_71 (sequence is synthesized)
tattaacattttgtatatatcctttacctatatatttattatatattttataatattatatatctttccaaaattggggccatgctctgttaataatctgacaatcagttttgagtgttt

SEQ ID NO: 160021 - DNA, 120 bp, Artificial Sequence
  ENSG00000107077_72 (sequence is synthesized)
ctgtagcttgtgtccacttttttgatattaactaagtaacaccataattttacatctttgcccagacttatgatgcttattttctgtcttttttttttccctgatatttattttctgctt

SEQ ID NO: 160022 - DNA, 120 bp, Artificial Sequence
  ENSG00000107077_73 (sequence is synthesized)
atttagagtggtagtgagtggaagaaccttaggaacatggagtcaaacttcggcatcttataagaggtagacctgaggtgcagaactaactcaggtgttgatatttccccctgtagttta

SEQ ID NO: 160023 - DNA, 120 bp, Artificial Sequence
  ENSG00000107077_74 (sequence is synthesized)
ccgcaatgatcgtcaaagtgtttgttagtaggtcaggaccaacattttaaaatgaggtggtaaaatagaataaaaagtattatagtgcttcctctgtggtaagggcaaatattcactcat

SEQ ID NO: 160024 - DNA, 120 bp, Artificial Sequence
  ENSG00000107077_75 (sequence is synthesized)
gacatgtgtgagtatgtgtgtatgtgtgtatatagtgtcactatctgaaatatataactcactgtgggttacattcaagaaaagtttgagaaatactaatttggacagtcagtgtctttg

SEQ ID NO: 160025 - DNA, 120 bp, Artificial Sequence
  ENSG00000107077_76 (sequence is synthesized)
ataactgtgttaattcacagcactaaagaagccagcgctggaaggaggcagtatccaatcctgagttcagaatacacaccaggagaacatcttgagcattgttctgtcatggatggaaaa

SEQ ID NO: 160026 - DNA, 120 bp, Artificial Sequence
  ENSG00000107077_77 (sequence is synthesized)
actattggcattcttaatggttatatcattctttttcatatttctgctggtaaaagtatgagttggtatattcatccttttttcaccactttcatgtagtatccgtggagagcaggtctg

SEQ ID NO: 160027 - DNA, 120 bp, Artificial Sequence
  ENSG00000107077_78 (sequence is synthesized)
gttttttttgttggtttgtttgtttggggtccagttgaggagtcatgatggggttcctttcacatgtttggattttacttactttaagatctagtttataaaaacttaatttgaaagtct

SEQ ID NO: 160028 - DNA, 120 bp, Artificial Sequence
  ENSG00000107099_0 (sequence is synthesized)
gacagacgaggtttgcgcttggctgggcatgttccgcggctactctgcggcgcgccaggcccccgctttccgcaccccgcgaccctagaagccaccgaaccgccggcgggccatggccac

SEQ ID NO: 160029 - DNA, 120 bp, Artificial Sequence
  ENSG00000107099_1 (sequence is synthesized)
tctgccgagcgcagagcgccgcgcgttcgcgctcaagatcaacaggtattcttcagcggaaataaggaaacagtttactctcccaccaaaccttggccagtaccatcgacagagcataag

SEQ ID NO: 160030 - DNA, 120 bp, Artificial Sequence
  ENSG00000107099_2 (sequence is synthesized)
tacctctggcttcccctctcttcaactacctcagttttatgaccctgtggagccagtggactttgaaggacttctgatgacacacctgaacagcctggatgtgcagcttgcccaggagct

SEQ ID NO: 160031 - DNA, 120 bp, Artificial Sequence
  ENSG00000107099_3 (sequence is synthesized)
cggggacttcactgatgacgacttggacgtggtgttcacgccaaaggaatgtaggactttgcagccctctttgccggaggaaggggttgaactggaccctcatgtcagggactgtgttca

SEQ ID NO: 160032 - DNA, 120 bp, Artificial Sequence
  ENSG00000107099_4 (sequence is synthesized)
gacctacatccgtgagtggctaatcgtgaaccggaaaaaccaaggaagtccagaaatctgtggctttaaaaagactggatctcgaaaagattttcacaagacgcttccgaaacagacgtt

SEQ ID NO: 160033 - DNA, 120 bp, Artificial Sequence
  ENSG00000107099_5 (sequence is synthesized)
tgagtcggaaaccttggagtgcagtgaacccgctgctcaggcaggcccccgccacttaaacgtgctgtgcgacgtgtctgggaaaggccccgtcactgcctgtgactttgacctccgcag

SEQ ID NO: 160034 - DNA, 120 bp, Artificial Sequence
  ENSG00000107099_6 (sequence is synthesized)
cctgcagcctgacaagcggctagaaaacctcctgcagcaagtgagtgccgaggactttgagaagcagaacgaggaggcccggaggaccaataggcaggccgagctctttgccctttaccc

SEQ ID NO: 160035 - DNA, 120 bp, Artificial Sequence
  ENSG00000107099_7 (sequence is synthesized)
atcagtggacgaggaggatgctgtggaaatacgtccagtaccagaatgtcccaaggaacacctgggcaacagaatattggtcaagttgctgaccttgaagttcgagattgaaattgagcc

SEQ ID NO: 160036 - DNA, 120 bp, Artificial Sequence
  ENSG00000107099_8 (sequence is synthesized)
cctgtttgccagcattgccctctacgatgttaaagaaaggaaaaagatctcagaaaattttcactgtgacctgaactctgaccagttcaaaggatttctgcgagctcacacgccttcagt

SEQ ID NO: 160037 - DNA, 120 bp, Artificial Sequence
  ENSG00000107099_9 (sequence is synthesized)
ggccgcatcaagtcaggcgagatctgcagtcttctcagtcacctacccgtcctcagacatctacctggtagtcaagattgaaaaagtcctgcagcagggagagattggagactgtgcaga

SEQ ID NO: 160038 - DNA, 120 bp, Artificial Sequence
  ENSG00000107099_10 (sequence is synthesized)
gccctacacggttatcaaagaaagtgatggtggaaagagtaaagaaaagattgaaaaactaaaactccaagctgaatccttctgccagcgtttggggaaataccggatgccctttgcctg

SEQ ID NO: 160039 - DNA, 120 bp, Artificial Sequence
  ENSG00000107099_11 (sequence is synthesized)
ggcacccataagcttatcaagcttcttcaatgtctccacccttgagagggaggtaactgatgtggactctgtggttgggagaagctcagtgggtgaacggaggacattggcccaatctag

SEQ ID NO: 160040 - DNA, 120 bp, Artificial Sequence
  ENSG00000107099_12 (sequence is synthesized)
aaggctttctgaaagagccctctccttggaggaaaatggggttggatccaacttcaaaacctccactctgagcgttagcagctttttcaagcaggaaggagatcgccttagcgatgaaga

SEQ ID NO: 160041 - DNA, 120 bp, Artificial Sequence
  ENSG00000107099_13 (sequence is synthesized)
cttattcaagtttttagctgactacaaaagatcatcatccttacagagacgagtcaagtcaattccaggcttgctaagactggagatttctacagctccagagatcatcaattgctgtct

SEQ ID NO: 160042 - DNA, 120 bp, Artificial Sequence
  ENSG00000107099_14 (sequence is synthesized)
gactcctgaaatgctgcccgtgaaaccctttcctgaaaaccggacacgcccgcacaaagagattttggaatttccaacacgagaagtatatgtccctcacactgtgtacagaaaccttct

SEQ ID NO: 160043 - DNA, 120 bp, Artificial Sequence
  ENSG00000107099_15 (sequence is synthesized)
ctatgtctacccacagaggctgaactttgtaaacaaactagcatcagcccggaacattacaataaagatccagtttatgtgtggagaagatgctagcaatgcgatgccggtcatctttgg

SEQ ID NO: 160044 - DNA, 120 bp, Artificial Sequence
  ENSG00000107099_16 (sequence is synthesized)
aaaatccagcgggcctgaatttctgcaggaagtgtacacagctgttacataccataataagtctcctgacttttatgaagaagtgaaaattaagctccccgctaagctcacagtaaatca

SEQ ID NO: 160045 - DNA, 120 bp, Artificial Sequence
  ENSG00000107099_17 (sequence is synthesized)
ccacctcctgttcaccttctaccatatcagctgtcagcagaagcaaggagcctccgtggaaactctcctgggatattcatggctgccaattctcttaaatgaacgtcttcaaactggatc

SEQ ID NO: 160046 - DNA, 120 bp, Artificial Sequence
  ENSG00000107099_18 (sequence is synthesized)
ctactgtctcccagttgccttggaaaaattgccacccaactactccatgcattctgctgagaaagtcccattacagaatcctcccattaagtgggctgaaggacataagggagtatttaa

SEQ ID NO: 160047 - DNA, 120 bp, Artificial Sequence
  ENSG00000107099_19 (sequence is synthesized)
tattgaagtgcaagctgtttcttctgtacacacccaggacaaccacctggagaagttcttcaccctctgccactccctggagagccaggtgaccttccccatccgcgtgctggatcagaa

SEQ ID NO: 160048 - DNA, 120 bp, Artificial Sequence
  ENSG00000107099_20 (sequence is synthesized)
aatcagcgagatggcgctggagcatgagctgaagctcagcatcatctgcctgaactcctcccgcctggagccgctcgtgctcttcctgcacctggtgctggacaagctcttccagctgtc

SEQ ID NO: 160049 - DNA, 120 bp, Artificial Sequence
  ENSG00000107099_21 (sequence is synthesized)
cgtgcagcccatggtcatcgctggccagacagccaacttctcccagtttgccttcgagtccgtggtggccatcgccaacagtctgcacaacagcaaggacctgagcaaggaccagcatgg

SEQ ID NO: 160050 - DNA, 120 bp, Artificial Sequence
  ENSG00000107099_22 (sequence is synthesized)
gaggaactgcctgctggcttcctacgtgcactacgtcttccgcctgccagaggtgcaaagggatgtgcccaagtcaggcgctcccactgccctcctagaccctcggagctaccacacgta

SEQ ID NO: 160051 - DNA, 120 bp, Artificial Sequence
  ENSG00000107099_23 (sequence is synthesized)
tggccgcacatcagctgctgctgtgagttcaaagctgctgcaggcccgggtgatgagcagcagtaacccagacctcgcggggacacactccgcagcagacgaggaagtgaagaacatcat

SEQ ID NO: 160052 - DNA, 120 bp, Artificial Sequence
  ENSG00000107099_24 (sequence is synthesized)
gtcttcaaagatcgccgatcgcaactgcagccgaatgtcttactattgctctggcagtagtgatgctccaagttcacctgcagccccaaggccagccagcaaaaagcatttccatgagga

SEQ ID NO: 160053 - DNA, 120 bp, Artificial Sequence
  ENSG00000107099_25 (sequence is synthesized)
gcttgcccttcagatggtggtcagcaccggaatggtgagagaaacagtcttcaagtatgcctggttcttctttgagcttctggtgaaaagcatggcccagcacgtacataacatggacaa

SEQ ID NO: 160054 - DNA, 120 bp, Artificial Sequence
  ENSG00000107099_26 (sequence is synthesized)
acgggacagttttcggaggactcgtttttctgaccgtttcatggatgacataactactattgttaatgtggtcacctcggaaattgcagcccttttagtaaaaccacagaaggaaaatga

SEQ ID NO: 160055 - DNA, 120 bp, Artificial Sequence
  ENSG00000107099_27 (sequence is synthesized)
acaggcggaaaagatgaacatcagcctggctttcttcttgtatgaccttctctccctcatggatcggggctttgtgtttaacctcatcagacattattgcagccagctgtcagccaagct

SEQ ID NO: 160056 - DNA, 120 bp, Artificial Sequence
  ENSG00000107099_28 (sequence is synthesized)
cagtaaccttccaacgctcatttccatgaggctagagttcctgagaatcctctgtagccatgagcattacctcaatctgaaccttttttttatgaatgctgatactgctccaacatctcc

SEQ ID NO: 160057 - DNA, 120 bp, Artificial Sequence
  ENSG00000107099_29 (sequence is synthesized)
ttgtccttccatatcttcccagaactcaagctcctgctccagcttccaggaccagaagatcgccagcatgttcgatctgacttccgagtaccgccagcagcacttcctcaccgggctcct

SEQ ID NO: 160058 - DNA, 120 bp, Artificial Sequence
  ENSG00000107099_30 (sequence is synthesized)
cttcacagaactggctgctgccctggatgccgaaggggaaggaatcagcaaagtacaaaggaaagctgtcagtgcaattcacagcctgctaagttctcacgacctggacccacgctgtgt

SEQ ID NO: 160059 - DNA, 120 bp, Artificial Sequence
  ENSG00000107099_31 (sequence is synthesized)
gaaggtcaaaatcgccgccctttacctacctttagttggcatcattttggatgctttgccacagctctgtgactttacagttgcagatactcgcagataccgcaccagtggctcggatga

SEQ ID NO: 160060 - DNA, 120 bp, Artificial Sequence
  ENSG00000107099_32 (sequence is synthesized)
agaacaagaaggagccggtgccattaaccagaatgtggctctggccatagcagggaataatttcaatttgaaaacaagtggaatagtgctgtcttccttgccctataagcagtacaacat

SEQ ID NO: 160061 - DNA, 120 bp, Artificial Sequence
  ENSG00000107099_33 (sequence is synthesized)
gctgaacgcggacactactcgcaacctcatgatctgcttcctctggatcatgaaaaatgctgatcagagcctcattaggaagtggattgctgacctgccatcaacgcagctcaacaggat

SEQ ID NO: 160062 - DNA, 120 bp, Artificial Sequence
  ENSG00000107099_34 (sequence is synthesized)
tttagatctacttttcatctgtgtgttatgttttgagtataagggaaaacagagttctgacaaagtcagtacccaagtcctgcagaagtcaagggatgtcaaggcccggctggaagaggc

SEQ ID NO: 160063 - DNA, 120 bp, Artificial Sequence
  ENSG00000107099_35 (sequence is synthesized)
tttgctccgtggggaaggggccagaggggagatgatgcgccgccgggctccagggaacgaccgatttccaggcctaaatgaaaatttgagatggaagaaagagcagacacattggcggca

SEQ ID NO: 160064 - DNA, 120 bp, Artificial Sequence
  ENSG00000107099_36 (sequence is synthesized)
agctaatgagaagctagataaaacaaaggccgagttagatcaagaagccttgatcagtggcaatctggctacagaagcacatttaatcatcctggatatgcaggaaaacattatccaggc

SEQ ID NO: 160065 - DNA, 120 bp, Artificial Sequence
  ENSG00000107099_37 (sequence is synthesized)
gagctcggctctggactgtaaagacagcctgctgggaggtgttctgagggtgctggtgaattctctgaactgtgatcagagtaccacctacctgactcactgctttgcaacactccgtgc

SEQ ID NO: 160066 - DNA, 120 bp, Artificial Sequence
  ENSG00000107099_38 (sequence is synthesized)
tctcatcgccaagtttggagacttactctttgaagaggaggtggaacagtgtttcgacctatgtcaccaagtcctgcaccactgcagcagcagcatggatgtcacccggagccaagcctg

SEQ ID NO: 160067 - DNA, 120 bp, Artificial Sequence
  ENSG00000107099_39 (sequence is synthesized)
tgccaccctttacctcctcatgaggttcagttttggagccaccagtaattttgcaagagtaaagatgcaagtaaccatgtccctggcatctttggtgggaagagcaccagactttaatga

SEQ ID NO: 160068 - DNA, 120 bp, Artificial Sequence
  ENSG00000107099_40 (sequence is synthesized)
agagcacctgagaagatccttgaggacaattttggcctattcagaagaggacacagccatgcagatgactccttttcccacccaggtggaggaacttctctgtaatctgaatagcatctt

SEQ ID NO: 160069 - DNA, 120 bp, Artificial Sequence
  ENSG00000107099_41 (sequence is synthesized)
atatgacacagtgaaaatgagggaatttcaggaagatcctgagatgcttatggatctcatgtacagaattgccaagagttaccaggcatctcctgatctgcggctgacctggctccagaa

SEQ ID NO: 160070 - DNA, 120 bp, Artificial Sequence
  ENSG00000107099_42 (sequence is synthesized)
catggcagagaaacacaccaagaagaagtgctacacggaggctgccatgtgcctggtgcacgccgctgcgttagtggctgagtatctgagcatgctggaggaccacagctacctgcccgt

SEQ ID NO: 160071 - DNA, 120 bp, Artificial Sequence
  ENSG00000107099_43 (sequence is synthesized)
gggcagtgtcagcttccagaatatttcttccaatgtgctggaggagtctgtggtctctgaggacaccctgtcacctgacgaggatggggtgtgcgcaggccagtacttcaccgagagtgg

SEQ ID NO: 160072 - DNA, 120 bp, Artificial Sequence
  ENSG00000107099_44 (sequence is synthesized)
cctggtaggcctcctggagcaggccgcggagctcttcagcacgggaggcttatatgagacagttaatgaggtctacaagctggtcatccccatcctagaagcgcatcgagaattccggaa

SEQ ID NO: 160073 - DNA, 120 bp, Artificial Sequence
  ENSG00000107099_45 (sequence is synthesized)
gctgacactcactcacagcaagctgcagagagccttcgacagcatcgttaacaaggatcataagagaatgtttggaacctacttccgagttggtttctttggatccaaatttggggattt

SEQ ID NO: 160074 - DNA, 120 bp, Artificial Sequence
  ENSG00000107099_46 (sequence is synthesized)
ggatgaacaggagtttgtctacaaagagcctgcaattaccaagcttcctgagatctcacatagactagaggcattttatggtcaatgttttggtgcagaatttgtggaagtgattaaaga

SEQ ID NO: 160075 - DNA, 120 bp, Artificial Sequence
  ENSG00000107099_47 (sequence is synthesized)
ctccactcctgtggacaaaaccaagttggatcctaacaaggcctacatacagatcacttttgtggagccctactttgatgagtatgagatgaaagacagggtcacatactttgagaagaa

SEQ ID NO: 160076 - DNA, 120 bp, Artificial Sequence
  ENSG00000107099_48 (sequence is synthesized)
tttcaacctccggaggttcatgtacaccaccccgttcaccctggaggggcggcctcggggagagctgcatgagcagtacagaaggaacacagtcctgaccactatgcacgccttccccta

SEQ ID NO: 160077 - DNA, 120 bp, Artificial Sequence
  ENSG00000107099_49 (sequence is synthesized)
catcaagaccaggatcagcgtcatccagaaggaggagtttgttttgacaccgattgaagttgccattgaagacatgaagaagaagaccctgcagttagcagttgccattaaccaggagcc

SEQ ID NO: 160078 - DNA, 120 bp, Artificial Sequence
  ENSG00000107099_50 (sequence is synthesized)
gcctgatgcaaagatgcttcagatggtgctgcaaggctctgtgggagctactgtaaatcagggaccactggaagtagcccaagtgtttttggctgaaattcctgctgatccaaaactcta

SEQ ID NO: 160079 - DNA, 120 bp, Artificial Sequence
  ENSG00000107099_51 (sequence is synthesized)
tcgacatcacaacaagttgaggttatgctttaaggaattcatcatgagatgtggtgaagctgtagagaaaaacaagcgtctcatcacggcagaccagagggaatatcagcaggaactcaa

SEQ ID NO: 160080 - DNA, 120 bp, Artificial Sequence
  ENSG00000107099_52 (sequence is synthesized)
aaagaactataacaagctaaaagagaacctcaggccaatgatcgagcggaaaattccagaactgtacaagccaatattcagagttgagagtcaaaagagggactccttccacagatctag

SEQ ID NO: 160081 - DNA, 120 bp, Artificial Sequence
  ENSG00000107099_53 (sequence is synthesized)
tttcaggaaatgtgaaacccagttgtcacagggcagctaagaaaagccatcttcattcgtggagactgtggccctgcaaccctggagaaggacttgctggtacttaaaaaatgggacatt

SEQ ID NO: 160082 - DNA, 120 bp, Artificial Sequence
  ENSG00000107099_54 (sequence is synthesized)
tgccacccaggactgactgtacactccctgatcagccagcactctggaagctttgggatcccaggaaccatggaattattcccaaatggactctgaccagatttttgccatactgggggg

SEQ ID NO: 160083 - DNA, 120 bp, Artificial Sequence
  ENSG00000107099_55 (sequence is synthesized)
tggcgggatggaggatgggtactcaggcatgactgcgtatttattaaagtgtgtttttccacaatgtaccaaacaaggcataagcagcttctcctgctgactggccaatcactgcccatc

SEQ ID NO: 160084 - DNA, 120 bp, Artificial Sequence
  ENSG00000107099_56 (sequence is synthesized)
tgagagatgatttcctctggcccatatttgaatttattggagtaactcaaattgcctgaggaaaaatggaaaaattatccaccagtcgattcaaactgaatttcactctttataggaagg

SEQ ID NO: 160085 - DNA, 120 bp, Artificial Sequence
  ENSG00000107099_57 (sequence is synthesized)
cagggcaaacttgtaggagtacgaaacattttcaataaatctacaaagggaagccttactacaattccaaaaatcatcatggttggaaatttgggaggagattatttgtgaacttgttac

SEQ ID NO: 160086 - DNA, 120 bp, Artificial Sequence
  ENSG00000107099_58 (sequence is synthesized)
ccttttggtaatggtggactaattgctgtatagttatttttgttttattattactgttacattaatttaacatgcatttatagaagaatacattcaaagcactgatgtaggagatacacg

SEQ ID NO: 160087 - DNA, 120 bp, Artificial Sequence
  ENSG00000107099_59 (sequence is synthesized)
gtacttggagcagtcagccagaaatcacagatactgctttcacttaaatggaaacaattctccgataatgctttgctttttttcttatgtcactcttgtgtactatctatttttctcctc

SEQ ID NO: 160088 - DNA, 120 bp, Artificial Sequence
  ENSG00000107099_60 (sequence is synthesized)
tctgggaccaagtttctttttataaagcaataatatctctgttttcatttcagaacattgtgctgtctgtcagcatatgtatatcagctacaaaatatattcaactttgacttcttttga

SEQ ID NO: 160089 - DNA, 120 bp, Artificial Sequence
  ENSG00000107099_61 (sequence is synthesized)
caaaggactttaggaaaaagaggaacaaagacattatttgagaattaaattatatatttttaatatgactgtgaccttgactgataataaagatgtaataagaattgcaagctaaatgtt

SEQ ID NO: 160090 - DNA, 120 bp, Artificial Sequence
  ENSG00000107099_62 (sequence is synthesized)
tggacaattgtgttgttcattattactatatagcagcccatggtgtcagggctcacttgtatgatttctggggcctcgtttttcactcaggcaagcctgtgtgtcatagcagagccatta

SEQ ID NO: 160091 - DNA, 120 bp, Artificial Sequence
  ENSG00000107099_63 (sequence is synthesized)
ttgattatcacacagatgggattctgataataataacaactggaattttcatagcactttacaaaatatgttcactaagagcatctcatttaatccccaaatgtttcaagggtctacatg

SEQ ID NO: 160092 - DNA, 120 bp, Artificial Sequence
  ENSG00000107099_64 (sequence is synthesized)
tagtaatcacacccagcaagtcaaaccatcctattatttgaggggatgtgtggtcactaatccattgagacatacattacttaaactttgatgttctttagtgctttgttactttctttt

SEQ ID NO: 160093 - DNA, 120 bp, Artificial Sequence
  ENSG00000107099_65 (sequence is synthesized)
taatggtctctatgagcaaccagagagacctgctttgaaaacatttcaggctaggataatcacagcccatgctcccaatgtatagaactttgggatcttgattgtttacttcttcattta

SEQ ID NO: 160094 - DNA, 120 bp, Artificial Sequence
  ENSG00000107099_66 (sequence is synthesized)
ttggagctgactgacaacaataggataatgtagactttgcctgtggtcactgcctgaggcactttggatgaaatgagaggtgacgattattcaagccttttgtctgtttgaactccttat

SEQ ID NO: 160095 - DNA, 120 bp, Artificial Sequence
  ENSG00000107099_67 (sequence is synthesized)
actgtataggaggctctcagttttcccctctgcgtgaggttatctacacttctgggtcttgccagaacagattactgctatatctctgctgtccaaatggtattgaaagttcagttggaa

SEQ ID NO: 160096 - DNA, 120 bp, Artificial Sequence
  ENSG00000107099_68 (sequence is synthesized)
ttttgtctcctgtaacaatttacgcgccgtgtaactgtgaatctttcaaagctcttgcaggagaactctcttgtagctcaccctgtctgaaaacatactggaaaggaattcaaggaaatg

SEQ ID NO: 160097 - DNA, 120 bp, Artificial Sequence
  ENSG00000107099_69 (sequence is synthesized)
cccgaggctgcggcggtggagccgctggacgcgcggcggctcctgcgctgggcccggcgaggtcctccccaagaatctcggtgctcctggatgtcctcagccgccggggatcccttcccc

SEQ ID NO: 160098 - DNA, 120 bp, Artificial Sequence
  ENSG00000107099_70 (sequence is synthesized)
gaacaacctcgcccgctccgccctccaggttcttacaggtggccgggtcccagaagggtgataggcgcctgggtaaccgtgttgggcgcgccacggagtgtctcataaacggctccttcc

SEQ ID NO: 160099 - DNA, 120 bp, Artificial Sequence
  ENSG00000107099_71 (sequence is synthesized)
agagagaacaattaaaggatgcagagaatatgtccagtgagacgtttgcttgtcagtgtctccctggtggtattagaggggagaatgttccatctgaacagattaaaataatgaaacgta

SEQ ID NO: 160100 - DNA, 120 bp, Artificial Sequence
  ENSG00000107099_72 (sequence is synthesized)
tacagagaagtcttccaggtttcagctgttgctcattaatgctcaccacagccctttgaggtcgatgcaattatgctttggaaaagctaagtaacttgccaaaggccatgcagctaaaag

SEQ ID NO: 160101 - DNA, 120 bp, Artificial Sequence
  ENSG00000107099_73 (sequence is synthesized)
aagcaaaagctggattcaaatctcagctctctgcctccagagagaacaccctcaatcccgcttaacagacattagctctgcttatttgattggtggcagtggagatgaacagaagtgaac

SEQ ID NO: 160102 - DNA, 120 bp, Artificial Sequence
  ENSG00000107099_74 (sequence is synthesized)
agtgagcagagaggggtctgtaccccacacacatccctgcaccccaactgtcaactgtcttccatcatcatttactatatccacgtccactcctgacagcatcagtggctcagtcttacc

SEQ ID NO: 160103 - DNA, 120 bp, Artificial Sequence
  ENSG00000107099_75 (sequence is synthesized)
gacctgcatcagggttttgggctctgcctctgtttagacagagcacgatttgggaagtgctgctaagtcagccagtggctgagtagaaacagccctgcagtgggcctctgcctgctctgt

SEQ ID NO: 160104 - DNA, 120 bp, Artificial Sequence
  ENSG00000107099_76 (sequence is synthesized)
ggctcgtttatcatgtgtctcatctttaaaagttggggctcagtctaggtgcctcctggcctgagcaccccagaattctatgctgatcccttcattgtgacatggcctgtcatctactct

SEQ ID NO: 160105 - DNA, 120 bp, Artificial Sequence
  ENSG00000107099_77 (sequence is synthesized)
tctgggaagaccatctgcacctcactgatacttgaagctcattgagtattgtcacatatcagcccagaaagtcacagggtacagcaactcatacttgctcccagcaccaggccagcccca

SEQ ID NO: 160106 - DNA, 120 bp, Artificial Sequence
  ENSG00000107099_78 (sequence is synthesized)
gctcctgtgtgttcttgattgttccaattatcatttttcctctcgaatacctgagagcattcattattttgcaagagatttgagaatccctgtgccctaacttttctttccttgatgtgg

SEQ ID NO: 160107 - DNA, 120 bp, Artificial Sequence
  ENSG00000107099_79 (sequence is synthesized)
caagatgcccagccaagagtgactgtgggctaaagtccagtctgttcttcattcactgagccatgggttctggtgttgggattactgcatctagaggaaagagctttttttctctgcaca

SEQ ID NO: 160108 - DNA, 60 bp, Artificial Sequence
  ENSG00000107099_80 (sequence is synthesized)
agaagttggagaccagcccagggaacataatgagactctgtctctacaaaaaatataaaa

SEQ ID NO: 160109 - DNA, 120 bp, Artificial Sequence
  ENSG00000107099_81 (sequence is synthesized)
gggaacataatgagactctgtctctacaaaaaatataaaaattagcagagcatggtggcacatacctttagtcccagctactcaggaagaagctgaggcaggaggatcatttaagcccag

SEQ ID NO: 160110 - DNA, 120 bp, Artificial Sequence
  ENSG00000107099_82 (sequence is synthesized)
gcactccagcctgggaaacagagcgagatcccatctcttaaaacaaacaaacaaacaaacaaacaccctaaaattccattttcgttttcaggacaatacaaaacttacatgaatgctgaa

SEQ ID NO: 160111 - DNA, 120 bp, Artificial Sequence
  ENSG00000107099_83 (sequence is synthesized)
ttttcaggacaatacaaaacttacatgaatgctgaaattatgtgtttctttatagatctttcttcctccctccttgcctctttttatgctctaaacacttattttgtctgcccatttgat

SEQ ID NO: 160112 - DNA, 120 bp, Artificial Sequence
  ENSG00000107099_84 (sequence is synthesized)
aatccctcactggtctttacccacttgctaatttatgattcagctgagaatctcttttttaagatggagaagtggtgactgatgcctacgattctagtataataaaggaaataatatata

SEQ ID NO: 160113 - DNA, 89 bp, Artificial Sequence
  ENSG00000107099_85 (sequence is synthesized)
gagtttgagaccagccttggcaacatggcaaaaccgtgtctctacaacatatacaaaatttagctaacttggcaggctgaggcaggaga

SEQ ID NO: 160114 - DNA, 120 bp, Artificial Sequence
  ENSG00000107099_86 (sequence is synthesized)
gcctcaaatcagggtgggctgctcacccctgtcacttcacacaagtccgggactcatcagtgtacaaagtccgtctattccaggccaatactgctcagcatgtgcaagggcttctgtgcc

SEQ ID NO: 160115 - DNA, 120 bp, Artificial Sequence
  ENSG00000107099_87 (sequence is synthesized)
caggatatcagtggggaaacagggtcagtcttacttgacgatctctttctcggcttattctgtagtgagcttggaacatacagatcattttagaggattaaaaaaagtcataaagtcttt

SEQ ID NO: 160116 - DNA, 120 bp, Artificial Sequence
  ENSG00000107099_88 (sequence is synthesized)
ccatactgcccataggaccaccccactctaaaggcatacaaagtaaagagatggctcaacacgtgcgccatgtttgctgagtgtcttccatgcacaaactgtacacactgtgttatacac

SEQ ID NO: 160117 - DNA, 120 bp, Artificial Sequence
  ENSG00000107099_89 (sequence is synthesized)
acacagtgttacacacttactcaagcctcggaccacagtgctgatgaatacaaagtaccgcctagtaattataaacacacaccacctccacaccttctaggagtggatctttgttctgag

SEQ ID NO: 160118 - DNA, 120 bp, Artificial Sequence
  ENSG00000107099_90 (sequence is synthesized)
gcaaaatataaatcaaattattcatatatatatatatatataaaatgcagtgtgctccaaggaactcaaaatgccagaatttatactttttaaaccatctcctactaaatgagatggtgg

SEQ ID NO: 160119 - DNA, 85 bp, Artificial Sequence
  ENSG00000107099_91 (sequence is synthesized)
ttatactttttaaaccatctcctactaaatgagatggtggttagctattactatttcccataagtcatagaattcagttaatata

SEQ ID NO: 160120 - DNA, 85 bp, Artificial Sequence
  ENSG00000107099_92 (sequence is synthesized)
tcagcctaaaggcgtgagccactgcacgcagttaatatacctttctaaaaagaaaaagaaaaaaatcctttctcttaatgtccca

SEQ ID NO: 160121 - DNA, 120 bp, Artificial Sequence
  ENSG00000107099_93 (sequence is synthesized)
taaaaagaaaaagaaaaaaatcctttctcttaatgtcccacccaaagaaaaaaagaaaaaaaaaaacctttctcctaacgtcccacctgtcttcccaatgcaaggtgtcttaagacagcg

SEQ ID NO: 160122 - DNA, 120 bp, Artificial Sequence
  ENSG00000107099_94 (sequence is synthesized)
atgctgcttcaggcccaaggaggtatctttttctaaatggcacaaatgtggataaggcagtggagattcaaatcacctaagtgagtaggtctgtatgtttgagagagaagaacctggaac

SEQ ID NO: 160123 - DNA, 120 bp, Artificial Sequence
  ENSG00000107099_95 (sequence is synthesized)
tggggatttctcactcaagacaaaagtatgtaactttggcctgttggatagacctctaggcagtgaggcagagtggagagagtactggttttctaatctcacaaacatgtggcctttggt

SEQ ID NO: 160124 - DNA, 120 bp, Artificial Sequence
  ENSG00000107099_96 (sequence is synthesized)
cactaatatagccccttggaacctcatttcacccttcatagccagttcctttgcactggtgtgcttgggccagttgtagtcccagcacttttttttttctttttgagacaggatctcact

SEQ ID NO: 160125 - DNA, 86 bp, Artificial Sequence
  ENSG00000107099_97 (sequence is synthesized)
atggtgcaatctcgactcactgcaacctctgcttcctaggctcaagcgatcctcttgcctccgccccctgagtagcagggactata

SEQ ID NO: 160126 - DNA, 120 bp, Artificial Sequence
  ENSG00000107099_98 (sequence is synthesized)
caggtgtgagccactgctcctggccaacccagcactcttaattgtacaaaatgcagctctatgagaccagaacatcctgttggcctgatgatagtcaatttgatgtacccaaatgttact

SEQ ID NO: 160127 - DNA, 120 bp, Artificial Sequence
  ENSG00000107099_99 (sequence is synthesized)
tgtaaggactatagtcctctcttcagctgaccttcaggtccccagtcagaaccaagggaaccgactctgtcccttctcatagcacctgaaaaccccgggaaacgaggggaatgctttgct

SEQ ID NO: 160128 - DNA, 90 bp, Artificial Sequence
  ENSG00000107099_100 (sequence is synthesized)
gaccctagaagccaccgaaccgccggcgggccatggccactctgccgagcgcagagcgccgcgcgttcgcgctcaagatcaacagtcagg

SEQ ID NO: 160129 - DNA, 120 bp, Artificial Sequence
  ENSG00000107104_0 (sequence is synthesized)
gcgagcgagcggccggcaggttgggaggagcggccgaaggttgaatgcctttgagaacttgatgcataaaatttgcatgactcctcactcctttctggatctctcattggactcaagcca

SEQ ID NO: 160130 - DNA, 120 bp, Artificial Sequence
  ENSG00000107104_1 (sequence is synthesized)
gcatggctcacaccacaaaggttaacggcagtgcctcaggaaaagcaggtgatattctcagtggagaccaggacaaggaacagaaagacccttactttgtggagaccccctatggttatc

SEQ ID NO: 160131 - DNA, 120 bp, Artificial Sequence
  ENSG00000107104_2 (sequence is synthesized)
aactagacttagatttcctcaaatatgtggatgacatacagaagggaaataccatcaaaagactgaacatccagaagaggcggaagccgtccgtgccatgcccagaacccaggaccacat

SEQ ID NO: 160132 - DNA, 120 bp, Artificial Sequence
  ENSG00000107104_3 (sequence is synthesized)
ctggtcagcaaggtatatggacttccactgaatccctctcatcctccaacagtgatgacaacaagcagtgccccaacttcctcatagccagaagtcaagttacatcaactccaatctcaa

SEQ ID NO: 160133 - DNA, 120 bp, Artificial Sequence
  ENSG00000107104_4 (sequence is synthesized)
agccacctccccctctggagacctcactcccttttcttaccatcccagaaaatcgacagctgccacctccctcaccacaactcccaaagcataaccttcatgtcaccaagacactgatgg

SEQ ID NO: 160134 - DNA, 120 bp, Artificial Sequence
  ENSG00000107104_5 (sequence is synthesized)
agacccggagaagactggaacaggagagagccaccatgcagatgacaccgggtgagttcagaaggcccaggctggccagttttggaggcatgggcaccacaagctccctcccttcttttg

SEQ ID NO: 160135 - DNA, 120 bp, Artificial Sequence
  ENSG00000107104_6 (sequence is synthesized)
tgggttctggaaaccacaatcctgccaagcaccagcttcagaatggataccaaggtaatggggattatggtagctatgccccagctgctcccaccacttcctccatggggagctccatcc

SEQ ID NO: 160136 - DNA, 120 bp, Artificial Sequence
  ENSG00000107104_7 (sequence is synthesized)
gccacagccccctgagctcagggatctccaccccagtgaccaacgtgagccccatgcacctgcagcacatccgcgagcagatggccattgctctgaaacgcctgaaggagctggaggagc

SEQ ID NO: 160137 - DNA, 120 bp, Artificial Sequence
  ENSG00000107104_8 (sequence is synthesized)
aggtgcgaaccatccctgtgctccaggtaaagatctctgtcttgcaagaagagaaaaggcagttggtctcacagctgaaaaaccaaagggctgcatcccagatcaatgtctgtggtgtga

SEQ ID NO: 160138 - DNA, 120 bp, Artificial Sequence
  ENSG00000107104_9 (sequence is synthesized)
ggaagcggtcctatagtgcggggaacgcctcccagctggaacagctctcccgggcccgaagaagtggcggggaattatacattgactatgaggaggaagaaatggagaccgtagaacaga

SEQ ID NO: 160139 - DNA, 120 bp, Artificial Sequence
  ENSG00000107104_10 (sequence is synthesized)
gcacgcagaggataaaggagttccggcaacttacagcagacatgcaagccctggagcagaagatccaggacagcagctgtgaggcctcctcagagctcagggagaatggagagtgccggt

SEQ ID NO: 160140 - DNA, 120 bp, Artificial Sequence
  ENSG00000107104_11 (sequence is synthesized)
ctgtggctgtgggtgccgaggagaacatgaacgacatcgtcgtgtaccacagaggctccaggtcctgtaaggatgcagctgtagggacacttgttgagatgagaaattgtggggtcagcg

SEQ ID NO: 160141 - DNA, 120 bp, Artificial Sequence
  ENSG00000107104_12 (sequence is synthesized)
tgacagaggccatgcttggagtgatgactgaagctgacaaagaaattgagctgcaacagcagaccatagaatccttgaaggaaaagatctatcgcctagaagtacagcttagagaaacca

SEQ ID NO: 160142 - DNA, 120 bp, Artificial Sequence
  ENSG00000107104_13 (sequence is synthesized)
cccatgaccgggagatgactaaactgaaacaagagctgcaggctgctggatcgaggaaaaaggttgacaaagccacgatggcccagccgcttgttttcagtaaggtggtggaggcagtgg

SEQ ID NO: 160143 - DNA, 120 bp, Artificial Sequence
  ENSG00000107104_14 (sequence is synthesized)
tgcagaccagagaccaaatggtcggcagtcacatggacctggtggacacgtgtgttgggacctccgtggaaacaaacagtgtaggcatctcctgccagcctgaatgtaagaataaagtcg

SEQ ID NO: 160144 - DNA, 120 bp, Artificial Sequence
  ENSG00000107104_15 (sequence is synthesized)
tagggcctgagctgcctatgaattggtggattgttaaggagagggtggaaatgcatgaccgatgtgctgggaggtctgtggaaatgtgtgacaagagtgtgagtgtggaagtcagcgtct

SEQ ID NO: 160145 - DNA, 120 bp, Artificial Sequence
  ENSG00000107104_16 (sequence is synthesized)
gcgaaacaggcagcaacacagaggagtctgtgaacgacctcacactcctcaagacaaacttgaatctcaaagaagtgcggtctatcggttgtggagattgttctgttgacgtgaccgtct

SEQ ID NO: 160146 - DNA, 120 bp, Artificial Sequence
  ENSG00000107104_17 (sequence is synthesized)
gctctccaaaggagtgcgcctcccggggcgtgaacactgaggctgttagccaggtggaagctgccgtcatggcagtgcctcgtactgcagaccaggacactagcacagatttggaacagg

SEQ ID NO: 160147 - DNA, 120 bp, Artificial Sequence
  ENSG00000107104_18 (sequence is synthesized)
tgcaccagttcaccaacaccgagacggccaccctcatagagtcctgcaccaacacttgtctaagcactttggacaagcagaccagcacccagactgtggagacgcggacagtagctgtag

SEQ ID NO: 160148 - DNA, 120 bp, Artificial Sequence
  ENSG00000107104_19 (sequence is synthesized)
gagaaggccgtgtcaaggacatcaactcctccaccaagacgcggtccattggtgttggaacgttgctttctggccattctgggtttgacaggccatcagctgtgaagaccaaagagtcag

SEQ ID NO: 160149 - DNA, 120 bp, Artificial Sequence
  ENSG00000107104_20 (sequence is synthesized)
gtgtggggcagataaatattaacgacaactatctggttggtctcaaaatgaggactatagcttgtgggccaccacagttgactgtggggctgacagccagcagaaggagcgtgggggttg

SEQ ID NO: 160150 - DNA, 120 bp, Artificial Sequence
  ENSG00000107104_21 (sequence is synthesized)
gtaggggaatctctggagaacccccagcctcaagctccacttggaatgatgactggcctggatcactacattgagcgtatccagaagctgctggcagaacagcagacactgctggctgag

SEQ ID NO: 160151 - DNA, 120 bp, Artificial Sequence
  ENSG00000107104_22 (sequence is synthesized)
aactacagtgaactggcagaagctttcggggaacctcactcacagatgggctccctcaactctcagctcatcagcaccctgtcgtctatcaactctgtcatgaaatctgcaagcactgaa

SEQ ID NO: 160152 - DNA, 120 bp, Artificial Sequence
  ENSG00000107104_23 (sequence is synthesized)
gagctgaggaaccctgacttccagaaaaccagtctgggtaaaatcacaggcaattatttgggatatacctgtaagtgtgggggccttcagtcaggaagtcccttaagctcccagacatcc

SEQ ID NO: 160153 - DNA, 120 bp, Artificial Sequence
  ENSG00000107104_24 (sequence is synthesized)
cagcctgagcaagaagtggggacctcagaaggaaagccaatcagcagcctggatgccttccccactcaggaaggtacgctgtctccagtgaacctgacagacgaccagatcgccgctggc

SEQ ID NO: 160154 - DNA, 120 bp, Artificial Sequence
  ENSG00000107104_25 (sequence is synthesized)
ctctatgcatgtacaaacaatgaaagtacactgaagtccatcatgaagaagaaagatggtaacaaagattcaaatggcgcaaaaaagaatcttcagtttgttggcattaatggagggtat

SEQ ID NO: 160155 - DNA, 120 bp, Artificial Sequence
  ENSG00000107104_26 (sequence is synthesized)
gaaacaacttcaagtgatgattccagctcagatgaaagctcttcttccgagtcagatgacgagtgtgatgtcattgagtatcctcttgaagaagaggaggaggaggaggatgaagacact

SEQ ID NO: 160156 - DNA, 120 bp, Artificial Sequence
  ENSG00000107104_27 (sequence is synthesized)
cggggaatggcagaagggcaccatgcagttaatattgaaggtttgaagtctgccagggtggaagatgaaatgcaggttcaagaatgtgaacctgagaaggtggaaatcagagagaggtat

SEQ ID NO: 160157 - DNA, 120 bp, Artificial Sequence
  ENSG00000107104_28 (sequence is synthesized)
gaattaagtgaaaagatgttgtctgcatgcaacttactgaaaaatactataaatgaccccaaagctttgaccagcaaagatatgaggttctgtctgaacaccctccagcacgagtggttc

SEQ ID NO: 160158 - DNA, 120 bp, Artificial Sequence
  ENSG00000107104_29 (sequence is synthesized)
cgcgtgtccagtcagaagtcagccattccagccatggtgggggactacatagctgcttttgaggccatttccccagatgtcctccgctatgtcatcaacttggcagacggcaacggcaac

SEQ ID NO: 160159 - DNA, 120 bp, Artificial Sequence
  ENSG00000107104_30 (sequence is synthesized)
acagccctccattacagcgtgtcccactccaacttcgagattgtgaagctgctgttagatgccgatgtgtgtaatgtggatcaccagaacaaggcaggctacacccccatcatgttggcg

SEQ ID NO: 160160 - DNA, 120 bp, Artificial Sequence
  ENSG00000107104_31 (sequence is synthesized)
gccctcgccgctgtggaagcagagaaggacatgcggattgtggaagaactcttcggctgtggggatgtgaatgccaaagctagtcaggcgggacagacggccctcatgctggcggtcagt

SEQ ID NO: 160161 - DNA, 120 bp, Artificial Sequence
  ENSG00000107104_32 (sequence is synthesized)
cacggacggatagacatggtgaagggccttctggcctgtggggctgatgtcaacatccaggatgacgagggctccacggccctcatgtgtgccagcgagcacggacacgtggagattgtc

SEQ ID NO: 160162 - DNA, 120 bp, Artificial Sequence
  ENSG00000107104_33 (sequence is synthesized)
aagctgctgctggcccagcccggctgcaacggtcacctagaggacaacgatggcagcactgcgctctcaatcgccctggaagcaggacacaaggacatcgctgttcttctgtatgcccat

SEQ ID NO: 160163 - DNA, 120 bp, Artificial Sequence
  ENSG00000107104_34 (sequence is synthesized)
gtcaactttgcaaaagcccagtctccgggcacccctaggcttggaaggaagacgtctcctggccccacccaccgaggttcatttgattgattgtatgcaaatagccctttatttacatgc

SEQ ID NO: 160164 - DNA, 120 bp, Artificial Sequence
  ENSG00000107104_35 (sequence is synthesized)
cactattaagctgctaattgttcctgttggggtgacagatactgaatgtatacgtattgtgcctgagctcaccagcaaacagaagcatcaagcccaggggtaaaggctgaagctttcaca

SEQ ID NO: 160165 - DNA, 120 bp, Artificial Sequence
  ENSG00000107104_36 (sequence is synthesized)
gtgcagagactgctagcctgggcacacacacctcctttctggccgtcttctgtgtagggcacactttaacccagtctctgttgctgttgagtctctgctccgttttgtacagtcacaggg

SEQ ID NO: 160166 - DNA, 120 bp, Artificial Sequence
  ENSG00000107104_37 (sequence is synthesized)
aattctgatctgaaggggcaccttctgttcactcccacaaagtggtgtctggttctcactgagacgttttaagatttttccacaaatatttatatgtactaaatgtggaaccattagaaa

SEQ ID NO: 160167 - DNA, 120 bp, Artificial Sequence
  ENSG00000107104_38 (sequence is synthesized)
gttcttccaaaatctcattccagcatagttttggatttttcttttgtcttattttaaaataaggaagtcgagatgactttgatcattggtaacttgggcctgggccagacaaagtataaa

SEQ ID NO: 160168 - DNA, 120 bp, Artificial Sequence
  ENSG00000107104_39 (sequence is synthesized)
acttacaaaagaatattctcatttggtcttaactaggtagatgtaatatatgactttttataaaaagggtatctatatgaacttgacacagtattttcagcttttgtattccatactaaa

SEQ ID NO: 160169 - DNA, 120 bp, Artificial Sequence
  ENSG00000107104_40 (sequence is synthesized)
gccatgaagaactacacgtaacatcatcatttgtattaattgcacaactccaatgctaaaggttggattgtgttagaggaatcggctctgtatttgcctctagagaaacacagtgttctc

SEQ ID NO: 160170 - DNA, 120 bp, Artificial Sequence
  ENSG00000107104_41 (sequence is synthesized)
tttgtatttatggattcctttttaccgtgtcacatttactttggtcctctatgtatttaaatgtttgaagtgccttagactcttgccatattttcaaaataaaattccattaagctcttt

SEQ ID NO: 160171 - DNA, 120 bp, Artificial Sequence
  ENSG00000107104_42 (sequence is synthesized)
gcccgagggtgtttcggggcgtccgaagcgggcgtgctccagcctgctcagcagcgagtggttggaaattagcaaagtgagagggtgaaaggaagcaggaggaggagggagttctagcga

SEQ ID NO: 160172 - DNA, 120 bp, Artificial Sequence
  ENSG00000107104_43 (sequence is synthesized)
agacttcggagggaagcaacccatcccctgccacaagaaagcaccgccactccagtgggaacggacacgcgtgcacacagccacgagtgaggagagaatacagcagttccaaggacaagg

SEQ ID NO: 160173 - DNA, 120 bp, Artificial Sequence
  ENSG00000107104_44 (sequence is synthesized)
gattcgtaccactgctcctcactcagtaaatagcagagacagaatttgaacggtctcactctgtcacctgagctagagtgcagtggtgcgatcacagcttactgcagcattgaactcctg

SEQ ID NO: 160174 - DNA, 120 bp, Artificial Sequence
  ENSG00000107104_45 (sequence is synthesized)
tgatcctcttgcctcagcctcccaagtaactgtgactgcagtgtccttgctggccttgcaaaatgagtttggaagggttgattccatcctcttcagttgttggaaagagtttaagaaggg

SEQ ID NO: 160175 - DNA, 120 bp, Artificial Sequence
  ENSG00000107104_46 (sequence is synthesized)
aagaagggttggtgttaattcttctctttaaatatttgatgaaattcaccagtgaagccgtgacatcctgggatattctttgttgagaggttgaatgcctttgagaacttgatgcataaa

SEQ ID NO: 160176 - DNA, 120 bp, Artificial Sequence
  ENSG00000107104_47 (sequence is synthesized)
gagctccgggtccgcggcggagcgagcgagcggccggcaggttgggaggagcggccgaagaaaaacaggacaaagaaacctgtgtgaattttcagcttttcaccttctctgattttattt

SEQ ID NO: 160177 - DNA, 120 bp, Artificial Sequence
  ENSG00000107104_48 (sequence is synthesized)
cttcctcactcttcctttgacagtcctcgcagtccgcctgagagagtagagaagaccccctcccagaaccttcctgtaaggtctccccgctgacttcctgtagtggatgtgactgtgtgc

SEQ ID NO: 160178 - DNA, 120 bp, Artificial Sequence
  ENSG00000107104_49 (sequence is synthesized)
caggtgcctgccgaagacccctgtcactgactgtgccctttgggaaagagtcaacaatggcctcctcctatggctgacttcgttcatgttcaggctctccagcttgctagtgagaattgc

SEQ ID NO: 160179 - DNA, 120 bp, Artificial Sequence
  ENSG00000107104_50 (sequence is synthesized)
caaggattggttcatggcaggatagaactaaactgatagatgaaagctccacagtgcttcaagacggggtcccgttcatgttaagcagttttccttccttcaaaataaaaaactagcagt

SEQ ID NO: 160180 - DNA, 120 bp, Artificial Sequence
  ENSG00000107104_51 (sequence is synthesized)
ccttagggaggacagttttttccttccttttcctattctggctccaacagctgtctcaacacagcccgagatggggagcagcctggcttccaccggcaatagctgtattgtgggagtgtg

SEQ ID NO: 160181 - DNA, 120 bp, Artificial Sequence
  ENSG00000107104_52 (sequence is synthesized)
agacttcggagggaagcaacccatcccctgccacaagaaagcaccgccactccagtgggaacggacacgcgtgcacacagccacgaatggtgatgacactcccaagtccatgtgggactc

SEQ ID NO: 160182 - DNA, 120 bp, Artificial Sequence
  ENSG00000107104_53 (sequence is synthesized)
cctccttatgcgggcctcagtctgtcatcttccttggagcaggaccaaagtaaataagataaagtcacaatttctcatccttcttcactcaacttttctttgaggagagaatacagcagt

SEQ ID NO: 160183 - DNA, 120 bp, Artificial Sequence
  ENSG00000107104_54 (sequence is synthesized)
ctcagtaaatagcagagacagaatttgaacgctagctgtgtggcctcacctaacttctctgaaccattgctcacatgtaaaacacggaaaaaattatccacttctcagggatgttgtgaa

SEQ ID NO: 160184 - DNA, 120 bp, Artificial Sequence
  ENSG00000107104_55 (sequence is synthesized)
gattaaaagaacaagagatgtagagtgctcagcacagtgcctctgctctgggaagcactccagatgtgtctgcttttgttgtgattttgccattcttcaacaaagttaaaagagcctcaa

SEQ ID NO: 160185 - DNA, 120 bp, Artificial Sequence
  ENSG00000107104_56 (sequence is synthesized)
tttatgttgattcagaaaatggaagttttagtctggagcttaagagttcatcctttccgcctccaccccgcaaaaagcaggagaactaatgttttagcagaggctggaccttgcttgtcc

SEQ ID NO: 160186 - DNA, 120 bp, Artificial Sequence
  ENSG00000107104_57 (sequence is synthesized)
ttgcaagacatatgctcacagcttcccatagaggttttgattctgtgcagaattatccagatagcagcccctgagcccatggggatatttcgccatggttctggcattgttcctgaagca

SEQ ID NO: 160187 - DNA, 120 bp, Artificial Sequence
  ENSG00000107104_58 (sequence is synthesized)
acctgttccctgttctcagccagagctctcctggctcgggctcacagctgcttgttgcctgtggtgggccaagatcctatgtcacagggtacacatctgcctgaggtcacttattaaccc

SEQ ID NO: 160188 - DNA, 120 bp, Artificial Sequence
  ENSG00000107104_59 (sequence is synthesized)
gaaaaacagagcctctctgtagagatgcttaaagtgctagctttatttaaaaatcagctggcaaagcgggagtgaagaacacacattttcagaagataccggtttcctgttttcattaag

SEQ ID NO: 160189 - DNA, 120 bp, Artificial Sequence
  ENSG00000107104_60 (sequence is synthesized)
aaaacagggaatgcggaacagctgagtgcggcgggggtggtgtcactgcagccggagggagacctcgccggtgaaagctcagcctatggcatccgagcgtggccggccaagtttacacga

SEQ ID NO: 160190 - DNA, 120 bp, Artificial Sequence
  ENSG00000107104_61 (sequence is synthesized)
atgttgaaacttctcctcacggggtgaggatcgagggcgcccgaggccgggtccggctgagctggagcgagctgtgcggggcagcgcgggctggcggggagcgcggcgggcgccacgtgg

SEQ ID NO: 160191 - DNA, 120 bp, Artificial Sequence
  ENSG00000107104_62 (sequence is synthesized)
aaagctttgaccagcaaagatatgggccaggtgcagtggctgacacctatgatcccaacacttcgggaggccgatgcaggtggatcacatgagaggttctgtctgaacaccctccagcac

SEQ ID NO: 160192 - DNA, 120 bp, Artificial Sequence
  ENSG00000107104_63 (sequence is synthesized)
ttttctgaaaccttaactctgctatataatttaacatatggaaccacaatccactaaaacttgcattgtttgaacaccttaccttatatttaaagacattttaattttttggtggccagc

SEQ ID NO: 160193 - DNA, 120 bp, Artificial Sequence
  ENSG00000107104_64 (sequence is synthesized)
ctactttaagatttcagattttatgtttagccatttatcttgatacaggtgtatcattattacaggatcattgtgtggatgaggcctcagccaaagatcacatatactgtaaagatgatg

SEQ ID NO: 160194 - DNA, 120 bp, Artificial Sequence
  ENSG00000107104_65 (sequence is synthesized)
catatcacttacatgtttgtattttgttacacattgaatgatcaggaataccacaagaatggatttgggtatatcataaatagtagctgaaaaacactctggttggctgaaatatgtgcc

SEQ ID NO: 160195 - DNA, 120 bp, Artificial Sequence
  ENSG00000107104_66 (sequence is synthesized)
tcagaatgtaagttttcaagaccattagataaggatttgatgctcataaaatagagagtagaaaaggtggaaacttcagtatggtttttcagtatgtgaaatataaatagaacatttcag

SEQ ID NO: 160196 - DNA, 120 bp, Artificial Sequence
  ENSG00000107104_67 (sequence is synthesized)
aaaacttacctctatttaatttggcaaatgaaagtttaactgcattaaaacaaggtaagtgtttttagtttatatttccaagtgtttcacatggctttttaacagctttgagatgtaatt

SEQ ID NO: 160197 - DNA, 120 bp, Artificial Sequence
  ENSG00000107104_68 (sequence is synthesized)
tatataccatatgtcatttttttacttttcatatgggttaaacacttgagtcaccaaatgtgggttcagatgtgtggtttactggtcagcacgatggatatatggtaatttgtggaaagt

SEQ ID NO: 160198 - DNA, 120 bp, Artificial Sequence
  ENSG00000107104_69 (sequence is synthesized)
caaggcaagaggatcgcttgagcacaggagtttgagactagcctggacaatatagtaagacctcatccctacaaaaatatcaattacctgggcatggtgtcacatgccagctgctctgga

SEQ ID NO: 160199 - DNA, 120 bp, Artificial Sequence
  ENSG00000107104_70 (sequence is synthesized)
caattacctgggcatggtgtcacatgccagctgctctggaggataaggtgggaggatcacttgaaccctggaggttgaggctgcagtgagccagtgcactccagtctgggtgacagagca

SEQ ID NO: 160200 - DNA, 120 bp, Artificial Sequence
  ENSG00000107104_71 (sequence is synthesized)
acccccttaaaattaaaaatattttttaaaaacttagaacaggttgggcacagtggctcacacccataatgccaatactttgggaggctgaggcaggcaggcagatagcttgagcccaag

SEQ ID NO: 160201 - DNA, 120 bp, Artificial Sequence
  ENSG00000107104_72 (sequence is synthesized)
aacatggtgaaaccctgtctctacaaatacaaagccgggtgtggtggcacacacgtgtaatcccagttacttgggaagctgaggtaggaagattgcttgagcctgggacagcaaaactac

SEQ ID NO: 160202 - DNA, 120 bp, Artificial Sequence
  ENSG00000107104_73 (sequence is synthesized)
aaaaatctctaaatgttattccagaatgtcataaaggccaattggtgaagccgaatgtcaccctcccaaacaaggcctcaatctctggctggaggtgttggctctgcacagtggacgtaa

SEQ ID NO: 160203 - DNA, 120 bp, Artificial Sequence
  ENSG00000107104_74 (sequence is synthesized)
cccttagacccctaaggatttctgtgctgcctctgcccaagcaccttgtgccataatgacctgcctgggctggcttggggccacttgccttttaaaaatatatttttaaaagttgaagct

SEQ ID NO: 160204 - DNA, 120 bp, Artificial Sequence
  ENSG00000107104_75 (sequence is synthesized)
cactccagcctgggcgacagagcatgaccctgtctcaaaaaaaaaattagatatttgggttgaaataaaaatgattttcttcttgtgaccaatcgtaacttgttttttctcctttcaggt

SEQ ID NO: 160205 - DNA, 120 bp, Artificial Sequence
  ENSG00000107104_76 (sequence is synthesized)
tgtcaatgtaccttttaaattgacctggaagaaagttaatatcgttatttggaaggtaggcccagaatatctttaaataaggttaccaaagaggccgggcatggtggctcacacctgtga

SEQ ID NO: 160206 - DNA, 120 bp, Artificial Sequence
  ENSG00000107104_77 (sequence is synthesized)
ctgcactccagcctgggtgacagaaagaggccctgtctcaaaattacgaaagaaagctgtacaagaaagcttacctgatattacaaattatgaaatattttaaatagcattttattcacg

SEQ ID NO: 160207 - DNA, 120 bp, Artificial Sequence
  ENSG00000107104_78 (sequence is synthesized)
cacgttctggcaggcataagttttttcaggttatctcagctgaagaagaataataatccctgtttagtacgtaaatggtccttgaggctcgtgagacacgacatcactttataagcagta

SEQ ID NO: 160208 - DNA, 120 bp, Artificial Sequence
  ENSG00000107104_79 (sequence is synthesized)
aagccggatacaaatgtcagttttcactggctttgttatgtctggaaggactaattgatttttttcccatgtgaagaatgttattaatggaactttgaattattttctttgcatgcacac

SEQ ID NO: 160209 - DNA, 120 bp, Artificial Sequence
  ENSG00000107104_80 (sequence is synthesized)
actttcccattgaattttgtggaaacttctcacatatatatgccaagatctacatttacatgcatgagaaaagaactgtacaggaaaaaagatcatttaacatgtatgggtgtgagtttt

SEQ ID NO: 160210 - DNA, 120 bp, Artificial Sequence
  ENSG00000107104_81 (sequence is synthesized)
catttttattgccttgactttttcacagcatgtacaaacaatgaaagtacactgaagtccatcatgaagaagaaagatggtaacaaagattcaaatggcgcaaaaaagaatcttcagttt

SEQ ID NO: 160211 - DNA, 120 bp, Artificial Sequence
  ENSG00000107104_82 (sequence is synthesized)
gttggcattaatggagggtaaggaaagatggtggttctagaggctaatgctgtcagtctcctttacctcctgcctaagtcacatttcaaggcgcctagtcggggaagcggccacagcgca

SEQ ID NO: 160212 - DNA, 120 bp, Artificial Sequence
  ENSG00000107104_83 (sequence is synthesized)
gtgatgaaagattccctcctcagaaaggcagaaaggtgcatttgggctttgctttcctcctctggtgctgtctttaaggatttgtcactctcttaaggatacctgatgaagctgagcggt

SEQ ID NO: 160213 - DNA, 120 bp, Artificial Sequence
  ENSG00000107104_84 (sequence is synthesized)
ttacatctcctcacctctgatctgaaagaaatagtcttcagcgaacgcagcagggttcctgcactgtgttggacaacttgtacttacctatacgagaactcacaattgagcagaaaaaga

SEQ ID NO: 160214 - DNA, 120 bp, Artificial Sequence
  ENSG00000107104_85 (sequence is synthesized)
ctgagagcatcactctctgggccaacgatcgtcatcttttccttcaaaatgggtccttttgcttagctctccatgtttacgacccaaattgtagggcctttcacaattgataaccacatc

SEQ ID NO: 160215 - DNA, 120 bp, Artificial Sequence
  ENSG00000107104_86 (sequence is synthesized)
accagtttgctttctaaatagaatggttattgtttgttccttctctttgcattggcccacgtacatagttaagcccctttgttgtcctacaattgaatcaaatcaatgaattgatacatg

SEQ ID NO: 160216 - DNA, 120 bp, Artificial Sequence
  ENSG00000107104_87 (sequence is synthesized)
gcccccacaagaaagaaataatacaaagtgtaccattagggtttaaccttatggtgcctgttttccaaatctagaagttttattcagtgataatggccaggagattttggagggcataca

SEQ ID NO: 160217 - DNA, 120 bp, Artificial Sequence
  ENSG00000107104_88 (sequence is synthesized)
ccagaaaaactatcgattgcctatgtaatctattccccttgatactgggagaattaataggatgaaataggaagacatggggtgggggggggacaaaaagcacctaccgatctgttttcc

SEQ ID NO: 160218 - DNA, 120 bp, Artificial Sequence
  ENSG00000107104_89 (sequence is synthesized)
ataaagtatgttttctcatgatttatgctaagccggagatgccattattttctttaacaagtgttacatgataccaattggttatatgataccgataaccagtttaagttagagtccatt

SEQ ID NO: 160219 - DNA, 120 bp, Artificial Sequence
  ENSG00000107104_90 (sequence is synthesized)
caaaaccaccaggcatttaaatagaccttactttgaacttctaagtgcaggatctaaaaccactagtgaaatttctggagtcaattagcaaatcccttcatagaaatttctatcactggg

SEQ ID NO: 160220 - DNA, 120 bp, Artificial Sequence
  ENSG00000107104_91 (sequence is synthesized)
cagagcttttgtaattaaatgtttgcttttatctgttcctcagaggtatacacatcttgagatactaatatatacaagtgcagagtattacaactcttagatctcttatggtagaatggc

SEQ ID NO: 160221 - DNA, 120 bp, Artificial Sequence
  ENSG00000107104_92 (sequence is synthesized)
agctgttgaaatatcaaactgtaccaagattttggccatgatggactctgttctctgcacactaagagatttatcttcctgatcatcagtagaaatattaataaataatattggttgcca

SEQ ID NO: 160222 - DNA, 120 bp, Artificial Sequence
  ENSG00000107105_0 (sequence is synthesized)
gagcctggcagagcagctgcacacacggcagtgcggaggcagagaaggggttggtgatacggtgctataaatctgtggtccagtccacctcccttttaagacgtcctcccccctatttct

SEQ ID NO: 160223 - DNA, 120 bp, Artificial Sequence
  ENSG00000107105_1 (sequence is synthesized)
gttcttagttagagatgcagcagcttactcctgtagcgacctactaaaaagcaacaaggagaaagacatcgtctttttgaaaaaacgttctttcgtctcttttctttgttccttggtttg

SEQ ID NO: 160224 - DNA, 120 bp, Artificial Sequence
  ENSG00000107105_2 (sequence is synthesized)
tttttcttgcccctttttgtttagttgaacggcaataggagggtagtctctccgtctttttaaactcttttttaagtttcccctcccctttcatattttttttcgccatttcttttagca

SEQ ID NO: 160225 - DNA, 120 bp, Artificial Sequence
  ENSG00000107105_3 (sequence is synthesized)
ttggactttggggtcgaaagcgtttctttttatttgcttcttttaagccgagcacagtttaggtttcgtgctgtcttaagagaactatccagcagcttcttgctcatccttattgggaga

SEQ ID NO: 160226 - DNA, 120 bp, Artificial Sequence
  ENSG00000107105_4 (sequence is synthesized)
actgcaccgttactttaaaaacacacatacacaaaaaccttaagggagaaaggtaattgctgccatggaaacacaactgtctaatgggccaacttgcaataacacagccaatggtccaac

SEQ ID NO: 160227 - DNA, 120 bp, Artificial Sequence
  ENSG00000107105_5 (sequence is synthesized)
caccataaacaacaactgttcgtcaccagttgactctgggaacacagaagacagcaagaccaacttaatagtcaactaccttcctcagaacatgacacaggaggaactaaagagtctctt

SEQ ID NO: 160228 - DNA, 120 bp, Artificial Sequence
  ENSG00000107105_6 (sequence is synthesized)
tgggagcattggtgaaatagagtcctgtaagcttgtaagagacaaaataacagggcagagcttgggatatggctttgtgaactacattgaccccaaggatgcagagaaagctatcaacac

SEQ ID NO: 160229 - DNA, 120 bp, Artificial Sequence
  ENSG00000107105_7 (sequence is synthesized)
cctgaatggattgagacttcaaaccaaaacaataaaagtttcctatgctcgcccaagttcagcttctatcagagatgcaaatttatatgtcagcggacttccaaaaacaatgacccagaa

SEQ ID NO: 160230 - DNA, 120 bp, Artificial Sequence
  ENSG00000107105_8 (sequence is synthesized)
ggagttggaacagcttttttcacaatatggacgcattattacttctcgtattcttgtcgaccaggtcactggcatatcaaggggtgtagggtttattcgatttgacaagcgaattgaggc

SEQ ID NO: 160231 - DNA, 120 bp, Artificial Sequence
  ENSG00000107105_9 (sequence is synthesized)
aaccaatcaggccatcctttcccagctgtaccagtctccaaacagaaggtatccaggaccgctagctcagcaggcacagcgttttaggttggacaatctgctcaatatggcttatggagt

SEQ ID NO: 160232 - DNA, 120 bp, Artificial Sequence
  ENSG00000107105_10 (sequence is synthesized)
aaagaggttttctccaatgaccattgacggaatgaccagtttggctggaattaatatccctgggcaccctggaacagggtggtgtatatttgtgtacaacctggctcctgacgcagatga

SEQ ID NO: 160233 - DNA, 120 bp, Artificial Sequence
  ENSG00000107105_11 (sequence is synthesized)
gagtatcctgtggcaaatgtttgggccttttggagctgtcaccaatgtgaaggtcatccgtgactttaacaccaataaatgcaaaggttttggatttgtgactatgacaaactatgatga

SEQ ID NO: 160234 - DNA, 120 bp, Artificial Sequence
  ENSG00000107105_12 (sequence is synthesized)
ggctgccatggcgatagctagcctcaatggataccgtctgggagacagagtactgcaggtctcctttaagacaaacaaaacgcacaaagcctaatgagctcttgtcctcagtccatttat

SEQ ID NO: 160235 - DNA, 120 bp, Artificial Sequence
  ENSG00000107105_13 (sequence is synthesized)
atatgaaaactatacaacaaaggcaagttaagagaaactttatacattagtaaatgtctttgtaagtcagtgttgagatggggataaaatgactacttagcatcctaagaaatatgtgag

SEQ ID NO: 160236 - DNA, 120 bp, Artificial Sequence
  ENSG00000107105_14 (sequence is synthesized)
attttttattgctagtatttgaattaaaacttcttaaatatcttttatgtttgaatatggacaagaggtacagggtttttacctgtcacattgcattctattgccttctttgaagaaggt

SEQ ID NO: 160237 - DNA, 120 bp, Artificial Sequence
  ENSG00000107105_15 (sequence is synthesized)
ggaccttttaaagtgtttcagctaagggaagacatttcttttctttttacataactgccttgaacctgtgagtaaatattgaggctttgtgttgtaattcttcagttggttgtgtctttt

SEQ ID NO: 160238 - DNA, 120 bp, Artificial Sequence
  ENSG00000107105_16 (sequence is synthesized)
ttttcccccctttttttcctttttctgattagctttgtgtttggtttacatttaaagcattgctgttatgtctgtttaagaaaagtattttgaagtttacatttttatttatgaagttta

SEQ ID NO: 160239 - DNA, 120 bp, Artificial Sequence
  ENSG00000107105_17 (sequence is synthesized)
aaacagtatttattttgtaattatgatttgggttggggaagggggggctacattataaacgcttattgtaagaatactggagaacttttcgtaaagcagtaccttgccaaagagataaga

SEQ ID NO: 160240 - DNA, 120 bp, Artificial Sequence
  ENSG00000107105_18 (sequence is synthesized)
gcctctttgatgtgggtttaaaaaaagcatctatttttataaaaaagaaaatttggagaaactttttactggtcctggaacaaatattttgacttgaatactttgagaaatctcttcata

SEQ ID NO: 160241 - DNA, 120 bp, Artificial Sequence
  ENSG00000107105_19 (sequence is synthesized)
ccaggaaatttgcagcggttggaaaatttagaaagatttatggtgtagaaaatacttttgagatctttgtatgaaaggagtagaatcaatggggggaaacactgctggtttcatttttgt

SEQ ID NO: 160242 - DNA, 120 bp, Artificial Sequence
  ENSG00000107105_20 (sequence is synthesized)
aatcaccagtggagcgtctgatcatcctggttattatgtgataggtggctcacattgatttgtgattttgaaacaaataaaaaaaatttacaaaagaatatataagagcaggcaagaaat

SEQ ID NO: 160243 - DNA, 120 bp, Artificial Sequence
  ENSG00000107105_21 (sequence is synthesized)
ttaaattaccgagagatgggggaaaaaatctgttcttcctaaagaaatcccttcagatagagctcatggtgtttagtgatgtacttgcagtattgtttgaagaattgttttgtcttaagg

SEQ ID NO: 160244 - DNA, 120 bp, Artificial Sequence
  ENSG00000107105_22 (sequence is synthesized)
aaaaaagacgttgcacatgatttgtactgcagcaaatcagcaaaagtgatctgagttggatatatttgaaggtattttgaaagttacgttcaaggctaacacctgagctttgtgtaatgt

SEQ ID NO: 160245 - DNA, 120 bp, Artificial Sequence
  ENSG00000107105_23 (sequence is synthesized)
aaataagaccttgtgtttatgaacctttcagctaatttaattttttttcccttacatgccaagtgatgttcaggttttgaatgtttttgtatcagttttttcctttgtaaatggcattaa

SEQ ID NO: 160246 - DNA, 120 bp, Artificial Sequence
  ENSG00000107105_24 (sequence is synthesized)
cattgttacttgaggtcttgcttaatcacttttgttgtcctgaggacttgaatttacagtgcatcagatttgttgcaaattttgtctgtagatagtctagcttcagctgtttatggtgat

SEQ ID NO: 160247 - DNA, 120 bp, Artificial Sequence
  ENSG00000107105_25 (sequence is synthesized)
gctacattttggtttataaatatgtttgtggtataaaaaaatgagtataaccataggttttgaacaaatttccttacatttttcatacaaaaatcataaatatctgtatgctattgaaat

SEQ ID NO: 160248 - DNA, 120 bp, Artificial Sequence
  ENSG00000107105_26 (sequence is synthesized)
ttaactttgtatgatgcttaaaaaccactatttggggaaataataaaataagtctttaccatgtatgaaagaaattttaaaaaatacaaaatattttctgattagcatctagcttataat

SEQ ID NO: 160249 - DNA, 120 bp, Artificial Sequence
  ENSG00000107105_27 (sequence is synthesized)
aaattttcaaaaaagctgaaggcaaaaatgccttcatcaggatgcactgagaactatatagttacgtcctgctttttgtataaactgagatgctcacatgcttccccttagaacaggcaa

SEQ ID NO: 160250 - DNA, 120 bp, Artificial Sequence
  ENSG00000107105_28 (sequence is synthesized)
tgtgctatgcataacatagttgtacattatctttgcggttgctttgagttttattttttattatttaaaattgtagttataaaatttttcagtatagtacagtacatatactgtgaggcg

SEQ ID NO: 160251 - DNA, 120 bp, Artificial Sequence
  ENSG00000107105_29 (sequence is synthesized)
cgtgctaaagtgaataagcgagttttcatgctgacccactcaatgctattcagaaatcaattggcttagcactttctcatatccttaggtgcatttagattgccagagttaaccttctgc

SEQ ID NO: 160252 - DNA, 120 bp, Artificial Sequence
  ENSG00000107105_30 (sequence is synthesized)
gtttaaaaaaagaaaaacactaaaaaataaaatacatgtatatacttaaaaaaaaataataaggtttccctcaagggaaaacagcagctacatgcttctttcctatactactgtagcaaa

SEQ ID NO: 160253 - DNA, 120 bp, Artificial Sequence
  ENSG00000107105_31 (sequence is synthesized)
ccaaggcattgatgagagggcatgcaaattgtgcttcactttacagtgttttatcagagcacttaataaaatgtaaggctggtatttatttgaagttgtacagtatgacttaattcacat

SEQ ID NO: 160254 - DNA, 120 bp, Artificial Sequence
  ENSG00000107105_32 (sequence is synthesized)
ctgttggaatagaaaatatattctgttgagtatttaagaggctgtacatgttttcttttgtgtttggattctttgtactttttcatgttcagtacatcaataaacaaagttgaagggaaa

SEQ ID NO: 160255 - DNA, 80 bp, Artificial Sequence
  ENSG00000107105_33 (sequence is synthesized)
acaaacggcgggaccgcggcgcctgggcgtcactgaggcagtagccggccgggtgaggagggcggttgccggcgcggcgc

SEQ ID NO: 160256 - DNA, 120 bp, Artificial Sequence
  ENSG00000107105_34 (sequence is synthesized)
tcccctttcccgccgccgccgccgccaccgcctctccgcggagctcgccccgagcgactcctccgcggcagtgctgacggccagcggcacgagccgtagtagctgcagcttcgagtcaca

SEQ ID NO: 160257 - DNA, 120 bp, Artificial Sequence
  ENSG00000107105_35 (sequence is synthesized)
gcccgggtgcggccgcgtgtagcgcaagaaggaaactgttgagacgcagacggcaactccaaactaacatggcagtcagactgtgtgatgtggcttctctgcttagaagtggttcgtggg

SEQ ID NO: 160258 - DNA, 120 bp, Artificial Sequence
  ENSG00000107105_36 (sequence is synthesized)
agtccgaactctgggcgggaacactggtgggggcggcggaggttgtgcccgcgaagttcctagagctcagcccgttgcggcgggagtagagagaattgggcgcctcgggaggtggcaccg

SEQ ID NO: 160259 - DNA, 120 bp, Artificial Sequence
  ENSG00000107105_37 (sequence is synthesized)
cccctcccgtgggcacaagcaggttgggggcggcgggagccgagcggggacagtcgcgcctggcagcgtgcacgggcgtggacgtgcccgggtgcggccgcgtgtagcgcaagaaggaaa

SEQ ID NO: 160260 - DNA, 120 bp, Artificial Sequence
  ENSG00000107105_38 (sequence is synthesized)
gctttcttcccttgcctttgaagactttctgcaggccctggaattgcctttgttcctctgtctgcccactttgccagtgtgaagcaggttttcatgggattctactggggtaaaccaaaa

SEQ ID NO: 160261 - DNA, 60 bp, Artificial Sequence
  ENSG00000107105_39 (sequence is synthesized)
taatcccagcacattgggaggccgaggttggcagatcagttgaagccaggagttcgagac

SEQ ID NO: 160262 - DNA, 68 bp, Artificial Sequence
  ENSG00000107105_40 (sequence is synthesized)
cttgtccgagatcatgcccactgccatccagtctggatgacagagagagagaccttgcctcaaaagaa

SEQ ID NO: 160263 - DNA, 120 bp, Artificial Sequence
  ENSG00000107105_41 (sequence is synthesized)
cagtctggatgacagagagagagaccttgcctcaaaagaagaaagatttgaattaatggtttgaaaattcttagaacacttgaccacagggcagagcttgggatatggctttgtgaacta

SEQ ID NO: 160264 - DNA, 80 bp, Artificial Sequence
  ENSG00000107130_0 (sequence is synthesized)
ctcctgctgggcgccccaaccgggtccggcccgggggggcgggggccgcggccgccgaggatggggaaatccaacagcaa

SEQ ID NO: 160265 - DNA, 120 bp, Artificial Sequence
  ENSG00000107130_1 (sequence is synthesized)
gggggccgcggccgccgaggatggggaaatccaacagcaagttgaagcccgaagttgtggaggagctgaccaggaagacctactttaccgagaaggaggtccagcagtggtacaaaggct

SEQ ID NO: 160266 - DNA, 120 bp, Artificial Sequence
  ENSG00000107130_2 (sequence is synthesized)
tcatcaaggactgccccagtgggcagctggatgcggcaggcttccagaagatctacaagcaattcttcccgttcggagaccccaccaagtttgccacatttgttttcaacgtctttgatg

SEQ ID NO: 160267 - DNA, 120 bp, Artificial Sequence
  ENSG00000107130_3 (sequence is synthesized)
aaaacaaggacgggcgaattgagttctccgagttcatccaggcgctgtcggtgacctcacggggaaccctggatgagaagctacggtgggccttcaagctctacgacttggacaatgatg

SEQ ID NO: 160268 - DNA, 120 bp, Artificial Sequence
  ENSG00000107130_4 (sequence is synthesized)
gctacatcaccaggaatgagatgctggacattgtggatgccatttaccagatggtggggaataccgtggagctcccagaggaggagaacactcctgagaagagggtggaccggatctttg

SEQ ID NO: 160269 - DNA, 120 bp, Artificial Sequence
  ENSG00000107130_5 (sequence is synthesized)
ccatgatggataagaatgccgacgggaagctgaccctgcaggagttccaggagggttccaaggcagacccgtccattgtgcaggcgctgtccctctacgacgggctggtatagtcccagg

SEQ ID NO: 160270 - DNA, 120 bp, Artificial Sequence
  ENSG00000107130_6 (sequence is synthesized)
ctggagctggatgcctgggaaccactcacctccttctgtgccatgaggccacctcagccctgacaccaaccccgtgcgtccacccagccttcttccgcatccacacacagccggctgccc

SEQ ID NO: 160271 - DNA, 120 bp, Artificial Sequence
  ENSG00000107130_7 (sequence is synthesized)
ttgacccgggaggccccggctctcctctcccctgtcctgcacccatcccccgcctgaagccaccggctccaattgccagcaacctctgcttgtccggaaaacgacaacacgaaatggaaa

SEQ ID NO: 160272 - DNA, 120 bp, Artificial Sequence
  ENSG00000107130_8 (sequence is synthesized)
aggctacagccctctgcataaaccaaggacttggctgcctcgcaggcagcctccgttcctcccgctctcttgcgcgtgtgcttttgttttttattttgaacagacgttttaaaagaaaaa

SEQ ID NO: 160273 - DNA, 120 bp, Artificial Sequence
  ENSG00000107130_9 (sequence is synthesized)
aaaacaactaccttctgtcctagaagacacagactgacagatggggtgaaggcctggggacctcagagaactctgccttgccctcgtccctcgtccttcggcagccggagaggctgtggg

SEQ ID NO: 160274 - DNA, 120 bp, Artificial Sequence
  ENSG00000107130_10 (sequence is synthesized)
tgggccgagggtgtctaggggttctgcctggtcaacgttatttgtcgtcccatcttttggcagcaaaaccacctgcgtggctaggatgattaattatgaggatgatgattttttttgtga

SEQ ID NO: 160275 - DNA, 120 bp, Artificial Sequence
  ENSG00000107130_11 (sequence is synthesized)
taacagtattgtgctttttgtggggaaagtgaggtttttttttatatacatatataattgatatctttaatttattggttgttaactgttgctgctgcctggtgtgtcctcagctcccag

SEQ ID NO: 160276 - DNA, 120 bp, Artificial Sequence
  ENSG00000107130_12 (sequence is synthesized)
ggctgcgggcccaccgtttacatgtgcacgccctgacccacctgcccacgccgacttgggaggatggtggcctgcagcggccaagaagccaaaaaaaattttttttttttcagatactgt

SEQ ID NO: 160277 - DNA, 120 bp, Artificial Sequence
  ENSG00000107130_13 (sequence is synthesized)
gcttgatttttggagaggggagaggtggaaattcctaaatggctaatgcactgttccctccagcccgaatgcctcctgccaaaccccttttccctgctgcctctgtccccgcatccttgt

SEQ ID NO: 160278 - DNA, 120 bp, Artificial Sequence
  ENSG00000107130_14 (sequence is synthesized)
tctcccctgggtccgtaacattttttccgaggatgaacaggggacatctttaggtttctcaactcttgctttggtgtttgccgcagcatggaaaacagggcgcctaaggctgggagctgg

SEQ ID NO: 160279 - DNA, 120 bp, Artificial Sequence
  ENSG00000107130_15 (sequence is synthesized)
aagaaggggcattgggtacccaggcagagtcaggagaggtggtctttgaagtaagttagcagaaatcaaggggacccccgcctccttgggctggggaggggatttcaagatagttcatga

SEQ ID NO: 160280 - DNA, 120 bp, Artificial Sequence
  ENSG00000107130_16 (sequence is synthesized)
ctctctcccgctctgccttccctccttcctatctgctttttccagtaaactgcatggtgtccttccctggccttctcttggctcaaaggctgggagggagggaaggagagaagagttcca

SEQ ID NO: 160281 - DNA, 120 bp, Artificial Sequence
  ENSG00000107130_17 (sequence is synthesized)
ggcaatcccatcaatatagtccctacacctggggctgcggcccacatgtcttcacggaggcttccagcggtgcctgccactgaggcaggtgcggccccaggaccatcaccaggaatgcga

SEQ ID NO: 160282 - DNA, 120 bp, Artificial Sequence
  ENSG00000107130_18 (sequence is synthesized)
ggccaccctggaccagaggtaggagcccaaggtccggcccttgctctttgattgtgggcagcctcctgccctctctgggtctcagttgccccatctgcagagcgaggaggcccgggctgg

SEQ ID NO: 160283 - DNA, 120 bp, Artificial Sequence
  ENSG00000107130_19 (sequence is synthesized)
ttggtcttgaaggcccttttccatgccgacatcatgtcactctaggcctggggttcagtttcctgtggctggtgatgctgtggttaagtttgcttgaccccagcagcccgagggactgtc

SEQ ID NO: 160284 - DNA, 120 bp, Artificial Sequence
  ENSG00000107130_20 (sequence is synthesized)
tcacagcacagcccctattgcgtggctgctggtgtgtggggtcagttccagcagatgaatgtgtcatgtggcacaccttgtcccttcccgcagcatttcctggttccccccagacccttg

SEQ ID NO: 160285 - DNA, 120 bp, Artificial Sequence
  ENSG00000107130_21 (sequence is synthesized)
agcgctctttgggacccagaaggagtccttgcacagggaaggcttgaggtgagaagccgcttcccagactgtcagggccaggcctgggtctagaattcttgctgctgctttgcagagtca

SEQ ID NO: 160286 - DNA, 120 bp, Artificial Sequence
  ENSG00000107130_22 (sequence is synthesized)
acagcccatcagcccatgttttagaggggacactttggtcctcggttcccaccctcagcaagcaggcctccagcccgaggaaggcctctgccgtagtgacgttgccgtgtggggctgcgt

SEQ ID NO: 160287 - DNA, 120 bp, Artificial Sequence
  ENSG00000107130_23 (sequence is synthesized)
ggctgttccccttggctggagcattcagccaaccccagcgtcccccctgaggcgttcattggcagccccctaggactgcacgctggccccacggtaaccccccctcccccaccaacatcc

SEQ ID NO: 160288 - DNA, 120 bp, Artificial Sequence
  ENSG00000107130_24 (sequence is synthesized)
tgcagggatggggtcagtggttccaccttcacaggccactttgaagggtggattctttgaggcccctgccagtcggctccctgctcagctgctggcccgggcgacctgggactcagcacc

SEQ ID NO: 160289 - DNA, 120 bp, Artificial Sequence
  ENSG00000107130_25 (sequence is synthesized)
aacggctgaagtttctcagctgggctctgacctggggtctggggcagggaacgaacatggtggctttgggctgagaggatgagggaggtctttcccaggtcaaattactttcctttggcc

SEQ ID NO: 160290 - DNA, 120 bp, Artificial Sequence
  ENSG00000107130_26 (sequence is synthesized)
tctgcctgaggctcgatttgcctctctggtccaatgggactgacactgttgtacaacctgacctgtggctgagggtgtctgggcttaagcatgtggaccccttcggtgtgtccggccttc

SEQ ID NO: 160291 - DNA, 120 bp, Artificial Sequence
  ENSG00000107130_27 (sequence is synthesized)
ctccatcgtcctgccctttggccttttggtttgaagccacaggtgtggcttctggccttagcagatggtatgcttgcggaccgcagcccagcatgccggtgggcccacagcccgagccag

SEQ ID NO: 160292 - DNA, 120 bp, Artificial Sequence
  ENSG00000107130_28 (sequence is synthesized)
cccagagctgccggaagggccgcccttcccggccctggcggggtgctggacactggccattttcactagagtttgcctggcagggaccgatctctgccccctcctctccccaggcctctg

SEQ ID NO: 160293 - DNA, 120 bp, Artificial Sequence
  ENSG00000107130_29 (sequence is synthesized)
gctgcagtgatgccgcagaatcctgagccaggtgcctcctgagcagcccgtgcgcctctccacagcggcgtttgccacccaatgcggctcgcttcagatgctctgatgcagagggcacgc

SEQ ID NO: 160294 - DNA, 120 bp, Artificial Sequence
  ENSG00000107130_30 (sequence is synthesized)
ccatagtccctctgcagagcctcgcactggggccagggcaggcaccagccccaggcggccagtcggccacggcctgtcctcttcctcgtagcgtctgctcctcactttgtgttgatggtg

SEQ ID NO: 160295 - DNA, 120 bp, Artificial Sequence
  ENSG00000107130_31 (sequence is synthesized)
acttaggagaatgttccgattttccatgatctaagcaggccacgtttaaaataacatcaaggcaagcgtacgtgtcaccctctgtactgacatctcttcccctgaaatgcttttcagttt

SEQ ID NO: 160296 - DNA, 120 bp, Artificial Sequence
  ENSG00000107130_32 (sequence is synthesized)
gacagcccgtttcctagacaagtgcacctggggtttcaggaactttgtgttttttcggagggggttggtggggaggtcgggatgcctgggatcccttcctggagaggcaggctgtctctg

SEQ ID NO: 160297 - DNA, 120 bp, Artificial Sequence
  ENSG00000107130_33 (sequence is synthesized)
gaaaaagcctccattgcccacccgccaggcggaaagtcaccctgttcccagcgcggtttcagcatttaattttaagggagctaaggaagcgcggcgcgccccctggtggtggtaagccgc

SEQ ID NO: 160298 - DNA, 120 bp, Artificial Sequence
  ENSG00000107130_34 (sequence is synthesized)
caacgcacctgggggctgcaaccccaccggacgggtggtccggagggaggctggagcggggaggcgaggagggggctgtgagtcctcagaggccctgggccaccacatttctggcagcgt

SEQ ID NO: 160299 - DNA, 120 bp, Artificial Sequence
  ENSG00000107130_35 (sequence is synthesized)
ttcccagacacccctctgctaggccatccctggatagcaagtgaattaacttaagggcactgtgatgggaagccttgcccccctcttttttttttttttttaatatctgcggaataaacc

SEQ ID NO: 160300 - DNA, 120 bp, Artificial Sequence
  ENSG00000107130_36 (sequence is synthesized)
caatggttaatttttgaatgaataaaaggcttttgttgaataaacagctggtcccatcttctgtcttggcatcttagcatccaggctcaggctctgccccttctccaggatggggtagcc

SEQ ID NO: 160301 - DNA, 120 bp, Artificial Sequence
  ENSG00000107130_37 (sequence is synthesized)
ccgagtcgccctccccagtctgcacattccctgttgtccctgttcctgcagtggctcccggccccagggaggcccacctcactcccagcctgactcggtggctggcttccttcaggactt

SEQ ID NO: 160302 - DNA, 120 bp, Artificial Sequence
  ENSG00000107130_38 (sequence is synthesized)
tgcgcaagtcagttctgctcattgggtctcaatttccccatcccttggatgggagcaagagtctctgctgggcctgcctcgcaggggcctggtgagacccaaatgtgagtgtcatcatca

SEQ ID NO: 160303 - DNA, 120 bp, Artificial Sequence
  ENSG00000107130_39 (sequence is synthesized)
aagcccctcacagaagtggaggacggtgcccaagagtagcggtttggactgctgctgcctcccacccggagcctgccacttgggggagaaattggtataatgcttgcaaaaacaaacaaa

SEQ ID NO: 160304 - DNA, 120 bp, Artificial Sequence
  ENSG00000107130_40 (sequence is synthesized)
caaaaggcaatgtcttctggttgtggttatttcctttcctgcttgcctccccagccccctttgagtctctttttggggtgccgtcctgtctgaacctgccggtgtgtgtctctggggcca

SEQ ID NO: 160305 - DNA, 120 bp, Artificial Sequence
  ENSG00000107130_41 (sequence is synthesized)
gggtcagggcgaggcccaggggtggacaggggccgtgtagcatgccccagcctccccaagctcctgctgtatgtcgtccatgtcacgccaattaaacacgcttcctggacttgtcctcgc

SEQ ID NO: 160306 - DNA, 120 bp, Artificial Sequence
  ENSG00000107130_42 (sequence is synthesized)
gaccacagagaggggctgcagggacaggctgacagggagggtggtccacccttctgctgagagctgccccttttcagcctagctccccccacccccccacataggtggggcagccgagtg

SEQ ID NO: 160307 - DNA, 120 bp, Artificial Sequence
  ENSG00000107130_43 (sequence is synthesized)
ttgctgttaccgagaaggaggtccagcagtggtacaaaggcttcatcaaggactgccccagtgggcagctggatgcggcaggcttccagaagatctacaagcaattcttcccgttcggag

SEQ ID NO: 160308 - DNA, 120 bp, Artificial Sequence
  ENSG00000107140_0 (sequence is synthesized)
ccggtccaggcccaagcccaggccctgcgcggagcggagcggcgcggcgtccacccgggcccagccagccggcgcggcgggggcgggtccaggatcttcggcggatcttccattctcagg

SEQ ID NO: 160309 - DNA, 120 bp, Artificial Sequence
  ENSG00000107140_1 (sequence is synthesized)
gcggatcttccattctcagggcgggagccggagtccgggcgcccgggatcgggctgggcccgcgcccatggcaagcgcggcctgcccgggccctggggaccctgccatgtgaggcaggcc

SEQ ID NO: 160310 - DNA, 80 bp, Artificial Sequence
  ENSG00000107140_2 (sequence is synthesized)
gcacgggcggaggcccgggccggggccgcccctcctcctaccgggctctccgcagcgccgtgtctagcctggcgcgtgtg

SEQ ID NO: 160311 - DNA, 120 bp, Artificial Sequence
  ENSG00000107140_3 (sequence is synthesized)
ccgggctctccgcagcgccgtgtctagcctggcgcgtgtggacgattttcactgcgcggagaagatcggggccggcttcttctctgaggtctacaaggttcggcaccgacagtcagggca

SEQ ID NO: 160312 - DNA, 120 bp, Artificial Sequence
  ENSG00000107140_4 (sequence is synthesized)
agtcatggtgctgaagatgaacaagctccccagtaaccggggcaacacactacgggaagtgcagctgatgaaccggctcaggcaccccaacatcctaaggttcatgggagtctgtgtgca

SEQ ID NO: 160313 - DNA, 120 bp, Artificial Sequence
  ENSG00000107140_5 (sequence is synthesized)
ccagggacagctgcacgctcttacagagtatatgaatggggggacattggaacagctgctcagctcccctgaacccctgtcctggccggtcaggctccacctggccctggacattgcccg

SEQ ID NO: 160314 - DNA, 120 bp, Artificial Sequence
  ENSG00000107140_6 (sequence is synthesized)
aggcctgcggtacctgcactccaaaggtgtatttcaccgcgacctcacatccaagaactgtctagtccgacgggaagatcgaggcttcaccgctgtcgtgggtgacttcgggctggccga

SEQ ID NO: 160315 - DNA, 120 bp, Artificial Sequence
  ENSG00000107140_7 (sequence is synthesized)
aaagattcctgtgtatagggagggggcaaggaaggagccattggccgtggtgggctccccatactggatggctccagaggtgttacggggtgagctgtatgatgagaaggctgatgtctt

SEQ ID NO: 160316 - DNA, 120 bp, Artificial Sequence
  ENSG00000107140_8 (sequence is synthesized)
tgccttcgggattgtcctctgtgagctcatcgcccgagtacctgcagaccctgactacctaccacgcactgaggactttggcctggatgtgcctgctttccgaactctggtgggggatga

SEQ ID NO: 160317 - DNA, 120 bp, Artificial Sequence
  ENSG00000107140_9 (sequence is synthesized)
cctttcttgctcctggccatccactgctgcaacctggaacccagcacccgtgcccccttcaccgaaattacccagcacctggaatggatcctggagcagctgcctgagccagccccactc

SEQ ID NO: 160318 - DNA, 120 bp, Artificial Sequence
  ENSG00000107140_10 (sequence is synthesized)
accaggaccgccctgacacacaatcagggctctgttgcaagagggggtccctctgccacgcttcccaggccagatccccggctttcccgaagccggtcagacctcttcctgcccccatca

SEQ ID NO: 160319 - DNA, 120 bp, Artificial Sequence
  ENSG00000107140_11 (sequence is synthesized)
ccagaatcaccccccaactggggggacaatctgactcgagtcaaccccttctcactacgggaagacctcaggggtggcaagatcaagctcttagacacacccagcaagccagtcctgcct

SEQ ID NO: 160320 - DNA, 120 bp, Artificial Sequence
  ENSG00000107140_12 (sequence is synthesized)
cttgtgccaccatcaccattcccatccactcagctgcccttggtgaccactccggagaccctggtccagcctgggacacctgcccgccgctgccgctcactaccctcatcccccgagctc

SEQ ID NO: 160321 - DNA, 120 bp, Artificial Sequence
  ENSG00000107140_13 (sequence is synthesized)
ccccgccgtatggagacagcactgccaggtcctggccctcccgctgtgggcccctcggctgaagagaagatggagtgcgagggcagcagccctgagccggaacctccagggccagcgccc

SEQ ID NO: 160322 - DNA, 120 bp, Artificial Sequence
  ENSG00000107140_14 (sequence is synthesized)
cagctgcctctggctgtggccacagacaacttcatcagcacctgttcctcggcctcccaaccctggtcccctagatcaggacccgtcctcaataacaatcccccagctgtggtggtgaac

SEQ ID NO: 160323 - DNA, 120 bp, Artificial Sequence
  ENSG00000107140_15 (sequence is synthesized)
tccccacaaggctgggctggggagccctggaaccgggcccagcatagcctgccccgggcggcagccctggagcggacagaaccctcgccacccccttcagctccccgggagcccgatgag

SEQ ID NO: 160324 - DNA, 120 bp, Artificial Sequence
  ENSG00000107140_16 (sequence is synthesized)
gggctgccctgtcctggctgctgcctcggccccttcagctttggcttcctgtccatgtgcccccgccccacaccagctgttgcccgctaccgcaacctgaactgtgaggcgggcagtctc

SEQ ID NO: 160325 - DNA, 120 bp, Artificial Sequence
  ENSG00000107140_17 (sequence is synthesized)
ctctgccaccgagggcaccacgccaagccacccacacccagcctgcagctgcctggggcacgctcttagcagtggagcccgtggtctcaggcctccaactttggccttcaggacaccctg

SEQ ID NO: 160326 - DNA, 120 bp, Artificial Sequence
  ENSG00000107140_18 (sequence is synthesized)
taagaacagagcacacttgctggacagtgccagttccagatgggctgaccggctcttctccccgtgtaggggagccccagcatggactcaagggacagagcacttccagtcgaccccccg

SEQ ID NO: 160327 - DNA, 120 bp, Artificial Sequence
  ENSG00000107140_19 (sequence is synthesized)
gctcgcgttcccgtggggatcactgaaccagacacagcattgctgacacatgagactaacacgtgcaattatttaaaaagatttcaataaaactgcctggctggctccgggccgccccta

SEQ ID NO: 160328 - DNA, 120 bp, Artificial Sequence
  ENSG00000107140_20 (sequence is synthesized)
ctcacatccaaggtaggctagcagggtgggtggagacatgaaagagggtttgaggctattaggttgtaactggcctgtggatgttggaatatggataacagatatattaggatgttggag

SEQ ID NO: 160329 - DNA, 120 bp, Artificial Sequence
  ENSG00000107140_21 (sequence is synthesized)
tggcaaggcattggagaatattgggggaccagggtgaggggagtgctcggagggactgagtagcaccctgtgtttggagtgttggatgatgttgcaatattgaagtgccttgaaaaactg

SEQ ID NO: 160330 - DNA, 120 bp, Artificial Sequence
  ENSG00000107140_22 (sequence is synthesized)
ggagagcagagagggttggagttatgctggagtgacagggctttgggttatacattgggaggccagacagcagaaggtgatgagtgcgtggggatactatgtgtgtgtgtgtcagaactg

SEQ ID NO: 160331 - DNA, 120 bp, Artificial Sequence
  ENSG00000107140_23 (sequence is synthesized)
tgagaaggtgagacatcaacccttcagatccccaaggccttccgagacccttgaggtattctcataaagccccatccatccccaaaacaaccctaccagatcttcaggagtccccaagat

SEQ ID NO: 160332 - DNA, 120 bp, Artificial Sequence
  ENSG00000107140_24 (sequence is synthesized)
gaagatcgaggcttcaccgctgtcgtgggtgacttcgggctggccgaaaagattcctgtgtataggtgagatgaatgtccctgttccccccaaatctcccagagtgcccctatctgatgt

SEQ ID NO: 160333 - DNA, 120 bp, Artificial Sequence
  ENSG00000107140_25 (sequence is synthesized)
ccccagagccccagggatgtttcccttggggaacggagggagttcacctcatccccttttgcctgggggggatgcctgaataggatgcttctgaccactctgcccctgcccctgcaggga

SEQ ID NO: 160334 - DNA, 120 bp, Artificial Sequence
  ENSG00000107147_0 (sequence is synthesized)
agggcaacgcgagggaagaaggtggcggctcccactcgcttctccctcgggtcgggtccgagctgccaggccgcatgccactccctgacggggcgcggaccccggggggcgtctgccggg

SEQ ID NO: 160335 - DNA, 120 bp, Artificial Sequence
  ENSG00000107147_1 (sequence is synthesized)
aggcgcgcggcgggggctacaccaaccggaccttcgagtttgacgacggccaatgcgcccccaggcggccctgcgcgggggacggcgcgctcctggacaccgccggcttcaagatgagcg

SEQ ID NO: 160336 - DNA, 120 bp, Artificial Sequence
  ENSG00000107147_2 (sequence is synthesized)
acctggactccgaggtgctgcccttgccgccgcgctaccgcttccgggacctgctgctgggcgacccgtccttccagaacgacgacagggtccaggtggagttctacgtcaacgagaaca

SEQ ID NO: 160337 - DNA, 120 bp, Artificial Sequence
  ENSG00000107147_3 (sequence is synthesized)
ccttcaaggagcggctcaagctgttcttcatcaaaaaccaaagatcgagcctgaggatccggctgttcaacttctccctgaagctgctcacctgcctgctctacattgtgcgcgtcctgc

SEQ ID NO: 160338 - DNA, 120 bp, Artificial Sequence
  ENSG00000107147_4 (sequence is synthesized)
tcgatgacccggccctgggcatcggatgctggggctgcccaaagcagaactactccttcaatgactcgtcctccgagatcaactgggctcctattctgtgggtggagagaaagatgacac

SEQ ID NO: 160339 - DNA, 120 bp, Artificial Sequence
  ENSG00000107147_5 (sequence is synthesized)
tgtgggcgatccaggtcatcgtggccataataagcttcctggagacgatgcttctcatctacctcagctacaaaggcaacatctgggagcagatcttccgcgtgtccttcgtcctggaga

SEQ ID NO: 160340 - DNA, 120 bp, Artificial Sequence
  ENSG00000107147_6 (sequence is synthesized)
tgatcaacactctgcccttcatcatcacgatcttctggccgccgctgcggaacctgttcatccccgtctttctgaactgctggctggccaagcacgcgctggaaaacatgattaatgact

SEQ ID NO: 160341 - DNA, 120 bp, Artificial Sequence
  ENSG00000107147_7 (sequence is synthesized)
tccaccgtgccatcctgcggacacagtcagccatgttcaaccaggtcctcatcctcttctgcaccctgctgtgcctcgttttcacggggacctgcggcatccagcacctggagcgggcgg

SEQ ID NO: 160342 - DNA, 120 bp, Artificial Sequence
  ENSG00000107147_8 (sequence is synthesized)
gcgagaacctgtccctcctgacctccttctacttctgcatcgtcaccttctccaccgtgggctacggtgacgtcacgcccaagatctggccatcgcagctgctggtggtcatcatgatct

SEQ ID NO: 160343 - DNA, 120 bp, Artificial Sequence
  ENSG00000107147_9 (sequence is synthesized)
gcgtggccctcgtggtgctcccactgcagttcgaggagctcgtctacctctggatggagcggcagaagtcagggggcaactacagccgccaccgtgcgcagacggagaagcacgtggtcc

SEQ ID NO: 160344 - DNA, 120 bp, Artificial Sequence
  ENSG00000107147_10 (sequence is synthesized)
tgtgtgtcagctccctcaagatcgaccttctcatggacttcctgaacgagttctacgcccacccccggctccaggactattacgtggtcatcctgtgccccacggagatggatgtccagg

SEQ ID NO: 160345 - DNA, 120 bp, Artificial Sequence
  ENSG00000107147_11 (sequence is synthesized)
tgcgcagagtcctgcagatccctctgtggtcccagcgggtcatctacctccagggctctgcactcaaagaccaggacctcatgcgagccaagatggacaatggggaggcctgcttcatcc

SEQ ID NO: 160346 - DNA, 120 bp, Artificial Sequence
  ENSG00000107147_12 (sequence is synthesized)
tcagcagcaggaacgaggtggaccgcacggctgcagaccaccagaccatcctgcgcgcctgggccgtgaaggacttcgcccccaactgccccctctacgtccagatcctcaaacctgaaa

SEQ ID NO: 160347 - DNA, 120 bp, Artificial Sequence
  ENSG00000107147_13 (sequence is synthesized)
acaagtttcacgtcaagtttgctgaccacgtggtgtgtgaggaggagtgcaagtacgccatgctggcgctgaactgcatctgcccggcgacctccaccctcatcaccctgctggtgcaca

SEQ ID NO: 160348 - DNA, 120 bp, Artificial Sequence
  ENSG00000107147_14 (sequence is synthesized)
cgtcccgcggccaggagggacaggagtctccggagcagtggcagcgcatgtatgggcgctgctccggcaacgaggtgtaccacatccgcatgggtgacagcaagttcttccgcgagtacg

SEQ ID NO: 160349 - DNA, 120 bp, Artificial Sequence
  ENSG00000107147_15 (sequence is synthesized)
agggcaagagcttcacctacgcggccttccacgcccacaagaagtatggcgtgtgcctcatcgggctgaagcgggaggacaacaagagcatcctgctgaacccggggccccggcacatcc

SEQ ID NO: 160350 - DNA, 120 bp, Artificial Sequence
  ENSG00000107147_16 (sequence is synthesized)
tggccgcctctgacacctgcttctacatcaacatcaccaaggaggagaactcggccttcatcttcaagcaggaggagaagcggaagaagagggccttctcggggcaggggctgcacgagg

SEQ ID NO: 160351 - DNA, 120 bp, Artificial Sequence
  ENSG00000107147_17 (sequence is synthesized)
gtccggcccgcctgcccgtgcacagcatcatcgcctccatggggacagtggccatggacctgcagggcacagagcaccggcctacgcagagcggcggtgggggcgggggcagcaagctgg

SEQ ID NO: 160352 - DNA, 120 bp, Artificial Sequence
  ENSG00000107147_18 (sequence is synthesized)
cactgcccacggagaacggctcgggcagccggcggcccagcatcgcgcccgtcctggaactggccgacagctcagccctgctgccctgcgacctgctgagcgaccagtcggaggatgagg

SEQ ID NO: 160353 - DNA, 120 bp, Artificial Sequence
  ENSG00000107147_19 (sequence is synthesized)
tgacgccgtcggacgacgaggggctctccgtggtagagtatgtgaagggctaccctcccaactcgccctacatcggcagctccccaaccctgtgccacctcctgcctgtgaaagccccct

SEQ ID NO: 160354 - DNA, 120 bp, Artificial Sequence
  ENSG00000107147_20 (sequence is synthesized)
tctgctgcctgcggctggacaagggctgcaagcacaacagctatgaagacgccaaggcctacgggttcaagaacaagctgatcatcgtctcggcagagacggccggcaatgggctgtaca

SEQ ID NO: 160355 - DNA, 120 bp, Artificial Sequence
  ENSG00000107147_21 (sequence is synthesized)
acttcatcgtgccactgcgggcctactacagatcccgcaaggagctgaaccccatcgtgctgctgctggacaacaagcccgaccaccacttcctggaagccatctgctgcttccccatgg

SEQ ID NO: 160356 - DNA, 120 bp, Artificial Sequence
  ENSG00000107147_22 (sequence is synthesized)
tctactacatggagggctctgtggacaacctggacagcctgctgcagtgtggcatcatctatgcggacaacctggtggtggtggacaaggagagcaccatgagcgccgaggaggactaca

SEQ ID NO: 160357 - DNA, 120 bp, Artificial Sequence
  ENSG00000107147_23 (sequence is synthesized)
tggcggacgccaagaccatcgtcaacgtgcagaccatgttccggctcttccccagcctcagcatcaccacggagctcacccacccttccaacatgcgcttcatgcagttccgcgccaagg

SEQ ID NO: 160358 - DNA, 120 bp, Artificial Sequence
  ENSG00000107147_24 (sequence is synthesized)
acagctactctctggctctttccaaactagaaaagagggagcgagagaatggctccaacctggccttcatgttccgcctgccgttcgccgccggccgcgtcttcagcatcagcatgttgg

SEQ ID NO: 160359 - DNA, 120 bp, Artificial Sequence
  ENSG00000107147_25 (sequence is synthesized)
acacactgctctaccagtccttcgtgaaggactacatgatcaccatcacccggctgctgctgggcctggacaccacgccgggctcggggtacctctgtgccatgaaaatcaccgagggcg

SEQ ID NO: 160360 - DNA, 120 bp, Artificial Sequence
  ENSG00000107147_26 (sequence is synthesized)
acctgtggatccgcacgtacggccgcctcttccagaagctctgctcctccagcgccgagatccccattggcatctaccggacagagagccacgtcttctccacctcggagccccacgacc

SEQ ID NO: 160361 - DNA, 120 bp, Artificial Sequence
  ENSG00000107147_27 (sequence is synthesized)
tcagagcccagtcccagatctcggtgaacgtggaggactgtgaggacacacgggaagtgaaggggccctggggctcccgcgctggcaccggaggcagctcccagggccgccacacgggcg

SEQ ID NO: 160362 - DNA, 120 bp, Artificial Sequence
  ENSG00000107147_28 (sequence is synthesized)
gcggtgaccccgcagagcacccactgctacggcgcaagagcctgcagtgggcccggaggctgagccgcaaggcgcccaagcaggcaggccgggcggcggccgcggagtggatcagccagc

SEQ ID NO: 160363 - DNA, 120 bp, Artificial Sequence
  ENSG00000107147_29 (sequence is synthesized)
cgagctggtgaagaaccgcatgaagcacctggggctgcccaccaccggctacgacgagatgaacgaccaccagaacaccctctcctacgtcctcatcaaccctccgcccgacacgaggct

SEQ ID NO: 160364 - DNA, 120 bp, Artificial Sequence
  ENSG00000107147_30 (sequence is synthesized)
ggagcccagtgacattgtctatctcatccgctccgaccccctggctcacgtggccagcagctcccagagccggaagagcagctgcagccacaagctgtcgtcctgcaaccccgagactcg

SEQ ID NO: 160365 - DNA, 120 bp, Artificial Sequence
  ENSG00000107147_31 (sequence is synthesized)
cgacgagacacagctctgagccagccctgcacggagctcaggccaccaagcccggggtcctcaggaaggacgtggaggagcgtgtgaggacacggtggcactagcgtgaccctggggatg

SEQ ID NO: 160366 - DNA, 120 bp, Artificial Sequence
  ENSG00000107147_32 (sequence is synthesized)
gcacactctactcaccatggctcctgggactccaccctggaaaggagcccctcatgcggggggagggccagctcacccctgggcacctgcaggctagtgaggagagttttttaacctatt

SEQ ID NO: 160367 - DNA, 120 bp, Artificial Sequence
  ENSG00000107147_33 (sequence is synthesized)
tttacacgtcgatgcagtccacttctctttacacagatgtaccgcaactcgtgaccagggctggctgggagggcaacgcagggactggacgccctacagggccgagcccaggctgtgctg

SEQ ID NO: 160368 - DNA, 120 bp, Artificial Sequence
  ENSG00000107147_34 (sequence is synthesized)
gagggtggggctggggtgcatggggaggggagcagaacccagaacccaggagccccgcgtgggccacacccaactcagagccggcctgagcgttcacggccaggcagcctcgcttccttg

SEQ ID NO: 160369 - DNA, 120 bp, Artificial Sequence
  ENSG00000107147_35 (sequence is synthesized)
cagccaagggctgggggccagggctgctgttctgcactctggggtgggtgagggggaccctgggctgtttgctgtcccaagccccttctggaagttagaagcagcaaagggcccggggaa

SEQ ID NO: 160370 - DNA, 120 bp, Artificial Sequence
  ENSG00000107147_36 (sequence is synthesized)
gccgggcatgtgagaggggtgcgtccccaggtcccccagagggccctgtcgccgaggacctttctgaaggaagcagaagacgccatttcctctacttcacactgaactgtcccagccact

SEQ ID NO: 160371 - DNA, 120 bp, Artificial Sequence
  ENSG00000107147_37 (sequence is synthesized)
gcatctagggggcattgggcggaagatggtgcatttccatggaccattttacacttaccttttaaagcaaagcctcattttctaaacccctgacttgtgaagcacaattcagcctccggg

SEQ ID NO: 160372 - DNA, 120 bp, Artificial Sequence
  ENSG00000107147_38 (sequence is synthesized)
ctgggccacgtggagagagaggatcttctcagcaaggcgagatcccgggcggcggctgacatcaggagcgccaccctgcgtcctttgctgctggttccttactggtttgtacggtcagcg

SEQ ID NO: 160373 - DNA, 120 bp, Artificial Sequence
  ENSG00000107147_39 (sequence is synthesized)
ctggaaacttctattaaatggatgcattctggaggcatgaagttacaagtcaagtcgccctgctcgtgtttccaaggctctcacccctcccagccaccccactttaagggttacaaacac

SEQ ID NO: 160374 - DNA, 120 bp, Artificial Sequence
  ENSG00000107147_40 (sequence is synthesized)
ctgctggggtccccaccccaaccccataggcaagcccccattccccagccaggccaggacagtccttccaaaactcgggaaccaaattgtatttggctactggtgactggatcctggtag

SEQ ID NO: 160375 - DNA, 120 bp, Artificial Sequence
  ENSG00000107147_41 (sequence is synthesized)
ccaggaaacctgcctggtggtgggggtcccagagtccaggagggctgtctggtgagctgcccatcagcctcacccctgcagccaggcatgtccctggggtgggcacagagaccccaggct

SEQ ID NO: 160376 - DNA, 120 bp, Artificial Sequence
  ENSG00000107147_42 (sequence is synthesized)
ctgcccgcagtggcacagaactcatctgaggccagtggctgctggggatcccctacactgggggtcagggctgccccaggtggggatgtgtgtgcacctcaccacgttcacttcagggta

SEQ ID NO: 160377 - DNA, 120 bp, Artificial Sequence
  ENSG00000107147_43 (sequence is synthesized)
ccccaagaggctgaaggggaaggaccaaaaggccgaggtgcagcccctccccggtgtcagggcagacaacacagcagctgctggaggggccggccctggccacacagactagctagtccc

SEQ ID NO: 160378 - DNA, 120 bp, Artificial Sequence
  ENSG00000107147_44 (sequence is synthesized)
ttactcccggcctgtctggaaccctcctgctcagaaggtgcccactagccctctgtgggggacagagccagacatgggtggtcagggagaggctgtgtggattcaggggaccagaaagta

SEQ ID NO: 160379 - DNA, 120 bp, Artificial Sequence
  ENSG00000107147_45 (sequence is synthesized)
agtcccaggaccttgatggagcggcagggattgatgttgggctagggtggccagagcctgtcccagcagggctggggtctatcacgttcctgggatccaagcagcgagcacgccctgccc

SEQ ID NO: 160380 - DNA, 120 bp, Artificial Sequence
  ENSG00000107147_46 (sequence is synthesized)
cgcagtcaccccgccccgcagtcgccctgcagctggaaggcccaagtctgcctcacctgggtggcctctcatgtcccccacaccctggcccccaggcgaggggggctgcacagcacctgc

SEQ ID NO: 160381 - DNA, 120 bp, Artificial Sequence
  ENSG00000107147_47 (sequence is synthesized)
agggaggagaagggagagaaaagccggtctggctgctgggatgggagggccacagttccagcagtggcaggggaagctgtagcccctggagccccacactggaagagctggcctgcagga

SEQ ID NO: 160382 - DNA, 120 bp, Artificial Sequence
  ENSG00000107147_48 (sequence is synthesized)
ggcaccatgggggagtcgcatgacttattcgggattgacttgcgatgtggatggtgttcccggagtcccctgtggccactccaccaccatgaggccgggaggcatcttagcctttgagcc

SEQ ID NO: 160383 - DNA, 120 bp, Artificial Sequence
  ENSG00000107147_49 (sequence is synthesized)
tctctccaggggtgagcggagccccccaaagagggctgaaggcttgctgcccaagaggggctgggtgagcacttggggcctctgagaacatcagtggtccgttccctcctgcacactggt

SEQ ID NO: 160384 - DNA, 120 bp, Artificial Sequence
  ENSG00000107147_50 (sequence is synthesized)
ggcaagtggcagcattttttcataatctccagtaatgaggccacttcgggtccagccctggacatccgaggaggaggcgggcagtccctgccccttcactaaccgcagaggatgccagct

SEQ ID NO: 160385 - DNA, 120 bp, Artificial Sequence
  ENSG00000107147_51 (sequence is synthesized)
ctaggccccctgctccgcctggagctcatgcgggcagccgtggacacaggtggcacccagcgcccagcggcctgtgaatcctcccgtgggcaaagctgggagccaggggctggaaccagg

SEQ ID NO: 160386 - DNA, 120 bp, Artificial Sequence
  ENSG00000107147_52 (sequence is synthesized)
caggtcagtgactgtgagatgccagctgccagcccaagaaaagctgcctgcagcatctggaaacttctgtgctctccttggcctctgtgttcttcatctccaggtttagggagcacccgg

SEQ ID NO: 160387 - DNA, 120 bp, Artificial Sequence
  ENSG00000107147_53 (sequence is synthesized)
gtgcctctctgcttgtcccgagcccactcaccaacagccccagcttgcacagtcatgacatcaggaaggtgggtccctgctcccagccgtcctcgtccaccatcacttctcccagcctcg

SEQ ID NO: 160388 - DNA, 120 bp, Artificial Sequence
  ENSG00000107147_54 (sequence is synthesized)
tgtcctgctgacccataaaaggtccccctgcaaagtacaccaagtgaagtaggatctgagcaaaggttgagggactgaattccctaagaagtcatcactgcctagaataagcgaaaagaa

SEQ ID NO: 160389 - DNA, 120 bp, Artificial Sequence
  ENSG00000107147_55 (sequence is synthesized)
ttttttttaatgttttacggtagaattatttgaaacatacaaaatgagtgagacacctgctattttccttattcctgttttttgtttgtttttattttccttatacctaattcatctaac

SEQ ID NO: 160390 - DNA, 81 bp, Artificial Sequence
  ENSG00000107147_56 (sequence is synthesized)
ccaggagttgagtttaagatcagcgtgggcaacatgatgaaccctgactgtatcaaaaagtacaaaaaaaaaaatagctag

SEQ ID NO: 160391 - DNA, 120 bp, Artificial Sequence
  ENSG00000107147_57 (sequence is synthesized)
ccctgactgtatcaaaaagtacaaaaaaaaaaatagctagacgtggtggcatgtgcatacagtcccaggtacccaagaggctgaggaaggaggatcacctgagctggggaggttgaggct

SEQ ID NO: 160392 - DNA, 76 bp, Artificial Sequence
  ENSG00000107147_58 (sequence is synthesized)
gatcacctgagctggggaggttgaggctgccagagaccctgtctcaaacaaaacaaacaaacaaaaaagaaaaaga

SEQ ID NO: 160393 - DNA, 80 bp, Artificial Sequence
  ENSG00000107147_59 (sequence is synthesized)
cccccgaggagcctcacgggctcagcccgctgctgccggcccgcggcgggggctccgtgggcagcgacgtgggccagagg

SEQ ID NO: 160394 - DNA, 120 bp, Artificial Sequence
  ENSG00000107147_60 (sequence is synthesized)
ttgcacccggaggcagggccaggcctggggcagccacagaagtaaagcgtcggcctctcccggctctgtgcttttccccacgatggcgctcatggaagaccctcgctctgccgggcactg

SEQ ID NO: 160395 - DNA, 120 bp, Artificial Sequence
  ENSG00000107147_61 (sequence is synthesized)
tggtgctcggacctgcagctagcggccttcatgagtgggatgcctgcgtcgcccgctcccctcacccgccaaagcttcctgcggctcccactgcagctccagggcaggcatggccacagc

SEQ ID NO: 160396 - DNA, 120 bp, Artificial Sequence
  ENSG00000107147_62 (sequence is synthesized)
gggcttggggggcgagggctcacaggactcccgcggcaggcatttcctgggctcggcctacatgcccgggagggtgacggtgccggggttctggggctggggagctgcacccccatgttt

SEQ ID NO: 160397 - DNA, 120 bp, Artificial Sequence
  ENSG00000107147_63 (sequence is synthesized)
agattcaagcggagcctaggccaagaggcagaacaggaagagtcacaccctttgcggggagggcgggcagcatcctggggcccctccagcgtgcagcccccatcccacacacacagcggg

SEQ ID NO: 160398 - DNA, 120 bp, Artificial Sequence
  ENSG00000107147_64 (sequence is synthesized)
aggaggcaccccagccccgatactcacacaaatcccctcttcacgccttcctcacagctgccgtggggggaggcactagttatccccagtttatagagaaggaaactgaggctcgggtgg

SEQ ID NO: 160399 - DNA, 120 bp, Artificial Sequence
  ENSG00000107147_65 (sequence is synthesized)
cggtagctctggcctggcgtgggggattcaggcgggagtgaccgtggatgccaagagccaggaggtctggaagcctctggggcctgcagggttaggaagcgggttggggggcgagcagag

SEQ ID NO: 160400 - DNA, 120 bp, Artificial Sequence
  ENSG00000107147_66 (sequence is synthesized)
ctaccactgaggcctggagtaaaggtcggagggtctgggtggaggagtcaggtagccctggggaccaggggcgaggtggccctgccccaggacatgcaccagaagagccaaagccagccc

SEQ ID NO: 160401 - DNA, 120 bp, Artificial Sequence
  ENSG00000107147_67 (sequence is synthesized)
ctgccccaccccaggccctcaggcacacctgctgccagccttcaccaagcaccgtggacacgcgaagctagtcctctgcgaccatcctgggcagccaggaccagtgccatgtgactgacc

SEQ ID NO: 160402 - DNA, 120 bp, Artificial Sequence
  ENSG00000107147_68 (sequence is synthesized)
acaacccaggccctggcactgcagctggggcctggcatccccacccgccccctagcccagccccaagaaacacaaagcccagcctggctcagcccagtgagctctgcttacttcagaagc

SEQ ID NO: 160403 - DNA, 120 bp, Artificial Sequence
  ENSG00000107147_69 (sequence is synthesized)
gtgtggtccgggcaccccagcgggagaagctggggcctgggggccagtctgtgcctgccggagtgaaatgagctggtggccccttgttctcggtgtcccactgggtgctcgtcacaaagc

SEQ ID NO: 160404 - DNA, 120 bp, Artificial Sequence
  ENSG00000107147_70 (sequence is synthesized)
cagtcaggcaggggggcagggtcccaagaacctactagagctgccctcaccacccactccctgtgccacctgccatgcggccaccccagaagcgtgtgtgggcacgagggtggggagggt

SEQ ID NO: 160405 - DNA, 120 bp, Artificial Sequence
  ENSG00000107147_71 (sequence is synthesized)
gtgtctccctgcacagcctcagcatgaggcccctgggcctcctccaaaggcctggggaagaccccaccatgggttttgggaaaagagcaaaacagctgtgaggggcaggtgtcaggccgt

SEQ ID NO: 160406 - DNA, 120 bp, Artificial Sequence
  ENSG00000107147_72 (sequence is synthesized)
cccatcccgcaggtgtggacacaggagctggcaccaaatgacctgccgccgtgtgcgaaaggcctgaagcagagctggtctcctggccggagctgccctggtcgcccccaagtcctagcc

SEQ ID NO: 160407 - DNA, 120 bp, Artificial Sequence
  ENSG00000107147_73 (sequence is synthesized)
tgtgcccccgccaccctggcagcagctgtgctcacactgtgggaactccaaagcccccactgcagagggaccagcatggcccccacctggctggccagcagcctccccgacttttccctt

SEQ ID NO: 160408 - DNA, 120 bp, Artificial Sequence
  ENSG00000107147_74 (sequence is synthesized)
ctcagggaccagggcagggctaccccaaggggagaggacgggcagagaggagggaatggcagcagccagggtggaggctccctggggtcccccgtcctgggtcacctttgttctctgtcc

SEQ ID NO: 160409 - DNA, 120 bp, Artificial Sequence
  ENSG00000107147_75 (sequence is synthesized)
ttggagtcctggaacaggaatccaggagcttcccgtagacaccatcagatggataaactgaggccacagaccctttccagccagtgaacccagggccactgctgggatggtggcctctcc

SEQ ID NO: 160410 - DNA, 120 bp, Artificial Sequence
  ENSG00000107147_76 (sequence is synthesized)
agactgtgagatgatgggggggctgtctctccaggaccgttctcaccctgtgggacacatgcccacgcccaccccatgagccggacgccaggctgtctcccatgaggggcagaggccatg

SEQ ID NO: 160411 - DNA, 120 bp, Artificial Sequence
  ENSG00000107147_77 (sequence is synthesized)
ttctcggagggatgagctgcggggtgggggtgctctgggctgatgccactcaggacttcagtctgaagcaaagggctgagcacagcgagtgggaatggcctgtccaggcccggggacagc

SEQ ID NO: 160412 - DNA, 120 bp, Artificial Sequence
  ENSG00000107147_78 (sequence is synthesized)
ggcagctgcagggccctgagggagggacagggctgagcagcctctggaggcgggggtgggggtgtgtggatgtggaggacggcatgcaggtgtgtatatgagtgagtgtgcaggggtctg

SEQ ID NO: 160413 - DNA, 120 bp, Artificial Sequence
  ENSG00000107147_79 (sequence is synthesized)
tggataccataggcatgggttgctatgaagatctgtgcagacacacaaatgtgtgtggaatacagaggtgaatctgcaggtgtgtgcaggtgtagatgaaggcatgcatgcatgtgaggt

SEQ ID NO: 160414 - DNA, 120 bp, Artificial Sequence
  ENSG00000107147_80 (sequence is synthesized)
gaacagacacgtcccggtgtctgcaggctgacgtacgtggcaggtgtgcgctggtgtgtgcaggtgtgctcagtgcctctgctcagggccacccctttgctgcgatgccacctagcacca

SEQ ID NO: 160415 - DNA, 120 bp, Artificial Sequence
  ENSG00000107147_81 (sequence is synthesized)
gaggtgggtgcgggtcagagctggctcccagctgccctcctggctgtcccctgccctgtgtggagatgggacaggtgtcggtcagggatgggccctggctgggctcaccaggatgaggtg

SEQ ID NO: 160416 - DNA, 120 bp, Artificial Sequence
  ENSG00000107147_82 (sequence is synthesized)
ctggagcagaatggtcaggaaggccggaaagactcagctcatcctggagcccccacacctctgggcccctgcagagctgggaggggcagggctgggggggtgacgtctgcccggctgtgt

SEQ ID NO: 160417 - DNA, 120 bp, Artificial Sequence
  ENSG00000107147_83 (sequence is synthesized)
cgcagtaggtggggagggggcaggctgccttgtctcccaggtgttagagctctgatgtgggggttagccccgggtgggtgagtaggaggcccccatgaacccgagcctgtggaagccctc

SEQ ID NO: 160418 - DNA, 120 bp, Artificial Sequence
  ENSG00000107147_84 (sequence is synthesized)
tcagagcccaggtaagcaacccctccgtgcccacgcagcttctgcggagcaccagaacatcgcagcttcacatggagaagcctgccaggccccacccacccacccacccacagggccctg

SEQ ID NO: 160419 - DNA, 120 bp, Artificial Sequence
  ENSG00000107147_85 (sequence is synthesized)
ggaaagccgaggcaggagcgggtcccacggatgtgtcggccccagcacggctcagagaaggctgttgacactcactccctcctgcactggtggtggggaagctgaggcctggggggagta

SEQ ID NO: 160420 - DNA, 120 bp, Artificial Sequence
  ENSG00000107147_86 (sequence is synthesized)
gcctgtgagtttggacaccaggtgcacccccgccccctcccaggccccaccaaggcaggcagcccccatgcccatctggcctgaccagcccccagcctcccaggcctttctgaaggtgcc

SEQ ID NO: 160421 - DNA, 120 bp, Artificial Sequence
  ENSG00000107147_87 (sequence is synthesized)
acccaggtgggatgcctacctcttcccagcaccccacgacccacaggctctggcaccccacgttccccaggttcggggcctccaaagggtgtgtttgcaagagggatcagggctcatctg

SEQ ID NO: 160422 - DNA, 120 bp, Artificial Sequence
  ENSG00000107147_88 (sequence is synthesized)
cagatggagaaattgacacgcagagggggtgacctctcagggcaaggccaggatgtgctggggtccagatgggtcccaggccggacccacagaaataagggctcagagaggcgaagggag

SEQ ID NO: 160423 - DNA, 120 bp, Artificial Sequence
  ENSG00000107147_89 (sequence is synthesized)
ctgccctcagcagcctggcgaatcccttgaccaggcccgggcagggtgggtggcccggcgatctgtgctcaggaggaaaccaggcacattctttccagaggaggaaggcacatgcaccct

SEQ ID NO: 160424 - DNA, 120 bp, Artificial Sequence
  ENSG00000107147_90 (sequence is synthesized)
ggggtctgtcgtcgtcctcttccctaacacccccagctgctcccacgcaggccccaagctgcagagcccacacctcttcctaagcccctgccccaaagcccgcgaccctcccggcagcct

SEQ ID NO: 160425 - DNA, 120 bp, Artificial Sequence
  ENSG00000107147_91 (sequence is synthesized)
ctccagggctctgcactcaaagaccaggacctcatgcgagccaatttctctagctcaggtcccaggcccagatgagcaggaccctgcagccaggcccttgtccctgcaccatacccactg

SEQ ID NO: 160426 - DNA, 120 bp, Artificial Sequence
  ENSG00000107147_92 (sequence is synthesized)
cactccccccacgtaggggctgaacacggcggggctgcagggtccaggtggagttctacgtcaacgagaacaccttcaaggagcggctcaagctgttcttcatcaaaaaccaaagatcga

SEQ ID NO: 160427 - DNA, 120 bp, Artificial Sequence
  ENSG00000107147_93 (sequence is synthesized)
ggaggcctgcttcatcctcagcagcaggaacgaggtggaccgcacggctgcacccacagaggccagcccgtctgcactgaccaaccacccaccccgccaggaccaccagaccatcctgcg

SEQ ID NO: 160428 - DNA, 120 bp, Artificial Sequence
  ENSG00000107147_94 (sequence is synthesized)
catcaaaaaccaaagatcgagtcagaagagggcagaacccactaggagagtttgagaaggagaactgggccctgactgactctcaagctactttcctagctggggctgcccaaagcagaa

SEQ ID NO: 160429 - DNA, 120 bp, Artificial Sequence
  ENSG00000107159_0 (sequence is synthesized)
accgtgtgctgggacaccccacagtcagccgcatggctcccctgtgccccagcccctggctccctctgttgatcccggcccctgctccaggcctcactgtgcaactgctgctgtcactgc

SEQ ID NO: 160430 - DNA, 120 bp, Artificial Sequence
  ENSG00000107159_1 (sequence is synthesized)
tgcttctggtgcctgtccatccccagaggttgccccggatgcaggaggattcccccttgggaggaggctcttctggggaagatgacccactgggcgaggaggatctgcccagtgaagagg

SEQ ID NO: 160431 - DNA, 120 bp, Artificial Sequence
  ENSG00000107159_2 (sequence is synthesized)
attcacccagagaggaggatccacccggagaggaggatctacctggagaggaggatctacctggagaggaggatctacctgaagttaagcctaaatcagaagaagagggctccctgaagt

SEQ ID NO: 160432 - DNA, 120 bp, Artificial Sequence
  ENSG00000107159_3 (sequence is synthesized)
tagaggatctacctactgttgaggctcctggagatcctcaagaaccccagaataatgcccacagggacaaagaaggggatgaccagagtcattggcgctatggaggcgacccgccctggc

SEQ ID NO: 160433 - DNA, 120 bp, Artificial Sequence
  ENSG00000107159_4 (sequence is synthesized)
cccgggtgtccccagcctgcgcgggccgcttccagtccccggtggatatccgcccccagctcgccgccttctgcccggccctgcgccccctggaactcctgggcttccagctcccgccgc

SEQ ID NO: 160434 - DNA, 120 bp, Artificial Sequence
  ENSG00000107159_5 (sequence is synthesized)
tcccagaactgcgcctgcgcaacaatggccacagtgtgcaactgaccctgcctcctgggctagagatggctctgggtcccgggcgggagtaccgggctctgcagctgcatctgcactggg

SEQ ID NO: 160435 - DNA, 120 bp, Artificial Sequence
  ENSG00000107159_6 (sequence is synthesized)
cttggggcgcccgggaggcctggccgtgttggccgcctttctggaggagggcccggaagaaaacagtgcctatgagcagttgctgtctcgcttggaagaaatcgctgaggaaggctcaga

SEQ ID NO: 160436 - DNA, 120 bp, Artificial Sequence
  ENSG00000107159_7 (sequence is synthesized)
gactcaggtcccaggactggacatatctgcactcctgccctctgacttcagccgctacttccaatatgaggggtctctgactacaccgccctgtgcccagggtgtcatctggactgtgtt

SEQ ID NO: 160437 - DNA, 120 bp, Artificial Sequence
  ENSG00000107159_8 (sequence is synthesized)
taaccagacagtgatgctgagtgctaagcagctccacaccctctctgacaccctgtggggacctggtgactctcggctacagctgaacttccgagcgacgcagcctttgaatgggcgagt

SEQ ID NO: 160438 - DNA, 120 bp, Artificial Sequence
  ENSG00000107159_9 (sequence is synthesized)
gattgaggcctccttccctgctggagtggacagcagtcctcgggctgctgagccagtccagctgaattcctgcctggctgctggtgacatcctagccctggtttttggcctcctttttgc

SEQ ID NO: 160439 - DNA, 120 bp, Artificial Sequence
  ENSG00000107159_10 (sequence is synthesized)
tgtcaccagcgtcgcgttccttgtgcagatgagaaggcagcacagaaggggaaccaaagggggtgtgagctaccgcccagcagaggtagccgagactggagcctagaggctggatcttgg

SEQ ID NO: 160440 - DNA, 120 bp, Artificial Sequence
  ENSG00000107159_11 (sequence is synthesized)
agaatgtgagaagccagccagaggcatctgagggggagccggtaactgtcctgtcctgctcattatgccacttccttttaactgccaagaaattttttaaaataaatatttataataaaa

SEQ ID NO: 160441 - DNA, 80 bp, Artificial Sequence
  ENSG00000107164_0 (sequence is synthesized)
cttttccggctacgggtccccaagcggagcgggaggccggaccggggagccgagcggcggcgtcggcggcgtcggcggcg

SEQ ID NO: 160442 - DNA, 120 bp, Artificial Sequence
  ENSG00000107164_1 (sequence is synthesized)
aggggcagagcgctcctgtggggatgaaggccgagggcttcgtggatgccctgcaccgggtccggcagattgctgctaaaattgattcaattcctcacttgaataattccacacctctag

SEQ ID NO: 160443 - DNA, 120 bp, Artificial Sequence
  ENSG00000107164_2 (sequence is synthesized)
tggacccctcagtatatggatacggagtacaaaaacggcccttggatgatggagtaggtaaccagttaggggccttggtacatcaaaggacggtaataacggaagaattcaaagtgcctg

SEQ ID NO: 160444 - DNA, 120 bp, Artificial Sequence
  ENSG00000107164_3 (sequence is synthesized)
acaaaatggttggatttattatcggcaggggaggtgagcagatttcacggattcaagcagaatctggttgcaaaattcagattgcttcagagagttctgggattccagagaggccctgtg

SEQ ID NO: 160445 - DNA, 120 bp, Artificial Sequence
  ENSG00000107164_4 (sequence is synthesized)
tacttaccggaaccccagaaagtattgaacaagccaaacggctcctgggacagattgtggaccgctgtcgaaatggacctggctttcataatgacatagacagcaacagcacaatccagg

SEQ ID NO: 160446 - DNA, 120 bp, Artificial Sequence
  ENSG00000107164_5 (sequence is synthesized)
agattctcattcccgcatctaaagtgggtctggtcatcggcagaggaggggaaacaatcaagcagttgcaggagcggacaggggtgaagatggtcatgatccaggatggcccattgccca

SEQ ID NO: 160447 - DNA, 120 bp, Artificial Sequence
  ENSG00000107164_6 (sequence is synthesized)
cgggagcagacaagcctcttcgtatcactggagatgcatttaaagtacagcaagcaagagaaatggtactagagattatccgagaaaaagaccaagctgactttcggggtgtacgcggcg

SEQ ID NO: 160448 - DNA, 120 bp, Artificial Sequence
  ENSG00000107164_7 (sequence is synthesized)
atttcaactctcgaatgggaggaggcagtatagaggtatctgtgcctaggtttgctgtggggattgtaataggaagaaacggggaaatgatcaaaaagatccagaatgatgctggtgtga

SEQ ID NO: 160449 - DNA, 120 bp, Artificial Sequence
  ENSG00000107164_8 (sequence is synthesized)
ggattcagtttaaaccagatgatgggattagtccagaaagagctgcccaggtcatgggccctccggatcggtgtcagcatgcagcgcatatcatcagcgagctgattcttacagcccagg

SEQ ID NO: 160450 - DNA, 120 bp, Artificial Sequence
  ENSG00000107164_9 (sequence is synthesized)
aaagagacggctttggaggcctggcagcagccagaggaagaggtcgtggccgtggcgactggagcgtgggagcccctggtggcgtccaggagataacatacacggtgccagccgataagt

SEQ ID NO: 160451 - DNA, 120 bp, Artificial Sequence
  ENSG00000107164_10 (sequence is synthesized)
gtggcctcgtcataggcaaagggggtgagaacatcaaaagcatcaaccagcagtcaggggcgcacgtggagcttcagaggaacccccctcccaacagcgaccccaacctgcggagattca

SEQ ID NO: 160452 - DNA, 120 bp, Artificial Sequence
  ENSG00000107164_11 (sequence is synthesized)
ccatcaggggggttccccagcagatcgaggtggccaggcagctcatagatgagaaagttggcgggaccaatctcggagcacctggagccttcggacagagtccattcagccagccacctg

SEQ ID NO: 160453 - DNA, 120 bp, Artificial Sequence
  ENSG00000107164_12 (sequence is synthesized)
ccccacctcatcaaaatacctttcctccaaggagctccgggtgcttcccaaacatggctgccaaggtgaatgggaacccccacagcacccctgtgagtggtcctccggcctttctgaccc

SEQ ID NO: 160454 - DNA, 120 bp, Artificial Sequence
  ENSG00000107164_13 (sequence is synthesized)
agcccacacagcaggtcccaagccagcagagccagccgcagagcagccagcccaactacagcaaggcctgggaagactattacaaaaaacagagtcacgccgccagcgctgctcctcagg

SEQ ID NO: 160455 - DNA, 120 bp, Artificial Sequence
  ENSG00000107164_14 (sequence is synthesized)
ccagctccccaccggactacacaatggcctgggcagaatattacagacagcaggtcgctttctacggacagacgttagggcaggcgcaggcccacagccaggagcagtaggacagcgtcc

SEQ ID NO: 160456 - DNA, 120 bp, Artificial Sequence
  ENSG00000107164_15 (sequence is synthesized)
tcgtggccaactctcccctcaaaatcattgtcaaagaaaacctatttgtaacagaggtttttacatttgcaaaccttttgatgaagaactgttgttttgttctgtgaaacactatattta

SEQ ID NO: 160457 - DNA, 120 bp, Artificial Sequence
  ENSG00000107164_16 (sequence is synthesized)
gattaacggaatttttctaaaaatcaggaaaattagttactaaaaattgctgatcatttttgtttcattatttttgttatttcaaatgtataagctctgggattctttttggagcaatac

SEQ ID NO: 160458 - DNA, 120 bp, Artificial Sequence
  ENSG00000107164_17 (sequence is synthesized)
ctacaaagtcaggcaccagaatgtgcctcagagctgtgacatttcaacatgatggttttggtttggtttggttttgtgtcctttttatttgcagttttttctgttgcaacagaaagtggc

SEQ ID NO: 160459 - DNA, 120 bp, Artificial Sequence
  ENSG00000107164_18 (sequence is synthesized)
ttggaagtcttaggtggtatgtaacaaattctttttaaaaattttaaagcagtatttaagtattcttaaatgtgtaaattcatttaatgttttacttctaatttcttgtatcttggctgt

SEQ ID NO: 160460 - DNA, 120 bp, Artificial Sequence
  ENSG00000107164_19 (sequence is synthesized)
ctggttttattgcatttttaaaaaaactgaactattatgtattgtaatgaatgatgtgaattctgaactgagacagataattgtattgctgtccaacaggggttgggaggggcattttgt

SEQ ID NO: 160461 - DNA, 120 bp, Artificial Sequence
  ENSG00000107164_20 (sequence is synthesized)
agggtttgtataatttctagagttcgaaaggggtaatataaaaatgtgctcgtgtgtttagcctacgtttttctcatgcctccattaccagttgcaattgtgtatctaagacctccaagc

SEQ ID NO: 160462 - DNA, 120 bp, Artificial Sequence
  ENSG00000107164_21 (sequence is synthesized)
ttgtttttaaaacaaaacaaaaaacctttctctattatctcagaaatataaatactgttatttttaatattaagaaattcaatataacttttaacacacactgtggaacattaaaccgta

SEQ ID NO: 160463 - DNA, 120 bp, Artificial Sequence
  ENSG00000107164_22 (sequence is synthesized)
ctgtggaacattaaaccgtataaaaatgtagttataactatttttaattccaaggtgttgtttgcttttttcttttaaatattttcttaatattttgtcagattaactagatgaataaat

SEQ ID NO: 160464 - DNA, 120 bp, Artificial Sequence
  ENSG00000107164_23 (sequence is synthesized)
tatgaattaaataattttgatttaatgaaagggataatatgatttccagtgtttactgtagtgtatcttgtacagataacatgtatttttaaaggaaaaaaaacggaattgaagctattt

SEQ ID NO: 160465 - DNA, 120 bp, Artificial Sequence
  ENSG00000107164_24 (sequence is synthesized)
tttcttgcatttctaattgacctgagggacattccgtttgaaatgtactgaagttacagtttctggttttttctccttatttttcttataatgcttgaaatgtctaactattaaaaaaga

SEQ ID NO: 160466 - DNA, 120 bp, Artificial Sequence
  ENSG00000107164_25 (sequence is synthesized)
caattggaaaatgttatgcatggggtttttaagaaaacaaagtgttctttttatttgactgacaattcattttacactctatataataaaatctccacaaggcatcttgtgggcaaagtc

SEQ ID NO: 160467 - DNA, 120 bp, Artificial Sequence
  ENSG00000107164_26 (sequence is synthesized)
agagtttgttaaggaccgtgtaagaggacaccacgctggcttttcagtgggcgcgtctctcctgggggcatcaccagacaaccccaggcggaagtggcggtggcccatcctcatgcaaac

SEQ ID NO: 160468 - DNA, 120 bp, Artificial Sequence
  ENSG00000107164_27 (sequence is synthesized)
tgcagtgtaagaactggggcccgggactcctcgcaaatgtgggacactgacattctgtgatgctgtcccaatgccctttcaaagcgctcagcccccaaattcccaaccaacagccatttc

SEQ ID NO: 160469 - DNA, 120 bp, Artificial Sequence
  ENSG00000107164_28 (sequence is synthesized)
agggaggggctacccaggaccaggcttttgatgaaccacgactgttcggggtgccgtcttgggagagccacgtcagtccctctgagattccaaacggccgacagcggacacctcgggacc

SEQ ID NO: 160470 - DNA, 120 bp, Artificial Sequence
  ENSG00000107164_29 (sequence is synthesized)
acatccaagcctcggggacctgtcaagacgccatcgacggtcctggaccaaatcccgcccgggaagggaagggtcgcgaccggaccctggagacccacggctgcctggcgatctgagccc

SEQ ID NO: 160471 - DNA, 120 bp, Artificial Sequence
  ENSG00000107164_30 (sequence is synthesized)
accccggcgctgccgtcccgcccccacttccgatcggtcgaaggtcacgtgccctgaccccgccccgcagacgcgactcctccagctgcgagcgtcccggctttcccttccgccggaagt

SEQ ID NO: 160472 - DNA, 120 bp, Artificial Sequence
  ENSG00000107164_31 (sequence is synthesized)
cgggcgcttgaagatatggtctttacatctctttccagtattccaggggagggaaccctacctgtttccctgataactgacttttcatgttatatattgatgctcctatagacattatat

SEQ ID NO: 160473 - DNA, 120 bp, Artificial Sequence
  ENSG00000107164_32 (sequence is synthesized)
tggatcccagaactttccaaacctgtggttccacctaaaattttatctgatgaattgttactttactgcctagctgccaaccagtacagtagtgagtatccatcttacttagacttcaga

SEQ ID NO: 160474 - DNA, 120 bp, Artificial Sequence
  ENSG00000107164_33 (sequence is synthesized)
ttacagtgctctcctctacagtacagggtcctgaaccttgtttctcactggctactaatatgtaatggctttcgctctgtgctgatgtgtgacagtcaccttgttggccttctatgtccg

SEQ ID NO: 160475 - DNA, 120 bp, Artificial Sequence
  ENSG00000107164_34 (sequence is synthesized)
ggaagaattatagtcactgccctaaagggctcagatcctcagtttgcagaaggcctgtagttgaacataaagtgaattttgaaccattgagaagacattccgcttctcttgagccagtgg

SEQ ID NO: 160476 - DNA, 120 bp, Artificial Sequence
  ENSG00000107164_35 (sequence is synthesized)
ttgaactcatattcttggacaacctgctccagagggagaccctctggtaaatgctgacctaatgtggattgttgaagcagtggtgtttactactagcagtgaaaacttcattggaattgt

SEQ ID NO: 160477 - DNA, 120 bp, Artificial Sequence
  ENSG00000107164_36 (sequence is synthesized)
tctcagctctgaaatgcaccattgactggagcagtaataagcccaatggagacagggctgtaagtgtgttccttctgaatgttaacagctggaggtccatactatctccaaggatttgat

SEQ ID NO: 160478 - DNA, 120 bp, Artificial Sequence
  ENSG00000107164_37 (sequence is synthesized)
ggcctttaaaaactaaagaaaaaccaggttggtgggtaattttaggtttattgtatatagatttgcattgggcaagaacggaatgttagaaatctgtaatactgtatgctgatggtaaac

SEQ ID NO: 160479 - DNA, 120 bp, Artificial Sequence
  ENSG00000107164_38 (sequence is synthesized)
ttactgtaaggatctcatttgggtatctggaaggtgatagttctgtttctttgttatatacacagcatgttacagagatgtgatttttctccccattaaacagaactaaaagacagtata

SEQ ID NO: 160480 - DNA, 120 bp, Artificial Sequence
  ENSG00000107164_39 (sequence is synthesized)
tttatttaaacgcaaagctttttccccttttatgtctcctcataaactccagagacagtctggaaggccctcttaaatttgtcaaagagcagtaaagtgtctcacgctcagtttttctag

SEQ ID NO: 160481 - DNA, 120 bp, Artificial Sequence
  ENSG00000107164_40 (sequence is synthesized)
cagatcgtaatactctcagttgaccctgctgggatttgaacctgcagtttctattaagtttggtgtgtgaagtccaacaccttatcaactaggctttccctctgacatcttgaagcctcc

SEQ ID NO: 160482 - DNA, 120 bp, Artificial Sequence
  ENSG00000107164_41 (sequence is synthesized)
gtgtatatcctttggactctgcagcaaagtgcatcagttgttagtttactctgagcatggtattcttagattgaaaagaagtctctgaagatgtcaaataaaatgtaaacattttctcca

SEQ ID NO: 160483 - DNA, 120 bp, Artificial Sequence
  ENSG00000107164_42 (sequence is synthesized)
ctcacctcactgcctcccagacctccctgccttccagccgtccggagggagagcagatgcccagggcctttgggaagggtcctgcccagtgcacctccgctcccgataacctgtgtttcc

SEQ ID NO: 160484 - DNA, 120 bp, Artificial Sequence
  ENSG00000107164_43 (sequence is synthesized)
agatgggccactgctcacctcaatggggacgtagaatggcagaaagagccttgggccagcctaagttgacgggagagtcaagcaggggaccaatctcggagcacctggagccttcggaca

SEQ ID NO: 160485 - DNA, 120 bp, Artificial Sequence
  ENSG00000107164_44 (sequence is synthesized)
cacacctctagtggacccctcagtatatggatacggagtacaaaaacggcccttggatgatggagattattattaaaattggcagagtattactcttcagaaagaatttatgatatcgta

SEQ ID NO: 160486 - DNA, 120 bp, Artificial Sequence
  ENSG00000107164_45 (sequence is synthesized)
ggatgactcacagcccaggcagttcgtattatatagtgcacaagggaaacgagaactacacctgtatatgctggaattgctccaacgggacctttagaagcaagaagatgcattgtcaac

SEQ ID NO: 160487 - DNA, 120 bp, Artificial Sequence
  ENSG00000107164_46 (sequence is synthesized)
cagcacacaccattagtggaaacaggactgattttacccagcatttttccttttttacaggaaaatgagtgtagttccattcaattgaatatgataggtgttcccatctgcctccttagt

SEQ ID NO: 160488 - DNA, 120 bp, Artificial Sequence
  ENSG00000107164_47 (sequence is synthesized)
gtgacccctcctcattgcgaagactgaggagaggttcctgttcctggagttggacatagaagttggccatatgagtacccagcgcccctgatctaactgctggttttcatttttaggcag

SEQ ID NO: 160489 - DNA, 120 bp, Artificial Sequence
  ENSG00000107164_48 (sequence is synthesized)
caaatgggaatgttccgaagggaatgaaactgcaatcacatgtttcagccttgggtggactccagcatttgcatggaggagggagatgatttatccttcctaagcatctgccagctcaga

SEQ ID NO: 160490 - DNA, 120 bp, Artificial Sequence
  ENSG00000107164_49 (sequence is synthesized)
gttgactctggacttgaacctgatttcctctcagtgatgcggctctcagcagcccatctatctgtgggatgatagtgtgaacattttcatctctggtcattatgagtgcctccaccgtgg

SEQ ID NO: 160491 - DNA, 120 bp, Artificial Sequence
  ENSG00000107164_50 (sequence is synthesized)
ctggcaggaatggtgtcatgtgcgtggcacctgtaacacatactttgccaacaaaaaggaattgccatttttgtgatgagcacaaaatttcaaatggcttttgaacaggagccctctgaa

SEQ ID NO: 160492 - DNA, 120 bp, Artificial Sequence
  ENSG00000107164_51 (sequence is synthesized)
tattcttgtgaatctcaggaagttctttatggtagcactgccctttgtttctgtggcttttctggctgagacagaaatttctgaagatcatcggccctttgacatcctttaccaaacaac

SEQ ID NO: 160493 - DNA, 120 bp, Artificial Sequence
  ENSG00000107164_52 (sequence is synthesized)
gcagtggaccagaacccacggtgcggcctcattcccccagctgaggaatgctgagcacctctcctctgtgttctcatcatttcaagacattttagttcttctggcttcagtagattcttt

SEQ ID NO: 160494 - DNA, 120 bp, Artificial Sequence
  ENSG00000107164_53 (sequence is synthesized)
acccactaagaggggaattctgatagcaatcagggaagctgagcttgacccataaataggaacagctaaccaagctcacagtaggtaaccagttaggggccttggtacatcaaaggacgg

SEQ ID NO: 160495 - DNA, 120 bp, Artificial Sequence
  ENSG00000107165_0 (sequence is synthesized)
aacagttctgacgtgagaggacaagaaacacaagcaaatataaaacattcaattctaagagaagttcatcagagacatccttcaggattgtgagctggattttcctctacgtgcttcagt

SEQ ID NO: 160496 - DNA, 120 bp, Artificial Sequence
  ENSG00000107165_1 (sequence is synthesized)
cttctctacacaaagagctgcaaaccaggtctttgttttgcactcttatttcaagcagaatgagtgctcctaaactcctctctctgggctgtatcttcttccccttgctactttttcagc

SEQ ID NO: 160497 - DNA, 120 bp, Artificial Sequence
  ENSG00000107165_2 (sequence is synthesized)
aggcccgggctcaattcccaagacagtgtgccactgttgaggctttgagaagtggtatgtgttgcccagacctgtcccctgtgtctgggcctgggacagaccgctgtggctcatcatcag

SEQ ID NO: 160498 - DNA, 120 bp, Artificial Sequence
  ENSG00000107165_3 (sequence is synthesized)
ggaggggcagatgtgaggcagtgactgcagactcccggccccacagccctcagtatccccatgatggcagagatgatcgggaggtctggcccttgcgcttcttcaataggacatgtcact

SEQ ID NO: 160499 - DNA, 120 bp, Artificial Sequence
  ENSG00000107165_4 (sequence is synthesized)
gcaacggcaatttctcaggacacaactgtgggacgtgccgtcctggctggagaggagctgcctgtgaccagagggttctcatagtcaggagaaatcttctggacttaagtaaagaagaaa

SEQ ID NO: 160500 - DNA, 120 bp, Artificial Sequence
  ENSG00000107165_5 (sequence is synthesized)
agaaccactttgtccgggccctggatatggcaaagcgcacaactcaccctttatttgtcattgccaccaggagatcagaagaaatactggggccagatggcaacacgccacaatttgaga

SEQ ID NO: 160501 - DNA, 120 bp, Artificial Sequence
  ENSG00000107165_6 (sequence is synthesized)
acatttccatttataactactttgtttggacacactattactcagtcaaaaagactttccttggggtaggacaggaaagctttggtgaagtggatttctctcatgagggaccagcttttc

SEQ ID NO: 160502 - DNA, 120 bp, Artificial Sequence
  ENSG00000107165_7 (sequence is synthesized)
tcacatggcacaggtaccacctcctgcgtctggagaaagacatgcaggaaatgttgcaagagccttctttctcccttccttactggaattttgcaacggggaaaaatgtctgtgatatct

SEQ ID NO: 160503 - DNA, 120 bp, Artificial Sequence
  ENSG00000107165_8 (sequence is synthesized)
gcacggatgacttgatgggatccagaagcaactttgattccactctaataagcccaaactctgtcttttctcaatggcgagtggtctgtgactccttggaagattatgataccctgggaa

SEQ ID NO: 160504 - DNA, 120 bp, Artificial Sequence
  ENSG00000107165_9 (sequence is synthesized)
cactttgtaacagcaccgaggatgggccaattaggagaaatccagctggaaatgtggccagaccaatggtgcaacgtcttcctgaaccacaggatgtcgctcagtgcttggaagttggtt

SEQ ID NO: 160505 - DNA, 120 bp, Artificial Sequence
  ENSG00000107165_10 (sequence is synthesized)
tatttgacacgcctcctttttattccaactctacaaacagtttccgaaacacagtggaaggttacagtgaccccacgggaaagtatgaccctgctgttcgaagtcttcacaatttggctc

SEQ ID NO: 160506 - DNA, 120 bp, Artificial Sequence
  ENSG00000107165_11 (sequence is synthesized)
atctattcctgaatggaacagggggacaaacccatttgtctccaaatgatcctatttttgtcctcctgcacaccttcacagatgcagtctttgatgaatggctgaggagatacaatgctg

SEQ ID NO: 160507 - DNA, 120 bp, Artificial Sequence
  ENSG00000107165_12 (sequence is synthesized)
attggaaaatgcccctattggacataatagacaatacaacatggtgccattctggcccccagtcaccaacacagaaatgtttgttactgctccagacaacctgggatacacttatgaaat

SEQ ID NO: 160508 - DNA, 120 bp, Artificial Sequence
  ENSG00000107165_13 (sequence is synthesized)
tcaatggccaagtcgggagtttagtgtacctgagataattgccatagcagtagttggcgctttgttactggttgcactcatttttgggactgcttcttatctgattcgtgccagacgcag

SEQ ID NO: 160509 - DNA, 120 bp, Artificial Sequence
  ENSG00000107165_14 (sequence is synthesized)
tatggatgaagctaaccagcctctcctcactgatcagtatcaatgctatgctgaagaatatgaaaaactccagaatcctaatcagtctgtggtctaacaaatgccctactctcttatgca

SEQ ID NO: 160510 - DNA, 120 bp, Artificial Sequence
  ENSG00000107165_15 (sequence is synthesized)
ttagtatcacaaaaccacctggttgaatataatagattgagttattaactgtattttctttcactttattaccttctttctaatacaagcatatgttagcattaaagttctaggcatact

SEQ ID NO: 160511 - DNA, 120 bp, Artificial Sequence
  ENSG00000107165_16 (sequence is synthesized)
tttcaaagctgggaagaccctttcagaatcttttcaatgggttttaattttcagttctatttaaaatggtgaatgacactaaactccatgatatttaaggatagtgtgaagatctttggc

SEQ ID NO: 160512 - DNA, 120 bp, Artificial Sequence
  ENSG00000107165_17 (sequence is synthesized)
atgatttaaaggttgagtatgtgaagatataagtaagtgaactaccatgctttgtttacgtgtaaaggaaaataatgtttgatagtaaatgtccacttaaaatacatgaatgggcatttc

SEQ ID NO: 160513 - DNA, 120 bp, Artificial Sequence
  ENSG00000107165_18 (sequence is synthesized)
taaaatgttaaaacataaacacatttccattcatggatatttgtcaacagatttaaagaaaaccacagttattaattaaagaaaattaattatgtgtagttataaaccaatgaaattttg

SEQ ID NO: 160514 - DNA, 120 bp, Artificial Sequence
  ENSG00000107165_19 (sequence is synthesized)
attaaccttttcaaattaatgttccagtttgaagaccaatcaaatatattatttagtcaacatatactatttagtctcaggttcaaggctacaacaaaaatcaccatctttgtcaaactt

SEQ ID NO: 160515 - DNA, 120 bp, Artificial Sequence
  ENSG00000107165_20 (sequence is synthesized)
tggagagggaaaatcttcactttcttaagcaacaatggatattgcctgtgtttgccactgtgtttccctgcctctcaattcgctgaaaaaggaactacctatccttacatttcacctact

SEQ ID NO: 160516 - DNA, 120 bp, Artificial Sequence
  ENSG00000107165_21 (sequence is synthesized)
aatgtctcttctaacatcttagaggtccatggagaaggcatatggagaacatgttttatactgctctataaatagtattccaatcactgtgcttaatttaaatagcattatcttatcatt

SEQ ID NO: 160517 - DNA, 120 bp, Artificial Sequence
  ENSG00000107165_22 (sequence is synthesized)
tatcagccttttatgtattttccaagtaaaatattaacatattatttcattggtcttcttttttatctggttctatatgaatgctattttttcccttctcttctaacatgaaatatattt

SEQ ID NO: 160518 - DNA, 120 bp, Artificial Sequence
  ENSG00000107165_23 (sequence is synthesized)
tctctttttgatcttgtgctatgaaacaatcttccaaagaactgtataaggtggtcataagtgaatattttaattaaaattggtaaaaataaataataacagtaataatcatgcactata

SEQ ID NO: 160519 - DNA, 120 bp, Artificial Sequence
  ENSG00000107165_24 (sequence is synthesized)
aaatacatttaatgaattttattcaaattgctttatgtaatttttaaaaattattcaagatcaccataggtgatgaaatactaaaactcccctgcttttaaactctcttttttattaagt

SEQ ID NO: 160520 - DNA, 120 bp, Artificial Sequence
  ENSG00000107165_25 (sequence is synthesized)
ggtatattggtactgtattcaaagcattttctgttttatgtaatttctcatcctgctgtagtgaaacttcatatctttattcagtgtaaaataagaataaaattttttcaggttctcctt

SEQ ID NO: 160521 - DNA, 120 bp, Artificial Sequence
  ENSG00000107165_26 (sequence is synthesized)
ataaaagttatctcactaaatacttgagactcaaagtgatatacttcacttttccatacagcctgcagacaaaacccatcatatagctctgcctagctacaaggggatggcaaaatataa

SEQ ID NO: 160522 - DNA, 120 bp, Artificial Sequence
  ENSG00000107165_27 (sequence is synthesized)
aaagactttccttggggtaggacaggaaagctttggtgaagtggatttctctcatgagggaccagcttttctcacatggcacaggtaccacctcctgcgtctggagaaagacatgcaggc

SEQ ID NO: 160523 - DNA, 120 bp, Artificial Sequence
  ENSG00000107165_28 (sequence is synthesized)
ctccctcccaccatctctcttctttaaggctcctatcatattatctatccctagtatcacagttctttgtttgttactgcccttcacaaagtttcattatttctcacattaattgctgaa

SEQ ID NO: 160524 - DNA, 120 bp, Artificial Sequence
  ENSG00000107165_29 (sequence is synthesized)
gagggttctcataggtaagtggagatatgaatgagttcataagtcctgcatgagactcaaggctcttaataaaatcttaaatcatttgagctggaggaatacctggaaatcatatagctc

SEQ ID NO: 160525 - DNA, 120 bp, Artificial Sequence
  ENSG00000107175_0 (sequence is synthesized)
gtagagggacagtggataggtgcccgaggcctacagctggcctggggctcgtgtctgggcttcggacgttggggcccggtggcccaccctttccgtagttgtcccaaatggagctggaat

SEQ ID NO: 160526 - DNA, 120 bp, Artificial Sequence
  ENSG00000107175_1 (sequence is synthesized)
tggatgctggtgaccaagacctgctggccttcctgctagaggaaagtggagatttggggacggcacccgatgaggccgtgagggccccactggactgggcgctgccgctttctgaggtac

SEQ ID NO: 160527 - DNA, 120 bp, Artificial Sequence
  ENSG00000107175_2 (sequence is synthesized)
cgagcgactgggaagtagatgatttgctgtgctccctgctgagtcccccagcgtcgttgaacattctcagctcctccaacccctgccttgtccaccatgaccacacctactccctcccac

SEQ ID NO: 160528 - DNA, 120 bp, Artificial Sequence
  ENSG00000107175_3 (sequence is synthesized)
gggaaactgtctctatggatctagagagtgagagctgtagaaaagaggggacccagatgactccacagcatatggaggagctggcagagcaggagattgctaggctagtactgacagatg

SEQ ID NO: 160529 - DNA, 120 bp, Artificial Sequence
  ENSG00000107175_4 (sequence is synthesized)
aggagaagagtctattggagaaggaggggcttattctgcctgagacacttcctctcactaagacagaggaacaaattctgaaacgtgtgcggaggaagattcgaaataaaagatctgctc

SEQ ID NO: 160530 - DNA, 120 bp, Artificial Sequence
  ENSG00000107175_5 (sequence is synthesized)
aagagagccgcaggaaaaagaaggtgtatgttgggggtttagagagcagggtcttgaaatacacagcccagaatatggagcttcagaacaaagtacagcttctggaggaacagaatttgt

SEQ ID NO: 160531 - DNA, 120 bp, Artificial Sequence
  ENSG00000107175_6 (sequence is synthesized)
accagcagcagcagcacctgcatcttggtcctactagtctccttctgcctcctccttgtacctgctatgtactcctctgacacaagggggagcctgccagctgagcatggagtgttgtcc

SEQ ID NO: 160532 - DNA, 120 bp, Artificial Sequence
  ENSG00000107175_7 (sequence is synthesized)
cgccagcttcgtgccctccccagtgaggacccttaccagctggagctgcctgccctgcagtcagaagtgccgaaagacagcacacaccagtggttggacggctcagactgtgtactccag

SEQ ID NO: 160533 - DNA, 120 bp, Artificial Sequence
  ENSG00000107175_8 (sequence is synthesized)
gcccctggcaacacttcctgcctgctgcattacatgcctcaggctcccagtgcagagcctcccctggagtggccattccctgacctcttctcagagcctctctgccgaggtcccatcctc

SEQ ID NO: 160534 - DNA, 120 bp, Artificial Sequence
  ENSG00000107175_9 (sequence is synthesized)
cccctgcaggcaaatctcacaaggaagggaggatggcttcctactggtagcccctctgtcattttgcaggacagatactcaggctagatatgaggatatgtggggggtctcagcaggagc

SEQ ID NO: 160535 - DNA, 120 bp, Artificial Sequence
  ENSG00000107175_10 (sequence is synthesized)
ctggggggctccccatctgtgtccaaataaaaagcggtgggcaagggctggccgcagctcctgtgccctgtcaggacgactgagggctcaaacacaccacacttaatggctttctgggtc

SEQ ID NO: 160536 - DNA, 120 bp, Artificial Sequence
  ENSG00000107175_11 (sequence is synthesized)
ttttatttgtacccatgtgtctgtcacaccatgaatgtacctggggaaatcaactgacctccctgaacatttcacgcagtcagggaacaggtgaggaaagaaataaataagtgattctaa

SEQ ID NO: 160537 - DNA, 120 bp, Artificial Sequence
  ENSG00000107185_0 (sequence is synthesized)
agtcccgcctctaccgcccagcggacgccgccgccgccgccgccgccgcgtacctagccaggtccctgaggggcgggcagatgaggcctaggggtgccgatccctagtgtcgactatgcg

SEQ ID NO: 160538 - DNA, 120 bp, Artificial Sequence
  ENSG00000107185_1 (sequence is synthesized)
agatctgattccggagctgccatgattgaagtggtagcagagctcagccggggtcctgtatttttggctggggaggcgctggagtgtgtagtgaccgtcaccaacccccttccgcccacg

SEQ ID NO: 160539 - DNA, 120 bp, Artificial Sequence
  ENSG00000107185_2 (sequence is synthesized)
gccacttctgcatccagtgaggccctggcctgggccagtgcccaaatccactgccagttccatgccagtgagagtcgagtagcactgcctcctcctgactctagtcagccagatgtccag

SEQ ID NO: 160540 - DNA, 120 bp, Artificial Sequence
  ENSG00000107185_3 (sequence is synthesized)
cccgacagccagactgtctttctgccacaccgaggtgagaggggccagtgtatcctttctactccaccgaaaattctattctgtgacctgaggcttgatcctggagagtccaaatcatac

SEQ ID NO: 160541 - DNA, 120 bp, Artificial Sequence
  ENSG00000107185_4 (sequence is synthesized)
tcctacagtgaagtgctgcccatagagggaccaccctcctttcggggtcagtcagtcaagtacgtctacaaactgaccattggctgccagcgtgtcaactcccctatcactttactcaga

SEQ ID NO: 160542 - DNA, 120 bp, Artificial Sequence
  ENSG00000107185_5 (sequence is synthesized)
gtccctctgagggttcttgtgctgactggccttcaggatgtccggtttccccaggatgaggctgtagccccatccagtccattcttggaggaggatgaaggtgggaagaaagattcatgg

SEQ ID NO: 160543 - DNA, 120 bp, Artificial Sequence
  ENSG00000107185_6 (sequence is synthesized)
ctagctgagctggctggggaacgcctaatggctgccacatcctgccgcagcctccatctatacaatatcagtgatggccgagggaaagttgggacgtttggcatcttcaaatctgtgtac

SEQ ID NO: 160544 - DNA, 120 bp, Artificial Sequence
  ENSG00000107185_7 (sequence is synthesized)
agacttggcgaggacgtggtggggaccttaaacttaggggaaggaaccgtagcttgtttgcagttttcagtcagcttacagaccgaggagcgtgtacagcctgagtaccagcggcgacgt

SEQ ID NO: 160545 - DNA, 120 bp, Artificial Sequence
  ENSG00000107185_8 (sequence is synthesized)
ggggcagggggtgtcccctctgtgtcacatgtgactcacgcccggcaccaggaatcctgcctacatacaactagaaccagcttctccctcccaatccctctcagctccaccccaggcttc

SEQ ID NO: 160546 - DNA, 120 bp, Artificial Sequence
  ENSG00000107185_9 (sequence is synthesized)
tgtacagccattgtgtccttgaagtggagattgcattttgaatttgtaacgtcccgagaaccaggattggtactcctaccccctgtggaacagcccgaacctaccacctggacaggacct

SEQ ID NO: 160547 - DNA, 120 bp, Artificial Sequence
  ENSG00000107185_10 (sequence is synthesized)
gagcaagtacctgtagacaccttcagctgggacctgcccatcaaggtgctgcctactagccccaccctggcctcatatgctgccccaggccccagcaccagcaccataaccatctgaaac

SEQ ID NO: 160548 - DNA, 120 bp, Artificial Sequence
  ENSG00000107185_11 (sequence is synthesized)
tggcccaccctggtgctagttccttccggatactgagaactcagcacctggactctaatgggacccactttttccacctggggtccaatgtcgtggacagtgagagtcgggctttcagct

SEQ ID NO: 160549 - DNA, 120 bp, Artificial Sequence
  ENSG00000107185_12 (sequence is synthesized)
atagcattaatttatttgttcagaatacattggcagctgctagtggtttccctggaagtggcagcagcagtgagcagtcagcagatggatgatcagttgagtttagctggagtggggagc

SEQ ID NO: 160550 - DNA, 120 bp, Artificial Sequence
  ENSG00000107185_13 (sequence is synthesized)
aggagccccaggaacaggggtgttggctgagccccattctgggtcaggccctccccctttgcagggcagccgagggtcagatttttgcaccaaggagaactggcaggttcctgcctcctg

SEQ ID NO: 160551 - DNA, 120 bp, Artificial Sequence
  ENSG00000107185_14 (sequence is synthesized)
acgtacctcacacccagccgggaagtcgatgggatgctgggacctggggaaccaaggataggggaaggagtcagcacagtgaaaggctgcctttatccctgcccacatgttccctctctc

SEQ ID NO: 160552 - DNA, 120 bp, Artificial Sequence
  ENSG00000107185_15 (sequence is synthesized)
acagttttccccccacagagcccctttcagtggccccttggtcctcctaactaagctgtcacctaccatatgtgggcctttttgttttataacaggagtattttctctccaggtccaccc

SEQ ID NO: 160553 - DNA, 120 bp, Artificial Sequence
  ENSG00000107185_16 (sequence is synthesized)
caacctcccctgatttatagcctgaagccttatctttcacactagtgttggtcccttcaggtttggcccatcttgtattgctcttctgttcattcttacatcacagcaatctagtcactc

SEQ ID NO: 160554 - DNA, 120 bp, Artificial Sequence
  ENSG00000107185_17 (sequence is synthesized)
cctggtcatccctcagtcactcatatcagagtcattctctctggccatctttggtcactcacgtgtcacagcagcccacgccaacaggatgcagacaggtgcaatggaaacagtccttgc

SEQ ID NO: 160555 - DNA, 120 bp, Artificial Sequence
  ENSG00000107185_18 (sequence is synthesized)
ggagccaagactcacccagggtaaaatatttcccctcatagtgacagggggctagggaagaacgggaaatgttagtaggtgtaggagtgctgatgagaggcagaggctcttctggtctgg

SEQ ID NO: 160556 - DNA, 120 bp, Artificial Sequence
  ENSG00000107185_19 (sequence is synthesized)
ggtggagacagtaagtacgcactatccccgtatttagtttgtctttcctgtttcacagctggaggaagcctgggtattttgacacgggatcatctgtaaggccccatcctccctgtgccc

SEQ ID NO: 160557 - DNA, 120 bp, Artificial Sequence
  ENSG00000107185_20 (sequence is synthesized)
tctctgctgctcctccattcctaacgcttcaccccactttaccttgagcttggaagtagcacttgctgtagactcctgggtgctggaggagtagagacatcaccaagcagatgatccccc

SEQ ID NO: 160558 - DNA, 120 bp, Artificial Sequence
  ENSG00000107185_21 (sequence is synthesized)
agcctcctaggatccccttggcctgtccagcccagagcatccttagggccattgctgctgcacagccctctcagacccttcttggcctctgctcagctactctggtcttgactccttgac

SEQ ID NO: 160559 - DNA, 120 bp, Artificial Sequence
  ENSG00000107185_22 (sequence is synthesized)
tttgctttgcgttgctccttgagtcttagtttctgtctttctcccctgggctcctgtctcacactatctccctgccctctgctctcacaggctggggatgtttataaagtgaggaccctg

SEQ ID NO: 160560 - DNA, 120 bp, Artificial Sequence
  ENSG00000107185_23 (sequence is synthesized)
gccccctgctgagtagagctggaaaagttgtaactctgtttcctgaggtgagggcatgaaaacaagaggtctagctttaacaagctgtgagagctgattcatgccccggcacagctagag

SEQ ID NO: 160561 - DNA, 120 bp, Artificial Sequence
  ENSG00000107185_24 (sequence is synthesized)
ggagggaggtggccatggagggggcactggactgggcacttccccagcaaggaggcaggaggggcgagggcccccaggtggtccccagatctcttccctgacctggagagaaggaagcat

SEQ ID NO: 160562 - DNA, 120 bp, Artificial Sequence
  ENSG00000107185_25 (sequence is synthesized)
tccaccttccccctttctcccccactgccaccaccaggggtgtgtatgctgggatccctgcctggaccggagggaggcatttcctggggatggttaatcctgtgccccagccaaacccag

SEQ ID NO: 160563 - DNA, 120 bp, Artificial Sequence
  ENSG00000107185_26 (sequence is synthesized)
gagctgcaatagggtgcgacggccagaagctccaggagagtgagcaggcacctggagtggagactgtgtttccctcagatcctagggcagggtttccctaatgtatccaagaaatagggc

SEQ ID NO: 160564 - DNA, 120 bp, Artificial Sequence
  ENSG00000107185_27 (sequence is synthesized)
tgcccctcagagatggtggggagggtctcttttcctcaggcattccagaggtgaactgtccattgcttatcaccttcaaacatacagcagatgtgggatcaccccacatctggggatggt

SEQ ID NO: 160565 - DNA, 120 bp, Artificial Sequence
  ENSG00000107185_28 (sequence is synthesized)
tctttcccctttcaaagaggagcatctctaagtgccctgatgggatgaatcactccaggttcacagaggtgtcctctctttcctcccatatataatggagtgaggtttttaggaatttat

SEQ ID NO: 160566 - DNA, 120 bp, Artificial Sequence
  ENSG00000107185_29 (sequence is synthesized)
tgtagagacagtcttcttggattcagatcctgactccacttagctatgtaacctggtcagattacttcacctctctgagcctgtttcctcatctataaattggggatagtaatgccaact

SEQ ID NO: 160567 - DNA, 120 bp, Artificial Sequence
  ENSG00000107185_30 (sequence is synthesized)
cattgggctgttatgaggattactgagataatgcgtgcagtgctcttatcaccatctctggtgcgtaagcgtcaggaaatagcagttgctgtgattggggctaaagctctgaggcaaaat

SEQ ID NO: 160568 - DNA, 120 bp, Artificial Sequence
  ENSG00000107185_31 (sequence is synthesized)
gggcgacattattttctttgaatgacattaagcagtttgtgcatagctgagggcttctattggggatggctgtctcctggcatagacctctgcacctttcacactcatactccttgtcag

SEQ ID NO: 160569 - DNA, 120 bp, Artificial Sequence
  ENSG00000107185_32 (sequence is synthesized)
cagtccccaacctttttggtaccagggaccggttttgtggaaaacaatttttccaccagtggatggagggggatagcagcggggagatgattttgggatgaaactgtttcatctcagatc

SEQ ID NO: 160570 - DNA, 120 bp, Artificial Sequence
  ENSG00000107185_33 (sequence is synthesized)
ggcattagattctcataaggagtgtgcaatctagatcccttgcatgcggagttcacagtggggtttgcactcctgtgagaatctaatgcctctgctgatctgccaggaggaggagctcag

SEQ ID NO: 160571 - DNA, 120 bp, Artificial Sequence
  ENSG00000107185_34 (sequence is synthesized)
tcaggcggtaatgctcactcgcctgccgcccacctcctgctttgtgctcccgcttcctaacaggccacagactggtactggcctgtggcctgggggatggagacccctaatccatgtcac

SEQ ID NO: 160572 - DNA, 120 bp, Artificial Sequence
  ENSG00000107185_35 (sequence is synthesized)
ctttcccacctctttcaaaaacaggtacctccaggaacattttggttttggcccttgtattgacttctgaatgtctagtttgagaaactgttcccaataagccttcttcccccagatctg

SEQ ID NO: 160573 - DNA, 120 bp, Artificial Sequence
  ENSG00000107185_36 (sequence is synthesized)
caccctcgcctctaccctaggacaagatgtccttttctcatcatcctgccaggctaactttaagtctcctgctttttctcacttggatttggatccatttcttcctatttccgctcatgt

SEQ ID NO: 160574 - DNA, 120 bp, Artificial Sequence
  ENSG00000107185_37 (sequence is synthesized)
gaactctccagttctcctttctcaccactctcctgctagccatctctttggcactaaaggccctggtcaaattggatttctttcatttttccacacttcaaagacccatgttctaggtat

SEQ ID NO: 160575 - DNA, 120 bp, Artificial Sequence
  ENSG00000107185_38 (sequence is synthesized)
tctccatagggatagtctctttggcatttatttggtttttctacgttttcagtcccatttactccaagactcactccctgccacctagtgcatcagatacagctacttctggctgacttt

SEQ ID NO: 160576 - DNA, 120 bp, Artificial Sequence
  ENSG00000107185_39 (sequence is synthesized)
tcaagggggaccaccctacctgtcatctcttcactgttcagaaatgactgtgtcagtgcacctcaaactcccttgctgtccttttccaaggagacagctaaggtggatggagatgcagaa

SEQ ID NO: 160577 - DNA, 120 bp, Artificial Sequence
  ENSG00000107185_40 (sequence is synthesized)
tggacctcacgttcgccctagtcaggactgataccctttccgtttcagaggattgccaagaaaaaactcacagttgaggcagggtgctctgaggtcggctgcggtgtgggaggcacggcc

SEQ ID NO: 160578 - DNA, 120 bp, Artificial Sequence
  ENSG00000107185_41 (sequence is synthesized)
tgggcctgctctctgggctggagcaggtggattcgaaggcctgtctagcacgagggcccaaaggtcttgtcagtggccagtagctctgccgcctttcccagagagggggtccaggggaca

SEQ ID NO: 160579 - DNA, 120 bp, Artificial Sequence
  ENSG00000107185_42 (sequence is synthesized)
tcctggaaggctgggccctgggccaccttctgctcttgcaagctagagccagcccaatagggggcggatgtgagtggggagctggggcgcatgaaggtgggggtgatgccgaaggggaag

SEQ ID NO: 160580 - DNA, 120 bp, Artificial Sequence
  ENSG00000107185_43 (sequence is synthesized)
ggatcgccagtggggattggtgcgtgtgcggaaacggggacagaagtgaaggttcatcgcctataacgaagatgaggtaggcatataggggcttctggaaagctagaggctgggctgagc

SEQ ID NO: 160581 - DNA, 120 bp, Artificial Sequence
  ENSG00000107185_44 (sequence is synthesized)
caggagtcctctcccagaagttggggggcggtgcagaggtgtgggtcgagcccgcatgcgtgcctgctggggagggggtgagtggtgaggaccaggcccgctgggtcctgggggcgcggt

SEQ ID NO: 160582 - DNA, 120 bp, Artificial Sequence
  ENSG00000107185_45 (sequence is synthesized)
ggctggcgcgcaggtcccggagggggcggctggcgcgcactacacgcttgggaacaaggaaaacatccgccggaggcccggccgggcggcgctccagcctcggggcaggtgcgcggagag

SEQ ID NO: 160583 - DNA, 120 bp, Artificial Sequence
  ENSG00000107185_46 (sequence is synthesized)
gaagtgagagcattccggcccccccaccccaaccccggccgctggccctctggtgagtcacagccgacccccgccgccggagggagaggggagctgcgggccagagccccggagggtctg

SEQ ID NO: 160584 - DNA, 120 bp, Artificial Sequence
  ENSG00000107185_47 (sequence is synthesized)
gaggagccaggagggtttctgggagcagagggtcacttagtgggcttctgtcgtggtgtcgctacgggcgcgaaacggacactgaacacagtctgactgtatggaggcaggtggggaggg

SEQ ID NO: 160585 - DNA, 120 bp, Artificial Sequence
  ENSG00000107185_48 (sequence is synthesized)
atcccctgggagaacttggcgggccgagagcagaccccagggcaaggaggggcccccgagggggaaaccgggagtcgggcaggtggcgtaacccagaaagggaaggagagccggattgat

SEQ ID NO: 160586 - DNA, 120 bp, Artificial Sequence
  ENSG00000107185_49 (sequence is synthesized)
tggggtgagagaggaaggaagcacgccaagttaggcctgggagaactgagggacctgaggagggaggagggagaccaacacagggtgggaaggcggaaatggccaaaccccaggcatcag

SEQ ID NO: 160587 - DNA, 120 bp, Artificial Sequence
  ENSG00000107185_50 (sequence is synthesized)
gtctgtccagaggctgacgtagacagtgaagggtgaagggtaggttttaggagtagggggagttatgattatttggttacattttgggattatttggtctcacaggtagaagggagcctg

SEQ ID NO: 160588 - DNA, 120 bp, Artificial Sequence
  ENSG00000107185_51 (sequence is synthesized)
ctggtctctgtgtaacggatggcttaaaagcaaggttgtctgcgtcttggattactgtctgccattcagcctttgccaaaaaatttggcactgatctgcacatttttatagtcatttaaa

SEQ ID NO: 160589 - DNA, 120 bp, Artificial Sequence
  ENSG00000107185_52 (sequence is synthesized)
attgtatgactctgtcaaatgatttaagtaattttggtggatttttaaaaataaaaaaataaaaatagaaaagttgcacaatctaattcaatatttgacttaaaaccaaaagtgaggctc

SEQ ID NO: 160590 - DNA, 120 bp, Artificial Sequence
  ENSG00000107185_53 (sequence is synthesized)
tcagattggtaatatggtattcagcctttttcttgtttggcttttgtgccatttgcccctcactgacttgattgaattctttgtggctgatgcctcagtttttctggatcagtagtgctg

SEQ ID NO: 160591 - DNA, 120 bp, Artificial Sequence
  ENSG00000107185_54 (sequence is synthesized)
cacttccacttttcctctccctcattttactgtctttatttttagccttttttctgtgtagccctctaacctgccctttatattttgaaccaaataaaacatttcttggaatgggagctt

SEQ ID NO: 160592 - DNA, 120 bp, Artificial Sequence
  ENSG00000107185_55 (sequence is synthesized)
tggactacagtatacagacaaacaactcacaattttagcatatgaggctactatcttctgtggatgtgtatgtaattatacagtttctgtatttatcctgtggctgatagaaaaagttaa

SEQ ID NO: 160593 - DNA, 120 bp, Artificial Sequence
  ENSG00000107185_56 (sequence is synthesized)
agctgtttaattcaccatagtatttctacaacacagcaatttattagtctgacttctcttctaaaatcaactctaaaatggtattttgtacttgtctcagagacgaattctgccatgatc

SEQ ID NO: 160594 - DNA, 120 bp, Artificial Sequence
  ENSG00000107185_57 (sequence is synthesized)
cttatgatctgtgttatgttgggccaaaggtgattactttataaattataaagatccctaaactctgcattgcctttggtcccaaacaagcaaatctgggtcaattaatgaaaaaaaaaa

SEQ ID NO: 160595 - DNA, 120 bp, Artificial Sequence
  ENSG00000107186_0 (sequence is synthesized)
cgtgagtgtctgtgcgttttgatccgaagctcctcgccgggtcgttacttcagaagagaagacagtgagcgtgggcgaggcgaggcatccagaggccccggcgacccctgctccccagtc

SEQ ID NO: 160596 - DNA, 120 bp, Artificial Sequence
  ENSG00000107186_1 (sequence is synthesized)
ctccgccccctcgcgtcgcggccctgggcgggcgccgcgagccggagttccattttaattgctgttaatcatttcagagaagaacactgaactttgaaaaaaatgttggaagccattgac

SEQ ID NO: 160597 - DNA, 120 bp, Artificial Sequence
  ENSG00000107186_2 (sequence is synthesized)
aaaaatcgggccctgcatgcagcagagcgcttgcaaaccaagctgcgagaacgtggggatgtagcaaatgaagacaaactgagccttctgaagtcagtcctgcagagccctctcttcagt

SEQ ID NO: 160598 - DNA, 120 bp, Artificial Sequence
  ENSG00000107186_3 (sequence is synthesized)
cagattctgagccttcagacttctgtacagcagctgaaagaccaggtaaatattgcaacttcagcaacttcaaatattgaatatgcccacgttcctcatctcagcccagctgtgattcct

SEQ ID NO: 160599 - DNA, 120 bp, Artificial Sequence
  ENSG00000107186_4 (sequence is synthesized)
actctgcaaaatgaatcgtttttattatccccaaacaatgggaatctggaagcacttacaggacctggtattccacacattaatgggaaacctgcttgtgatgaatttgatcagcttatc

SEQ ID NO: 160600 - DNA, 120 bp, Artificial Sequence
  ENSG00000107186_5 (sequence is synthesized)
aaaaatatggcccagggtcgccatgtagaagtttttgagctcctcaaacctccatctggaggccttgggtttagtgttgtgggactaagaagtgaaaacagaggagagctgggaatattt

SEQ ID NO: 160601 - DNA, 120 bp, Artificial Sequence
  ENSG00000107186_6 (sequence is synthesized)
gttcaagagatacaagagggcagtgtggcccatagagatggaagattgaaagaaactgatcaaattcttgctatcaatggacaggctcttgatcagacaattacacatcagcaggctatc

SEQ ID NO: 160602 - DNA, 120 bp, Artificial Sequence
  ENSG00000107186_7 (sequence is synthesized)
agcatcctgcagaaagccaaagatactgtccagctagttattgccagaggctcattgcctcagcttgtcagccccatagtttcccgttctccatctgcagccagcacaatttcagctcac

SEQ ID NO: 160603 - DNA, 120 bp, Artificial Sequence
  ENSG00000107186_8 (sequence is synthesized)
tctaatccggttcactggcaacacatggaaacgattgaattggtgaatgatggatctggtttgggatttggcatcataggaggaaaagcaactggtgtgatagtaaaaaccattctgcct

SEQ ID NO: 160604 - DNA, 120 bp, Artificial Sequence
  ENSG00000107186_9 (sequence is synthesized)
ggaggagtagctgatcagcatgggcgtttatgcagtggagaccacattctaaagattggtgacacagatctagcaggaatgagcagtgagcaagtagcacaagtccttaggcaatgtgga

SEQ ID NO: 160605 - DNA, 120 bp, Artificial Sequence
  ENSG00000107186_10 (sequence is synthesized)
aatagagttaagttgatgattgcaagaggtgccatagaagaacgtacagcacccactgctttgggcatcaccctctcctcatccccaacttcaacaccagagttgcgggttgatgcttct

SEQ ID NO: 160606 - DNA, 120 bp, Artificial Sequence
  ENSG00000107186_11 (sequence is synthesized)
actcagaaaggtgaagaaagtgagacatttgatgtagaactcactaaaaatgtccaaggattaggaattaccattgctggctacattggagataaaaaattggaaccttcaggaatcttt

SEQ ID NO: 160607 - DNA, 120 bp, Artificial Sequence
  ENSG00000107186_12 (sequence is synthesized)
gtaaagagcattacaaaaagcagtgccgttgagcatgatggaagaatccaaattggagaccaaattatagcagtagatggcacaaaccttcagggttttactaatcagcaagcagtagag

SEQ ID NO: 160608 - DNA, 120 bp, Artificial Sequence
  ENSG00000107186_13 (sequence is synthesized)
gtattgcgacatacaggacaaactgtgctcctgacactaatgaggagaggaatgaagcaggaagccgagctcatgtcaagggaagacgtcacaaaagatgcagatttgtctcctgttaat

SEQ ID NO: 160609 - DNA, 120 bp, Artificial Sequence
  ENSG00000107186_14 (sequence is synthesized)
gccagcataatcaaagaaaattatgaaaaagatgaagattttttatcttcgacgagaaacaccaacatattaccaactgaagaagaagggtatccattactgtcagctgagatagaagaa

SEQ ID NO: 160610 - DNA, 120 bp, Artificial Sequence
  ENSG00000107186_15 (sequence is synthesized)
atagaagatgcacaaaaacaagaagctgctctgctgacaaaatggcaaaggattatgggaattaactatgaaatagtggtggcccatgtgagcaagtttagtgagaacagtggattgggg

SEQ ID NO: 160611 - DNA, 120 bp, Artificial Sequence
  ENSG00000107186_16 (sequence is synthesized)
ataagcctggaagcgacagtgggacatcattttatccgatctgttctaccagagggtcctgttggacacagcgggaagctcttcagtggagacgagctattggaagtaaatggcataact

SEQ ID NO: 160612 - DNA, 120 bp, Artificial Sequence
  ENSG00000107186_17 (sequence is synthesized)
ttacttggggaaaatcaccaagatgtggtgaatatcttaaaagaactgcctatagaagtgacaatggtgtgctgtcgtcgaactgtgccacccaccacccaatcagaattggatagcctg

SEQ ID NO: 160613 - DNA, 120 bp, Artificial Sequence
  ENSG00000107186_18 (sequence is synthesized)
gacttatgtgatattgagctaacagaaaagcctcacgtagatctaggtgagttcatcgggtcatcagagacagaggatccagtgctggcgatgactgatgcgggtcagagtacagaagag

SEQ ID NO: 160614 - DNA, 120 bp, Artificial Sequence
  ENSG00000107186_19 (sequence is synthesized)
gttcaagcacctttggccatgtgggaggctggcattcagcacatagagctggagaaagggagcaaaggacttggttttagcattttagattatcaggatccaattgatccagcaagcact

SEQ ID NO: 160615 - DNA, 120 bp, Artificial Sequence
  ENSG00000107186_20 (sequence is synthesized)
gtgattataattcgttctttggtgcctggcggcattgctgaaaaggatggacgacttcttcctggtgaccgactcatgtttgtaaacgatgttaacttggaaaacagcagtcttgaggaa

SEQ ID NO: 160616 - DNA, 120 bp, Artificial Sequence
  ENSG00000107186_21 (sequence is synthesized)
gctgtagaagcactgaagggagcaccgtcagggactgtgagaataggagttgctaagcctttacccctttcaccagaagaaggttatgtttctgctaaggaggattcctttctctaccca

SEQ ID NO: 160617 - DNA, 120 bp, Artificial Sequence
  ENSG00000107186_22 (sequence is synthesized)
ccacactcctgtgaggaagcagggctggctgacaaacccctcttcagggctgacttggctctggtgggcacaaatgatgctgacttagtagatgaatccacatttgagtctccatactct

SEQ ID NO: 160618 - DNA, 120 bp, Artificial Sequence
  ENSG00000107186_23 (sequence is synthesized)
cctgaaaatgacagcatctactctactcaagcctctattttatctcttcatggcagttcttgtggtgatggcctgaactatggttcttcccttccatcatctcctcctaaggatgttatt

SEQ ID NO: 160619 - DNA, 120 bp, Artificial Sequence
  ENSG00000107186_24 (sequence is synthesized)
gaaaattcttgtgatccagtacttgatctgcatatgtctctggaggaactatatacccagaatctcctgcaaagacaggatgagaatacaccttcggtggacataagtatggggcctgct

SEQ ID NO: 160620 - DNA, 120 bp, Artificial Sequence
  ENSG00000107186_25 (sequence is synthesized)
tctggctttactataaatgactacacacctgcaaatgctattgaacaacaatatgaatgtgaaaacacaatagtgtggactgaatctcatttaccaagtgaagttatatcaagtgcagaa

SEQ ID NO: 160621 - DNA, 120 bp, Artificial Sequence
  ENSG00000107186_26 (sequence is synthesized)
cttccttctgtgctacccgattcagctggaaagggctctgagtacctgcttgaacagagctccctggcctgtaatgctgagtgtgtcatgcttcaaaatgtatctaaagaatcttttgaa

SEQ ID NO: 160622 - DNA, 120 bp, Artificial Sequence
  ENSG00000107186_27 (sequence is synthesized)
aggactattaatatagcaaaaggcaattctagcctaggaatgacagttagtgctaataaagatggcttggggatgatcgttcgaagcattattcatggaggtgccattagtcgagatggc

SEQ ID NO: 160623 - DNA, 120 bp, Artificial Sequence
  ENSG00000107186_28 (sequence is synthesized)
cggattgccattggggactgcatcttgtccattaatgaagagtctaccatcagtgtaaccaatgcccaggcacgagctatgttgagaagacattctctcattggccctgacataaaaatt

SEQ ID NO: 160624 - DNA, 120 bp, Artificial Sequence
  ENSG00000107186_29 (sequence is synthesized)
acttatgtgcctgcagaacatttggaagagttcaaaataagcttgggacaacaatctggaagagtaatggcactggatattttttcttcatacactggcagagacattccagaattacca

SEQ ID NO: 160625 - DNA, 120 bp, Artificial Sequence
  ENSG00000107186_30 (sequence is synthesized)
gagcgagaagagggagagggtgaagaaagcgaacttcaaaacacagcatatagcaattggaatcagcccaggcgggtggaactctggagagaaccaagcaaatccttaggcatcagcatt

SEQ ID NO: 160626 - DNA, 120 bp, Artificial Sequence
  ENSG00000107186_31 (sequence is synthesized)
tgatgaggggcattttcatcaaacatgttctggaagatagtccagctggcaaaaatggaaccttgaaacctggagatagaatcgtagaggtggatggaatggacctcagagatgcaagcc

SEQ ID NO: 160627 - DNA, 120 bp, Artificial Sequence
  ENSG00000107186_32 (sequence is synthesized)
atgaacaagctgtggaagccattcggaaagcaggcaaccctgtagtctttatggtacagagcattataaacagaccaaggaaatcccctttgccttccttgctgcacaacctttacccta

SEQ ID NO: 160628 - DNA, 120 bp, Artificial Sequence
  ENSG00000107186_33 (sequence is synthesized)
agtacaacttcagcagcactaacccatttgctgactctctacaaatcaacgccgacaaggcacccagtcagtcagagtcagagccagagaaggctccattgtgcagtgtgcccccacccc

SEQ ID NO: 160629 - DNA, 120 bp, Artificial Sequence
  ENSG00000107186_34 (sequence is synthesized)
ctccttcagcctttgccgaaatgggtagtgatcacacacagtcatctgcaagcaaaatctcacaagatgtggacaaagaggatgagtttggttacagctggaaaaatatcagagagcgtt

SEQ ID NO: 160630 - DNA, 120 bp, Artificial Sequence
  ENSG00000107186_35 (sequence is synthesized)
atggaaccctaacaggcgagctgcatatgattgaactggagaaaggtcatagtggtttgggcctaagtcttgctgggaacaaagaccgatccaggatgagtgtcttcatagtggggattg

SEQ ID NO: 160631 - DNA, 120 bp, Artificial Sequence
  ENSG00000107186_36 (sequence is synthesized)
atccaaatggagctgcaggaaaagatggtcgattgcaaattgcagatgagcttctagagatcaatggtcagattttatatggaagaagtcatcagaatgcctcatcaatcattaaatgtg

SEQ ID NO: 160632 - DNA, 120 bp, Artificial Sequence
  ENSG00000107186_37 (sequence is synthesized)
ccccttctaaagtgaaaataatttttatcagaaataaagatgcagtgaatcagatggccgtatgtcctggaaatgcagtagaacctttgccttctaactcagaaaatcttcaaaataagg

SEQ ID NO: 160633 - DNA, 120 bp, Artificial Sequence
  ENSG00000107186_38 (sequence is synthesized)
agacagagccaactgttactacttctgatgcagctgtggacctcagttcatttaaaaatgtgcaacatctggagcttcccaaggatcaggggggtttgggtattgctatcagcgaagaag

SEQ ID NO: 160634 - DNA, 120 bp, Artificial Sequence
  ENSG00000107186_39 (sequence is synthesized)
atacactcagtggagtcatcataaagagcttaacagagcatggggtagcagccacggatggacgactcaaagtcggagatcagatactggctgtagatgatgaaattgttgttggttacc

SEQ ID NO: 160635 - DNA, 120 bp, Artificial Sequence
  ENSG00000107186_40 (sequence is synthesized)
ctattgaaaagtttattagccttctgaagacagcaaagatgacagtaaaacttaccatccatgctgagaatccagattcccaggctgttccttcagcagctggtgcagccagtggagaaa

SEQ ID NO: 160636 - DNA, 120 bp, Artificial Sequence
  ENSG00000107186_41 (sequence is synthesized)
aaaagaacagctcccagtctctgatggtcccacagtctggctccccagaaccggagtccatccgaaatacaagcagatcatcaacaccagcaatttttgcttctgatcctgcaacctgcc

SEQ ID NO: 160637 - DNA, 120 bp, Artificial Sequence
  ENSG00000107186_42 (sequence is synthesized)
ccattatccctggctgcgaaacaaccatcgagatttccaaagggcgaacagggctgggcctgagcatcgttgggggttcagacacgctgctgggtgccattattatccatgaagtttatg

SEQ ID NO: 160638 - DNA, 120 bp, Artificial Sequence
  ENSG00000107186_43 (sequence is synthesized)
aagaaggagcagcatgtaaagatggaagactctgggctggagatcagatcttagaggtgaatggaattgacttgagaaaggccacacatgatgaagcaatcaatgtcctgagacagacgc

SEQ ID NO: 160639 - DNA, 120 bp, Artificial Sequence
  ENSG00000107186_44 (sequence is synthesized)
cacagagagtgcgcctgacactctacagagatgaggccccatacaaagaggaggaagtgtgtgacaccctcactattgagctgcagaagaagccgggaaaaggcctaggattaagtattg

SEQ ID NO: 160640 - DNA, 120 bp, Artificial Sequence
  ENSG00000107186_45 (sequence is synthesized)
ttggtaaaagaaacgatactggagtatttgtgtcagacattgtcaaaggaggaattgcagatgccgatggaagactgatgcagggagaccagatattaatggtgaatggggaagacgttc

SEQ ID NO: 160641 - DNA, 120 bp, Artificial Sequence
  ENSG00000107186_46 (sequence is synthesized)
gtaatgccacccaagaagcggttgccgctttgctaaaggtgagtgaaggcagcctgtcatctttcacttttccactctctggatccagtacatctgagtcactggaaagtagctcaaaga

SEQ ID NO: 160642 - DNA, 120 bp, Artificial Sequence
  ENSG00000107186_47 (sequence is synthesized)
agaatgcattggcatctgaaatacagggattaagaacagtcgaaatgaaaaagggccctactgactcactgggaatcagcatcgctggaggagtaggcagcccacttggtgatgtgccta

SEQ ID NO: 160643 - DNA, 120 bp, Artificial Sequence
  ENSG00000107186_48 (sequence is synthesized)
tatttattgcaatgatgcacccaactggagttgcagcacagacccaaaaactcagagttggggataggattgtcaccatctgtggcacatccactgagggcatgactcacacccaagcag

SEQ ID NO: 160644 - DNA, 120 bp, Artificial Sequence
  ENSG00000107186_49 (sequence is synthesized)
ttaacctactgaaaaatgcatctggctccattgaaatgcaggtggttgctggaggagacgtgagtgtggtcacaggtcatcagcaggagcctgcaagttccagtctttctttcactgggc

SEQ ID NO: 160645 - DNA, 120 bp, Artificial Sequence
  ENSG00000107186_50 (sequence is synthesized)
tgacgtcaagcagtatatttcaggatgatttaggacctcctcaatgtaagtctattacactagagcgaggaccagatggcttaggcttcagtatagttggaggatatggcagccctcatg

SEQ ID NO: 160646 - DNA, 120 bp, Artificial Sequence
  ENSG00000107186_51 (sequence is synthesized)
gagacttacccatttatgttaaaacagtgtttgcaaagggagcagcctctgaagacggacgtctgaaaaggggcgatcagatcattgctgtcaatgggcagagtctagaaggagtcaccc

SEQ ID NO: 160647 - DNA, 120 bp, Artificial Sequence
  ENSG00000107186_52 (sequence is synthesized)
atgaagaagctgttgccatccttaaacggacaaaaggcactgtcactttgatggttctctcttgaattggctgccagaattgaaccaacccaacccctagctcacctcctactgtaaaga

SEQ ID NO: 160648 - DNA, 120 bp, Artificial Sequence
  ENSG00000107186_53 (sequence is synthesized)
gaatgcactggtcctgacaatttttatgctgtgttcagccgggtcttcaaaactgtaggggggaaataacacttaagtttctttttctcatctagaaatgctttccttactgacaaccta

SEQ ID NO: 160649 - DNA, 120 bp, Artificial Sequence
  ENSG00000107186_54 (sequence is synthesized)
acatcatttttcttttcttcttgcattttgtgaacttaaagagaaggaatatttgtgtaggtgaatctcgtttttatttgtggagatatctaatgttttgtagtcacatgggcaagaatt

SEQ ID NO: 160650 - DNA, 120 bp, Artificial Sequence
  ENSG00000107186_55 (sequence is synthesized)
attacatgctaagctggttagtataaagaaagataattctaaagctaaccaaagaaaatggcttcagtaaattaggatgaaaaatgaaaatataaaataaagaagaaaatctcggggagt

SEQ ID NO: 160651 - DNA, 120 bp, Artificial Sequence
  ENSG00000107186_56 (sequence is synthesized)
ttaaaaaaaatgcctcaatttggcaatctacctcctctccccaccccaaactaaaaaaagaaaaaaaggttttctaatgaaaatctttaaaaatactgtcagtattttaaaattttcaac

SEQ ID NO: 160652 - DNA, 120 bp, Artificial Sequence
  ENSG00000107186_57 (sequence is synthesized)
agtattataaaaacattgcatctccccacctctaatatgcatatatatttttcctgctaaaattggtttctacaattgagtaaatggcaaatacatgaagcaatgtccctaaattttata

SEQ ID NO: 160653 - DNA, 120 bp, Artificial Sequence
  ENSG00000107186_58 (sequence is synthesized)
aagaaattatatttaatgcacatttcaattttcattcttatttttgaccttttgtaaaatattttcatgttgctataagtaaatgatgatgccaccccatgttgactatggtttttctag

SEQ ID NO: 160654 - DNA, 120 bp, Artificial Sequence
  ENSG00000107186_59 (sequence is synthesized)
aaagcaactatgctgctaaccatagaggaacatagaagggttccagaatctttagtgctggttttaacaaccgatgcaacattaaaaatgtgttagtgtgctgtgcaattggttttcaat

SEQ ID NO: 160655 - DNA, 120 bp, Artificial Sequence
  ENSG00000107186_60 (sequence is synthesized)
tcatattaatcttaatgacagagaacaatgtgttactaattattttggttgtatgccattagtaaattgatagaaaaattaaggggattaacataacttcatttcattgacttatattaa

SEQ ID NO: 160656 - DNA, 120 bp, Artificial Sequence
  ENSG00000107186_61 (sequence is synthesized)
catcttataatacaatagtttaagactaagggaaacagatggagctgtttattgagacaactggtgaggaattatcatgtgttcattcccattttagagcgtgaaactcctacattagaa

SEQ ID NO: 160657 - DNA, 120 bp, Artificial Sequence
  ENSG00000107186_62 (sequence is synthesized)
tatataaagtcactttaaatatctatatttgtaacagaagtagtgtacagatattttattacagcatttttgtgtaaatgcagaattaaagtgaataaataagaattttcagtggtgcac

SEQ ID NO: 160658 - DNA, 120 bp, Artificial Sequence
  ENSG00000107186_63 (sequence is synthesized)
gcggttgccgctttgctaaagtgttccctaggcacagtaaccttggaagttggaagaatcaaagctggtccattccattcagagaggaggccatctcaaagcagccaggtgagtgaaggc

SEQ ID NO: 160659 - DNA, 120 bp, Artificial Sequence
  ENSG00000107186_64 (sequence is synthesized)
ttttaactacatatgtatgcatctcacattcagcacaagacattgacatttgttaacaccattgtaaaaagatgccgcggcgtatgcttcacattctagattttctgcagcacctgctga

SEQ ID NO: 160660 - DNA, 120 bp, Artificial Sequence
  ENSG00000107186_65 (sequence is synthesized)
atctgcaagcaaaatctcacaagatgtggacaaagaggatgagtttggttacagctggagtaagttgtgtttttgtgatgcatttaattgtaagaggtattaaaatagctctgagtttct

SEQ ID NO: 160661 - DNA, 120 bp, Artificial Sequence
  ENSG00000107186_66 (sequence is synthesized)
cagctaaaggctaattatttttaaacacagaaagaatttagcatattatttgagtgtcagtgggaatatgtctaaaaaatagactttttttggaatacagtatcagtagtctagttctca

SEQ ID NO: 160662 - DNA, 120 bp, Artificial Sequence
  ENSG00000107186_67 (sequence is synthesized)
tgaaatatgacatgggtaacatggctactataggatgtggggtcaccaggtcatcataaaaaccaccattaatgaaccctaaactctgtgccttgggaagaccatacaaagaccgtctaa

SEQ ID NO: 160663 - DNA, 120 bp, Artificial Sequence
  ENSG00000107186_68 (sequence is synthesized)
tccaataccctgtttctaaagatgggaaagcggaggatcaaatggtgaaatgatttgatgtcatgaccttggcaagaacaagtgatacagttcagcttttactatatatttctatttatg

SEQ ID NO: 160664 - DNA, 120 bp, Artificial Sequence
  ENSG00000107186_69 (sequence is synthesized)
gttatcttcgtatctttagaagttttgggttttttttttatagttttgtgaaagaaaggatgggaataagatttgtgtttattttgcataaacctatctcgtgtggaagatgtgtaatga

SEQ ID NO: 160665 - DNA, 120 bp, Artificial Sequence
  ENSG00000107186_70 (sequence is synthesized)
tttcaaataaaagacatcacagcaatggtacttagattttgagttaataaatggtgtttagtttgagatacacatctgttatgattttcagtaatattaatgatggtgatagcaacattt

SEQ ID NO: 160666 - DNA, 120 bp, Artificial Sequence
  ENSG00000107186_71 (sequence is synthesized)
atgtaaccacaagttaatattattcaaagctccattctgatttggaaagaacagcagattttgcatccaaggactgactcttaagtcttacttttgccacttagtagccgagtgacccat

SEQ ID NO: 160667 - DNA, 120 bp, Artificial Sequence
  ENSG00000107186_72 (sequence is synthesized)
aaaatgagaatggtaatacacgcttctactcagtgtatataaatgatgaagaataaatatgcttattggagatcattttaatctatgaagcactgtaagacataagctgttatttatcaa

SEQ ID NO: 160668 - DNA, 120 bp, Artificial Sequence
  ENSG00000107186_73 (sequence is synthesized)
aaaatataattctaatgttgccccagtgttgctccaaataacaaaacttttaaagtcataaaaacaagtaaaaattttgggtaaaaacgtaactttttattaaataagcattgcattaca

SEQ ID NO: 160669 - DNA, 120 bp, Artificial Sequence
  ENSG00000107186_74 (sequence is synthesized)
acacttagagagggatattagaggtagataagttatagccttggccttcaaggagtgtacatcctagtataagaagacactcatggaaataagcataccacttatgtgaagagtacttgt

SEQ ID NO: 160670 - DNA, 120 bp, Artificial Sequence
  ENSG00000107186_75 (sequence is synthesized)
agtctgcctagggaatagtgagggtaggaaaagagttatcagttctgcctctgaaaagaaattgaggataaaactttatatggaaggttacatatgaagtgtatgttggaagatttgggg

SEQ ID NO: 160671 - DNA, 120 bp, Artificial Sequence
  ENSG00000107186_76 (sequence is synthesized)
ggcaaaaatgttgcaagcggagggcatggagtgaggaatggcatggagactttggccaatgcaggaagctaaattgtagagcatcactgagcaatgaggggcagggaatggaagctggtg

SEQ ID NO: 160672 - DNA, 120 bp, Artificial Sequence
  ENSG00000107186_77 (sequence is synthesized)
gggaaagggtcaatgttaaaggggacagggtcagatcatgggatacattgataggccaacatgtgccagctttgtctttgaggcagtgtggagctcaaagaatgagaaatgtttagttaa

SEQ ID NO: 160673 - DNA, 120 bp, Artificial Sequence
  ENSG00000107186_78 (sequence is synthesized)
aaatttctctggcagtactgtagagaaaaatcagaggtagcaggggagagaggttagaggaagtaagataattattggaataattcaggaaacagttaacaaggacctgaactaaagctg

SEQ ID NO: 160674 - DNA, 120 bp, Artificial Sequence
  ENSG00000107186_79 (sequence is synthesized)
gaagagggaatggttacatcagatgtttaagacccaaattgataatacttcatccccaactaaatgtactcactgaggaaaaatgagtggttgaagatgtgtttatccaacaaatatttt

SEQ ID NO: 160675 - DNA, 120 bp, Artificial Sequence
  ENSG00000107186_80 (sequence is synthesized)
ctgagtactctgccttataccagatactgctctttggactggagaataaaacaggtaggatatacaaggttttcagatatctgacttagtgacatgagggatggctgtcttttactgaat

SEQ ID NO: 160676 - DNA, 120 bp, Artificial Sequence
  ENSG00000107186_81 (sequence is synthesized)
agaaaatacagaaagatatttgcaaaaatatggtacattctatttggggcaggttaagaacgaagtgcctgttggatagcctggtaaaaatgtacattgggacatttggtctccagttta

SEQ ID NO: 160677 - DNA, 120 bp, Artificial Sequence
  ENSG00000107186_82 (sequence is synthesized)
gagatgatttcctgtatatgcagatttggcatttcttagccatggaggctgaggtgcttgctacagagagcatttagagagaaagagggccaagggcagaatcatgtggtagcaacagta

SEQ ID NO: 160678 - DNA, 120 bp, Artificial Sequence
  ENSG00000107186_83 (sequence is synthesized)
acagctctacatgctgccatgtagcaagaatccagtgagaagatgagtagaaagagtcccttgggtgtggtaactaggagactgttagtggtttttgagaaagcaaatgatggacaagaa

SEQ ID NO: 160679 - DNA, 120 bp, Artificial Sequence
  ENSG00000107186_84 (sequence is synthesized)
gtcaaggagagagagaggcagtggctagagggtgacagagaattgggagagtggttttgttttgatttaggaaagctttggatacatgtgtatgatgaataaaaggagttagtagagaat

SEQ ID NO: 160680 - DNA, 120 bp, Artificial Sequence
  ENSG00000107186_85 (sequence is synthesized)
gaaaagcttaaaattagaggaactttggtgattatcagtgggggtacctgtaggaagagaaacattctttcctaaatgaatatataaacatagagcttatgtatacataagatagatgta

SEQ ID NO: 160681 - DNA, 120 bp, Artificial Sequence
  ENSG00000107186_86 (sequence is synthesized)
caaatcattgtctcattccggctgctcctaacgttccactaagccacgtggttatttaagataattaggttataaggtaatatattttcttttcatattagttgtactaaatatgtctct

SEQ ID NO: 160682 - DNA, 120 bp, Artificial Sequence
  ENSG00000107186_87 (sequence is synthesized)
taaggaaatggagtattttaataacgttcattaaagttttcaattcacttgataaataacacagtaaagaataatgaatggtgtttctgctgatgctctgtcactgagtttcaccatttg

SEQ ID NO: 160683 - DNA, 120 bp, Artificial Sequence
  ENSG00000107186_88 (sequence is synthesized)
ttagctgggctaccatcggttttcattatacagtaaacccaggcagtcttcaagccacttggtctatctgtgctctcaactgattgctgtccagttacacctcgtaagtattttgaagag

SEQ ID NO: 160684 - DNA, 120 bp, Artificial Sequence
  ENSG00000107186_89 (sequence is synthesized)
gtccagttacacctcgtaagtattttgaagagaatgtaatgttcataaattccatagaatgttaaaatagcaaaaatgtattataataaataaatgtattaaaatagcaatagtgtatta

SEQ ID NO: 160685 - DNA, 120 bp, Artificial Sequence
  ENSG00000107186_90 (sequence is synthesized)
gtgctctgtgctaacaaactggctctctggtagacaagcctgcatgtgtgatacttgctgtcctggatttgttaagagaatcatatggagagaggattcaggcacccagtcagtcagagt

SEQ ID NO: 160686 - DNA, 120 bp, Artificial Sequence
  ENSG00000107187_0 (sequence is synthesized)
agaggctccgggccccagggcggcccgcgggcgcagcgcccagcagcacccggagtcgcttggacgccggttcggggctattgcggggtggcgtcgctgggcccgggaaagttcgggact

SEQ ID NO: 160687 - DNA, 120 bp, Artificial Sequence
  ENSG00000107187_1 (sequence is synthesized)
aagttcgggactggagagtggcgacgccgggcggcgggacccatggaggcgcgcggggagctgggcccggcccgggagtcggcgggaggcgacctgctgctagcactgctggcgcggagg

SEQ ID NO: 160688 - DNA, 120 bp, Artificial Sequence
  ENSG00000107187_2 (sequence is synthesized)
cgagagatcccgctgtgcgctggctgtgaccagcacatcctggaccgcttcatcctcaaggctctggaccgccactggcacagcaagtgtctcaagtgcagcgactgccacacgccactg

SEQ ID NO: 160689 - DNA, 120 bp, Artificial Sequence
  ENSG00000107187_3 (sequence is synthesized)
gccgagcgctgcttcagccgaggggagagcgtttactgcaaggacgactttttcaagcgcttcgggaccaagtgcgccgcgtgccagctgggcatcccgcccacgcaggtggtgcgccgc

SEQ ID NO: 160690 - DNA, 120 bp, Artificial Sequence
  ENSG00000107187_4 (sequence is synthesized)
gcccaggacttcgtgtaccacctgcactgctttgcctgcgtcgtgtgcaagcggcagctggccacgggcgacgagttctacctcatggaggacagccggctcgtgtgcaaggcggactac

SEQ ID NO: 160691 - DNA, 120 bp, Artificial Sequence
  ENSG00000107187_5 (sequence is synthesized)
gaaaccgccaagcagcgagaggccgaggccacggccaagcggccgcgcacgaccatcaccgccaagcagctggagacgctgaagagcgcttacaacacctcgcccaagccggcgcgccac

SEQ ID NO: 160692 - DNA, 120 bp, Artificial Sequence
  ENSG00000107187_6 (sequence is synthesized)
gtgcgcgagcagctctcgtccgagacgggcctggacatgcgcgtggtgcaggtttggttccagaaccgccgggccaaggagaagaggctgaagaaggacgccggccggcagcgctggggg

SEQ ID NO: 160693 - DNA, 120 bp, Artificial Sequence
  ENSG00000107187_7 (sequence is synthesized)
cagtatttccgcaacatgaagcgctcccgcggcggctccaagtcggacaaggacagcgttcaggaggggcaggacagcgacgctgaggtctccttccccgatgagccttccttggcggaa

SEQ ID NO: 160694 - DNA, 120 bp, Artificial Sequence
  ENSG00000107187_8 (sequence is synthesized)
atgggcccggccaatggcctctacgggagcttgggggaacccacccaggccttgggccggccctcgggagccctgggcaacttctccctggagcatggaggcctggcaggcccagagcag

SEQ ID NO: 160695 - DNA, 120 bp, Artificial Sequence
  ENSG00000107187_9 (sequence is synthesized)
taccgagagctgcgtcccggcagcccctacggtgtccccccatcccccgccgccccgcagagcctccctggcccccagcccctcctctccagcctggtgtacccagacaccagcttgggc

SEQ ID NO: 160696 - DNA, 120 bp, Artificial Sequence
  ENSG00000107187_10 (sequence is synthesized)
ccatgagggtgctggcagggaacggacccagttctgacctatccacggggagcagcgggggttaccccgacttccctgccagccccgcctcctggctggatgaggtagaccacgctcagt

SEQ ID NO: 160697 - DNA, 120 bp, Artificial Sequence
  ENSG00000107187_11 (sequence is synthesized)
tctgacccaggcccggctccaccctgcacctcacacgagggagctgcccctgggtgggcggctcggggctgctggggtttccgaggaagtggggccagggcgtcaagggagggctggtgc

SEQ ID NO: 160698 - DNA, 120 bp, Artificial Sequence
  ENSG00000107187_12 (sequence is synthesized)
cttcggagcctcccactgccgaccgcacagctccctctctgggggctgagggacccacctggcccctcctctgacacagggctggcccgccaggtggcctcccagcaagccagccttttt

SEQ ID NO: 160699 - DNA, 120 bp, Artificial Sequence
  ENSG00000107187_13 (sequence is synthesized)
tgtaagcaaatttctcccctttattgaccaattaactgagcacttgctgctatttctagacatgaaatgtcaccttgctgaggcccagcccagcccagcatagcccgagggctggaaaaa

SEQ ID NO: 160700 - DNA, 120 bp, Artificial Sequence
  ENSG00000107187_14 (sequence is synthesized)
cgctttcatctctaaaactgagaaatcatcataattgtgctttcacttcccaggctccatgtgtcttggagccgtcaccccgaggctccctctttaggtcggagattggccttgcctgtc

SEQ ID NO: 160701 - DNA, 120 bp, Artificial Sequence
  ENSG00000107187_15 (sequence is synthesized)
gaggcaagaggctgcagaggcggggacacacctgtgtcctccgggagaggccccctcctctccccagaccacagggggcctctctgcctccagccccaccttccccgggagaagctttcc

SEQ ID NO: 160702 - DNA, 120 bp, Artificial Sequence
  ENSG00000107187_16 (sequence is synthesized)
ccaatccccaggtctctagatcattctgttctcgagtatcctgtggaggaggcaaaaatgcctggcgccccttctctccaagctcaattctctaagcccctcagggtctcctcctcaccc

SEQ ID NO: 160703 - DNA, 120 bp, Artificial Sequence
  ENSG00000107187_17 (sequence is synthesized)
caccccaggcccttggtgtccaggctgcacccacagatgtctgttgccaaacagcctgccctccctgccggagccggctctgccagccccagattgggaagtctccccgctggagaaggg

SEQ ID NO: 160704 - DNA, 120 bp, Artificial Sequence
  ENSG00000107187_18 (sequence is synthesized)
tggggctcctctgagcctgccctgcctcctccatcagatcctttgggaagaagtttctgggagatgcccgcagctgtgcgtgccccagacacaaaggctggcctgtgtgtaagtcaaagt

SEQ ID NO: 160705 - DNA, 120 bp, Artificial Sequence
  ENSG00000107187_19 (sequence is synthesized)
cactcccgcaaacctgaatctcgagctacctattggttctgtgaatgttctgtgtcttttatttattctcgggtgatcagctctttccaagacttcaataaatttgtcagttacagtcaa

SEQ ID NO: 160706 - DNA, 120 bp, Artificial Sequence
  ENSG00000107187_20 (sequence is synthesized)
agtggctcccgggctccctgccccgcacgacgcggcgggacttgggagccccgaaccctccaggggacgctgacctaggaggagcgcgtctcgcgccactcggcctggtggccgcgatgc

SEQ ID NO: 160707 - DNA, 120 bp, Artificial Sequence
  ENSG00000107187_21 (sequence is synthesized)
ggacgactttttcaagtgagccccgaaacctcacctcagtgtgggagcggagggcacgcctgccccagggactcctcccctcacaatcaccaaggccaggccctcgaagcctgcgtctct

SEQ ID NO: 160708 - DNA, 120 bp, Artificial Sequence
  ENSG00000107187_22 (sequence is synthesized)
cgcaatcccagcccactcctgtcacccaggcagggcaccctgtggcctggccaaattaagggtggggcctctccatgggtgctccctgggtggctgggcctggctgggacatcagcaagt

SEQ ID NO: 160709 - DNA, 120 bp, Artificial Sequence
  ENSG00000107187_23 (sequence is synthesized)
attatttggaaaaaaaagcaatttattacctaaatcacagaagcagtcattagagaagatacacccctatttgtaggattctactggacttagttcctccgaaattggtgatgttttagt

SEQ ID NO: 160710 - DNA, 120 bp, Artificial Sequence
  ENSG00000107187_24 (sequence is synthesized)
tcctaatgctggcacccagcggctctggcccagtggccttcatggctccagctgtggggtgtgagggactggccccagatgggtcctctccctccggattcaccttcccagatccagcat

SEQ ID NO: 160711 - DNA, 120 bp, Artificial Sequence
  ENSG00000107187_25 (sequence is synthesized)
gggtcctgcaggcaatggcggctgggctccccgaggtctttctgagattgaggttcccttctcagtgggagtgggcagctctgccccggcggccaggctggcgaccaccctgcagggccg

SEQ ID NO: 160712 - DNA, 120 bp, Artificial Sequence
  ENSG00000107187_26 (sequence is synthesized)
gacagagccttcctccggggccgccttcccaggcagccgcttgcctctctccaacccgctcggggcgaaatgagcctcgcgcttccgcgctgagcccggccctgtgcgtcccgcaggcgc

SEQ ID NO: 160713 - DNA, 120 bp, Artificial Sequence
  ENSG00000107187_27 (sequence is synthesized)
actgggagatgggctggagccggcggggtccacagccagggaggcgggtgcaatatgtcagtaaatcccggtcccttcagcgggcactcctctcttccagagactttttctaagtgaaga

SEQ ID NO: 160714 - DNA, 120 bp, Artificial Sequence
  ENSG00000107187_28 (sequence is synthesized)
gggagtcctcagcccttgacacctggaaaacccgctcacagactcgaggctcccacagggcacccttggacctccccagtgtggttcctccagggggcctgcagtaccgaagtggggtgt

SEQ ID NO: 160715 - DNA, 120 bp, Artificial Sequence
  ENSG00000107187_29 (sequence is synthesized)
ggggggcagaagcagcgggaagccagacgtttgagtaactctgacggtgttgggggcacccacgcctgacacaaaggcagtggatcggcttgtccagtccactcataagtaattttgcgg

SEQ ID NO: 160716 - DNA, 120 bp, Artificial Sequence
  ENSG00000107187_30 (sequence is synthesized)
ctgcccaatgatggggaaggcattgatatttaccccggaggcctgcagacagggccaccaggcagggcagccacatttgcgaggagtccctagaaagagtggccatgacgcttaacatga

SEQ ID NO: 160717 - DNA, 120 bp, Artificial Sequence
  ENSG00000107201_0 (sequence is synthesized)
gaacgtagctagctgcaagcagaggccggcatgaccaccgagcagcgacgcagcctgcaagccttccaggattatatccggaagaccctggaccctacctacatcctgagctacatggcc

SEQ ID NO: 160718 - DNA, 120 bp, Artificial Sequence
  ENSG00000107201_1 (sequence is synthesized)
ccctggtttagggaggaagaggtgcagtatattcaggctgagaaaaacaacaagggcccaatggaggctgccacactttttctcaagttcctgttggagctccaggaggaaggctggttc

SEQ ID NO: 160719 - DNA, 120 bp, Artificial Sequence
  ENSG00000107201_2 (sequence is synthesized)
cgtggctttttggatgccctagaccatgcaggttattctggactttatgaagccattgaaagttgggatttcaaaaaaattgaaaagttggaggagtatagattacttttaaaacgttta

SEQ ID NO: 160720 - DNA, 120 bp, Artificial Sequence
  ENSG00000107201_3 (sequence is synthesized)
caaccagaatttaaaaccagaattatcccaaccgatatcatttctgatctgtctgaatgtttaattaatcaggaatgtgaagaaattctacagatttgctctactaaggggatgatggca

SEQ ID NO: 160721 - DNA, 120 bp, Artificial Sequence
  ENSG00000107201_4 (sequence is synthesized)
ggtgcagagaaattggtggaatgccttctcagatcagacaaggaaaactggcccaaaactttgaaacttgctttggagaaagaaaggaacaagttcagtgaactgtggattgtagagaaa

SEQ ID NO: 160722 - DNA, 120 bp, Artificial Sequence
  ENSG00000107201_5 (sequence is synthesized)
ggtataaaagatgttgaaacagaagatcttgaggataagatggaaacttctgacatacagattttctaccaagaagatccagaatgccagaatcttagtgagaattcatgtccaccttca

SEQ ID NO: 160723 - DNA, 120 bp, Artificial Sequence
  ENSG00000107201_6 (sequence is synthesized)
gaagtgtctgatacaaacttgtacagcccatttaaaccaagaaattaccaattagagcttgctttgcctgctatgaaaggaaaaaacacaataatatgtgctcctacaggttgtggaaaa

SEQ ID NO: 160724 - DNA, 120 bp, Artificial Sequence
  ENSG00000107201_7 (sequence is synthesized)
acctttgtttcactgcttatatgtgaacatcatcttaaaaaattcccacaaggacaaaaggggaaagttgtcttttttgcgaatcagatcccagtgtatgaacagcagaaatctgtattc

SEQ ID NO: 160725 - DNA, 120 bp, Artificial Sequence
  ENSG00000107201_8 (sequence is synthesized)
tcaaaatactttgaaagacatgggtatagagttacaggcatttctggagcaacagctgagaatgtcccagtggaacagattgttgagaacaatgacatcatcattttaactccacagatt

SEQ ID NO: 160726 - DNA, 120 bp, Artificial Sequence
  ENSG00000107201_9 (sequence is synthesized)
cttgtgaacaaccttaaaaagggaacgattccatcactatccatctttactttgatgatatttgatgaatgccacaacactagtaaacaacacccgtacaatatgatcatgtttaattat

SEQ ID NO: 160727 - DNA, 120 bp, Artificial Sequence
  ENSG00000107201_10 (sequence is synthesized)
ctagatcagaaacttggaggatcttcaggcccactgccccaggtcattgggctgactgcctcggttggtgttggggatgccaaaaacacagatgaagccttggattatatctgcaagctg

SEQ ID NO: 160728 - DNA, 120 bp, Artificial Sequence
  ENSG00000107201_11 (sequence is synthesized)
tgtgcttctcttgatgcgtcagtgatagcaacagtcaaacacaatctggaggaactggagcaagttgtttataagccccagaagtttttcaggaaagtggaatcacggattagcgacaaa

SEQ ID NO: 160729 - DNA, 120 bp, Artificial Sequence
  ENSG00000107201_12 (sequence is synthesized)
tttaaatacatcatagctcagctgatgagggacacagagagtctggcaaagagaatctgcaaagacctcgaaaacttatctcaaattcaaaatagggaatttggaacacagaaatatgaa

SEQ ID NO: 160730 - DNA, 120 bp, Artificial Sequence
  ENSG00000107201_13 (sequence is synthesized)
caatggattgttacagttcagaaagcatgcatggtgttccagatgccagacaaagatgaagagagcaggatttgtaaagccctgtttttatacacttcacatttgcggaaatataatgat

SEQ ID NO: 160731 - DNA, 120 bp, Artificial Sequence
  ENSG00000107201_14 (sequence is synthesized)
gccctcattatcagtgagcatgcacgaatgaaagatgctctggattacttgaaagacttcttcagcaatgtccgagcagcaggattcgatgagattgagcaagatcttactcagagattt

SEQ ID NO: 160732 - DNA, 120 bp, Artificial Sequence
  ENSG00000107201_15 (sequence is synthesized)
gaagaaaagctgcaggaactagaaagtgtttccagggatcccagcaatgagaatcctaaacttgaagacctctgcttcatcttacaagaagagtaccacttaaacccagagacaataaca

SEQ ID NO: 160733 - DNA, 120 bp, Artificial Sequence
  ENSG00000107201_16 (sequence is synthesized)
attctctttgtgaaaaccagagcacttgtggacgctttaaaaaattggattgaaggaaatcctaaactcagttttctaaaacctggcatattgactggacgtggcaaaacaaatcagaac

SEQ ID NO: 160734 - DNA, 120 bp, Artificial Sequence
  ENSG00000107201_17 (sequence is synthesized)
acaggaatgaccctcccggcacagaagtgtatattggatgcattcaaagccagtggagatcacaatattctgattgccacctcagttgctgatgaaggcattgacattgcacagtgcaat

SEQ ID NO: 160735 - DNA, 120 bp, Artificial Sequence
  ENSG00000107201_18 (sequence is synthesized)
cttgtcatcctttatgagtatgtgggcaatgtcatcaaaatgatccaaaccagaggcagaggaagagcaagaggtagcaagtgcttccttctgactagtaatgctggtgtaattgaaaaa

SEQ ID NO: 160736 - DNA, 120 bp, Artificial Sequence
  ENSG00000107201_19 (sequence is synthesized)
agcagtatttagggaaaagattctgcatatacagactcatgaaaaattcatcagagatagtcaagaaaaaccaaaacctgtacctgataaggaaaataaaaaactgctctgcagaaagtg

SEQ ID NO: 160737 - DNA, 120 bp, Artificial Sequence
  ENSG00000107201_20 (sequence is synthesized)
caaagccttggcatgttacacagctgacgtaagagtgatagaggaatgccattacactgtgcttggagatgcttttaaggaatgctttgtgagtagaccacatcccaagccaaagcagtt

SEQ ID NO: 160738 - DNA, 120 bp, Artificial Sequence
  ENSG00000107201_21 (sequence is synthesized)
ttcaagttttgaaaaaagagcaaagatattctgtgcccgacagaactgcagccatgactggggaatccatgtgaagtacaagacatttgagattccagttataaaaattgaaagttttgt

SEQ ID NO: 160739 - DNA, 120 bp, Artificial Sequence
  ENSG00000107201_22 (sequence is synthesized)
ggtggaggatattgcaactggagttcagacactgtactcgaagtggaaggactttcattttgagaagataccatttgatccagcagaaatgtccaaatgatatcaggtcctcaatcttca

SEQ ID NO: 160740 - DNA, 120 bp, Artificial Sequence
  ENSG00000107201_23 (sequence is synthesized)
gctacagggaatgagtaactttgagtggagaagaaacaaacatagtgggtataatcatggatcgcttgtacccctgtgaaaatatattttttaaaaatatctttagcagtttgtactata

SEQ ID NO: 160741 - DNA, 120 bp, Artificial Sequence
  ENSG00000107201_24 (sequence is synthesized)
ttatatatgcaaagcacaaatgagtgaatcacagcactgagtattttgtaggccaacagagctcatagtacttgggaaaaattaaaaagcctcatttctagccttctttttagagtcaac

SEQ ID NO: 160742 - DNA, 120 bp, Artificial Sequence
  ENSG00000107201_25 (sequence is synthesized)
tgccaacaaacacacagtaatcactctgtacacactgggatagatgaatgaatggaatgttgggaatttttatctccctttgtctccttaacctactgtaaactggcttttgcccttaac

SEQ ID NO: 160743 - DNA, 120 bp, Artificial Sequence
  ENSG00000107201_26 (sequence is synthesized)
aatctactgaaattgttcttttgaaggttaccagtgactctggttgccaaatccactgggcacttcttaaccttctatttgacctctgcgcatttggccctgttgagcactcttcttgaa

SEQ ID NO: 160744 - DNA, 120 bp, Artificial Sequence
  ENSG00000107201_27 (sequence is synthesized)
gctctccctgggcttctctctcttctagttctattctagtctttttttattgagtcctcctctttgctgatcccttccaagggttcaatatatatacatgtatatactgtacatatgtat

SEQ ID NO: 160745 - DNA, 120 bp, Artificial Sequence
  ENSG00000107201_28 (sequence is synthesized)
atgtaactaatatacatacatacaggtatgtatatgtaatggttatatgtactcatgttcctggtgtagcaacgtgtggtatggctacacagagaacatgagaacataaagccattttta

SEQ ID NO: 160746 - DNA, 120 bp, Artificial Sequence
  ENSG00000107201_29 (sequence is synthesized)
tgcttactactaaaagctgtccactgtagagttgctgtatgtagcaatgtgtatccactctacagtggtcagcttttagtagagagcataaaaatgataaaatacttcttgaaaacttag

SEQ ID NO: 160747 - DNA, 120 bp, Artificial Sequence
  ENSG00000107201_30 (sequence is synthesized)
tttactatacatcttgccctattaatatgttctcttaacgtgtgccattgttctctttgaccattttcctataatgatgttgatgttcaacacctggactgaatgtctgttctcagatcc

SEQ ID NO: 160748 - DNA, 120 bp, Artificial Sequence
  ENSG00000107201_31 (sequence is synthesized)
cttggatgttacagatgaggcagtctgactgtcctttctacttgaaagattagaatatgtatccaaatggcattcacgtgtcacttagcaaggtttgctgatgcttcaaagagcttagtt

SEQ ID NO: 160749 - DNA, 120 bp, Artificial Sequence
  ENSG00000107201_32 (sequence is synthesized)
tgcggtttcctggacgtggaaacaagtatctgagttccctggagatcaacgggatgaggtgttacagctgcctccctcttcatgcaatctggtgagcagtggtgcaggcggggagccaga

SEQ ID NO: 160750 - DNA, 120 bp, Artificial Sequence
  ENSG00000107201_33 (sequence is synthesized)
gaaacttgccagttatataacttctctttggcttttcttcatctgtaaaacaaggataatactgaactgtaagggttagtggagagtttttaattaaaagaatgtgtgaaaagtacatga

SEQ ID NO: 160751 - DNA, 120 bp, Artificial Sequence
  ENSG00000107201_34 (sequence is synthesized)
cacagtagttgcttgataatagttactagtagtagtattcttactaagacccaatacaaatggattatttaaaccaagtttatgagttggttttttttcattttctatttgtattttatt

SEQ ID NO: 160752 - DNA, 120 bp, Artificial Sequence
  ENSG00000107201_35 (sequence is synthesized)
agttggttttttttcattttctatttgtattttattaagagtgtcttttcttatgtgattttttttaattgctatttgatatggtttggctatatgtccccacccaaatctcatcttgaa

SEQ ID NO: 160753 - DNA, 84 bp, Artificial Sequence
  ENSG00000107201_36 (sequence is synthesized)
tgaattataatccccatgtgtcaagggagggacctgacgggaggtgattggatcacgggggcagttgtccccatgctgttcttg

SEQ ID NO: 160754 - DNA, 63 bp, Artificial Sequence
  ENSG00000107201_37 (sequence is synthesized)
tataagtgtttgacaattcctcctttacacacactctctctctcatctgctgccatgtaagac

SEQ ID NO: 160755 - DNA, 120 bp, Artificial Sequence
  ENSG00000107223_0 (sequence is synthesized)
ctctagcagctgccgctgagccgccggacggacgctcgtcttcgcccgccatggccgagagcgactgggacacggtgacggtgctgcgcaagaagggccctacggccgcccaggccaaat

SEQ ID NO: 160756 - DNA, 120 bp, Artificial Sequence
  ENSG00000107223_1 (sequence is synthesized)
ccaagcaggctatcttagcggcacagagacgaggagaagatgtggagacttccaagaaatgggctgctggccagaacaaacaacattctattaccaagaacacggccaagctggaccggg

SEQ ID NO: 160757 - DNA, 120 bp, Artificial Sequence
  ENSG00000107223_2 (sequence is synthesized)
cggcagagcaaggggcttacgcagaaggacctggccacgaaaatcaatgagaagccacaggtgatcgcggactatgagagcggacgggccatacccaataaccaggtgcttggcaaaatc

SEQ ID NO: 160758 - DNA, 120 bp, Artificial Sequence
  ENSG00000107223_3 (sequence is synthesized)
gagcgggccattggcctcaagctccggggaaaggacattggaaagcccatcgagaaggggcctagggcgaaatgaacacaaagcctcgaaatcagtgcgctccagctgatctcgttccgc

SEQ ID NO: 160759 - DNA, 120 bp, Artificial Sequence
  ENSG00000107223_4 (sequence is synthesized)
cggttccccttggccgccagttccgttctcctcacgggccgaacggaacaaggggtccagcttgcgggggaccctccccagcccattcctgctgtcaaacaaacaaaaccttgcaaagcg

SEQ ID NO: 160760 - DNA, 120 bp, Artificial Sequence
  ENSG00000107223_5 (sequence is synthesized)
agctggggttggtgagagtgggactcgggggaagaagatggccctgggggtcccctgttctctgaattctggagctttgcttctccaggtagtacagactgagggatggtggggtctctg

SEQ ID NO: 160761 - DNA, 120 bp, Artificial Sequence
  ENSG00000107223_6 (sequence is synthesized)
caggcctcaggaaacccctaagagcaagtggagtccgagtcccttccccttgccagttcccgtcagcctgtgctgttggcgatggttctctgagcctgagcacagcgggtccgggccctg

SEQ ID NO: 160762 - DNA, 120 bp, Artificial Sequence
  ENSG00000107223_7 (sequence is synthesized)
tcagcatggggccggaagccagttccacagaggaccccggctccggttcttccggagaggggtgttcatgctctgctgtctaaggtgatcagactcatcctcttcaaaattagatgtggg

SEQ ID NO: 160763 - DNA, 120 bp, Artificial Sequence
  ENSG00000107223_8 (sequence is synthesized)
ctcgtgtgctgagagcccagtgaggcacgggagcggcgtggccccccttccctgggaagatgttgaagaggggcagcgttggggggaggagggagctggtgctgcagtggccagtggctg

SEQ ID NO: 160764 - DNA, 80 bp, Artificial Sequence
  ENSG00000107242_0 (sequence is synthesized)
ctctctgcgcctcgctccgactccggcgcgcaccaagcgggaacccgcgcccgagcccggcgggcgccgctgctgctcct

SEQ ID NO: 160765 - DNA, 120 bp, Artificial Sequence
  ENSG00000107242_1 (sequence is synthesized)
ggctgcgcccggcagtggagccgctcggagctgctgggctttggcggccgctcgctgctccgtctggccggaggaccggcggggaaggaaggggaaagcggggacacacacactcgccgc

SEQ ID NO: 160766 - DNA, 120 bp, Artificial Sequence
  ENSG00000107242_2 (sequence is synthesized)
ggaaagcggggacacacacactcgccgcggcgcgcgcgcactgcacactcgtagccgcgcgcccccgccaaggcgcgtccggagcgagtttggccccgcggctccagccccggcacctgc

SEQ ID NO: 160767 - DNA, 120 bp, Artificial Sequence
  ENSG00000107242_3 (sequence is synthesized)
ccccgcccgccgccccctccgccctcccgcccctcccgcccctcccgcccctcgcctgcactgctctcccttcgctgtggggaagcgacaacgtcccgataacttgcagactgtggcgca

SEQ ID NO: 160768 - DNA, 120 bp, Artificial Sequence
  ENSG00000107242_4 (sequence is synthesized)
actggtcttggtagcggaggcacccgaatgctgcccgggtgagatgaggaagccaaggcccagcagagctgagatgtgactgcagagccgtccaaccccagtcctgtgacctttctctgg

SEQ ID NO: 160769 - DNA, 120 bp, Artificial Sequence
  ENSG00000107242_5 (sequence is synthesized)
tgcctgatacctctcagcatttgagggccttttctcttcctgcttcatctctaaaggtccttctaggagagaggtgaaagaaacctggcaaagaaaacggtctcgacaatgagtaggcca

SEQ ID NO: 160770 - DNA, 120 bp, Artificial Sequence
  ENSG00000107242_6 (sequence is synthesized)
cccatcactactaactacagatgacttgccatttcatttacaaagatgtcttctgctgctgaaaatggagaggcagcacctggaaaacaaaatgaagaaaaaacctataaaaagactgca

SEQ ID NO: 160771 - DNA, 120 bp, Artificial Sequence
  ENSG00000107242_7 (sequence is synthesized)
tcatctgctattaaaggtgctattcagctgggaataggatacacagtgggtaatctcacttccaagccagaacgagatgttcttatgcaagacttttatgtggtggaaagtgtgttccta

SEQ ID NO: 160772 - DNA, 120 bp, Artificial Sequence
  ENSG00000107242_8 (sequence is synthesized)
cccagcgaagggagcaatctgaccccagcacatcactacccagactttagatttaagacatacgctccattagcattccgatatttcagagaactttttggtatcaagcctgatgattac

SEQ ID NO: 160773 - DNA, 120 bp, Artificial Sequence
  ENSG00000107242_9 (sequence is synthesized)
ttgtattccatctgcagtgaacctctaatagaactgtctaaccctggagccagtggatccttgttttttgtgaccagtgatgatgaatttatcatcaaaacagttcagcacaaagaagct

SEQ ID NO: 160774 - DNA, 120 bp, Artificial Sequence
  ENSG00000107242_10 (sequence is synthesized)
gagtttcttcagaagctactgccaggctattacatgaatttaaaccagaatccaaggactcttttgccaaaattttacggactgtattgtatgcaatcaggaggcattaatatcaggatt

SEQ ID NO: 160775 - DNA, 120 bp, Artificial Sequence
  ENSG00000107242_11 (sequence is synthesized)
gtggtgatgaacaacgttttgccacgctccatgagaatgcactttacatatgacttgaaaggctcaacgtataagcgaagagcatcccgtaaagagagagagaaatccaaccccacattt

SEQ ID NO: 160776 - DNA, 120 bp, Artificial Sequence
  ENSG00000107242_12 (sequence is synthesized)
tcatggattatagccttctgttgggaattcatttcctggaccattccctcaaagagaaagaggaggagaccccacaaaatgtgcctgatgctaagcggactgggatgcagaaggttctct

SEQ ID NO: 160777 - DNA, 120 bp, Artificial Sequence
  ENSG00000107242_13 (sequence is synthesized)
actcaacagccatggaatctatccagggtccagggaaatctggagatgggataatcacagagaacccagacacaatgggaggcattccagctaaaagccataggggagaaaaactacttt

SEQ ID NO: 160778 - DNA, 120 bp, Artificial Sequence
  ENSG00000107242_14 (sequence is synthesized)
tatttatgggcattattgacattctgcaatcatataggttaatgaagaagttagaacattcctggaaagctcttgtttatgatggggacactgtttctgttcatagaccaagcttttatg

SEQ ID NO: 160779 - DNA, 120 bp, Artificial Sequence
  ENSG00000107242_15 (sequence is synthesized)
cagacagatttcttaagttcatgaattccagagttttcaagaaaattcaagctttgaaggcttcaccgtctaagaaacggtgcaattcaatcgccgccctaaaggccacttcacaggaga

SEQ ID NO: 160780 - DNA, 120 bp, Artificial Sequence
  ENSG00000107242_16 (sequence is synthesized)
ttgtgtcctcaattagccaggaatggaaggatgagaagcgggatttgctgactgaaggacaaagttttagcagccttgatgaagaagccctgggatcccgacacaggccagacctggtcc

SEQ ID NO: 160781 - DNA, 120 bp, Artificial Sequence
  ENSG00000107242_17 (sequence is synthesized)
ctagcactccatcactgtttgaagctgcttccttggcaaccacaatttcatcttcttccttatacgtcaatgagcactatccacacgacaggcctacactctattcaaacagcaaagggt

SEQ ID NO: 160782 - DNA, 120 bp, Artificial Sequence
  ENSG00000107242_18 (sequence is synthesized)
taccttccagttcaacatttaccttggaagaggggaccatctacttgaccgctgagcccaacactctggaagtgcaggatgacaatgcttctgtgcttgacgtctatttataagtgaaaa

SEQ ID NO: 160783 - DNA, 120 bp, Artificial Sequence
  ENSG00000107242_19 (sequence is synthesized)
tggtgatcacctaagcacatggatgagacgtgagcacagttatggcagagaagtttctccgcaccagaattatccacagcaacttggctgagccccactacacacagagaaatcatcaac

SEQ ID NO: 160784 - DNA, 120 bp, Artificial Sequence
  ENSG00000107242_20 (sequence is synthesized)
ctgacttaagagttttcaagatgtcaacttcaggctgatcagcagatgggatgtgaaaaatactaccctattctatcatttgctgttgcttgctgaactgtgaagaactgcatgaactat

SEQ ID NO: 160785 - DNA, 120 bp, Artificial Sequence
  ENSG00000107242_21 (sequence is synthesized)
atttaagctgctttctgtaccattgccaatcacctttttggagttggaagtgctattttcctatggacttttgcattatttcattgtgcatgcatccagtgattatacataagcaacata

SEQ ID NO: 160786 - DNA, 120 bp, Artificial Sequence
  ENSG00000107242_22 (sequence is synthesized)
tgtaatctgcttatatatttttaaaaatccatccacacacatggtaaattaagtataaattcttttgcaaaattatagttcatgtcattgaaagtttaaattggtttcatttaaagatca

SEQ ID NO: 160787 - DNA, 120 bp, Artificial Sequence
  ENSG00000107242_23 (sequence is synthesized)
atatactaggtctgccttcactttatagaaaactagcttctataaagattttttcactgtttactagtgaaatgagaaaagcaaagctatttataaaaggccttatgtcgtgtacataca

SEQ ID NO: 160788 - DNA, 120 bp, Artificial Sequence
  ENSG00000107242_24 (sequence is synthesized)
atgtcgtgtacatacattgtctttgaaatatttgtgatctagtttattgcttgtaaaagagaaattatataatttatttagtaaatactactgtaaactatagttttgtgagagaaataa

SEQ ID NO: 160789 - DNA, 120 bp, Artificial Sequence
  ENSG00000107242_25 (sequence is synthesized)
agtgcattccaagttctaaacagctgagttttggatctcagctcctttgagagttgtggaccagtcagacacaaaattatctttaaatatacagatagggatgaggaagccaaggcccag

SEQ ID NO: 160790 - DNA, 120 bp, Artificial Sequence
  ENSG00000107242_26 (sequence is synthesized)
tcgtcacccggatccccggggccgcagtgacactcggagatcactctgggttcacttaaataggagtactctccccttttccggggaacctgcagagtttggcagcggaaggaaaggtct

SEQ ID NO: 160791 - DNA, 120 bp, Artificial Sequence
  ENSG00000107242_27 (sequence is synthesized)
cccaccaccctcccccggtacgaaacagcggtgaacttgttaggcgccctggtatctcaagaggggcttgcgagttggtgttctgctcatttctggcgctggtgccggattgaacagatg

SEQ ID NO: 160792 - DNA, 120 bp, Artificial Sequence
  ENSG00000107242_28 (sequence is synthesized)
aggaaactgaggtttagacaagcagtgggagttttccatggatttacatctcatttagtggcatttgcaagactagaacttggatcttctgatgtccagtccattgctttgtgtattctg

SEQ ID NO: 160793 - DNA, 120 bp, Artificial Sequence
  ENSG00000107242_29 (sequence is synthesized)
aggactgttaagcatgcccccagtgacctgggttctagttctgggactacatttggccgtatgacctgggccatcatatcacttccaagtctcaagtgtctcacatataaaacaaaacgt

SEQ ID NO: 160794 - DNA, 120 bp, Artificial Sequence
  ENSG00000107242_30 (sequence is synthesized)
ttgtatgaaattatgttttttctttccaactttagcattttgtgatgtttaccaatgtgtttgtaatccaatgttatcattttctctagaggaaggagacctttgtaccccacatcacct

SEQ ID NO: 160795 - DNA, 120 bp, Artificial Sequence
  ENSG00000107242_31 (sequence is synthesized)
aagagacctagctaattactctttcacctttagtttatcccttcccccctttactacatgccacttcatcaaaggaatgaaacttaacaagtgcgttttagcttaacatctacagtatat

SEQ ID NO: 160796 - DNA, 120 bp, Artificial Sequence
  ENSG00000107242_32 (sequence is synthesized)
actttctaaacaataaacatgtgacacttgtttaataatcacagcaaccatggagtggatactattatcaccatttaatagaggagtgtgatgagaagccattagagggttgagtgaagg

SEQ ID NO: 160797 - DNA, 120 bp, Artificial Sequence
  ENSG00000107242_33 (sequence is synthesized)
caacgagaacctcctgccctgtgtctcatgaagaggcagtatttcaagaagaggcttaaagctgagagtgttttgctaatcagtgaagatgtgactaatgagctgctggggaagtcaagc

SEQ ID NO: 160798 - DNA, 120 bp, Artificial Sequence
  ENSG00000107242_34 (sequence is synthesized)
atgcgcagaggggccagcccgctgacagattctcggtggcggcggcagcggcggcggccctggactgcggggaatgggaatcctaggtccctgactgagcacctcccccgcctccctgcc

SEQ ID NO: 160799 - DNA, 120 bp, Artificial Sequence
  ENSG00000107242_35 (sequence is synthesized)
cccgacatggctcaggagaagatggagctagacctggagctgcctccgggtacgggcgggagcccggcggagggcggtggcagcggcggcggcgggggcctcaggaggtctaacagcgcc

SEQ ID NO: 160800 - DNA, 120 bp, Artificial Sequence
  ENSG00000107242_36 (sequence is synthesized)
cccctgatccacggcctcagtgacacttcgccggtgttccaggccgaggcgccgagcgccaggcggaacagcacaacgttcccgagccgccacggcctgctgctgccggcctcccctgtc

SEQ ID NO: 160801 - DNA, 120 bp, Artificial Sequence
  ENSG00000107242_37 (sequence is synthesized)
cgcatgcacagcagccgcttgcaccagatcaaacaagaagagggcatggacttgatcaaccgagagacggtccacgaacgggaggtgcagaccgcaatgcagataagccactcctgggag

SEQ ID NO: 160802 - DNA, 120 bp, Artificial Sequence
  ENSG00000107242_38 (sequence is synthesized)
gagaaatccgcctcccccaagcgcatcgatttcattcctgtgtcaccagcaccgtcacccactcggggaattgggaagcagtgtttttcgccatccttgcaaagttttgtaagtagcaac

SEQ ID NO: 160803 - DNA, 120 bp, Artificial Sequence
  ENSG00000107242_39 (sequence is synthesized)
ggattgcctccaagccctattcccagcccaacgacccgatttaccacccggagaagccagagccccatcaattgcattagaccaagtgttcttggaccattgaaaagaaaatgtgaaatg

SEQ ID NO: 160804 - DNA, 120 bp, Artificial Sequence
  ENSG00000107242_40 (sequence is synthesized)
gaaactgaatatcagccaaagagatttttccagggcatcaccaacatgctttcttctgacgttgcacagctgtcagatcctggtgtgtgtgtatcttcggatacccttgatggaaacagc

SEQ ID NO: 160805 - DNA, 120 bp, Artificial Sequence
  ENSG00000107242_41 (sequence is synthesized)
agcagtgccggatcttcttgtaactcaccagcgaaagtcagcactaccaccgactctcctgtgtcacctgcccaagcggcttctccatttattccactagatgaactttcgtctaagtga

SEQ ID NO: 160806 - DNA, 120 bp, Artificial Sequence
  ENSG00000107242_42 (sequence is synthesized)
cccagcactttgcgaggccgaggcagactgatctcttgagtccggaagttcaagaccagcctgggcaatatgctcaatccatctgagcacctgttattcatatcagaaggaaatgaaatc

SEQ ID NO: 160807 - DNA, 120 bp, Artificial Sequence
  ENSG00000107242_43 (sequence is synthesized)
agaaggaaatgaaatcaatagcattttcttccccagtggcagtctttaaacttccttctcttttgccagatgagaaggttcagcctagttcttcagtggttccatacttaaaccatccaa

SEQ ID NO: 160808 - DNA, 120 bp, Artificial Sequence
  ENSG00000107242_44 (sequence is synthesized)
aaatacagaaaaacatcaagcaacccaaatcatgtgggacattctgcagtatacctgatgagtactcttcagaactgtcaaggtcatcaaaaacaagaagtctaaaaaaccatcacagtc

SEQ ID NO: 160809 - DNA, 120 bp, Artificial Sequence
  ENSG00000107242_45 (sequence is synthesized)
tatgagagcctaaggagatgtgacacctaaatgtcacatggtatccagagtgggactctggaacggaaaaaggcattaaggaaaatgaacaaaatctggatatagtatggagcaaagggt

SEQ ID NO: 160810 - DNA, 120 bp, Artificial Sequence
  ENSG00000107249_0 (sequence is synthesized)
atcctttatggttgaagggtgttggaggaagcagagttttcatcagctgctgaagtggcaactaatagaggtttgaatggccgtagaaaaatattgtgttacttgtttgttgtctagggg

SEQ ID NO: 160811 - DNA, 120 bp, Artificial Sequence
  ENSG00000107249_1 (sequence is synthesized)
ctcttggctttgggcctcagtgcaagtccattggaaaaggcagctgcaacaatctagtggtcaccagcagtcccatgatggttcagcgactgggactcatttcacctccagcaagccagg

SEQ ID NO: 160812 - DNA, 120 bp, Artificial Sequence
  ENSG00000107249_2 (sequence is synthesized)
tctctacagcatgcaaccagatcagtcctagcttacagagggcaatgaatgcagccaacctgaatatacctccttcagataccaggtcccttatttcgcgtgagtctttggcgtccacga

SEQ ID NO: 160813 - DNA, 120 bp, Artificial Sequence
  ENSG00000107249_3 (sequence is synthesized)
ccttgagtctgacggaaagtcagtcggcctcaagcatgaagcaggagtggtcccagggctacagggccctcccttcgctctccaaccacggctctcagaatggccttgatctaggggatc

SEQ ID NO: 160814 - DNA, 120 bp, Artificial Sequence
  ENSG00000107249_4 (sequence is synthesized)
tccttagccttcctcccgggacatccatgtccagcaatagtgtctctaactcattaccatcctacctttttggcacggaaagtagccactctccttaccctagtcctcggcactcatcca

SEQ ID NO: 160815 - DNA, 120 bp, Artificial Sequence
  ENSG00000107249_5 (sequence is synthesized)
ccaggtcccactcggcccgctccaagaagagagcgctgtccttgtccccgctgtccgatggcatcgggatagatttcaataccatcatccgcacgtcgcccacgtccttggtggcctaca

SEQ ID NO: 160816 - DNA, 120 bp, Artificial Sequence
  ENSG00000107249_6 (sequence is synthesized)
tcaacgggtcgagggcttcgccggccaacctgtccccgcagccggaggtctacgggcatttcctgggcgtgcgcggcagctgcattccccagccgcgcccggtgcccggcagccagaagg

SEQ ID NO: 160817 - DNA, 120 bp, Artificial Sequence
  ENSG00000107249_7 (sequence is synthesized)
gcgtgctggtggcccctggaggcctggcgctgccggcctacggcgaggacggggccctggagcacgagcgcatgcaacagctggagcacggcggcctgcagccaggcctggtcaaccaca

SEQ ID NO: 160818 - DNA, 120 bp, Artificial Sequence
  ENSG00000107249_8 (sequence is synthesized)
tggtggtgcagcatggcctgccgggccccgacagccagtcggccggcctgttcaagaccgaacgcctggaggagttcccgggcagcaccgtagacctaccccccgcgcctccgctccctc

SEQ ID NO: 160819 - DNA, 120 bp, Artificial Sequence
  ENSG00000107249_9 (sequence is synthesized)
ctctgccgccgcccccaggccccccacccccttaccatgcccatgcgcaccttcaccacccggagctcgggccccacgcccagcagctggccttgccccaggccaccctggacgacgacg

SEQ ID NO: 160820 - DNA, 120 bp, Artificial Sequence
  ENSG00000107249_10 (sequence is synthesized)
gggagatggacggcatcgggggcaagcattgctgccgctggatcgactgcagcgccctgtacgaccagcaggaggagctcgtgcggcacatcgagaaggtccacatcgaccagcgcaaag

SEQ ID NO: 160821 - DNA, 120 bp, Artificial Sequence
  ENSG00000107249_11 (sequence is synthesized)
gggaggacttcacttgcttctgggccggttgccctcgaagatacaagcccttcaacgcccgctataaactgctgatccacatgagagtccactctggggagaagcccaacaagtgtacgt

SEQ ID NO: 160822 - DNA, 120 bp, Artificial Sequence
  ENSG00000107249_12 (sequence is synthesized)
ttgaaggttgcgagaaggccttttcaaggcttgaaaatctcaagatccacttgcggagccacacaggcgagaagccgtatttgtgccagcatccgggttgtcagaaggccttcagtaact

SEQ ID NO: 160823 - DNA, 120 bp, Artificial Sequence
  ENSG00000107249_13 (sequence is synthesized)
ccagtgaccgcgccaaacaccagcggacgcatctggacaccaaaccttatgcttgtcaaattccaggatgtaccaaacgctacacagacccaagttccctaagaaagcatgtgaaggcac

SEQ ID NO: 160824 - DNA, 120 bp, Artificial Sequence
  ENSG00000107249_14 (sequence is synthesized)
attcttccaaagagcaacaagcaaggaaaaagttgcggtccagcacagagctccatccagacctgctcacagattgcctcaccgtgcagtccctgcagccggccacttcccctagagatg

SEQ ID NO: 160825 - DNA, 120 bp, Artificial Sequence
  ENSG00000107249_15 (sequence is synthesized)
ctgctgctgaagggaccgtgggacgctcccctggacccgggcctgacctctattcagctcccattttctccagcaattattcaagccgaagtggaacagctgctggggccgtaccacccc

SEQ ID NO: 160826 - DNA, 120 bp, Artificial Sequence
  ENSG00000107249_16 (sequence is synthesized)
cacatcctgtcagtcacccttctccaggacataatgtacaggggagccctcacaacccctcctcccagttacctccactcacagctgtggacgcaggagctgagaggtttgcaccttctg

SEQ ID NO: 160827 - DNA, 120 bp, Artificial Sequence
  ENSG00000107249_17 (sequence is synthesized)
ctccatctcctcaccacatcagcccccggagagttccagctccttcttcaatactgcaaagaacacagcctccctatacccagcagccatcaggttcacacctgaagtcctatcagccag

SEQ ID NO: 160828 - DNA, 120 bp, Artificial Sequence
  ENSG00000107249_18 (sequence is synthesized)
aaacaaactcttcttttcaaccaaatggtatccatgtccatggattttatgggcagctgcagaagttctgtcccccacactaccccgattcccagagaattgtgccgcctgtcagctcct

SEQ ID NO: 160829 - DNA, 120 bp, Artificial Sequence
  ENSG00000107249_19 (sequence is synthesized)
gcagtgtggtgccttcgtttgaggactgcctagtccctacatccatgggccaggccagttttgatgttttccacagagccttctcgactcactcgggcattacagtgtatgatttacctt

SEQ ID NO: 160830 - DNA, 120 bp, Artificial Sequence
  ENSG00000107249_20 (sequence is synthesized)
caagttcctcgagcctctttggggagtctctccgcagcggggctgaagatgctaccttcttgcagatcagcaccgtggaccgctgtcctagccagctctcctctgtctacaccgaaggct

SEQ ID NO: 160831 - DNA, 120 bp, Artificial Sequence
  ENSG00000107249_21 (sequence is synthesized)
aaaagctctcttggccactcctgcacacccaggaccttgatgttgcttgccaccttttgttttcgtactctcacagactgcttgaggaaggatgtcagcccaatcagcgggccctgcaga

SEQ ID NO: 160832 - DNA, 120 bp, Artificial Sequence
  ENSG00000107249_22 (sequence is synthesized)
gttactgatgttctttcagaaggcaggactgaatggcagagctagctttgcaggaatcattacagttgctcctttttctctctggttttcctggactatgtgaccaggaggactgtcttt

SEQ ID NO: 160833 - DNA, 120 bp, Artificial Sequence
  ENSG00000107249_23 (sequence is synthesized)
tcaaagggaatttagagcctcactctcctggatacctgttacttcctggctgtcaacccttaaaggaccccagtgaaatgatgtgcatatgaaaatgtagtttggggatgactctacctg

SEQ ID NO: 160834 - DNA, 120 bp, Artificial Sequence
  ENSG00000107249_24 (sequence is synthesized)
aaaactccaaacagggaaaaagacctcaattacgagaggcatagtgacctgcctcacctaatcctcacccttgctgctcctgatgcaaagccaggcacaacaagggaaatccatgtccaa

SEQ ID NO: 160835 - DNA, 120 bp, Artificial Sequence
  ENSG00000107249_25 (sequence is synthesized)
agcatagtgtggtctcaactcttagaaactccctgggtttcccttttctcttagccacatgctaaccagttgcttctcagtgtttctcttcaatagaaaaataaggttttatatgccagc

SEQ ID NO: 160836 - DNA, 120 bp, Artificial Sequence
  ENSG00000107249_26 (sequence is synthesized)
agcctatccttgtttttgcattttaaagacttagttatttatacgtattttaaaatgaaaaaaaaatgtaaaggtctgtgctttggatggaaatcattattattgtaatcaccccagcta

SEQ ID NO: 160837 - DNA, 120 bp, Artificial Sequence
  ENSG00000107249_27 (sequence is synthesized)
aggttacctgagggaaatggagtgggcacctcccgcaccaacagtcctgtagctggaaccttcctgagttgactgtttagtaactccacctcaaagactgtgttcaaagaaaaatgttgt

SEQ ID NO: 160838 - DNA, 120 bp, Artificial Sequence
  ENSG00000107249_28 (sequence is synthesized)
ttgactggtttacccattgcctccactctggtgctgcacccagagaagtgccagatgtgagaactgggacagactgagtcatgtgccagcttcccttggaaaaccaaacctagtgatact

SEQ ID NO: 160839 - DNA, 120 bp, Artificial Sequence
  ENSG00000107249_29 (sequence is synthesized)
tgacttccagtgctcagattttactaacgtttttcaggatatccactcatctgtctgtctcttccctacacttctctccaccctctttttgcatccctcttaccctcttcctgactgtgg

SEQ ID NO: 160840 - DNA, 120 bp, Artificial Sequence
  ENSG00000107249_30 (sequence is synthesized)
ttcatatatccccaccagccgccattgtctgatcatcttgggaaggtagaggtgacagttctcgaaaagtctacagaaagaggcaattctttttctgagttccagtttgaaggcctggaa

SEQ ID NO: 160841 - DNA, 120 bp, Artificial Sequence
  ENSG00000107249_31 (sequence is synthesized)
ttttcacatagcacttggtcgaaaatatcaagcctaaataggaagtcattttctgtgacacctctacatagctattacagatcctaagtcctagggcatcagctataaaaattggccagt

SEQ ID NO: 160842 - DNA, 120 bp, Artificial Sequence
  ENSG00000107249_32 (sequence is synthesized)
cccaaagacacagtaagttctaacattctggtactatcatatttcaagtattttttctcactttttaaaaatgtttttctgaacaaaagtgaaacaatgccatttatcaaactgagatca

SEQ ID NO: 160843 - DNA, 120 bp, Artificial Sequence
  ENSG00000107249_33 (sequence is synthesized)
ttacaatcttcaacaagacaactaaaacagcttgatgttagatgggattctgtgacagtttgtatactgacaggtccttccagtctccctccacagtcccacaagcggaagtattctacc

SEQ ID NO: 160844 - DNA, 120 bp, Artificial Sequence
  ENSG00000107249_34 (sequence is synthesized)
tgattccagagttcattccaacatgcagtagaatgaggtgaatgaagaaccaagtgtgggttttgttttcacagtgcacttggtcaatctagtttctctgagtagtgggctgtattctaa

SEQ ID NO: 160845 - DNA, 120 bp, Artificial Sequence
  ENSG00000107249_35 (sequence is synthesized)
gaaaagctttcacgtagacgtcaaagtctgcaaaagagatgagttagccactttaaaaaacctgctctgctttacaaaagatgcacaccaggcttcctttacaagtgaactccaaggctg

SEQ ID NO: 160846 - DNA, 120 bp, Artificial Sequence
  ENSG00000107249_36 (sequence is synthesized)
cttgtaaagtaccacccttcctgcagactttgtgggtcgtgtcacttggcctaaacaagtggcctaacatatgcatgctcacagctagtagcatccctcatgcgtcctttgtcatactct

SEQ ID NO: 160847 - DNA, 120 bp, Artificial Sequence
  ENSG00000107249_37 (sequence is synthesized)
ggaaagaaaaaaactctgctatcttcagagaaaccatctattcatacttaaatatggaagcctttacaaggaactcaaaatacatttcatttcatttgtacaatgagaaaaaagatgaaa

SEQ ID NO: 160848 - DNA, 120 bp, Artificial Sequence
  ENSG00000107249_38 (sequence is synthesized)
aggcaaggttgttattgcagttgacattgtcagccctgccttttggctttatgtaatttaaaatagaaagggggaaggaggacaagacagaagctcaactttagaaaccatggacatcac

SEQ ID NO: 160849 - DNA, 120 bp, Artificial Sequence
  ENSG00000107249_39 (sequence is synthesized)
ctccctctttgagaggagctgcttgtgaaccaggctccagtcttcctgtggcctctcacagtaaccctgcccctttcttacctcacaggggcaagagggactctaaagagggcgtaagca

SEQ ID NO: 160850 - DNA, 120 bp, Artificial Sequence
  ENSG00000107249_40 (sequence is synthesized)
atagaggcacctgcagccctccttcctcagcaggaaatcaatgtggagccccagagggacattttatctcagagagagcatgctggccacaggacccagtgcagccctgcttcccgcacc

SEQ ID NO: 160851 - DNA, 120 bp, Artificial Sequence
  ENSG00000107249_41 (sequence is synthesized)
gtgggtctttcctgatagctgcaggcttgagattgcagcctcaggataggacacgttcagatgccttccagactacacacactatgcttagattcgagagtctttcctgaccttaaaatt

SEQ ID NO: 160852 - DNA, 120 bp, Artificial Sequence
  ENSG00000107249_42 (sequence is synthesized)
tgtcccttgcttactttcacactgcagaagatttatatatatattcatcattatttttgcagcagtacaagtggaaacttcaaaaaaatcattccctttcatgtcctggtctttttaagt

SEQ ID NO: 160853 - DNA, 120 bp, Artificial Sequence
  ENSG00000107249_43 (sequence is synthesized)
cttgatatgtaaccattttcataaatgtccaaacagagattgtcattccccttaaaaacagaaacaaaacacaaaactagtgcttgtgaaaacacacagcgcaaagacaattatcctatt

SEQ ID NO: 160854 - DNA, 120 bp, Artificial Sequence
  ENSG00000107249_44 (sequence is synthesized)
gcattaaaaaaaaaatcagtctgcctagagacatttcattggctgcattgtcttaattccctaacgaaactgcatcaaaatgtcagttgtaatttagcctctgatcagctgttaaatatt

SEQ ID NO: 160855 - DNA, 120 bp, Artificial Sequence
  ENSG00000107249_45 (sequence is synthesized)
atttaaatatttacaggtcctgtggggtatctcccattacccatgtcgccctcaaattacataagcgatcataaaataagaagaaaaaaaaaggtctttagtagatcacagcagagttac

SEQ ID NO: 160856 - DNA, 120 bp, Artificial Sequence
  ENSG00000107249_46 (sequence is synthesized)
cactgataagagtgttggctttgttcagttgtttctaaattaccagccgtcaagcacagtagcccctaaaaccaattttgagcaaggataaattcaactccctcatctgagaaccttgac

SEQ ID NO: 160857 - DNA, 120 bp, Artificial Sequence
  ENSG00000107249_47 (sequence is synthesized)
tttccagttgccttgaagtattgggaatagtaactgtacattttcaatttaattatttggtattttatttgactgtcttggccatgtcattttatggaagcatttttaaatagcactttt

SEQ ID NO: 160858 - DNA, 120 bp, Artificial Sequence
  ENSG00000107249_48 (sequence is synthesized)
tgttagtggtgtggaatttctgcggttattatttttttttttttttgcaacagatgaagcaaaaaaaaaaaagcactcattggagaaatagtgagtgtaaaaagagatttattttgtaca

SEQ ID NO: 160859 - DNA, 120 bp, Artificial Sequence
  ENSG00000107249_49 (sequence is synthesized)
gacagcaaagtatcctgtgtaatgttgctgacataaagcactttgggggaaaaaagtggaaatctgttttccataaatcacacagactcttgtacatagttatatacactcacgtagaga

SEQ ID NO: 160860 - DNA, 120 bp, Artificial Sequence
  ENSG00000107249_50 (sequence is synthesized)
aatgaactgcatatatcatactggatatggggccgattttactctagaggcacatctggtgcttattgtcataaatcttttaaagaattaggtacacttttttctattaatatgtatagt

SEQ ID NO: 160861 - DNA, 120 bp, Artificial Sequence
  ENSG00000107249_51 (sequence is synthesized)
tttgtgatttgtcacagttatgtttcatataatcataagttattttgtcttgttcatgaagtcctttttttatgtcaaaagtaaaatgaagggattgtgcacttggtacagaataaaact

SEQ ID NO: 160862 - DNA, 120 bp, Artificial Sequence
  ENSG00000107249_52 (sequence is synthesized)
ggaaatagagaagacgccctcctgcctaaaatcctccttcagcctgtcggtttaaaacacaatggcaaccatcattgtttgtttgtttgtttttttgttttgttttaccatcagcctctt

SEQ ID NO: 160863 - DNA, 120 bp, Artificial Sequence
  ENSG00000107249_53 (sequence is synthesized)
acatactgggaatggtaattataattaaaggcagatgatgcgggagggaatgttcaagtccagctttaaaatgctgcattgctttgggccagagctgtagcctggatttaattatagata

SEQ ID NO: 160864 - DNA, 120 bp, Artificial Sequence
  ENSG00000107249_54 (sequence is synthesized)
tgaggaggaaatggcagtaaaaatgaatgtctccctgagtcctttacatgttgggagtgtccataaataaaacatgaagttttatttcatcagatttaattaaagcttttatacatgttt

SEQ ID NO: 160865 - DNA, 120 bp, Artificial Sequence
  ENSG00000107249_55 (sequence is synthesized)
acacacatccacactcctcgcccggctgccttcctccctccctcttcccccttcccctctccctgcagccgcgtccacactgcgccgcccgggcagcccagagcgcggcgcgcacgggca

SEQ ID NO: 160866 - DNA, 120 bp, Artificial Sequence
  ENSG00000107249_56 (sequence is synthesized)
ccggcggcgagtgccgcggccactgcccctcccgggaccccctgtacgccgtccgcgccgtccagggtcacaccggcgacggaacccgccggcagcaattagccagcatcccggggtcgg

SEQ ID NO: 160867 - DNA, 120 bp, Artificial Sequence
  ENSG00000107249_57 (sequence is synthesized)
cccccagaagcattccccggcccaggacgaggatgaacaggacaggcgaggcacaaagtcgcaactgaactttttagaaacattatttgtgtgtgtatgtgtgtagcaggggagaatgag

SEQ ID NO: 160868 - DNA, 120 bp, Artificial Sequence
  ENSG00000107249_58 (sequence is synthesized)
ctgatgccgagggtccagccaccccgcctctgcctcctcctccccctgccgccgctgccctcgcagacgcgcgcgcacacacggcacttgggccgggtttccgcgctccgtccccccgtt

SEQ ID NO: 160869 - DNA, 120 bp, Artificial Sequence
  ENSG00000107249_59 (sequence is synthesized)
tggatgggggttttcatttccgaaggaggcacagcccgcggagcgctctgaagggctggagccccaagttactcctcgccagcgccggccgcccgctgtcactcgcgctggccggccggg

SEQ ID NO: 160870 - DNA, 120 bp, Artificial Sequence
  ENSG00000107249_60 (sequence is synthesized)
ggaagggacccgcacgccgggctttgttgtggaaatcccggttacctggcttataacccacaccatggataacttattggactttgcctgaaaggagtcattagtgacattggatatttg

SEQ ID NO: 160871 - DNA, 120 bp, Artificial Sequence
  ENSG00000107249_61 (sequence is synthesized)
accgtcttggccacaggtttttcagaatgaatggaagatcatgcagcatgagtctccaccggacatcgggaaccccacaggggcctaggatggtcagtggtcatcacattcctgccatcc

SEQ ID NO: 160872 - DNA, 120 bp, Artificial Sequence
  ENSG00000107249_62 (sequence is synthesized)
gagcccactccgggactcctggcccctcgccctgtggcagcacatcgagtcccactatggcaagccttgctaacaacctccatctcaagatgccctcaggaggagggatggctcctcaga

SEQ ID NO: 160873 - DNA, 120 bp, Artificial Sequence
  ENSG00000107249_63 (sequence is synthesized)
acaacgtggctgagagccgcatccatctgcctgccttaagccccaggagacaaatgctcaccaatgggaagccgcgattccaggtcacccaggctggaggcatgtcagggtcacatactt

SEQ ID NO: 160874 - DNA, 120 bp, Artificial Sequence
  ENSG00000107249_64 (sequence is synthesized)
actacacagctggcagcctctgccattgcagtaagtatatgcgacagggtaaaaagggttaatgtggtgaggacaaaggactgcagaggcctggctaggagggtccagatgcttaataat

SEQ ID NO: 160875 - DNA, 120 bp, Artificial Sequence
  ENSG00000107249_65 (sequence is synthesized)
acaccgtttcttctgaaaaatacccagtttttttctggactttctacagcttctttacctgaacccttaaagaatatgtgtttactagtttctgacagtaccaaagattattctcaggga

SEQ ID NO: 160876 - DNA, 120 bp, Artificial Sequence
  ENSG00000107249_66 (sequence is synthesized)
aacataactaaaccttatgcttgtcaaattccaggatgtaccaaacgctacacagacccaagttccctaagaaagcatgtgaaggcacattcttccaaagagcaacaagcaaggaaaaag

SEQ ID NO: 160877 - DNA, 120 bp, Artificial Sequence
  ENSG00000107249_67 (sequence is synthesized)
tttcaaccaaatggtatccatgtccatggtaagcaagaagctggcagtcccttgagttttgaaaagtgacattgtgctgttgcttttcatcttagttacctgtcgtggatttcagatgct

SEQ ID NO: 160878 - DNA, 120 bp, Artificial Sequence
  ENSG00000107249_68 (sequence is synthesized)
ctgttctacaccaggcttaggctttcatgacttgcctctaaaatttcacacttgataggcatgaaatcctatggtattttcctgactttggcctgatgatggtatgatttatgacacatc

SEQ ID NO: 160879 - DNA, 120 bp, Artificial Sequence
  ENSG00000107249_69 (sequence is synthesized)
gcactggtcagctcaagttgctggttttttcattggccagggctctaacaccagcaatagcatcctgtttctaaacaatagacagcccatggagaaagaaatgacaggagttcttgtgcc

SEQ ID NO: 160880 - DNA, 120 bp, Artificial Sequence
  ENSG00000107249_70 (sequence is synthesized)
caagcatgcctctgctctgctaggtttttgctctcattctcataggtccacatcctctccgtccttcaaggcgcaggtggaatgacacctcctctctgaagcccttcctgatcccccagc

SEQ ID NO: 160881 - DNA, 120 bp, Artificial Sequence
  ENSG00000107249_71 (sequence is synthesized)
tgatgtcatctctccaggctctaaactctgattttatatcgcctgtctttctctggtagtatttatgcttcctctaccttgtgttttacttatctgtgaataaaacatactttcactatt

SEQ ID NO: 160882 - DNA, 120 bp, Artificial Sequence
  ENSG00000107249_72 (sequence is synthesized)
atctggtataggagcatgtaggaaagaaggattcattgtgacagagggatgtgggcaggcagcaggaggttccacctgagtgagccttgagtaaatggatagattttgactgcaagagtg

SEQ ID NO: 160883 - DNA, 120 bp, Artificial Sequence
  ENSG00000107249_73 (sequence is synthesized)
aagacgggagcattccagtcccaggagatgaaggagcaatgttcttctatcagaagcaaacatattcagaaactccgtgtcctggctcgcttagcaataatagtacacatagcagtgtgg

SEQ ID NO: 160884 - DNA, 120 bp, Artificial Sequence
  ENSG00000107249_74 (sequence is synthesized)
tgaagtcaggcaccctcctgctactacaagagaatatgaagtaacgaagatcccccctgccacacacacatttgtgttttggtccccctcaccactcaccctctgaagaagaaggtcatt

SEQ ID NO: 160885 - DNA, 120 bp, Artificial Sequence
  ENSG00000107249_75 (sequence is synthesized)
tgtgaggaattgtgctgttgaactcttcccccaagaagtgctcaggttgaggttaaagggctcctgagggcagaaaggcagatactgtcaaaaaagagagttcctgtgatcccggtgtca

SEQ ID NO: 160886 - DNA, 120 bp, Artificial Sequence
  ENSG00000107249_76 (sequence is synthesized)
tgtggctccccaaacaatttcttgaagacttgtaaatgtggcagtctgcaaaagcagcagcagaagtgacaactgggaaaaattgtgataccgctttctgtgaatccccgaggacagcca

SEQ ID NO: 160887 - DNA, 120 bp, Artificial Sequence
  ENSG00000107249_77 (sequence is synthesized)
acacgaccaaaggatccctgaaggtttgaaggttgcgagaaggccttttcaaggcttgaaaatctcaagatccacttgcggagccacacaggcgagaagccgtatttgtgccagcatccg

SEQ ID NO: 160888 - DNA, 120 bp, Artificial Sequence
  ENSG00000107249_78 (sequence is synthesized)
accttttaaaaatggaaacgatttttttctcccccatcccattttctgccagcaaatcctatggaaaaatacatgattcagtgtcagggtcaaagatgatggtctcataatgatatatag

SEQ ID NO: 160889 - DNA, 120 bp, Artificial Sequence
  ENSG00000107249_79 (sequence is synthesized)
cttgctcagtaagggaatgggtgtgtatgtgttggaggggaccacagtggtaaatgctgagtatgagacatctcctgggactgtgaaacagagtaacagtaagatagaaagataaaaaat

SEQ ID NO: 160890 - DNA, 120 bp, Artificial Sequence
  ENSG00000107249_80 (sequence is synthesized)
agggaggcaggctgagtggttgtggtggaagggtaagagctaggttagcaagatcatgccctccggatacaggtagcgctgccctgtttccctgggggctgaattctccaggccatggac

SEQ ID NO: 160891 - DNA, 120 bp, Artificial Sequence
  ENSG00000107249_81 (sequence is synthesized)
aagaagaccgactggaactgtccttatgccagtgctaaaagtatagtgtagaagaaaggtggtgtttggaaggaaaagaataaaaaagggaaattttaataaccaataaaatgaggaatc

SEQ ID NO: 160892 - DNA, 120 bp, Artificial Sequence
  ENSG00000107249_82 (sequence is synthesized)
catttgtcagatgctttcctctctgcactccagcctttgctgaatgtcctggcagttcctgaatgttcctgctgcctgcattttataaaaccaaagagcaagtagccctggaaatgtatg

SEQ ID NO: 160893 - DNA, 120 bp, Artificial Sequence
  ENSG00000107249_83 (sequence is synthesized)
ccaagtactctgcacagctgtctgaggcccccagccaagggcaagatataaacaatctatacccacacaggtacacaagcagacactgcatatggaagccccgcagtgcaaggacttctt

SEQ ID NO: 160894 - DNA, 120 bp, Artificial Sequence
  ENSG00000107249_84 (sequence is synthesized)
ttttcatcagctgctgaagtggcaactaatagagctcttcatctcttcatggacgctcctgtccccaacccaatgctcattgtgtaggagtcgatcatctgccatcttcactctattttg

SEQ ID NO: 160895 - DNA, 120 bp, Artificial Sequence
  ENSG00000107249_85 (sequence is synthesized)
actaaatgacagtcatcctgaattctgtccccagagacgaccatgggtggaattttgatatacatccttccagttatagtcaaacatatacaataaacataggctttcctttccactaaa

SEQ ID NO: 160896 - DNA, 120 bp, Artificial Sequence
  ENSG00000107249_86 (sequence is synthesized)
agttccaagttactcactggagctgacaagtcacctcggggaccgggaagtcactcaagtgtctggaaatcttggccctggctgatttgtcatcctatggatgattcaattaggcttata

SEQ ID NO: 160897 - DNA, 120 bp, Artificial Sequence
  ENSG00000107249_87 (sequence is synthesized)
ggaggtgatggctggagttccaacaggcacttggatcgtgagataacctcagaaagctgtttcccgagggtgctgaactggcaggaaagaaaccttggtcctcgatgatattgtgaagac

SEQ ID NO: 160898 - DNA, 120 bp, Artificial Sequence
  ENSG00000107249_88 (sequence is synthesized)
accatattagcatggatggcctatttctgaatttctttcaggcctgcttctctttaccttctgccatgagtggaagtggcctgaggccctcacctgaagccaagcagatgacagcaccag

SEQ ID NO: 160899 - DNA, 120 bp, Artificial Sequence
  ENSG00000107249_89 (sequence is synthesized)
gcttcttgtatagcctgcagaaccgtttgcaaatgaaattcaaaaaatcggcagtgactcttcttggaccaggtggagagcaggaagaaggccggcagcaggtgtggctcgggcagattg

SEQ ID NO: 160900 - DNA, 120 bp, Artificial Sequence
  ENSG00000107249_90 (sequence is synthesized)
gagaggcacaatggggcacgtttgctagacaaatagagagacaggcacaaagagcttaagtgactaccctaaagttgctcagctattaaatgtggagccaggactaaatcccagcagttt

SEQ ID NO: 160901 - DNA, 120 bp, Artificial Sequence
  ENSG00000107249_91 (sequence is synthesized)
ggctctggggtctgggttctaaaattgtctcaattcagcctctccagctgccaagtgtgagacctagacaagggctttgagtttgactgtaggagccatcccaggcttataacccacacc

SEQ ID NO: 160902 - DNA, 120 bp, Artificial Sequence
  ENSG00000107249_92 (sequence is synthesized)
actgacctcatccatagtgtggtgtttggtctatgagcagttgattcaccagttttcagagcccaagtctaaaatcacagatcctgtgggggatctgggagcatctgccttacctttatg

SEQ ID NO: 160903 - DNA, 120 bp, Artificial Sequence
  ENSG00000107249_93 (sequence is synthesized)
aaggttatggtcagttaagccttgctttcaatgggctcacttcgctatgggaagaaaattctgcagttgttaaaaacaaaaggacactgccttttccaagggagctgacagctattggtt

SEQ ID NO: 160904 - DNA, 120 bp, Artificial Sequence
  ENSG00000107249_94 (sequence is synthesized)
attactggtgaagacagttatgaagaacaagtaactcttgtaaataaacagcatgttcttgcttaaatatttcccagaacagttctaaagaaatataatacaggtcccttatttcgcgtg

SEQ ID NO: 160905 - DNA, 120 bp, Artificial Sequence
  ENSG00000107249_95 (sequence is synthesized)
accgtgggacgctcccctggacccgggcctgacctctattcaggtaaagacagcaaaggcagagccaaccacaactacccttttttaggccttttactctggttaaaaggaatgctcacg

SEQ ID NO: 160906 - DNA, 120 bp, Artificial Sequence
  ENSG00000107249_96 (sequence is synthesized)
tgagaaaaattttcctaagatcgtctgtgttgttctttatcaatgggctgcaaattgctctccaccccttctgattcctgagctgggtgtggcagcagattgttttttctcataaagaaa

SEQ ID NO: 160907 - DNA, 120 bp, Artificial Sequence
  ENSG00000107249_97 (sequence is synthesized)
taaaataaaataatgcattacctcttttagttatggacttctgccagaaattcagtgtacccaaccctcgcagttatgttacatttactcacttgatttagactcgaaggaaatgtttcc

SEQ ID NO: 160908 - DNA, 120 bp, Artificial Sequence
  ENSG00000107249_98 (sequence is synthesized)
tccttaagcaggtagcaggctgcgtgtggatttcttaatgaaacagttgttgtcatctttatgttttaaaaggaagccccaggtctctaaggaaattttcacatcagcaaaccaacttat

SEQ ID NO: 160909 - DNA, 80 bp, Artificial Sequence
  ENSG00000107262_0 (sequence is synthesized)
agcttccatcgctgggcggtcaacaagtgcgggcctggctcagcgcgggggggcgcggagaccgcgaggcgaccgggagc

SEQ ID NO: 160910 - DNA, 120 bp, Artificial Sequence
  ENSG00000107262_1 (sequence is synthesized)
cccccggcccagcgtggtccgcctccctctgggcgtccacctgcccggagtactgccagcgggcatgaccgacccaccaggggcgccgccgccggcgctcgcaggccgcggatgaagaag

SEQ ID NO: 160911 - DNA, 120 bp, Artificial Sequence
  ENSG00000107262_2 (sequence is synthesized)
gccgcggatgaagaagaaaacccggcgccgctcgacccggagcgaggagttgacccggagcgaggagttgaccctgagtgaggaagcgacctggagtgaagaggcgacccagagtgagga

SEQ ID NO: 160912 - DNA, 120 bp, Artificial Sequence
  ENSG00000107262_3 (sequence is synthesized)
ggcgacccagggcgaagagatgaatcggagccaggaggtgacccgggacgaggagtcgacccggagcgaggaggtgaccagggaggaaatggcggcagctgggctcaccgtgactgtcac

SEQ ID NO: 160913 - DNA, 120 bp, Artificial Sequence
  ENSG00000107262_4 (sequence is synthesized)
ccacagcaatgagaagcacgaccttcatgttacctcccagcagggcagcagtgaaccagttgtccaagacctggcccaggttgttgaagaggtcataggggttccacagtcttttcagaa

SEQ ID NO: 160914 - DNA, 120 bp, Artificial Sequence
  ENSG00000107262_5 (sequence is synthesized)
actcatatttaagggaaaatctctgaaggaaatggaaacaccgttgtcagcacttggaatacaagatggttgccgggtcatgttaattgggaaaaagaacagtccacaggaagaggttga

SEQ ID NO: 160915 - DNA, 120 bp, Artificial Sequence
  ENSG00000107262_6 (sequence is synthesized)
actaaagaagttgaaacatttggagaagtctgtggagaagatagctgaccagctggaagagttgaataaagagcttactggaatccagcagggttttctgcccaaggatttgcaagctga

SEQ ID NO: 160916 - DNA, 120 bp, Artificial Sequence
  ENSG00000107262_7 (sequence is synthesized)
agctctctgcaaacttgataggagagtaaaagccacaatagagcagtttatgaagatcttggaggagattgacacactgatcctgccagaaaatttcaaagacagtagattgaaaaggaa

SEQ ID NO: 160917 - DNA, 120 bp, Artificial Sequence
  ENSG00000107262_8 (sequence is synthesized)
aggcttggtaaaaaaggttcaggcattcctagccgagtgtgacacagtggagcagaacatctgccaggagactgagcggctgcagtctacaaactttgccctggccgagtgaggtgtagc

SEQ ID NO: 160918 - DNA, 120 bp, Artificial Sequence
  ENSG00000107262_9 (sequence is synthesized)
agaaaaaggctgtgctgccctgaagaatggcgccaccagctctgccgtctctggagcggaatttacctgatttcttcagggctgctgggggcaactggccatttgccaattttcctactc

SEQ ID NO: 160919 - DNA, 120 bp, Artificial Sequence
  ENSG00000107262_10 (sequence is synthesized)
tcacactggttctcaatgaaaaatagtgtctttgtgattttgagtaaagctcctatctgttttctccttctgtctctgtggttgtactgtccagcaatccaccttttctggagagggcca

SEQ ID NO: 160920 - DNA, 120 bp, Artificial Sequence
  ENSG00000107262_11 (sequence is synthesized)
cctctgcccaaattttcccagctgtttggacctctgggtgctttctttgggctggtgagagctctaatttgccttgggccagtttcaggtttataggccccctcagtcttcagatacatg

SEQ ID NO: 160921 - DNA, 120 bp, Artificial Sequence
  ENSG00000107262_12 (sequence is synthesized)
agggcttctttgctcttgtgatcgtgtagtcccatagctgtaaaaccagaatcaccaggaggttgcacctagtcaggaatattgggaatggcctagaacaaggtgtttggcacataagta

SEQ ID NO: 160922 - DNA, 120 bp, Artificial Sequence
  ENSG00000107262_13 (sequence is synthesized)
gaccacttatccctcattgtgacctaattccagagcatctggctgggttgttgggttctagactttgtcctcacctcccagtgaccctgactagccacaggccatgagataccagggggc

SEQ ID NO: 160923 - DNA, 120 bp, Artificial Sequence
  ENSG00000107262_14 (sequence is synthesized)
cgttccttggatggagcctgtggttgatgcaaggcttccttgtccccaagcaagtcttcagaaggttagaacccagtgttgactgagtctgtgcttgaaaccaggccagagccatggatt

SEQ ID NO: 160924 - DNA, 120 bp, Artificial Sequence
  ENSG00000107262_15 (sequence is synthesized)
tttgttaaccatatccttctgagttctatgtttccttcacagctgttctatccattttgtggactgtcccccacccccaccccatcattgtttttaaaaaattaaggcctggcgcagcag

SEQ ID NO: 160925 - DNA, 75 bp, Artificial Sequence
  ENSG00000107262_16 (sequence is synthesized)
agcaaaaccccattctgctttaaaaaaaaaaaaaaaaaaaattagcttggcgtagtggcatgtgcctataatccc

SEQ ID NO: 160926 - DNA, 68 bp, Artificial Sequence
  ENSG00000107262_17 (sequence is synthesized)
aacatagcaaaaccccattctgctttaaaaaaaaaaaaaaaaaaaattagcttggcgtagtggcatgt

SEQ ID NO: 160927 - DNA, 85 bp, Artificial Sequence
  ENSG00000107262_18 (sequence is synthesized)
aaaaaaaaattgagtcaggtgcagtagctccagaggatcacttgagcccaggagtttgagtctagtctgggcaacatagcaagac

SEQ ID NO: 160928 - DNA, 120 bp, Artificial Sequence
  ENSG00000107262_19 (sequence is synthesized)
ggcaacatagcaagaccccatctctaaaatttaagtaagtaaaagtagataaataaaaagaaaaaaaaactgtttatgtgctcatcataaagtagaagagtggtttgctttttttttttt

SEQ ID NO: 160929 - DNA, 120 bp, Artificial Sequence
  ENSG00000107262_20 (sequence is synthesized)
agagtggtttgcttttttttttttttttggattaatgaggaaatcattctgtggctctagtcataatttatgcttaataacattgatagtagccctttgcgctataactctacctaaaga

SEQ ID NO: 160930 - DNA, 120 bp, Artificial Sequence
  ENSG00000107262_21 (sequence is synthesized)
ctcacatcatttggcagagagagagtcgttgaagtcccaggaattcaggactgggcaggttaagacctcagacaaggtagtagaggtagacttgtggacaaggctcgggtcccagcccac

SEQ ID NO: 160931 - DNA, 120 bp, Artificial Sequence
  ENSG00000107262_22 (sequence is synthesized)
cgcaccccaactttaatcagagtggttcactattgatctatttttgtgtgatagctgtgtggcgtgggccacaacatttaatgagaagttactgtgcaccaaactgccgaacaccattct

SEQ ID NO: 160932 - DNA, 120 bp, Artificial Sequence
  ENSG00000107262_23 (sequence is synthesized)
aaactattcatatatattagtcatttaattcttacataacttgagaggtagacagatatccttattttagagatgaggaaaccaagagaacttaggtcattagcgcaaggttgtagagta

SEQ ID NO: 160933 - DNA, 120 bp, Artificial Sequence
  ENSG00000107262_24 (sequence is synthesized)
agcggcaaagccaagacacaaagctgggtggtttggtttcagagccagtgcttttcccctctactgtactgcctctcaaccaacacagggttgcacaggcccattctctgatttttttcc

SEQ ID NO: 160934 - DNA, 120 bp, Artificial Sequence
  ENSG00000107262_25 (sequence is synthesized)
tcttgtcctctgcctctccctctagctcccacttcctctctgctctagttcattttctttagagcagcccgagtgatcatgaagtgcaaatcttgccatgtcagtcccctgcttagaacc

SEQ ID NO: 160935 - DNA, 120 bp, Artificial Sequence
  ENSG00000107262_26 (sequence is synthesized)
ctccaatggctcactttctctttaggcaaaagtctttaccccatgccttctcccatctcatctcaaccccctcatttgttggctgtctgctgtcagccactcttctttcaggtcctcaga

SEQ ID NO: 160936 - DNA, 120 bp, Artificial Sequence
  ENSG00000107262_27 (sequence is synthesized)
tgcactgcaccctctcctgcctgggggtctttgctcctgctactacctctgcttgaacagctcctcaccttccttcctccaaccctacccttgtataggtgacttttgttcatccttcag

SEQ ID NO: 160937 - DNA, 120 bp, Artificial Sequence
  ENSG00000107262_28 (sequence is synthesized)
aattcaactcacatgtctcttgcatggagaaccctcacctactgtgttgagaccctgtccagcccccaggtgggatcctctctcgacttcccatacatttctttcacagcatttacatag

SEQ ID NO: 160938 - DNA, 120 bp, Artificial Sequence
  ENSG00000107262_29 (sequence is synthesized)
tccatgatagtttacttgtgggattatttggttaatctttgcctttaacaccagggttccttgggtgaaggagcttctttatcttggtaacagcattatttcaagcataacttgtaatat

SEQ ID NO: 160939 - DNA, 120 bp, Artificial Sequence
  ENSG00000107262_30 (sequence is synthesized)
ctgagtagagagagggcagataaacaaagtgaaggcaaaaaaaatctaatccagacttggaactgccaggagactggaactcaggacttgccacaaagagaagtgaataatttgggatag

SEQ ID NO: 160940 - DNA, 120 bp, Artificial Sequence
  ENSG00000107262_31 (sequence is synthesized)
cataactaagcagaaagctgctagacctatctatcaattgtttacctgagagaagagggaaatattctaaatttcttgcttcagggtcagggagaatggtgatgggcaacaggcagaacc

SEQ ID NO: 160941 - DNA, 120 bp, Artificial Sequence
  ENSG00000107262_32 (sequence is synthesized)
aaagagtcaagtttgaagaaactataggacttttacttggagctgacacagagcgtatggagcgaagtgtgaactcaaggaaggcaccatggcacatgcctattgtcccagcaagttggg

SEQ ID NO: 160942 - DNA, 120 bp, Artificial Sequence
  ENSG00000107262_33 (sequence is synthesized)
agtctgagacaggaggatcacttgagtccaggggtttgaggctgcagtgagttatgatcatgcctgtaaacagccactgcactccaacctgggaaccgtagtgagaccctatctcaaaaa

SEQ ID NO: 160943 - DNA, 61 bp, Artificial Sequence
  ENSG00000107262_34 (sequence is synthesized)
gaagtctgtggagaagatagctgaccagctggaagagttgaataaagagcttactggaatc

SEQ ID NO: 160944 - DNA, 120 bp, Artificial Sequence
  ENSG00000107262_35 (sequence is synthesized)
ttaagtacatgtataggcactaatatggaaaataaaaattacccatggggcaccaactcagagatgacgattaccaaagcctgaaatatatttttcatcttaaaaaaatttgatataatg

SEQ ID NO: 160945 - DNA, 120 bp, Artificial Sequence
  ENSG00000107262_36 (sequence is synthesized)
ttatttacactttataaactattcttttattggataaaaaattaaacattttcctgtgatggtatttttcaaagctcgcatgcatttcatcttgtataaatgtattatttacctagccaa

SEQ ID NO: 160946 - DNA, 120 bp, Artificial Sequence
  ENSG00000107262_37 (sequence is synthesized)
cgggacgaggagtcgacccggagcgaggaggcaatgagaagcacgaccttcatgttacctcccagcagggcagcagtgaaccagttgtccaagacctggcccaggttgttgaagaggtca

SEQ ID NO: 160947 - DNA, 120 bp, Artificial Sequence
  ENSG00000107262_38 (sequence is synthesized)
ctttgactgtccttggacgtaaatcttttttgaccattcctggtttttttggtagaataaattctttgagttggaattgctgggtgatgtttaaagctcttgctacgtgttgtgaaatct

SEQ ID NO: 160948 - DNA, 120 bp, Artificial Sequence
  ENSG00000107262_39 (sequence is synthesized)
gtgtctgtagctcgtggctgtgataaacatcctcagagatccctgctatccaactcttgtcaccagctaactggtcattaggccaagctgtgtgagtgaaccattagacaatttgataaa

SEQ ID NO: 160949 - DNA, 120 bp, Artificial Sequence
  ENSG00000107262_40 (sequence is synthesized)
aataagcactgctgccattctttagcatgcgtctgtgccacaagttagtgacacatgtacatatattccctttacctcacagtaaccatctagggtgtgggcatcataatcttcattttt

SEQ ID NO: 160950 - DNA, 120 bp, Artificial Sequence
  ENSG00000107262_41 (sequence is synthesized)
ctctaaacctgtgcttttaacatctgcctcttcttgtgactgggggcttcactggagccaagcctcaggaggcatttgcagccacagtgggtcatgcgaggtagagcagactgcaacctg

SEQ ID NO: 160951 - DNA, 120 bp, Artificial Sequence
  ENSG00000107262_42 (sequence is synthesized)
atagaattcttggactggcccacggccagcctttttaatttttccaagagttaaagttgtggatctgagatgtggcctggcctgccagggctatggtgggctcagtgtgattgcatcatt

SEQ ID NO: 160952 - DNA, 120 bp, Artificial Sequence
  ENSG00000107262_43 (sequence is synthesized)
gatctcatgttactttactacattaagcctcagtttcatcatctgtaaaacagcagtacttccctgatggagttgtggtaaggcttaaaaaataggtaaggtgcttaggatagtgtgtgg

SEQ ID NO: 160953 - DNA, 120 bp, Artificial Sequence
  ENSG00000107262_44 (sequence is synthesized)
catgtaggaagtgttcaataaaagtattcatcgttgttaaccagcatcacattaaacaggagcgctcaattggaggctgccatttaggaattccatttaaaggaatggtagaattccacc

SEQ ID NO: 160954 - DNA, 120 bp, Artificial Sequence
  ENSG00000107262_45 (sequence is synthesized)
tttcttgccattctggactcctcacaagtgtttactgaaatgtgattaccctccaggcttcagtcttggttgttgatcagtatagggctgagactgaatctggcacttggattgtctcca

SEQ ID NO: 160955 - DNA, 120 bp, Artificial Sequence
  ENSG00000107262_46 (sequence is synthesized)
ttctctgcacccaagctgtcagggccctcaccagaatgtttacctaacaccttctctctagtctggagtctttgtagatggaaaacttgatgtataaccctttgacttgatttccaagaa

SEQ ID NO: 160956 - DNA, 89 bp, Artificial Sequence
  ENSG00000107262_47 (sequence is synthesized)
gttatttctaggtgagtggcttcatgcaggtgtggtcaggtatttttcctgacagaggctgctgttcttgttgagacagtctcgctctg

SEQ ID NO: 160957 - DNA, 78 bp, Artificial Sequence
  ENSG00000107262_48 (sequence is synthesized)
tcaccctggctggagtacaggtgcacgatctcagctcactacaaacctccacctcccaggttcaagctatcgccagca

SEQ ID NO: 160958 - DNA, 120 bp, Artificial Sequence
  ENSG00000107262_49 (sequence is synthesized)
acactgatcctgccagaaaatttcaaagacagtagattgaaaaggaaaggcttggtaaaaaaggttcaggatcaaagaagacaggcatgaggctaccttctcaggagctgtagtgtacca

SEQ ID NO: 160959 - DNA, 120 bp, Artificial Sequence
  ENSG00000107262_50 (sequence is synthesized)
ttcagggacctggcacagtccatccagacatcctgctgagcgtcgcccacatatgcagtctcggacctatgtcctacctgttcatgcagttgtccatatccagtgggatgtcctaggggc

SEQ ID NO: 160960 - DNA, 120 bp, Artificial Sequence
  ENSG00000107262_51 (sequence is synthesized)
ccccaaaccacccatctcagcccatgaaaccactggccacccaagcccacaaatcagaaaccagtatgctgcctccttcccctcagcctttacatacagtcacataccaagcctgtcaat

SEQ ID NO: 160961 - DNA, 120 bp, Artificial Sequence
  ENSG00000107262_52 (sequence is synthesized)
tccactcccaatgtacctcctaaccatgagtctttgattagcatgatctttctctaagctaggacaacatcctgatgttccttatatttcctcaaatacaaactttcacatctatccaga

SEQ ID NO: 160962 - DNA, 120 bp, Artificial Sequence
  ENSG00000107263_0 (sequence is synthesized)
ctggggctgggaagggccctgtgtcctctggctttaaaatgggcaatgctattgaaaaacagaagcccttgaaacgaagtcatctgtacccctggaaacaagactctcagcgttctcatc

SEQ ID NO: 160963 - DNA, 120 bp, Artificial Sequence
  ENSG00000107263_1 (sequence is synthesized)
tctcttccttcaccatgaagctgatggacaaattccactcacccaaaatcaagagaacgccatcaaagaagggaaaaccagctgaggtgtccgtaaagattccagagaagcctgtgaaca

SEQ ID NO: 160964 - DNA, 120 bp, Artificial Sequence
  ENSG00000107263_2 (sequence is synthesized)
aagaggcaacagacagatttctaccagagggctaccctctccccttggatctggagcagcaggcagtagaatttatgtccaccagtgctgtggcttccaggtctcaaaggcagaagaacc

SEQ ID NO: 160965 - DNA, 120 bp, Artificial Sequence
  ENSG00000107263_3 (sequence is synthesized)
tgagctggctggaggagaaagagaaggaagttgtcagtgccctgcgctactttaagaccattgtggacaaaatggcaattgataagaaggtactggagatgcttccagggtcagccagca

SEQ ID NO: 160966 - DNA, 120 bp, Artificial Sequence
  ENSG00000107263_4 (sequence is synthesized)
aggtgctggaggccatcttacccctggtgcagaacgatcctcgaattcagcacagctcagccctctcttcctgctatagccgagtgtaccaaagcctcgccaacctcattcgctggtctg

SEQ ID NO: 160967 - DNA, 120 bp, Artificial Sequence
  ENSG00000107263_5 (sequence is synthesized)
accaagtgatgctggaaggcgtgaactcagaagacaaggagatggtgacgactgtgaagggggtcatcaaggctgtgctggatggagtgaaggagctggtcaggctcaccatcgagaagc

SEQ ID NO: 160968 - DNA, 120 bp, Artificial Sequence
  ENSG00000107263_6 (sequence is synthesized)
agggacgtccgtctccgacgagccccgtgaagcccagttcccctgccagcaagcctgatggcccagcagagctccccctgacagaccgcgaggtagagatcctaaacaagacgactggga

SEQ ID NO: 160969 - DNA, 120 bp, Artificial Sequence
  ENSG00000107263_7 (sequence is synthesized)
tgtcacagtcaactgagctcctcccagatgccacggatgaagaggtcgcgccccccaagcctcctctgcctggcattcgggtggttgataatagtcctccaccagcattgccacccaaga

SEQ ID NO: 160970 - DNA, 120 bp, Artificial Sequence
  ENSG00000107263_8 (sequence is synthesized)
aaagacagtcggcgccgtcccctacccgagtggctgtggtggcccccatgagccgagccaccagtggctccagtttgcctgttggaatcaataggcaggattttgatgttgactgttacg

SEQ ID NO: 160971 - DNA, 120 bp, Artificial Sequence
  ENSG00000107263_9 (sequence is synthesized)
cacagaggcgactgtcaggaggcagccactcatatggtggagagtcgccccgcctctccccctgcagcagcataggcaagctcagcaagtcagacgagcagctgtcctctctggacaggg

SEQ ID NO: 160972 - DNA, 120 bp, Artificial Sequence
  ENSG00000107263_10 (sequence is synthesized)
acagtgggcagtgctcccggaacacaagctgtgaaacactagaccactatgatcccgactatgaattcctccagcaagacctctctaacgcagaccagatacctcagcagacggcctgga

SEQ ID NO: 160973 - DNA, 120 bp, Artificial Sequence
  ENSG00000107263_11 (sequence is synthesized)
accttagcccgttgccagagtctttgggggagtctgggtctccatttcttggccctcctttccagctgcctcttggcggccatccccagccagacggacctctggccccagggcagcaga

SEQ ID NO: 160974 - DNA, 120 bp, Artificial Sequence
  ENSG00000107263_12 (sequence is synthesized)
cagatacgccacctgctctccccgagaagaagcgcaggagcgcagcctcccagacggcggacggctctggctgcagggtgtcctacgagcggcatccctcgcagtatgacaacatctctg

SEQ ID NO: 160975 - DNA, 120 bp, Artificial Sequence
  ENSG00000107263_13 (sequence is synthesized)
gggaggacctgcagagcacagccccgatcccatccgtcccctacgcgccctttgctgctattctgccctttcagcatggaggttcctcagcccctgtcgaatttgtgggtgattttactg

SEQ ID NO: 160976 - DNA, 120 bp, Artificial Sequence
  ENSG00000107263_14 (sequence is synthesized)
ctcctgagtcaaccggtgacccagaaaaaccacctcctctaccagagaagaaaaacaaacacatgctggcctacatgcagttgctggaggactactcggagccgcagccctctatgttct

SEQ ID NO: 160977 - DNA, 120 bp, Artificial Sequence
  ENSG00000107263_15 (sequence is synthesized)
accagacgccacagaacgagcacatctaccagcagaagaacaagctcctcatggaggtatacggcttcagcgactccttcagtggggtggactccgtgcaggagctggccccgccgcccg

SEQ ID NO: 160978 - DNA, 120 bp, Artificial Sequence
  ENSG00000107263_16 (sequence is synthesized)
ccctaccccccaagcagcggcagctggagccaccggctgggaaagacggacatcccagagatccctcagcggtcagcggcgtccctgggaaggacagcagagacggcagtgagagggccc

SEQ ID NO: 160979 - DNA, 120 bp, Artificial Sequence
  ENSG00000107263_17 (sequence is synthesized)
caaagtcaccagatgctctggagtcggctcagtcggaggaggaagtggacgagctgtccctcattgaccacaacgaaattatgtccaggctgacgctcaagcaggagggtgatgacgggc

SEQ ID NO: 160980 - DNA, 120 bp, Artificial Sequence
  ENSG00000107263_18 (sequence is synthesized)
cggacgtccgcggaggatctggggacatcttactggtccatgctactgagactgacaggaaagatttggtgttgtactgcgaggcattcctgaccacctacaggaccttcatctccccag

SEQ ID NO: 160981 - DNA, 120 bp, Artificial Sequence
  ENSG00000107263_19 (sequence is synthesized)
aggagctcatcaagaagctgcagtacagatatgagaaattctctccctttgccgacacattcaagaagcgcgtcagcaagaacacgttcttcgtgctggtacgggtggtggatgagctct

SEQ ID NO: 160982 - DNA, 120 bp, Artificial Sequence
  ENSG00000107263_20 (sequence is synthesized)
gcctggtggagttgacagaagagatcctgaagctgctgatggaactggtcttccgcctggtgtgcaatggggagctgagcctggcccgtgtgctccggaagaacatcctggacaaggtgg

SEQ ID NO: 160983 - DNA, 120 bp, Artificial Sequence
  ENSG00000107263_21 (sequence is synthesized)
accagaagaagctactcaggtgtgccacctccagccagcccctggcagcccggggggtagcagccaggccggggaccttgcacgactttcacagccatgagatagcggagcagctaacgc

SEQ ID NO: 160984 - DNA, 120 bp, Artificial Sequence
  ENSG00000107263_22 (sequence is synthesized)
tgctggatgctgagctcttctataaaatagagattcctgaggttttgctttgggcaaaagagcagaatgaggagaagagccccaacttgacccagttcacggagcacttcaacaacatgt

SEQ ID NO: 160985 - DNA, 120 bp, Artificial Sequence
  ENSG00000107263_23 (sequence is synthesized)
cctactgggtccggtccataatcatgttacaggaaaaggcccaggacagggaacggctgctcttgaagttcatcaagatcatgaagcacttgcggaagctgaataacttcaactcctact

SEQ ID NO: 160986 - DNA, 120 bp, Artificial Sequence
  ENSG00000107263_24 (sequence is synthesized)
tggccatcctctctgccctggactcggcgcccatccgcaggctggagtggcagaagcagacttcagagggcctggccgagtactgcacactgatcgacagctcgtcctccttccgagcct

SEQ ID NO: 160987 - DNA, 120 bp, Artificial Sequence
  ENSG00000107263_25 (sequence is synthesized)
tggggctgatcctgcaggacctgaccttcgttcacctgggaaacccagactacatcgacgggaaagtgaacttctccaagcggtggcagcagttcaacatcctcgacagcatgcgctgct

SEQ ID NO: 160988 - DNA, 120 bp, Artificial Sequence
  ENSG00000107263_26 (sequence is synthesized)
tccagcaggcgcactatgacatgcggaggaacgacgacattataaacttcttcaatgacttcagtgaccacctggctgaggaggccctatgggaactgtctctgaaaattaaacccagga

SEQ ID NO: 160989 - DNA, 120 bp, Artificial Sequence
  ENSG00000107263_27 (sequence is synthesized)
acataacaaggagaaaaacagaccgggaagagaagacctaggagcagacgccgggatccaggagaatgctcgaggggcgcagagggcagctcccagaccggagaggaccttggacctgtt

SEQ ID NO: 160990 - DNA, 120 bp, Artificial Sequence
  ENSG00000107263_28 (sequence is synthesized)
aggcgcatggcaggagtcccggcctcggagccatgaggctggccagccctcagcggggccgggcgggagctggagcctgccagccgcttcctgcctccttcctctgtgggagcagacccg

SEQ ID NO: 160991 - DNA, 120 bp, Artificial Sequence
  ENSG00000107263_29 (sequence is synthesized)
tgggcctcagggcagccagcaggcaggtcttgttgccaatttacaaaccggtggttttctggtttggttttgttttctgcttttacttccatctctcccctcttgaccttccacccactc

SEQ ID NO: 160992 - DNA, 120 bp, Artificial Sequence
  ENSG00000107263_30 (sequence is synthesized)
ccctccagggagagagcagcagagacctcatcagcagaccaaggaagtggtgggtgctccccctccctaagctccagggtccctgaatcttctgaaatctcaaatgagtggaggcctcct

SEQ ID NO: 160993 - DNA, 120 bp, Artificial Sequence
  ENSG00000107263_31 (sequence is synthesized)
ggggtggcctgtcctgcaggggccctggaatgggggcaagcagctgggtgggcagaatgcagagtagactcgggggaggatcctttcactttccgcttccccttctgatgcatggaggat

SEQ ID NO: 160994 - DNA, 120 bp, Artificial Sequence
  ENSG00000107263_32 (sequence is synthesized)
ggtgtgagcttttcagcaggcccggaaaggtacgcaggtgacgccttagcagccccgcagctggtgctctgccccgcggtactggcgccatcagggcctcccttgcccgcctgagagcag

SEQ ID NO: 160995 - DNA, 120 bp, Artificial Sequence
  ENSG00000107263_33 (sequence is synthesized)
cagcagtctctgtcatcccgtcgccccttaccccccaccccaggccactgggcccctcccacaccacctggggagctgagaagaggaggctggagtaagggaggacttgatcatccaaga

SEQ ID NO: 160996 - DNA, 120 bp, Artificial Sequence
  ENSG00000107263_34 (sequence is synthesized)
aatactttttattgctgggagtcttctgaacctcaccaaactgaggccagagctgagctcctgggggagttaattcagaggggagaggccagcacctccctcctccatcgctcgctgtgt

SEQ ID NO: 160997 - DNA, 120 bp, Artificial Sequence
  ENSG00000107263_35 (sequence is synthesized)
gccttaaactccatctcatgtccctccccatcccctggctttccctccctccttgccccatcctgggccagccagcagggctcctcctctggctcttcagacctttcagccagtgctgtc

SEQ ID NO: 160998 - DNA, 120 bp, Artificial Sequence
  ENSG00000107263_36 (sequence is synthesized)
agtgcccctgggagggaagggcatccctgaggcacccgaatggtccctcagggtgcagggaggcagaagcctggccacagaggagcctcctaaggcagcagctgcagcaagcgcaccctc

SEQ ID NO: 160999 - DNA, 120 bp, Artificial Sequence
  ENSG00000107263_37 (sequence is synthesized)
tccccactctccccacgccagagcggcttccagagcagatgctgtttccatcctcctcgtcaaaaccattctcgctgctgagcttgacaatctgggcaaggcttgtggggcgcttgacaa

SEQ ID NO: 161000 - DNA, 120 bp, Artificial Sequence
  ENSG00000107263_38 (sequence is synthesized)
acagaatctgccctgtgccgcctggttccgtggcctccagcatgagcctgcaggcagggcgctgcgggaacccagttgtgctgccccagcccatgcctccgggtctgctgtgcatgaatg

SEQ ID NO: 161001 - DNA, 120 bp, Artificial Sequence
  ENSG00000107263_39 (sequence is synthesized)
agtgctcacttgtcccgggtttaggacgtggtcaagtgaacagcagggtctaactgtgcttacttagcccagttcaaacagaacaaaggaaaaatatagaaagcaacatctgttgatcat

SEQ ID NO: 161002 - DNA, 120 bp, Artificial Sequence
  ENSG00000107263_40 (sequence is synthesized)
ttaggtttttttttaaaccaccatgtcactttgagtccttcatgggtttttgaacagcatttatcaagaagaaaatgtgggctttttcccctctcccgtgttttgtttgtcctgtagata

SEQ ID NO: 161003 - DNA, 120 bp, Artificial Sequence
  ENSG00000107263_41 (sequence is synthesized)
gagggaggaaagccgtgcagtggcaggcgggaccccctctggtggcgggaccccctcttgcggtggtcttgcggggccagccgggacctgtcactttattatttaaggagtgtgtgtgta

SEQ ID NO: 161004 - DNA, 120 bp, Artificial Sequence
  ENSG00000107263_42 (sequence is synthesized)
gagtcgctggcttattaacagtattgtgtgtgggttgggtttttagtttgttccttctttttgaagtcccttcatttcaatccttgactctctctccccttcccttgcccagctctgttg

SEQ ID NO: 161005 - DNA, 120 bp, Artificial Sequence
  ENSG00000107263_43 (sequence is synthesized)
aatgctgctgtgcgcgtgtgagggccgctctgcacacagggcccttgggttgtgtgaactgaaattctccctgtatttgtgagactcgcaggagtccccatctgtagcacaggcaatgcc

SEQ ID NO: 161006 - DNA, 120 bp, Artificial Sequence
  ENSG00000107263_44 (sequence is synthesized)
agtgccatgctgcagcctcagaaaccaggcctctcactccagcagcaggcagaaccgtgtctgtggtcgggtgctgtccacagctctgtctgccttgttcttgggcttgagctggataga

SEQ ID NO: 161007 - DNA, 120 bp, Artificial Sequence
  ENSG00000107263_45 (sequence is synthesized)
ggtggggtctcttcaccttccctgaattcagaacagaccctgtgcctggccccagtgtgcccaggcaattccccaggccctcactgggagcccttggtgttctgagcagcagggcccagg

SEQ ID NO: 161008 - DNA, 120 bp, Artificial Sequence
  ENSG00000107263_46 (sequence is synthesized)
cagcacatgagcagtgcccaggggctccctgcgtgaggacggcaaggtgcgatgtatgtctaacttattgatggcaggcagccccctgtgccccctaagcctggccctggttattgctga

SEQ ID NO: 161009 - DNA, 120 bp, Artificial Sequence
  ENSG00000107263_47 (sequence is synthesized)
gctctgtgctcagtgctgcggcctggccgtggctcgtctgttcctttggggggcccgggcgggttgtgggaatcagtcttcacagacagacgtgagccaggcggaggactcgttccttgc

SEQ ID NO: 161010 - DNA, 120 bp, Artificial Sequence
  ENSG00000107263_48 (sequence is synthesized)
agaggtcagtcctcacctgcaggtgtcggggtgtgggggggcaaggaggggcaggcacacaccatgtctgacctgaacccgattctggggagcatcttcccgctccggccccacgacctc

SEQ ID NO: 161011 - DNA, 120 bp, Artificial Sequence
  ENSG00000107263_49 (sequence is synthesized)
cacagggttacattgtaatatatatgccccagctaacctgtctgatggtggcatcttcctgcagacatttcaaacatgtaacttttatatgaaaaaaaataaacacagatgaaagctgcc

SEQ ID NO: 161012 - DNA, 120 bp, Artificial Sequence
  ENSG00000107263_50 (sequence is synthesized)
ccttttctgggcaccgccttctgctagggggttgtagatgaaagtgcctgctcccagagaagcttgtctaacctagcacagtttctaagctacccaggctgccagaccgagcgaccgtgc

SEQ ID NO: 161013 - DNA, 120 bp, Artificial Sequence
  ENSG00000107263_51 (sequence is synthesized)
cagggcctcagtgtgtccgtctctaactcctttctcagccggcacggcagcttgcccgtgccctcgtataagtctgtgtttaggtcctactcccaggatttcgtgcctcaccaccaagct

SEQ ID NO: 161014 - DNA, 120 bp, Artificial Sequence
  ENSG00000107263_52 (sequence is synthesized)
tccgttccgcctttccttccgcctacctcctcttcctctccacatttcccacctgcccaccagtctcagagctctgacttagccgtgccaaccatggccggtccacctcccagcaccgtg

SEQ ID NO: 161015 - DNA, 120 bp, Artificial Sequence
  ENSG00000107263_53 (sequence is synthesized)
gacgggcctctctcggcttctcaggagagcagctttcatgggaatactgtctgccttccttccgaaacctctttcactgactcggagccaccggctgggaaagacggacatcccagagat

SEQ ID NO: 161016 - DNA, 120 bp, Artificial Sequence
  ENSG00000107263_54 (sequence is synthesized)
gctggccccgccgcccgccctaccccccaagcagcggcagctgagtgaaaacgccagtgaggaagctggtgagggtgaatatgtcaatctgtattcctctggccagagcagcgaggagct

SEQ ID NO: 161017 - DNA, 120 bp, Artificial Sequence
  ENSG00000107281_0 (sequence is synthesized)
ggatccttgctgcagcgtcagcgccgccgcccgtgcctttcctcttcctcctcctcctccttggcatccgcctcttcttcctcctgcgtcctcccccgctgcctccgctgctcccgacgc

SEQ ID NO: 161018 - DNA, 80 bp, Artificial Sequence
  ENSG00000107281_1 (sequence is synthesized)
ggagcccggagcccgcgccgagcccctggcctcgcggtgccatgctgccccggcggcggcgctgaaggatggcgacgccg

SEQ ID NO: 161019 - DNA, 120 bp, Artificial Sequence
  ENSG00000107281_2 (sequence is synthesized)
tgctgctctccggcctcgtcctcggcgccgccctgcgtggagccgccgccggccacccggatgtagccgcctgtcccgggagcctggactgtgccctgaagaggcgggcaaggtgtcctc

SEQ ID NO: 161020 - DNA, 120 bp, Artificial Sequence
  ENSG00000107281_3 (sequence is synthesized)
ctggtgcacatgcctgtgggccctgccttcagcccttccaggaggaccagcaagggctctgtgtgcccaggatgcgccggcctccaggcgggggccggccccagcccagactggaagatg

SEQ ID NO: 161021 - DNA, 120 bp, Artificial Sequence
  ENSG00000107281_4 (sequence is synthesized)
agattgacttcctggcccaggagcttgcccggaaggagtctggacactcaactccgcccctacccaaggaccgacagcggctcccggagcctgccaccctgggcttctcggcacgggggc

SEQ ID NO: 161022 - DNA, 120 bp, Artificial Sequence
  ENSG00000107281_5 (sequence is synthesized)
aggggctggagctgggcctcccctccactccaggaacccccacgcccacgccccacacctccctgggctcccctgtgtcatccgacccggtgcacatgtcgcccctggagccccggggag

SEQ ID NO: 161023 - DNA, 120 bp, Artificial Sequence
  ENSG00000107281_6 (sequence is synthesized)
gcgttctgtgtggccggtgcagccgccctctccgtagcctccctctgctggtgcaggctgcagcgtgagatccgcctgactcagaaggccgactacgccactgcgaaggcccctggctca

SEQ ID NO: 161024 - DNA, 120 bp, Artificial Sequence
  ENSG00000107281_7 (sequence is synthesized)
cctgcagctccccggatctcgcctggggaccagcggctggcacagagcgcggagatgtaccactaccagcaccaacggcaacagatgctgtgcctggagcggcataaagagccacccaag

SEQ ID NO: 161025 - DNA, 120 bp, Artificial Sequence
  ENSG00000107281_8 (sequence is synthesized)
gagctggacacggcctcctcggatgaggagaatgaggacggagacttcacggtgtacgagtgcccgggcctggccccgaccggggaaatggaggtgcgcaaccctctgttcgaccacgcc

SEQ ID NO: 161026 - DNA, 120 bp, Artificial Sequence
  ENSG00000107281_9 (sequence is synthesized)
gcactgtccgcgcccctgccggcccccagctcaccgcctgcactgccatgacctggaggcagacagacgcccacctgctccccgacctcgaggcccccggggaggggcagggcctggagc

SEQ ID NO: 161027 - DNA, 120 bp, Artificial Sequence
  ENSG00000107281_10 (sequence is synthesized)
ttcccactaaaaacatgttttgatgctgtgtgcttttggctgggcctcgggctccaggccctgggaccccttgccagggagacccccgaacctttgtgccaggacacctcctggtcccct

SEQ ID NO: 161028 - DNA, 120 bp, Artificial Sequence
  ENSG00000107281_11 (sequence is synthesized)
gcacctctcctgttcggtttagacccccaaactggagggggcatggagaaccgtagagcgcaggaacgggtgggtaattctagagacaaaagccaattaaagtccatttcagacctgcgg

SEQ ID NO: 161029 - DNA, 120 bp, Artificial Sequence
  ENSG00000107281_12 (sequence is synthesized)
gtgtgcagtgtggggctgggcagagaggaagagtcctggttagccagaggtgccaccgcagactccccaggcagggttgatggccctgctggggttcccctggctccactggcttgctgt

SEQ ID NO: 161030 - DNA, 120 bp, Artificial Sequence
  ENSG00000107281_13 (sequence is synthesized)
gactggggacattccttagctttgaggcaactcagctatatcccagaggggaaactgaggcagagggccattgccccctcgccccgttctccagcaccaggataagactgattagccaca

SEQ ID NO: 161031 - DNA, 120 bp, Artificial Sequence
  ENSG00000107281_14 (sequence is synthesized)
tgtgtcagctggcaccgtggcctgggcccctcatcagcgagatgaaagtgtggttaggaactagggaactagggcctggcctgccatccccagcactgccaacctcggcctcctgaggcc

SEQ ID NO: 161032 - DNA, 120 bp, Artificial Sequence
  ENSG00000107281_15 (sequence is synthesized)
ctcgggtgccacctggcccctgactgcagcccctggtgtggtggctttgggagtgacctgcctgggttctgtgtctgaggccagtgaggtcagcagactccatcttaggtgtcctcggtg

SEQ ID NO: 161033 - DNA, 120 bp, Artificial Sequence
  ENSG00000107281_16 (sequence is synthesized)
cctgggggacaagccagaggctggaggagcagcatcccttccaggctgcacacttgtcagtgccgggttctggggagagccgcacgggaaggagaggtcgctggcggcatcgtttgctgc

SEQ ID NO: 161034 - DNA, 120 bp, Artificial Sequence
  ENSG00000107281_17 (sequence is synthesized)
tccccagagacagacctgggcccttccctctgggactcccaatctggacggggttcctggcttgctgtggggcatgttgaggccggaggctgggcttgtggggctgcacggccctgccca

SEQ ID NO: 161035 - DNA, 120 bp, Artificial Sequence
  ENSG00000107281_18 (sequence is synthesized)
ggagaactcagcactgcctggacggcgagactcagcttctgagctgagggctctatcaggcctggaagtggaccctggggaggggtggggcagggtagttctgataagtcctaggactgt

SEQ ID NO: 161036 - DNA, 120 bp, Artificial Sequence
  ENSG00000107281_19 (sequence is synthesized)
tcgcttccgggttctgagccctggcgtcagggaggaagggcatgtccagaacaatggccagaaccaggcccggccagctcggggggtgacgggggcgggtggctggggcagcgctgccgt

SEQ ID NO: 161037 - DNA, 120 bp, Artificial Sequence
  ENSG00000107282_0 (sequence is synthesized)
tgcggagccggagctgggcgagggcggctgcggtcccggcggcggcggcggcggcggcagctgcggcgggagaagatggtggcgctggaggcagcagcggctggagcggagctttattcc

SEQ ID NO: 161038 - DNA, 120 bp, Artificial Sequence
  ENSG00000107282_1 (sequence is synthesized)
agcagcggctggagcggagctttattcccaggcttggcaccagcgctgtcactagcgccgcctgctcccgcgggcccgcggacccagctgtcaggcaagcccagtggagcaaaatgagag

SEQ ID NO: 161039 - DNA, 120 bp, Artificial Sequence
  ENSG00000107282_2 (sequence is synthesized)
cgcagtgagccgggcccagcttctctcctagccgttccgactcccaccatgaaccacttggaggggtctgcggaggtggaggtgaccgacgaggcggcaggtggggaggtgaacgagtcg

SEQ ID NO: 161040 - DNA, 120 bp, Artificial Sequence
  ENSG00000107282_3 (sequence is synthesized)
gtggaggccgacctggagcaccccgaggtggaagaggaacagcagcagccgccgcagcagcagcactatgtgggccgccaccagcgcgggcgagccctcgaggacctccgcgcccagctc

SEQ ID NO: 161041 - DNA, 120 bp, Artificial Sequence
  ENSG00000107282_4 (sequence is synthesized)
ggccaggaggaagaggagcgcggggaatgcctggcgcgctcagccagcacggagagcggcttccacaaccacacggacaccgccgagggcgacgtgatcgccgcggcccgcgacggctac

SEQ ID NO: 161042 - DNA, 120 bp, Artificial Sequence
  ENSG00000107282_5 (sequence is synthesized)
gatgcggagcgcgcgcaggaccccgaggacgagagcgcctatgctgtgcagtaccggcccgaggccgaggagtacacggagcaggcagaggccgagcacgccgaggccacgcaccgccgc

SEQ ID NO: 161043 - DNA, 120 bp, Artificial Sequence
  ENSG00000107282_6 (sequence is synthesized)
gcgctgcccaaccacctgcacttccactcgctggagcacgaggaagccatgaatgcggcctactcaggctacgtctacacgcaccggctcttccaccgcggtgaggacgagccctactcc

SEQ ID NO: 161044 - DNA, 120 bp, Artificial Sequence
  ENSG00000107282_7 (sequence is synthesized)
gagccctatgccgactacggcggcctccaggagcacgtgtacgaggagataggggacgcgcccgagctggacgcacgcgacggcctgcggctctacgagcaggagcgcgacgaggcggcc

SEQ ID NO: 161045 - DNA, 120 bp, Artificial Sequence
  ENSG00000107282_8 (sequence is synthesized)
gcgtaccgccaggaggccctgggcgcgcggctgcaccattacgacgagcgctccgacggcgagtccgacagccccgagaaggaggccgagttcgcgccctacccgcgcatggacagctac

SEQ ID NO: 161046 - DNA, 120 bp, Artificial Sequence
  ENSG00000107282_9 (sequence is synthesized)
gagcaggaggaggacatcgaccagatagtggccgaggtgaagcagagcatgagctcgcagagcctcgacaaggcagccgaggacatgcctgaggccgagcaggacctggagcgtccccct

SEQ ID NO: 161047 - DNA, 120 bp, Artificial Sequence
  ENSG00000107282_10 (sequence is synthesized)
ccgggctgcaggcgccggcggggcagcagcgggcggtgggccccgcgggcggcggcgaggcggggcagcggtacagcaaggagaagcgcgatgccatctcgctggccatcaaggacatca

SEQ ID NO: 161048 - DNA, 120 bp, Artificial Sequence
  ENSG00000107282_11 (sequence is synthesized)
gccatctcgctggccatcaaggacatcaaggaggccatcgaggaggtgaaaaccaggaccatccgttcgccttacacccccgacgagcccaaagagcccatctgggtcatgcgccaggac

SEQ ID NO: 161049 - DNA, 120 bp, Artificial Sequence
  ENSG00000107282_12 (sequence is synthesized)
attagccccaccagggactgtgacgaccagaggccgatggacggagattctccgtctcctggcagctcctcccccttgggtgcagagtcatcaagcacatctcttcaccccagtgaccct

SEQ ID NO: 161050 - DNA, 120 bp, Artificial Sequence
  ENSG00000107282_13 (sequence is synthesized)
gtggaagcgtccactaataaagagtcaagaaaaagcttggcttcattcccaacctacgttgaagttccgggaccctgcgaccccgaagacttgatcgatggaatcatttttgccgccaat

SEQ ID NO: 161051 - DNA, 120 bp, Artificial Sequence
  ENSG00000107282_14 (sequence is synthesized)
taccttggctccactcagctgctctcagacaaaactccttccaaaaacgtgcgcatgatgcaggcccaggaagccgtaagcaggatcaagatggcccagaaattagccaaaagcaggaag

SEQ ID NO: 161052 - DNA, 120 bp, Artificial Sequence
  ENSG00000107282_15 (sequence is synthesized)
aaggctcctgaaggcgaatctcagccaatgactgaagtggatctcttcatttctacccagagaatcaaagtgctgaacgccgacacacaggagacaatgatggaccaccctctgaggacc

SEQ ID NO: 161053 - DNA, 120 bp, Artificial Sequence
  ENSG00000107282_16 (sequence is synthesized)
atttcctacattgcggacattgggaacatcgttgtgctgatggcccgccggcggatgcctcgctccaactcccaggagaacgtggaagcgtcccacccatcccaggatgggaaaaggcag

SEQ ID NO: 161054 - DNA, 120 bp, Artificial Sequence
  ENSG00000107282_17 (sequence is synthesized)
tacaagatgatctgccacgtcttcgagtctgaggatgctcagctgattgcacagtccatcggacaggcatttagcgtggcataccaggaattcctcagggccaatgggattaaccccgaa

SEQ ID NO: 161055 - DNA, 120 bp, Artificial Sequence
  ENSG00000107282_18 (sequence is synthesized)
gatctcagccagaaggagtatagtgacctgctcaatacccaggacatgtacaacgatgacctgatccacttctccaagtcggaaaactgtaaagatgttttcatagagaagcagaaagga

SEQ ID NO: 161056 - DNA, 120 bp, Artificial Sequence
  ENSG00000107282_19 (sequence is synthesized)
gaaatcctaggtgtggtgattgtggagtctggctggggatccatcctccccaccgtgatcattgccaacatgatgcatggtggccctgcggagaaatctgggaagctgaatatcggtgac

SEQ ID NO: 161057 - DNA, 120 bp, Artificial Sequence
  ENSG00000107282_20 (sequence is synthesized)
cagatcatgtccattaatggcaccagcctggtgggcctgcctctgtccacctgccagagcattattaagggcttaaagaatcagtcccgagtcaagctgaatatcgtgagatgtcctccg

SEQ ID NO: 161058 - DNA, 120 bp, Artificial Sequence
  ENSG00000107282_21 (sequence is synthesized)
gtgaccaccgtgttaatcagaagaccagaccttcgctaccagctcggtttcagcgtccagaatggaattatctgcagcctcatgcgagggggaatagctgagagaggaggcgtccgtgtg

SEQ ID NO: 161059 - DNA, 120 bp, Artificial Sequence
  ENSG00000107282_22 (sequence is synthesized)
gggcaccggatcattgaaatcaatggacagagcgtcgtggccaccccccacgagaagatcgtccacattctctccaatgctgttggggagattcatatgaagacaatgccagccgcgatg

SEQ ID NO: 161060 - DNA, 120 bp, Artificial Sequence
  ENSG00000107282_23 (sequence is synthesized)
tacaggctgctgacggcccaggagcagcctgtttacatctgaccgcggccacacgcggtggcatgcatggaggactctcctcttcgtggttgtgtttctcgtgctgcatccctgtgtcca

SEQ ID NO: 161061 - DNA, 120 bp, Artificial Sequence
  ENSG00000107282_24 (sequence is synthesized)
ctgagactttcccctctcgcgcccagcatttggttttacacaggaagagaagaatccacaaggacctctttactctctccgatttgcttttttttttttttttttttcaataccagggaa

SEQ ID NO: 161062 - DNA, 120 bp, Artificial Sequence
  ENSG00000107282_25 (sequence is synthesized)
gtttcgtatgcactcccttgaggatggagagcagccagcacccacctggtactgacccaggaccatcctggagggctttctgggtgtgtccagggggtgggctgtcactgcttgagggag

SEQ ID NO: 161063 - DNA, 120 bp, Artificial Sequence
  ENSG00000107282_26 (sequence is synthesized)
aatcctcccttcccaggaggtgcagacttcttaaaaggagctcgcggggcagcaaagcagctgattcagcagtgcctaaaacccagttgctgatccctgctctctgagtttatctgtggg

SEQ ID NO: 161064 - DNA, 120 bp, Artificial Sequence
  ENSG00000107282_27 (sequence is synthesized)
tattgctagttctaatttcaacgtatgtgtgttttctaatacgagccttctcaccccaggataaaaggggaaataactgccttgggcaaggacaccatagtgtcacagagagcttggcaa

SEQ ID NO: 161065 - DNA, 120 bp, Artificial Sequence
  ENSG00000107282_28 (sequence is synthesized)
agagcttggcaattcatggggcatctgaagctttaccaggttgtcctcaagttatcaaccattagataaacacaggcaggtactgtctgcttctctctctctcacacacacacacacaca

SEQ ID NO: 161066 - DNA, 120 bp, Artificial Sequence
  ENSG00000107282_29 (sequence is synthesized)
tgcatatcacccttccctgctcccaccaccagtgagacaagctgaagattaggcacacagatcccctggaaacccacctctctggaaggccccttccctggcaggtggccaggcaggcgg

SEQ ID NO: 161067 - DNA, 120 bp, Artificial Sequence
  ENSG00000107282_30 (sequence is synthesized)
gggctgctcagcctcatcctgagagacctgccctctctgcgctgaggcccagcccctccagcaccactttggcttaaagcatcctcctcctggactcccctccctgccgaacacacatcc

SEQ ID NO: 161068 - DNA, 120 bp, Artificial Sequence
  ENSG00000107282_31 (sequence is synthesized)
caggagtctgggaaggagggactgttcccaagaaggcaagctgcaggtgcaattgcgtcttgttttctggcccaaggcaagaccaactttcttctctgctcagggccactaggcggatgt

SEQ ID NO: 161069 - DNA, 120 bp, Artificial Sequence
  ENSG00000107282_32 (sequence is synthesized)
gatattggaaaggccagaatagtacataaaccacaaaattaaggagacaatagcaacctcaagttatgcctcagaatccccagatgtggtccataaacaccctcttgctgccttgtgggc

SEQ ID NO: 161070 - DNA, 120 bp, Artificial Sequence
  ENSG00000107282_33 (sequence is synthesized)
ctgagagcatttttggctggtgtggaattgttccgtgttttcatcaggtgcctcatatttatgcttccgtctcagttcagtgtagatgttttagtaatattataattctgagccagtttt

SEQ ID NO: 161071 - DNA, 120 bp, Artificial Sequence
  ENSG00000107282_34 (sequence is synthesized)
cacttggtccaaagagcattttgtgttcatgtgaggtgtgatttggctttgcttttgttttgtttcattcatgacctcagtagagacaggggaagagaaactattatattttgtaattaa

SEQ ID NO: 161072 - DNA, 120 bp, Artificial Sequence
  ENSG00000107282_35 (sequence is synthesized)
tatagtccctgttctctgcatccgagatatttatgttgtgtctatggaaataggaactcagtgagcaaatggtgggtagcatgtatttatagagagaatggagggattctaaggagggag

SEQ ID NO: 161073 - DNA, 120 bp, Artificial Sequence
  ENSG00000107282_36 (sequence is synthesized)
caaagtgactataacaagattagggacaagagacttcaaccagagagttctgtgatcaattccccgagatctctgcatcttctgagttttctgcttagaatcagggaagctcagtgcttg

SEQ ID NO: 161074 - DNA, 120 bp, Artificial Sequence
  ENSG00000107282_37 (sequence is synthesized)
acaggaacgagcagtggcactctcagtttcactgtgttacaaaggagccctgaggaagggaggccgctggctgcccaggtgccctggggggaaagggacttctgctgctgcagagagtgg

SEQ ID NO: 161075 - DNA, 120 bp, Artificial Sequence
  ENSG00000107282_38 (sequence is synthesized)
cacccggtggggccaggggctctgggatggtccgtaaagctccccaggacttctttgaaggatgctttacagaatgtttctgggagaccagcctcaaggtcaacccatcacaaacgtgag

SEQ ID NO: 161076 - DNA, 120 bp, Artificial Sequence
  ENSG00000107282_39 (sequence is synthesized)
gaccaggaaggaaccatggccagggttctccatttgctgtagagtatctggtgatacagtgagacactaaagagtcatcagccagttcatctttcctctgccaataagagtggatagaac

SEQ ID NO: 161077 - DNA, 120 bp, Artificial Sequence
  ENSG00000107282_40 (sequence is synthesized)
aggaatgaagtgttactggtggtatttcaggcatcaggagccttggaaaatcatcgtaggggcccatgcctgtctgtccctaggcacctgggcagtgccacagaggcccgcccacgactg

SEQ ID NO: 161078 - DNA, 120 bp, Artificial Sequence
  ENSG00000107282_41 (sequence is synthesized)
gccaggggacagaactccagtagtgcatccctgtacaacctgcacataacggttatgtatgttcacctaaaggagagaatatactttctattcctattgcacaaaaaccttgtaaacttt

SEQ ID NO: 161079 - DNA, 120 bp, Artificial Sequence
  ENSG00000107282_42 (sequence is synthesized)
gagaggtgctgaaaaagccaattctgcaagctctcctagaggactgacattgtaacattagagtgagaagatttctctgccacattcttttgtgttaatccaggtgtgtcttcacaccca

SEQ ID NO: 161080 - DNA, 120 bp, Artificial Sequence
  ENSG00000107282_43 (sequence is synthesized)
gtgagtggaagttgctggagctcggtacaggtccacccagctgaagtgggttctttttcccactaccactggggcaagggagtgagcctaggtatggtcacctcagcagccacagtctta

SEQ ID NO: 161081 - DNA, 120 bp, Artificial Sequence
  ENSG00000107282_44 (sequence is synthesized)
aaagcaagtcgctagattttttgaaagtcccaagagaagtggtggtcttcccttctgtcatcccagtatatatagttatacatgtaaatatctaaataccccatgtaatgggaaggctat

SEQ ID NO: 161082 - DNA, 120 bp, Artificial Sequence
  ENSG00000107282_45 (sequence is synthesized)
gtacagggcagccttcccaaacgctgtgagggcacagagctgctgtggctgctccaccagggtgtgctggtggctcagctttggggttggactcccacgttcacctccccctcctggtcc

SEQ ID NO: 161083 - DNA, 120 bp, Artificial Sequence
  ENSG00000107282_46 (sequence is synthesized)
aggcagaggcaccagaacccatcctgccttttctccagtgtgagcatttcagggagccaccatcagccttgggttcatgagaggaagaaacccccaaagaccaatgcctggagcccactt

SEQ ID NO: 161084 - DNA, 120 bp, Artificial Sequence
  ENSG00000107282_47 (sequence is synthesized)
ctccagcgacaccttccctcgccagagcaggctcctaggagtgcatggcaggggtgccgggtccctgtgcacgggtttgctttctgaacattgcccatcaacaccgccttcagggagtcc

SEQ ID NO: 161085 - DNA, 120 bp, Artificial Sequence
  ENSG00000107282_48 (sequence is synthesized)
cagagtaacctactacctcccccatcgctcctctgcccccctcaccctgtgggcaccaacacctcccgcacacagatgaaaaccatctacagagcccttcccgggtccctcgacccagtg

SEQ ID NO: 161086 - DNA, 120 bp, Artificial Sequence
  ENSG00000107282_49 (sequence is synthesized)
gtgtagccgttaccaatgtttacaaccaggggccgcccctccttagatgtgtttactcgcattcacaggccacctgttggtttgagtttcatgtgtctccttccctggcctaggttgact

SEQ ID NO: 161087 - DNA, 120 bp, Artificial Sequence
  ENSG00000107282_50 (sequence is synthesized)
tgagcacacaactcgatctttcttcccctccatcaaggcagtgtgtgaggactgtgtgggaatgacatttcttgtacatacttagcacagcacctagagtatgaacttgtactattgttc

SEQ ID NO: 161088 - DNA, 120 bp, Artificial Sequence
  ENSG00000107282_51 (sequence is synthesized)
tgtaaagagggtgaaatagagcttattgtaaagtgtcgggagaagtatagtattgtatttgtaacaatatcgttctttgtatacacaaaactcaatgatctatatataaatataaataaa

SEQ ID NO: 161089 - DNA, 120 bp, Artificial Sequence
  ENSG00000107282_52 (sequence is synthesized)
tatataaataaaatatatctacacgtgagcctggaatgtggacaccgcacacccactgaatgtacttccttgacagtctggtcactggtccctccctccctccctcctccgtcccgtggc

SEQ ID NO: 161090 - DNA, 120 bp, Artificial Sequence
  ENSG00000107282_53 (sequence is synthesized)
cacagtcatccagtttggggttgtgatgtatttactgtgctatctatcttcctttatttaactgaacgctaatgtctgtataagagttgctgcaacaataaacaagaacttcacctcttg

SEQ ID NO: 161091 - DNA, 120 bp, Artificial Sequence
  ENSG00000107282_54 (sequence is synthesized)
tttagttgtcttccaggcacagcattcaaaacaacaacccacaaacctctcagagagagcaagctgcttctcaggcaaagtcacgtcctattttgtataaagcagagaactttaaatcaa

SEQ ID NO: 161092 - DNA, 120 bp, Artificial Sequence
  ENSG00000107282_55 (sequence is synthesized)
agagacatagagacatagttctgactccacgtgccccatgggtaccagatatgccacctgggcttccaggtgaatggtgctgttagcttccccaggtttggtggaagcacaaaagcctgg

SEQ ID NO: 161093 - DNA, 120 bp, Artificial Sequence
  ENSG00000107282_56 (sequence is synthesized)
tgtgcctcacttggggtctctgatagacagggactgccttcataagatgtgtttggaaatgagtgggggcacctctgcttgtcaccatgactgggggcattttctgggccagagccaggt

SEQ ID NO: 161094 - DNA, 120 bp, Artificial Sequence
  ENSG00000107282_57 (sequence is synthesized)
gtgctcaagaccctataacatccagggcagagccacaaaacaaagattttatctctaccaaaatgccaaagagcccctatcaaggaatgctacccagagcccgttcaggcgtatcttcca

SEQ ID NO: 161095 - DNA, 120 bp, Artificial Sequence
  ENSG00000107282_58 (sequence is synthesized)
gaataaagcagcagtctgcccccaaaggagtactgaagacttctgaggttgaaaactgcacgttgccttgaggttagttttttctaggttctatccatcaaggcttcaaacattttaagg

SEQ ID NO: 161096 - DNA, 120 bp, Artificial Sequence
  ENSG00000107282_59 (sequence is synthesized)
ttcaggtttcatttgggacaccttgtttattagccctctgatagctttggactcctacagacagaacatttatgcctttccagtccccttatggcacttaggtagtgctgagatggcctt

SEQ ID NO: 161097 - DNA, 120 bp, Artificial Sequence
  ENSG00000107282_60 (sequence is synthesized)
acagggaaaaagcgggcacggggcacatcacttgaacgtaaagcaatgttcggggtacacagcatccctgtaccaaagctcgtcagtgccaattatattgtgaattacattttcttattt

SEQ ID NO: 161098 - DNA, 120 bp, Artificial Sequence
  ENSG00000107282_61 (sequence is synthesized)
ccaaagtggtgtcctatagagttgttattccttctttaaagtccagctgcctcataagaaatcagagattttacttcaaagcttccaaaggattggtatcccgaagttccacagttcatt

SEQ ID NO: 161099 - DNA, 120 bp, Artificial Sequence
  ENSG00000107282_62 (sequence is synthesized)
tgaatcaaaaattagatggctctgttgatcagaacaaccaagatagaggctttctgattataaatacattttagacctgcctagagcagaataggcatttggaaaacatagatttatttt

SEQ ID NO: 161100 - DNA, 120 bp, Artificial Sequence
  ENSG00000107282_63 (sequence is synthesized)
tacaagcaaattactctggcgtgaggaattcattatagagtggtaaaattaaatggttacatttcatttataacttataagtatcattttacaatgtgcatctatgcattggaaggaact

SEQ ID NO: 161101 - DNA, 120 bp, Artificial Sequence
  ENSG00000107282_64 (sequence is synthesized)
gttgcctgtcattaaatattttctgtttcatgttccttttacatccattaaaatgcttatcagattggttgacgttatatccagctagaagccttttccaagtgtaaatggagatgcctg

SEQ ID NO: 161102 - DNA, 120 bp, Artificial Sequence
  ENSG00000107282_65 (sequence is synthesized)
tttaagtcagcactctccaaaaagtgactgtgtcagggagcgtacacggacttcatcaatgcaaagggaagctgggggcaaagagtgctgatcctgagcaggctgggctgggctcaagtg

SEQ ID NO: 161103 - DNA, 120 bp, Artificial Sequence
  ENSG00000107282_66 (sequence is synthesized)
gaaggagcttgcaccaggtgcccacatgtgcttgggagacactgctctgtaaggaagatggtgccacgctgtttcctaaagagagactgacctttcaggacaagttattctaggccacct

SEQ ID NO: 161104 - DNA, 120 bp, Artificial Sequence
  ENSG00000107282_67 (sequence is synthesized)
tgacagaaaggacgtagagcacagcaaagctgcagactttatagcgtccgtccaggaaggaaggagaaagaaaagctctgtggatttattttgcaatccatttagcaatgtccttaaccc

SEQ ID NO: 161105 - DNA, 120 bp, Artificial Sequence
  ENSG00000107282_68 (sequence is synthesized)
caatctgattagtaatttctggcttggcactttcacctaaacaaaggtgggggtagtttcctcctttgttttctgattcctccttcttccctcactccctgcagggacccccgttttgtc

SEQ ID NO: 161106 - DNA, 120 bp, Artificial Sequence
  ENSG00000107282_69 (sequence is synthesized)
cctctcttcctctgcctacattgtttgtttgaccagatggatgtgactggatgtgaatgagaactgctcaccacgcgccctgttattcgtggtgctttatctctgaacagacgctgacct

SEQ ID NO: 161107 - DNA, 120 bp, Artificial Sequence
  ENSG00000107282_70 (sequence is synthesized)
tgaagcttaggtttccatttcaaagtagtctttaatttctcttccatttgtcgattgtggtgtccgccactcatgtagtaccaactgtatactaaaattgaacattgcttattggatttg

SEQ ID NO: 161108 - DNA, 120 bp, Artificial Sequence
  ENSG00000107282_71 (sequence is synthesized)
gacttggggttttgaaaattactgttttcttaatttaacaaaaaatttacaagattcctttgccacatggagagagaatttggagctgcggtttggccaggtattttctacttaatgtga

SEQ ID NO: 161109 - DNA, 120 bp, Artificial Sequence
  ENSG00000107282_72 (sequence is synthesized)
aaagaaacaaaggaatttggccccaaatgccaactgttgctgtgcagactcctgtgataggccctttaggaataaatttaaccaatacacagttcttgagcttgagaaacttgcagtaaa

SEQ ID NO: 161110 - DNA, 120 bp, Artificial Sequence
  ENSG00000107282_73 (sequence is synthesized)
aacaagccaaaaagaatgttaggtaacaaaaatacaaggtaagctgagggctctgaaatttaaaggcttttccatctaccacaatttaagagatgacatatctgagcacaatagcagaat

SEQ ID NO: 161111 - DNA, 120 bp, Artificial Sequence
  ENSG00000107282_74 (sequence is synthesized)
ccctccctaatgtgttcattctgcctttgttggtcatcatttttgagaagtaatatccttccagagagcccccatataccttaggggattgcattagagccctggttctcaaagcatgat

SEQ ID NO: 161112 - DNA, 120 bp, Artificial Sequence
  ENSG00000107282_75 (sequence is synthesized)
ccctggaccagtagcatcagcattgcctacaaacttcttagaagtacaggttttcaggcccaaccccaaacctactgagtcagaaactcagaaggtggcacccaggagtctgtgttttaa

SEQ ID NO: 161113 - DNA, 120 bp, Artificial Sequence
  ENSG00000107282_76 (sequence is synthesized)
caaaccctccaggagattctgctctgcaccagcgtttgggaaccactgccttagagaaaggtggacccgccagtgtgtgaagcatctttcctcccactgtgccctgtagcattctagtca

SEQ ID NO: 161114 - DNA, 120 bp, Artificial Sequence
  ENSG00000107282_77 (sequence is synthesized)
ggctaagtgcttgtcattaatagagttccactggcaaataagctcaagaaaatagacctccttttcggacatttgctacaggtgtcttcctcttcaaggctctgagaagtcctgcactaa

SEQ ID NO: 161115 - DNA, 120 bp, Artificial Sequence
  ENSG00000107282_78 (sequence is synthesized)
gaagatttcattcactttaactagcagctcccatacttatttgagcacagaatacattgttaccatgtgatagatacctgtcattggtagtattctctggaacatgttttgggagaaact

SEQ ID NO: 161116 - DNA, 120 bp, Artificial Sequence
  ENSG00000107282_79 (sequence is synthesized)
tctagagagagctttgtcctatgtgctgtcagtctttaatgtgccgtagatagaaacacatctctcccctaacaacgtgggactcatgcctacccctttctagagaaagccagactggaa

SEQ ID NO: 161117 - DNA, 120 bp, Artificial Sequence
  ENSG00000107282_80 (sequence is synthesized)
gccagcacaatgagctcatttgtcttccttgttctccactgcatctccaccttgccttccactctcattcccacttcattctctgctcttcaaccagaagatagggtggcctgctgagcc

SEQ ID NO: 161118 - DNA, 120 bp, Artificial Sequence
  ENSG00000107282_81 (sequence is synthesized)
ctacctgaaccacagagactgcttcatgtccatccacccagagtgtggtgtttgtgtctccattcttcctgtatttgtgaagctaatgcaattagattagattacaaatggtgtataggt

SEQ ID NO: 161119 - DNA, 120 bp, Artificial Sequence
  ENSG00000107282_82 (sequence is synthesized)
atcttgtggtccatgcattttggcaagctgcattcattatcaaatattcatatattcatcttaactagcctgtcccaaagatcagatttttttcattcttttatgattttctcaaaatta

SEQ ID NO: 161120 - DNA, 120 bp, Artificial Sequence
  ENSG00000107282_83 (sequence is synthesized)
tgatttcattgtagaagtaaaatgtctatcattatagctttgcctaagttgtagcatttcccagcttagttgaagaaatctatgatcagtaaagtattaggcccttcacatgcattatct

SEQ ID NO: 161121 - DNA, 120 bp, Artificial Sequence
  ENSG00000107282_84 (sequence is synthesized)
caatctcatttactcctcaaaatggatggggtagagaacattgtgaggtaggtgttgttaaccccatggtatagacaaatggagaagtttacagatgacatgcttgccccagttgcacaa

SEQ ID NO: 161122 - DNA, 120 bp, Artificial Sequence
  ENSG00000107282_85 (sequence is synthesized)
ctaggggtttacaatggagtgagattgccagagtttgaatctctattctgccacttcacagctgtgtgacctggggcaagttaattagcctctctgtgccacatttccctcttctgaaaa

SEQ ID NO: 161123 - DNA, 120 bp, Artificial Sequence
  ENSG00000107282_86 (sequence is synthesized)
atgaggataacataatataggcagaaatgacaacatctacttaaacctcgtgtttcatgggattgatcatggcttaccatctagcagggtagtagctcacaggggtgttgtaagctttta

SEQ ID NO: 161124 - DNA, 120 bp, Artificial Sequence
  ENSG00000107282_87 (sequence is synthesized)
cactgatttatgtgaaatactttgaaggattctggcacatagcaagttctcagtaaatgtcagtggggagagaaaagatagaacagtcaggagcatccctggcacgactaatctagagtg

SEQ ID NO: 161125 - DNA, 120 bp, Artificial Sequence
  ENSG00000107282_88 (sequence is synthesized)
tgttaacagcggcagaaactcagtacacattgtggatggagtaagggggtggggggtgctgcagtttgtcctttgcactacaccccgccacgtggtaaaccatgatcaatcccatgaaac

SEQ ID NO: 161126 - DNA, 120 bp, Artificial Sequence
  ENSG00000107282_89 (sequence is synthesized)
acgagggtttaaatagatgttgtcattcctggctttaaaatgcatgctggccttatgtttctcttggacccctttctgctaccctaatttctcattctggctccaactctcccatcttct

SEQ ID NO: 161127 - DNA, 120 bp, Artificial Sequence
  ENSG00000107282_90 (sequence is synthesized)
gtgatgttatatttaaattttaaattataatttgttgcagggtacttggatatcatgagtgatttaaagatggtattactctaaatccacagaatatttttaacttcataaaaactgttt

SEQ ID NO: 161128 - DNA, 77 bp, Artificial Sequence
  ENSG00000107282_91 (sequence is synthesized)
gcaccactgcactctttcagaatacctttcatgaaactcagtttgccttttggatcctcttcctcaacaccagtccc

SEQ ID NO: 161129 - DNA, 120 bp, Artificial Sequence
  ENSG00000107290_0 (sequence is synthesized)
acttccgctggtggcctagagcggggcccggtatggaggtgggctagaggccgacgccagccagagagcgaaatgttcttttggggccagagtctgggcatatatgaatgcaaatccgtg

SEQ ID NO: 161130 - DNA, 120 bp, Artificial Sequence
  ENSG00000107290_1 (sequence is synthesized)
tttgttcacaactaagcccagctgagacgatcacttttctgtaggccatttgtccaggtacagaatgagcacatgttgttggtgtacgccaggtggtgcttccaccattgacttcctaaa

SEQ ID NO: 161131 - DNA, 120 bp, Artificial Sequence
  ENSG00000107290_2 (sequence is synthesized)
gcgctatgcttccaacactccgtccggtgaatttcaaacagccgacgaagacctctgctactgcttggagtgtgtggctgagtaccacaaagcaagagatgaattgccattcttgcatga

SEQ ID NO: 161132 - DNA, 120 bp, Artificial Sequence
  ENSG00000107290_3 (sequence is synthesized)
ggttttatgggaattagaaaccttacgtctcataaatcactttgaaaaatccatgaaggcagaaattggagatgatgatgagttatatatagtagacaataatggagagatgccactgtt

SEQ ID NO: 161133 - DNA, 120 bp, Artificial Sequence
  ENSG00000107290_4 (sequence is synthesized)
tgacatcactgggcaagactttgaaaataagcttcgagttcctcttcttgaaatactgaaatatccttacttgcttctacatgaacgtgttaacgagttatgtgttgaagcactttgtcg

SEQ ID NO: 161134 - DNA, 120 bp, Artificial Sequence
  ENSG00000107290_5 (sequence is synthesized)
gatggaacaagccaattgctcctttcaggtgtttgataaacatccagggatctatttgtttttagtccatcccaatgaaatggttcggcgttgggctatcttgactgcaagaaacttggg

SEQ ID NO: 161135 - DNA, 120 bp, Artificial Sequence
  ENSG00000107290_6 (sequence is synthesized)
gaaagtggacagagatgattattatgacttacaagaagttttactttgcctttttaaagtcattgagttggggcttttagagagtccagacatttatacttcttctgtcctagagaaggg

SEQ ID NO: 161136 - DNA, 120 bp, Artificial Sequence
  ENSG00000107290_7 (sequence is synthesized)
taaactgattcttctgccctcacacatgtatgatactaccaactacaaaagctattggttaggtatttgcatgttgctgaccattcttgaggaacaagccatggattccctgttgttggg

SEQ ID NO: 161137 - DNA, 120 bp, Artificial Sequence
  ENSG00000107290_8 (sequence is synthesized)
ctcagacaaacaaaatgattttatgcaatcgatacttcacactatggagagggaagcagatgatgatagtgtggatcctttctggccagcgttacactgttttatggtgattctggatcg

SEQ ID NO: 161138 - DNA, 120 bp, Artificial Sequence
  ENSG00000107290_9 (sequence is synthesized)
ccttggatctaaggtctggggtcaacttatggatcctattgtggcatttcaaaccattatcaacaacgcaagctacaatagagagatccgacatatacggaacagctctgtaaggaccaa

SEQ ID NO: 161139 - DNA, 120 bp, Artificial Sequence
  ENSG00000107290_10 (sequence is synthesized)
gttagaaccggagtcctatttggatgatatggtgacttgcagccagatcgtatacaattataatcctgaaaagaccaaaaaggattctggatggagaacagccatttgcccagattattg

SEQ ID NO: 161140 - DNA, 120 bp, Artificial Sequence
  ENSG00000107290_11 (sequence is synthesized)
tcctaacatgtatgaagaaatggaaacattagccagtgtacttcagtcagatattggtcaagacatgcgtgttcataacagcacatttctatggttcatcccttttgtccagtccctcat

SEQ ID NO: 161141 - DNA, 120 bp, Artificial Sequence
  ENSG00000107290_12 (sequence is synthesized)
ggatcttaaggatttgggtgtggcttacatagcacaggttgttaatcatctgtactctgaagtcaaagaagtcctcaaccaaacagatgctgtgtgtgacaaagtcactgaattttttct

SEQ ID NO: 161142 - DNA, 120 bp, Artificial Sequence
  ENSG00000107290_13 (sequence is synthesized)
tctaattttggtatcagtgattgaactgcatagaaataaaaaatgtttgcatttgctgtgggtaagttcccagcaatgggtggaagccgtcgtcaaatgtgccaagcttcctaccactgc

SEQ ID NO: 161143 - DNA, 120 bp, Artificial Sequence
  ENSG00000107290_14 (sequence is synthesized)
gtttacacggagttctgagaaatcatctggaaattgctccaaaggaacagcaatgatatcttcactgtcattgcattccatgccatctaactctgtacaacttgcttatgtgcagctgat

SEQ ID NO: 161144 - DNA, 120 bp, Artificial Sequence
  ENSG00000107290_15 (sequence is synthesized)
tagaagtctccttaaagaaggttatcagcttgggcagcagtctctttgcaagcgattctgggataagctcaacttattccttagaggaaatttatctctaggttggcagttgactagtca

SEQ ID NO: 161145 - DNA, 120 bp, Artificial Sequence
  ENSG00000107290_16 (sequence is synthesized)
ggaaacccatgagctacaaagttgcttaaagcaaattattagaaacataaaattcaaagcacctccatgtaacacttttgtggatctgacttctgcatgtaaaatctctcctgcatctta

SEQ ID NO: 161146 - DNA, 120 bp, Artificial Sequence
  ENSG00000107290_17 (sequence is synthesized)
taataaagaagaaagtgaacaaatggggaagacgtctagaaaagatatgcattgtttggaagcttccagcccaacattttctaaagaaccaatgaaagtgcaagacagtgtattgatcaa

SEQ ID NO: 161147 - DNA, 120 bp, Artificial Sequence
  ENSG00000107290_18 (sequence is synthesized)
agcagataacactatagaaggtgacaataatgagcaaaattatataaaggatgtgaaactagaggaccatctcttagctgggtcatgcttaaagcagagtagtaaaaacatttttactga

SEQ ID NO: 161148 - DNA, 120 bp, Artificial Sequence
  ENSG00000107290_19 (sequence is synthesized)
aagagctgaagatcaaattaaaataagtacaaggaagcagaagtctgtaaaagagatctcttcatatacaccaaaggactgtacttcaagaaatggtccagaaaggggatgtgacagagg

SEQ ID NO: 161149 - DNA, 120 bp, Artificial Sequence
  ENSG00000107290_20 (sequence is synthesized)
aataatagtatcaacacgtttgttgactgattctagcactgatgctttggaaaaagtgtccacatcgaatgaagatttctctttaaaggatgatgctcttgctaaaacctcaaaacgaaa

SEQ ID NO: 161150 - DNA, 120 bp, Artificial Sequence
  ENSG00000107290_21 (sequence is synthesized)
aactaaggtacagaaagatgaaatctgtgcaaagttatcacatgtaataaagaagcaacacaggaagagtactttggtcgataatactatcaatttagatgaaaatttgactgtatctaa

SEQ ID NO: 161151 - DNA, 120 bp, Artificial Sequence
  ENSG00000107290_22 (sequence is synthesized)
cattgagagtttctattcaaggaaagatacaggagttcagaaaggagatggtttcatacacaatctttctttagaccctagtggtgttctggatgataagaatggagaacaaaaatctca

SEQ ID NO: 161152 - DNA, 120 bp, Artificial Sequence
  ENSG00000107290_23 (sequence is synthesized)
aaacaatgtattgccaaaagagaaacaattaaagaatgaagaattagttattttctctttccatgaaaacaattgtaaaatacaggaatttcatgttgatggtaaagaattgatcccttt

SEQ ID NO: 161153 - DNA, 120 bp, Artificial Sequence
  ENSG00000107290_24 (sequence is synthesized)
tacagaaatgaccaatgcttcagagaagaaatcatctccctttaaagatcttatgactgtacctgaatcaagagatgaggagatgagtaatagtaccagtgtgatttattctaacttgac

SEQ ID NO: 161154 - DNA, 120 bp, Artificial Sequence
  ENSG00000107290_25 (sequence is synthesized)
aagagaacaggcccctgacatcagtcctaaatctgacaccttaacggattctcagatagacagagaccttcacaaattatctttactagctcaagccagtgttattacgttcccatccga

SEQ ID NO: 161155 - DNA, 120 bp, Artificial Sequence
  ENSG00000107290_26 (sequence is synthesized)
ttcacctcagaactcatcgcagctgcaaaggaaagtaaaagaagataaaagatgtttcacagctaaccaaaataatgttggagatacctcccgtggacaggttattattatttcagattc

SEQ ID NO: 161156 - DNA, 120 bp, Artificial Sequence
  ENSG00000107290_27 (sequence is synthesized)
tgatgatgatgatgatgaaagaatcctgagtcttgagaaactcactaaacaggacaaaatatgccttgagagggaacatccagagcagcacgtttcaacagttaatagtaaggaggaaaa

SEQ ID NO: 161157 - DNA, 120 bp, Artificial Sequence
  ENSG00000107290_28 (sequence is synthesized)
gaatccagtaaaggaagaaaagacagagactctttttcagtttgaggaatctgattctcagtgttttgagtttgaaagttcatctgaagtgttttcagtttggcaagatcatccagacga

SEQ ID NO: 161158 - DNA, 120 bp, Artificial Sequence
  ENSG00000107290_29 (sequence is synthesized)
taataattcagttcaagatggtgagaaaaaatgtttggctcctatagccaatactacaaatggtcagggttgtacagattatgtatctgaagttgttaaaaaaggagcagagggcattga

SEQ ID NO: 161159 - DNA, 120 bp, Artificial Sequence
  ENSG00000107290_30 (sequence is synthesized)
agaacacacaagaccacggagtatttctgttgaagaattttgtgaaattgaagtaaaaaagcctaagagaaaacgatctgaaaaaccaatggctgaagatcctgtgaggccttcatcttc

SEQ ID NO: 161160 - DNA, 120 bp, Artificial Sequence
  ENSG00000107290_31 (sequence is synthesized)
tgtcagaaatgagggccagtctgatactaataagagagatcttgtgggaaatgattttaaaagtattgatagaaggacttcaactcccaattcacgtattcagagagccactacggtttc

SEQ ID NO: 161161 - DNA, 120 bp, Artificial Sequence
  ENSG00000107290_32 (sequence is synthesized)
acaaaagaagtcttcaaagctttgtacttgtacagaacccatcaggaaagttccagtttctaagacccctaagaaaactcattcagatgccaaaaaaggacagaatagaagttcaaatta

SEQ ID NO: 161162 - DNA, 120 bp, Artificial Sequence
  ENSG00000107290_33 (sequence is synthesized)
cctaagttgtagaacaactcctgctatagtgccgccaaagaaatttcgtcagtgtcctgagccaacttcaacagctgagaaacttggcctgaaaaagggtcctcgtaaggcatatgagtt

SEQ ID NO: 161163 - DNA, 120 bp, Artificial Sequence
  ENSG00000107290_34 (sequence is synthesized)
gtcccagcggtctttggattatgtagctcaattacgtgatcatggcaaaactgttggagtagttgatacccgaaaaaagactaaattaatttctcctcagaacctgtctgtcagaaataa

SEQ ID NO: 161164 - DNA, 120 bp, Artificial Sequence
  ENSG00000107290_35 (sequence is synthesized)
taagaaacttctgactagtcaagaacttcagatgcaaaggcagatcagacccaaatcacaaaaaaatagacgaagactttctgattgtgaaagtacagatgttaaaagagcagggtcaca

SEQ ID NO: 161165 - DNA, 120 bp, Artificial Sequence
  ENSG00000107290_36 (sequence is synthesized)
tacagcacagaattctgacatatttgtaccagaatctgataggtcagattataattgtacaggaggaactgaggtacttgccaacagtaacagaaaacagttaataaaatgcatgccttc

SEQ ID NO: 161166 - DNA, 120 bp, Artificial Sequence
  ENSG00000107290_37 (sequence is synthesized)
tgaaccagaaaccataaaagcaaaacatgggtctccagcaactgatgatgcttgccctttgaaccagtgtgattctgtagtgttaaatggaacagtaccaacaaatgaagtaattgtctc

SEQ ID NO: 161167 - DNA, 120 bp, Artificial Sequence
  ENSG00000107290_38 (sequence is synthesized)
cacttcagaagaccctctgggtggaggtgatccaacagcacgtcatatagagatggcagctttgaaagaaggagagcctgactccagcagtgatgcagaggaagataacttatttttaac

SEQ ID NO: 161168 - DNA, 120 bp, Artificial Sequence
  ENSG00000107290_39 (sequence is synthesized)
ccaaaatgatcctgaagatatggatttatgttcacaaatggagaatgacaattataaactcattgaactaattcatggaaaagatacagttgaggttgaagaagattctgtaagtcggcc

SEQ ID NO: 161169 - DNA, 120 bp, Artificial Sequence
  ENSG00000107290_40 (sequence is synthesized)
tcagttggaatctttgagtggcacaaagtgtaagtacaaagattgtcttgaaaccacaaaaaaccagggtgaatactgcccaaaacactctgaagtgaaagcagcagatgaagatgtatt

SEQ ID NO: 161170 - DNA, 120 bp, Artificial Sequence
  ENSG00000107290_41 (sequence is synthesized)
tcgtaaacctggcttgcctcctcctgcatctaaacctttgagacctaccactaagatttttagctcaaagagtacttcacgaattgctggtctttctaaatctttggaaacttcttcagc

SEQ ID NO: 161171 - DNA, 120 bp, Artificial Sequence
  ENSG00000107290_42 (sequence is synthesized)
actttcaccgtctctaaaaaataagtcaaaggggatacagtcgattttgaaagtaccacagccagttcccctcatagctcagaagccagttggtgaaatgaagaattcgtgcaatgttct

SEQ ID NO: 161172 - DNA, 120 bp, Artificial Sequence
  ENSG00000107290_43 (sequence is synthesized)
tcatcctcagtctccgaataattccaacaggcaaggttgcaaagttccatttggtgaaagcaaatattttccatcttcctctccagtaaacattcttttgtcatcacagtctgtctctga

SEQ ID NO: 161173 - DNA, 120 bp, Artificial Sequence
  ENSG00000107290_44 (sequence is synthesized)
caccttcgttaaagaggtcttaaaatggaaatatgaaatgtttttgaactttggtcagtgtgggccccctgcaagtctttgtcagtccatctcaagacctgtgcctgtcagatttcacaa

SEQ ID NO: 161174 - DNA, 120 bp, Artificial Sequence
  ENSG00000107290_45 (sequence is synthesized)
ttatggagattattttaatgtttttttccctttgatggtattgaatacttttgaaacagtggcacaagaatggctcaactctccaaatagagagaatttctatcagttgcaagtacgaaa

SEQ ID NO: 161175 - DNA, 120 bp, Artificial Sequence
  ENSG00000107290_46 (sequence is synthesized)
gctaaacagctttatccaaaggaaaacgatttggtgtttttagctcctgagagaataaatgaagagaagaaagatacagagagaaatgacatacaagatctccacgaatatcattctggt

SEQ ID NO: 161176 - DNA, 120 bp, Artificial Sequence
  ENSG00000107290_47 (sequence is synthesized)
tatgttcataaatttcgccgcacgtcagtcatgcgtaatgggaaaactgagtgttacctttccatccagactcaagagaactttccggccaatttaaacgaacttgtgaattgtattgta

SEQ ID NO: 161177 - DNA, 120 bp, Artificial Sequence
  ENSG00000107290_48 (sequence is synthesized)
atcagttctctggtaactacacaaaggaagttgaaagccatgtctctgttgggtagtcggaaccaactggctagagctgttctgaatccaaaccctatggacttctgtacaaaagattta

SEQ ID NO: 161178 - DNA, 120 bp, Artificial Sequence
  ENSG00000107290_49 (sequence is synthesized)
ctgactacaacatctgagagaattattgcgtacttaagagatttcaatgaagatcaaaagaaagcaatagaaactgcatatgctatggtgaaacactcaccatcagttgccaaaatctgc

SEQ ID NO: 161179 - DNA, 120 bp, Artificial Sequence
  ENSG00000107290_50 (sequence is synthesized)
ttgattcatggaccacctggaacaggaaaatcaaaaactattgttggcctcctctatcgtctactgacagagaaccagaggaaggggcattcagacgaaaactccaatgccaaaatcaaa

SEQ ID NO: 161180 - DNA, 120 bp, Artificial Sequence
  ENSG00000107290_51 (sequence is synthesized)
caaaaccgtgtcctcgtgtgtgcaccttccaatgcagctgttgatgaactcatgaaaaaaattatccttgaattcaaagaaaaatgtaaagacaagaagaatcctttaggaaactgtgga

SEQ ID NO: 161181 - DNA, 120 bp, Artificial Sequence
  ENSG00000107290_52 (sequence is synthesized)
gatataaatttagtacgactgggtccagaaaagtctattaatagtgaggttctaaagttcagtttggacagccaagtaaaccacagaatgaaaaaagagttaccttctcatgttcaggcg

SEQ ID NO: 161182 - DNA, 120 bp, Artificial Sequence
  ENSG00000107290_53 (sequence is synthesized)
atgcataaaagaaaggaatttctagattatcagctggatgagctttcccggcagcgagctctatgccgaggtggacgggaaatacagaggcaagaattagatgaaaacatttccaaagtt

SEQ ID NO: 161183 - DNA, 120 bp, Artificial Sequence
  ENSG00000107290_54 (sequence is synthesized)
tctaaggaaaggcaggaacttgcttctaaaattaaagaggttcaaggacgcccacagaaaacacagagtatcatcatcttagagtcccatatcatctgctgcacgttgagcacaagtggt

SEQ ID NO: 161184 - DNA, 120 bp, Artificial Sequence
  ENSG00000107290_55 (sequence is synthesized)
ggtttactacttgagtctgctttccgtgggcaagggggtgtccccttcagctgtgtcattgttgatgaggctggacagtcttgtgaaattgagactcttactccactcatccatcgctgc

SEQ ID NO: 161185 - DNA, 120 bp, Artificial Sequence
  ENSG00000107290_56 (sequence is synthesized)
aataagctcatcctagtaggagatcctaagcagctccctccgacagtcatctctatgaaagcacaggagtatggctacgaccagtcaatgatggctcgcttctgcagactgctggaagag

SEQ ID NO: 161186 - DNA, 120 bp, Artificial Sequence
  ENSG00000107290_57 (sequence is synthesized)
aatgtagaacacaacatgatcagcaggctgcccattctacagctcactgttcagtacaggatgcatccagacatatgcctcttcccttctaattatgtttataacagaaacttaaaaaca

SEQ ID NO: 161187 - DNA, 120 bp, Artificial Sequence
  ENSG00000107290_58 (sequence is synthesized)
aatagacagacagaagccattcgatgttcatcagattggccatttcagccataccttgtgtttgatgttggagatggttcagaaagacgggataatgactcatatataaatgttcaagaa

SEQ ID NO: 161188 - DNA, 120 bp, Artificial Sequence
  ENSG00000107290_59 (sequence is synthesized)
ataaaactggtgatggaaataattaagcttattaaagacaaaagaaaggatgttagttttcgaaacattggcataataactcattacaaggcccagaagacgatgattcagaaggatttg

SEQ ID NO: 161189 - DNA, 120 bp, Artificial Sequence
  ENSG00000107290_60 (sequence is synthesized)
gacaaagagttcgatagaaaaggaccagcagaagtagacactgtggatgcattccagggtcggcagaaggattgtgttattgttacgtgtgtcagagcaaatagcatccaaggttcaatt

SEQ ID NO: 161190 - DNA, 120 bp, Artificial Sequence
  ENSG00000107290_61 (sequence is synthesized)
ggattcctggcaagtttgcagagattgaatgtcaccatcacacgagccaagtacagcctcttcatcctcggacatttgaggaccctgatggaaaaccagcattggaatcagctgattcag

SEQ ID NO: 161191 - DNA, 120 bp, Artificial Sequence
  ENSG00000107290_62 (sequence is synthesized)
gatgctcagaagcgtggtgccattattaagacctgtgacaaaaactatagacatgatgcagtgaagattctgaaactcaagcctgtgctgcagagaagtctcactcaccctcctaccata

SEQ ID NO: 161192 - DNA, 120 bp, Artificial Sequence
  ENSG00000107290_63 (sequence is synthesized)
gccccagaggggtccagaccccagggtggtttgcccagcagcaagctagacagtggatttgccaagacatctgttgctgcttctctataccacacaccctctgactccaaggaaattact

SEQ ID NO: 161193 - DNA, 120 bp, Artificial Sequence
  ENSG00000107290_64 (sequence is synthesized)
cttactgttacttcaaaggaccctgaaagacctcctgttcatgaccaacttcaggacccacgactgctgaagaggatgggcattgaggtcaaaggaggaatattcctttgggatccacaa

SEQ ID NO: 161194 - DNA, 120 bp, Artificial Sequence
  ENSG00000107290_65 (sequence is synthesized)
ccctcgagcccccagcatcctggagcaacacctcctacgggcgagccgggcttccctgtcgttcaccaggacctgagccatatacagcagcccgctgctgtagtggctgctctgagcagc

SEQ ID NO: 161195 - DNA, 120 bp, Artificial Sequence
  ENSG00000107290_66 (sequence is synthesized)
cacaaacctcccgtgcggggcgaacctccagctgccagtcccgaggcttccacgtgtcagagcaaatgtgatgacccggaagaggagctctgtcacaggagagaggccagggctttcagt

SEQ ID NO: 161196 - DNA, 120 bp, Artificial Sequence
  ENSG00000107290_67 (sequence is synthesized)
gaaggggagcaggagaagtgtggttccgagacccatcacaccaggaggaactctaggtgggacaagaggacactggagcaggaggacagcagttccaagaaaagaaagcttttataggaa

SEQ ID NO: 161197 - DNA, 120 bp, Artificial Sequence
  ENSG00000107290_68 (sequence is synthesized)
agcccagtgacatgggccagcagccacagcatattgtaaactgaagatgaccagctcgtgggaccatctagataagcttgttttttgtaaggagtttgtgtgctgttggaaaacatggaa

SEQ ID NO: 161198 - DNA, 120 bp, Artificial Sequence
  ENSG00000107290_69 (sequence is synthesized)
aatgcatccttaacacctgagcctctggtcatcttcagtattttctgtcatttgcaaaagctttcagagggcattgtgtatccgtaataatgtccttgaagtcagagactggaaatgttg

SEQ ID NO: 161199 - DNA, 120 bp, Artificial Sequence
  ENSG00000107290_70 (sequence is synthesized)
atctcttagtcttctatagacaaggaggtcagactggagtgaatgttgtaaaagttgaaatgtatatttgtatagcaaataacaaaatccttttaaaatttaatctagtagaccgctttt

SEQ ID NO: 161200 - DNA, 120 bp, Artificial Sequence
  ENSG00000107290_71 (sequence is synthesized)
ctttccccctgtttaaaatgttaatcagttttcaacagaacaaactttatattaccaaaaaaaaaaagatgggaggagggcgggtcctttcaaccattgttagagcaagacagataatta

SEQ ID NO: 161201 - DNA, 120 bp, Artificial Sequence
  ENSG00000107290_72 (sequence is synthesized)
tttaacagcctagcttggaataagctgagttagtgctggtgggtcaggtgtctctggctctattaaaaaaagcaaaaacccccccaaaaacctggagtctcctaggggacactttgggca

SEQ ID NO: 161202 - DNA, 120 bp, Artificial Sequence
  ENSG00000107290_73 (sequence is synthesized)
gcacggttatgttaggtaaagtcttgctgacatggtgcatttttagatagagtgcattggcccagggtattatatttctgtgatgagttcatttacctgtttcagtatgcacatagttcc

SEQ ID NO: 161203 - DNA, 120 bp, Artificial Sequence
  ENSG00000107290_74 (sequence is synthesized)
ctagctaaaattcctaatcttcttgagagagaagaatatggagtgaaagaataattcttgagctatcattcaaatgctcccagcatattgtgagccttgtgtgactggtgaggtacagac

SEQ ID NO: 161204 - DNA, 120 bp, Artificial Sequence
  ENSG00000107290_75 (sequence is synthesized)
atttggttgccaaatgctagattagcgctgggtcagctgtggaagaatcgcctcagcttacagattgtcagacagatctaactagttttccagaaagcctgggaagctgtgtgttcaaca

SEQ ID NO: 161205 - DNA, 120 bp, Artificial Sequence
  ENSG00000107290_76 (sequence is synthesized)
tttcccaagggattctgatcaccaggcagcttgggaaccactggggcaggccaaatagaatattttgggcgggaaagaagcacccgatttaaaatgaagcgtaaccagaggagttcagaa

SEQ ID NO: 161206 - DNA, 120 bp, Artificial Sequence
  ENSG00000107290_77 (sequence is synthesized)
ctgggaagagagtggtagacttcctgtgatcttcagaaatcatctacctggtaaaaatacatgctgtttagaatatctgataggtgtttccagctactattagaggtgatagtgcttttg

SEQ ID NO: 161207 - DNA, 120 bp, Artificial Sequence
  ENSG00000107290_78 (sequence is synthesized)
tgggggaaaaaattggtcatggtgaatggagatcgaggaagctcgggacaagggaggggtgggctgcctgattttgtccagttttccaaatatccacgcagtgaactggagtatcctaaa

SEQ ID NO: 161208 - DNA, 120 bp, Artificial Sequence
  ENSG00000107290_79 (sequence is synthesized)
catgagaatgtacagttgacagttgtaaaaactagggatctgtagtgaatgctgtgcagccccatatctcatttgggggtaggaaaatagctgaagattcatgtgcattatttgacattt

SEQ ID NO: 161209 - DNA, 120 bp, Artificial Sequence
  ENSG00000107290_80 (sequence is synthesized)
cctttgtcatctgctttttaagcaaaaaagggttttgtgttagaaattctacttgagcagattataaagagctttaaaaaacaactttcggttgccaaaagtttgagcatttgatttcat

SEQ ID NO: 161210 - DNA, 120 bp, Artificial Sequence
  ENSG00000107290_81 (sequence is synthesized)
tacctgtgtctccctcactggtgtccagacggtcaactgaatactcctgaaacccagggagcaggtgacttcctggagtgctttgtccccagagtcagccactgcttcctctgtgggggt

SEQ ID NO: 161211 - DNA, 120 bp, Artificial Sequence
  ENSG00000107290_82 (sequence is synthesized)
ggagagtttgtctttggccatgcagtgtgcgacagttcaggacgggtagggatgggtcccattctgtctgggtcaagggctctatcagcttcttccatgtgcctttgggaagaaatctcg

SEQ ID NO: 161212 - DNA, 120 bp, Artificial Sequence
  ENSG00000107290_83 (sequence is synthesized)
ttactttaagtttgctttcctgttatcttgatgaagtgcccattttagcagacacttgtagtgctgaccacttagggaatgtacaaactcctaagcttctaaagggaggcatggcaaaaa

SEQ ID NO: 161213 - DNA, 120 bp, Artificial Sequence
  ENSG00000107290_84 (sequence is synthesized)
cgttggggtcaggatgtctctcacgctgctcatgttaatactattaacacatgatttgagaaataagttttctctaaaatgcatattttgccgccacacactgaacaatattatttccag

SEQ ID NO: 161214 - DNA, 120 bp, Artificial Sequence
  ENSG00000107290_85 (sequence is synthesized)
tgaagtttgatgcctgttcttacgttgtgttcacctgttggttcaccactcagcagatctgattctgcaagaattaatggtagaactagatcatcctttctaacagacgagcctgtgtcc

SEQ ID NO: 161215 - DNA, 120 bp, Artificial Sequence
  ENSG00000107290_86 (sequence is synthesized)
tgtgacggcctttcacagcggaatgcagttgtacctcacattacttttgaaacttcactcgttccagttggtacaagtatttgccaaagccatttcctatgttcaccgtggcccctcctg

SEQ ID NO: 161216 - DNA, 120 bp, Artificial Sequence
  ENSG00000107290_87 (sequence is synthesized)
atgtggctgtcagcgcagcgttgttgaacagggctattctttttacaaggtgtgaagtgtggctcttcgcttcgtctttgccatggcattaaaagaaagttccctgtcttctttcaatat

SEQ ID NO: 161217 - DNA, 120 bp, Artificial Sequence
  ENSG00000107290_88 (sequence is synthesized)
tagttatttcaaatgaatatgtgctacttaaaagcttgttttgtttctttgtatataatttgccttggatttattgtgcacagtttgttgagttgtatgtttttgtgaattatcaggagt

SEQ ID NO: 161218 - DNA, 120 bp, Artificial Sequence
  ENSG00000107290_89 (sequence is synthesized)
aaatttgacaagtacatgtgaataacctcctgtaaatgaattttataacaaaaatgtactgaactattttttaaagttgtgcagattagcaattttttgctatagctttgacttttctat

SEQ ID NO: 161219 - DNA, 120 bp, Artificial Sequence
  ENSG00000107290_90 (sequence is synthesized)
gctgtgaattaatagctgcgatttggcaaacagccctgttgtctttgttaaaccctaaattttaagaggaaatggcagaattaaaagcagaaacaagaagatggacatggattagaggtt

SEQ ID NO: 161220 - DNA, 120 bp, Artificial Sequence
  ENSG00000107290_91 (sequence is synthesized)
atgtattatgaagtaaactacaaggtactaacatcatttcgtctgccatttggtttgctttatgctgaaattacttggtggggatttgtgcaattcagatataaaaagtttcattatcca

SEQ ID NO: 161221 - DNA, 120 bp, Artificial Sequence
  ENSG00000107290_92 (sequence is synthesized)
gtctgtgcaaattggtgatacggcacgaggaagctgggatgctgctggctttcatagacttgtgctgtgtggctcctgggtagacaggttacttcctggcagttggaatgtcaacattct

SEQ ID NO: 161222 - DNA, 120 bp, Artificial Sequence
  ENSG00000107290_93 (sequence is synthesized)
ccttggcagtggaattgactaagaaacttgccaggtctttaccttttagttccatgacttgttcatctgaattcttgttctagcaagactaaaagtaacatttcactttaaataaatgat

SEQ ID NO: 161223 - DNA, 120 bp, Artificial Sequence
  ENSG00000107290_94 (sequence is synthesized)
attcccttatgtagaaatatactccttaatgaccctccatagtgaaagtggattttccagtattgggggttagtcttgaggatgactgatggtttctaacaaaatctctgctgagtgact

SEQ ID NO: 161224 - DNA, 120 bp, Artificial Sequence
  ENSG00000107290_95 (sequence is synthesized)
gtctcactcctgcttagaatatctctggtaaccttttgaagtagttttaatataattttggatagctttgagccacagtatgttcacctgatgtcttttattcctagttcactctttgag

SEQ ID NO: 161225 - DNA, 120 bp, Artificial Sequence
  ENSG00000107290_96 (sequence is synthesized)
caaacatttattgggtacgtactgtttgtcagaacgtagagtcagaagacaaaagagatggagcaggagataccagagaattgagtgatcaggagacccaagatccagttttcaccagaa

SEQ ID NO: 161226 - DNA, 120 bp, Artificial Sequence
  ENSG00000107295_0 (sequence is synthesized)
gtcagagtgtttctccgcaagagcccgtgtcccgctaggctccgcgccctcgcgcccatagccccggcggcggcacgaccagaggcggccaggggagcgcgccgccccgctcggccctcc

SEQ ID NO: 161227 - DNA, 120 bp, Artificial Sequence
  ENSG00000107295_1 (sequence is synthesized)
agtccccctccgcctcctccctcccgcacagcagccgccagcgcggcctcctgcaccatgtcggtggccggcctcaagaagcagttccataaagccactcagaaagtgagtgagaaggtt

SEQ ID NO: 161228 - DNA, 120 bp, Artificial Sequence
  ENSG00000107295_2 (sequence is synthesized)
ggaggagctgaaggaaccaagctagatgatgacttcaaagagatggaaaggaaagtggatgtcaccagcagggctgtgatggaaataatgactaaaacaattgaataccttcaacccaat

SEQ ID NO: 161229 - DNA, 120 bp, Artificial Sequence
  ENSG00000107295_3 (sequence is synthesized)
ccagcttccagagctaagctcagcatgatcaacaccatgtcaaaaatccgtggccaggagaaggggccaggctatcctcaggcagaggcgctgctggcagaggccatgctcaaatttgga

SEQ ID NO: 161230 - DNA, 120 bp, Artificial Sequence
  ENSG00000107295_4 (sequence is synthesized)
agagagcttggagatgattgcaactttggcccagcacttggtgaggtcggggaggccatgcgggaactgtcggaggtcaaagactctttggacatagaagtgaagcagaacttcattgac

SEQ ID NO: 161231 - DNA, 120 bp, Artificial Sequence
  ENSG00000107295_5 (sequence is synthesized)
cctcttcagaatcttcatgacaaagatcttagggaaattcaacatcatctaaagaagttggagggtcgacgcctggattttgattataagaagaaacgacaaggcaagattccggatgaa

SEQ ID NO: 161232 - DNA, 120 bp, Artificial Sequence
  ENSG00000107295_6 (sequence is synthesized)
gagcttcgtcaagctctagagaaatttgatgagtctaaggaaattgctgagtcaagcatgttcaatctcttggagatggatattgaacaagtgagccagctctctgcacttgtgcaagct

SEQ ID NO: 161233 - DNA, 120 bp, Artificial Sequence
  ENSG00000107295_7 (sequence is synthesized)
cagctggagtaccacaagcaggcagtccagatcctgcagcaagtcacggtcagactggaagaaagaataagacaggcttcatctcagcctagaagggaatatcaacctaaaccacgaatg

SEQ ID NO: 161234 - DNA, 120 bp, Artificial Sequence
  ENSG00000107295_8 (sequence is synthesized)
agcctggagtttccaactggagacagtactcagcccaatgggggtctctcccacacaggcactcccaaaccttcaggtgtccaaatggatcagccctgctgccgagctctgtacgacttt

SEQ ID NO: 161235 - DNA, 120 bp, Artificial Sequence
  ENSG00000107295_9 (sequence is synthesized)
gaacctgaaaatgaaggggagttgggatttaaagagggcgatatcatcacactcactaaccaaattgatgagaactggtatgaggggatgctgcatggccattcaggcttcttccccatc

SEQ ID NO: 161236 - DNA, 120 bp, Artificial Sequence
  ENSG00000107295_10 (sequence is synthesized)
ggcaatgctgcttataacacatcccaagtgcaggccgcagtggtccacgtcatccagccccaccaagtgactttggttgacttgtgggctcccacaggagtcatggtgatggatgatatc

SEQ ID NO: 161237 - DNA, 120 bp, Artificial Sequence
  ENSG00000107295_11 (sequence is synthesized)
ctcttagcctggtgggcgtggcatgtgctttttaaaacatcatctgagaccagccagtagtcacagaactgctgtttacacagttctcaggaggctgtggtttcttagaatatgaccatg

SEQ ID NO: 161238 - DNA, 120 bp, Artificial Sequence
  ENSG00000107295_12 (sequence is synthesized)
agccatttcacagaaaaaccatcccaccgaagatattgtctatcaccccaggggccatctgaaggtctctttgcatttctccatgcaaagaggagaaagcttttgctttcacactgtccc

SEQ ID NO: 161239 - DNA, 120 bp, Artificial Sequence
  ENSG00000107295_13 (sequence is synthesized)
ttcccaaatatgtgagtcatggaattgtcaaagtaagccttccctcaccagcaaattgtctcctgatctgaatgaatttgtctcttaatgcatccatagaaaagtgttaattgtgggttc

SEQ ID NO: 161240 - DNA, 120 bp, Artificial Sequence
  ENSG00000107295_14 (sequence is synthesized)
aaagcattctctgcaaataggcatctcagctcctcacacttatggctatttctgacgtatagccagttttcttccctccttgctattaaagccagagcggtaattccaaattatttttca

SEQ ID NO: 161241 - DNA, 120 bp, Artificial Sequence
  ENSG00000107295_15 (sequence is synthesized)
gtaagacagttaatcagcattattgtgagagggactgaaaagaaattctccattatgaggaattgggaagaaatctggtatccaagcttaaatttcttgctatacagaaactatgtatgt

SEQ ID NO: 161242 - DNA, 120 bp, Artificial Sequence
  ENSG00000107295_16 (sequence is synthesized)
atttaggctatttctgaagggcacagggaagggggaacaaatatcttcacttcagttttatttgtgaattacatgtttcatgaatccatttggcacagagacacaaggaagaaaacacta

SEQ ID NO: 161243 - DNA, 120 bp, Artificial Sequence
  ENSG00000107295_17 (sequence is synthesized)
gtaaccatctttccactagttcatatactgagaaacagtaaatacctttcctttccacttttaccctgtgttctttgaacatcatttgtgcagattctgccctcaatgaggaccaaataa

SEQ ID NO: 161244 - DNA, 120 bp, Artificial Sequence
  ENSG00000107295_18 (sequence is synthesized)
agatgatttttgtgcttagcagtttaaggtatatggctgcatatgcaaaactctttcccaattcagtcgctacttttacttctgccctttctatccatcgtcttcattttgtgtgtacag

SEQ ID NO: 161245 - DNA, 120 bp, Artificial Sequence
  ENSG00000107295_19 (sequence is synthesized)
tgctgtgtgtaagcttatcagtgtgtttttttatttgtatcagtcatgaaagtcctgttaggtatgcagagttctatttatctagctgtacagactctttcagaggtttaacgtgctgct

SEQ ID NO: 161246 - DNA, 120 bp, Artificial Sequence
  ENSG00000107295_20 (sequence is synthesized)
tccgatgtgccacctgcagtagtggatcatgtggagtgaaaggcaaatcttactgcttaatgtataaactctcaccacaggaagcatcgctgtttccaataaatattgctgaagacagaa

SEQ ID NO: 161247 - DNA, 120 bp, Artificial Sequence
  ENSG00000107317_0 (sequence is synthesized)
gctcctcctgcacacctccctcgctctcccacaccactggcaccaggccccggacacccgctctgctgcaggagaatggctactcatcacacactgtggatgggactggccctgctgggg

SEQ ID NO: 161248 - DNA, 120 bp, Artificial Sequence
  ENSG00000107317_1 (sequence is synthesized)
gtgctgggcgacctgcaggcagcaccggaggcccaggtctccgtgcagcccaacttccagcaggacaagttcctggggcgctggttcagcgcgggcctcgcctccaactcgagctggctc

SEQ ID NO: 161249 - DNA, 120 bp, Artificial Sequence
  ENSG00000107317_2 (sequence is synthesized)
cgggagaagaaggcggcgttgtccatgtgcaagtctgtggtggcccctgccacggatggtggcctcaacctgacctccaccttcctcaggaaaaaccagtgtgagacccgaaccatgctg

SEQ ID NO: 161250 - DNA, 120 bp, Artificial Sequence
  ENSG00000107317_3 (sequence is synthesized)
ccagtacgcgctgctgtacagccagggcagcaagggccctggcgaggacttccgcatggccaccctctacagccgaacccagacccccagggctgagttaaaggagaaattcaccgcctt

SEQ ID NO: 161251 - DNA, 120 bp, Artificial Sequence
  ENSG00000107317_4 (sequence is synthesized)
ctgcaaggcccagggcttcacagaggataccattgtcttcctgccccaaaccgataagtgcatgacggaacaataggactccccagggctgaagctgggatcccggccagccaggtgacc

SEQ ID NO: 161252 - DNA, 120 bp, Artificial Sequence
  ENSG00000107317_5 (sequence is synthesized)
cccacgctctggatgtctctgctctgttccttccccgagcccctgccccggctccccgccaaagcaaccctgcccactcaggcttcatcctgcacaataaactccggaagcaagtcagta

SEQ ID NO: 161253 - DNA, 120 bp, Artificial Sequence
  ENSG00000107317_6 (sequence is synthesized)
aggacttccgcatggccaccctctacagtacgtgccccgtggacgccgcccacacgcaggcctgaccagagggggctccccaagacccagggcagggcacacagcatcccccccgctgag

SEQ ID NO: 161254 - DNA, 89 bp, Artificial Sequence
  ENSG00000107317_7 (sequence is synthesized)
cttctgcaaggcccagggcttcacagaggataccattgtcttcctgccccaaaccgataagtgcatgacggaacaataggtgagccact

SEQ ID NO: 161255 - DNA, 120 bp, Artificial Sequence
  ENSG00000107317_8 (sequence is synthesized)
atggatcagggccccaggacagcctggtgctgcagacccatccttcccgatggctgcagtccagggccgggcgggagacactggggctgcccacattgatgggtgcacaggtgtgaggct

SEQ ID NO: 161256 - DNA, 120 bp, Artificial Sequence
  ENSG00000107317_9 (sequence is synthesized)
attgaggggcgggggtcagttcctggggcggggcgtgaggggcgtggctgctcgggggattgggcgtgggggcggggccgggttggagaccggaggagtagacggcagaggcgcccccgc

SEQ ID NO: 161257 - DNA, 120 bp, Artificial Sequence
  ENSG00000107317_10 (sequence is synthesized)
ggcacagagagtgtgcagggtggtccttgtccctgcccaagctgcaagaggctctgcgaaggtccctcctgcccctgtccaccttgcacagtcctagccgggggaggaggggagaaatct

SEQ ID NO: 161258 - DNA, 120 bp, Artificial Sequence
  ENSG00000107317_11 (sequence is synthesized)
ggcgtgccaggagctggcaactgcccagcccttcctggatgtgggactgaggagtccgtcctgaaccgaagcatgatcctgttagctcttccagctctccaggcgccaacgaccatatgg

SEQ ID NO: 161259 - DNA, 120 bp, Artificial Sequence
  ENSG00000107317_12 (sequence is synthesized)
ctcgctccccacccgggctcaccttcagaccagcggcagcgctcacccaccacgcctgccagggaagctcagtcccaacagaatccagagagggcccaccacatgtgcctgcctgtgacg

SEQ ID NO: 161260 - DNA, 120 bp, Artificial Sequence
  ENSG00000107317_13 (sequence is synthesized)
aggataccattgtcttcctgccccaaaccgtgcccagggagaggtgggaggtgatgggggatctgtgcagtttgggggctcagtcaagacgagctctgcgttacgggaggaacaggaagc

SEQ ID NO: 161261 - DNA, 120 bp, Artificial Sequence
  ENSG00000107317_14 (sequence is synthesized)
gcctccaccggccccctgggcccagcctgggggcgacacttgccgggacgactctgggccagccccctgccgcggagatccatggggtgggaggtgatggctgccccaccagcgtcagag

SEQ ID NO: 161262 - DNA, 120 bp, Artificial Sequence
  ENSG00000107317_15 (sequence is synthesized)
gcaaaggccaggcctgggcgtgactacccatgcacaagtgttagggacagagagacccttcctccagggggttggatcctctctggagcccaccattgtcttgtcaggccccttccctgc

SEQ ID NO: 161263 - DNA, 120 bp, Artificial Sequence
  ENSG00000107317_16 (sequence is synthesized)
cagccccacggggtgctcccgagtctggaccagactcggggtggggaggcccagactcggcggggggcagacttggggtggggggattgctgggggaagttggggcctctggcaagggat

SEQ ID NO: 161264 - DNA, 120 bp, Artificial Sequence
  ENSG00000107317_17 (sequence is synthesized)
agggcctgtgctcaagcccaaaggtgccccaggctgaaatgggcacccaggggtcactatcagagccccaacagctggccatgggggaagccatgcccagcaaacctggccctcgggacc

SEQ ID NO: 161265 - DNA, 120 bp, Artificial Sequence
  ENSG00000107317_18 (sequence is synthesized)
ccctccatatgcctcctcccaattctcctccccaggacccaggggtttcctcactcccacctggggaatggctcccacggggaaacctcttcacttccggttctggcagcgacttctgcg

SEQ ID NO: 161266 - DNA, 120 bp, Artificial Sequence
  ENSG00000107317_19 (sequence is synthesized)
gctgcaccaggaatcctggttttctgagcctggctcccccagattctggtttggggacagggttcacaggctgtgcaggcgagagcagggcactggctggagagcagccgggtgggggag

SEQ ID NO: 161267 - DNA, 120 bp, Artificial Sequence
  ENSG00000107331_0 (sequence is synthesized)
gctgcggggcccggcggggcgcgcagaggagcgggccgcggcgctgaggcggcggagcgtggccccgccatgggcttcctgcaccagctgcagctgctgctctggaagaacgtgacgctc

SEQ ID NO: 161268 - DNA, 120 bp, Artificial Sequence
  ENSG00000107331_1 (sequence is synthesized)
gctgctgctctggaagaacgtgacgctcaaacgccggagcccgtgggtcctggccttcgagatcttcatccccctggtgctgttctttatcctgctggggctgcgacagaagaagcccac

SEQ ID NO: 161269 - DNA, 120 bp, Artificial Sequence
  ENSG00000107331_2 (sequence is synthesized)
catctccgtgaaggaagtctccttctacacagcggcgcccctgacgtctgccggcatcctgcctgtcatgcaatcgctgtgcccggacggccagcgagacgagttcggcttcctgcagta

SEQ ID NO: 161270 - DNA, 120 bp, Artificial Sequence
  ENSG00000107331_3 (sequence is synthesized)
cgccaactccacggtcacgcagctgcttgagcgcctggaccgcgtggtggaggaaggcaacctgtttgacccagcgcggcccagcctgggctcagagctcgaggccctacgccagcatct

SEQ ID NO: 161271 - DNA, 120 bp, Artificial Sequence
  ENSG00000107331_4 (sequence is synthesized)
ggaggccctcagtgcgggcccgggcacctcggggagccacctggacagatccacagtgtcttccttctctctggactcggtggccagaaacccgcaggagctctggcgtttcctgacgca

SEQ ID NO: 161272 - DNA, 120 bp, Artificial Sequence
  ENSG00000107331_5 (sequence is synthesized)
aaacttgtcgctgcccaatagcacggcccaagcactcttggccgcccgtgtggacccgcccgaggtctaccacctgctctttggtccctcatctgccctggattcacagtctggcctcca

SEQ ID NO: 161273 - DNA, 120 bp, Artificial Sequence
  ENSG00000107331_6 (sequence is synthesized)
caagggtcaggagccctggagccgcctagggggcaatcccctgttccggatggaggagctgctgctggctcctgccctcctggagcagctcacctgcacgccgggctcgggggagctggg

SEQ ID NO: 161274 - DNA, 120 bp, Artificial Sequence
  ENSG00000107331_7 (sequence is synthesized)
ccggatcctcactgtgcctgagagtcagaagggagccctgcagggctaccgggatgctgtctgcagtgggcaggctgctgcgcgtgccaggcgcttctctgggctgtctgctgagctccg

SEQ ID NO: 161275 - DNA, 120 bp, Artificial Sequence
  ENSG00000107331_8 (sequence is synthesized)
gaaccagctggacgtggccaaggtctcccagcagctgggcctggatgcccccaacggctcggactcctcgccacaggcgccacccccacggaggctgcaggcgcttctgggggacctgct

SEQ ID NO: 161276 - DNA, 120 bp, Artificial Sequence
  ENSG00000107331_9 (sequence is synthesized)
ggatgcccagaaggttctgcaggatgtggatgtcctgtcggccctggccctgctactgccccagggtgcctgcactggccggacccccggacccccagccagtggtgcgggtggggcggc

SEQ ID NO: 161277 - DNA, 120 bp, Artificial Sequence
  ENSG00000107331_10 (sequence is synthesized)
caatggcactggggcaggggcagtcatgggccccaacgccaccgctgaggagggcgcaccctctgctgcagcactggccaccccggacacgctgcagggccagtgctcagccttcgtaca

SEQ ID NO: 161278 - DNA, 120 bp, Artificial Sequence
  ENSG00000107331_11 (sequence is synthesized)
gctctgggccggcctgcagcccatcttgtgtggcaacaaccgcaccattgaacccgaggcgctgcggcggggcaacatgagctccctgggcttcacgagcaaggagcagcggaacctggg

SEQ ID NO: 161279 - DNA, 120 bp, Artificial Sequence
  ENSG00000107331_12 (sequence is synthesized)
cctcctcgtgcacctcatgaccagcaaccccaaaatcctgtacgcgcctgcgggctctgaggtcgaccgcgtcatcctcaaggccaacgagacttttgcttttgtgggcaacgtgactca

SEQ ID NO: 161280 - DNA, 120 bp, Artificial Sequence
  ENSG00000107331_13 (sequence is synthesized)
ctatgcccaggtctggctcaacatctcggcggagatccgcagcttcctggagcagggcaggctgcagcaacacctgcgctggctgcagcagtatgtagcagagctgcggctgcaccccga

SEQ ID NO: 161281 - DNA, 120 bp, Artificial Sequence
  ENSG00000107331_14 (sequence is synthesized)
ggcactgaacctgtcactggatgagctgccgccggccctgagacaggacaacttctcgctgcccagtggcatggccctcctgcagcagctggataccattgacaacgcggcctgcggctg

SEQ ID NO: 161282 - DNA, 120 bp, Artificial Sequence
  ENSG00000107331_15 (sequence is synthesized)
gatccagttcatgtccaaggtgagcgtggacatcttcaagggcttccccgacgaggagagcattgtcaactacaccctcaaccaggcctaccaggacaacgtcactgtttttgccagtgt

SEQ ID NO: 161283 - DNA, 120 bp, Artificial Sequence
  ENSG00000107331_16 (sequence is synthesized)
gatcttccagacccggaaggacggctcgctcccgcctcacgtgcactacaagatccgccagaactccagcttcaccgagaaaaccaacgagatccgccgcgcctactggcggcctgggcc

SEQ ID NO: 161284 - DNA, 120 bp, Artificial Sequence
  ENSG00000107331_17 (sequence is synthesized)
caatactggcggccgcttctacttcctctacggcttcgtctggatccaggacatgatggagcgcgccatcatcgacacttttgtggggcacgatgtggtggagccaggcagctacgtgca

SEQ ID NO: 161285 - DNA, 120 bp, Artificial Sequence
  ENSG00000107331_18 (sequence is synthesized)
gatgttcccctacccctgctacacacgcgatgacttcctgtttgtcattgagcacatgatgccgctgtgcatggtgatctcctgggtctactccgtggccatgaccatccagcacatcgt

SEQ ID NO: 161286 - DNA, 120 bp, Artificial Sequence
  ENSG00000107331_19 (sequence is synthesized)
ggcggagaaggagcaccggctcaaggaggtgatgaagaccatgggcctgaacaacgcggtgcactgggtggcctggttcatcaccggctttgtgcagctgtccatctccgtgacagcact

SEQ ID NO: 161287 - DNA, 120 bp, Artificial Sequence
  ENSG00000107331_20 (sequence is synthesized)
caccgccatcctgaagtacggccaggtgcttatgcacagccacgtggtcatcatctggctcttcctggcagtctacgcggtggccaccatcatgttctgcttcctggtgtctgtgctgta

SEQ ID NO: 161288 - DNA, 120 bp, Artificial Sequence
  ENSG00000107331_21 (sequence is synthesized)
ctccaaggccaagctggcctcggcctgcggtggcatcatctacttcctgagctacgtgccctacatgtacgtggcgatccgagaggaggtggcgcatgataagatcacggccttcgagaa

SEQ ID NO: 161289 - DNA, 120 bp, Artificial Sequence
  ENSG00000107331_22 (sequence is synthesized)
gtgcatcgcgtccctcatgtccacgacggcctttggtctgggctctaagtacttcgcgctgtatgaggtggccggcgtgggcatccagtggcacaccttcagccagtccccggtggaggg

SEQ ID NO: 161290 - DNA, 120 bp, Artificial Sequence
  ENSG00000107331_23 (sequence is synthesized)
ggacgacttcaacttgctcctggctgtcaccatgctgatggtggacgccgtggtctatggcatcctcacgtggtacattgaggctgtgcacccaggcatgtacgggctgccccggccctg

SEQ ID NO: 161291 - DNA, 120 bp, Artificial Sequence
  ENSG00000107331_24 (sequence is synthesized)
gtacttcccactgcagaagtcctactggctgggcagtgggcggacagaagcctgggagtggagctggccgtgggcacgcaccccccgcctcagtgtcatggaggaggaccaggcctgtgc

SEQ ID NO: 161292 - DNA, 120 bp, Artificial Sequence
  ENSG00000107331_25 (sequence is synthesized)
catggagagccggcgctttgaggagacccgtggcatggaggaggagcccacccacctgcctctggttgtctgcgtggacaaactcaccaaggtctacaaggacgacaagaagctggccct

SEQ ID NO: 161293 - DNA, 120 bp, Artificial Sequence
  ENSG00000107331_26 (sequence is synthesized)
gaacaagctgagcctgaacctctacgagaaccaggtggtctccttcttgggccacaacggggcgggcaagaccaccaccatgtccatcctgaccggcctgttccctccaacgtcgggttc

SEQ ID NO: 161294 - DNA, 120 bp, Artificial Sequence
  ENSG00000107331_27 (sequence is synthesized)
cgccaccatctacgggcacgacatccgcacggagatggatgagatccgcaagaacctgggcatgtgcccgcagcacaatgtgctctttgaccggctcacggtggaggaacacctctggtt

SEQ ID NO: 161295 - DNA, 120 bp, Artificial Sequence
  ENSG00000107331_28 (sequence is synthesized)
ctactcacggctcaagagcatggctcaggaggagatccgcagagagatggacaagatgatcgaggacctggagctctccaacaaacggcactcactggtgcagacattgtcgggtggcat

SEQ ID NO: 161296 - DNA, 120 bp, Artificial Sequence
  ENSG00000107331_29 (sequence is synthesized)
gaagcgcaagctgtccgtggccatcgccttcgtgggcggctctcgcgccatcatcctggacgagcccacggcgggcgtggacccctacgcgcgccgcgccatctgggacctcatcctgaa

SEQ ID NO: 161297 - DNA, 120 bp, Artificial Sequence
  ENSG00000107331_30 (sequence is synthesized)
gtacaagccaggccgcaccatccttctgtccacccaccacatggatgaggctgacctgcttggggaccgcattgccatcatctcccatgggaagctcaagtgctgcggctccccgctctt

SEQ ID NO: 161298 - DNA, 120 bp, Artificial Sequence
  ENSG00000107331_31 (sequence is synthesized)
cctcaagggcacctatggcgacgggtaccgcctcacgctggtcaagcggcccgccgagccggggggcccccaagagccagggctggcatccagccccccaggtcgggccccgctgagcag

SEQ ID NO: 161299 - DNA, 120 bp, Artificial Sequence
  ENSG00000107331_32 (sequence is synthesized)
ctgctccgagctccaggtgtcccagttcatccgcaagcatgtggcctcctgcctgctggtctcagacacaagcacggagctctcctacatcctgcccagcgaggccgccaagaagggggc

SEQ ID NO: 161300 - DNA, 120 bp, Artificial Sequence
  ENSG00000107331_33 (sequence is synthesized)
gctgatggacacgaccctggaggaagtgttcctcaaggtgtcggaggaggatcagtcgctggagaacagtgaggccgatgtgaaggagtccaggaaggatgtgctccctggggcggaggg

SEQ ID NO: 161301 - DNA, 120 bp, Artificial Sequence
  ENSG00000107331_34 (sequence is synthesized)
cccggcgtctggggagggtcacgctggcaatctggcccggtgctcggagctgacccagtcgcaggcatcgctgcagtcggcgtcatctgtgggctctgcccgtggcgacgagggagctgg

SEQ ID NO: 161302 - DNA, 120 bp, Artificial Sequence
  ENSG00000107331_35 (sequence is synthesized)
ctacaccgacgtctatggcgactaccgccccctctttgataacccacaggacccagacaatgtcagcctgcaagaggtggaggcagaggccctgtcgagggtcggccagggcagccgcaa

SEQ ID NO: 161303 - DNA, 120 bp, Artificial Sequence
  ENSG00000107331_36 (sequence is synthesized)
gctggacggcgggtggctgaaggtgcgccagttccacgggctgctggtcaaacgcttccactgcgcccgccgcaactccaaggcactcttctcccagatcttgctgccagccttcttcgt

SEQ ID NO: 161304 - DNA, 120 bp, Artificial Sequence
  ENSG00000107331_37 (sequence is synthesized)
ctgcgtggccatgaccgtggccctgtccgtcccggagattggtgatctgcccccgctggtcctgtcaccttcccagtaccacaactacacccagccccgtggcaatttcatcccctacgc

SEQ ID NO: 161305 - DNA, 120 bp, Artificial Sequence
  ENSG00000107331_38 (sequence is synthesized)
caacgaggagcgccgcgagtaccggctgcggctatcgcccgacgccagcccccagcagctcgtgagcacgttccggctgccgtcgggggtgggtgccacctgcgtgctcaagtctcccgc

SEQ ID NO: 161306 - DNA, 120 bp, Artificial Sequence
  ENSG00000107331_39 (sequence is synthesized)
caacggctcgctggggcccacgttgaacctgagcagcggggagtcgcgcctgctggcggctcggttcttcgacagcatgtgtctggagtccttcacacaggggctgccactgtccaattt

SEQ ID NO: 161307 - DNA, 120 bp, Artificial Sequence
  ENSG00000107331_40 (sequence is synthesized)
cgtgccacccccaccctcgcccgccccatctgactcgccagcgtccccggatgaggacctgcaggcctggaacgtctccctgccgcccaccgctgggccagaaatgtggacgtcggcacc

SEQ ID NO: 161308 - DNA, 120 bp, Artificial Sequence
  ENSG00000107331_41 (sequence is synthesized)
ctccctgccgcgcctggtacgggagcccgtccgctgcacctgctctgcgcagggcaccggcttctcctgccccagcagtgtgggcgggcacccgccccagatgcgggtggtcacaggcga

SEQ ID NO: 161309 - DNA, 120 bp, Artificial Sequence
  ENSG00000107331_42 (sequence is synthesized)
catcctgaccgacatcaccggccacaatgtctctgagtacctgctcttcacctccgaccgcttccgactgcaccggtatggggccatcacctttggaaacgtcctgaagtccatcccagc

SEQ ID NO: 161310 - DNA, 120 bp, Artificial Sequence
  ENSG00000107331_43 (sequence is synthesized)
ctcatttggcaccagggccccacccatggtgcggaagatcgcggtgcgcagggctgcccaggttttctacaacaacaagggctatcacagcatgcccacctacctcaacagcctcaacaa

SEQ ID NO: 161311 - DNA, 120 bp, Artificial Sequence
  ENSG00000107331_44 (sequence is synthesized)
cgccatcctgcgtgccaacctgcccaagagcaagggcaacccggcggcttacggcatcaccgtcaccaaccaccccatgaataagaccagcgccagcctctccctggattacctgctgca

SEQ ID NO: 161312 - DNA, 120 bp, Artificial Sequence
  ENSG00000107331_45 (sequence is synthesized)
gggcacggatgtcgtcatcgccatcttcatcatcgtggccatgtccttcgtgccggccagcttcgttgtcttcctcgtggccgagaagtccaccaaggccaagcacctgcagtttgtcag

SEQ ID NO: 161313 - DNA, 120 bp, Artificial Sequence
  ENSG00000107331_46 (sequence is synthesized)
cggctgcaaccccatcatctactggctggcgaactacgtgtgggacatgctcaactacctggtccccgctacctgctgtgtcatcatcctgtttgtgttcgacctgccggcctacacgtc

SEQ ID NO: 161314 - DNA, 120 bp, Artificial Sequence
  ENSG00000107331_47 (sequence is synthesized)
gcccaccaacttccctgccgtcctctccctcttcctgctctatgggtggtccatcacgcccatcatgtacccggcctccttctggttcgaggtccccagctccgcctacgtgttcctcat

SEQ ID NO: 161315 - DNA, 120 bp, Artificial Sequence
  ENSG00000107331_48 (sequence is synthesized)
tgtcatcaatctcttcatcggcatcaccgccaccgtggccaccttcctgctacagctcttcgagcacgacaaggacctgaaggttgtcaacagttacctgaaaagctgcttcctcatttt

SEQ ID NO: 161316 - DNA, 120 bp, Artificial Sequence
  ENSG00000107331_49 (sequence is synthesized)
ccccaactacaacctgggccacgggctcatggagatggcctacaacgagtacatcaacgagtactacgccaagattggccagtttgacaagatgaagtccccgttcgagtgggacattgt

SEQ ID NO: 161317 - DNA, 120 bp, Artificial Sequence
  ENSG00000107331_50 (sequence is synthesized)
cacccgcggactggtggccatggcggttgagggcgtcgtgggcttcctcctgaccatcatgtgccagtacaacttcctgcggcggccacagcgcatgcctgtgtctaccaagcctgtgga

SEQ ID NO: 161318 - DNA, 120 bp, Artificial Sequence
  ENSG00000107331_51 (sequence is synthesized)
ggatgatgtggacgtggccagtgagcggcagcgagtgctccggggagacgccgacaatgacatggtcaagattgagaacctgaccaaggtctacaagtcccggaagattggccgtatcct

SEQ ID NO: 161319 - DNA, 120 bp, Artificial Sequence
  ENSG00000107331_52 (sequence is synthesized)
ggccgttgaccgcctgtgcctgggtgtgcgtcctggcgagtgcttcgggctcctgggcgtcaacggtgcgggcaagaccagcaccttcaagatgctgaccggcgacgagagcacgacggg

SEQ ID NO: 161320 - DNA, 120 bp, Artificial Sequence
  ENSG00000107331_53 (sequence is synthesized)
gggcgaggccttcgtcaatggacacagcgtgctgaaggagctgctccaggtgcagcagagcctcggctactgcccgcagtgtgacgcgctgttcgacgagctcacggcccgggagcacct

SEQ ID NO: 161321 - DNA, 120 bp, Artificial Sequence
  ENSG00000107331_54 (sequence is synthesized)
gcagctgtacacgcggctgcgtgggatctcctggaaggacgaggcccgggtggtgaagtgggctctggagaagctggagctgaccaagtacgcagacaagccggctggcacctacagcgg

SEQ ID NO: 161322 - DNA, 120 bp, Artificial Sequence
  ENSG00000107331_55 (sequence is synthesized)
cggcaacaagcggaagctctccacggccatcgccctcattgggtacccagccttcatcttcctggacgagcccaccacaggcatggaccccaaggcccggcgcttcctctggaacctcat

SEQ ID NO: 161323 - DNA, 120 bp, Artificial Sequence
  ENSG00000107331_56 (sequence is synthesized)
ccttgacctcatcaagacagggcgttcagtggtgctgacatcacacagcatggaggagtgcgaggcgctgtgcacgcggctggccatcatggtgaacggtcgcctgcggtgcctgggcag

SEQ ID NO: 161324 - DNA, 120 bp, Artificial Sequence
  ENSG00000107331_57 (sequence is synthesized)
catccagcacctgaagaaccggtttggagatggctacatgatcacggtgcggaccaagagcagccagagtgtgaaggacgtggtgcggttcttcaaccgcaacttcccggaagccatgct

SEQ ID NO: 161325 - DNA, 120 bp, Artificial Sequence
  ENSG00000107331_58 (sequence is synthesized)
caaggagcggcaccacacaaaggtgcagtaccagctcaagtcggagcacatctcgctggcccaggtgttcagcaagatggagcaggtgtctggcgtgctgggcatcgaggactactcggt

SEQ ID NO: 161326 - DNA, 120 bp, Artificial Sequence
  ENSG00000107331_59 (sequence is synthesized)
cagccagaccacactggacaatgtgttcgtgaactttgccaagaagcagagtgacaacctggagcagcaggagacggagccgccatccgcactgcagtcccctctcggctgcttgctcag

SEQ ID NO: 161327 - DNA, 120 bp, Artificial Sequence
  ENSG00000107331_60 (sequence is synthesized)
cctgctccggccccggtctgcccccacggagctccgggcacttgtggcagacgagcccgaggacctggacacggaggacgagggcctcatcagcttcgaggaggagcgggcccagctgtc

SEQ ID NO: 161328 - DNA, 120 bp, Artificial Sequence
  ENSG00000107331_61 (sequence is synthesized)
cttcaacacggacacgctctgctgaccacccagagctgggccagggaggacacgctccactgaccacccagagctgggccagggactcaacaatggggacagaagtcccccagtgcctgc

SEQ ID NO: 161329 - DNA, 120 bp, Artificial Sequence
  ENSG00000107331_62 (sequence is synthesized)
cagggcctggagtggaggttcaggaccaaggggcttctggtcctccagcccctgtactcggccatgccctgtggtcactgcggttgccgcccctaattgtgccaaaggctgacccggccc

SEQ ID NO: 161330 - DNA, 120 bp, Artificial Sequence
  ENSG00000107331_63 (sequence is synthesized)
gggctgcgtacacccttgccctgctttgccttaaagcctcggggtctgcccggcccctcgcccctgcctggcactgctcaccgcccaaggcgacgccggctggaccaggcactgctggcc

SEQ ID NO: 161331 - DNA, 120 bp, Artificial Sequence
  ENSG00000107331_64 (sequence is synthesized)
tttctcctgcccggcctcggaaccagcttttctctcttacgatgaaggctgatgccgagagcgggctgtgggcggagctgggtcagtcccgtatttattttgctttgagaagaggctcct

SEQ ID NO: 161332 - DNA, 120 bp, Artificial Sequence
  ENSG00000107331_65 (sequence is synthesized)
ctggccctgctctcctgcagggaggtggctgtcctgcgggaagccatcagcttgggccagctggcaggtggcaggaatggagaagctgaccctgctggccaggcaaggggccagaccccc

SEQ ID NO: 161333 - DNA, 120 bp, Artificial Sequence
  ENSG00000107331_66 (sequence is synthesized)
cccaacccccagctgccatcgctctcccacccagcttggccccctgcccgcccacctccctgggagccgggcctgtacatagcgcacagatgtttgttttaaataaataaacaaaatgtc

SEQ ID NO: 161334 - DNA, 120 bp, Artificial Sequence
  ENSG00000107331_67 (sequence is synthesized)
agaaccgcctgatcccgaactccctgtgcagagaccagactcgcccgaatatggggagaaaaacgagccgcgtgcagcaggggccgcctcggtcccctgcctgctccgctcacggcgagc

SEQ ID NO: 161335 - DNA, 120 bp, Artificial Sequence
  ENSG00000107331_68 (sequence is synthesized)
gttcctggggcctcgagtttccccccttccgctggctgctcggaatcgcgggacggacccacctggccgccctgcctcccttccagtgggtcctggccttcgagatcttcatccccctgg

SEQ ID NO: 161336 - DNA, 120 bp, Artificial Sequence
  ENSG00000107331_69 (sequence is synthesized)
gcagagtgggagggggtctctgcaggcctgggacccctgggcagagggtgtcggcagaattgacacgggaggggtacggggtgcagcttcggatgggacacaggctctgcaggtggggga

SEQ ID NO: 161337 - DNA, 120 bp, Artificial Sequence
  ENSG00000107331_70 (sequence is synthesized)
cagctgcggggggcccatgggccgtcctggcttgagcgccctccccgcttgcattaacagccctcccgggccccctgccggcctcaggaacagctggctccagatggggggtggcaggca

SEQ ID NO: 161338 - DNA, 120 bp, Artificial Sequence
  ENSG00000107331_71 (sequence is synthesized)
gtgaagtgggaggtggtagggagtgaaaggcccggccacctaaaggcacagctggtgcctgggtcaagctgaggcggcatctctctgcctggccttgccttctagggctggggtgcctcg

SEQ ID NO: 161339 - DNA, 120 bp, Artificial Sequence
  ENSG00000107331_72 (sequence is synthesized)
gcttctgggctgagtctgggctgaggctgggctggcctgggctggggctggagcggcctggctactctcccttcatactccttcaggctcttgcactcactctgctaaccagctggccag

SEQ ID NO: 161340 - DNA, 120 bp, Artificial Sequence
  ENSG00000107331_73 (sequence is synthesized)
aggtcagaggtcactgcccagagggggtcctttgtcctcccctgggctctgtaggcagtgccacacctgaaacgttttcggggggagagtgccagggcatgtgggcctgcactggctgaa

SEQ ID NO: 161341 - DNA, 120 bp, Artificial Sequence
  ENSG00000107331_74 (sequence is synthesized)
aggaaaggaatgctctgggagttatggcagaaggggtggtgagtggctctttgacctctgacctgctggagtcattcgccccagaacgcttggcctgtagcccagctggggccagggctc

SEQ ID NO: 161342 - DNA, 120 bp, Artificial Sequence
  ENSG00000107331_75 (sequence is synthesized)
tgtgccgccttctccctaacgctgcttctccttcctgactttctctaaatttctcctctcggcctctgtctccctccccttctggattcctctctctctctctcccctttcacccccgac

SEQ ID NO: 161343 - DNA, 120 bp, Artificial Sequence
  ENSG00000107331_76 (sequence is synthesized)
gctccgtgggtgaggaaagggcccctttggtgacttggagctcctcctgggagagggggagggtcccaggggtctatggcaggcatgaggggtagaggcatgtcgtgggacccaggcagc

SEQ ID NO: 161344 - DNA, 120 bp, Artificial Sequence
  ENSG00000107331_77 (sequence is synthesized)
tgctgtgggaaggcactggagagtctgctctggcagggtcctccggctgggggtggccggtccagggcagtgctggtggaggaggggtgtgtccagagaccttccagagtgtctcgtggg

SEQ ID NO: 161345 - DNA, 120 bp, Artificial Sequence
  ENSG00000107331_78 (sequence is synthesized)
cgggcagctgggcagtttgggttctgggtgaggggtcctgtctggaacaagcagaggccagggctggacattggcctgggaggggagggcctgtggacgaggccaatcctgggtgtagag

SEQ ID NO: 161346 - DNA, 120 bp, Artificial Sequence
  ENSG00000107331_79 (sequence is synthesized)
ggggtccctaggatgagggtgggacagatgagggtggagcattgggtgcttaagggacacatggagacaggtccagcaaaggagctggtgggcacagctgggcagttgggggtccggagg

SEQ ID NO: 161347 - DNA, 120 bp, Artificial Sequence
  ENSG00000107331_80 (sequence is synthesized)
ccgtgctgccctgggagtggagggcaaagcaggtttcacctgagcgccgcagaaaggagtggagagcccgggcgtgggactcacgcttgaaatcccagcactttgggaagccatggtggg

SEQ ID NO: 161348 - DNA, 88 bp, Artificial Sequence
  ENSG00000107331_81 (sequence is synthesized)
tcacgcttgaaatcccagcactttgggaagccatggtaagcccgagcaacatagcggaagcccgtctctaccaaaaatacaaaattag

SEQ ID NO: 161349 - DNA, 86 bp, Artificial Sequence
  ENSG00000107331_82 (sequence is synthesized)
ttggagggctgaggcgggaggatccggactgcaccactgcactccagcgtgggtgactgagaccctgtctcaggaaaaaaaaaaaa

SEQ ID NO: 161350 - DNA, 120 bp, Artificial Sequence
  ENSG00000107331_83 (sequence is synthesized)
ctgctcttcacctccgaccgcttccgactgcaccgcctcactgcctgcctagcctcaccgcccctcccacctgcctgcccaggtatggggccatcacctttggaaacgtcctgaagtcca

SEQ ID NO: 161351 - DNA, 120 bp, Artificial Sequence
  ENSG00000107331_84 (sequence is synthesized)
agggcgcaccctctgctgcagcactggccaccccggacacgctgcagggccagtgctcagccttcgtacagctctgggccggcctgcagcccatcttgtgtggcaacaaccggcgctgcg

SEQ ID NO: 161352 - DNA, 120 bp, Artificial Sequence
  ENSG00000107331_85 (sequence is synthesized)
cgagtactacgccaagattggtgagggggcccgtggggcggggaaggcggtgggggccccgcaaggcccagagcacaggccctgagctgtctccccgcaggccagtttgacaagatgaag

SEQ ID NO: 161353 - DNA, 120 bp, Artificial Sequence
  ENSG00000107331_86 (sequence is synthesized)
ctacccctgctacacacgcgatgagtgagtgctgggcgcccggggctggggctggggctggggctgagtggcgcctgagcgcggcctccccgcagcttcctgtttgtcattgagcacatg

SEQ ID NO: 161354 - DNA, 120 bp, Artificial Sequence
  ENSG00000107331_87 (sequence is synthesized)
caccggctcaaggaggtgcgcgggccgggactctccctggaggcgcgggctggcagggaggggcggcgtcctccccggggcctgccccaagcccctggcccacccgcaggtgatgaagac

SEQ ID NO: 161355 - DNA, 120 bp, Artificial Sequence
  ENSG00000107331_88 (sequence is synthesized)
ctgtgggaggctatggggcttcctggggtgcctgtgggggctgtagggctgggaggctggggggctggggctctggctgggcggcgcagggctccgggccaccggcctgtcccaccaggt

SEQ ID NO: 161356 - DNA, 120 bp, Artificial Sequence
  ENSG00000107331_89 (sequence is synthesized)
ggctccagccgcgggtggggtcgggggagaactggccccaggatgcttgctgtccagaggtcaagggggcagagtgggcgagggacacttgcagataggcctggagagacgtaactgcat

SEQ ID NO: 161357 - DNA, 120 bp, Artificial Sequence
  ENSG00000107331_90 (sequence is synthesized)
caggggggtggggccccagcagtggaggtggagcctgggtgggcagggccctgagctctgggggtggggcctgcatggggtggggctgtggggcacgtggccccctgggctctggaggtg

SEQ ID NO: 161358 - DNA, 120 bp, Artificial Sequence
  ENSG00000107331_91 (sequence is synthesized)
ctgggctctggaggtggggcagggtctgggtggggtggggccagaggggcagggtgggggcaggatgccccgctgagtgggcaggctcctggccaggtctacaagtcccggaagattggc

SEQ ID NO: 161359 - DNA, 120 bp, Artificial Sequence
  ENSG00000107338_0 (sequence is synthesized)
gacgggcacgggcgcgcgggctccggcgggcgccggctgccttcctccgtcgctcgctgtctctcccggccgcattctcctccgctgcggggccgagctctccccagcgctcgcaggaag

SEQ ID NO: 161360 - DNA, 120 bp, Artificial Sequence
  ENSG00000107338_1 (sequence is synthesized)
gctctccccagcgctcgcaggaaggaagaagggagccgaggacgccgagaagttcccgcggcagccgcggatcccggccaaggcggaggctgcggctccgacggggcaggagcgcgatcc

SEQ ID NO: 161361 - DNA, 120 bp, Artificial Sequence
  ENSG00000107338_2 (sequence is synthesized)
acggcgaggggcgtacggccaaagggtccgcggcgtggagcgctcggaccttccgctctcccccgggcgtgggccgggaccccatgagacgcgcccacgaggggcgcgagattcctagct

SEQ ID NO: 161362 - DNA, 120 bp, Artificial Sequence
  ENSG00000107338_3 (sequence is synthesized)
tgggcggcgctaggcggagggaggtgttgcagccgccggagccagagagctgccggcaggaggcggcggcggcaagaacttgaacttggcgtcgggagcgggcgccccggacgccccccg

SEQ ID NO: 161363 - DNA, 120 bp, Artificial Sequence
  ENSG00000107338_4 (sequence is synthesized)
ggggcgccgagggacctgcgccgcagcgctgccccccgaatggccgcggcggcggaccgggctcccgcgccgcggccctaggcggcctctcgccatggccaagtggctaaacaagtactt

SEQ ID NO: 161364 - DNA, 120 bp, Artificial Sequence
  ENSG00000107338_5 (sequence is synthesized)
aagtacttcagcttgggcaacagcaagaccaagagccccccgcagccgccgcggccagactaccgcgagcagcggcgccgaggcgagcggccttcgcagcccccccaggccgtgccgcag

SEQ ID NO: 161365 - DNA, 120 bp, Artificial Sequence
  ENSG00000107338_6 (sequence is synthesized)
gcctcctccgccgcctcggcgtcctgcggtccggccaccgcctcctgcttctcagcctcttcgggctcgctgcccgacgacagcggcagcaccagcgacctcatccgcgcctaccgcgcg

SEQ ID NO: 161366 - DNA, 120 bp, Artificial Sequence
  ENSG00000107338_7 (sequence is synthesized)
cagaaggagcgagacttcgaggacccctacaacgggcctggctcgtcgctgcgcaaactgcgcgccatgtgccgcctggactactgcggcggcagcggggagccaggcggggtccagcgc

SEQ ID NO: 161367 - DNA, 120 bp, Artificial Sequence
  ENSG00000107338_8 (sequence is synthesized)
gccttctcggcctcgtccgcgtcgggcgccgcgggctgttgctgcgcctcctcgggcgcgggggccgccgcgtcctcgtcctcgtcctccggctctccgcatctctaccgcagcagcagc

SEQ ID NO: 161368 - DNA, 120 bp, Artificial Sequence
  ENSG00000107338_9 (sequence is synthesized)
cgcagcagcagcgagcggcggcccgccacgccggccgaggtgcgctacatctcccccaagcaccgcctcatcaaagtggagagcgccgcgggcggtggggccggggaccccctggggggc

SEQ ID NO: 161369 - DNA, 120 bp, Artificial Sequence
  ENSG00000107338_10 (sequence is synthesized)
ggccgcacctggagcccgacggcctgcggaggcaagaaactgctcaacaagtgcgccgcctcagccgcggaggagagcggggccggcaagaaggacaaggtgaccatagccgatgactac

SEQ ID NO: 161370 - DNA, 120 bp, Artificial Sequence
  ENSG00000107338_11 (sequence is synthesized)
tcagatccctttgatgccaagaatgatctcaagagcaaagcaggaaagggggagagtgctggctacatggagccctatgaggcacagaggatcatgacagaatttcagaggcaggaaagt

SEQ ID NO: 161371 - DNA, 120 bp, Artificial Sequence
  ENSG00000107338_12 (sequence is synthesized)
gtccggtcccagcataaaggtatccagttatatgacaccccttacgaacctgaaggccaaagtgttgactcagactcggagagcacagtcagcccccgactgcgggagagcaagctgccc

SEQ ID NO: 161372 - DNA, 120 bp, Artificial Sequence
  ENSG00000107338_13 (sequence is synthesized)
caggatgacgacaggcccgccgatgagtacgaccagccttgggagtggaaccgggtcaccatcccagccctggcagcacagtttaatggcaacgagaagcggcagtcatccccctcacct

SEQ ID NO: 161373 - DNA, 120 bp, Artificial Sequence
  ENSG00000107338_14 (sequence is synthesized)
tcgcgggaccggcggcgccagcttcgtgcccctggagggggctttaagcctatcaaacatgggagccctgagttctgcgggatcctaggagaaagggtggatcctgccgtccccctggag

SEQ ID NO: 161374 - DNA, 120 bp, Artificial Sequence
  ENSG00000107338_15 (sequence is synthesized)
aagcaaatatggtatcacggagccatcagcagaggagacgccgagaacctgctgcgactctgcaaggagtgtagctaccttgtccggaacagccagaccagcaagcatgactactccctc

SEQ ID NO: 161375 - DNA, 120 bp, Artificial Sequence
  ENSG00000107338_16 (sequence is synthesized)
tccctgaggagcaaccagggttttatgcacatgaaactggccaaaaccaaagagaaatacgttctgggtcagaacagccctccgttcgacagtgtcccggaagtcatccactactacacc

SEQ ID NO: 161376 - DNA, 120 bp, Artificial Sequence
  ENSG00000107338_17 (sequence is synthesized)
accagaaagctacccatcaaaggggctgagcacttgtccctcctctatcccgtggctgtgaggaccctgtgagcggaccagacctgccctgctctgtgacagagcctgagacttggaggt

SEQ ID NO: 161377 - DNA, 120 bp, Artificial Sequence
  ENSG00000107338_18 (sequence is synthesized)
gccagaggccccccaccaaccagcccagccactgttgctggctgtgtcgtttgtgttgtgtgtatggtactagcacaccactgcatgtctctagaatgctgttgccacttacgggggctg

SEQ ID NO: 161378 - DNA, 120 bp, Artificial Sequence
  ENSG00000107338_19 (sequence is synthesized)
gagaaggcctggataaagacagaagggcggcaacacaccaccccagcccccacccccaccctctccttgagtttctgtgaattaaaatatttgcaaatccaaagagatgccttccaggat

SEQ ID NO: 161379 - DNA, 120 bp, Artificial Sequence
  ENSG00000107338_20 (sequence is synthesized)
gaacaaaggcagaccagctccgaggggcggggtagggtggggcgggagctccctggctgacatctctttgttctccagctgtctcaaattcacacctctgtacagggcaaagttttccca

SEQ ID NO: 161380 - DNA, 120 bp, Artificial Sequence
  ENSG00000107338_21 (sequence is synthesized)
caggagcccccctactgatgctgggagccaaatgctggtgctttgagagtcccggaggccccggggttcccgccccgctggtgtgtatatgtgtgtctgtgtgagtgtgtgtgtgagtac

SEQ ID NO: 161381 - DNA, 120 bp, Artificial Sequence
  ENSG00000107338_22 (sequence is synthesized)
agatgtgagaaggtggtcacacacagatgggtaagcccactgatctacttgtagtcactcagtgtaatcattaggctatcttcaaggaatcattgtgcagtcaaaaagaggattcaatta

SEQ ID NO: 161382 - DNA, 120 bp, Artificial Sequence
  ENSG00000107338_23 (sequence is synthesized)
tttatgaatagggtgtgtaaataaaatagtcatttaatatatagccttatccttttttgatatactgcagagggtctctgagggggcagttctggtttcactcccagagcaaggcgtgtc

SEQ ID NO: 161383 - DNA, 120 bp, Artificial Sequence
  ENSG00000107338_24 (sequence is synthesized)
tcctctgggcttgctgctgtggcaggccccagggaggggagggaggccgaggcctcagctccagccctcagcagctctggacacaagagccgtctgctctgacaactgggctgaggcagt

SEQ ID NO: 161384 - DNA, 120 bp, Artificial Sequence
  ENSG00000107338_25 (sequence is synthesized)
ttcaggcttcagcagtggacatagtcaggagcctccagtgttgaccaaaaaaccagtctttccctcctgcagtgggacgtctgtgttgacacccccccaacccctggacacagcacccag

SEQ ID NO: 161385 - DNA, 120 bp, Artificial Sequence
  ENSG00000107338_26 (sequence is synthesized)
ctggctacaaagggctctctccccactatctgttagcaccacctgggaggtatttggcatgtagggaaagggagacagagaaggaacgtcatttgcccaaagccacacagctcaccagca

SEQ ID NO: 161386 - DNA, 120 bp, Artificial Sequence
  ENSG00000107338_27 (sequence is synthesized)
gcagagcggttctgcagccaatgctctttcgttggttctgcatggccttgctgtcaccctgcccatggaggagggagaatcctgacctcccagggacatagagccctcagtggtccacac

SEQ ID NO: 161387 - DNA, 84 bp, Artificial Sequence
  ENSG00000107338_28 (sequence is synthesized)
cacacacacacacacacacacagccctcagtggtccacactgcttccacacacaagacagtggtccacactgcttccacacaca

SEQ ID NO: 161388 - DNA, 120 bp, Artificial Sequence
  ENSG00000107338_29 (sequence is synthesized)
tcagtggtccacactgcttccacacacaagaacacctacacacgcacacgcacacgcgacctctctcttgcttgccatagcagggtcctcccacacaggccaggcagccccgatgaggct

SEQ ID NO: 161389 - DNA, 120 bp, Artificial Sequence
  ENSG00000107338_30 (sequence is synthesized)
aagagtttctcagctctcctgctttttccacccacccagtagcatgaagatgtggctgccctctcctgaatgagatacaagggttccagagccttcgccaggcaccagctggtctgaatg

SEQ ID NO: 161390 - DNA, 120 bp, Artificial Sequence
  ENSG00000107338_31 (sequence is synthesized)
aactagaagtttgacgactgtcatccctggcccacctgggcagagcacaaggggccgagtttgaatgtcatcagcaggttcagacatcagcgctgctcatgtctttagagactgtttgga

SEQ ID NO: 161391 - DNA, 120 bp, Artificial Sequence
  ENSG00000107338_32 (sequence is synthesized)
ggtggttccagctcactgttcacatgcagagacacaggcccggagaaggaggactcgccaaggccacgtgtcgagctgggactgagccctgcccctttaggtagctgcgtggacttcagc

SEQ ID NO: 161392 - DNA, 120 bp, Artificial Sequence
  ENSG00000107338_33 (sequence is synthesized)
ggtttgtgcaaagccctgcccttggtgacccgcctttagtgaccagtctgcctcttgggtcttcctcccaggccttgtctggcacgtccacgtggcccagccctcatagagaccacgctg

SEQ ID NO: 161393 - DNA, 120 bp, Artificial Sequence
  ENSG00000107338_34 (sequence is synthesized)
gctgtggcctgggtttaatctcttaaagaagccaatcctttccttgcctgtttggcatttcctaaaacatccctcaatgagggaggaaggcagggacaccctggaacgattcgtgctttc

SEQ ID NO: 161394 - DNA, 120 bp, Artificial Sequence
  ENSG00000107338_35 (sequence is synthesized)
ctttgggggagtgggaaggtaggtgggaaatgacaagatgagtgaggagttggcacttggccaaacagaggagcctggaccccaaggcttattctcagaggaggcccaagagaggctgag

SEQ ID NO: 161395 - DNA, 120 bp, Artificial Sequence
  ENSG00000107338_36 (sequence is synthesized)
gaagagggggaacaaccctccggcgggggaggagggtgagacctcacactggcaagttcaggtccagccacttcctgaggctgctgggtggggccgcacctcacggtccttccctgtaga

SEQ ID NO: 161396 - DNA, 120 bp, Artificial Sequence
  ENSG00000107338_37 (sequence is synthesized)
ccatcttcccgggcacattgctcctcagaaaaggctctgggagggtctcagtggaagctggcagctgtgccctctggccctgacttggcctcttagggtattcctgggaccctccctctg

SEQ ID NO: 161397 - DNA, 120 bp, Artificial Sequence
  ENSG00000107338_38 (sequence is synthesized)
tccctggccttcgtcttcctgaagtttccctgggaggcccaacctcctgcccctctcagggacagaggccagcagaggagccagcttacaggatgggagctgctgaaaagaatttttttc

SEQ ID NO: 161398 - DNA, 120 bp, Artificial Sequence
  ENSG00000107338_39 (sequence is synthesized)
ccttaattttatgaacctctccctcttcttcctctaattgtgaccgtttcctgtgtcagcctgtattcatgttttcttggacatctaacaattgaaacagcttttccctttcagaaacac

SEQ ID NO: 161399 - DNA, 120 bp, Artificial Sequence
  ENSG00000107338_40 (sequence is synthesized)
ttgttttgggtttgttttttttttttttcatctgctgccaattaattggggaaaaaattgagctggatttctttgagagaaaagaaaagctcctgccacacaacgtcgcgccctcggcat

SEQ ID NO: 161400 - DNA, 120 bp, Artificial Sequence
  ENSG00000107338_41 (sequence is synthesized)
gctcctgccacacaacgtcgcgccctcggcattttgtctgagaacctccagcactagcggctgtttctgtgtctcccttctttgctggctttattattgaccataatgcctgcccacttg

SEQ ID NO: 161401 - DNA, 120 bp, Artificial Sequence
  ENSG00000107338_42 (sequence is synthesized)
agcaactctgtccttgagcgctgaggagtcaagggcccttctggcagccccccaaacaggatggcgcccacagaaagaaaggaggctttgtaggggaagagggccccaccgcctgccagt

SEQ ID NO: 161402 - DNA, 120 bp, Artificial Sequence
  ENSG00000107338_43 (sequence is synthesized)
cccgtcctgaagtcagaagaatggcccaggctgacaccctctcctggagagaggctcacagcgtagctgttcccaggaaaggggtgcaaagactccgaggcttcaggaggcaggccctgt

SEQ ID NO: 161403 - DNA, 120 bp, Artificial Sequence
  ENSG00000107338_44 (sequence is synthesized)
cctcacagggcggctgtgggccggggcccctctgtggcctgagagtgagcaggagggaaacctgaagcagctacccgcaaggcgtccggtcaacagggtggagctgcaggctccctctgc

SEQ ID NO: 161404 - DNA, 120 bp, Artificial Sequence
  ENSG00000107338_45 (sequence is synthesized)
ccattcccagaaccagcggccccctttgtaagatgctgaacacgaagttccggtagctccccagacgctgtctcagaagtggtgatatcattgaccaagggcctggcaaggaccggcagc

SEQ ID NO: 161405 - DNA, 120 bp, Artificial Sequence
  ENSG00000107338_46 (sequence is synthesized)
cagggtccccatttgctcttgcagccctagggactgtgcaggtagaagccctgccagcagagcaggctggcgtttggtgttggcccacagacacccgtgaagggtcatggccgaatcagg

SEQ ID NO: 161406 - DNA, 120 bp, Artificial Sequence
  ENSG00000107338_47 (sequence is synthesized)
cagctgtccagccaactgtctctccacccttccagaattggtgatcagcgaagaccaaattcggcaagccatccagagggagtgcagggcgcacagtcttagatgtgggcgcacctccca

SEQ ID NO: 161407 - DNA, 120 bp, Artificial Sequence
  ENSG00000107338_48 (sequence is synthesized)
gaaccccacggggacttgttcacaggcgcgcttgcaggagggcaagccccttggtcctggaacacaggtgccccttggcctttccacctccctccttggggctgtttgcatccctgccag

SEQ ID NO: 161408 - DNA, 120 bp, Artificial Sequence
  ENSG00000107338_49 (sequence is synthesized)
gagccttaaaccagccacctactgctgaagtctcttgtaacattccaaatctatgtgacacactgtataatgatgaatatttaatgtgaagctcttaatatactacaagtgtcttgttta

SEQ ID NO: 161409 - DNA, 80 bp, Artificial Sequence
  ENSG00000107341_0 (sequence is synthesized)
gcttctcggctccgttgctcccgcggcgcgaggcgctctcgctctcctcctcctccgccgtcgcccctccccccgcgcag

SEQ ID NO: 161410 - DNA, 120 bp, Artificial Sequence
  ENSG00000107341_1 (sequence is synthesized)
ctccggcccctgcggcccccgaagagaacgagagggcgagcgagcgcggcgttcccgggccggcccggccccctcccttcaccatcgccggccctccgccgccttcctccgcttccacct

SEQ ID NO: 161411 - DNA, 120 bp, Artificial Sequence
  ENSG00000107341_2 (sequence is synthesized)
cctccgccgccttcctccgcttccacctcctctccccccccccaagttgaggccccctccgggggggggaggcccgggaccgggacccgtagcgaattctcctaactccctcgacctctc

SEQ ID NO: 161412 - DNA, 120 bp, Artificial Sequence
  ENSG00000107341_3 (sequence is synthesized)
ctctcgcccggcccgagtgtgaggagaagggcccggcccggcctgcgtcgtgtgtgaggaggaccccgggcgggcccacgggccgtgtggggcctggtctggcccgccgggtgtgtgaag

SEQ ID NO: 161413 - DNA, 80 bp, Artificial Sequence
  ENSG00000107341_4 (sequence is synthesized)
gtgtgaagaccggggcccggtgctgcccggccggagggcgagcggaggggaggggcctggtccggcccggccggtgcgtg

SEQ ID NO: 161414 - DNA, 120 bp, Artificial Sequence
  ENSG00000107341_5 (sequence is synthesized)
ggcccagcagcagatgaccagctcgcagaaggccctgatgctcgagctgaaatccctgcaggaggaaccggtggagggcttccggatcaccctggtggacgagtccgacctctacaactg

SEQ ID NO: 161415 - DNA, 120 bp, Artificial Sequence
  ENSG00000107341_6 (sequence is synthesized)
ggaggtggccatcttcggaccccccaacaccctctacgaaggcggctacttcaaggcgcatattaaatttcctattgactacccctattcaccacctaccttcagattcttgaccaaaat

SEQ ID NO: 161416 - DNA, 120 bp, Artificial Sequence
  ENSG00000107341_7 (sequence is synthesized)
gtggcaccccaacatttatgagaatggagatgtatgcatttcgattcttcatccgcctgtagatgacccacagagtggagaactgccttctgaaaggtggaatcctactcagaatgtgag

SEQ ID NO: 161417 - DNA, 120 bp, Artificial Sequence
  ENSG00000107341_8 (sequence is synthesized)
gactatcctattaagtgtaatctcactgcttaatgagcccaacaccttctccccagccaatgtcgatgcttcagttatgttcaggaaatggagagacagtaaaggaaaagacaaagaata

SEQ ID NO: 161418 - DNA, 120 bp, Artificial Sequence
  ENSG00000107341_9 (sequence is synthesized)
tgctgaaattattaggaaacaagtttcagccactaaggccgaagcagaaaaggatggagtgaaggtccccacaaccctggcggaatactgcatcaaaactaaagtgccttccaatgacaa

SEQ ID NO: 161419 - DNA, 120 bp, Artificial Sequence
  ENSG00000107341_10 (sequence is synthesized)
cagctcagatttgctttacgacgacttgtatgatgacgacattgatgatgaagatgaggaggaggaagatgccgactgttatgatgatgatgattctgggaatgaggagtcgtgacgtgc

SEQ ID NO: 161420 - DNA, 120 bp, Artificial Sequence
  ENSG00000107341_11 (sequence is synthesized)
tccttcagtgcccctgtactgccctgccatctcaggccaaagggaggggagcaagtggggacctggccatggcccctcagcaaaaacctattcacagcgggtggggaaacacacacagct

SEQ ID NO: 161421 - DNA, 120 bp, Artificial Sequence
  ENSG00000107341_12 (sequence is synthesized)
cctgctgactccccttatggatctcagtttgctcctttttatggacctttaatggagagagagtaaccctccacagaatgtctgaattcttgcattctttacccttccatcactatattg

SEQ ID NO: 161422 - DNA, 120 bp, Artificial Sequence
  ENSG00000107341_13 (sequence is synthesized)
attctttttttaaaaaatatgaacccaaactcccgcctcacttcgtctctacagaatgttcacagcaaaacacgtttggtctgtttttagattcttgaagaattcaatagtctttcaaga

SEQ ID NO: 161423 - DNA, 120 bp, Artificial Sequence
  ENSG00000107341_14 (sequence is synthesized)
tgtttaatgtgtttaaagctgggaacctgttgggagttcacaagtgctgcatatactgggtagcaaaagaaaatggaaaaaaacccacaaaacaaactttaaaaaaaaaaaaaaacaaat

SEQ ID NO: 161424 - DNA, 120 bp, Artificial Sequence
  ENSG00000107341_15 (sequence is synthesized)
ttgccaaggtttagctgctcatttacattagtgtgtgtgcattcgttcagccccatggtggtgaattctgtttctttcctttcctaaggctgggacatggtgggcatcagggactttgtg

SEQ ID NO: 161425 - DNA, 120 bp, Artificial Sequence
  ENSG00000107341_16 (sequence is synthesized)
ctaagcctgatgaaatgtgctccttcaatctccatgaaaccatcgtaacatggaggcctcagctgctctgaggagagaaatcagactttgttttttgaaatcgattgggatcgaaagcct

SEQ ID NO: 161426 - DNA, 120 bp, Artificial Sequence
  ENSG00000107341_17 (sequence is synthesized)
gaaataaatattcatactttccatagaactgagcacttggttgctatttattttaaaggcagggttatttccccccagggagtggggcaagcggggaagttgggatgagtgcgtgtggga

SEQ ID NO: 161427 - DNA, 120 bp, Artificial Sequence
  ENSG00000107341_18 (sequence is synthesized)
tgctactggggggaaaaagttgaaactactggtgaccactgttgggagaggaaacatctgttttatagatttagcatggccttcccatcaaaaatacactcgtaccatgacgttttgttt

SEQ ID NO: 161428 - DNA, 120 bp, Artificial Sequence
  ENSG00000107341_19 (sequence is synthesized)
ttgttttttaagtagccacttttaattactcagtattaatcctaggtgcatgtgttaagatttcggttttcatcgagctgcttatactgatagtgaaaaacttggatgtgtgtgagacga

SEQ ID NO: 161429 - DNA, 120 bp, Artificial Sequence
  ENSG00000107341_20 (sequence is synthesized)
gttaccgccttcttcattggatgtgatctgaactttttttctcctttcaacatacttaggctgtggagtgcaagcagaattatgcatagaaattgtggcagggctgagggagttgactgc

SEQ ID NO: 161430 - DNA, 120 bp, Artificial Sequence
  ENSG00000107341_21 (sequence is synthesized)
aggcagtttttaggccagataaggctagatcttcctgcaatgcacttgctgcagctttgattttccagatctcaatcgtgttgcttcaatcaatattgagatccagcagccttcaccatc

SEQ ID NO: 161431 - DNA, 120 bp, Artificial Sequence
  ENSG00000107341_22 (sequence is synthesized)
caggagacttcagaacttgaaggtaatttttggttgttatgggggtgcaccagatcataggagggcattatttggaggaaaccgctataatgtaaaatcagatttcagaaggaaaatgca

SEQ ID NO: 161432 - DNA, 120 bp, Artificial Sequence
  ENSG00000107341_23 (sequence is synthesized)
gcaaggactgactgtagtcctatttcagacccctgggcactagtgtcaactcctcctttggctcgtaactcagaaagaaccaaagggcagattagggacggggcaggagggatcctagga

SEQ ID NO: 161433 - DNA, 120 bp, Artificial Sequence
  ENSG00000107341_24 (sequence is synthesized)
tggccagagtaggtgacgcttacttccttagctcctccttccattctgatctcagggttttcactcttcaaactcccaaacacatgacttcttcccagcagcccttcccggcctctaaag

SEQ ID NO: 161434 - DNA, 120 bp, Artificial Sequence
  ENSG00000107341_25 (sequence is synthesized)
tttggtcccagcagcccttcccagcctctaaagtttggtctggtatgaaatgggactgtttaacaagcaaggctcttaggggacactgttgagcctggtcccagaatctgtgatctccac

SEQ ID NO: 161435 - DNA, 120 bp, Artificial Sequence
  ENSG00000107341_26 (sequence is synthesized)
agggccagggttgctacttgcacccagaatctagtgattttagtcagatccatggaacagagcagcttcgtaatacattgtcaagttacctgattacaaactctcatagatgttggaact

SEQ ID NO: 161436 - DNA, 120 bp, Artificial Sequence
  ENSG00000107341_27 (sequence is synthesized)
acctttttactccccatactttgtaagtaatgcttccagattaacctgcaaatcttgtggagccaaagcctctcacagtgctgatttacctcccccaaaatgcccccaaacccccatgca

SEQ ID NO: 161437 - DNA, 120 bp, Artificial Sequence
  ENSG00000107341_28 (sequence is synthesized)
agtttacagccagtagcttggtcttattctcttggagccctaaaattaagcctttcattcccctttgctaaagcatctcactcccagggcagccccagcaccctggcattgcgggaggtg

SEQ ID NO: 161438 - DNA, 120 bp, Artificial Sequence
  ENSG00000107341_29 (sequence is synthesized)
ctctgctgcacagctgttccatcaggccctattggcctctgttagacattgactcagggagccggagcgccaagtggaggttgtacctttcagccctttggggtgttaaaagtgtcaagg

SEQ ID NO: 161439 - DNA, 120 bp, Artificial Sequence
  ENSG00000107341_30 (sequence is synthesized)
gctgggtttgcctctgatgagtacaatcagttccagaagactgggtaagtctcttgctagcaggtggacattctggtattttagactgactgaacgaaacccagaggctggttccagagc

SEQ ID NO: 161440 - DNA, 120 bp, Artificial Sequence
  ENSG00000107341_31 (sequence is synthesized)
tctgtccctgagaacacatccctgtggaaaatacttgagtttgtaattttttttcccccttctgggagtggaggtctcaggctcaatccggaaccatgtacgtacagttttgcttattat

SEQ ID NO: 161441 - DNA, 120 bp, Artificial Sequence
  ENSG00000107341_32 (sequence is synthesized)
ttgatgtgacatgaactcaaaatcctgcatttttagattccttttagttctaattgaggcctcactagatgctcttcagttctgtgtattttgaggctgggtggagaagtatatgattct

SEQ ID NO: 161442 - DNA, 120 bp, Artificial Sequence
  ENSG00000107341_33 (sequence is synthesized)
gctgttgattctttcagtcttccccccttctccttttatcaatcattccagagttattttctattagtcaaacttttttgtagaaccttctttcccttaccctggcaaattgcttcttta

SEQ ID NO: 161443 - DNA, 120 bp, Artificial Sequence
  ENSG00000107341_34 (sequence is synthesized)
cttgctggtttccttacgtttggggcacatgttgtaagaaactgattggaaggggaaatgtgcagctctccactggaaaggaactctccacccctcccatcctgataaaacaaacaaggt

SEQ ID NO: 161444 - DNA, 120 bp, Artificial Sequence
  ENSG00000107341_35 (sequence is synthesized)
ttacatttacaactaaaaggattcagatgcaattttcaactattctgaaaccagcaggacacacctgactttaatagttttagctgaaattgtagatgttttgcttcagtttaacttatg

SEQ ID NO: 161445 - DNA, 120 bp, Artificial Sequence
  ENSG00000107341_36 (sequence is synthesized)
agaaaagattatctgacggattttgtgttgacttcccctttagtggtttattttgtctttttctgcccatctgtctactaataaaatgtgaaataaaatacctgtattgctacttcccca

SEQ ID NO: 161446 - DNA, 120 bp, Artificial Sequence
  ENSG00000107362_0 (sequence is synthesized)
cggacggcgcccggagcgcggatctcgccttgtggaggacagcgcgtcggctgcggttctctctcgaccccttctgcccggcgcttcggcccgggccgctcaggtgcagagcatgaataa

SEQ ID NO: 161447 - DNA, 120 bp, Artificial Sequence
  ENSG00000107362_1 (sequence is synthesized)
tctttcatttagtgagctatgttgcctcttctgctgtccaccttgtccagggaagattgcttcaaaattagcgtttttgccacctgatccaacttacacactgatgtgtgatgaaagcgg

SEQ ID NO: 161448 - DNA, 120 bp, Artificial Sequence
  ENSG00000107362_2 (sequence is synthesized)
aagccgttggactttacatctgtctgaacgagcagactggcagtattcttctagagaaaaagatgctattgagtgtttcatgactagaaccagtaaaggcaacagaattgcttgtatgtt

SEQ ID NO: 161449 - DNA, 120 bp, Artificial Sequence
  ENSG00000107362_3 (sequence is synthesized)
tgtacgttgttcacccaatgcgaaatacactttactcttctcacatggaaatgctgttgatcttggtcaaatgagcagcttttacataggactaggatcacggattaattgtaatatatt

SEQ ID NO: 161450 - DNA, 120 bp, Artificial Sequence
  ENSG00000107362_4 (sequence is synthesized)
ctcatatgattattctggatatggtgccagttccgggaaacccacagagaagaacctctatgcagacattgaagctgcttggcttgctcttaggacaagatatggcattcgccctgaaaa

SEQ ID NO: 161451 - DNA, 120 bp, Artificial Sequence
  ENSG00000107362_5 (sequence is synthesized)
tgtgattatatatggccaaagtatagggacagtaccgtctgtggatcttgctgctcgatatgagagtgctgctgttattcttcattctcctctgacttcgggaatgcgagttgcctttcc

SEQ ID NO: 161452 - DNA, 120 bp, Artificial Sequence
  ENSG00000107362_6 (sequence is synthesized)
tgataccaagaagacctactgttttgatgcattcccaaacattgacaaaatctctaagataacctctccagtattaataattcatgggactgaagatgaagtcattgacttttcacatgg

SEQ ID NO: 161453 - DNA, 120 bp, Artificial Sequence
  ENSG00000107362_7 (sequence is synthesized)
cctcgcattgtttgaacgttgccaaagacctgtggagcctctctgggttgaaggagcaggtcacaatgatgtggaactttatggacagtatcttgaaaggttgaaacagtttgtgtcaca

SEQ ID NO: 161454 - DNA, 120 bp, Artificial Sequence
  ENSG00000107362_8 (sequence is synthesized)
ggaactggtaaatttgtaaaatattctgtaaatttgctactgggttttcctttcttgctgaactgcactctttggtaaataacataaaacctgaaggttttgtttgcaaatcatgtcagt

SEQ ID NO: 161455 - DNA, 120 bp, Artificial Sequence
  ENSG00000107362_9 (sequence is synthesized)
tgccttcataaatgtacaggtaatgatttgttaacagacttaatgaaggttttaattaccagaactaaaaactggaaataacagtaccgtgcagtcaggctgtgtaatttatattttttc

SEQ ID NO: 161456 - DNA, 120 bp, Artificial Sequence
  ENSG00000107362_10 (sequence is synthesized)
atgcttttgcatactagaaacaaatttataaatatttttaaaacatctcaatatattaaatcttatcctggaatacaactgtaatattttgaaaaaagctatgtatctaaagcaatttaa

SEQ ID NO: 161457 - DNA, 120 bp, Artificial Sequence
  ENSG00000107362_11 (sequence is synthesized)
gaatgaactgtaaaagagatttaaaaccatgcaagttcactagaattaacctaaaccctgttgtacagggatagaggtttaaagttattttattgtaaaatacattgaattttctgtata

SEQ ID NO: 161458 - DNA, 120 bp, Artificial Sequence
  ENSG00000107362_12 (sequence is synthesized)
ctctgattacatacatttatcctttaaaaaagatgtaaatcttaatttttatgccatctattaatttaccaatgagttaccttgtaaatgagaagtcatgatagcactgaattttaacta

SEQ ID NO: 161459 - DNA, 120 bp, Artificial Sequence
  ENSG00000107362_13 (sequence is synthesized)
gttttgacttctaagtttggtactgtgaggcaagtacttaaaattttcatgctggttacttaaaaggcatttagagatttcaagaatgattttgtatacgatgttttaaattttgactga

SEQ ID NO: 161460 - DNA, 120 bp, Artificial Sequence
  ENSG00000107362_14 (sequence is synthesized)
tctcatagtcttcatagaattgcagtagtcttcattgtatgaaatcccgaaagtccatgagttgatcttaaagaccactaacagactggctatcagatcccttttcactttggctatttt

SEQ ID NO: 161461 - DNA, 120 bp, Artificial Sequence
  ENSG00000107362_15 (sequence is synthesized)
tcagatcccttttcactttggctatttttttcattttttgagatggagtcttgctgtgtcactgaggctggagtgcagtggcgcgatcttgattcactgcaacctctgcctcccgggatc

SEQ ID NO: 161462 - DNA, 120 bp, Artificial Sequence
  ENSG00000107362_16 (sequence is synthesized)
aggcatgagccactgcgcctggcccactttagctatttttaaaaataggacctattgttttggattactatctgagaatttcatggattcactcctgggtataggagataagaatacgtt

SEQ ID NO: 161463 - DNA, 120 bp, Artificial Sequence
  ENSG00000107362_17 (sequence is synthesized)
gggtataggagataagaatacgtttaattcataacttttatattaaccaatatagtaaaaaaataaagctcacacatacaaaaactaagttgcctttccttgaatgaaccctgtctgaat

SEQ ID NO: 161464 - DNA, 120 bp, Artificial Sequence
  ENSG00000107362_18 (sequence is synthesized)
aaaacaatgaaaaataaaaataaaattaatggtatgtagtctaatttgtaaatgaatgaatatggaaataatacacactgtggatatattttaaggccttatgtagttttaattgttctg

SEQ ID NO: 161465 - DNA, 120 bp, Artificial Sequence
  ENSG00000107362_19 (sequence is synthesized)
ctcgttccgtggttatgtttaagactatagtatatgactctcttcaaagtatatcaagtattgtgaatgctttggttcagatgtgtcaaattaacagtaaaacaacaaatataccactga

SEQ ID NO: 161466 - DNA, 120 bp, Artificial Sequence
  ENSG00000107362_20 (sequence is synthesized)
cagcgccccgcaccggggccgttagtcagcagaacgcgagctcttgtggaggagcagggccggcgcgaggcgagactcgggagcgtgagcggggcccctggggcgccgccgtccttcttc

SEQ ID NO: 161467 - DNA, 120 bp, Artificial Sequence
  ENSG00000107362_21 (sequence is synthesized)
ggtctacagttttcaatgacggtactatgtattccattatcttctctttaccaaacttaactggattaatataccaatgatcctttcaaattatatgacataaacttatttgctctccaa

SEQ ID NO: 161468 - DNA, 120 bp, Artificial Sequence
  ENSG00000107371_0 (sequence is synthesized)
ggtgtttggtggagcccgcgatggccgaacctgcgtctgtcgcggctgaatctctcgcgggcagcagggcgcgcgctgcacgcacagtactaggtcaggtggtgctcccgggtgaggagc

SEQ ID NO: 161469 - DNA, 120 bp, Artificial Sequence
  ENSG00000107371_1 (sequence is synthesized)
tgctcctgccggaacaggaggacgcggaaggccctgggggtgcagtggagcgaccgttgagcctgaatgctagagcgtgctcgcgggtgcgcgttgtatgcggtccgggccttcggcgct

SEQ ID NO: 161470 - DNA, 120 bp, Artificial Sequence
  ENSG00000107371_2 (sequence is synthesized)
gtggggaccgcctgctggtcaccaagtgcggccgcctccgtcacaaggagcccggcagtggcagcggcggcggtgtttactgggtggactctcagcagaagcggtatgttccagtaaaag

SEQ ID NO: 161471 - DNA, 120 bp, Artificial Sequence
  ENSG00000107371_3 (sequence is synthesized)
gagaccatgtgattggcatagtgacagctaaatctggagatatattcaaagttgatgttggagggagtgagccagcttctttgtcttacttgtcatttgaaggtgcaactaaaagaaaca

SEQ ID NO: 161472 - DNA, 120 bp, Artificial Sequence
  ENSG00000107371_4 (sequence is synthesized)
gaccaaatgtgcaggttggagatctcatctatggccagtttgtggttgctaataaagacatggaaccagagatggtctgtattgacagctgtggacgagccaatggaatgggtgtcattg

SEQ ID NO: 161473 - DNA, 120 bp, Artificial Sequence
  ENSG00000107371_5 (sequence is synthesized)
gacaggatggtctgctttttaaagtgactctgggcttaattagaaagctattagctccagattgtgaaatcatacaggaagtgggaaaactctatccactggagatagtatttggaatga

SEQ ID NO: 161474 - DNA, 120 bp, Artificial Sequence
  ENSG00000107371_6 (sequence is synthesized)
atggaagaatatgggttaaggcaaaaaccatccagcagactttaattttggcaaacattttagaagcttgtgaacacatgacgtcagatcaaagaaaacagatcttctccagattggcag

SEQ ID NO: 161475 - DNA, 120 bp, Artificial Sequence
  ENSG00000107371_7 (sequence is synthesized)
gtggacttttttacaggtcagttgaggcaaaaaactatgggttttttcaggtgaacctcccccatttaaatactcagaagataaggtgtgaatgtatgtattattagagtccgaaagtat

SEQ ID NO: 161476 - DNA, 120 bp, Artificial Sequence
  ENSG00000107371_8 (sequence is synthesized)
ttttataagttactggttttcacccacgcttttgtgggagagaaaatcattgcaaaatcattttttttgttcggtacaataaagtttactaaaaaacagtattagggtttatttggagtt

SEQ ID NO: 161477 - DNA, 120 bp, Artificial Sequence
  ENSG00000107371_9 (sequence is synthesized)
aactcccttagtaattgctacagcttccataattaactggaggtcagcagtaaaataattttgtgattataacagtaagccaggttcaccagaggaaatgtggaatacctaagtataaag

SEQ ID NO: 161478 - DNA, 120 bp, Artificial Sequence
  ENSG00000107371_10 (sequence is synthesized)
cagcaaagaaatgtcacctgtagtcccattattcagcgggtgagtatataacaacgaaatactttttcatttaccaagtattgtgttttgcatggattaactcctttattctaactgcag

SEQ ID NO: 161479 - DNA, 120 bp, Artificial Sequence
  ENSG00000107371_11 (sequence is synthesized)
aagacacttatcctcataattgaaactgaggcacagaatttaacttggcctacattctctatattcatcaaattgaaattatagttattatagcttatatgccactttgtaatatacttt

SEQ ID NO: 161480 - DNA, 120 bp, Artificial Sequence
  ENSG00000107371_12 (sequence is synthesized)
tgtctacttcaaacagcatgatacatttcacaactttagtcacatatttcatgttacaggatatttttgagttttatcattatataaataacactatgaggatttctgaatccaaatctg

SEQ ID NO: 161481 - DNA, 120 bp, Artificial Sequence
  ENSG00000107371_13 (sequence is synthesized)
gccaagtcttattttgctaaaatcatttcctaggagctaagcatagaaaactcttctatgctatttagtatattaaccaaaacctttagaggtaaagagactgccaggtgatccacatca

SEQ ID NO: 161482 - DNA, 120 bp, Artificial Sequence
  ENSG00000107371_14 (sequence is synthesized)
gtgattcttggtttctagacctctgagaatatgtgagatacagatcccctgaagcctatccatagaaagtcctttttggatcaaagagattatagaactctatttgttgataaagaccaa

SEQ ID NO: 161483 - DNA, 85 bp, Artificial Sequence
  ENSG00000107371_15 (sequence is synthesized)
ggccaccatacctggctaatttttaattttttagaggcagggtcttcctatattgcctaggctagtcttgaactcctggcctcaa

SEQ ID NO: 161484 - DNA, 120 bp, Artificial Sequence
  ENSG00000107371_16 (sequence is synthesized)
gtgatcctcttgcctcggcctcccaagatgctgggattatatgcaggagccactgtgcccagcctaatagtagggaattcttggttaacattttcagaggactagagttagaagtttcag

SEQ ID NO: 161485 - DNA, 120 bp, Artificial Sequence
  ENSG00000107371_17 (sequence is synthesized)
ttggttaacattttcagaggactagagttagaagtttcaggtaggaacctcagatctgcagttttcctaacttatctgaaaaatatgcaaacactagcacataaaacagatgtctaaaaa

SEQ ID NO: 161486 - DNA, 120 bp, Artificial Sequence
  ENSG00000107371_18 (sequence is synthesized)
gagagtttacaatttacatactgtgatgtaaggcctaaaattaaggcccagtattatgcactgccttgacatctgtcaaaactgggaatacttcaaatagcctaatagtaagctcccctc

SEQ ID NO: 161487 - DNA, 120 bp, Artificial Sequence
  ENSG00000107371_19 (sequence is synthesized)
gggactccggaggggtggtgcggcagtgagagtggtagccctgctttgagaagacctcccaaaagaagagagggaccctgaggccctcttttgttcaggcaaacctagagccaccgtagt

SEQ ID NO: 161488 - DNA, 120 bp, Artificial Sequence
  ENSG00000107371_20 (sequence is synthesized)
cttgtgcccacttctgcatgtcctttagagggaccgtgaacaataggaacatagcctgagaagggcgaccaggagagaaaaacgtttggagaccgtgagtcatgattatagtcttcaaaa

SEQ ID NO: 161489 - DNA, 120 bp, Artificial Sequence
  ENSG00000107371_21 (sequence is synthesized)
taatcttcaggattcagattctttgtaacgtttgaatttctcctcagagttagaaatcagtatccattttaacacatttggaaactcatgaatttaatcctatcttcttggaaacatatc

SEQ ID NO: 161490 - DNA, 120 bp, Artificial Sequence
  ENSG00000107372_0 (sequence is synthesized)
aggccgcggatggcggcgtccgggggaggggagcccgcccgccagcccaggaagcacaaagacggaggcgtcatcctgtcgtcgtggcccgagacctggctcccggcgtccctggctcgc

SEQ ID NO: 161491 - DNA, 120 bp, Artificial Sequence
  ENSG00000107372_1 (sequence is synthesized)
tccacagcacgcagaaaaatatggctcaggagactaaccagaccccggggcccatgctgtgtagcacaggatgtggcttttatggaaatcctaggacaaatggaatgtgttcagtttgct

SEQ ID NO: 161492 - DNA, 120 bp, Artificial Sequence
  ENSG00000107372_2 (sequence is synthesized)
acaaagaacatcttcagaggcagcaaaatagtggcagaatgagcccaatgggaacagctagtggttccaacagtcctacctcagattctgcatctgtacagagagcagacactagcttaa

SEQ ID NO: 161493 - DNA, 120 bp, Artificial Sequence
  ENSG00000107372_3 (sequence is synthesized)
acaactgtgaaggtgctgctggcagcacatctgaaaaatcaagaaatgtgcctgtggctgccttgcctgtaactcagcaaatgacagaaatgagcatttcaagagaggacaaaataacta

SEQ ID NO: 161494 - DNA, 120 bp, Artificial Sequence
  ENSG00000107372_4 (sequence is synthesized)
ccccgaaaacagaggtgtcagagccagttgtcactcagcccagtccatcagtttctcagcccagtacttctcagagtgaagaaaaagctcctgaattgcccaaaccaaagaaaaacagat

SEQ ID NO: 161495 - DNA, 120 bp, Artificial Sequence
  ENSG00000107372_5 (sequence is synthesized)
gtttcatgtgcagaaagaaagttggtcttacagggtttgactgccgatgtggaaatttgttttgtggacttcaccgttactctgacaagcacaactgtccgtatgattacaaagcagaag

SEQ ID NO: 161496 - DNA, 120 bp, Artificial Sequence
  ENSG00000107372_6 (sequence is synthesized)
ctgcagcaaaaatcagaaaagagaatccagttgttgtggctgaaaaaattcagagaatataaattacttcttgtgaagagactgaaactttgtttttattttaatatatcgtaggaaaac

SEQ ID NO: 161497 - DNA, 120 bp, Artificial Sequence
  ENSG00000107372_7 (sequence is synthesized)
attaaagagcagatgcatggccatttttctttgatgttctccagagttttacattacacttgtctgtcttataattgatattttaggatgtttgggtgtttgttacaggcagaattggat

SEQ ID NO: 161498 - DNA, 120 bp, Artificial Sequence
  ENSG00000107372_8 (sequence is synthesized)
agatacagccctacaaatgtatatgccctcccctgaaaaaaattggatgaaaatctgcacagcaaagtgaaacacacagataataggaacaaaatgtagttcccatgtgccaaacaaaat

SEQ ID NO: 161499 - DNA, 120 bp, Artificial Sequence
  ENSG00000107372_9 (sequence is synthesized)
aaatgaaatctctgcatgtttgcagcatatctgccttttgggaatgtaatcaaggtataatctttggctagtgttatgtgcctgtatttttttaaaatggtacaccagaaaaggactggc

SEQ ID NO: 161500 - DNA, 120 bp, Artificial Sequence
  ENSG00000107372_10 (sequence is synthesized)
agtctacttctaccatagttaaacttcaccctctttaatttcacaacatattctttggaagcaggaagaaatgctcataaagaggatcagaccttctttcccgtgaaaccagtatttggc

SEQ ID NO: 161501 - DNA, 120 bp, Artificial Sequence
  ENSG00000107372_11 (sequence is synthesized)
gccatatataagcctggttaaattggtcatctaaagctgtcaaataagacattctgtgaaaggtaaacatcgaaactggttataagtaaaaccatcaagccaacaacagggtcttgagat

SEQ ID NO: 161502 - DNA, 120 bp, Artificial Sequence
  ENSG00000107372_12 (sequence is synthesized)
aacctttgaagcttattgtactggcctgcaccagaagatgtctgcattactcattgctaaaaatgtgtagcacagaactgcactaggattaatttgtttacaagaagaaatttaaactct

SEQ ID NO: 161503 - DNA, 120 bp, Artificial Sequence
  ENSG00000107372_13 (sequence is synthesized)
acgtttggttttcacatacagcagctctattgaataacatgcatctgaattttaagttgcaaaggtatctgaataatttttcatgtgcatcttttgtcgaatgttttggttcaagaaaga

SEQ ID NO: 161504 - DNA, 120 bp, Artificial Sequence
  ENSG00000107372_14 (sequence is synthesized)
atgtttaaagctttttaaaagacttcagttcttaatgtaactgtacccttctgcatggaaaatcataaccaacatggctgcagtagacttcttagtggtatccagcaccacttgcagagg

SEQ ID NO: 161505 - DNA, 120 bp, Artificial Sequence
  ENSG00000107372_15 (sequence is synthesized)
gctgctttatcatattgtacttgggtgtaggactctagtgttcttgggtgtattgcatgggctgcattatctacagcattgtacaataacaactagaaaaggcagtatacttcactgatg

SEQ ID NO: 161506 - DNA, 120 bp, Artificial Sequence
  ENSG00000107372_16 (sequence is synthesized)
cttgtctggtaataatcacttctgtgttataatggaaggttttttgtgatgtatgaaacttgtgttttttatatataaatgagtatagttagtgttgtggtaatgcctgttttcatctgt

SEQ ID NO: 161507 - DNA, 120 bp, Artificial Sequence
  ENSG00000107372_17 (sequence is synthesized)
aaatagttaagtatgtacacgaggcactacttctgatttattgcaatgttcagtcctagtttttacttttattcttaaagcattcagttttgctttcaattttatgtaccttagttctga

SEQ ID NO: 161508 - DNA, 120 bp, Artificial Sequence
  ENSG00000107372_18 (sequence is synthesized)
gttagacctgcagatgtgtacagatagttcatatttatgtattgcacataatcatgctattcagcattgatgctatattgtattatgtaaataataaaagccatgtacagagggaaactt

SEQ ID NO: 161509 - DNA, 120 bp, Artificial Sequence
  ENSG00000107372_19 (sequence is synthesized)
cacttgttcattgggtttttaagccatagttggagtcctaaagggggaaaattagaaaatgttactttacatggctatataattttttttcctttgccatcgctgaacttgttcaagtga

SEQ ID NO: 161510 - DNA, 120 bp, Artificial Sequence
  ENSG00000107372_20 (sequence is synthesized)
taatcaagagatattagaagcatttgcaggtatgatacctgataggcagtttatttttgaagaattcaataggcacctttgggattaaaacaattttaaaatttgagaaagatgaaattt

SEQ ID NO: 161511 - DNA, 120 bp, Artificial Sequence
  ENSG00000107372_21 (sequence is synthesized)
gaacaattatggcctacctcgcttctccatgttgtaaaagatgatgttttatgacaattctgaagaagaaagtaggtatgacttagtttacaaaaagagttctgttttatttctgttttg

SEQ ID NO: 161512 - DNA, 120 bp, Artificial Sequence
  ENSG00000107372_22 (sequence is synthesized)
ggacttggtctctgtagcgtttatgccagatcataaagaacaaggggtgacaggtacatgttgactttacctggggtaaatgattaccagagtgcaactgttgcttctctgtgatggagt

SEQ ID NO: 161513 - DNA, 120 bp, Artificial Sequence
  ENSG00000107372_23 (sequence is synthesized)
ttggggtggaaataccctagttttatctgtcagttctttgcatgctgctacttttgcttcaagttagggaggtacatatgtatgtcaaagttcctatactgacatagggtagtatttctc

SEQ ID NO: 161514 - DNA, 120 bp, Artificial Sequence
  ENSG00000107372_24 (sequence is synthesized)
tgaatatgaaaagtcacaattgagttgaaaatttagaagttgaagatttagaagggcaacttaatttttcaagttaaaaatggaagtaagagtggtatagagaaggtaagatgagccctc

SEQ ID NO: 161515 - DNA, 120 bp, Artificial Sequence
  ENSG00000107372_25 (sequence is synthesized)
tggtatagagaaggtaagatgagccctcggactccatcactctgaaggtctgagtagtagcaagagatagatttttgtttggccaggctgcagtgcaatggcgtaatcttggctcactgc

SEQ ID NO: 161516 - DNA, 120 bp, Artificial Sequence
  ENSG00000107372_26 (sequence is synthesized)
taaaccagatcagaacaaagatttgtcagggttgtccattgactggggagaaagggaatcagtgtgtaaggcacctgagaggactcagttctacccaaattcttgcattcaaacctgaat

SEQ ID NO: 161517 - DNA, 120 bp, Artificial Sequence
  ENSG00000107372_27 (sequence is synthesized)
gcaaggccatgaagtcctttgaaatgtacagatattaagcaatttaataatataccatgtttcccttacataagcagacaaatatttacacccccatgacctgaagttttgttaggctgt

SEQ ID NO: 161518 - DNA, 120 bp, Artificial Sequence
  ENSG00000107372_28 (sequence is synthesized)
gaccacatgaattcgcagtataaatgggtgagtcctttttgaaaacctcatcttcagtgtgcctgatctgtaaaactagagcctcaggtttgatcctaggtaggcttcccacaacgtggg

SEQ ID NO: 161519 - DNA, 120 bp, Artificial Sequence
  ENSG00000107372_29 (sequence is synthesized)
gaaaattagtttgtgagggaaagctgtttctgagcattatggcatagtgattaagatgagggaccctggaaccagcccgtgattttgggcaagttattttaggtccactttggactgctt

SEQ ID NO: 161520 - DNA, 120 bp, Artificial Sequence
  ENSG00000107372_30 (sequence is synthesized)
catctcttaaatgaagacagcaaccaccttcaggagtgtgaaggtgacaacacttaaaactgtgcctggcacattgtatttgctattgtcttaatgttctggaataatggtttccataac

SEQ ID NO: 161521 - DNA, 120 bp, Artificial Sequence
  ENSG00000107372_31 (sequence is synthesized)
ttgggaagaaaactttgagaacaggattggttacatcaagttgtatagtgaaaagataaagatttgttatttaaacttgcagtttaaagtcattagaatcattcttttccgtaaggcttt

SEQ ID NO: 161522 - DNA, 120 bp, Artificial Sequence
  ENSG00000107372_32 (sequence is synthesized)
ctttgcaagagatctgcattaaataaagttgctaggaaataactaaaattggggaaataatctaataatagcaagatgttaagcatactattattgtattttgggggttggtaataacat

SEQ ID NO: 161523 - DNA, 120 bp, Artificial Sequence
  ENSG00000107372_33 (sequence is synthesized)
tcacatggatttatcaatacacactgagaagcaaagcctctcaagctgtcccatatcctccatttcaaaggcacacatacattttaggtaactcataatttagaaaggttatttaatctt

SEQ ID NO: 161524 - DNA, 120 bp, Artificial Sequence
  ENSG00000107372_34 (sequence is synthesized)
ttccacatgtaaatatttgaatatgtacaaagacttgatttgactcttgtctgtttttgttttgttttgtttgtttgagacagaggctccgtcgcccaggctggagtaaaatggcatggt

SEQ ID NO: 161525 - DNA, 69 bp, Artificial Sequence
  ENSG00000107372_35 (sequence is synthesized)
acccgtcaccacacctggctaatgttttttgttttttgggtttttttgtatttttagtagagagagggt

SEQ ID NO: 161526 - DNA, 120 bp, Artificial Sequence
  ENSG00000107372_36 (sequence is synthesized)
ctgcgcctggccgactcttgtctgtttgaatgcaaagttctcaatagtggtttttgtccataagtattaacttataattttggagagtgataggtatggttgctggttgattagcaataa

SEQ ID NO: 161527 - DNA, 120 bp, Artificial Sequence
  ENSG00000107372_37 (sequence is synthesized)
gattatgtagccttaaactagctagaagagtttgcatgggtgaggcaacaggctgttaacaaaaagaaactggaaatacagtttcccctgtttgtttctcctgtttgtacaatctgcttt

SEQ ID NO: 161528 - DNA, 120 bp, Artificial Sequence
  ENSG00000107372_38 (sequence is synthesized)
aaaaacaagtgaacatgcaccatgtcagtcatggtgaatcggccaacagccagcccttgccagttgacatcacagtctaagatgggaaactggtacagatagacatgaagagagcttagc

SEQ ID NO: 161529 - DNA, 120 bp, Artificial Sequence
  ENSG00000107372_39 (sequence is synthesized)
agtggttgaggtggtgactaaatatacagtcattgaataaataccgtgtagcaaatgtaaaaaaaaaaaaaaaagtacaacagaatacaaaagtgccatttaatattttatagctatttc

SEQ ID NO: 161530 - DNA, 120 bp, Artificial Sequence
  ENSG00000107372_40 (sequence is synthesized)
tatgcacaagtgctggttttaaatttatataaaagcaaagactgtttctgtgttttcttccagagtatttctgttacagccatagaagtaaagttaataaatgtaagactttttttgttt

SEQ ID NO: 161531 - DNA, 120 bp, Artificial Sequence
  ENSG00000107372_41 (sequence is synthesized)
acagcccgggcgccgggcggcgagtgcgttagtcggccgggacgcggagctgtgtgcatctcctacgcgggctcgctcgctcccgggagccgcgcagcttccccggcggtggcaggagcg

SEQ ID NO: 161532 - DNA, 120 bp, Artificial Sequence
  ENSG00000107372_42 (sequence is synthesized)
gcgaagagcgccatcagcgggcccttacggccccaggcctcgcggcgcgcggtccgctcgccctcctcgtccgcccaacctgcggcctgtggaggcgtgaggcgacgacaggcgagcgcc

SEQ ID NO: 161533 - DNA, 120 bp, Artificial Sequence
  ENSG00000107372_43 (sequence is synthesized)
tcgagcagcgttagccgctgcggccgccggtcctccctccacctcctcctcggccccccctcgcttccctcctcccacttcccgagctccggcgtgtcccggccacgctcgacgctgctg

SEQ ID NO: 161534 - DNA, 80 bp, Artificial Sequence
  ENSG00000107372_44 (sequence is synthesized)
caggaacaaaggaagaccccgcggcggcggcggcgccacctccgcctgctgctccgacccgctcccggcccgcggcggcg

SEQ ID NO: 161535 - DNA, 120 bp, Artificial Sequence
  ENSG00000107372_45 (sequence is synthesized)
cgaacccggctttcgcatttgggaccctgcagggccctgaaaaggagcctttaaaagtcaattctactccatttggcaaagagggaactgaaatctggaaagtaaggacttgcccaaggt

SEQ ID NO: 161536 - DNA, 120 bp, Artificial Sequence
  ENSG00000107372_46 (sequence is synthesized)
ccgcgccccctgcccgttgcagccccccctagctctcccctaagaggagccgttcggggtcgggggtcgggggtcggggatccgcgtggggcctgcaggcgaagggctggccgggcctgc

SEQ ID NO: 161537 - DNA, 120 bp, Artificial Sequence
  ENSG00000107372_47 (sequence is synthesized)
ctgctgagctgctgttctgcatgactcagtggttttcggagagggccctgttgggctttattgagtgaggcctttgcttagagggggatggggtatcagtgggacccgaacttgttccaa

SEQ ID NO: 161538 - DNA, 120 bp, Artificial Sequence
  ENSG00000107372_48 (sequence is synthesized)
aatccattggaacatggggccgggggttctcggcgtcgtcttttgggcttctcgacgtcgctgcgtttttatcctgagatccgttttcatggaggaaatggaacacctcctttgtttggt

SEQ ID NO: 161539 - DNA, 120 bp, Artificial Sequence
  ENSG00000107372_49 (sequence is synthesized)
gcatttaggctgatgaatgtgaaattttttgctcgctttccacgcactccgtggaggtgtgttttcggggaagggtcggattatctttattgattgagtgtctcctaagggatagcatct

SEQ ID NO: 161540 - DNA, 120 bp, Artificial Sequence
  ENSG00000107372_50 (sequence is synthesized)
aaggagataccaagataaaggaacatataggtcacacatccccgttcttaaacctgggatttagatacagacttctaaaaacataaacgaatgtattttattccttatttttaggatttt

SEQ ID NO: 161541 - DNA, 120 bp, Artificial Sequence
  ENSG00000107372_51 (sequence is synthesized)
ttttaaagagtaggctttcagaactcagttggtgaaaatactgcaattttatctttgaagttttttgttaaaatgtttccccacacccccctaaaaaattaaggattctttgtagttgtc

SEQ ID NO: 161542 - DNA, 120 bp, Artificial Sequence
  ENSG00000107372_52 (sequence is synthesized)
caaagaacatcttcagaggcagcaaaatagtggcagaatgagcccaatgggtaagttatttccaaggaaaaacacatttgaaagaactggtggacagaaatacagaaccaagaattgggg

SEQ ID NO: 161543 - DNA, 120 bp, Artificial Sequence
  ENSG00000107372_53 (sequence is synthesized)
ctgagaatgctgaaagcacatggagagaacacctgataagagcttgaaattcaagcaacagcccaagtgcttgacatgactgatcaggaatgaatgactatctacaagcatcttatagct

SEQ ID NO: 161544 - DNA, 120 bp, Artificial Sequence
  ENSG00000107404_0 (sequence is synthesized)
ccccgggccgggccctgagcgcgcgggctccgcgccgccgccgcgccatggcggagaccaagattatctaccacatggacgaggaggagacgccgtacctggtcaagctgcccgtggccc

SEQ ID NO: 161545 - DNA, 120 bp, Artificial Sequence
  ENSG00000107404_1 (sequence is synthesized)
ccgagcgcgtcacgctggccgacttcaagaacgtgctcagcaaccggcccgtgcacgcctacaaattcttctttaagtccatggaccaggacttcggggtggtgaaggaggagatctttg

SEQ ID NO: 161546 - DNA, 120 bp, Artificial Sequence
  ENSG00000107404_2 (sequence is synthesized)
atgacaatgccaagcttccctgcttcaacggccgcgtggtctcctggctggtcctggctgagggtgctcactcggatgcggggtcccagggcacggacagccacacagacctgcccccgc

SEQ ID NO: 161547 - DNA, 120 bp, Artificial Sequence
  ENSG00000107404_3 (sequence is synthesized)
ctcttgagcggacaggcggcatcggggactcccggcccccctccttccacccaaatgtggccagcagccgtgacgggatggacaacgagacaggcacggagtccatggtcagtcaccggc

SEQ ID NO: 161548 - DNA, 120 bp, Artificial Sequence
  ENSG00000107404_4 (sequence is synthesized)
gggagcgtgcccgacgccggaaccgcgaggaggccgcccggaccaatgggcacccaaggggagaccgacggcgggatgtggggctgcccccagacagcgcgtccaccgccctcagcagcg

SEQ ID NO: 161549 - DNA, 120 bp, Artificial Sequence
  ENSG00000107404_5 (sequence is synthesized)
agcttgagtccagcagctttgtggactcggacgaggatggcagcacgagcaggctcagcagctccacggagcagagcacctcatccagactcatccggaagcacaaacgccggcggagga

SEQ ID NO: 161550 - DNA, 120 bp, Artificial Sequence
  ENSG00000107404_6 (sequence is synthesized)
agcagcgccttcggcaggcggaccgggcctcctccttcagcagcataaccgactccaccatgtccctcaacatcgtcactgtcacgctcaacatggaaagacatcactttctgggcatca

SEQ ID NO: 161551 - DNA, 120 bp, Artificial Sequence
  ENSG00000107404_7 (sequence is synthesized)
gcatcgtggggcagagcaacgaccgtggagacggcggcatctacattggctccatcatgaagggcggggctgtggccgctgacggccgcatcgagcccggcgacatgttgctgcaggtga

SEQ ID NO: 161552 - DNA, 120 bp, Artificial Sequence
  ENSG00000107404_8 (sequence is synthesized)
atgacgtgaactttgagaacatgagcaatgacgatgccgtgcgggtgctgcgggagatcgtttcccagacggggcccatcagcctcactgtggccaagtgctgggacccaacgccccgaa

SEQ ID NO: 161553 - DNA, 120 bp, Artificial Sequence
  ENSG00000107404_9 (sequence is synthesized)
gctacttcaccgtcccacgggctgacccggtgcggcccatcgaccccgccgcctggctgtcccacacggcggcactgacaggagccctgccccgctacgagctggaagaggcgccgctga

SEQ ID NO: 161554 - DNA, 120 bp, Artificial Sequence
  ENSG00000107404_10 (sequence is synthesized)
cggtgaagagtgacatgagcgccgtcgtccgggtcatgcagctgccagactcgggactggagatccgcgaccgcatgtggctcaagatcaccatcgccaatgccgtcatcggggcggacg

SEQ ID NO: 161555 - DNA, 120 bp, Artificial Sequence
  ENSG00000107404_11 (sequence is synthesized)
tggtggactggctgtacacacacgtggagggcttcaaggagcggcgggaggcccggaagtacgccagcagcttgctgaagcacggcttcctgcggcacacggtcaacaagatcaccttct

SEQ ID NO: 161556 - DNA, 120 bp, Artificial Sequence
  ENSG00000107404_12 (sequence is synthesized)
caccctgaacctcaacagtggctccagtgggacttcggatcaggacacgctggccccgctgccccacccggctgccccctggcctctgggtcagggctacccctaccagtacccgggacc

SEQ ID NO: 161557 - DNA, 120 bp, Artificial Sequence
  ENSG00000107404_13 (sequence is synthesized)
cccaccctgcttcccgcctgcctaccaggacccgggctttagctatggcagcggcagcaccgggagtcagcagagtgaagggagcaaaagcagtgggtccacccggagcagccgccgggc

SEQ ID NO: 161558 - DNA, 120 bp, Artificial Sequence
  ENSG00000107404_14 (sequence is synthesized)
cccgggccgtgagaaggagcgtcgggcggcgggagctgggggcagtggcagtgaatcggatcacacggcaccgagtggggtggggagcagctggcgagagcgtccggccggccagctcag

SEQ ID NO: 161559 - DNA, 120 bp, Artificial Sequence
  ENSG00000107404_15 (sequence is synthesized)
ccgtggcagcagcccacgcagtcaggcctcggctaccgccccggggctccccccgccccaccccacgaccaaggcctatacagtggtgggggggccacccgggggaccccctgtccggga

SEQ ID NO: 161560 - DNA, 120 bp, Artificial Sequence
  ENSG00000107404_16 (sequence is synthesized)
gctggctgccgtccccccggaattgacaggcagccgccagtccttccagaaggctatggggaacccctgcgagttcttcgtggacatcatgtgactcgtggcgcatgccccagccctgcc

SEQ ID NO: 161561 - DNA, 120 bp, Artificial Sequence
  ENSG00000107404_17 (sequence is synthesized)
tgaggtggggagctggcggtcctgccgcatgcagagctcgcgtgggcttgccttcgtgggggccaggacgggaggcagggtggggggcaggctggaccaccaccatctgccctggcagcc

SEQ ID NO: 161562 - DNA, 120 bp, Artificial Sequence
  ENSG00000107404_18 (sequence is synthesized)
tggctgctccagctcctgacagcacctgtgtctgagcagccgtgttgggggcgctccctctctgcccctcagcgagagcctcggacctcccaaccccttgtgtctggtggggatccctcc

SEQ ID NO: 161563 - DNA, 120 bp, Artificial Sequence
  ENSG00000107404_19 (sequence is synthesized)
tgggatgaggaagaccccctcgggctctcggctgacccccacctcctgcacagctgtgcccaggcccccagggtggtccatgcggggcaaccccctgcggtgcacaggccccctgtctgg

SEQ ID NO: 161564 - DNA, 120 bp, Artificial Sequence
  ENSG00000107404_20 (sequence is synthesized)
agtagggatctaatttatttatttattgcctggccggtgactcgggggaggaggcgaccctgtcatctgtcccacctgctgctgccccttggagcagcctgcaccttctctcctcccatc

SEQ ID NO: 161565 - DNA, 120 bp, Artificial Sequence
  ENSG00000107404_21 (sequence is synthesized)
cggcaacagtctgaaagtacgtggaggacgggaccggaagacgagagagggctggacatcctgcccaccgtgtcccagccagggcagggagggaccatggcccgcagggtcaaggggccc

SEQ ID NO: 161566 - DNA, 120 bp, Artificial Sequence
  ENSG00000107404_22 (sequence is synthesized)
cgatgtgcacagctgccacagggagggaggtcttggggagatgggcagtcaggtggcccgtccttggtgagtgcacacactgcgcgcacacatcgcggccttcctggcttctctggcccc

SEQ ID NO: 161567 - DNA, 120 bp, Artificial Sequence
  ENSG00000107404_23 (sequence is synthesized)
cacgtgtctgtgctgtagatactgtatcaaagtcccagcgtttagatggttaacatagagctgcttctgtgtaaatgctgcttattttaaacactaaaaagcgtttaattttatgggaca

SEQ ID NO: 161568 - DNA, 80 bp, Artificial Sequence
  ENSG00000107404_24 (sequence is synthesized)
ccacgctcaggaccccgggccgggcggtccctttaacggcgcggcccgaggggcgcaggcgggagggcggcggggctgag

SEQ ID NO: 161569 - DNA, 120 bp, Artificial Sequence
  ENSG00000107404_25 (sequence is synthesized)
tgggacccccatgagccatgttcctactacagcagttcctgtcccccagccagtggcggtgcttgggtggaggcacaggcccagcgagcctacagttgagctgccagctcccagacccac

SEQ ID NO: 161570 - DNA, 120 bp, Artificial Sequence
  ENSG00000107404_26 (sequence is synthesized)
aggcatgcagcactgcccaggcagccccaaacccatgacctctgggagaccctgcagtcagttcccaacctgctgcccccacagccgcccggaccaatgggcacccaaggggagaccgac

SEQ ID NO: 161571 - DNA, 120 bp, Artificial Sequence
  ENSG00000107404_27 (sequence is synthesized)
gggctgggggcgctggagcgggaggggccaggcagggaggtgggaccatgggggccttgctgtgtgaccaccgttcctgcaggcccatcagcctcactgtggccaagtgctgggacccaa

SEQ ID NO: 161572 - DNA, 120 bp, Artificial Sequence
  ENSG00000107404_28 (sequence is synthesized)
agcggaccttgggccgggagcaaaagcagtgggtccacccggagcagccgccgggccccgggccgtgagaaggagcgtcgggcggcgggagctgggggcagtggcagtgaatcggatcac

SEQ ID NO: 161573 - DNA, 120 bp, Artificial Sequence
  ENSG00000107438_0 (sequence is synthesized)
ctccgacagccgccgggggtgccctgcaagctgttccgcgcgtcctgcccgtctgtccccgcgggtcgtcgcccgccacagccgcgccatgaccacccagcagatagacctccagggccc

SEQ ID NO: 161574 - DNA, 120 bp, Artificial Sequence
  ENSG00000107438_1 (sequence is synthesized)
ggggccgtggggcttccgcctcgtgggcggcaaggacttcgagcagcctctcgccatttcccgggtcactcctggaagcaaggcggctctagctaatttatgtattggagatgtaatcac

SEQ ID NO: 161575 - DNA, 120 bp, Artificial Sequence
  ENSG00000107438_2 (sequence is synthesized)
agccattgatggggaaaatactagcaatatgacacacttggaagctcagaacagaatcaaaggctgcacagacaacttgactctcactgtagccagatctgaacataaagtctggtctcc

SEQ ID NO: 161576 - DNA, 120 bp, Artificial Sequence
  ENSG00000107438_3 (sequence is synthesized)
tctggtgacggaggaagggaagcgtcatccatacaagatgaatttagcctctgaaccccaggaggtcctgcacataggaagcgcccacaaccgaagtgccatgccctttaccgcctcgcc

SEQ ID NO: 161577 - DNA, 120 bp, Artificial Sequence
  ENSG00000107438_4 (sequence is synthesized)
tgcctccagcactactgccagggtcatcacaaaccagtacaacaacccagctggcctctactcttctgaaaatatctccaacttcaacaatgccctggagtcaaagactgctgccagcgg

SEQ ID NO: 161578 - DNA, 120 bp, Artificial Sequence
  ENSG00000107438_5 (sequence is synthesized)
gcccccgaaacagtccacgtctttcttggttttgcaggaaatcctggagtctgaagaaaaaggggatcccaacaagccctcaggattcagaagtgttaaagctcctgtcactaaagtggc

SEQ ID NO: 161579 - DNA, 120 bp, Artificial Sequence
  ENSG00000107438_6 (sequence is synthesized)
tgcgtcgattggaaatgctcagaagttgcctatgtgtgacaaatgtggcactgggattgttggtgtgtttgtgaagctgcgggaccgtcaccgccaccctgagtgttatgtgtgcactga

SEQ ID NO: 161580 - DNA, 120 bp, Artificial Sequence
  ENSG00000107438_7 (sequence is synthesized)
ctgtggcaccaacctgaaacagaagggccatttctttgtggaggatcaaatctactgtgagaagcatgcccgggagcgagtcacaccacctgagggttatgaagtggtcactgtgttccc

SEQ ID NO: 161581 - DNA, 120 bp, Artificial Sequence
  ENSG00000107438_8 (sequence is synthesized)
caagtgagccagcagatctgaccactgttctccagcaggcctctgctgcagctttttctctcagtgttctggccctctcctctcttgaaagttctctgcttactttggttttccctctgc

SEQ ID NO: 161582 - DNA, 120 bp, Artificial Sequence
  ENSG00000107438_9 (sequence is synthesized)
ttgtaaaacattgagtcccctccctgccttggttaattgactcacaccagctgtgcgatgcccgcttttacaattaaaggaaaactgttttgttcagtgtcaccttgtcagcaacactgt

SEQ ID NO: 161583 - DNA, 120 bp, Artificial Sequence
  ENSG00000107438_10 (sequence is synthesized)
gtcccttcgccccaccgttcttctctgctgcatttggacatcagccaaatttgaacccaatcaaatataacgtgtctgacactgattttgtttttactcaataaatgtatagactacaaa

SEQ ID NO: 161584 - DNA, 120 bp, Artificial Sequence
  ENSG00000107438_11 (sequence is synthesized)
ggggaccagagaggctaagttacttgcccaggatcacagagcagagtcactccagttcccatggccttgcttgaacatatatttataagtggttctgaagagctgagtgatacttatgca

SEQ ID NO: 161585 - DNA, 120 bp, Artificial Sequence
  ENSG00000107438_12 (sequence is synthesized)
ccaaaaagtaattgagctactgaagctatttagaagaagagcctctgattgcattgaagcagcagccagctctgactacaaagacatctcagtttcactgtgctggcagcaggtctgtgg

SEQ ID NO: 161586 - DNA, 120 bp, Artificial Sequence
  ENSG00000107438_13 (sequence is synthesized)
tcatgtcctaatcaatttttcaaacattctttacagcttagaccatgctcagcctccaagcagccttgtcatcgacaaagaatctgaagtttacaagatgcttcaggagaaacaggagtt

SEQ ID NO: 161587 - DNA, 120 bp, Artificial Sequence
  ENSG00000107438_14 (sequence is synthesized)
agctgctgaaaactgcatcagatactgaggtttaggacccaacttgtgtgtcctggtttggtgccttgaagaacctgttacctgtggttcagccataaggagacacccaggtgttcataa

SEQ ID NO: 161588 - DNA, 120 bp, Artificial Sequence
  ENSG00000107438_15 (sequence is synthesized)
gatcttcctcaactggatcccgagagtcaagggccttctccaaagggtggccagagccctgtgggcactgggagcctgggggtgttactgccaccttgatcctgcggacttggaattccc

SEQ ID NO: 161589 - DNA, 120 bp, Artificial Sequence
  ENSG00000107438_16 (sequence is synthesized)
atccaggaaggtcttgtaatgtggaaaaaaaaagttgtgaacttaccctgggatgatgacagtaatatttttagtataccttagtttagaaaatctaaccagataccttggttagagata

SEQ ID NO: 161590 - DNA, 120 bp, Artificial Sequence
  ENSG00000107443_0 (sequence is synthesized)
aacaatgggcggcgcgagcgtccaggcgctgggctctagctgaggccggcgcttagcggcccactgtccgcagcatgagcggggccggcgtccgccgcacgacggcggggctggggctgt

SEQ ID NO: 161591 - DNA, 120 bp, Artificial Sequence
  ENSG00000107443_1 (sequence is synthesized)
gagggccgcggttccggactcgagttgccgcgtcgggctgggcgcgccgccgggtcccatggagctggaggggcagtggtggcgaggacagctggccgccgatattcaccaagcgcttcg

SEQ ID NO: 161592 - DNA, 120 bp, Artificial Sequence
  ENSG00000107443_2 (sequence is synthesized)
ctacaaggagctgaagttgccctcctataaaggccagtcccctcagttaagtctcagacggtattttgctgacttgattgccattgtgagcaatcgcttcacactctgcccttctgcccg

SEQ ID NO: 161593 - DNA, 120 bp, Artificial Sequence
  ENSG00000107443_3 (sequence is synthesized)
ccatcttgctgtctatttactggacctgtttatggaccgctatgacatctctatccagcagctgcatttagttgcgctttcctgcctgcttctagcaagtaaatttgaagaaaaagaaga

SEQ ID NO: 161594 - DNA, 120 bp, Artificial Sequence
  ENSG00000107443_4 (sequence is synthesized)
cagtgtgcctaagctggagcagctcaacagcctgggttgtatgactaatatgaatctagtattaacaaaacaaaatttgctacatatggaactattattattagaaacctttcagtggaa

SEQ ID NO: 161595 - DNA, 120 bp, Artificial Sequence
  ENSG00000107443_5 (sequence is synthesized)
cctctgccttccaacagccgcccatttcattgagtattatctctctgaagcagtacacgaaacagatcttcatgacggctggccaatgatttgcttggaaaagactaaactctacatggc

SEQ ID NO: 161596 - DNA, 120 bp, Artificial Sequence
  ENSG00000107443_6 (sequence is synthesized)
caaatatgcagattacttcctggaagtatctttgcaagattatgcctttctaaattatgcaccttctttagtagctgctgcatgtgtggcttcttcgaggattatacttcgtctttctcc

SEQ ID NO: 161597 - DNA, 120 bp, Artificial Sequence
  ENSG00000107443_7 (sequence is synthesized)
aacgtggcctacaagactacatcgtcttactgcctactcttgggatttcttagtgcagtgtattgaacgactgttgatcgctcatgataatgatgtgaaagaagcaaacaaacagagagg

SEQ ID NO: 161598 - DNA, 120 bp, Artificial Sequence
  ENSG00000107443_8 (sequence is synthesized)
gcaagcaggacctcagtcagcgcaactaagtgtattccagacagcctcccagccatcacggccagttcactttcagcaacctcagtatctccatcagacacatcagacctcactgcagta

SEQ ID NO: 161599 - DNA, 120 bp, Artificial Sequence
  ENSG00000107443_9 (sequence is synthesized)
tcgccatcctacgtcagaacaaccaagctgtcagcagattgtatcgaccacacacacctcatcttacacactacagacatgtcctgctggcttccaaactagtgttcagggccttgggca

SEQ ID NO: 161600 - DNA, 120 bp, Artificial Sequence
  ENSG00000107443_10 (sequence is synthesized)
catgcagactggtgttgggatgtcactggcaataccagtagaagttaagccctgtctgagtgtttcttacaaccggagttatcagataaatgaacattacccttgtattactccatgttt

SEQ ID NO: 161601 - DNA, 120 bp, Artificial Sequence
  ENSG00000107443_11 (sequence is synthesized)
tgaaaggtgattatttgtgaagctgataaccgacccagactgctttgtgacatgaagctatgggtaagcgttttgtaaacttctgttcaaaaggaaagggatctaaatgacatcagaact

SEQ ID NO: 161602 - DNA, 120 bp, Artificial Sequence
  ENSG00000107443_12 (sequence is synthesized)
cttcaggtaccagcaccaggaagactgaatatcctttttaatgcaccatgaatcctgggagactaagcaaattaacagtatgtcaaattctgttacaacaaatccctgtatgacaaaaat

SEQ ID NO: 161603 - DNA, 120 bp, Artificial Sequence
  ENSG00000107443_13 (sequence is synthesized)
gttcaagtcctggctgatggtccaaatatttcaaaaatattcagtacaacagaaaatttggacagacttcaatttgccattttgagatttgacctgtggtagcatctgggcctaatgttg

SEQ ID NO: 161604 - DNA, 120 bp, Artificial Sequence
  ENSG00000107443_14 (sequence is synthesized)
gcttctaagtcaaagactaaatgtttatctcatctatggacttgccaaacagtcttttatgaaggaaagttacagtattaatttttgaaaaggttttttttattctgcaattttttattt

SEQ ID NO: 161605 - DNA, 120 bp, Artificial Sequence
  ENSG00000107443_15 (sequence is synthesized)
ttgttctacacatgaatttttgactaagtttaaactcatgaattgttatgctataccaatctgcagtaaaaaaaatttttttagatgattctatataacttcgtctcacaaatagtgtag

SEQ ID NO: 161606 - DNA, 120 bp, Artificial Sequence
  ENSG00000107443_16 (sequence is synthesized)
ttaactcagggaatttgtactacttggaaacacttaactgtaatgcaacatgccttgggaatgttatagtgtgaactacctttataacataggttaaaatacgcttgctagggtgtgttt

SEQ ID NO: 161607 - DNA, 120 bp, Artificial Sequence
  ENSG00000107443_17 (sequence is synthesized)
tcaaatgagaacataatatagctcagaatgaagtggtagttcctgtgattcataatacatatgtaggttttgcatatctcagtgcaatccatgatttatactcagaatcgacattcttaa

SEQ ID NO: 161608 - DNA, 120 bp, Artificial Sequence
  ENSG00000107443_18 (sequence is synthesized)
aaagttatttcaagggatggcataactgtaagaggtcagtgctagaataaagtcctgtaggtttattttggaagggactgtggccagggtagttctcaggttgtgctagagcagcacttt

SEQ ID NO: 161609 - DNA, 120 bp, Artificial Sequence
  ENSG00000107443_19 (sequence is synthesized)
gttatgtggaagacaggttttttaagcaacctttgaatccagctctagtcagtctaagcaggcaaaggtaactgatgactaaatttcagtagctactttcattggattgaccctacaact

SEQ ID NO: 161610 - DNA, 120 bp, Artificial Sequence
  ENSG00000107443_20 (sequence is synthesized)
gccctgggacatttcactgtaccagtattaactgcaaacagcaataattgtcattacagcaagggcagtttgggggtaaagcattttggaggaataaccttaaaaagttaaaaagtcatt

SEQ ID NO: 161611 - DNA, 120 bp, Artificial Sequence
  ENSG00000107443_21 (sequence is synthesized)
gtaataactgataaactgtatacattgtgctcctttctgtgggagaagaaagatttggtggagggaagctttctggtttaaaaattagtaaggtgtgtctttttgttttttttaagatag

SEQ ID NO: 161612 - DNA, 120 bp, Artificial Sequence
  ENSG00000107443_22 (sequence is synthesized)
cacttgaatagaagggaaaactgcatggcagatacgtgactgccacaatatgcatcgaagacaaacttactataaagatgttgtgggtatgcagcaggagtctcagtaatcaagccaatg

SEQ ID NO: 161613 - DNA, 120 bp, Artificial Sequence
  ENSG00000107443_23 (sequence is synthesized)
gcctttgtcaggaagggaaggggctcaacacagtgatggactgatccagatggctcccggggatgaatgtgggtgggtagcttctgtcagtatcaatgcttagagaaatatcctttcctt

SEQ ID NO: 161614 - DNA, 120 bp, Artificial Sequence
  ENSG00000107443_24 (sequence is synthesized)
aaaaagaaaataacttttatatttagagtacatagggcatgatgtggatttattagtctggtagataaaatgaaaaaccactcaggtaagaacactcactcatggcagtttttaagcatg

SEQ ID NO: 161615 - DNA, 120 bp, Artificial Sequence
  ENSG00000107443_25 (sequence is synthesized)
aaaattgttttctgaaagtatcatcacttttcctttttaaagaaggctgctaattggattttggtagttcttacctcaagaaaacttgaattatttgggggaaagtaggctcaaaagaga

SEQ ID NO: 161616 - DNA, 120 bp, Artificial Sequence
  ENSG00000107443_26 (sequence is synthesized)
atatatctttcacattcacattcagaacccagcaacctggagtccaattttcagtattttaactacctcaataatgctatgaatgtaagatattgggatagagatcccaacttgaaacaa

SEQ ID NO: 161617 - DNA, 120 bp, Artificial Sequence
  ENSG00000107443_27 (sequence is synthesized)
cagccagtgcctgtggtaacttaatgtcttgtcaaatacttttattgattggtttatatgccattcttgttatagaagaatatgccttttaaaaaagcttattaataacactttcccaat

SEQ ID NO: 161618 - DNA, 120 bp, Artificial Sequence
  ENSG00000107443_28 (sequence is synthesized)
ttatattttaaaaagctaaagaacactggattaataatcttttgggagggtagaataaaataattgattactattgctgcatacccggggtgggatggggtggttggagaaccagaacta

SEQ ID NO: 161619 - DNA, 120 bp, Artificial Sequence
  ENSG00000107443_29 (sequence is synthesized)
tttttaaaacattaggtttcaatataaatacaactcacaactgctagctttggggggtgggggaacattgtgtgggttttgttttgtttaatttattgattagtctttaaagtaggcttt

SEQ ID NO: 161620 - DNA, 120 bp, Artificial Sequence
  ENSG00000107443_30 (sequence is synthesized)
tttttttttttttgagaatactggaccatcattaaatgtgtactgtgaagagattaatatgtatgaagggctttaccaaagtccactaaataaacactactcaagtacagactgcaaacc

SEQ ID NO: 161621 - DNA, 120 bp, Artificial Sequence
  ENSG00000107443_31 (sequence is synthesized)
aaaatgtatctgtgttacgacattaattgcaaatagcaagtatggtgctaaagtctacaccaatggaattagatgagtgctatgcacttaattttaaaataaaactagttttcagtaaaa

SEQ ID NO: 161622 - DNA, 120 bp, Artificial Sequence
  ENSG00000107443_32 (sequence is synthesized)
cgtgcgggatgctgaccgtacccaggcgggagccgccgcgccgccgcctggcgctgcacctgggcccggcccggccgccaattggacggctcggggcgaccccgctgtatcgcgagacga

SEQ ID NO: 161623 - DNA, 120 bp, Artificial Sequence
  ENSG00000107447_0 (sequence is synthesized)
agtctccctcccttctggagacaccaccagatgggccagccagaggcagcagcagcctcttcccatggatccaccacgagcgtcccacttgagccctcggaagaagagaccccggcagac

SEQ ID NO: 161624 - DNA, 120 bp, Artificial Sequence
  ENSG00000107447_1 (sequence is synthesized)
gggtgccttgatggcctcctctcctcaagacatcaaatttcaagatttggtcgtcttcattttggagaagaaaatgggaaccacccgcagagcgttcctcatggagctggcccgcaggaa

SEQ ID NO: 161625 - DNA, 120 bp, Artificial Sequence
  ENSG00000107447_2 (sequence is synthesized)
agggttcagggttgaaaatgagctcagtgattctgtcacccacatcgtagcagagaacaactcgggttcggatgttctggagtggcttcaagcacagaaagtacaagtcagctcacaacc

SEQ ID NO: 161626 - DNA, 120 bp, Artificial Sequence
  ENSG00000107447_3 (sequence is synthesized)
agagctcctcgatgtctcctggctgatcgaatgcataagagcagggaaaccggtggaaatgacaggaaaacaccagcttgttgtgagaagagactattcagatagcaccaacccaggccc

SEQ ID NO: 161627 - DNA, 120 bp, Artificial Sequence
  ENSG00000107447_4 (sequence is synthesized)
cccgaagactccaccaattgctgtacaaaagatctcccagtatgcgtgtcagagaagaaccactttaaacaactgtaaccagatattcacggatgcctttgatatactggctgaaaactg

SEQ ID NO: 161628 - DNA, 120 bp, Artificial Sequence
  ENSG00000107447_5 (sequence is synthesized)
tgagtttagagaaaatgaagactcctgtgtgacatttatgagagcagcttctgtattgaaatctctgccattcacaatcatcagtatgaaggacacagaaggaattccctgcctggggtc

SEQ ID NO: 161629 - DNA, 120 bp, Artificial Sequence
  ENSG00000107447_6 (sequence is synthesized)
caaggtgaagggtatcatagaggagattattgaagatggagaaagttctgaagttaaagctgtgttaaatgatgaacgatatcaatccttcaaactctttacttctgtatttggagtggg

SEQ ID NO: 161630 - DNA, 120 bp, Artificial Sequence
  ENSG00000107447_7 (sequence is synthesized)
gctgaagacttctgagaagtggttcaggatgggtttcagaactctgagtaaagtaaggtcggacaaaagcctgaaatttacacgaatgcagaaagcaggatttctgtattatgaagacct

SEQ ID NO: 161631 - DNA, 120 bp, Artificial Sequence
  ENSG00000107447_8 (sequence is synthesized)
ccagggcagaagcagaggccgtcagtgtgctggttaaagaggctgtctgggcatttcttccggatgctttcgtcaccatgacaggagggttccggaggggtaagaagatggggcatgatg

SEQ ID NO: 161632 - DNA, 120 bp, Artificial Sequence
  ENSG00000107447_9 (sequence is synthesized)
tagattttttaattaccagcccaggatcaacagaggatgaagagcaacttttacagaaagtgatgaacttatgggaaaagaagggattacttttatattatgaccttgtggagtcaacat

SEQ ID NO: 161633 - DNA, 120 bp, Artificial Sequence
  ENSG00000107447_10 (sequence is synthesized)
ttgaaaagctcaggttgcctagcaggaaggttgatgctttggatcattttcaaaagtgctttctgattttcaaattgcctcgtcaaagagtggacagtgaccagtccagctggcaggaag

SEQ ID NO: 161634 - DNA, 120 bp, Artificial Sequence
  ENSG00000107447_11 (sequence is synthesized)
gaaagacctggaaggccatccgtgtggatttagttctgtgcccctacgagcgtcgtgcctttgccctgttgggatggactggctcccggcagtttgagagagacctccggcgctatgcca

SEQ ID NO: 161635 - DNA, 120 bp, Artificial Sequence
  ENSG00000107447_12 (sequence is synthesized)
cacatgagcggaagatgattctggataaccatgctttatatgacaagaccaagaggatattcctcaaagcagaaagtgaagaagaaatttttgcgcatctgggattggattatattgaac

SEQ ID NO: 161636 - DNA, 120 bp, Artificial Sequence
  ENSG00000107447_13 (sequence is synthesized)
cgtgggaaagaaatgcctaggaaagtgttgtcaacatttttttcctattcttttcaagttaaataaattatgcttcatattagtaaaagatgccataggagagtttggggttatttaggt

SEQ ID NO: 161637 - DNA, 120 bp, Artificial Sequence
  ENSG00000107447_14 (sequence is synthesized)
cttattgaaatgcagattgctactagaaataaataactttggaaacatgggaaggtgccactggtaatgggtaaggttctaataggccatgtttatgactgttgcatagaattcacaatg

SEQ ID NO: 161638 - DNA, 120 bp, Artificial Sequence
  ENSG00000107447_15 (sequence is synthesized)
catttttcaagagaaatgatgttgtcactggtggctcattcagggaagctcatcaaagcccactttgttcgcagtgtagctgaaatactgtctatctctaataaaaacaggaggaaacaa

SEQ ID NO: 161639 - DNA, 120 bp, Artificial Sequence
  ENSG00000107485_0 (sequence is synthesized)
gcgagacagagcgagcaacgcaatctgaccgagcaggtcgtacgccgccgcctcctcctcctctctgctcttcgctacccaggtgacccgaggagggactccgcctccgagcggctgagg

SEQ ID NO: 161640 - DNA, 120 bp, Artificial Sequence
  ENSG00000107485_1 (sequence is synthesized)
accccggtgcagaggagcctggctcgcagaattgcagagtcgtcgcccctttttacaacctggtcccgttttattctgccgtacccagtttttggatttttgtcttccccttcttctctt

SEQ ID NO: 161641 - DNA, 120 bp, Artificial Sequence
  ENSG00000107485_2 (sequence is synthesized)
tgctaaacgacccctccaagataatttttaaaaaaccttctcctttgctcacctttgcttcccagccttcccatccccccaccgaaagcaaatcattcaacgacccccgaccctccgacg

SEQ ID NO: 161642 - DNA, 120 bp, Artificial Sequence
  ENSG00000107485_3 (sequence is synthesized)
ctcccaggcggaccgccctccctccccgcgcgcgggttccgggcccggcgagagggcgcgagcacagccgaggccatggaggtgacggcggaccagccgcgctgggtgagccaccaccac

SEQ ID NO: 161643 - DNA, 120 bp, Artificial Sequence
  ENSG00000107485_4 (sequence is synthesized)
ggtgagccaccaccaccccgccgtgctcaacgggcagcacccggacacgcaccacccgggcctcagccactcctacatggacgcggcgcagtacccgctgccggaggaggtggatgtgct

SEQ ID NO: 161644 - DNA, 120 bp, Artificial Sequence
  ENSG00000107485_5 (sequence is synthesized)
ttttaacatcgacggtcaaggcaaccacgtcccgccctactacggaaactcggtcagggccacggtgcagaggtaccctccgacccaccacgggagccaggtgtgccgcccgcctctgct

SEQ ID NO: 161645 - DNA, 120 bp, Artificial Sequence
  ENSG00000107485_6 (sequence is synthesized)
tcatggatccctaccctggctggacggcggcaaagccctgggcagccaccacaccgcctccccctggaatctcagccccttctccaagacgtccatccaccacggctccccggggcccct

SEQ ID NO: 161646 - DNA, 120 bp, Artificial Sequence
  ENSG00000107485_7 (sequence is synthesized)
ctccgtctaccccccggcctcgtcctcctccttgtcggggggccacgccagcccgcacctcttcaccttcccgcccaccccgccgaaggacgtctccccggacccatcgctgtccacccc

SEQ ID NO: 161647 - DNA, 120 bp, Artificial Sequence
  ENSG00000107485_8 (sequence is synthesized)
aggctcggccggctcggcccggcaggacgagaaagagtgcctcaagtaccaggtgcccctgcccgacagcatgaagctggagtcgtcccactcccgtggcagcatgaccgccctgggtgg

SEQ ID NO: 161648 - DNA, 120 bp, Artificial Sequence
  ENSG00000107485_9 (sequence is synthesized)
agcctcctcgtcgacccaccaccccatcaccacctacccgccctacgtgcccgagtacagctccggactcttcccccccagcagcctgctgggcggctcccccaccggcttcggatgcaa

SEQ ID NO: 161649 - DNA, 120 bp, Artificial Sequence
  ENSG00000107485_10 (sequence is synthesized)
gtccaggcccaaggcccggtccagcacaggcagggagtgtgtgaactgtggggcaacctcgaccccactgtggcggcgagatggcacgggacactacctgtgcaacgcctgcgggctcta

SEQ ID NO: 161650 - DNA, 120 bp, Artificial Sequence
  ENSG00000107485_11 (sequence is synthesized)
aacggacagaaccggcccctcattaagcccaagcgaaggctgtctgcagccaggagagcagggacgtcctgtgcgaactgtcagaccaccacaaccacactctggaggaggaatgccaat

SEQ ID NO: 161651 - DNA, 120 bp, Artificial Sequence
  ENSG00000107485_12 (sequence is synthesized)
ggggaccctgtctgcaatgcctgtgggctctactacaagcttcacaatattaacagacccctgactatgaagaaggaaggcatccagaccagaaaccgaaaaatgtctagcaaatccaaa

SEQ ID NO: 161652 - DNA, 120 bp, Artificial Sequence
  ENSG00000107485_13 (sequence is synthesized)
aagtgcaaaaaagtgcatgactcactggaggacttccccaagaacagctcgtttaacccggccgccctctccagacacatgtcctccctgagccacatctcgcccttcagccactccagc

SEQ ID NO: 161653 - DNA, 120 bp, Artificial Sequence
  ENSG00000107485_14 (sequence is synthesized)
cacatgctgaccacgcccacgccgatgcacccgccatccagcctgtcctttggaccacaccacccctccagcatggtcaccgccatgggttagagccctgctcgatgctcacagggcccc

SEQ ID NO: 161654 - DNA, 120 bp, Artificial Sequence
  ENSG00000107485_15 (sequence is synthesized)
cagcgagagtccctgcagtccctttcgacttgcatttttgcaggagcagtatcatgaagcctaaacgcgatggatatatgtttttgaaggcagaaagcaaaattatgtttgccactttgc

SEQ ID NO: 161655 - DNA, 120 bp, Artificial Sequence
  ENSG00000107485_16 (sequence is synthesized)
aaaggagctcactgtggtgtctgtgttccaaccactgaatctggaccccatctgtgaataagccattctgactcatatcccctatttaacagggtctctagtgctgtgaaaaaaaaaatg

SEQ ID NO: 161656 - DNA, 120 bp, Artificial Sequence
  ENSG00000107485_17 (sequence is synthesized)
ctgaacattgcatataacttatattgtaagaaatactgtacaatgactttattgcatctgggtagctgtaaggcatgaaggatgccaagaagtttaaggaatatgggagaaatagtgtgg

SEQ ID NO: 161657 - DNA, 120 bp, Artificial Sequence
  ENSG00000107485_18 (sequence is synthesized)
tagtgtggaaattaagaagaaactaggtctgatattcaaatggacaaactgccagttttgtttcctttcactggccacagttgtttgatgcattaaaagaaaataaaaaaaagaaaaaag

SEQ ID NO: 161658 - DNA, 120 bp, Artificial Sequence
  ENSG00000107485_19 (sequence is synthesized)
aaaaaaaagaaaaaagttgtaggcgaatcatttgttcaaagctgttggcctctgcaaaggaaataccagttctgggcaatcagtgttaccgttcaccagttgccgttgagggtttcagag

SEQ ID NO: 161659 - DNA, 120 bp, Artificial Sequence
  ENSG00000107485_20 (sequence is synthesized)
agcctttttctaggcctacatgctttgtgaacaagtccctgtaattgttgtttgtatgtataattcaaagcaccaaaataagaaaagatgtagatttatttcatcatattatacagaccg

SEQ ID NO: 161660 - DNA, 120 bp, Artificial Sequence
  ENSG00000107485_21 (sequence is synthesized)
aactgttgtataaatttatttactgctagtcttaagaactgctttctttcgtttgtttgtttcaatattttccttctctctcaatttttggttgaataaactagattacattcagttggc

SEQ ID NO: 161661 - DNA, 120 bp, Artificial Sequence
  ENSG00000107485_22 (sequence is synthesized)
gaacactgagctgcctggcgccgtcttgatactttcagaaagaatgcattccctgtaaaaaaaaaaaaaaaatactgagagagggagagagagagagaagaagagagagagacggaggga

SEQ ID NO: 161662 - DNA, 120 bp, Artificial Sequence
  ENSG00000107485_23 (sequence is synthesized)
tagcttctaagagtccggcggcatctgtcttgtccctattcctgcagcctgtgctgagggtagcagtgtatgagctaccagcgtgcatgtcagcgaccctggcccgacaggccacgtcct

SEQ ID NO: 161663 - DNA, 120 bp, Artificial Sequence
  ENSG00000107485_24 (sequence is synthesized)
gcaatcggcccggctgcctcttcgccctgtcgtgttctgtgttagtgatcactgcctttaatacagtctgttggaataatattataagcataataataaagtgaaaatattttaaaacta

SEQ ID NO: 161664 - DNA, 120 bp, Artificial Sequence
  ENSG00000107485_25 (sequence is synthesized)
gcggtgagcagttccagcggccaggacggcagcggcggccacagtggcgaactctgcctgtcatttctgccttcagatctccgggcgagtcaggaaaaaaaataaaaaacagctggccct

SEQ ID NO: 161665 - DNA, 120 bp, Artificial Sequence
  ENSG00000107485_26 (sequence is synthesized)
cgcctcggagccgcgtgccctccgccccggggtgcccattgcgcagagcgtggcctggagacccgcgagccggggaaggtcgccgtggagtcccgaccagaggccggggttggggtcggt

SEQ ID NO: 161666 - DNA, 120 bp, Artificial Sequence
  ENSG00000107518_0 (sequence is synthesized)
gtcccctcctcctgccggtcaggtcccctcaggagcgccgggcgcagtctgcgcctcccgctccccgcctccggccgggtccgggacgccgcggctgtggggtcggcccgctaaggacaa

SEQ ID NO: 161667 - DNA, 120 bp, Artificial Sequence
  ENSG00000107518_1 (sequence is synthesized)
ccgggacgccgcggctgtggggtcggcccgctaaggacaaggtcgggagactgggtggcgatgcccgagtgcgactggaggcagccgagcggaggcgacggcggttgggatctgtccctc

SEQ ID NO: 161668 - DNA, 120 bp, Artificial Sequence
  ENSG00000107518_2 (sequence is synthesized)
ctgaccggggagcgggactcggacgggcgccggtgaggaggaggagaagcggcggcggagaggttttctgcggccggaattcccttcaacagcatccctgtcggcgcccgcgagcgcagt

SEQ ID NO: 161669 - DNA, 120 bp, Artificial Sequence
  ENSG00000107518_3 (sequence is synthesized)
ttcaacagcatccctgtcggcgcccgcgagcgcagtctcgccgggcaggggcgccggggaagatggagactgggggccgggcccgcactggtaccccgcagccagcggccccgggggtgt

SEQ ID NO: 161670 - DNA, 120 bp, Artificial Sequence
  ENSG00000107518_4 (sequence is synthesized)
cctcctcctggctgctggacgggaacagctggctgctgtgctatggcttcctctacctggcgctctacgcgcaggtgtcccagtccaagccgtgcgagaggaccggctcctgcttctcgg

SEQ ID NO: 161671 - DNA, 120 bp, Artificial Sequence
  ENSG00000107518_5 (sequence is synthesized)
gccgctgtgtcaactccacctgcctctgcgacccgggctgggtgggggaccagtgccagcactgccagggcaggttcaagttaacagaaccttctggatatttaacagatggcccaatta

SEQ ID NO: 161672 - DNA, 120 bp, Artificial Sequence
  ENSG00000107518_6 (sequence is synthesized)
actataaatataaaactaaatgtacttggctcattgaaggctatccaaatgcagtgttaagattaagattcaatcattttgctacagaatgtagctgggatcatatgtatgtttatgatg

SEQ ID NO: 161673 - DNA, 120 bp, Artificial Sequence
  ENSG00000107518_7 (sequence is synthesized)
gagattcaatatatgcacctttaatagctgtacttagtggtttgatagtccctgaaataaggggcaatgaaactgtgcctgaagttgttactacatctggctatgcactgttacattttt

SEQ ID NO: 161674 - DNA, 120 bp, Artificial Sequence
  ENSG00000107518_8 (sequence is synthesized)
ttagtgatgctgcgtataatctaactggtttcaacattttctattcaatcaattcttgtcctaacaattgctctggtcatgggaagtgtacaactagtgtctctgttccaagtcaagtat

SEQ ID NO: 161675 - DNA, 120 bp, Artificial Sequence
  ENSG00000107518_9 (sequence is synthesized)
attgtgaatgtgataaatactggaagggtgaagcttgtgatattccttactgtaaagccaattgcggcagtccagatcacggttactgtgacctgactggagaaaaattatgtgtctgca

SEQ ID NO: 161676 - DNA, 120 bp, Artificial Sequence
  ENSG00000107518_10 (sequence is synthesized)
atgatagttggcaaggtcctgattgttctttgaatgttccctctactgagtcttactggattctgccaaacgttaaacccttcagtccttctgtaggtcgggcttcacataaagcagttt

SEQ ID NO: 161677 - DNA, 120 bp, Artificial Sequence
  ENSG00000107518_11 (sequence is synthesized)
tacacgggaaatttatgtgggtgattggtggatatacttttaactacagttcttttcaaatggtcctaaattacaatttagaaagcagtatatggaatgtaggaactccatcaaggggac

SEQ ID NO: 161678 - DNA, 120 bp, Artificial Sequence
  ENSG00000107518_12 (sequence is synthesized)
ctctccagagatatggacactctcttgctttatatcaggaaaacatctttatgtatggaggcagaattgaaacaaatgatggcaatgtcacagatgaattatgggtttttaacatacata

SEQ ID NO: 161679 - DNA, 120 bp, Artificial Sequence
  ENSG00000107518_13 (sequence is synthesized)
gtcagtcatggagtacaaaaactcctactgttcttggacatggtcagcagtatgctgtggagggacattcagcacatattatggagttggatagtagagatgttgtcatgatcataatat

SEQ ID NO: 161680 - DNA, 120 bp, Artificial Sequence
  ENSG00000107518_14 (sequence is synthesized)
ttggatattctgcaatatatggttatacaagcagcatacaggaataccatatctcatcaaacacttggcttgttccagaaactaaaggagctattgtacaaggtggatatggccatacta

SEQ ID NO: 161681 - DNA, 120 bp, Artificial Sequence
  ENSG00000107518_15 (sequence is synthesized)
gtgtgtatgatgaaataacaaagtccatttatgttcatggagggtataaagcattgccagggaacaaatatggattggttgatgatctttataaatatgaagttaacactaagacttgga

SEQ ID NO: 161682 - DNA, 120 bp, Artificial Sequence
  ENSG00000107518_16 (sequence is synthesized)
ctattttgaaagaaagtgggtttgccagataccttcattcagctgttcttatcaatggagctatgcttatttttggaggaaatacccataatgacacttccttgagtaacggtgcaaaat

SEQ ID NO: 161683 - DNA, 120 bp, Artificial Sequence
  ENSG00000107518_17 (sequence is synthesized)
gtttttctgccgatttcctggcatatgacatagcttgtgatgaatggaaaatactaccaaaaccaaatcttcatagagatgtcaacagatttggacactctgcagtagtcattaacgggt

SEQ ID NO: 161684 - DNA, 120 bp, Artificial Sequence
  ENSG00000107518_18 (sequence is synthesized)
ccatgtatatatttgggggattttctagtgtactccttaatgatatccttgtatacaagcctccaaattgcaaggctttcagagatgaagaactttgtaaaaatgctggtccagggataa

SEQ ID NO: 161685 - DNA, 120 bp, Artificial Sequence
  ENSG00000107518_19 (sequence is synthesized)
aatgtgtttggaataaaaatcactgtgaatcttgggaatctgggaatactaataatattcttagagcaaagtgccctcctaaaacagctgcttctgatgacagatgttacagatatgcag

SEQ ID NO: 161686 - DNA, 120 bp, Artificial Sequence
  ENSG00000107518_20 (sequence is synthesized)
attgtgccagctgtactgccaatacaaatgggtgccaatggtgtgatgacaagaaatgcatttcggcaaatagtaactgcagtatgtctgtcaagaactacaccaaatgtcatgtgagaa

SEQ ID NO: 161687 - DNA, 120 bp, Artificial Sequence
  ENSG00000107518_21 (sequence is synthesized)
atgagcagatttgtaacaaacttaccagctgtaaaagctgttcactaaacttgaattgccagtgggatcagagacagcaagaatgccaggctttaccagctcatctttgtggagaaggat

SEQ ID NO: 161688 - DNA, 120 bp, Artificial Sequence
  ENSG00000107518_22 (sequence is synthesized)
ggagtcatattggggatgcttgtcttagagtcaattccagtagagaaaactatgacaatgcaaaactttattgctataatcttagtggaaatcttgcttcattaacaacctcaaaagaag

SEQ ID NO: 161689 - DNA, 120 bp, Artificial Sequence
  ENSG00000107518_23 (sequence is synthesized)
tagaatttgttctggatgaaatacagaagtatacacaacagaaagtatcaccttgggtaggcttgcgcaagatcaatatatcctattggggatgggaagacatgtctccttttacaaaca

SEQ ID NO: 161690 - DNA, 120 bp, Artificial Sequence
  ENSG00000107518_24 (sequence is synthesized)
caacactacagtggcttcctggcgaacccaatgattctgggttttgtgcatatctggaaagggctgcagtggcaggcttaaaagctaatccttgtacatctatggcaaatggccttgtct

SEQ ID NO: 161691 - DNA, 120 bp, Artificial Sequence
  ENSG00000107518_25 (sequence is synthesized)
gtgaaaaacctgttgttagtccaaatcaaaatgcgaggccgtgcaaaaagccatgctctctgaggacatcatgttccaactgtacaagcaatggcatggagtgtatgtggtgcagcagta

SEQ ID NO: 161692 - DNA, 120 bp, Artificial Sequence
  ENSG00000107518_26 (sequence is synthesized)
cgaaacgatgtgttgactctaatgcctatatcatctcttttccatatggacaatgtctagagtggcaaactgccacctgctcccctcaaaattgttctggattgagaacctgtggacagt

SEQ ID NO: 161693 - DNA, 120 bp, Artificial Sequence
  ENSG00000107518_27 (sequence is synthesized)
gtttggaacagcctggatgtggctggtgcaatgatcctagtaatacaggaagaggacattgcattgaaggttcttcacggggaccaatgaagcttattggaatgcaccacagtgagatgg

SEQ ID NO: 161694 - DNA, 120 bp, Artificial Sequence
  ENSG00000107518_28 (sequence is synthesized)
ttcttgacaccaatctttgccccaaagaaaagaactatgagtggtcctttatccagtgtccagcttgccagtgtaatggacatagcacttgcatcaataataatgtgtgcgaacagtgta

SEQ ID NO: 161695 - DNA, 120 bp, Artificial Sequence
  ENSG00000107518_29 (sequence is synthesized)
aaaatctcaccacaggaaagcagtgtcaagattgtatgccaggttattatggagatccaaccaatggtggacagtgcacagcttgtacatgcagtggccatgcaaatatctgtcatctgc

SEQ ID NO: 161696 - DNA, 120 bp, Artificial Sequence
  ENSG00000107518_30 (sequence is synthesized)
acacaggaaaatgtttctgcacaactaaaggaataaaaggtgaccaatgccaattatgtgactctgaaaatcgctatgttggtaatccacttagaggaacatgttattacagccttttga

SEQ ID NO: 161697 - DNA, 120 bp, Artificial Sequence
  ENSG00000107518_31 (sequence is synthesized)
ttgattatcaatttaccttcagcttattacaggaagatgatcgccaccatactgccataaactttatagcaaacccagaacagtcgaacaaaaatctggatatatcaattaatgcatcaa

SEQ ID NO: 161698 - DNA, 120 bp, Artificial Sequence
  ENSG00000107518_32 (sequence is synthesized)
acaactttaatctcaacattacgtggtctgtcggttcaacagctggaacaatatctggggaagagacttctatagtttccaagaataatataaaggaatacagagatagtttttcctatg

SEQ ID NO: 161699 - DNA, 120 bp, Artificial Sequence
  ENSG00000107518_33 (sequence is synthesized)
aaaaatttaactttagaagcaatcctaacattacattctatgtgtacgtcagcaacttttcctggcctattaaaatacagattgcattctcacaacacaatacaatcatggaccttgtgc

SEQ ID NO: 161700 - DNA, 120 bp, Artificial Sequence
  ENSG00000107518_34 (sequence is synthesized)
agttttttgtcaccttcttcagttgtttcctatccttattgctggtggctgctgtggtatggaagatcaaacaaacttgttgggcttctcgacggagagagcaactgcttcgagaacgac

SEQ ID NO: 161701 - DNA, 120 bp, Artificial Sequence
  ENSG00000107518_35 (sequence is synthesized)
agcagatggccagccgtccctttgcttctgttgatgtagctctggaagtgggagctgaacaaacagagtttctgcgagggccattagagggggcacccaagccaattgccattgaaccat

SEQ ID NO: 161702 - DNA, 120 bp, Artificial Sequence
  ENSG00000107518_36 (sequence is synthesized)
aatagatatttcacaacagaaagcttcagatagtaaagataagacttctggagtccggaatcgaaaacacctttcaacacgtcaaggaacttgtgtctgagaaatggaaaccgctcctgt

SEQ ID NO: 161703 - DNA, 120 bp, Artificial Sequence
  ENSG00000107518_37 (sequence is synthesized)
atattctgtactgttttacttcgggcttctgttaaagctgttctatggccttggattttatggaggcagatctctgtatcatccagagcctgagtacagtttccttccaaatggacaatg

SEQ ID NO: 161704 - DNA, 120 bp, Artificial Sequence
  ENSG00000107518_38 (sequence is synthesized)
acccaggtggccaaagaatgttcatgagttttataaaagtattgatggtcacaggtgataaagtcagtttttaccactatcttaggcttattatagctaacattaaattactctggaaaa

SEQ ID NO: 161705 - DNA, 120 bp, Artificial Sequence
  ENSG00000107518_39 (sequence is synthesized)
agatgtatattgtttcttaatgaagatgaaaaatatgtaattcatataaatcaactgtttatatcccaagacttgaaagaaagacattttttaatgcctgaatgatgagaattgtacagt

SEQ ID NO: 161706 - DNA, 120 bp, Artificial Sequence
  ENSG00000107518_40 (sequence is synthesized)
ttttgcctcataagcaaacttgaatcacctgtgtatgaacagggaatgaacacattgcaatggctttaaatgctcttttatctcgttgtaaaggtaaggcaagattttgatgtagtagga

SEQ ID NO: 161707 - DNA, 120 bp, Artificial Sequence
  ENSG00000107518_41 (sequence is synthesized)
tgtaggtaatgtatttaaatatttcatatgaccatatcgtgtccaaactcagtctgagaatgtgacagctttccgcctaactagaatgcagaccagaatgagttcaactcattctgtgca

SEQ ID NO: 161708 - DNA, 120 bp, Artificial Sequence
  ENSG00000107518_42 (sequence is synthesized)
acttcacagggggtttattagaatgctcagtgtagaggacattcctgtcatccatgccaactacctaactcgttatcagagctgatagagcatggaaaagtctgtccagcgatcagttgt

SEQ ID NO: 161709 - DNA, 120 bp, Artificial Sequence
  ENSG00000107518_43 (sequence is synthesized)
tcccctccttccaaaaacagcctccaataccacaacctgaaaagagccgaaatggttattttacagcatacaagcttctgctccagtatgataatttttaattgcctaagaatcattgga

SEQ ID NO: 161710 - DNA, 120 bp, Artificial Sequence
  ENSG00000107518_44 (sequence is synthesized)
tcagacctaaatgatccatctgcatttttataagaatggatctttctttgcccttcctctcctagctgctagattttaactaccttttacaaatgttacaaaatgtattttagaggcgac

SEQ ID NO: 161711 - DNA, 120 bp, Artificial Sequence
  ENSG00000107518_45 (sequence is synthesized)
atctctcaagatgacctgagttccttcctgccaactgttccacctagaatacaagtagagaagagcactggctggcaagcatcaacaggagtcttcttcccaacacgagcgcatccatgt

SEQ ID NO: 161712 - DNA, 120 bp, Artificial Sequence
  ENSG00000107518_46 (sequence is synthesized)
cctgagaaaaagtctgtggtttagaaaatatgtccatggttgcccacagtcagcacactcttagtgactcaaaattctgaattatggcagaaaggaaaaataaaacatacttcacattag

SEQ ID NO: 161713 - DNA, 120 bp, Artificial Sequence
  ENSG00000107518_47 (sequence is synthesized)
aacacagaatcatttacatcctaatactgaccacagttcactaaagctcagtagcattaacagatatagtttggaattgcagtttcctcacttcagggtgacaagatatgtataacagtg

SEQ ID NO: 161714 - DNA, 120 bp, Artificial Sequence
  ENSG00000107518_48 (sequence is synthesized)
acagaaatctccaaagctgctgtatatgatatagctttgttaaatatgaaggtcctttaaatacaattgatgtttagtactatatatgtacttttcacattctttggatttctggaaggt

SEQ ID NO: 161715 - DNA, 120 bp, Artificial Sequence
  ENSG00000107518_49 (sequence is synthesized)
tatgacactttactgtttacagctaatgcatagttacttgcatgccatggttgtacagtagcagactatgaccctattgtgatattaagtgtttatttcataatgccatttatacatagc

SEQ ID NO: 161716 - DNA, 120 bp, Artificial Sequence
  ENSG00000107518_50 (sequence is synthesized)
tgaatttgatgaggattgaatgtcatatataagaggaatgatcatacaatatgtagttgcatcttatataagatttctaggttgcatctaaccatgactatgtcattattttgataatta

SEQ ID NO: 161717 - DNA, 120 bp, Artificial Sequence
  ENSG00000107518_51 (sequence is synthesized)
ggcatttatgaattatagtatatattcctcatgttggcatgataattttgctattttccatgcattaaaaataagacaaattcttagagtaattttagtaattttatctataatctgtgg

SEQ ID NO: 161718 - DNA, 120 bp, Artificial Sequence
  ENSG00000107518_52 (sequence is synthesized)
ggtttttttggagggggaggccactggttgtttctacttccctgtgatattttctctctcattaaaggaatgagctaagtttgtaaatatctcctaaaaacaatcaagtaattttattag

SEQ ID NO: 161719 - DNA, 120 bp, Artificial Sequence
  ENSG00000107518_53 (sequence is synthesized)
cttcttttggaccctctaaatattgacttctctcatgaaaaaataaattgatgaaactaatgattacaaagatataatcattttttaaaaagtgattgcccaatgtatttctctaacaat

SEQ ID NO: 161720 - DNA, 120 bp, Artificial Sequence
  ENSG00000107518_54 (sequence is synthesized)
tgtcacaagagaaagcataacaataaaaatacaaaaacatacagatttagatgtaaaatctatataagctatatttttagggaggctaagcagatagtattactgtggaagaattatcaa

SEQ ID NO: 161721 - DNA, 120 bp, Artificial Sequence
  ENSG00000107518_55 (sequence is synthesized)
gttttattcacctcaaatcccactgggttcttaaaacttgaaaattcaaattgtagagaattatgagacacaatgtgatgtttagttaaagtcatgctatacctttctgggccacatatt

SEQ ID NO: 161722 - DNA, 120 bp, Artificial Sequence
  ENSG00000107518_56 (sequence is synthesized)
gctaactctgtggctaattatgcaattaattctcaacgtatcaaagcttttcactggcagtaaattctttgccctcaggtgaagtggattgaaaagacatcaaggatcaaggataatcac

SEQ ID NO: 161723 - DNA, 120 bp, Artificial Sequence
  ENSG00000107518_57 (sequence is synthesized)
tttgaatctgttggtttttccccctacattccagacactttaaatttggatgctttcattttttttaaatcaaaccacacaaatatgcagatactttcccagaatttcgcagttaaatgg

SEQ ID NO: 161724 - DNA, 120 bp, Artificial Sequence
  ENSG00000107518_58 (sequence is synthesized)
ctgatcctcttgaaaactaaccttaatggaattctaaacatttcagtttagaatgactttgaaaaattccttagatttttaggatgttttattctgccaagtatgaaaaaaaaatggtta

SEQ ID NO: 161725 - DNA, 120 bp, Artificial Sequence
  ENSG00000107518_59 (sequence is synthesized)
aatacaatggagttttaaaaattaacctggggattctatttgaactagaaaattcctattggaaaagaatttgcacatacttacagattcagctaataaattttaagaggattaggattc

SEQ ID NO: 161726 - DNA, 120 bp, Artificial Sequence
  ENSG00000107518_60 (sequence is synthesized)
tcataattctttaaatgaaaatttgttttagtgatacacagagatgccgtatactatagtgttatgttcagtaggaaaacttcaaatagttcgtatttaaaaaggtaattgatccttgct

SEQ ID NO: 161727 - DNA, 120 bp, Artificial Sequence
  ENSG00000107518_61 (sequence is synthesized)
gtacttcccaacatctcatcttcttttagctgcagtaagatagaggtgactgtatggctacagttcatggtataaggtcatttagggtgcacactggcacacaggctggaaaacgggcac

SEQ ID NO: 161728 - DNA, 120 bp, Artificial Sequence
  ENSG00000107518_62 (sequence is synthesized)
tggacccagctttcaggtgtgtggtgctgggtaagtttcacctttgaagcctcagccttccatctgtaaagggcggtaatggtgcccacctttcgaggcattgcgaggctagatggtaac

SEQ ID NO: 161729 - DNA, 120 bp, Artificial Sequence
  ENSG00000107518_63 (sequence is synthesized)
acacagaaagctcccacagtgggaccttgatgcagcgtagctggtattaacaaccgtggggacaccaggccactctttttctaccagttgttttatgaatccacctattaattttcatcc

SEQ ID NO: 161730 - DNA, 120 bp, Artificial Sequence
  ENSG00000107518_64 (sequence is synthesized)
atcttttggtcgtaggtaaaggtcaatcaggtttttcaaaaagactccctgaataacttaagttcctgtatttctaagatatagggatttctacaaaacgactttgacatttagtcaata

SEQ ID NO: 161731 - DNA, 120 bp, Artificial Sequence
  ENSG00000107518_65 (sequence is synthesized)
aagacttaaactcttcttaaatctatagttttaggagagtttttcttaaaattactgactgatgacattgagacaagagcatcaatgatcacctttcacgtacaaactaggcaagacagg

SEQ ID NO: 161732 - DNA, 120 bp, Artificial Sequence
  ENSG00000107518_66 (sequence is synthesized)
gtcagtgcttacattttgtggttatacatgatacatcttttctcagtgaacataaaactatgatttgaaaggtgtcttatatttaaaaaagattgtaaaatgaaaactgaccaaatgaac

SEQ ID NO: 161733 - DNA, 120 bp, Artificial Sequence
  ENSG00000107518_67 (sequence is synthesized)
taattctacccacctatggtctttttaaatgtcgagtttcaaaacccatttgccgtatactagagtgagcttggaaacttacctgattacaggaattgcttgggttcaggcagattccca

SEQ ID NO: 161734 - DNA, 120 bp, Artificial Sequence
  ENSG00000107518_68 (sequence is synthesized)
ctttcacctctagagatttagattcagaaacactggggtaggccctggagagcagtactcttaacaagctcctcagtgcttcttaccattaggcaaattagggaaacactgcattgggtc

SEQ ID NO: 161735 - DNA, 120 bp, Artificial Sequence
  ENSG00000107518_69 (sequence is synthesized)
aaagtgctgcctttaatcgaccattagagggagttctctaaataacaaagttattactctaattcaaaatgctttaaagaattttccaaggaatacaagccatctggttggtgttagtta

SEQ ID NO: 161736 - DNA, 120 bp, Artificial Sequence
  ENSG00000107518_70 (sequence is synthesized)
tagcagtgatttcattagagtgtacatttaacattttagttttatcaaaattttttgaaattaagaattagaaccagagctcctatcagtatatatgtacacaggtgtgcatgccagtgt

SEQ ID NO: 161737 - DNA, 120 bp, Artificial Sequence
  ENSG00000107518_71 (sequence is synthesized)
tcaaaagattgtgtaaaagttcaagcccgttttagaaagccaacattttatgttataatatgctgttaatcaggactttattaaataaaaacattggctcttccaacccccactgccaaa

SEQ ID NO: 161738 - DNA, 120 bp, Artificial Sequence
  ENSG00000107518_72 (sequence is synthesized)
tcaggaatcagtatttcatttgatttttaaactgccatcaaggctaagacaaagcccttatgagataaaggccaaactcctcaggatagctctacagggctcttccaaatcagatcccat

SEQ ID NO: 161739 - DNA, 120 bp, Artificial Sequence
  ENSG00000107518_73 (sequence is synthesized)
cctgaccttccagcttcaccttccattgcttctactgcatctcaccctccccaaaccagatctgcttgccaggcgccagacatactgaagacaggacatgacttcaggccttgcaattgc

SEQ ID NO: 161740 - DNA, 120 bp, Artificial Sequence
  ENSG00000107518_74 (sequence is synthesized)
atggttatacaagcagcatacaggaataccatatctgtgagttacttaaaaattgtaatttctttattgattgggaatgtttttctctttaataaaatcttcatatgaatttagtcaaaa

SEQ ID NO: 161741 - DNA, 120 bp, Artificial Sequence
  ENSG00000107518_75 (sequence is synthesized)
cacccaggctggcgtgcagtgtggggatctcagctcactgcaacctccgcatcctgggtcaagcaattctccattacaggcgcccactaccacgctcagctaatttttgtattttttagt

SEQ ID NO: 161742 - DNA, 66 bp, Artificial Sequence
  ENSG00000107518_76 (sequence is synthesized)
tatgtgaactctttaaatttagacattttcaacaacattgctgttcatttctgtagtagattaagg

SEQ ID NO: 161743 - DNA, 120 bp, Artificial Sequence
  ENSG00000107518_77 (sequence is synthesized)
tttcaacaacattgctgttcatttctgtagtagattaaggtgtgttcatataactgaacttctaaactcgtgatatatagattatttttggcctaaacagtgttttaaaaatttaaaaag

SEQ ID NO: 161744 - DNA, 120 bp, Artificial Sequence
  ENSG00000107518_78 (sequence is synthesized)
ctgctgttctgactgtgtttctttgtctaccacgaggatcatcaggtgcccctccccctgggcagtcagaacacagcccagagcctactgctcagaagatcttgctttaatcagccattg

SEQ ID NO: 161745 - DNA, 120 bp, Artificial Sequence
  ENSG00000107518_79 (sequence is synthesized)
ctgaccggggagcgggactcggacgggcgccgggatttcgccagggaataaaaatgttcttcaaatgtttcttgaggatagaagattgatagttgggggaagaaatgcagaagcaaatat

SEQ ID NO: 161746 - DNA, 120 bp, Artificial Sequence
  ENSG00000107518_80 (sequence is synthesized)
agtatcaaaagtggtacttcagttctcttagcattgattccagtcttctgtttccatttgaaaagaataaagcactcagaataacaagccattccttccttacacaggttaacagaacct

SEQ ID NO: 161747 - DNA, 120 bp, Artificial Sequence
  ENSG00000107521_0 (sequence is synthesized)
cgggctcctgcaggcggggcgctgtgcgcgccgcgatccggtacgtgggcctccgggctgtcccctctgggggcggcgatcctccctccggagccccccttcaaccctcccggaagtgag

SEQ ID NO: 161748 - DNA, 120 bp, Artificial Sequence
  ENSG00000107521_1 (sequence is synthesized)
catttgcaggaccagggatgctgtgctgctctcccatgagccagtcaccgagtcggtctgctgcagccctttctgaacctctggccgtctggatgctccactgtgcttgccaagatgaag

SEQ ID NO: 161749 - DNA, 120 bp, Artificial Sequence
  ENSG00000107521_2 (sequence is synthesized)
tgcgtcttggtggccactgagggcgcagaggtcctcttctactggacagatcaggagtttgaagagagtctccggctgaagttcgggcagtcagagaatgaggaagaagagctccctgcc

SEQ ID NO: 161750 - DNA, 120 bp, Artificial Sequence
  ENSG00000107521_3 (sequence is synthesized)
ctggaggaccagctcagcaccctcctagccccggtcatcatctcctccatgacgatgctggagaagctctcggacacctacacctgcttctccacggaaaatggcaacttcctgtatgtc

SEQ ID NO: 161751 - DNA, 120 bp, Artificial Sequence
  ENSG00000107521_4 (sequence is synthesized)
cttcacctgtttggagaatgcctgttcattgccatcaatggtgaccacaccgagagcgagggggacctgcggcggaagctgtatgtgctcaagtacctgtttgaagtgcactttgggctg

SEQ ID NO: 161752 - DNA, 120 bp, Artificial Sequence
  ENSG00000107521_5 (sequence is synthesized)
gtgactgtggacggtcatcttatccgaaaggagctgcggcccccagacctggcgcagcgtgtccagctgtgggagcacttccagagcctgctgtggacctacagccgcctgcgggagcag

SEQ ID NO: 161753 - DNA, 120 bp, Artificial Sequence
  ENSG00000107521_6 (sequence is synthesized)
gagcagtgcttcgccgtggaggccctggagcgactgattcacccccagctctgtgagctgtgcatagaggcgctggagcggcacgtcatccaggctgtcaacaccagccccgagcgggga

SEQ ID NO: 161754 - DNA, 120 bp, Artificial Sequence
  ENSG00000107521_7 (sequence is synthesized)
ggcgaggaggccctgcatgccttcctgctcgtgcactccaagctgctggcattctactctagccacagtgccagctccctgcgcccggccgacctgcttgccctcatcctcctggttcag

SEQ ID NO: 161755 - DNA, 120 bp, Artificial Sequence
  ENSG00000107521_8 (sequence is synthesized)
gacctctaccccagcgagagcacagcagaggacgacattcagccttccccgcggagggcccggagcagccagaacatccccgtgcagcaggcctggagccctcactccacgggcccaact

SEQ ID NO: 161756 - DNA, 120 bp, Artificial Sequence
  ENSG00000107521_9 (sequence is synthesized)
ggggggagctctgcagagacggagacagacagcttctccctccctgaggagtacttcacaccagctccttcccctggcgatcagagctcaggtagcaccatctggctggaggggggcacc

SEQ ID NO: 161757 - DNA, 120 bp, Artificial Sequence
  ENSG00000107521_10 (sequence is synthesized)
ccccccatggatgcccttcagatagcagaggacaccctccaaacactggttccccactgccctgtgccttccggccccagaaggatcttcctggatgccaacgtgaaggaaagctactgc

SEQ ID NO: 161758 - DNA, 120 bp, Artificial Sequence
  ENSG00000107521_11 (sequence is synthesized)
cccctagtgccccacaccatgtactgcctgcccctgtggcagggcatcaacctggtgctcctgaccaggagccccagcgcgcccctggccctggttctgtcccagctgatggatggcttc

SEQ ID NO: 161759 - DNA, 120 bp, Artificial Sequence
  ENSG00000107521_12 (sequence is synthesized)
tccatgctggagaagaagctgaaggaagggccggagcccggggcctccctgcgctcccagcccctcgtgggagacctgcgccagaggatggacaagtttgtcaagaatcgaggggcacag

SEQ ID NO: 161760 - DNA, 120 bp, Artificial Sequence
  ENSG00000107521_13 (sequence is synthesized)
gagattcagagcacctggctggagtttaaggccaaggctttctccaaaagtgagcccggatcctcctgggagctgctccaggcatgtgggaagctgaagcggcagctctgcgccatctac

SEQ ID NO: 161761 - DNA, 120 bp, Artificial Sequence
  ENSG00000107521_14 (sequence is synthesized)
cggctgaactttctgaccacagcccccagcaggggaggcccacacctgccccagcacctgcaggaccaagtgcagaggctcatgcgggagaagctgacggactggaaggacttcttgctg

SEQ ID NO: 161762 - DNA, 120 bp, Artificial Sequence
  ENSG00000107521_15 (sequence is synthesized)
cttccctcaactgcagtcaaaagacctcgtcggagttgggcaaggggccgctggctgcctttgtcaaaactaaggtctggtctctgatccagctggcgcgcagatacctgcagaagggct

SEQ ID NO: 161763 - DNA, 120 bp, Artificial Sequence
  ENSG00000107521_16 (sequence is synthesized)
acaccacgctgctgttccaggagggggatttctactgctcctacttcctgtggttcgagaatgacatggggtacaaactccagatgatcgaggtgcccgtcctctccgacgactcagtgc

SEQ ID NO: 161764 - DNA, 120 bp, Artificial Sequence
  ENSG00000107521_17 (sequence is synthesized)
ctatcggcatgctgggaggagactactacaggaagctcctgcgctactacagcaagaaccgcccaaccgaggctgtcaggtgctacgagctgctggccctgcacctgtctgtcatcccca

SEQ ID NO: 161765 - DNA, 120 bp, Artificial Sequence
  ENSG00000107521_18 (sequence is synthesized)
ctgacctgctggtgcagcaggccggccagctggcccggcgcctctgggaggcctcccgtatccccctgctctaggccaaggtggccgcagtctgcctttgcatcctgtcctccagccacc

SEQ ID NO: 161766 - DNA, 120 bp, Artificial Sequence
  ENSG00000107521_19 (sequence is synthesized)
cttgcttgccactgttccccatgacgagagcctcctgtctgcagtggccatcctgaggatagggcagagtgcccagggtggccccagggcttctaaaaccccacctagaccaccctccat

SEQ ID NO: 161767 - DNA, 120 bp, Artificial Sequence
  ENSG00000107521_20 (sequence is synthesized)
gtcaggtactgagcaaggccccagatccttctctctggaggaagagggaagcccaggggtcctgtttgtaaaacaacggtggcaacagctcctcttccagagctgcctctgcctttatcc

SEQ ID NO: 161768 - DNA, 120 bp, Artificial Sequence
  ENSG00000107521_21 (sequence is synthesized)
tgggagatggggaggaagccccatctctgctgttccctgcgtggaggaagcccacccagcaagctctctcctaccccaggtaaaaggtgctcctttgcctgggtttgaattccagcgctg

SEQ ID NO: 161769 - DNA, 120 bp, Artificial Sequence
  ENSG00000107521_22 (sequence is synthesized)
ccacttcctctctgcacctcctggcaagtttcttctattccccacgtttaaagcgatggcacctccgtcccagggtggtgtgaggattacccagtgtggtaggtgctcaataaatgttgg

SEQ ID NO: 161770 - DNA, 120 bp, Artificial Sequence
  ENSG00000107521_23 (sequence is synthesized)
tcattgttatcactgaagcccaacatgctagtgcttctagacccttctgtcagtgctgataagcccttgctaagtcccagccccttcatgcttggctggcgtctgccctagggctggggt

SEQ ID NO: 161771 - DNA, 120 bp, Artificial Sequence
  ENSG00000107521_24 (sequence is synthesized)
tctcaagcccctggccctggcccagagatttggattcccttggcggccgtggagcccagcctttgatgtctttcaaagcttctgtggtgcgccctggattgagaaccaccacccgagggg

SEQ ID NO: 161772 - DNA, 120 bp, Artificial Sequence
  ENSG00000107521_25 (sequence is synthesized)
tacagcccctctcttccaaccgagaagttcctgtcccagaatggacccagggacaagagaccctgagagccctgggactgggagtgtctgctcctctgaggccaggaggccggtgctggg

SEQ ID NO: 161773 - DNA, 120 bp, Artificial Sequence
  ENSG00000107521_26 (sequence is synthesized)
ccagagaggacggcgtggcgaaagtcagcgtccactgcagcacaggatcagatggccgtgtgctgtgcatgcaggagcctcgccttctgtgtctttagtcttgagccaaaatttgctcaa

SEQ ID NO: 161774 - DNA, 120 bp, Artificial Sequence
  ENSG00000107521_27 (sequence is synthesized)
agactgatctcttccttgcagggaacagctttggggctgggggaactagaacccacatgttggtctaaaccctgagaaggtggcagtgaggaagtatcccctcaggtgactggatctgtg

SEQ ID NO: 161775 - DNA, 120 bp, Artificial Sequence
  ENSG00000107521_28 (sequence is synthesized)
ttcctccttaacatcatctgatggaatggcaatgaaaagcgtggattgtggaaaatacagaaaaacataaaggaaaaaactccaatcccctgagcccaccactgttcaggacccctgctt

SEQ ID NO: 161776 - DNA, 120 bp, Artificial Sequence
  ENSG00000107521_29 (sequence is synthesized)
ttgtcacctactatttccctttagtttttagcagcggctggatgtgatatgtctagtttaaccagtccccttgatctttctatataataaataacacaggagtgaacatcctgaatcaga

SEQ ID NO: 161777 - DNA, 120 bp, Artificial Sequence
  ENSG00000107521_30 (sequence is synthesized)
catctgtcttaggctccagtggacccccgtgcctcctaaggcttgagtgcaggtacccgtgttcctagagcacaggacgctgtctgcggctccccatcttccctgccagctccagcctga

SEQ ID NO: 161778 - DNA, 120 bp, Artificial Sequence
  ENSG00000107521_31 (sequence is synthesized)
actcaaggattgttaagaccactccactgatccctaaagctgttgatgacaagttgattcatttaaaacttctgtacatgcattctcagactcatcttttttgtaattaaaattaaaaat

SEQ ID NO: 161779 - DNA, 80 bp, Artificial Sequence
  ENSG00000107521_32 (sequence is synthesized)
tcatctaatttctatacattctaaaatatattcagcatctgtagtttatactttgtttctccaaagtatgtgggtaaaca

SEQ ID NO: 161780 - DNA, 120 bp, Artificial Sequence
  ENSG00000107521_33 (sequence is synthesized)
aaaactggagtttcttggagctaaaaatgattatttcttgtggttcacagatagggccgcaatgggtgggtccaacttagggatcccacctctcactgcagctcttcttcctctgtagat

SEQ ID NO: 161781 - DNA, 120 bp, Artificial Sequence
  ENSG00000107521_34 (sequence is synthesized)
tgcccccacgctaactggagggtagtccatccatccaataatgatttattgttgagcctcctgctctgagccaaggcagtgcccgggtactaggagaggcccctggcactcacggagctt

SEQ ID NO: 161782 - DNA, 120 bp, Artificial Sequence
  ENSG00000107521_35 (sequence is synthesized)
ctctctggactaaatgagggcaagaagaagtcgaattttatcacgtaacagaagaacttggagccatcagtttctgtaacctaaaaagtttaacaaggctgggcgcggtggctcacgcct

SEQ ID NO: 161783 - DNA, 77 bp, Artificial Sequence
  ENSG00000107521_36 (sequence is synthesized)
gcctgtaatcacaacactttgggaagccaaggtgggccagttgcttgagctcagggatttgagaccagcctgggcag

SEQ ID NO: 161784 - DNA, 120 bp, Artificial Sequence
  ENSG00000107521_37 (sequence is synthesized)
aggttgaggtgggaggatcacttgagtccaggtggtagaggctgcagtgagccgagactgtgcccatgcattccaacctgggcgacagagcaaaaaaaaaaaaaaaaagtttaacgtaag

SEQ ID NO: 161785 - DNA, 120 bp, Artificial Sequence
  ENSG00000107521_38 (sequence is synthesized)
ctgaacacgttaattttttaatagctgtattaaggtatgattaacataccataaattgcacatatttaaagtgcataatttgataagctttgatatgtatatacctatgattctatcaca

SEQ ID NO: 161786 - DNA, 120 bp, Artificial Sequence
  ENSG00000107521_39 (sequence is synthesized)
cccagcccctgtgaagctgccatttttcacatactgcccccagctgggtccctaggtcagagaaacagctcaagtgaaccttggagaccatctggtctgaccctctgactttatatctgg

SEQ ID NO: 161787 - DNA, 120 bp, Artificial Sequence
  ENSG00000107537_0 (sequence is synthesized)
gggggttccccgcgccgcagccatggagcagcttcgcgccgccgcccgtctgcagattgttctgggccacctcggccgcccctcggccggggctgtcgtagctcatcccacttcagggac

SEQ ID NO: 161788 - DNA, 120 bp, Artificial Sequence
  ENSG00000107537_1 (sequence is synthesized)
tatttcctctgccagtttccatcctcaacaattccagtatactctggataataacgttctaaccctggaacagagaaaattttatgaagaaaatgggtttctagtaatcaaaaatcttgt

SEQ ID NO: 161789 - DNA, 120 bp, Artificial Sequence
  ENSG00000107537_2 (sequence is synthesized)
acctgatgccgatattcaacgctttcggaatgagtttgaaaaaatctgcagaaaggaggtgaaaccattaggattaacagtaatgagagatgtgaccatttcgaaatccgaatatgctcc

SEQ ID NO: 161790 - DNA, 120 bp, Artificial Sequence
  ENSG00000107537_3 (sequence is synthesized)
aagtgagaagatgatcacgaaggtccaggatttccaggaagataaggagctcttcagatactgcactctccccgagattctgaaatatgtggagtgcttcactggacctaatattatggc

SEQ ID NO: 161791 - DNA, 120 bp, Artificial Sequence
  ENSG00000107537_4 (sequence is synthesized)
catgcacacaatgttgataaacaaacctccagattctggcaagaagacgtcccgtcaccccctgcaccaggacctgcactatttccccttcaggcccagcgatctcatcgtttgcgcctg

SEQ ID NO: 161792 - DNA, 120 bp, Artificial Sequence
  ENSG00000107537_5 (sequence is synthesized)
gacggcgatggagcacatcagccggaacaacggctgtctggttgtgctcccaggcacacacaagggctccctgaagccccacgattaccccaagtgggaggggggagttaacaaaatgtt

SEQ ID NO: 161793 - DNA, 120 bp, Artificial Sequence
  ENSG00000107537_6 (sequence is synthesized)
gtcagaataaaacccagggattccggaaggcaatttcctgccatttcgccagtgccgattgccactacattgacgtgaagggcaccagtcaagaaaacatcgagaaggaagttgtaggaa

SEQ ID NO: 161794 - DNA, 120 bp, Artificial Sequence
  ENSG00000107537_7 (sequence is synthesized)
tagcacataaattctttggagctgaaaatagcgtgaacttgaaggatatttggatgtttcgagctcgacttgtgaaaggagaaagaaccaatctttgaaatagccatctgctataactct

SEQ ID NO: 161795 - DNA, 120 bp, Artificial Sequence
  ENSG00000107537_8 (sequence is synthesized)
ttcaacagaaaaccaaaaccaaacgaaatgtctaaggaaaatgttttcttaatgagatgatgtaaccttttctatcacttgttaaaagcagaaaacatgtatcaggtacttaattgcata

SEQ ID NO: 161796 - DNA, 120 bp, Artificial Sequence
  ENSG00000107537_9 (sequence is synthesized)
gagttagttttgcagcacaatggtgttgctttaatggaaaaaaaaaacagtaaaagtgaaatattactgttttaaggaaaactaatttagggtggcagccaataaaggtggttggtgtct

SEQ ID NO: 161797 - DNA, 120 bp, Artificial Sequence
  ENSG00000107537_10 (sequence is synthesized)
aatttaagtgttaaatcaatttctttcattcagttagctctttacccaagaagaagtgaatgatttggagcttagggtatgttttgtatcccctttctgataaacccattccctaccaat

SEQ ID NO: 161798 - DNA, 120 bp, Artificial Sequence
  ENSG00000107537_11 (sequence is synthesized)
tttatgtcataagagatttttttcccccaaatctagaacaatgtataatacattcacatctagtcaagggcataggaacggtgtcatggagtccaaataaagtggatattcctgctcgga

SEQ ID NO: 161799 - DNA, 120 bp, Artificial Sequence
  ENSG00000107537_12 (sequence is synthesized)
cttgcgttcaaaccgtgacaaaccgtagagtccttgagagccccgggttactcctacatggtcatattcccgcgcgggatgccgaagtggggcagatgaggtccggagctgctgagggat

SEQ ID NO: 161800 - DNA, 120 bp, Artificial Sequence
  ENSG00000107537_13 (sequence is synthesized)
cccgggtccttctgttggtctgagaccctggggcgggcggaatcccggagaaagccggagggactccccagtggaagcctgggagctgccgttctcctccctgcctgtgcaaacaggaag

SEQ ID NO: 161801 - DNA, 120 bp, Artificial Sequence
  ENSG00000107537_14 (sequence is synthesized)
gggctggtgatgctggctgcgggcctccctcctggactgcgacattgtcaccaaattctataaagacgtcatgcaggaagtgataacgtgtgctgcgacgttctggaagtaactcgaagc

SEQ ID NO: 161802 - DNA, 120 bp, Artificial Sequence
  ENSG00000107537_15 (sequence is synthesized)
cggccgccctggggtcggggcaattgccgcgttgccctgccctccgggatccctgggggcctctgctcctctctttgtggagacgtcgtttcaccggcggcgcgtgaccccggcagctgt

SEQ ID NO: 161803 - DNA, 120 bp, Artificial Sequence
  ENSG00000107537_16 (sequence is synthesized)
ccagagacccagagatgtccaatcacaggcgcacggtgcacaggcgcgcagggctgcctggaaccggcccaggcaggcagtgaccgggacctctccggaggggagaggacggtgccctcc

SEQ ID NO: 161804 - DNA, 120 bp, Artificial Sequence
  ENSG00000107537_17 (sequence is synthesized)
cgggcaggagctggccaggcaggcgctgcccagggcggcctccctgctggactacggcattgccactgagttatataaagacactatttggggaaggacagcgggtatactctggataat

SEQ ID NO: 161805 - DNA, 120 bp, Artificial Sequence
  ENSG00000107537_18 (sequence is synthesized)
atagtatgtattgtgtgcatgtaatgagaatacaaggtggattcgctcctggctttacagatgttttttaatgatttggtttgttgggaagtgtttagaagcatgggctctggtgccaga

SEQ ID NO: 161806 - DNA, 120 bp, Artificial Sequence
  ENSG00000107537_19 (sequence is synthesized)
cagactggctttttattttttatagagaaaggttctcactctgttgtgtaggctgagtgcagtggtgcgatcatagcttactgcggcctcaagttcctgggctcaagcaatcctcttgcc

SEQ ID NO: 161807 - DNA, 120 bp, Artificial Sequence
  ENSG00000107537_20 (sequence is synthesized)
cctcatctgtaaaatggggataataatagcacttatgtcctagtgttgttattaggactaaatacggtgaaatatatggaaaccactttgaagagagctgggcacatggtaagtgttaca

SEQ ID NO: 161808 - DNA, 120 bp, Artificial Sequence
  ENSG00000107537_21 (sequence is synthesized)
gaaatgtttgctgttattattattacaatgtaaccaaattataaaaagacttccctactggtatgctaaactagggaataatttaattctgggaatggattctagccagacagtttctcc

SEQ ID NO: 161809 - DNA, 120 bp, Artificial Sequence
  ENSG00000107537_22 (sequence is synthesized)
tccctttcattggaattattctacctcaagctggaggccaacttagtgcagagaaaccacccctcaagtctgcaaccctttccacagaggagggcagggcaggtgcttggagccagcggt

SEQ ID NO: 161810 - DNA, 120 bp, Artificial Sequence
  ENSG00000107537_23 (sequence is synthesized)
gggagaagaaaaaaaaatggtttcattaaaatgtgtaaggttggctgggtgcagtaactcatgcctgtaatcccagcattttaggagaccaagggaggaagatctctgaggccaggagtt

SEQ ID NO: 161811 - DNA, 120 bp, Artificial Sequence
  ENSG00000107537_24 (sequence is synthesized)
tgagagtggcctgggcaacatagtgaggctctgtctctaaaaataaaatttaaaaatatccaggcatggtggtatgcacttgtagtccctgctattggaaggctgaggtgggaggatcac

SEQ ID NO: 161812 - DNA, 120 bp, Artificial Sequence
  ENSG00000107537_25 (sequence is synthesized)
ttgagcccaggagttgaaggctgcagtgaacctataatggcatgctctccagcctgcgtgacacagtgagaccctatctctacataataaataaaacaaaacaaaacaaaataataaaat

SEQ ID NO: 161813 - DNA, 120 bp, Artificial Sequence
  ENSG00000107551_0 (sequence is synthesized)
gcagctccggtgcaagcgaggacacgacacatgcagtggcttctggactgcgcgatgactggacgcaagtaacttctaggtctgcagacaagaggaagagaagatgaaggaagactgtct

SEQ ID NO: 161814 - DNA, 120 bp, Artificial Sequence
  ENSG00000107551_1 (sequence is synthesized)
gccgagttctcacgtgcccatcagtgacagcaagtccattcagaagtcggagctcttaggcctgctgaaaacctacaactgctaccatgagggcaagagcttccagctgagacaccgtga

SEQ ID NO: 161815 - DNA, 120 bp, Artificial Sequence
  ENSG00000107551_2 (sequence is synthesized)
ggaagaagggactctgatcatcgaggggctcctcaacattgcctgggggctgaggcggcccatccggctgcagatgcaggatgaccgggagcaggtgcacctcccctccacctcatggat

SEQ ID NO: 161816 - DNA, 120 bp, Artificial Sequence
  ENSG00000107551_3 (sequence is synthesized)
gcccagacggcctagctgccctctaaaggagccatcgccccagaacgggaacatcacagcccaggggccaagcattcagccagtgcacaaggctgagagttccacagacagctcggggcc

SEQ ID NO: 161817 - DNA, 120 bp, Artificial Sequence
  ENSG00000107551_4 (sequence is synthesized)
cctggaggaggcagaggaggccccccagctgatgcggaccaagagcgacgccagttgcatgagccagaggaggcccaagtgccgcgcccccggtgaggcccagcgcatccggcgacaccg

SEQ ID NO: 161818 - DNA, 120 bp, Artificial Sequence
  ENSG00000107551_5 (sequence is synthesized)
gttctctatcaacggccacttctacaatcataagacctccgtgtttactccagcctatggatccgtgaccaatgtgagggtcaacagcaccatgacaaccctgcaggtgctcaccctgct

SEQ ID NO: 161819 - DNA, 120 bp, Artificial Sequence
  ENSG00000107551_6 (sequence is synthesized)
gctgaacaaatttagggtggaagatggccccagtgagttcgcactctacatcgttcacgagtctggggagcggacaaaattaaaagactgcgagtacccgctgatttccagaatcctgca

SEQ ID NO: 161820 - DNA, 120 bp, Artificial Sequence
  ENSG00000107551_7 (sequence is synthesized)
tgggccatgtgagaagatcgccaggatcttcctgatggaagctgacttgggcgtggaagtcccccatgaagtcgctcagtacattaagtttgaaatgccggtgctggacagttttgttga

SEQ ID NO: 161821 - DNA, 120 bp, Artificial Sequence
  ENSG00000107551_8 (sequence is synthesized)
aaaattaaaagaagaggaagaaagagaaataatcaaactgaccatgaagttccaagccctgcgtctgacgatgctgcagcgcctggagcagctggtggaggccaagtaactggccaacac

SEQ ID NO: 161822 - DNA, 120 bp, Artificial Sequence
  ENSG00000107551_9 (sequence is synthesized)
ctgcctcttccaaagtccccagcagtggcaggtgtacactgagccctggttgctggccccggccggtcacattgactgatggccaccgcctgacgaatcgagtgcctgtgtgtctacctc

SEQ ID NO: 161823 - DNA, 120 bp, Artificial Sequence
  ENSG00000107551_10 (sequence is synthesized)
tctgaagcctgagcaccatgattcccacagccagctcttggctccaagatgagcacccacaggaagccgacccaggcctgaggggccaggaacttgctgggtcagatctgtgtggccagc

SEQ ID NO: 161824 - DNA, 120 bp, Artificial Sequence
  ENSG00000107551_11 (sequence is synthesized)
cctgtccacaccatgcctctcctgcactggagagcagtgctggcccagcccctgcggcttaggcttcatctgcttgcacattgcctgtcccagagcccctgtgggtccacaagcccctgt

SEQ ID NO: 161825 - DNA, 120 bp, Artificial Sequence
  ENSG00000107551_12 (sequence is synthesized)
cctcttccttcatatgagattcttgtctgccctcatatcacgctgccccacaggaatgctgctgggaaaagcagggcctgccagcaggtatgagatctagcctgctttcagccatcacct

SEQ ID NO: 161826 - DNA, 120 bp, Artificial Sequence
  ENSG00000107551_13 (sequence is synthesized)
tgccacagtgtccccggcttctaagcctccaatatcaccctgtgagcctcgcacagctcagccccaacacagaggtgagaccaggaataaggccacaagtatctcactttctctgcagaa

SEQ ID NO: 161827 - DNA, 120 bp, Artificial Sequence
  ENSG00000107551_14 (sequence is synthesized)
atcaatctttacttcatcagagagacctaaagcgattcttacaaggagcttgctgcaagaaacacggtcattcaatcacattgaggagggtccacatggcattgagagggtgctgcccgc

SEQ ID NO: 161828 - DNA, 120 bp, Artificial Sequence
  ENSG00000107551_15 (sequence is synthesized)
gctcagccccatcaccactgtcccgtggatgcctgtgtacctcttgccttttctgggcttgcgtttctctcctctagtgggtggggatgactttcaatgactttcaatacttcccctgaa

SEQ ID NO: 161829 - DNA, 120 bp, Artificial Sequence
  ENSG00000107551_16 (sequence is synthesized)
ggaagaatgataaggagaaatgtctgttttgaggaaagggctttgaattccccagatactgaacaatttgtgtttgtgactgatggagaatttcaggaatgaatgagaaagcctttgcga

SEQ ID NO: 161830 - DNA, 120 bp, Artificial Sequence
  ENSG00000107551_17 (sequence is synthesized)
aactatgcaacagtttacatcagtcatgtgaagtatttgtctaaaacagagcaaactgaagaccaaattattctcctgttgaggtccgtggatggcagatttaaagggaagaaccacaaa

SEQ ID NO: 161831 - DNA, 120 bp, Artificial Sequence
  ENSG00000107551_18 (sequence is synthesized)
ggcttgcaaagataggagaggctccatctctaatgcatgtagaagctccttacgggtgcccatcaagagcatagcttggaagccaccatgctgtgcggaactgcgtcagggcaaatgtca

SEQ ID NO: 161832 - DNA, 120 bp, Artificial Sequence
  ENSG00000107551_19 (sequence is synthesized)
cagcaggatttccccaacccagctccatcatcacagacacagagagctgcaggggaggcctgcccactgttttgtcgactctgccctcctctggcagcatagatccttaggtgctcaata

SEQ ID NO: 161833 - DNA, 120 bp, Artificial Sequence
  ENSG00000107551_20 (sequence is synthesized)
aaggtgtgctgtattgaactgaagaagtgagaaccaagcttttttttttttttttgctttctgtgcatccaccctgacccccggctctaacttctgaaactcttatcctaaaggatgtgt

SEQ ID NO: 161834 - DNA, 120 bp, Artificial Sequence
  ENSG00000107551_21 (sequence is synthesized)
ggccatgtttggcagaagagccacaactcgctgctctaggagccgacatgactccttcatttctgtgcatgccctggggactagggtggagcctgaggagaggctgccatggaacacgca

SEQ ID NO: 161835 - DNA, 120 bp, Artificial Sequence
  ENSG00000107551_22 (sequence is synthesized)
ggcgtcactggtgggagcctagaggtgacctggatgatgagcaatagagtcaccccgagtcacagaatcttagcatcaggagggccccaagaatcttccaggccaggggctcaggtggga

SEQ ID NO: 161836 - DNA, 120 bp, Artificial Sequence
  ENSG00000107551_23 (sequence is synthesized)
tggaagcagggcctaggagagggtacaaaacaaatcaaacaggagctcccaggtaattgtactcccaagctattatttacaatctcaggtggaggacagctcctgtcccattgttcagct

SEQ ID NO: 161837 - DNA, 120 bp, Artificial Sequence
  ENSG00000107551_24 (sequence is synthesized)
gtaactgagtgactgccttgtgccaggcctgtgctcagccctggaggcacaaagatggagccagtctgtcctgtgtctaggggtcttctcatcaggagaagaaggccagacactggaagg

SEQ ID NO: 161838 - DNA, 120 bp, Artificial Sequence
  ENSG00000107551_25 (sequence is synthesized)
gtcaagagatcagctgagcaacgaaccggcaaagctcctgggagtgaggtggaggccaaggcagagttggctaagaagtgcatgtggcgtcacaggccaagatgcacctgccagctagga

SEQ ID NO: 161839 - DNA, 120 bp, Artificial Sequence
  ENSG00000107551_26 (sequence is synthesized)
gcaggccaggtcctggcacacaggaagccagtggagcaggagaccctccctaagtaccagcctgtttggttggttggtttgcttttgaaagttattacaatattatttaaggccttttcg

SEQ ID NO: 161840 - DNA, 120 bp, Artificial Sequence
  ENSG00000107551_27 (sequence is synthesized)
gataagttcacttttaaagtaggtgttatcaatctaatttctgaacgttatgggtcagaaaaatcactagcaagtggctcagaaaaagggaaaaggtacacttctgcaatcagctgagga

SEQ ID NO: 161841 - DNA, 120 bp, Artificial Sequence
  ENSG00000107551_28 (sequence is synthesized)
gttcacacctttttttctaaatcaacatcatatttgctgttcagaggcaatctgaaaagctgcaaattcagctcacctcaaccccataatttcaaacgttagaggctggtctctgtggtt

SEQ ID NO: 161842 - DNA, 120 bp, Artificial Sequence
  ENSG00000107551_29 (sequence is synthesized)
tcctactggttcctgtggggagctcccgctttctttctacatagagcttagggtatttctcatatgccccattggctacctagtgtctcaggtaataaacgtatccgaagataaagcaaa

SEQ ID NO: 161843 - DNA, 120 bp, Artificial Sequence
  ENSG00000107551_30 (sequence is synthesized)
tctcagccctgcagttgtctgttttcagaaaggagccatcgccccagaacgggaacatcacagcccaggggccaagcattcagccagtgcacaaggctgagagttccacagacagctcgg

SEQ ID NO: 161844 - DNA, 120 bp, Artificial Sequence
  ENSG00000107551_31 (sequence is synthesized)
ggccgctgcccgcacaccgaacctctcggggctgagtcgggctgctttctcctcgcgtcccggggcgccctcgggaactcgggagcgcgcggcgagctgaacaatggcctggggacacct

SEQ ID NO: 161845 - DNA, 120 bp, Artificial Sequence
  ENSG00000107551_32 (sequence is synthesized)
ggcaggtcgcaggccccaaatcttccccgccgcccctaggccaccgccctgcacccggaacctaccggcgttcccagagcggggcggacggggcggtgccattggccggtgcggagtgag

SEQ ID NO: 161846 - DNA, 80 bp, Artificial Sequence
  ENSG00000107551_33 (sequence is synthesized)
tgaggggcgtgctcggggcgggacggagagaccggggcggcacctttggccgtgccgggcgagaggcggggagcggggcg

SEQ ID NO: 161847 - DNA, 120 bp, Artificial Sequence
  ENSG00000107551_34 (sequence is synthesized)
tttgccatccccctcatcctgggcagcctttaggtggaggggttctgagcacttgttcagagatctgatggggtgccctgggggacagtgatggggtgcttctttttgagcctgtccaat

SEQ ID NO: 161848 - DNA, 120 bp, Artificial Sequence
  ENSG00000107551_35 (sequence is synthesized)
aggggatccccaagctacacatgaccatggctgggaggcatgggcaatagaaaagaggctccagatggcaggcactttatacgaaataggtgtgtacagggcctcattataacttttaca

SEQ ID NO: 161849 - DNA, 120 bp, Artificial Sequence
  ENSG00000107551_36 (sequence is synthesized)
ttgattgcatgttgacaaatagtaatttagatatattgagttcaataaaatgtgttattaatgctaatttcacctgtttcattttcccctctgtattaggccattcttgtgttgctataa

SEQ ID NO: 161850 - DNA, 120 bp, Artificial Sequence
  ENSG00000107551_37 (sequence is synthesized)
agaaatacctgaagctgggtaatttacaaagaaaagagatttagttggctcacggttctggaggctttacaagaagtgtggtgctggcatctgctcggcttccagggaggcctcaaggag

SEQ ID NO: 161851 - DNA, 120 bp, Artificial Sequence
  ENSG00000107551_38 (sequence is synthesized)
cctccagtcatgttggaaggcgaacggggagcaggcacttcacatggcgaaagcaggagcaagagagagggagtggagggtggtgccacacacttttaaatgaccagacctcgtgtgaac

SEQ ID NO: 161852 - DNA, 120 bp, Artificial Sequence
  ENSG00000107551_39 (sequence is synthesized)
tcagagcaaaagctcacttatcaccacggggatggcccaagccactcatgagggatctgctcccatgatccaaacacctcccacctggccccacctccaacactgggaattacaattcca

SEQ ID NO: 161853 - DNA, 120 bp, Artificial Sequence
  ENSG00000107551_40 (sequence is synthesized)
catgagatttgggtggggacacacatccaaaccatatcacctcctaacatgtactagaagattgaaattaccagtgtggctcacatcccacgtctgctggccccacagccccacagagcc

SEQ ID NO: 161854 - DNA, 120 bp, Artificial Sequence
  ENSG00000107551_41 (sequence is synthesized)
cagcttgggttcaggcagctgtccaggcctccccttcctccaacattagccagggctgtggctttcccttcgggaagggagacagcgttgagggaaagtggcttactgcagacttcaggg

SEQ ID NO: 161855 - DNA, 120 bp, Artificial Sequence
  ENSG00000107551_42 (sequence is synthesized)
ccttactcacagggccatcaccttccactgcgcctttggaaagtcagggtggggaagaagcaggcacccctcagggtggcccgcagcagccacagcaggccttgtaggaagtgatatggg

SEQ ID NO: 161856 - DNA, 120 bp, Artificial Sequence
  ENSG00000107551_43 (sequence is synthesized)
gaaaagcaagaggctgtacaatgccaaaagcaagtccagggcatttactgtgaggaagcaacgcaggtggagggcagggaggctgccagggccttacctgtgatagtgaaagtgtcggca

SEQ ID NO: 161857 - DNA, 120 bp, Artificial Sequence
  ENSG00000107551_44 (sequence is synthesized)
ccctggacatcctggaccagacgcaggcctgtcccgtgagtctcgcctcctcctcagcccgacccccatgccccccaccagggccatgtgcagaaccatccgggtgcattgcgatggcag

SEQ ID NO: 161858 - DNA, 120 bp, Artificial Sequence
  ENSG00000107551_45 (sequence is synthesized)
tctggtctcctctggttatgcctggccggcgagaagggtgctgtcacactcctgttacaaatgaggaaacagaggccagggaagccaaaggccagaagctgaggccctgccacaccctag

SEQ ID NO: 161859 - DNA, 120 bp, Artificial Sequence
  ENSG00000107551_46 (sequence is synthesized)
agggtgaggggttcttgggtgacggggcctcccaaggactcctggccagagccctgtcagttgatgtctccaggagctccacactctcccaaagggctcccagcctagcacagggaggcg

SEQ ID NO: 161860 - DNA, 120 bp, Artificial Sequence
  ENSG00000107551_47 (sequence is synthesized)
ccagccctccctctcccatcagtgaccgccagcaccagcagcttaggggaaagaagaatttgggtcctataaaaccatggcctgtccttttcctctagggaagtaaagtcttttccttca

SEQ ID NO: 161861 - DNA, 120 bp, Artificial Sequence
  ENSG00000107551_48 (sequence is synthesized)
ttttctctgtggatggcaggatgtttgaacctagaaaccccatttctaagttaccatgaaatccacattgtgcagggtcttcctgagtgctgccagggatacaaagaagtttccatggcg

SEQ ID NO: 161862 - DNA, 120 bp, Artificial Sequence
  ENSG00000107551_49 (sequence is synthesized)
tccctgttctcacagggcttttagtgccaacgaggagagagaaatgggatttgtgaatctaaaatatgggtcagaaatactgcatgattcccttatataaggaatctaaaataggctcat

SEQ ID NO: 161863 - DNA, 120 bp, Artificial Sequence
  ENSG00000107551_50 (sequence is synthesized)
agaggcagagagtgaaaatggtggttgcagggactggggcaggggaggaggaagtggagagttgctgtgcagctgatataatgtttcagctatgcaagatgagtaagtcctggatatggg

SEQ ID NO: 161864 - DNA, 120 bp, Artificial Sequence
  ENSG00000107551_51 (sequence is synthesized)
ctggacaacgttgtgcctacagtgaacaatacagtattgtgcactgaacagtttgtttagagggtagttcttatgttaaatgtccttatcacaataaaacataaataataaaattaaatg

SEQ ID NO: 161865 - DNA, 120 bp, Artificial Sequence
  ENSG00000107551_52 (sequence is synthesized)
ttggttgagatggcaatgagagaatgatattcaaagttaattgtgggaagactagtgtcagagcacattaggagtgtgtagtttcgagactgcggctctgggtagagggcagctgaggtt

SEQ ID NO: 161866 - DNA, 120 bp, Artificial Sequence
  ENSG00000107551_53 (sequence is synthesized)
gctggcaagtattctggcaaatgactcagcttggccaggcttacacacagagtgaccgggattggcacagaggcctggggtggtctcgcagagacagaggcctggaataggtcagaggca

SEQ ID NO: 161867 - DNA, 120 bp, Artificial Sequence
  ENSG00000107551_54 (sequence is synthesized)
ctgaatcaagggcccaaggggtgccaaccagcactactagcaaggtgcgtgcagaggactctgttgattagggccccaggttggcagcaggagagaagccatgtcacctgcagacctagg

SEQ ID NO: 161868 - DNA, 120 bp, Artificial Sequence
  ENSG00000107551_55 (sequence is synthesized)
gaaaccgagggaggttggggacatgggatgaaggctgttgtagaaattctggtatgggatatagggctagtgatgtctaagcagtggtgagaaaagcaagaccctttgtcagccctggca

SEQ ID NO: 161869 - DNA, 120 bp, Artificial Sequence
  ENSG00000107551_56 (sequence is synthesized)
agtggacgctgctgctgttggaaggcaccgggagaagggtgaggctgagacacagctaggacagagagtgcccacttctcctctggtgggtgtgggaccctgccgggcctggtggccata

SEQ ID NO: 161870 - DNA, 120 bp, Artificial Sequence
  ENSG00000107551_57 (sequence is synthesized)
ggtcccctgcttggcatgagcagacaggctgtgcgtccctggaaccacttcttcaccgcggtgtggacgtgcctgccggccagcagctggcttcctgtgggacacctgactcagccactg

SEQ ID NO: 161871 - DNA, 120 bp, Artificial Sequence
  ENSG00000107551_58 (sequence is synthesized)
tgttctgcgctgtgcccctggccaggcatgagctgagcacatctcaggctccctcccacagggcctggtcacacgccccagggcacgtagtggctgatggtccttcctgaggggatgggg

SEQ ID NO: 161872 - DNA, 120 bp, Artificial Sequence
  ENSG00000107551_59 (sequence is synthesized)
cgggacgtgctgtgcaggttcctctggtgccctctccaggctgaggaggggctcgggttgtctctggtgattaactccatcattgcctagagagggacgggggcacaccttgacaaattt

SEQ ID NO: 161873 - DNA, 120 bp, Artificial Sequence
  ENSG00000107551_60 (sequence is synthesized)
actactctgttttcattttaatgtcaaaattttaaaaataaatttatcagaatttcacattacatttgtttaatatcagaataatgtttctgtcaggaggaaatggtctcctgcctgcct

SEQ ID NO: 161874 - DNA, 120 bp, Artificial Sequence
  ENSG00000107551_61 (sequence is synthesized)
taccattcaatgcacatttatctcctcctcggcccactcccaaaagacgcagttagtagctgggccttgcctgcttctgcagtagtaactcctgtagagggcacacattcagagctttgc

SEQ ID NO: 161875 - DNA, 120 bp, Artificial Sequence
  ENSG00000107551_62 (sequence is synthesized)
ccccttcagatttcatatgaaacccatgctgtgacagcacccaccaccctgacagccccagcacatacctaggtgtccccagtcactcagcgaattctgaggcacacagaattagagcat

SEQ ID NO: 161876 - DNA, 120 bp, Artificial Sequence
  ENSG00000107551_63 (sequence is synthesized)
aaagtcagactccttaggaaggctgcaagtgtgactcacatgtgcccctcttcgaggtaaagcactcacagacagcagtcgcggctgtgcccgtgtattctccaggatcccatctgtctt

SEQ ID NO: 161877 - DNA, 120 bp, Artificial Sequence
  ENSG00000107551_64 (sequence is synthesized)
ctcttccccaggtcccctgggctacagggctgtgccccatcatacccactccttctccagcccagcactagctaccctggcctggggctcatcctgccaagaggcctggaggttgggccc

SEQ ID NO: 161878 - DNA, 120 bp, Artificial Sequence
  ENSG00000107551_65 (sequence is synthesized)
ttctaggtggcccctgcctgacaccccactaggccttcgggaagcccagcgagcctgtttggcacacagctgctggcctggctaagcctggtgtctaggaatgcgcaggccctgactatg

SEQ ID NO: 161879 - DNA, 120 bp, Artificial Sequence
  ENSG00000107551_66 (sequence is synthesized)
ttcatgtgtccgtgtgtctgtgcgatgcagcccagcacaagccctcaggtctgcagggccaggctcactctccgtccagcagatgctggggggaggcctctacttttcttttattgtttc

SEQ ID NO: 161880 - DNA, 120 bp, Artificial Sequence
  ENSG00000107551_67 (sequence is synthesized)
agactgactctcttggtttgaaatccaggcctcacctcagcctgccttgcttcccgcctgtgtcctaccccaggggctgctggtctcttctccttggcctgagctccctttctctgccgg

SEQ ID NO: 161881 - DNA, 120 bp, Artificial Sequence
  ENSG00000107551_68 (sequence is synthesized)
gaggggcttcacctgctggacccctacccaggtgcctgcctgtgaggtgctctgccctcattctcgctcctttttatggaaaagtgagcagaggcttgggaggtgacagtgacagtgtgg

SEQ ID NO: 161882 - DNA, 120 bp, Artificial Sequence
  ENSG00000107551_69 (sequence is synthesized)
gggtggcctgagtcccccgccctgtgtgtgctatgggaaacaggagcatccacagaaggcactgcgctctcctggcccctcacctccctctgcgacctcgtcctcaccctctgtacctgc

SEQ ID NO: 161883 - DNA, 120 bp, Artificial Sequence
  ENSG00000107551_70 (sequence is synthesized)
tcactcatcctttttattccccttcctttagccctcagtgaagggcctgtttcagagcaggggctcagaagacagggctggggccaccaaagacctccatgggcaccctaagacagagac

SEQ ID NO: 161884 - DNA, 120 bp, Artificial Sequence
  ENSG00000107551_71 (sequence is synthesized)
caagaggggtatggccatgtgacattgtgacccaggttaccctgtctgggtctcaccttcctatctgcaagctgggaatatccagcctccagtccaggaatggccctcacgtccccatct

SEQ ID NO: 161885 - DNA, 120 bp, Artificial Sequence
  ENSG00000107551_72 (sequence is synthesized)
caagccgaacatgtctcgccatctcttgttctatctttaaaattcacacgaatttagcctcttactactctgttttcattttaatgtcaaaattttaaaaataaatttatcagaatttca

SEQ ID NO: 161886 - DNA, 120 bp, Artificial Sequence
  ENSG00000107554_0 (sequence is synthesized)
acacgggatcgacccgcccgccgcttccaggggcggaggtgacagcgggctggggactggcggctgcaactgcctgccgcgccgagggaccgccgggcggcggaaagcaggttataaaac

SEQ ID NO: 161887 - DNA, 120 bp, Artificial Sequence
  ENSG00000107554_1 (sequence is synthesized)
atggaggctggctcagtggttcgagccatttttgacttctgccctagcgtatcagaagaactgccgctctttgtgggagatattattgaggtgctggcagtggtggatgaattttggctt

SEQ ID NO: 161888 - DNA, 120 bp, Artificial Sequence
  ENSG00000107554_2 (sequence is synthesized)
ctaggaaagaaggaggatgttacaggacaattccccagcagttttgtggaaattgtgaccattcccagtctaaaagagggagagaggctgtttgtgtgcatttgtgaattcacatcccaa

SEQ ID NO: 161889 - DNA, 120 bp, Artificial Sequence
  ENSG00000107554_3 (sequence is synthesized)
gagttggataatcttcccctccatcgaggtgacctggtgattctcgatggcattcccactgcaggctggctgcagggccgaagctgctggggcgcacggggcttcttcccatcttcatgt

SEQ ID NO: 161890 - DNA, 120 bp, Artificial Sequence
  ENSG00000107554_4 (sequence is synthesized)
gtccgcgagctctgcctctcctcacagagccggcagtggcactcccagagcgccctgtttcagattccggaatattccatgggacaagcccgggccctaatggggctttctgctcagctg

SEQ ID NO: 161891 - DNA, 120 bp, Artificial Sequence
  ENSG00000107554_5 (sequence is synthesized)
gatgaagagctggacttcagggaaggggatgtgatcaccattattggagttcctgaaccaggctggtttgaaggggagttagagggccgaagaggcatttttccagaaggttttgtagag

SEQ ID NO: 161892 - DNA, 120 bp, Artificial Sequence
  ENSG00000107554_6 (sequence is synthesized)
ctgttggggcccctgaggactgtggatgagtcagtaagttctggaaatcaagatgactgcattgttaatggtgaagtagatacccctgtaggagaagaagagatagggccggatgaggat

SEQ ID NO: 161893 - DNA, 120 bp, Artificial Sequence
  ENSG00000107554_7 (sequence is synthesized)
gaggaggagccagggacctatggggtcgccctgtacagattccaagccctggagccaaatgagctggatttcgaggtcggggataaaatccgaattctggcgaccttggaagatggctgg

SEQ ID NO: 161894 - DNA, 120 bp, Artificial Sequence
  ENSG00000107554_8 (sequence is synthesized)
ctggaaggatccctgaagggcaggacaggcatctttccttaccggtttgtgaaattatgtcctgacacacgggtggaggaaaccatggctctgccccaggaaggcagccttgccaggatc

SEQ ID NO: 161895 - DNA, 120 bp, Artificial Sequence
  ENSG00000107554_9 (sequence is synthesized)
ccggaaacttctttggattgtttggagaacaccttaggagtagaggaacaaagacatgaaaccagtgaccatgaggccgaggagcctgactgcattatttctgaagcacccacttctccc

SEQ ID NO: 161896 - DNA, 120 bp, Artificial Sequence
  ENSG00000107554_10 (sequence is synthesized)
ctcggtcatctgacttcagagtatgacacagacagaaactcttatcaggacgaggacaccgcaggagggcccccgagaagcccaggcgtggagtgggaaatgcctcttgccacagactct

SEQ ID NO: 161897 - DNA, 120 bp, Artificial Sequence
  ENSG00000107554_11 (sequence is synthesized)
cccacatctgaccctacagaagtagtcaatggtatttcctcccaacctcaggtcccttttcatcccaacttgcagaaaagccagtattattctacagtgggagggagccacccgcactca

SEQ ID NO: 161898 - DNA, 120 bp, Artificial Sequence
  ENSG00000107554_12 (sequence is synthesized)
gaacagtaccccgaccttcttcccctagaagcaaggactagagactatgccagcctacctcccaaaagaatgtattcccagctaaaaactcttcagaagccagtgctccctctttacagg

SEQ ID NO: 161899 - DNA, 120 bp, Artificial Sequence
  ENSG00000107554_13 (sequence is synthesized)
ggctcttctgtttcagcttcaagggtagtcaaacccagacaatcaagtcctcagctccacaacctagcaagttatactaaaaagcaccacacgtccagtgtttactccatctcagagaga

SEQ ID NO: 161900 - DNA, 120 bp, Artificial Sequence
  ENSG00000107554_14 (sequence is synthesized)
ttggagatgaagcctggtccgcaagcccaagggcttgttatggaagcagcaacacattcacagggagacggcagcactgacctggactcgaagctgacacaacagctgatcgagtttgag

SEQ ID NO: 161901 - DNA, 120 bp, Artificial Sequence
  ENSG00000107554_15 (sequence is synthesized)
aagagcttggcagggcccggcacagagccagataaaattttacgccacttttcaatcatggactttaactctgagaaggatattgtccgaggttcctcaaagttaatcaccgagcaggag

SEQ ID NO: 161902 - DNA, 120 bp, Artificial Sequence
  ENSG00000107554_16 (sequence is synthesized)
ctgccggaaaggagaaaggccctaaggccaccgccacctcgtccctgtactccggtatccacttctccccatttgctggttgaccagaacctaaaacctgcaccacccttggtggtgcga

SEQ ID NO: 161903 - DNA, 120 bp, Artificial Sequence
  ENSG00000107554_17 (sequence is synthesized)
ccctctcgcccagctcccctgcctccctcagcacagcagagaacgaatgcggtatcccccaagctcctatctcgacaccgtcctacctgtgagaccttagaaaaggagggccctggtcat

SEQ ID NO: 161904 - DNA, 120 bp, Artificial Sequence
  ENSG00000107554_18 (sequence is synthesized)
atgggaaggagtctggaccagacctccccatgccccttagtgctggtgaggattgaggaaatggagcgggacttggatatgtacagtagagctcaagaagagctaaacctcatgctggag

SEQ ID NO: 161905 - DNA, 120 bp, Artificial Sequence
  ENSG00000107554_19 (sequence is synthesized)
gagaagcaggatgaatcatcaagagcagagaccctcgaggatctcaagttctgtgaaagtaacattgaaagtttgaatatggaactccagcaactaagagaaatgacgctcctctcctcc

SEQ ID NO: 161906 - DNA, 120 bp, Artificial Sequence
  ENSG00000107554_20 (sequence is synthesized)
cagtcttcatcactggtggccccttctgggtctgtgtctgccgaaaatccagagcagaggatgctggagaagagagccaaggtcatagaagaacttcttcagacagaaagagactacatt

SEQ ID NO: 161907 - DNA, 120 bp, Artificial Sequence
  ENSG00000107554_21 (sequence is synthesized)
cgggatctggaaatgtgtattgagcggatcatggtacccatgcagcaggcacaggtaccaaacattgattttgagggactttttggaaatatgcagatggtgattaaggtctcgaagcaa

SEQ ID NO: 161908 - DNA, 120 bp, Artificial Sequence
  ENSG00000107554_22 (sequence is synthesized)
ttattggctgctctggaaatcagcgatgctgtaggacctgtgtttcttggtcaccgggatgagcttgagggaacatacaagatttactgccagaatcatgatgaggccattgcgctgctt

SEQ ID NO: 161909 - DNA, 120 bp, Artificial Sequence
  ENSG00000107554_23 (sequence is synthesized)
gaaatctacgagaaggatgagaagatccagaagcatcttcaggactccttggcagatctgaagagcctatacaacgaatggggatgcacaaattatattaacctgggctccttcctcatc

SEQ ID NO: 161910 - DNA, 120 bp, Artificial Sequence
  ENSG00000107554_24 (sequence is synthesized)
aaaccagtacagagagtaatgcgttacccgctgttgctaatggagttgctgaattccaccccagaatcccacccagataaagtgcctttaaccaatgcagtccttgcggtcaaggaaatc

SEQ ID NO: 161911 - DNA, 120 bp, Artificial Sequence
  ENSG00000107554_25 (sequence is synthesized)
aacgttaacattaatgaatataaacggcgaaaggacctggtcctcaagtaccgtaagggtgatgaagatagccttatggagaaaatttccaaactgaacatccactccatcatcaagaaa

SEQ ID NO: 161912 - DNA, 120 bp, Artificial Sequence
  ENSG00000107554_26 (sequence is synthesized)
tgaagaaacagaaaaaaacttccgaatgcaagaaagattgattaagtcttttatccgagacctgtctctctacctccagcacatccgggagtccgcatgtgtgaaagtggtggctgctgt

SEQ ID NO: 161913 - DNA, 120 bp, Artificial Sequence
  ENSG00000107554_27 (sequence is synthesized)
gagcatgtgggatgtgtgcatggagagaggacaccgggacctggagcagtttgagagggtgcatcgctacatcagtgaccagctcttcacaaactttaaggagaggacagagcggcttgt

SEQ ID NO: 161914 - DNA, 120 bp, Artificial Sequence
  ENSG00000107554_28 (sequence is synthesized)
catctcccccttaaatcagttactgagcatgtttacagggccccataagctggtacagaaacgctttgacaagctcctggacttctataactgtacagaacgggcagaaaagctaaagga

SEQ ID NO: 161915 - DNA, 120 bp, Artificial Sequence
  ENSG00000107554_29 (sequence is synthesized)
caagaagaccctggaggagctgcagtcggcccggaacaactatgaggccctgaatgcacagctgctggatgagctgcccaagttccaccagtacgcccagggcctcttcaccaactgtgt

SEQ ID NO: 161916 - DNA, 120 bp, Artificial Sequence
  ENSG00000107554_30 (sequence is synthesized)
ccacggctatgctgaagcccactgtgactttgtgcaccaggctctggagcaattaaagccactgctttcgttactcaaagtggctggcagagagggaaaccttattgccatcttccacga

SEQ ID NO: 161917 - DNA, 120 bp, Artificial Sequence
  ENSG00000107554_31 (sequence is synthesized)
agagcacagcagagttctgcagcaactccaggtttttaccttcttcccggagtctcttccagctaccaagaagccatttgagaggaaaaccattgaccgccagtctgctcgaaagccact

SEQ ID NO: 161918 - DNA, 120 bp, Artificial Sequence
  ENSG00000107554_32 (sequence is synthesized)
cctgggcctgccaagttacatgctacagtcagaagaactccgggcctccctcctggccaggtatccccctgaaaaactcttccaggcagaacggaacttcaatgctgctcaagacttgga

SEQ ID NO: 161919 - DNA, 120 bp, Artificial Sequence
  ENSG00000107554_33 (sequence is synthesized)
tgtctcacttttggaaggtgacctggtgggtgtgattaagaaaaaagaccccatgggcagccagaaccgctggctgattgacaatggagtcaccaaaggcttcgtgtacagctctttcct

SEQ ID NO: 161920 - DNA, 120 bp, Artificial Sequence
  ENSG00000107554_34 (sequence is synthesized)
aaagccctacaatcctcgccgcagccactccgatgcctccgtgggtagccactcctccacagagtctgagcacggcagctcctcccccaggttcccacgccagaacagcggcagcaccct

SEQ ID NO: 161921 - DNA, 120 bp, Artificial Sequence
  ENSG00000107554_35 (sequence is synthesized)
gaccttcaaccccagcagcatggctgtatcctttacctcggggtcttgccagaagcagcctcaagatgcatctcctccgccaaaagaatgtgaccaaggaactctcagtgcatccctaaa

SEQ ID NO: 161922 - DNA, 120 bp, Artificial Sequence
  ENSG00000107554_36 (sequence is synthesized)
tccgagtaattcagagagtagtccttccagatgcccttcagacccagactccacctcccagccaaggtcaggggactctgcagatgtagctagagatgtaaagcaacccactgccacgcc

SEQ ID NO: 161923 - DNA, 120 bp, Artificial Sequence
  ENSG00000107554_37 (sequence is synthesized)
gaggagctaccggaacttcaggcatccagaaatagttggctactccgtaccaggacgaaatgggcaaagtcaagacctcgtcaaaggatgtgcaagaacagcccaggctccggaagacag

SEQ ID NO: 161924 - DNA, 120 bp, Artificial Sequence
  ENSG00000107554_38 (sequence is synthesized)
aagtacagagccagatggcagtgaggcagaaggcaaccaggtctattttgctgtctacaccttcaaggcacgaaacccaaatgagctgagcgtgtcagccaatcagaaactcaagatcct

SEQ ID NO: 161925 - DNA, 120 bp, Artificial Sequence
  ENSG00000107554_39 (sequence is synthesized)
cgagtttaaagatgttacaggaaatacagagtggtggttagctgaggttaacgggaagaagggctacgttccctccaattatatccgcaaaaccgagtacacctgagcccacgttgcctg

SEQ ID NO: 161926 - DNA, 120 bp, Artificial Sequence
  ENSG00000107554_40 (sequence is synthesized)
ccacccagccttgctgcctttgctttcagtccgccgagggttctggcggcccaccgagagggcgcctgctcctgagacacaggccctgtctgcgttgcttaaccatggcatggtggagca

SEQ ID NO: 161927 - DNA, 120 bp, Artificial Sequence
  ENSG00000107554_41 (sequence is synthesized)
caccacagatcttgttctcctcgattgggttgtaaaccttgatgctcactagaatctctagaatttgaaatggaccctggggctttgcaaatgacttagtgactatgagaagagagacaa

SEQ ID NO: 161928 - DNA, 120 bp, Artificial Sequence
  ENSG00000107554_42 (sequence is synthesized)
gtcttagagctggcttttggaaaggagaaacttgcagtcagaagcccagtgtcctatgtatgcaggaagctgtgctctagcaatagacagtgttggtaatggttgtgctgtacggcgttt

SEQ ID NO: 161929 - DNA, 120 bp, Artificial Sequence
  ENSG00000107554_43 (sequence is synthesized)
ggggtggccccatgttccatgctcagctgaccggatgccaactcagatgaaaagaattcatggctctgggcaccccgtgaggcagtgcttgcacatggctgggagtttgtcgggattgaa

SEQ ID NO: 161930 - DNA, 120 bp, Artificial Sequence
  ENSG00000107554_44 (sequence is synthesized)
ccaaacctagtgcttcaaagctcctgggacacctccagtgtccagcacacattctcatacatactgcccctaatttctaaagtccctaaagcactacattctgtaaccttgtttctttta

SEQ ID NO: 161931 - DNA, 120 bp, Artificial Sequence
  ENSG00000107554_45 (sequence is synthesized)
ctccattcccagattagttatgcaaaattcaactgcgttctacttttagaagtgtttagggtctttattttctgttgacccttcatctgaaagattctcttcccttgttaggtacaatca

SEQ ID NO: 161932 - DNA, 120 bp, Artificial Sequence
  ENSG00000107554_46 (sequence is synthesized)
ctatgttgcccaggctggtcttaaacgcctgggctcaagcaaccctcccgcctccctgctgagattacaggtgtaagccaccataccgcaacctcaatgacacctttctgatggtcttta

SEQ ID NO: 161933 - DNA, 120 bp, Artificial Sequence
  ENSG00000107554_47 (sequence is synthesized)
accgcaacctcaatgacacctttctgatggtctttacacagtctgtgatgtctggtggcccccctgccctggactcaataattgatagattttcctagagtaacagtatgagagctccag

SEQ ID NO: 161934 - DNA, 120 bp, Artificial Sequence
  ENSG00000107554_48 (sequence is synthesized)
ccattccattaaaagtattagttctgctttgagctgaaaccagttgagcctaatggaagactggatgtctttcttcttcatccaagcaccctaatgactgtttagttacatccatagatg

SEQ ID NO: 161935 - DNA, 120 bp, Artificial Sequence
  ENSG00000107554_49 (sequence is synthesized)
cagacaacataacacctgtgacttacttgaattgggataagccattccagaagtagcttatcctagacttggaaataagatttttttcaccactaacttccatgcttcagagatgacatt

SEQ ID NO: 161936 - DNA, 120 bp, Artificial Sequence
  ENSG00000107554_50 (sequence is synthesized)
caaagccagattcccaagtgcctgatcatacctcccagtctcaggaagatatttgcttaccccttagaccaagaatcttaagatcttccccagctatgaagcctatcttggaatgggaaa

SEQ ID NO: 161937 - DNA, 120 bp, Artificial Sequence
  ENSG00000107554_51 (sequence is synthesized)
ccatgaaatttgtcttttaaaagaaagggaagaaatagccttacagcccctgttcctccaagtgcacatttagccttaaaatcctgggagtcgggagacaccgtggagtcctaacatcca

SEQ ID NO: 161938 - DNA, 120 bp, Artificial Sequence
  ENSG00000107554_52 (sequence is synthesized)
cagtgtctgctggtcgtggtcagaaggcagtaatgcaagagtccttttgtgaagagtgtttctatgtagagatgtttatatttaagtagttcttttataaataaaagcatttctaatggc

SEQ ID NO: 161939 - DNA, 120 bp, Artificial Sequence
  ENSG00000107554_53 (sequence is synthesized)
ggggaaatgccgaccctattcaaaggagtttggggggttgtggagcattccagagctctgggaagattctgtcccgcctgcttaccctcaggcccacacctccacacacagccagctctg

SEQ ID NO: 161940 - DNA, 120 bp, Artificial Sequence
  ENSG00000107554_54 (sequence is synthesized)
attatcttctggcctctggagaaagatagagtagctcgctgattggatcctgaggttgaaataactccacatctcactgcgctccgactagagcaacgagaagagtgtctggaatggttg

SEQ ID NO: 161941 - DNA, 120 bp, Artificial Sequence
  ENSG00000107554_55 (sequence is synthesized)
ggagacattttaagcaggacaaatccagccttaggctagactgcacctgtccacagcccagcccaggcccatggaaaagaatagtaaaacctttgtctttaagcacatagaatatgtgtg

SEQ ID NO: 161942 - DNA, 120 bp, Artificial Sequence
  ENSG00000107554_56 (sequence is synthesized)
aaacccagaaggctagaaaagaaagggaagtggaggagaaaaggcactgggactccagctgggagtatgaagactacgggagtgtacggaaaaggaaccttacagtgctggatggactct

SEQ ID NO: 161943 - DNA, 120 bp, Artificial Sequence
  ENSG00000107554_57 (sequence is synthesized)
acagagaaaatgacttggatcccaggtactgggccaagggacagcatcagccctacagaaaaagggattgtggatactgggattttgaacagagtgaaccaagctatatggactgtgggg

SEQ ID NO: 161944 - DNA, 120 bp, Artificial Sequence
  ENSG00000107554_58 (sequence is synthesized)
aagcacatgaaagtggaaagggctgtgtgtaccacggaggtcatgatggttataggagtccagaaaatgtagattatgagagtctcagccctgggacgaaggataattcacctacgagaa

SEQ ID NO: 161945 - DNA, 120 bp, Artificial Sequence
  ENSG00000107554_59 (sequence is synthesized)
gcccagatgtgacctcgaaagctggtggatacggggaggcaaatggctactcagactgtaagaatctgaattataatcctgaggactctaaaaaagctgaacagttgactgactgtaggg

SEQ ID NO: 161946 - DNA, 120 bp, Artificial Sequence
  ENSG00000107554_60 (sequence is synthesized)
gtttggatgattcttcagcgaatttaggtcaacctcagttgtggtatatagaccatgagaatgttaaccataatcttgaggattgttgggcaactaatttttattgtagagaacacagca

SEQ ID NO: 161947 - DNA, 120 bp, Artificial Sequence
  ENSG00000107554_61 (sequence is synthesized)
atttatatcatgttcctgggagttatcctgatggtcagcctgtgagcttttcagattcgaatggtgtcaatgaagataaggaatttatcaaataccatgaaggggacaggaatgttcatc

SEQ ID NO: 161948 - DNA, 120 bp, Artificial Sequence
  ENSG00000107554_62 (sequence is synthesized)
aaaatgacaacatgtatcccaaagcaaagactcatattatggatcagggtgattttgatacagaaaataaaggctatgatgctttatttgcaaactgtgcatataaatctcgtaattcca

SEQ ID NO: 161949 - DNA, 120 bp, Artificial Sequence
  ENSG00000107554_63 (sequence is synthesized)
gagggacagattctctccatcaaatggagaatttggagtataatggcactgacataccaagaacaaaggcacatgggggcagcaggatccttctggatggtctgcagactcagtgtacca

SEQ ID NO: 161950 - DNA, 120 bp, Artificial Sequence
  ENSG00000107554_64 (sequence is synthesized)
ggggagaacaaggaggacatcatttggggattcctcagagctcgtcattagagaagaacatctggcatttagaggaagagaaaaaattaaatggcccagagacttggagaaggaatagtt

SEQ ID NO: 161951 - DNA, 120 bp, Artificial Sequence
  ENSG00000107554_65 (sequence is synthesized)
tgacaataagcaagcattagtcaattctaatcatgtgagagagtatttttttgcaaagacaaaaaaaggaagcagcacagcaggagctattgggagtgccagggtcggatgggaaaccag

SEQ ID NO: 161952 - DNA, 120 bp, Artificial Sequence
  ENSG00000107554_66 (sequence is synthesized)
gttttgaggatcagtaacatggcaggacagttgtctttgagatggcgacagcatgaaccaagacttgaggaaggagaggtgactggtcattatcgtaatcctataggaatcatcttggtt

SEQ ID NO: 161953 - DNA, 120 bp, Artificial Sequence
  ENSG00000107554_67 (sequence is synthesized)
ctaatttgataatttgctttttggtaaattaagaaaccctattagggacataggggaatgctaaagagatgataaaagccctcaacagttttgttaagaattaaaagtcttagcctttct

SEQ ID NO: 161954 - DNA, 120 bp, Artificial Sequence
  ENSG00000107554_68 (sequence is synthesized)
tagttagaaaatttcaaattatggaactcatttttccaagactgctattcagtcttggaatgtatgacaaaagctggaaagttctgtctgttctgacttgtgtctgtcctaactggctcc

SEQ ID NO: 161955 - DNA, 120 bp, Artificial Sequence
  ENSG00000107560_0 (sequence is synthesized)
acgttcccgagaccaacatggagaaggccaacccggaagtgccgccgcagccgcccgcccggtgttaggagccgccggccgggccaggccgaaccaagcgcccgcagccctgcagcccgc

SEQ ID NO: 161956 - DNA, 120 bp, Artificial Sequence
  ENSG00000107560_1 (sequence is synthesized)
ccacgtcccgccggcgccggggcggccgcgttccccgccctcccccactccacccctggctacccgctcccgcccgagaggaggagctgaggcgagggggaggaggaggagggagaggtt

SEQ ID NO: 161957 - DNA, 120 bp, Artificial Sequence
  ENSG00000107560_2 (sequence is synthesized)
gagaggtttgcgagagggagcgaggccgcgttagccgccggcggttcgtattaccggggtcgggaggaggagccgggccgagcctgcggacgaacgccgggcgggcgggaggcgcggagg

SEQ ID NO: 161958 - DNA, 120 bp, Artificial Sequence
  ENSG00000107560_3 (sequence is synthesized)
cagcggaggctgctcggccgcaaggaggcaggcgggaggccaggggtgcagaattggggcgggggctcccttcacccccgcagccctccgcccgggtccgtgtggccaggcctcacgtgc

SEQ ID NO: 161959 - DNA, 120 bp, Artificial Sequence
  ENSG00000107560_4 (sequence is synthesized)
cccgcaggcctggggaaggtggagacaggggcgggggtccgcgcagaggcctgcacggcgcggccaggtgatggtgggcctctgtgtttctccagacgaaaggggacccccggagcggcc

SEQ ID NO: 161960 - DNA, 120 bp, Artificial Sequence
  ENSG00000107560_5 (sequence is synthesized)
gtgcccctgggctgcccccgcgaggcgttttgacatcagccatagggaagtcggggagccctgagcctgcctgtttccgttaagtgtccttaggatgcagtgattaaggaattaggctct

SEQ ID NO: 161961 - DNA, 120 bp, Artificial Sequence
  ENSG00000107560_6 (sequence is synthesized)
ccctccgggaggggcactgcctgtgctagggaactcgggggcagagaaacaggacaggatgatgctgtccgagcaagcccaaaagtggtttccaacccacgtgcaggtcacagtgctcca

SEQ ID NO: 161962 - DNA, 120 bp, Artificial Sequence
  ENSG00000107560_7 (sequence is synthesized)
agccaaagatctgaagccaaaaggcaaaagtggtaccaatgacacatacactataattcagctgggcaaggaaaagtactccacctctgtagctgagaaaacccttgagccagtttggaa

SEQ ID NO: 161963 - DNA, 120 bp, Artificial Sequence
  ENSG00000107560_8 (sequence is synthesized)
ggaggaggcctctttcgagctacctggattgctaattcagggaagtccagagaaatacattcttttccttatagttatgcacaggtccctggtgggtctggataaatttttagggcaggt

SEQ ID NO: 161964 - DNA, 120 bp, Artificial Sequence
  ENSG00000107560_9 (sequence is synthesized)
ggcaatcaatctcaatgacatctttgaggacaaacaaagaaggaaaacagagtggtttagattagaatccaaacaaggaaaacgaatcaaaaacaggggtgagataaaggtcaatattca

SEQ ID NO: 161965 - DNA, 120 bp, Artificial Sequence
  ENSG00000107560_10 (sequence is synthesized)
gtttatgaggaacaatatgaccgcaagtatgtttgacttatcaatgaaggacaaaaccagatctccttttgcaaagttaaaagataagatgaagggtagaaaaaatgatggaacattttc

SEQ ID NO: 161966 - DNA, 120 bp, Artificial Sequence
  ENSG00000107560_11 (sequence is synthesized)
tgatacgtcttctgcaatcattccaagtactcacatgcccgatgccaatagtgaattttcaagtggtgaaatacagatgaaatccaaaccaaaaaagccttttctcttgggtcctcagcg

SEQ ID NO: 161967 - DNA, 120 bp, Artificial Sequence
  ENSG00000107560_12 (sequence is synthesized)
actctcgtcagcgcattcaatgtctgatttatctgggtcccatatgtcttctgagaaactgaaggctggcaccataggtcaaacacatcttctcggacaccagttagattcctttggaac

SEQ ID NO: 161968 - DNA, 120 bp, Artificial Sequence
  ENSG00000107560_13 (sequence is synthesized)
agttccagaaagtggaagtctcaaatctccacacagaagaacattaagctttgatacttctaaaatgaaccaacctgacagcattgtggatgaaggtgaattgtgtttcggaagacaaaa

SEQ ID NO: 161969 - DNA, 120 bp, Artificial Sequence
  ENSG00000107560_14 (sequence is synthesized)
tgacccatttacaaatgtgactgcttcattaccccaaaaatttgcaacactgccaaggaagaaaaatccatttgaagaaagcagcgaaacatgggacagcagcatgaatttattttcaaa

SEQ ID NO: 161970 - DNA, 120 bp, Artificial Sequence
  ENSG00000107560_15 (sequence is synthesized)
accaattgaaataagaaaagaaaataaaagagagaaaagggagaaagttagcctgtttgaaagagtgactggaaaaaaagatagcagaagatctgataaacttaacaatgggggatctga

SEQ ID NO: 161971 - DNA, 120 bp, Artificial Sequence
  ENSG00000107560_16 (sequence is synthesized)
tagcccttgtgacttgaaatcacctaatgcatttagtgaaaatcgccaggactattttgattatgagtcaaccaatccatttacagcaaaattcagggcttcaaatataatgccatcttc

SEQ ID NO: 161972 - DNA, 120 bp, Artificial Sequence
  ENSG00000107560_17 (sequence is synthesized)
aagttttcatatgagtccaacaagcaatgaagacctcaggaaaatcccggacagcaacccctttgatgccactgcagggtatcgtagtctgacctatgaagaggttctacaggagctggt

SEQ ID NO: 161973 - DNA, 120 bp, Artificial Sequence
  ENSG00000107560_18 (sequence is synthesized)
gaaacacaaagaactccttaggaggaaagacacccacatccgggaactcgaggactacatcgacaacctccttgtaagggtaatggaagaaacgcccagtattctcagagtgccgtatga

SEQ ID NO: 161974 - DNA, 120 bp, Artificial Sequence
  ENSG00000107560_19 (sequence is synthesized)
accatccaggaaagctggcaaattctctaacagttaataaagccaattgtattgtattgataattggacaaagagagagaaagaaagaaggaaggaaggaaaaacttgttactgaaagag

SEQ ID NO: 161975 - DNA, 120 bp, Artificial Sequence
  ENSG00000107560_20 (sequence is synthesized)
actacactatcaggtttcattacatattctcctttattgtgaagagtagttttacctgtaaatattagcagggactatcaagagtgacctttgaagcaagctaaatcatttaaatgttta

SEQ ID NO: 161976 - DNA, 120 bp, Artificial Sequence
  ENSG00000107560_21 (sequence is synthesized)
aattgaaaatgggccagattctcaatgaataagtggttccttaggactcactcaggtgctggtactgacccactaatctgccataggcccagaaatatcttcagaagtacgtgagttgtt

SEQ ID NO: 161977 - DNA, 120 bp, Artificial Sequence
  ENSG00000107560_22 (sequence is synthesized)
cctcaggaatagatttttcataaagcagaattgatcctgtggctggtttctcagaaatcagtttgtagaaatatttagcttcaggaatactgctcgttataaacactactaaaaaaacag

SEQ ID NO: 161978 - DNA, 120 bp, Artificial Sequence
  ENSG00000107560_23 (sequence is synthesized)
atacacatatgtacatgaatatatatatattcatgtatcttgtatataaaatataggcatatacctcatatatacatgtgtttttagaacatttagaaacaattgattgcctctaaagtt

SEQ ID NO: 161979 - DNA, 120 bp, Artificial Sequence
  ENSG00000107560_24 (sequence is synthesized)
gcctctaaagttaggctaccaatttcttgatttgaaaatgtgtgtgctctattgatgcaagacaagtcatccttcctactgtcatggtttgttatagagaagctgcttcaaatcactctt

SEQ ID NO: 161980 - DNA, 120 bp, Artificial Sequence
  ENSG00000107560_25 (sequence is synthesized)
gactacatggaccttggtttcaaagtgagctgctatatattattctagcatcaaagtttttctctttccccaaaagtgatgatctcaagtccttttttaaagaatgacaaattttaggag

SEQ ID NO: 161981 - DNA, 120 bp, Artificial Sequence
  ENSG00000107560_26 (sequence is synthesized)
aattaacatttgagtttgtttaaggtataagcagaagataagctaatatagcttgttttgttgaaattctgcatgcctttaaatcactagcaaagcaaatattataaagttatatctgaa

SEQ ID NO: 161982 - DNA, 120 bp, Artificial Sequence
  ENSG00000107560_27 (sequence is synthesized)
aataattgtgggaagtatgtgattgcctggtgtgtctgataacccaaagcagcgggcagattccaggaatgaagaattaggcttggtttcaggttacataaataatagagcagatggttg

SEQ ID NO: 161983 - DNA, 120 bp, Artificial Sequence
  ENSG00000107560_28 (sequence is synthesized)
cctttgggtcttgaaccaaaataagacttactaaaggaagagtgagtttttagaagagaactttacgagcgtgacattatgcattactccacatccaccctttaagaattgatttattac

SEQ ID NO: 161984 - DNA, 120 bp, Artificial Sequence
  ENSG00000107560_29 (sequence is synthesized)
aaaattatgttctattttaaagtccactcccccaaaatactgatttcttccatggattatttttatatgatttgtacaaattttttctgaaatttaaattgacaagcaatgttataaaaa

SEQ ID NO: 161985 - DNA, 120 bp, Artificial Sequence
  ENSG00000107560_30 (sequence is synthesized)
tattgctaatcttctgcttatttttcagcctttaaagtctgaaatactataaaacactgagagtatctatgtctttctgaatttaaaatgaaaattcatgtccatatggagacttacata

SEQ ID NO: 161986 - DNA, 120 bp, Artificial Sequence
  ENSG00000107560_31 (sequence is synthesized)
ttccccaatctttccatgaattgcatttttttctaatacttatctctgttaagactccattgaaagttaaacaaaaagccgatataatagtttgggttttttttttttgcttattttagt

SEQ ID NO: 161987 - DNA, 120 bp, Artificial Sequence
  ENSG00000107560_32 (sequence is synthesized)
attttgaatcagagaatacttggccaagctcgtatttgtaaactaaaaccccttgttatttgtatcttctgcatttcagttttactgtaagaacatacattttgaaattatgaacatttt

SEQ ID NO: 161988 - DNA, 120 bp, Artificial Sequence
  ENSG00000107560_33 (sequence is synthesized)
tttcataaaaattaaatgctttaagaaatggagaaggaaaaatagcttttatcaatttttttctcctcaagattctgtaataaacctcaaagtctggtgtagaatggtattttcccgttt

SEQ ID NO: 161989 - DNA, 120 bp, Artificial Sequence
  ENSG00000107560_34 (sequence is synthesized)
gaggtcttggtagttttttttttttttttaaacatggtgccacttttaattaactaaatgttacaaaattctcagcatttgtttttgtctggtagtattattgagtcttttcatacactt

SEQ ID NO: 161990 - DNA, 120 bp, Artificial Sequence
  ENSG00000107560_35 (sequence is synthesized)
cttaaaatgtgaaaatctatgttttcagtattatgacagtatctgcagatactataataatatgctttggccaaatttgctgtttatagagtgaaccaagatgtcagttttgtattgggg

SEQ ID NO: 161991 - DNA, 120 bp, Artificial Sequence
  ENSG00000107560_36 (sequence is synthesized)
atatgttttacataaatagaactcatttaaaagtatggttcaagtactgctcttctttttatggggaaattgatttttaaggagcgattcttttcctatataaaagctattgaggcttag

SEQ ID NO: 161992 - DNA, 120 bp, Artificial Sequence
  ENSG00000107560_37 (sequence is synthesized)
ctttattcatacatgagtgatttggttataactcaatcaaaatttttatctttaaatctgagacaagtattatatttaaaactagatctattaatacattcatcactgcctgaaaatttg

SEQ ID NO: 161993 - DNA, 120 bp, Artificial Sequence
  ENSG00000107560_38 (sequence is synthesized)
ctgttctaatgtttgtgaattttcactcattacctagagtaaacttattgcatattttcataatcagtcaaaataataaaactaaaaacaaaaagtaaaaattagttcccaagtaaatat

SEQ ID NO: 161994 - DNA, 120 bp, Artificial Sequence
  ENSG00000107560_39 (sequence is synthesized)
atcagtgtttcctgtgtttgggcagaagtgcaaagtagttttaatttctcacgttgtagaaaaagaggccaaaaaggtcaccttagtttatttttccaaaacataactttaggtattcta

SEQ ID NO: 161995 - DNA, 120 bp, Artificial Sequence
  ENSG00000107560_40 (sequence is synthesized)
atgtattttgttagttgcttagaaatggaaataaaatatatgtgcttattaaataatgcacagtacactagattatagagtttatttttgcttttatgctttaaagaatgcatgcccaaa

SEQ ID NO: 161996 - DNA, 120 bp, Artificial Sequence
  ENSG00000107560_41 (sequence is synthesized)
acactactaccaacaagaggattttttaaaatcacagaattgatatttatctcaagactatcttaagctaatgtacttctgttacataattaaactatttctgctattatttttaaagca

SEQ ID NO: 161997 - DNA, 120 bp, Artificial Sequence
  ENSG00000107560_42 (sequence is synthesized)
gtattattttataaccaattctaaaattcagctttaaaaatattgaacataccttcctaccacttacgcttcaagtttcatttattgaataccagggtcatatcttagaattgtatataa

SEQ ID NO: 161998 - DNA, 120 bp, Artificial Sequence
  ENSG00000107560_43 (sequence is synthesized)
aacaacatgtaacccattcatgaaaaacgtttttaagtattgctttttgctgctatgttctgcattgagcctagttttgccattgtcccctgaatgtagtattatctatagattatacat

SEQ ID NO: 161999 - DNA, 120 bp, Artificial Sequence
  ENSG00000107560_44 (sequence is synthesized)
aactacatctattgcttttggtggtaaatcaagatttagttgtaattttccagctgtgaaaatgttgccttgtatttaaaagggtttcatgaatggaaacctaagtaaaactaagctcat

SEQ ID NO: 162000 - DNA, 120 bp, Artificial Sequence
  ENSG00000107560_45 (sequence is synthesized)
tagtgacagacttgttttcttcttgttattcctccagcaactccctcaccaccacgcctccctgcctaccatccccggaagggtgcttattctttaacaaagagaatctaaaaaaaaaaa

SEQ ID NO: 162001 - DNA, 120 bp, Artificial Sequence
  ENSG00000107560_46 (sequence is synthesized)
caaaaaactgttgtctaatatatctacagtaaatgttacactagagcttttattttcctctgtagcttttcagaagaagcaatttaccttggatttgtaaatcaagctgaaacttttttg

SEQ ID NO: 162002 - DNA, 120 bp, Artificial Sequence
  ENSG00000107560_47 (sequence is synthesized)
atgttcatgtactcatatgtcttgtaggtggtaggtgtcacttgtgtgtatgtgtaagtgaagtatgatgcatgctcattcacttggtccctttgaaataagggaaaggatcacagtgct

SEQ ID NO: 162003 - DNA, 120 bp, Artificial Sequence
  ENSG00000107560_48 (sequence is synthesized)
gctgggccatgatggtatgtagaagggtctgtcagcacacatggaaagcccccatttgcacagatgtagaactttaataatccagatgcaatcattggaagtatttaatatgcaattggt

SEQ ID NO: 162004 - DNA, 120 bp, Artificial Sequence
  ENSG00000107560_49 (sequence is synthesized)
agcaccttagctaattaatctgcatatgaagcattttctgatatatttaataagaggtatagaagctcttcaagcattaaaatagagttgatgtttcattccatttgttttatccatcaa

SEQ ID NO: 162005 - DNA, 120 bp, Artificial Sequence
  ENSG00000107560_50 (sequence is synthesized)
aaaatgcactctcacagtggagttgaagtctaatacatgatacatgtgggcctgttagtcttcgaagcttccagatggtttgtgttttgaggtacaaaaaaatgctgcagatctagaaat

SEQ ID NO: 162006 - DNA, 120 bp, Artificial Sequence
  ENSG00000107560_51 (sequence is synthesized)
gcatatatttagcgggtatttgaaagatagaagcattatttataactgaagagtataacacttatcttcttaagtaaatgctctcataacttgtatacatttttgcaggtacaaattcaa

SEQ ID NO: 162007 - DNA, 120 bp, Artificial Sequence
  ENSG00000107560_52 (sequence is synthesized)
gcaggtacaaattcaaaagtatgtaagcattgtataatgtgacaattgtataatttatgtaatctgatgcatgaatcagaatttttatataatatatgattattgacttatagttgatta

SEQ ID NO: 162008 - DNA, 120 bp, Artificial Sequence
  ENSG00000107560_53 (sequence is synthesized)
catccgggaactcgaggactacatcgacaacctccttcaactccctcaccaccacgcctccctgcctaccatccccggaagggtgcttattctttaacaaagagaatctaaaaaaaaaaa

SEQ ID NO: 162009 - DNA, 120 bp, Artificial Sequence
  ENSG00000107562_0 (sequence is synthesized)
actttcactctccgtcagccgcattgcccgctcggcgtccggcccccgacccgcgctcgtccgcccgcccgcccgcccgcccgcgccatgaacgccaaggtcgtggtcgtgctggtcctc

SEQ ID NO: 162010 - DNA, 120 bp, Artificial Sequence
  ENSG00000107562_1 (sequence is synthesized)
gtgctgaccgcgctctgcctcagcgacgggaagcccgtcagcctgagctacagatgcccatgccgattcttcgaaagccatgttgccagagccaacgtcaagcatctcaaaattctcaac

SEQ ID NO: 162011 - DNA, 120 bp, Artificial Sequence
  ENSG00000107562_2 (sequence is synthesized)
actccaaactgtgcccttcagattgtagcccggctgaagaacaacaacagacaagtgtgcattgacccgaagctaaagtggattcaggagtacctggagaaagctttaaacaagtaagca

SEQ ID NO: 162012 - DNA, 120 bp, Artificial Sequence
  ENSG00000107562_3 (sequence is synthesized)
caacagccaaaaaggactttccgctagacccactcgaggaaaactaaaaccttgtgagagatgaaagggcaaagacgtgggggagggggccttaaccatgaggaccaggtgtgtgtgtgg

SEQ ID NO: 162013 - DNA, 120 bp, Artificial Sequence
  ENSG00000107562_4 (sequence is synthesized)
ggtgggcacattgatctgggatcgggcctgaggtttgccagcatttagaccctgcatttatagcatacggtatgatattgcagcttatattcatccatgccctgtacctgtgcacgttgg

SEQ ID NO: 162014 - DNA, 120 bp, Artificial Sequence
  ENSG00000107562_5 (sequence is synthesized)
aacttttattactggggtttttctaagaaagaaattgtattatcaacagcattttcaagcagttagttccttcatgatcatcacaatcatcatcattctcattctcattttttaaatcaa

SEQ ID NO: 162015 - DNA, 120 bp, Artificial Sequence
  ENSG00000107562_6 (sequence is synthesized)
cgagtacttcaagatctgaatttggcttgtttggagcatctcctctgctcccctggggagtctgggcacagtcaggtggtggcttaacagggagctggaaaaagtgtcctttcttcagac

SEQ ID NO: 162016 - DNA, 120 bp, Artificial Sequence
  ENSG00000107562_7 (sequence is synthesized)
accgactggggctgggcgccgccactgccttcacctcctctttcaacctcagtgattggctctgtgggctccatgtagaagccactattactgggactgtgctcagagacccctctccca

SEQ ID NO: 162017 - DNA, 120 bp, Artificial Sequence
  ENSG00000107562_8 (sequence is synthesized)
gctattcctactctctccccgactccgagagcatgcttaatcttgcttctgcttctcatttctgtagcctgatcagcgccgcaccagccgggaagagggtgattgctggggctcgtgccc

SEQ ID NO: 162018 - DNA, 120 bp, Artificial Sequence
  ENSG00000107562_9 (sequence is synthesized)
tgcatccctctcctcccagggcctgccccacagctcgggccctctgtgagatccgtctttggcctcctccagaatggagctggccctctcctggggatgtgtaatggtccccctgcttac

SEQ ID NO: 162019 - DNA, 120 bp, Artificial Sequence
  ENSG00000107562_10 (sequence is synthesized)
ccgcaaaagacaagtctttacagaatcaaatgcaattttaaatctgagagctcgctttgagtgactgggttttgtgattgcctctgaagcctatgtatgccatggaggcactaacaaact

SEQ ID NO: 162020 - DNA, 120 bp, Artificial Sequence
  ENSG00000107562_11 (sequence is synthesized)
ctgaggtttccgaaatcagaagcgaaaaaatcagtgaataaaccatcatcttgccactaccccctcctgaagccacagcagggtttcaggttccaatcagaactgttggcaaggtgacat

SEQ ID NO: 162021 - DNA, 120 bp, Artificial Sequence
  ENSG00000107562_12 (sequence is synthesized)
ttccatgcataaatgcgatccacagaaggtcctggtggtatttgtaactttttgcaaggcatttttttatatatatttttgtgcacatttttttttacgtttctttagaaaacaaatgta

SEQ ID NO: 162022 - DNA, 120 bp, Artificial Sequence
  ENSG00000107562_13 (sequence is synthesized)
tttcaaaatatatttatagtcgaacaattcatatatttgaagtggagccatatgaatgtcagtagtttatacttctctattatctcaaactactggcaatttgtaaagaaatatatatga

SEQ ID NO: 162023 - DNA, 120 bp, Artificial Sequence
  ENSG00000107562_14 (sequence is synthesized)
tatataaatgtgattgcagcttttcaatgttagccacagtgtattttttcacttgtactaaaattgtatcaaatgtgacattatatgcactagcaataaaatgctaattgtttcatggta

SEQ ID NO: 162024 - DNA, 120 bp, Artificial Sequence
  ENSG00000107562_15 (sequence is synthesized)
aagatgtgagagggtcagacgcctgaggaacccttacagtaggagcccagctctgaaaccagtgttagggaagggcctgccacagcctcccctgccagggcagggccccaggcattgcca

SEQ ID NO: 162025 - DNA, 120 bp, Artificial Sequence
  ENSG00000107562_16 (sequence is synthesized)
agggctttgttttgcacactttgccatattttcaccatttgattatgtagcaaaatacatgacatttatttttcatttagtttgattattcagtgtcactggcgacacgtagcagcttag

SEQ ID NO: 162026 - DNA, 120 bp, Artificial Sequence
  ENSG00000107562_17 (sequence is synthesized)
actaaggccattattgtacttgccttattagagtgtctttccacggagccactcctctgactcagggctcctgggttttgtattctctgagctgtgcaggtggggagactgggctgaggg

SEQ ID NO: 162027 - DNA, 120 bp, Artificial Sequence
  ENSG00000107562_18 (sequence is synthesized)
agcctggccccatggtcagccctagggtggagagccaccaagagggacgcctgggggtgccaggaccagtcaacctgggcaaagcctagtgaaggcttctctctgtgggatgggatggtg

SEQ ID NO: 162028 - DNA, 120 bp, Artificial Sequence
  ENSG00000107562_19 (sequence is synthesized)
gagggccacatgggaggctcacccccttctccatccacatgggagccgggtctgcctcttctgggagggcagcagggctaccctgagctgaggcagcagtgtgaggccagggcagagtga

SEQ ID NO: 162029 - DNA, 120 bp, Artificial Sequence
  ENSG00000107562_20 (sequence is synthesized)
gacccagccctcatcccgagcacctccacatcctccacgttctgctcatcattctctgtctcatccatcatcatgtgtgtccacgactgtctccatggccctgcaaaaggactctcagga

SEQ ID NO: 162030 - DNA, 120 bp, Artificial Sequence
  ENSG00000107562_21 (sequence is synthesized)
ccaaagctttcatgtaaactgtgcaccaagcaggaaatgaaaatgtcttgtgttacctgaaaacactgtgcacatctgtgtcttgtttggaatattgtccattgtccaatcctatgtttt

SEQ ID NO: 162031 - DNA, 120 bp, Artificial Sequence
  ENSG00000107562_22 (sequence is synthesized)
tgttcaaagccagcgtcctcctctgtgaccaatgtcttgatgcatgcactgttccccctgtgcagccgctgagcgaggagatgctccttgggccctttgagtgcagtcctgatcagagcc

SEQ ID NO: 162032 - DNA, 120 bp, Artificial Sequence
  ENSG00000107562_23 (sequence is synthesized)
gtggtcctttggggtgaactaccttggttcccccactgatcacaaaaacatggtgggtccatgggcagagcccaagggaattcggtgtgcaccagggttgaccccagaggattgctgccc

SEQ ID NO: 162033 - DNA, 120 bp, Artificial Sequence
  ENSG00000107562_24 (sequence is synthesized)
catcagtgctccctcacatgtcagtaccttcaaactagggccaagcccagcactgcttgaggaaaacaagcattcacaacttgtttttggtttttaaaacccagtccacaaaataaccaa

SEQ ID NO: 162034 - DNA, 120 bp, Artificial Sequence
  ENSG00000107562_25 (sequence is synthesized)
tcctggacatgaagattctttcccaattcacatctaacctcatcttcttcaccatttggcaatgccatcatctcctgccttcctcctgggccctctctgctctgcgtgtcacctgtgctt

SEQ ID NO: 162035 - DNA, 120 bp, Artificial Sequence
  ENSG00000107562_26 (sequence is synthesized)
gtaagtcaacctgcctgacatttggagtgttccccttccactgagggcagtcgatagagctgtattaagccacttaaaatgttcacttttgacaaaggcaagcacttgtgggtttttgtt

SEQ ID NO: 162036 - DNA, 120 bp, Artificial Sequence
  ENSG00000107562_27 (sequence is synthesized)
ttgtttttcattcagtcttacgaatacttttgccctttgattaaagactccagttaaaaaaaattttaatgaagaaagtggaaaacaaggaagtcaaagcaaggaaactatgtaacatgt

SEQ ID NO: 162037 - DNA, 120 bp, Artificial Sequence
  ENSG00000107562_28 (sequence is synthesized)
aggaagtaggaagtaaattatagtgatgtaatcttgaattgtaactgttcttgaatttaataatctgtagggtaattagtaacatgtgttaagtattttcataagtatttcaaattggag

SEQ ID NO: 162038 - DNA, 120 bp, Artificial Sequence
  ENSG00000107562_29 (sequence is synthesized)
cttcatggcagaaggcaaacccatcaacaaaaattgtcccttaaacaaaaattaaaatcctcaatccagctatgttatattgaaaaaatagagcctgagggatctttactagttataaag

SEQ ID NO: 162039 - DNA, 120 bp, Artificial Sequence
  ENSG00000107562_30 (sequence is synthesized)
atacagaactctttcaaaaccttttgaaattaacctctcactataccagtataattgagttttcagtggggcagtcattatccaggtaatccaagatattttaaaatctgtcacgtagaa

SEQ ID NO: 162040 - DNA, 120 bp, Artificial Sequence
  ENSG00000107562_31 (sequence is synthesized)
cttggatgtacctgcccccaatccatgaaccaagaccattgaattcttggttgaggaaacaaacatgaccctaaatcttgactacagtcaggaaaggaatcatttctatttctcctccat

SEQ ID NO: 162041 - DNA, 120 bp, Artificial Sequence
  ENSG00000107562_32 (sequence is synthesized)
gggagaaaatagataagagtagaaactgcagggaaaattatttgcataacaattcctctactaacaatcagctccttcctggagactgcccagctaaagcaatatgcatttaaatacagt

SEQ ID NO: 162042 - DNA, 120 bp, Artificial Sequence
  ENSG00000107562_33 (sequence is synthesized)
cttccatttgcaagggaaaagtctcttgtaatccgaatctctttttgctttcgaactgctagtcaagtgcgtccacgagctgtttactagggatccctcatctgtccctccgggacctgg

SEQ ID NO: 162043 - DNA, 120 bp, Artificial Sequence
  ENSG00000107562_34 (sequence is synthesized)
tgctgcctctacctgacactcccttgggctccctgtaacctcttcagaggccctcgctgccagctctgtatcaggacccagaggaaggggccagaggctcgttgactggctgtgtgttgg

SEQ ID NO: 162044 - DNA, 120 bp, Artificial Sequence
  ENSG00000107562_35 (sequence is synthesized)
gattgagtctgtgccacgtgtttgtgctgtggtgtgtccccctctgtccaggcactgagataccagcgaggaggctccagagggcactctgcttgttattagagattacctcctgagaaa

SEQ ID NO: 162045 - DNA, 120 bp, Artificial Sequence
  ENSG00000107562_36 (sequence is synthesized)
aaaggttccgcttggagcagaggggctgaatagcagaaggttgcacctcccccaaccttagatgttctaagtctttccattggatctcattggacccttccatggtgtgatcgtctgact

SEQ ID NO: 162046 - DNA, 120 bp, Artificial Sequence
  ENSG00000107562_37 (sequence is synthesized)
ggtgttatcaccgtgggctccctgactgggagttgatcgcctttcccaggtgctacacccttttccagctggatgagaatttgagtgctctgatccctctacagagcttccctgactcat

SEQ ID NO: 162047 - DNA, 120 bp, Artificial Sequence
  ENSG00000107562_38 (sequence is synthesized)
tctgaaggagccccattcctgggaaatattccctagaaacttccaaatcccctaagcagaccactgataaaaccatgtagaaaatttgttattttgcaacctcgctggactctcagtctc

SEQ ID NO: 162048 - DNA, 120 bp, Artificial Sequence
  ENSG00000107562_39 (sequence is synthesized)
tgagcagtgaatgattcagtgttaaatgtgatgaatactgtattttgtattgtttcaattgcatctcccagataatgtgaaaatggtccaggagaaggccaattcctatacgcagcgtgc

SEQ ID NO: 162049 - DNA, 120 bp, Artificial Sequence
  ENSG00000107562_40 (sequence is synthesized)
tttaaaaaataaataagaaacaactctttgagaaacaacaatttctactttgaagtcataccaatgaaaaaatgtatatgcacttataattttcctaataaagttctgtactcaaatgta

SEQ ID NO: 162050 - DNA, 120 bp, Artificial Sequence
  ENSG00000107562_41 (sequence is synthesized)
atctaacggccaaagtggttttggaaaaaaaatgcacagaagacacctactcccaccagcggagttccggagccctcgcagcctcctgttgaccgctcccgcctaatgcagccgctgacc

SEQ ID NO: 162051 - DNA, 120 bp, Artificial Sequence
  ENSG00000107562_42 (sequence is synthesized)
gcccactccccgacggccaggactccccagggacagggacgtgtccccagggcaggcccctggatggacgcggcgactgaccccacttcgctggacgctgtgctgggaaggacacagaga

SEQ ID NO: 162052 - DNA, 120 bp, Artificial Sequence
  ENSG00000107562_43 (sequence is synthesized)
ggtggctggggcagcctgcggtcacaaagcgaggcccaaaggggcgctctcctcacccccacgtctcctgggtgccgacctgcaccctcccttcgccaccggactggggccatctgggat

SEQ ID NO: 162053 - DNA, 120 bp, Artificial Sequence
  ENSG00000107562_44 (sequence is synthesized)
cttgaacttggcataattagtggcagctattcttatcatgaggacctttagtatgccaccaggcattaattttaaaagccgctcttggcctgggcaccctgctgtgctcgtagtagttct

SEQ ID NO: 162054 - DNA, 120 bp, Artificial Sequence
  ENSG00000107562_45 (sequence is synthesized)
ctcttctttccaaacctgtgttcttcagcacagcacagctggatgctggagaaactatgggcttcaccaaggttttggctgaagcctagtaaattagccagcccttagctaataacagtg

SEQ ID NO: 162055 - DNA, 120 bp, Artificial Sequence
  ENSG00000107562_46 (sequence is synthesized)
aagaagcgacagaagaagagaaaggctgcccagaaaaggaaaaactagttatctgccacctcgagatggaccacagttcacttgctctcggcgctttgtaaatttgctcgatcctcctcc

SEQ ID NO: 162056 - DNA, 120 bp, Artificial Sequence
  ENSG00000107566_0 (sequence is synthesized)
ggctgttggcggcggttggctcggcgcgggagtcggctgcacgtgcgggcgggggcgatgcgtcactgatcggaggaacgagaatgaatatgactcaagcccgggttctggtggctgcag

SEQ ID NO: 162057 - DNA, 120 bp, Artificial Sequence
  ENSG00000107566_1 (sequence is synthesized)
tggtggggttggtggctgtcctgctctacgcctccatccacaagattgaggagggccatctggctgtgtactacaggggaggagctttactaactagccccagtggaccaggctatcata

SEQ ID NO: 162058 - DNA, 120 bp, Artificial Sequence
  ENSG00000107566_2 (sequence is synthesized)
tcatgttgcctttcattactacgttcagatctgtgcagacaacactacaaactgatgaagttaaaaatgtgccttgtggaacaagtggtggggtcatgatctatattgaccgaatagaag

SEQ ID NO: 162059 - DNA, 120 bp, Artificial Sequence
  ENSG00000107566_3 (sequence is synthesized)
tggttaatatgttggctccttatgcagtgtttgatatcgtgaggaactatactgcagattatgacaagaccttaatcttcaataaaatccaccatgagctgaaccagttctgcagtgccc

SEQ ID NO: 162060 - DNA, 120 bp, Artificial Sequence
  ENSG00000107566_4 (sequence is synthesized)
acacacttcaggaagtttacattgaattgtttgatcaaatagatgaaaacctgaagcaagctctgcagaaagacttaaacctcatggccccaggtctcactatacaggctgtgcgtgtta

SEQ ID NO: 162061 - DNA, 120 bp, Artificial Sequence
  ENSG00000107566_5 (sequence is synthesized)
caaaacccaaaatcccagaagccataagaagaaattttgagttaatggaggctgagaagacaaaactccttatagctgcacagaaacaaaaggttgtggaaaaagaagctgagacagaga

SEQ ID NO: 162062 - DNA, 120 bp, Artificial Sequence
  ENSG00000107566_6 (sequence is synthesized)
tatagaagcagagaagattgcacaagtggcaaaaattcggtttcagcagaaagtgatggaaaaagaaactgaaaagcgcatttctgaaatcgaagatgctgcattcctggcccgagagaa

SEQ ID NO: 162063 - DNA, 120 bp, Artificial Sequence
  ENSG00000107566_7 (sequence is synthesized)
agcgaaagcagatgctgaatattatgctgcacacaaatatgccacctcaaacaagcacaagttgaccccggaatatctggagctcaaaaagtaccaggccattgcttctaacagtaagat

SEQ ID NO: 162064 - DNA, 120 bp, Artificial Sequence
  ENSG00000107566_8 (sequence is synthesized)
ctattttggcagcaacatccctaacatgttcgtggactcctcatgtgctttgaaatattcagatattaggactggaagagaaagctcactcccctctaaggaggctcttgaaccctctgg

SEQ ID NO: 162065 - DNA, 120 bp, Artificial Sequence
  ENSG00000107566_9 (sequence is synthesized)
agagaacgtcatccaaaacaaagagagcacaggttgatgcaagaggtggaaatgttctccatatcaagatgtggcccaaggggttaagtgggaacaatcattatacggactcttcagatt

SEQ ID NO: 162066 - DNA, 120 bp, Artificial Sequence
  ENSG00000107566_10 (sequence is synthesized)
tacagagaacttacacttcatctgttccacctctcctgcgatagtcctgggtgctccactgattggaggatagagccagctgtctgacacacaaatggtcttttcagccacagtcttatc

SEQ ID NO: 162067 - DNA, 120 bp, Artificial Sequence
  ENSG00000107566_11 (sequence is synthesized)
aagtatcctatatgtattcctttctaaactgctactcatgaatgaggaaagtctgatgctaagatactgcctgcactggaatgttaaacactaaatatataacaagctgtgttttcctaa

SEQ ID NO: 162068 - DNA, 120 bp, Artificial Sequence
  ENSG00000107566_12 (sequence is synthesized)
gttggcggcggttggctcggcgcgggagtcggctgcacgtgcgggcgggggcgatgcgtcactgatcggtgaggcgcggccgaggggtcggctttcctcgcgagcctgcggctgggcttc

SEQ ID NO: 162069 - DNA, 120 bp, Artificial Sequence
  ENSG00000107566_13 (sequence is synthesized)
ttctcagttagtgccttccacccgggagcgacccttgggagagggagtttcaggaagctcaccgagcaggggcggcccactggcctccgggggcggaggagttggcaaggggtcagcggg

SEQ ID NO: 162070 - DNA, 120 bp, Artificial Sequence
  ENSG00000107566_14 (sequence is synthesized)
ctcagccagaagggaagaatgaggggacaggggtactggactccccggctcagcctgcgagagagcgccaagtttccggagggagagggtagaaactggagggggtggacctgtcactca

SEQ ID NO: 162071 - DNA, 120 bp, Artificial Sequence
  ENSG00000107566_15 (sequence is synthesized)
cccggggaaatgtatgctcagccaccattcaagagatgactgagaaggagatggtaagttcaagaagactgattgcacctgggacccaggccctttctttgggatccagtcccagccttc

SEQ ID NO: 162072 - DNA, 120 bp, Artificial Sequence
  ENSG00000107566_16 (sequence is synthesized)
atccatgtgattaagatccaggccgctgaagttccccaggaaatgatcttccacttgagcaaccttttacttgatacgatttgcacctttctgttttcctgcagtcagggtggtggcctg

SEQ ID NO: 162073 - DNA, 120 bp, Artificial Sequence
  ENSG00000107566_17 (sequence is synthesized)
cagggacctgagctttgctacccaaccagattcctcatagagattcctaatcactagtttcttgtattcataaactcagagatacagagggcttggtttgaagttggggtgagatgaaac

SEQ ID NO: 162074 - DNA, 120 bp, Artificial Sequence
  ENSG00000107566_18 (sequence is synthesized)
ctttgctctgagccaaagctctggggccttgcattccctgcattgggttgatgactgtcagcatcactgccgcaggccatgcttgactaaggtacctggttttagccacagccacctcct

SEQ ID NO: 162075 - DNA, 120 bp, Artificial Sequence
  ENSG00000107566_19 (sequence is synthesized)
tgtatgttacctttcagctctggccaagagtgggacagggttttaaccacaaataggagcagcatgcaattcctagtgacttgctgcacagtattgtatcataattacaggaagttttta

SEQ ID NO: 162076 - DNA, 120 bp, Artificial Sequence
  ENSG00000107566_20 (sequence is synthesized)
tttttaaaactggatctggggtatattcatttgccccatcacctctgtctaaaggcccaagtcctagggctgccatggtcacaagcacactgatgctccttaagattgtttatctggagc

SEQ ID NO: 162077 - DNA, 120 bp, Artificial Sequence
  ENSG00000107566_21 (sequence is synthesized)
ccacatagtgtggaacaaaaagtcacctagaaagcatccttggtcatcattgtctccttcccacctggcccagagatgcttaaatccaagttgtttctccagctgtcacctcccccagga

SEQ ID NO: 162078 - DNA, 120 bp, Artificial Sequence
  ENSG00000107566_22 (sequence is synthesized)
gatcaggattccactgacgtcctgggcagccagtgaatttaattttccatgagaaacaacagagttaacctgtggcattaggagacctacttcatgtggaccctttttttccttcagttt

SEQ ID NO: 162079 - DNA, 120 bp, Artificial Sequence
  ENSG00000107566_23 (sequence is synthesized)
aacttttctggagcagtgtgctgcgtagttcggcctgagtttgtgcagcttgttaagacaactcttgtgtacgctatgttgaagctcaacaaaaaagtcatgggaccacttctagaaatc

SEQ ID NO: 162080 - DNA, 120 bp, Artificial Sequence
  ENSG00000107566_24 (sequence is synthesized)
tttcagctgtcaggcctgtcagtctcatgacagtttgttggttgtgccaaacactttatttgggaaaggaaagcccagatttgaatgggtctttcccctgggccttatcctatagaggca

SEQ ID NO: 162081 - DNA, 120 bp, Artificial Sequence
  ENSG00000107566_25 (sequence is synthesized)
ggcatttgtaatatggagaaaataatttttcatttttgctcatttaattctataaattctctttataaatgaattttgtgttctttagttctccttaaaagaacttttgaattataaaaa

SEQ ID NO: 162082 - DNA, 120 bp, Artificial Sequence
  ENSG00000107566_26 (sequence is synthesized)
atctttacctgtcgaattgttgctgcagatgattgttgtggaaaatctggatcattgacctctgtgctttcattcctagagatgttttatagttacatgagcaaaagctgttgccccaaa

SEQ ID NO: 162083 - DNA, 120 bp, Artificial Sequence
  ENSG00000107566_27 (sequence is synthesized)
gtgatggccctggaggcggggctgaggaacagggaaatgccgctgtgaagtcttaaagcacttctgcttaaactcccatgtgtgaggagtgtgcctccctgtgccctctcagctctgagg

SEQ ID NO: 162084 - DNA, 120 bp, Artificial Sequence
  ENSG00000107566_28 (sequence is synthesized)
ctggccgtctttcggggtgttccttttggcaaatatacactgtaatcttgagtctaaatttatatgttgaaatgctaccttttttaaaataagaaactaaataaaattattttactatca

SEQ ID NO: 162085 - DNA, 120 bp, Artificial Sequence
  ENSG00000107581_0 (sequence is synthesized)
cctttccgtctctggccggctgggcgcgggcgactgctggcgaggcgcgtgggaccttacgctggttccccttcgtctcctctcccggcccgggccactagagagttcgctgacgccggg

SEQ ID NO: 162086 - DNA, 120 bp, Artificial Sequence
  ENSG00000107581_1 (sequence is synthesized)
tgagctgagcctgccgccaagatgccggcctattttcagaggccggaaaatgccctcaaacgcgccaacgaatttcttgaggttggcaaaaagcagcctgctctggatgttctttatgat

SEQ ID NO: 162087 - DNA, 120 bp, Artificial Sequence
  ENSG00000107581_2 (sequence is synthesized)
gttatgaaaagtaaaaaacatagaacatggcaaaagatacacgaaccaattatgttgaaatacttggaactttgcgtggatcttcgcaagagccacttggcaaaggaggggttataccag

SEQ ID NO: 162088 - DNA, 120 bp, Artificial Sequence
  ENSG00000107581_3 (sequence is synthesized)
tataagaacatttgtcaacaggtgaacataaaatctctggaggatgttgttagggcatatttgaaaatggcagaggaaaaaactgaagctgctaaagaagaatctcagcagatggtctta

SEQ ID NO: 162089 - DNA, 120 bp, Artificial Sequence
  ENSG00000107581_4 (sequence is synthesized)
gatatagaggatctagataatattcaaactcctgagagtgttctcctaagtgctgtaagtggtgaagacactcaggatcgtactgacagattacttttaactccatgggttaaattcctg

SEQ ID NO: 162090 - DNA, 120 bp, Artificial Sequence
  ENSG00000107581_5 (sequence is synthesized)
tgggagtcttacaggcagtgtttggaccttcttagaaacaattctagagtagagcgcctgtaccatgatattgcccagcaagctttcaaattctgcctccaatacacgcgtaaggctgaa

SEQ ID NO: 162091 - DNA, 120 bp, Artificial Sequence
  ENSG00000107581_6 (sequence is synthesized)
ttccgtaaactgtgtgacaatttgagaatgcacttatcgcagattcagcgccaccataaccaaagtacggcaatcaatcttaataatccagagagccagtccatgcatttggaaaccaga

SEQ ID NO: 162092 - DNA, 120 bp, Artificial Sequence
  ENSG00000107581_7 (sequence is synthesized)
cttgttcagctggacagtgctatcagcatggaattgtggcaggaagcattcaaagctgtggaagatattcacgggctattctccttgtctaaaaaaccacctaaacctcagttgatggca

SEQ ID NO: 162093 - DNA, 120 bp, Artificial Sequence
  ENSG00000107581_8 (sequence is synthesized)
aattactataacaaagtctcaactgtgttttggaaatctggaaatgctctttttcatgcatctacactccatcgtctttaccatctctctagagaaatgagaaagaatctcacacaagat

SEQ ID NO: 162094 - DNA, 120 bp, Artificial Sequence
  ENSG00000107581_9 (sequence is synthesized)
gagatgcaaagaatgtctactagagtccttttagccactctttccatccctattactcctgagcgtacggatattgctcgacttctggatatggatggcattatagttgaaaaacagcgt

SEQ ID NO: 162095 - DNA, 120 bp, Artificial Sequence
  ENSG00000107581_10 (sequence is synthesized)
cgccttgcaacactactaggtcttcaagccccaccgacacgaattggccttattaatgatatggtcagatttaatgtactacaatatgttgtcccagaagtgaaagacctttacaattgg

SEQ ID NO: 162096 - DNA, 120 bp, Artificial Sequence
  ENSG00000107581_11 (sequence is synthesized)
cttgaagtagaatttaacccattaaaactctgtgagcgagtcacaaaggttctaaattgggttagggaacaacctgaaaaggaaccggaattgcagcagtatgtgccacaactgcaaaac

SEQ ID NO: 162097 - DNA, 120 bp, Artificial Sequence
  ENSG00000107581_12 (sequence is synthesized)
aacaccatcctccgccttctgcagcaggtgtcacagatttatcagagcattgagttttctcgtttgacttctttggttccttttgttgatgctttccaactggaacgggccatagtagat

SEQ ID NO: 162098 - DNA, 120 bp, Artificial Sequence
  ENSG00000107581_13 (sequence is synthesized)
gcagccaggcattgcgacttgcaggttcgtattgatcacacttctcggaccctgagttttggatctgatttgaattatgctactcgagaagatgctccgattggtcctcatttgcaaagc

SEQ ID NO: 162099 - DNA, 120 bp, Artificial Sequence
  ENSG00000107581_14 (sequence is synthesized)
atgccttcagagcagataagaaaccagctgacagccatgtcctcagtacttgcaaaagcacttgaagtcattaaaccagctcatatactgcaagagaaagaagaacagcatcagttggct

SEQ ID NO: 162100 - DNA, 120 bp, Artificial Sequence
  ENSG00000107581_15 (sequence is synthesized)
gtcactgcataccttaaaaattcacgaaaagagcaccagcggatcctggctcgccgccagacaattgaggagagaaaagagcgccttgagagtctgaatattcagcgtgagaaagaagaa

SEQ ID NO: 162101 - DNA, 120 bp, Artificial Sequence
  ENSG00000107581_16 (sequence is synthesized)
ttggaacagagggaagctgaactccagaaagtgcggaaggctgaggaagagaggctgcgccaggaagcaaaggagagagagaaggagcgtatcttacaggaacatgaacaaatcaaaaag

SEQ ID NO: 162102 - DNA, 120 bp, Artificial Sequence
  ENSG00000107581_17 (sequence is synthesized)
aaaactgtccgagagcgtttggagcagatcaagaaaacagaactgggtgccaaagcattcaaagatattgatattgaagaccttgaggaattggatccagattttatcatggctaaacag

SEQ ID NO: 162103 - DNA, 120 bp, Artificial Sequence
  ENSG00000107581_18 (sequence is synthesized)
gttgaacaactggagaaagaaaagaaagaacttcaagaacgcctaaagaatcaagaaaagaagattgactattttgaaagagccaaacgtttggaagaaattcctttgataaagagcgct

SEQ ID NO: 162104 - DNA, 120 bp, Artificial Sequence
  ENSG00000107581_19 (sequence is synthesized)
tacgaggaacagagaattaaagacatggatctgtgggagcaacaagaggaagaaagaattactacaatgcagctagaacgtgaaaaggctcttgaacataagaatcgaatgtcacgaatg

SEQ ID NO: 162105 - DNA, 120 bp, Artificial Sequence
  ENSG00000107581_20 (sequence is synthesized)
cttgaagacagagatttattcgtaatgcgactcaaagctgcacggcagtctgtttatgaggaaaaacttaaacagtttgaagagcgattagcagaagaaaggcataatcgattggaagaa

SEQ ID NO: 162106 - DNA, 120 bp, Artificial Sequence
  ENSG00000107581_21 (sequence is synthesized)
cggaaaaggcagcgtaaagaagaacgcaggataacatactatagagaaaaagaagaggaggagcagagaagggcagaagaacaaatgctaaaagagcgggaagagagagagcgcgccgaa

SEQ ID NO: 162107 - DNA, 120 bp, Artificial Sequence
  ENSG00000107581_22 (sequence is synthesized)
cgagcaaaacgcgaggaagagctacgagagtatcaggagcgggtgaagaaattagaagaagtggaaaggaaaaaacgccaaagggagttggaaattgaagaacgagaacggcgtagagag

SEQ ID NO: 162108 - DNA, 120 bp, Artificial Sequence
  ENSG00000107581_23 (sequence is synthesized)
gaagagagaagacttggcgatagttccctttctagaaaggactctcgttggggagatagagattcagaaggcacctggagaaaaggacctgaagcagattctgagtggagaagaggcccg

SEQ ID NO: 162109 - DNA, 120 bp, Artificial Sequence
  ENSG00000107581_24 (sequence is synthesized)
ccagagaaggagtggagacgtggagaagggcgagatgaggacaggtctcatagaagagatgaagagcggccccggcgtctgggggatgatgaagatagagagccctctcttagaccagac

SEQ ID NO: 162110 - DNA, 120 bp, Artificial Sequence
  ENSG00000107581_25 (sequence is synthesized)
gatgatcgggttccccggcgtggcatggatgatgacagaggccctagacgtggtcctgaggaagataggttctctcgtcgtggggcagacgatgaccggccttcctggcgtaacacagat

SEQ ID NO: 162111 - DNA, 120 bp, Artificial Sequence
  ENSG00000107581_26 (sequence is synthesized)
gatgacaggcctcccagacgaattgccgatgaagacaggggaaactggcgtcatgcggatgatgacagaccacctagacgaggactggatgaggacagaggaagctggcgaacagctgat

SEQ ID NO: 162112 - DNA, 120 bp, Artificial Sequence
  ENSG00000107581_27 (sequence is synthesized)
tgatgatgagcgatcatcctggcgtaatgctgatgatgaccggggtcccaggcgagggttggatgatgatcggggtcccaggcgaggcatggatgatgaccggggtcccaggcgaggcat

SEQ ID NO: 162113 - DNA, 120 bp, Artificial Sequence
  ENSG00000107581_28 (sequence is synthesized)
ggatgatgaccggggtcccaggcgaggcatggatgatgaccggggtcccaggcgagggttggatgatgatcgaggaccttggaggaacgccgatgatgacagaattcccaggcgtggtgc

SEQ ID NO: 162114 - DNA, 120 bp, Artificial Sequence
  ENSG00000107581_29 (sequence is synthesized)
agaggatgacaggggcccttggagaaacatggatgatgatcgcctttcaagacgtgctgatgatgatcggtttcccagacggggtgatgactcaagacctggtccttggagaccattagt

SEQ ID NO: 162115 - DNA, 120 bp, Artificial Sequence
  ENSG00000107581_30 (sequence is synthesized)
caagccaggtggatggagagagaaagaaaaagccagagaggagagctggggtccacctcgagaatcaaggccatcagaagaacgtgaatgggacagagaaaaagaaagggacagagataa

SEQ ID NO: 162116 - DNA, 120 bp, Artificial Sequence
  ENSG00000107581_31 (sequence is synthesized)
tcaagatcgggaggagaatgacaaggaccctgagagagaaagggacagagagagagatgtggatcgagaggatcgcttcagaagacctagggatgaaggtggctggagaagaggaccagc

SEQ ID NO: 162117 - DNA, 120 bp, Artificial Sequence
  ENSG00000107581_32 (sequence is synthesized)
tgaggaatcttcaagctggagagactcaagtcgccgggacgatagggatagggatgaccgtcgccgtgagagggatgaccggcgtgatctaagagaaagacgagatctaagagacgacag

SEQ ID NO: 162118 - DNA, 120 bp, Artificial Sequence
  ENSG00000107581_33 (sequence is synthesized)
ggaccgaagaggacctccactcagatcagaacgtgaagaagtaagttcttggagacgtgctgatgacaggaaagatgaccgggtggaagagcgggaccctcctcgtcgagttcctccccc

SEQ ID NO: 162119 - DNA, 120 bp, Artificial Sequence
  ENSG00000107581_34 (sequence is synthesized)
agctctttcaagagaccgagaaagagaccgagaccgagaaagagaaggtgaaaaagagaaggcctcatggagagctgagaaagatagggaatctctccgtcgtactaaaaatgagactga

SEQ ID NO: 162120 - DNA, 120 bp, Artificial Sequence
  ENSG00000107581_35 (sequence is synthesized)
tgaagatggatggaccacagtacgacgttaagtctcaagataatggatttaaactggtgtcttaaataggtttgatcacattcaaggattattatacttgtgcttcaaccaatctaaatt

SEQ ID NO: 162121 - DNA, 120 bp, Artificial Sequence
  ENSG00000107581_36 (sequence is synthesized)
ggattctttaatgttgtttcaccataacacaaaaagcatgaacttgtattaatcctatataatagattgatcatgcaccatatccacaggaggttggaaaaaccatgccattttctggaa

SEQ ID NO: 162122 - DNA, 120 bp, Artificial Sequence
  ENSG00000107581_37 (sequence is synthesized)
tttaagggtgttgcattatttcatcaatcatttgttgacaaaaaagaaaaactaaaaaataaatttaaaatgtgacccttcaggtattgagtaacacctttatcttggtatagaactgat

SEQ ID NO: 162123 - DNA, 120 bp, Artificial Sequence
  ENSG00000107581_38 (sequence is synthesized)
actttttttttgattttgaaatatctgataataatttggaatgaagtaaggttctgttaaaatatatttgaagaccctttaaagcagtgaatctgaaacaattttcacacccttaagtgg

SEQ ID NO: 162124 - DNA, 120 bp, Artificial Sequence
  ENSG00000107581_39 (sequence is synthesized)
ttgatacgtacctattttaggtattttgaggtatttaccataaactaaatttagaaattttttagattcacttgaagtaaacattacaaacattggatacggtggggttttctttagatt

SEQ ID NO: 162125 - DNA, 120 bp, Artificial Sequence
  ENSG00000107581_40 (sequence is synthesized)
ttacttgagagaaggtgagtacaaagcaatttgcagttgttgtaatgacaagattactgcgcaagtgtgaatccaaacagtatagcttttaaattttaaagcatttggtaaattatcgct

SEQ ID NO: 162126 - DNA, 120 bp, Artificial Sequence
  ENSG00000107581_41 (sequence is synthesized)
gagtttttttctgttgccaatagcaaactgcttttccattaatggagaattcatgcctttcaagcattttaaatatgacaatatttataaatgtatggtttggaggaatcgtttaaattc

SEQ ID NO: 162127 - DNA, 120 bp, Artificial Sequence
  ENSG00000107581_42 (sequence is synthesized)
tctttcctaattttctttcttttgaagatagattctttcaacaagtaatttgtagtaatgactgtgttgacttcaattttggagcgcagtagctatgttaaagatgaactatttggtctc

SEQ ID NO: 162128 - DNA, 120 bp, Artificial Sequence
  ENSG00000107581_43 (sequence is synthesized)
attgaagccaacacagaacttgctgctgtgttttttcttcagtgataaataaaatacttacagaatttgttttagtgttgatttgtggttatagtattttgtttataatggtaagtttgc

SEQ ID NO: 162129 - DNA, 120 bp, Artificial Sequence
  ENSG00000107581_44 (sequence is synthesized)
atattcagttgagttttttttacttgaatttttatcagtgccattaaatgtctgtgtttagtatcaatgaaaatgaacctaaatataacaaagaaagcatatgtggctaggatgtccccc

SEQ ID NO: 162130 - DNA, 120 bp, Artificial Sequence
  ENSG00000107581_45 (sequence is synthesized)
taacatgtcttcctttgttaatgcaggaattccttagtttccttgtaacgctgtcctctgagtttgtgtgtgcatgtgcgtgtttgaagtaccaccttgggttttcacctgaaattagaa

SEQ ID NO: 162131 - DNA, 120 bp, Artificial Sequence
  ENSG00000107581_46 (sequence is synthesized)
aaatcgtagttaatttgagaaaatgttacaaattcatcatggctgtaggcacttatttctgttattgagtagtggtgagaattcctattggtacagctgtagggccagaagagggagtat

SEQ ID NO: 162132 - DNA, 120 bp, Artificial Sequence
  ENSG00000107581_47 (sequence is synthesized)
tgatgctttttaacttaaccagatgcagctatttttgtttgatgttaccaatgatagaaatcattttaaacaccttagtatctggtatttcaaatacgtagaagtctttaaaggtctttc

SEQ ID NO: 162133 - DNA, 120 bp, Artificial Sequence
  ENSG00000107581_48 (sequence is synthesized)
gtggggagaaggacttttctttcataacaagagaatttcagatcagtgattacaagtggggcagtaacttgctaagagtttgcttcctggagagtagatctgtatgtgtgacatcacagg

SEQ ID NO: 162134 - DNA, 120 bp, Artificial Sequence
  ENSG00000107581_49 (sequence is synthesized)
taagccccaagaatttatttaatcagatttgttcagacgagttactgctgcctacgttagagttagatttcaaggcgagtcagcaaacccatcctttctgctcagtctcccgtactgttc

SEQ ID NO: 162135 - DNA, 120 bp, Artificial Sequence
  ENSG00000107581_50 (sequence is synthesized)
tcccaagttctttgttctgggagtcagaacccaagtgcaagaggagggcagaagagtctgatgctgttactttgcgatcctgctcttggtttccactgtccaggccatacaactctgtct

SEQ ID NO: 162136 - DNA, 120 bp, Artificial Sequence
  ENSG00000107581_51 (sequence is synthesized)
actcccattagtatttaccaacaggtgttaaaggaaagctgaacaagcagcctactcaccgatctgctaggtggtcttccatgttcatggtggcttctgcagtttcattgagagtaacat

SEQ ID NO: 162137 - DNA, 120 bp, Artificial Sequence
  ENSG00000107581_52 (sequence is synthesized)
tgctgttaatacagatagatccagtagtagagacatcatcggtccaaaagactttgcatctcattagttgtccatagtgactaccaggaggtggctggcatctataacgtgtgggacgtt

SEQ ID NO: 162138 - DNA, 120 bp, Artificial Sequence
  ENSG00000107581_53 (sequence is synthesized)
tttatgtaaagaactgcctgtgtttttttttttttttaaccaaagacactgaccatagattgacttatacttttataagtctaattgaaatacttggggtactatgaaaggactgttcct

SEQ ID NO: 162139 - DNA, 120 bp, Artificial Sequence
  ENSG00000107581_54 (sequence is synthesized)
tgagtggctacgattagaaaatcaggactaacaaacttttctttgtctggaagcatatatatttgtgatataattttaatatgtataattttggtttaataaatcaaatctatgacaaaa

SEQ ID NO: 162140 - DNA, 120 bp, Artificial Sequence
  ENSG00000107581_55 (sequence is synthesized)
aagcatggagtttagagtcgatggtctgggattagcattctggctttaacaatgtactgctaacataaattctctggcataatttctacttcccatgactgtcatgagattgcacataaa

SEQ ID NO: 162141 - DNA, 120 bp, Artificial Sequence
  ENSG00000107581_56 (sequence is synthesized)
gcttttggtacagtgataccattttaaagtttactgagtgaacttttccagcttttgtatatgacattcttctgttactttttgacttcatgcttacttgtggatttaaccattgataat

SEQ ID NO: 162142 - DNA, 120 bp, Artificial Sequence
  ENSG00000107593_0 (sequence is synthesized)
aaacagctgctctcagacgcctttccatttgctctctgctggctaggctgggctgtgcctctgctccctcttcctctagctgagagtgggcacctggggtaccgggcccccccacctcat

SEQ ID NO: 162143 - DNA, 120 bp, Artificial Sequence
  ENSG00000107593_1 (sequence is synthesized)
tccccatgaatgctgtgggaagtcctgaggggcaggagctgcaaaagctggggagtggagcctgggacaaccccgcctacagtggtcccccttccccacacgggacgctgagagtctgca

SEQ ID NO: 162144 - DNA, 120 bp, Artificial Sequence
  ENSG00000107593_2 (sequence is synthesized)
ccatctccagcacggggcctctccagccccaacccaagaagcctgaagatgaaccccaggagacggcatacaggacccaggtgtccagctgctgcctccatatctgtcaaggcatcagag

SEQ ID NO: 162145 - DNA, 120 bp, Artificial Sequence
  ENSG00000107593_3 (sequence is synthesized)
gactttggggaacaaccctgactgagaacacagctgagaaccgggaactttatatcaagaccaccctgagggagctgttggtatatattgtgttcctggtggacatctgtctactgacct

SEQ ID NO: 162146 - DNA, 120 bp, Artificial Sequence
  ENSG00000107593_4 (sequence is synthesized)
atggaatgacaagctccagtgcttattactacaccaaagtgatgtctgagctcttcttacatactccatcagacactggagtctcctttcaggccatcagcagcatggcggacttctggg

SEQ ID NO: 162147 - DNA, 120 bp, Artificial Sequence
  ENSG00000107593_5 (sequence is synthesized)
attttgcccagggcccactactggacagtttgtattggaccaaatggtacaacaaccagagcctgggccatggctcccactccttcatctactatgagaacatgctgctgggggttccga

SEQ ID NO: 162148 - DNA, 120 bp, Artificial Sequence
  ENSG00000107593_6 (sequence is synthesized)
ggctgcggcagctaaaggtccgcaatgactcctgtgtggtgcatgaagacttccgggaggacattctgagctgctatgatgtctactctccagacaaagaagaacaactcccctttgggc

SEQ ID NO: 162149 - DNA, 120 bp, Artificial Sequence
  ENSG00000107593_7 (sequence is synthesized)
ccttcaatggcacagcgtggacataccactcgcaggatgagttggggggcttctcccactggggcaggctcacaagctacagcggaggtggctactacctggaccttccaggatcccgac

SEQ ID NO: 162150 - DNA, 120 bp, Artificial Sequence
  ENSG00000107593_8 (sequence is synthesized)
agggtagtgcagaggctctccgggcccttcaggaggggctgtggctggacaggggcactcgagtggtgttcatcgacttctcagtctacaatgccaatatcaatcttttctgtgtcctga

SEQ ID NO: 162151 - DNA, 120 bp, Artificial Sequence
  ENSG00000107593_9 (sequence is synthesized)
ggctggtggtggagtttccagctacaggaggtgccatcccatcctggcaaatccgcacagtcaagctgatccgctatgtcagcaactgggacttctttatcgttggctgtgaggtcatct

SEQ ID NO: 162152 - DNA, 120 bp, Artificial Sequence
  ENSG00000107593_10 (sequence is synthesized)
tctgcgtcttcatcttctactatgtggtggaagagatcctggagctccacattcaccggcttcgctacctcagcagcatctggaacatactggacctggtggtcatcttgctctccattg

SEQ ID NO: 162153 - DNA, 120 bp, Artificial Sequence
  ENSG00000107593_11 (sequence is synthesized)
tcgaggtgaatcggctcatggggaagctcctgcagcagccaaacacgtatgcagactttgagttcctcgccttctggcagacacagtacaacaacatgaatgctgtcaacctcttcttcg

SEQ ID NO: 162154 - DNA, 120 bp, Artificial Sequence
  ENSG00000107593_12 (sequence is synthesized)
cctggatcaagatattcaagtacatcagcttcaacaaaaccatgacccagctctcctccacgctggcccgctgtgccaaggacatcctgggcttcgccgtcatgttcttcattgttttct

SEQ ID NO: 162155 - DNA, 120 bp, Artificial Sequence
  ENSG00000107593_13 (sequence is synthesized)
tcgcctatgcccaactcggctacctgcttttcgggacccaagtggaaaactttagcactttcatcaagtgcattttcactcagttccggataatcctcggggactttgactacaatgcta

SEQ ID NO: 162156 - DNA, 120 bp, Artificial Sequence
  ENSG00000107593_14 (sequence is synthesized)
tcgacaatgccaaccgcatcctgggccctgcctactttgtcacctatgtcttcttcgtcttcttcgtgctcctgaacatgttcctggccatcatcaatgacacatattcagaggtcaagg

SEQ ID NO: 162157 - DNA, 120 bp, Artificial Sequence
  ENSG00000107593_15 (sequence is synthesized)
aggagctggctggacagaaggatgagctgcaactttctgacctcctgaaacagggctacaacaagaccctactaagactgcgtctgaggaaggagagggtttcggatgtgcagaaggtcc

SEQ ID NO: 162158 - DNA, 120 bp, Artificial Sequence
  ENSG00000107593_16 (sequence is synthesized)
tgcagggtggggagcaggagatccagtttgaggatttcaccaacaccttaagggaactgggacacgcagagcatgaaatcactgagctcacggccaccttcaccaagtttgacagagatg

SEQ ID NO: 162159 - DNA, 120 bp, Artificial Sequence
  ENSG00000107593_17 (sequence is synthesized)
ggaatcgtattctggatgagaaggaacaggaaaaaatgcgacaggacctggaggaagagagggtggccctcaacactgagattgagaaactaggccgatctattgtgagcagcccacaag

SEQ ID NO: 162160 - DNA, 120 bp, Artificial Sequence
  ENSG00000107593_18 (sequence is synthesized)
gcaaatcgggtccagaggctgccagagcaggaggctgggtttcaggagaagaattctacatgctcacaaggagagttctgcagctggagactgtcctggaaggagtagtgtcccagattg

SEQ ID NO: 162161 - DNA, 120 bp, Artificial Sequence
  ENSG00000107593_19 (sequence is synthesized)
atgctgtaggctcaaagctgaaaatgctggagaggaaggggtggctggctccctccccaggcgtgaaggaacaagctatttggaagcacccgcagccagccccagctgtgaccccagacc

SEQ ID NO: 162162 - DNA, 120 bp, Artificial Sequence
  ENSG00000107593_20 (sequence is synthesized)
cctggggagtccagggtgggcaggagagtgaggttccctataaaagagaagaggaagccttagaggagaggagactctcccgtggtgagattccaacgttgcagaggagttaagtgtgag

SEQ ID NO: 162163 - DNA, 120 bp, Artificial Sequence
  ENSG00000107593_21 (sequence is synthesized)
gcactcccggagcaaagtctatgaaggatcttctgcaagaggctgcctcctggtccactgaacctggaaactgagtgggctttaaccaggagataaaaatggagcctgaagggaatcagg

SEQ ID NO: 162164 - DNA, 120 bp, Artificial Sequence
  ENSG00000107593_22 (sequence is synthesized)
caaggaaatgaactcaggattcagagatctttgaattaatatgtggtgggttctgacattattcttccataagaccatgtgggtttccatggtggctatcaataaaactccttaggaaaa

SEQ ID NO: 162165 - DNA, 120 bp, Artificial Sequence
  ENSG00000107593_23 (sequence is synthesized)
gcctctccagccccaacccaagaagcctgaagatgaaccccaggagacggcatacaggacccaggtgtccagctgctgcctccatatctgtcaaggcatcagagaggttccctataaaag

SEQ ID NO: 162166 - DNA, 120 bp, Artificial Sequence
  ENSG00000107611_0 (sequence is synthesized)
atgctcagttggttggagtggcctcactcttacctgccaacctgggaggttgatgatgaacatgtctttaccttttctttggagtttgcttaccttattaatatttgctgaagtaaatgg

SEQ ID NO: 162167 - DNA, 120 bp, Artificial Sequence
  ENSG00000107611_1 (sequence is synthesized)
cgaagctggagaacttgagctgcagagacaaaaaagaagcatcaatctccaacagcctcgaatggctacagagagaggaaatttggtgtttcttacggggtctgctcaaaacattgagtt

SEQ ID NO: 162168 - DNA, 120 bp, Artificial Sequence
  ENSG00000107611_2 (sequence is synthesized)
tagaaccggatccctgggaaaaattaaattaaatgatgaagatctcagtgagtgtttacatcagatccagaaaaacaaagaagatattatagagttaaaagggagtgcaattggtctgcc

SEQ ID NO: 162169 - DNA, 120 bp, Artificial Sequence
  ENSG00000107611_3 (sequence is synthesized)
tcaaaatatatctagtcaaatctatcagcttaattccaagctggtggatcttgagagaaaattccaaggcttgcagcagactgttgacaaaaaggtttgcagcagcaatccttgccagaa

SEQ ID NO: 162170 - DNA, 120 bp, Artificial Sequence
  ENSG00000107611_4 (sequence is synthesized)
tggtggaacctgcctcaatctgcatgattcctttttttgtatctgtcccccacagtggaagggtcctctctgctcagctgatgttaacgaatgtgagatttactcaggaacacccttgag

SEQ ID NO: 162171 - DNA, 120 bp, Artificial Sequence
  ENSG00000107611_5 (sequence is synthesized)
ctgccagaatggaggcacatgtgttaatacaatgggaagttacagttgtcactgcccacctgagacgtacggaccccagtgtgcatccaaatatgacgactgtgaagggggttctgtggc

SEQ ID NO: 162172 - DNA, 120 bp, Artificial Sequence
  ENSG00000107611_6 (sequence is synthesized)
acgctgtgtccatggcatctgtgaggatttaatgcgagagcaagctggagagcccaagtacagctgcgtctgtgatgctgggtggatgttttcacccaacagccctgcctgcacgctgga

SEQ ID NO: 162173 - DNA, 120 bp, Artificial Sequence
  ENSG00000107611_7 (sequence is synthesized)
cagagacgagtgcagcttccagcccgggccttgctccacacttgtgcagtgtttcaacactcaaggctctttctactgtggggcctgtccaacaggctggcaaggcaatggatatatttg

SEQ ID NO: 162174 - DNA, 120 bp, Artificial Sequence
  ENSG00000107611_8 (sequence is synthesized)
cgaagatatcaatgaatgtgagataaataacggcggctgttctgtggctccacccgttgagtgtgtgaatacacctgggtcttcccactgccaggcctgtccaccagggtaccagggtga

SEQ ID NO: 162175 - DNA, 120 bp, Artificial Sequence
  ENSG00000107611_9 (sequence is synthesized)
cggaagagtgtgcacactcacagacatctgctcagtcagtaatggaggctgccacccagatgcctcatgctcctcaactctaggttccttacctctctgcacgtgtctcccgggttatac

SEQ ID NO: 162176 - DNA, 120 bp, Artificial Sequence
  ENSG00000107611_10 (sequence is synthesized)
tggaaatggttatgggccaaatggatgtgtgcagctcagtaatatttgcctaagtcacccctgtctaaatggacaatgcatcgacactgtctctggttatttttgtaagtgtgactcagg

SEQ ID NO: 162177 - DNA, 120 bp, Artificial Sequence
  ENSG00000107611_11 (sequence is synthesized)
ttggacaggtgtcaactgtacagaaaacatcaatgagtgtttgagcaacccctgtttgaatggaggaacttgtgttgatggcgttgattctttcagttgtgaatgcacacgtctctggac

SEQ ID NO: 162178 - DNA, 120 bp, Artificial Sequence
  ENSG00000107611_12 (sequence is synthesized)
tggagctctctgtcaggttcctcagcaagtttgtggagagtccctctcaggaataaatggaagcttcagctacaggagcccggatgttggttatgttcatgatgttaactgcttctgggt

SEQ ID NO: 162179 - DNA, 120 bp, Artificial Sequence
  ENSG00000107611_13 (sequence is synthesized)
tatcaaaactgaaatgggaaaggtcctgcgtatcactttcacttttttccggttagaatccatggacaactgtccacacgagtttcttcaggtttatgatggagattcctcttctgcttt

SEQ ID NO: 162180 - DNA, 120 bp, Artificial Sequence
  ENSG00000107611_14 (sequence is synthesized)
tcaacttggaagattttgtggctccagcctccctcatgaactcctcagcagtgacaatgctctctattttcatctctattctgaacatttaagaaatgggagaggctttacagtaagatg

SEQ ID NO: 162181 - DNA, 120 bp, Artificial Sequence
  ENSG00000107611_15 (sequence is synthesized)
ggaaacacagcaaccagagtgtggaggtatcctgactggtccttacggttctattaagtctccggggtatcctggaaactatcccccaggaagagattgtgtctggattgttgtaactag

SEQ ID NO: 162182 - DNA, 120 bp, Artificial Sequence
  ENSG00000107611_16 (sequence is synthesized)
tcctgacctcctggtaacatttacttttgggaccttgagcctcgagcaccatgatgactgcaacaaagattaccttgagattcgagatggtcctttgtatcaggacccccttcttgggaa

SEQ ID NO: 162183 - DNA, 120 bp, Artificial Sequence
  ENSG00000107611_17 (sequence is synthesized)
gttctgcaccactttctctgtcccaccgctccagactactggcccctttgccagaattcacttccattcagactcccagattagtgaccaaggcttccatatcacctacttaacatcacc

SEQ ID NO: 162184 - DNA, 120 bp, Artificial Sequence
  ENSG00000107611_18 (sequence is synthesized)
ttcggatctgcgttgtggtgggaactacacggacccagagggtgaactcttcttgcctgagttgtctgggcctttcactcacaccaggcaatgcgtctatatgatgaagcagccccaggg

SEQ ID NO: 162185 - DNA, 120 bp, Artificial Sequence
  ENSG00000107611_19 (sequence is synthesized)
agaacaaatacaaatcaacttcacccacgtggagctgcaatgccagagtgacagttctcagaattacattgaggttcgagatggtgaaaccttacttggaaaagtctgtggcaacggaac

SEQ ID NO: 162186 - DNA, 120 bp, Artificial Sequence
  ENSG00000107611_20 (sequence is synthesized)
catctctcacattaaatccattactaatagtgtctggatcaggtttaaaatagatgcttctgttgaaaaagctagtttcagagctgtttatcaagtcgcttgcggggatgaattaactgg

SEQ ID NO: 162187 - DNA, 120 bp, Artificial Sequence
  ENSG00000107611_21 (sequence is synthesized)
agaaggggtcattcgctcgcctttttttcctaacgtgtatcctggagaaagaacctgtaggtggaccatccaccagccccaaagccaagtcattctcctcaacttcactgtctttgaaat

SEQ ID NO: 162188 - DNA, 120 bp, Artificial Sequence
  ENSG00000107611_22 (sequence is synthesized)
tggaagttctgcccactgtgaaacagattatgttgagattggtagcagttccattttgggttctcctgaaaataaaaagtattgcggtacagacataccttcatttataacatctgtgta

SEQ ID NO: 162189 - DNA, 120 bp, Artificial Sequence
  ENSG00000107611_23 (sequence is synthesized)
caattttctttatgtcacattcgtgaaaagttcttctactgaaaaccatggtttcatggctaagttcagtgctgaggatttggcatgtggagaaattcttacagaatcaacagggaccat

SEQ ID NO: 162190 - DNA, 120 bp, Artificial Sequence
  ENSG00000107611_24 (sequence is synthesized)
tcaaagtcctggccatccaaatgtctacccccacggtatcaactgtacttggcatatattagtccaacctaatcacctgattcatttaatgttcgaaacatttcatctggagtttcatta

SEQ ID NO: 162191 - DNA, 120 bp, Artificial Sequence
  ENSG00000107611_25 (sequence is synthesized)
caattgcacaaacgactacttggaagtttatgacaccgactctgagacatcccttggaagatactgtggaaagtcgatcccgccatctctcacaagcagtggtaactcattgatgctggt

SEQ ID NO: 162192 - DNA, 120 bp, Artificial Sequence
  ENSG00000107611_26 (sequence is synthesized)
gtttgtgactgactccgacctcgcttatgaaggcttcttaataaactatgaagcaatcagtgcagcaacagcatgtttgcaagactacacagatgatttggggacattcacttctccaaa

SEQ ID NO: 162193 - DNA, 120 bp, Artificial Sequence
  ENSG00000107611_27 (sequence is synthesized)
cttccccaataattatcccaacaactgggaatgcatttatcggatcacagtgagaactggccaactgattgcagtgcacttcacaaacttctccttggaggaagccattggaaactatta

SEQ ID NO: 162194 - DNA, 120 bp, Artificial Sequence
  ENSG00000107611_28 (sequence is synthesized)
tacagattttctggaaatcagagatggaggctatgaaaaatcaccattgctgggaatattctatggctcaaatctacccccaacaatcatctctcatagtaacaaactatggttaaaatt

SEQ ID NO: 162195 - DNA, 120 bp, Artificial Sequence
  ENSG00000107611_29 (sequence is synthesized)
taagagtgaccaaatagacacaaggtctggattctcagcttactgggatgggtcatcaacaggttgcgggggtaatctcaccacttcaagcggcacgttcatatctcccaactacccgat

SEQ ID NO: 162196 - DNA, 120 bp, Artificial Sequence
  ENSG00000107611_30 (sequence is synthesized)
gccctattaccacagctctgaatgctactggtggttgaaatctagccacggcagcgcatttgaactggaattcaaagactttcacttggagcatcatccaaactgcactttagattacct

SEQ ID NO: 162197 - DNA, 120 bp, Artificial Sequence
  ENSG00000107611_31 (sequence is synthesized)
ggctgtatatgatggcccaagtagcaactctcatctgctaactcagctttgtggggatgagaaaccccctcttattcgttctagtggagacagcatgtttataaaactgaggacagatga

SEQ ID NO: 162198 - DNA, 120 bp, Artificial Sequence
  ENSG00000107611_32 (sequence is synthesized)
aggtcagcaaggacgtggcttcaaggctgaataccggcagacatgtgagaatgtggtaatagtcaatcaaacctatggcatcttagagagtatagggtatccgaatccttattctgaaaa

SEQ ID NO: 162199 - DNA, 120 bp, Artificial Sequence
  ENSG00000107611_33 (sequence is synthesized)
tcagcattgcaactggaccatccgggcaacaacaggcaacactgtgaactacacatttttagcatttgacttggaacatcacataaactgctccacagattatttagagctctatgatgg

SEQ ID NO: 162200 - DNA, 120 bp, Artificial Sequence
  ENSG00000107611_34 (sequence is synthesized)
accacggcagatgggacgctactgtggagtagacctgccccctccagggagtactacaagctccaagcttcaagtgctgctccttacagatggggttggccgccgtgagaaaggatttca

SEQ ID NO: 162201 - DNA, 120 bp, Artificial Sequence
  ENSG00000107611_35 (sequence is synthesized)
gatgcagtggtttgtttacggttgtggtggagagctgtctggggccacaggctccttcagcagccccgggttccccaacaggtatccaccaaacaaggagtgtatctggtacattaggac

SEQ ID NO: 162202 - DNA, 120 bp, Artificial Sequence
  ENSG00000107611_36 (sequence is synthesized)
ggaccccgggagtagcattcagctcaccatccatgacttcgatgtggagtatcattcaaggtgcaactttgatgtcttggagatctatggaggccccgatttccactctcccagaatagc

SEQ ID NO: 162203 - DNA, 120 bp, Artificial Sequence
  ENSG00000107611_37 (sequence is synthesized)
ccaactgtgtacccagagatcacctgagaaccccatgcaggtctccagcactggaaatgagctagcaattcgattcaagaccgacttgtccataaatgggagaggcttcaatgcgtcatg

SEQ ID NO: 162204 - DNA, 120 bp, Artificial Sequence
  ENSG00000107611_38 (sequence is synthesized)
gcaagcagtcactggaggttgtggtgggattttccaggctcccagtggagagattcattctccaaattaccccagtccttataggagcaacacagactgttcttgggtcattcgggttga

SEQ ID NO: 162205 - DNA, 120 bp, Artificial Sequence
  ENSG00000107611_39 (sequence is synthesized)
cagaaatcatcgtgttctcttgaacttcactgactttgatcttgaaccacaagactcttgtattatggcatacgatggcttaagctccacaatgtcccgccttgccaggacgtgtggaag

SEQ ID NO: 162206 - DNA, 120 bp, Artificial Sequence
  ENSG00000107611_40 (sequence is synthesized)
ggagcagctggctaaccccatcgtctcctcaggaaacagcctcttcttgagatttcagtctggcccttccagacagaacagaggcttccgagctcaattcaggcaagcctgcggaggcca

SEQ ID NO: 162207 - DNA, 120 bp, Artificial Sequence
  ENSG00000107611_41 (sequence is synthesized)
catcctcaccagctcatttgatactgtttcctctccacggttccctgccaattatccaaacaatcagaactgcagctggatcattcaagcgcaacctccattaaatcatatcaccctctc

SEQ ID NO: 162208 - DNA, 120 bp, Artificial Sequence
  ENSG00000107611_42 (sequence is synthesized)
ttttacccactttgaacttgaaagaagcacaacgtgtgcacgtgactttgtagaaattttggatggcggccacgaagacgcgcccctccgaggccgttactgtggcaccgacatgcccca

SEQ ID NO: 162209 - DNA, 120 bp, Artificial Sequence
  ENSG00000107611_43 (sequence is synthesized)
tcctatcacatccttcagcagcgccctgacgctgagattcgtctctgattctagcatcagtgctgggggtttccacaccacggtcaccgcatcagtgtcggcttgtggtggaacgttcta

SEQ ID NO: 162210 - DNA, 120 bp, Artificial Sequence
  ENSG00000107611_44 (sequence is synthesized)
catggctgaaggcatcttcaacagccctggctacccagacatttatccccctaatgtggaatgtgtctggaacatcgtcagttcccctggcaaccggctccagctgtcttttatatcttt

SEQ ID NO: 162211 - DNA, 120 bp, Artificial Sequence
  ENSG00000107611_45 (sequence is synthesized)
ccagttggaagactctcaggactgcagcagagattttgtggagatccgtgaaggaaatgccacgggtcacttggtgggacgatactgtggaaactccttccctctcaattattcttccat

SEQ ID NO: 162212 - DNA, 120 bp, Artificial Sequence
  ENSG00000107611_46 (sequence is synthesized)
cgttggacataccctgtgggtcagatttatctcagatggttctggcagcggcacgggcttccaggccacatttatgaagatatttggcaatgataatattgtgggaactcatgggaaagt

SEQ ID NO: 162213 - DNA, 120 bp, Artificial Sequence
  ENSG00000107611_47 (sequence is synthesized)
cgcctctcctttctggcctgaaaactacccacataactccaattaccaatggacagtaaatgtgaatgcatctcacgttgtccatggtagaatcttggagatggacatagaagaaataca

SEQ ID NO: 162214 - DNA, 120 bp, Artificial Sequence
  ENSG00000107611_48 (sequence is synthesized)
aaactgctattatgacaaattaaggatctatgatgggcctagcattcacgcccgcctaattggagcttactgtggtacccagactgaatctttcagctccactggaaattctttgacatt

SEQ ID NO: 162215 - DNA, 120 bp, Artificial Sequence
  ENSG00000107611_49 (sequence is synthesized)
ttgcagtggatgcacctgatggtgttttacctaccattgctccaggtgcttgtggtggcttcctgaggacgggagatgcacccgtgtttctcttctccccgggctggcctgacagttaca

SEQ ID NO: 162216 - DNA, 120 bp, Artificial Sequence
  ENSG00000107611_50 (sequence is synthesized)
gtaatagagtggactgtacgtggctcatccaggctcccgactctaccgtggaactcaacattctttccctggacattgaatctcaccgaacgtgtgcctatgatagccttgtgatacgag

SEQ ID NO: 162217 - DNA, 120 bp, Artificial Sequence
  ENSG00000107611_51 (sequence is synthesized)
atggagataataacttggcccagcagctagcagttctctgtggcagagagatccctgggcccatccggtctactggagagtacatgttcatccgcttcacctcggactccagtgtaacca

SEQ ID NO: 162218 - DNA, 120 bp, Artificial Sequence
  ENSG00000107611_52 (sequence is synthesized)
gggcaggcttcaatgcatcctttcacaagagctgcggtggatatttgcatgcagacagagggatcatcacgtcccccaagtatccagagacttacccatccaacctcaactgttcttggc

SEQ ID NO: 162219 - DNA, 120 bp, Artificial Sequence
  ENSG00000107611_53 (sequence is synthesized)
acgtcctggtccaaagtggcctgaccattgctgtccattttgaacagcctttccagattccaaatggagattcttcttgcaaccagggggattacttggtgctaagaaatggtcctgata

SEQ ID NO: 162220 - DNA, 120 bp, Artificial Sequence
  ENSG00000107611_54 (sequence is synthesized)
tctgttctccacccttgggaccccctggaggaaatggtcatttttgtggcagtcatgcttcatcaactctgttcacctcggataatcaaatgtttgttcagtttatttctgatcacagta

SEQ ID NO: 162221 - DNA, 120 bp, Artificial Sequence
  ENSG00000107611_55 (sequence is synthesized)
atgaagggcaaggatttaaaatcaaatatgaggcaaagagtttagcctgtgggggcaacgtctacatccatgatgctgattctgctgggtatgtgacctcccccaaccaccctcataatt

SEQ ID NO: 162222 - DNA, 120 bp, Artificial Sequence
  ENSG00000107611_56 (sequence is synthesized)
atcccccgcacgctgattgcatttggatcttagcggctccaccggaaacacgcatacagctgcaatttgaagatcgattcgatattgaagtaacacccaactgtacttccaactaccttg

SEQ ID NO: 162223 - DNA, 120 bp, Artificial Sequence
  ENSG00000107611_57 (sequence is synthesized)
agttgcgggatggagtggattcggatgcaccaatactttccaaattttgtgggacatctttgcccagcagtcagtggtcctcaggagaggttatgtatttgagatttcgatctgacaaca

SEQ ID NO: 162224 - DNA, 120 bp, Artificial Sequence
  ENSG00000107611_58 (sequence is synthesized)
gccccacacatgtgggattcaaggccaagtattctatagctcagtgtgggggaagagtaccagggcaaagtggtgttgttgaaagcattggacatccaacacttccatacagagacaact

SEQ ID NO: 162225 - DNA, 120 bp, Artificial Sequence
  ENSG00000107611_59 (sequence is synthesized)
tattctgtgagtggcatctccaggggctctctggacactatctcaccatctcttttgaagactttaaccttcagaattcttctggctgtgaaaaagacttcgtggagatctgggacaatc

SEQ ID NO: 162226 - DNA, 120 bp, Artificial Sequence
  ENSG00000107611_60 (sequence is synthesized)
atacctctggaaacatcttgggcagatactgtggaaacaccattcctgacagcatagacacttctagcaatactgctgtggtcaggtttgtcacagacggctctgtgactgcctcaggat

SEQ ID NO: 162227 - DNA, 120 bp, Artificial Sequence
  ENSG00000107611_61 (sequence is synthesized)
tcagactgcgatttgaatccagtatggaagagtgtggtggggatcttcagggctctattggaacatttacttctcccaactacccgaacccaaatcctcatggccggatctgcgagtgga

SEQ ID NO: 162228 - DNA, 120 bp, Artificial Sequence
  ENSG00000107611_62 (sequence is synthesized)
gaatcactgccccggagggaaggcggatcaccctaatgtttaacaacctgaggctggccacgcatccgtcctgcaacaatgagcatgtgatagtattcaatggcattagaagtaactcac

SEQ ID NO: 162229 - DNA, 120 bp, Artificial Sequence
  ENSG00000107611_63 (sequence is synthesized)
cccagctagagaaactgtgtagtagtgtgaatgtaagcaatgagattaaatcttcaggaaacacaatgaaagtcatttttttcacggatggatccaggccatatggcggcttcactgctt

SEQ ID NO: 162230 - DNA, 120 bp, Artificial Sequence
  ENSG00000107611_64 (sequence is synthesized)
cctatacctccagtgaagatgcagtgtgtggtgggtctcttccaaatactcctgaaggaaactttacttctcctggctatgacggagtcaggaattactcaagaaacctgaactgcgaat

SEQ ID NO: 162231 - DNA, 120 bp, Artificial Sequence
  ENSG00000107611_65 (sequence is synthesized)
ggactctcagcaatccaaatcagggaaattcatccatttccattcactttgaagatttttacctagaaagtcaccaagactgtcaatttgatgtcctcgagtttcgagtgggtgatgctg

SEQ ID NO: 162232 - DNA, 120 bp, Artificial Sequence
  ENSG00000107611_66 (sequence is synthesized)
atgggcccctgatgtggagactttgtggtccttcaaagcctacattgccattggttataccttattctcaggtatggattcactttgtcaccaacgaacgtgtagaacacattggattcc

SEQ ID NO: 162233 - DNA, 120 bp, Artificial Sequence
  ENSG00000107611_67 (sequence is synthesized)
atgcaaagtattcctttacagattgtggcggaatacagataggtgacagtggagtgatcacaagccccaactatccaaatgcttatgacagcctgacccactgctcttcgctgttggagg

SEQ ID NO: 162234 - DNA, 120 bp, Artificial Sequence
  ENSG00000107611_68 (sequence is synthesized)
ccccacaagggcacaccatcactctcacatttagtgactttgatattgaaccccatacaacttgtgcttgggactctgtcactgtcaggaatggtgggtcccctgaatcacccatcatag

SEQ ID NO: 162235 - DNA, 120 bp, Artificial Sequence
  ENSG00000107611_69 (sequence is synthesized)
gacaatactgtggaaattcaaaccccaggacaatacagtcaggttccaatcagctggtcgtgacttttaactcagaccattcattgcaaggtggtggattttatgctacgtggaacacac

SEQ ID NO: 162236 - DNA, 120 bp, Artificial Sequence
  ENSG00000107611_70 (sequence is synthesized)
aaactttaggttgtggtggaatatttcattctgataatggtacaatcagatcccctcactggcctcagaattttcccgaaaacagcagatgttcctggacggccattactcacaaaagta

SEQ ID NO: 162237 - DNA, 120 bp, Artificial Sequence
  ENSG00000107611_71 (sequence is synthesized)
aacacttggagatcagctttgacaacaacttcctaatccccagcggtgatggacaatgtcagaatagcttcgtgaaggtgtgggcaggaactgaggaggtggacaaagccctgctagcca

SEQ ID NO: 162238 - DNA, 120 bp, Artificial Sequence
  ENSG00000107611_72 (sequence is synthesized)
ctggctgtgggaacgtggctccgggtcccgttatcacaccaagtaacacattcactgccgtcttccagtctcaggaggcaccagctcagggcttctccgcgtcctttgttagccgatgtg

SEQ ID NO: 162239 - DNA, 120 bp, Artificial Sequence
  ENSG00000107611_73 (sequence is synthesized)
gaagtaatttcactggcccttcaggttacatcatttctccaaattacccaaaacaatatgacaacaacatgaattgcacctatgtcatagaggctaatcctctgtcagtggtcctcttga

SEQ ID NO: 162240 - DNA, 120 bp, Artificial Sequence
  ENSG00000107611_74 (sequence is synthesized)
cttttgtgtccttccacttagaagctcgttccgctgtgacgggaagctgtgtcaacgatggcgtgcacattatcagaggttacagcgtcatgtccaccccatttgctactgtgtgtgggg

SEQ ID NO: 162241 - DNA, 120 bp, Artificial Sequence
  ENSG00000107611_75 (sequence is synthesized)
atgagatgccagctcccctcaccatcgctgggccggttctgcttaacttctactccaacgagcaaatcacagacttcggattcaagttttcctataggataatctcctgtggtggtgtgt

SEQ ID NO: 162242 - DNA, 120 bp, Artificial Sequence
  ENSG00000107611_76 (sequence is synthesized)
tcaatttctcttctggaatcatcacaagtcctgcctattcatacgcagactacccaaatgatatgcactgtctgtataccatcaccgttagtgacgacaaggtgatcgagctcaagttca

SEQ ID NO: 162243 - DNA, 120 bp, Artificial Sequence
  ENSG00000107611_77 (sequence is synthesized)
gtgattttgatgtggttccctccacctcctgctcccatgactacctggcaatttacgatggtgccaataccagcgatccccttcttggcaaattctgcggttccaagcgcccaccaaatg

SEQ ID NO: 162244 - DNA, 120 bp, Artificial Sequence
  ENSG00000107611_78 (sequence is synthesized)
tgaagagcagcaataatagtatgctcctggtgttcaagacagattcatttcagacagcaaaaggctggaagatgtctttccggcagacattggggcctcagcaaggatgtggtggttatc

SEQ ID NO: 162245 - DNA, 120 bp, Artificial Sequence
  ENSG00000107611_79 (sequence is synthesized)
tgacaggctcgaataatacctttgcctctcctgattctgattcgaatggaatgtatgacaagaatttaaactgtgtatggatcataattgcacctgtaaacaaagtaattcacctcacct

SEQ ID NO: 162246 - DNA, 120 bp, Artificial Sequence
  ENSG00000107611_80 (sequence is synthesized)
tcaatacatttgctctggaggcagcaagtactaggcaaagatgcctttatgattatgtaaagttatatgatggggatagtgaaaatgcgaacttggctggaacgttttgtggttccacag

SEQ ID NO: 162247 - DNA, 120 bp, Artificial Sequence
  ENSG00000107611_81 (sequence is synthesized)
tacctgctccttttatctcttctggtaacttccttacggttcaattcatcagtgacttaacattagagagggaaggatttaatgctacatacaccatcatggacatgccttgtggtggaa

SEQ ID NO: 162248 - DNA, 120 bp, Artificial Sequence
  ENSG00000107611_82 (sequence is synthesized)
catacaatgcaacttggaccccacaaaatatttcatcacccaattcatcagacccagatgtcccattttccatctgtacttgggtcattgattcccctccgcatcagcaggtcaagataa

SEQ ID NO: 162249 - DNA, 120 bp, Artificial Sequence
  ENSG00000107611_83 (sequence is synthesized)
ctgtgtgggcattacagctgacctcgcaagactgcacgcagaattacttacagcttcaggactcaccgcagggtcacggaaattcaagatttcagttctgtggcagaaatgcttcggctg

SEQ ID NO: 162250 - DNA, 120 bp, Artificial Sequence
  ENSG00000107611_84 (sequence is synthesized)
tgccagtgttttattcttctatgagtactgcaatggtcattttcaaatctggagttgtaaacagaaactctagaatgagtttcacctatcagattgcagattgcaacagagactatcaca

SEQ ID NO: 162251 - DNA, 120 bp, Artificial Sequence
  ENSG00000107611_85 (sequence is synthesized)
aggcatttggcaacctgagaagccctggatggccagataactacgacaatgacaaggattgcaccgttactctcacagccccccagaaccacaccatttccctcttttttcattcacttg

SEQ ID NO: 162252 - DNA, 120 bp, Artificial Sequence
  ENSG00000107611_86 (sequence is synthesized)
gcatcgagaactcagttgaatgcagaaacgatttcttggaggtgagaaatggaagtaacagcaattcaccattactgggcaagtactgtggaactctgctgccaaaccctgtcttctctc

SEQ ID NO: 162253 - DNA, 120 bp, Artificial Sequence
  ENSG00000107611_87 (sequence is synthesized)
aaaataatgaactatacctacgatttaagagtgatagtgtaacttctgatcgtggatatgaaatcatctggacttcatcaccctctggatgtggtggaactctttatggagacagaggct

SEQ ID NO: 162254 - DNA, 120 bp, Artificial Sequence
  ENSG00000107611_88 (sequence is synthesized)
cattcaccagccccggctatccaggcacatacccaaacaacacgtactgcgagtgggtccttgttgctcctgctggaaggcttgtcaccatcaacttctacttcatcagcattgacgatc

SEQ ID NO: 162255 - DNA, 120 bp, Artificial Sequence
  ENSG00000107611_89 (sequence is synthesized)
caggagactgtgtccagaactatctcacactctatgatgggcccaacgccagctctccatcctctggaccatactgcggaggcgacaccagcatagctcccttcgtggcttcctcaaatc

SEQ ID NO: 162256 - DNA, 120 bp, Artificial Sequence
  ENSG00000107611_90 (sequence is synthesized)
aggtcttcataaaatttcatgctgattatgcacggcgtccatccgcattccgattaacttgggacagctaagtgggtaacaactcgtgttcactcagcactttccctctgcagcacgctg

SEQ ID NO: 162257 - DNA, 120 bp, Artificial Sequence
  ENSG00000107611_91 (sequence is synthesized)
gacagcactctgccatcctgatacatgacccctgctgatgccacagagaataagctgaacttgtatggtttttcaccaaaccatggatagaatcaatatttgtaggccaggcgtggtggc

SEQ ID NO: 162258 - DNA, 120 bp, Artificial Sequence
  ENSG00000107611_92 (sequence is synthesized)
ctgggcgagacggcaagactccatctcaaaaaaaaaagaaacaaaaaaaaccagaatcaatatttgtacattttctcgaacatagaatatagcttctttagtcttgagtgtgcatttcat

SEQ ID NO: 162259 - DNA, 120 bp, Artificial Sequence
  ENSG00000107611_93 (sequence is synthesized)
tctaatattttgagctgaaatttaaaaaaactttgaaagagttggaaatgattatggcatatgtgacatacatttttaaaagttaataataatagccaggggcagtggctcatacccata

SEQ ID NO: 162260 - DNA, 81 bp, Artificial Sequence
  ENSG00000107611_94 (sequence is synthesized)
agttaataataatagccaggggcagtggctcatacccataatcccagcacgctgggaggccatgatgggaggattgcttga

SEQ ID NO: 162261 - DNA, 120 bp, Artificial Sequence
  ENSG00000107611_95 (sequence is synthesized)
tggcatgcacccgtggttccagctacacaggaggttgaagcaggaggatcacttgagcccagtaggttaaggctgcagtgaaaccctgtgaattaaccactgtactccagcctgggtgac

SEQ ID NO: 162262 - DNA, 120 bp, Artificial Sequence
  ENSG00000107611_96 (sequence is synthesized)
agactgagaccctatctcaaaaatgacaacaagaacaacaaaagttaatgataatatagaagcataaatttcctgtgaatgttcaattacacataataaacattattgaattgtacacaa

SEQ ID NO: 162263 - DNA, 120 bp, Artificial Sequence
  ENSG00000107611_97 (sequence is synthesized)
ggaatcatcaggcatatttaattctccatctaaagtttctaggattctgtggcctcccaaatcaaattgaaatataccaggtatgctaaaacccaaacagtggtgagtatgattgtataa

SEQ ID NO: 162264 - DNA, 120 bp, Artificial Sequence
  ENSG00000107611_98 (sequence is synthesized)
ctcagttttccctgctgcaaagtggaactgtaagaatcaaatgtaaacaaatgtatttaagtacctatcagtgtctggttcagataagtatttgctgctattcctaatttttctattaca

SEQ ID NO: 162265 - DNA, 120 bp, Artificial Sequence
  ENSG00000107611_99 (sequence is synthesized)
atgactcctgcttctattactattaacgctatgttaaagatcttaaggaatcttttaaaaaaattttctccctgagcaagatgaaacttagtaaacaagataaaaaatccagtagaaaaa

SEQ ID NO: 162266 - DNA, 120 bp, Artificial Sequence
  ENSG00000107611_100 (sequence is synthesized)
atgggaagttacagaaatccttgctctaacatccccaaggaaccggaagaaggctcccgtgattggcacagagagtaagcatggcctggtgcaaaaggagctgaagacttaggaagagcc

SEQ ID NO: 162267 - DNA, 120 bp, Artificial Sequence
  ENSG00000107611_101 (sequence is synthesized)
gagctttattcaatgctatgtcaaaatgtgaccataacgaggtcaaagattaaactgaggttcaatgaatgaagtaactctctctgaccacagtcatcattatcagtacagctctatctt

SEQ ID NO: 162268 - DNA, 120 bp, Artificial Sequence
  ENSG00000107611_102 (sequence is synthesized)
ctcttctgacttattctgtcaagtgacttgtccacagaattctcctgctcagctcaggcatcactttctgcaggaaactttcccttccctttttaagcagagtgaggcatctcagggcct

SEQ ID NO: 162269 - DNA, 120 bp, Artificial Sequence
  ENSG00000107611_103 (sequence is synthesized)
ctatgttcccatcatgctctagggatatccatcgtcaaagctttgctgatgccacacacattgtctttctaaaaacgaagtccaaaaaattaaggcagatcaatgccaaacttacttttg

SEQ ID NO: 162270 - DNA, 120 bp, Artificial Sequence
  ENSG00000107611_104 (sequence is synthesized)
tacagttctttgaagtcaccttttaaactagacagtgtctttccttatagtttggctggtctcttttattttgtgatttttaaaagattaataaataaattctgctatagaatgaacaaa

SEQ ID NO: 162271 - DNA, 120 bp, Artificial Sequence
  ENSG00000107614_0 (sequence is synthesized)
aggcctagctccggggctgcggcggctgaggcgcggggatggagcccctgcgggtgctggagctatacagcggcgtgggcggcatgcaccacgcgctgagagaaagctgtatacctgcac

SEQ ID NO: 162272 - DNA, 120 bp, Artificial Sequence
  ENSG00000107614_1 (sequence is synthesized)
aagtggtggctgccattgatgtcaacactgtcgctaatgaagtatacaagtataattttcctcacacacagttacttgccaagacgattgaaggcattacactcgaagagtttgacagat

SEQ ID NO: 162273 - DNA, 120 bp, Artificial Sequence
  ENSG00000107614_2 (sequence is synthesized)
tatcttttgatatgattttaatgagccctccctgccagccattcacaaggattggccggcagggtgatatgactgattcaaggacgaatagcttcttacatattctagatattctcccaa

SEQ ID NO: 162274 - DNA, 120 bp, Artificial Sequence
  ENSG00000107614_3 (sequence is synthesized)
gattacaaaaattaccaaagtatattcttttggaaaatgttaaaggttttgaagtatcttctacaagagacctcttgatacaaacaatagaaaattgtggctttcagtaccaagagtttc

SEQ ID NO: 162275 - DNA, 120 bp, Artificial Sequence
  ENSG00000107614_4 (sequence is synthesized)
tattatctccaacctctcttggcattccaaattcaaggctacgatattttcttattgcaaagcttcagtcagagccattaccctttcaagcccctggtcaggtactgatggagttcccca

SEQ ID NO: 162276 - DNA, 120 bp, Artificial Sequence
  ENSG00000107614_5 (sequence is synthesized)
aaattgaatctgtacatccacaaaaatatgcaatggatgtagaaaataaaattcaagaaaagaacgttgaaccaaatattagctttgatggcagcatacagtgttctggaaaagatgcca

SEQ ID NO: 162277 - DNA, 120 bp, Artificial Sequence
  ENSG00000107614_6 (sequence is synthesized)
ttctttttaagcttgaaactgcagaagaaattcacaggaaaaatcaacaagatagtgatctctctgtgaaaatgctaaaagattttcttgaagatgacactgacgtgaaccagtatcttt

SEQ ID NO: 162278 - DNA, 120 bp, Artificial Sequence
  ENSG00000107614_7 (sequence is synthesized)
taccaccaaagtcattgctgcgatatgctcttctgttagacattgttcagcccacttgtagaaggtccgtgtgctttaccaaaggatatggaagctacatagaagggacagggtctgtgt

SEQ ID NO: 162279 - DNA, 120 bp, Artificial Sequence
  ENSG00000107614_8 (sequence is synthesized)
tacagactgcagaggatgtgcaggttgagaatatctacaaatcccttaccaatttgtcacaagaagaacagataacaaagctgttaatacttaaactgcgatatttcactcctaaagaaa

SEQ ID NO: 162280 - DNA, 120 bp, Artificial Sequence
  ENSG00000107614_9 (sequence is synthesized)
tagcaaatctccttggatttcctccagagttcggatttcctgagaagataacagtgaaacagcgttatcgcctacttggaaatagtctcaacgtgcatgtagtagctaaactaatcaaaa

SEQ ID NO: 162281 - DNA, 120 bp, Artificial Sequence
  ENSG00000107614_10 (sequence is synthesized)
tcttatatgaataattttgaaataactctgaaagatggtcatatgatattccttcattttcagagagtaattctgaaattctgttttgaactaattctggtgaaatttaactaaattatt

SEQ ID NO: 162282 - DNA, 120 bp, Artificial Sequence
  ENSG00000107614_11 (sequence is synthesized)
tctgtccttattaagaaatttggattttattaaaaaaatccatgtgtttcatcaaatttatattactgtattttataaaatacgaactattgttatgctttatggagagtatattttcat

SEQ ID NO: 162283 - DNA, 120 bp, Artificial Sequence
  ENSG00000107614_12 (sequence is synthesized)
tcatatgaaactgataaatatatatgtggaatattctttttaaaaacaattttataaacaaatcaaggagcactagagctttagtgtctacatgagtatcttgtgaagtgtcataacagg

SEQ ID NO: 162284 - DNA, 120 bp, Artificial Sequence
  ENSG00000107614_13 (sequence is synthesized)
tgtcataacaggcataacatatttttatgttaattaaagaagttttttatttctaattttaaaataatgattctaattctagcccattgaatgttttacttaatttccaatcctgtaaat

SEQ ID NO: 162285 - DNA, 120 bp, Artificial Sequence
  ENSG00000107614_14 (sequence is synthesized)
catctaaacaaatgcatatgatatgtaaaccaaattatcatcattcagtttatacagcagactgaagaatatgtcaggaaaaataatcctaaatgtttgattacctctccatgaagcggc

SEQ ID NO: 162286 - DNA, 120 bp, Artificial Sequence
  ENSG00000107614_15 (sequence is synthesized)
cacagaaactgttggtgcacattatctacattttcctcagcctctatctgaaggacaaaactcatttttccttcttcattttgtatgtactttcctttagttgactattatcaaagcttg

SEQ ID NO: 162287 - DNA, 120 bp, Artificial Sequence
  ENSG00000107614_16 (sequence is synthesized)
tttttgtcttctcagcttctgagttgaatttgcctttgcacgctgaggaatgtagcatgacgttaagatttcagggaggaagctgccctctgatcccatgtcatatgacagtactcccct

SEQ ID NO: 162288 - DNA, 120 bp, Artificial Sequence
  ENSG00000107614_17 (sequence is synthesized)
ccccccagttgttctttattgtagcaacatacactctcaatgaacttttatgacttttaactttctctgtctctcttcctcagcagacctcttggaattagggtttctaatcaaactaag

SEQ ID NO: 162289 - DNA, 120 bp, Artificial Sequence
  ENSG00000107614_18 (sequence is synthesized)
tcttgcatcataaattctatggtttgtgataaaagcaagtgacaaagagaagagagatgaaaagaaacaagtccagaaatcatattacaagattttaattcaaatttttcttcttaaaaa

SEQ ID NO: 162290 - DNA, 120 bp, Artificial Sequence
  ENSG00000107614_19 (sequence is synthesized)
tcagctatttagaggtggataaattggaagtttgtgcattgcttgtgggaacgtaaaatggttcagctgctgttggaaaacgctatggaggttcgtcacaaaattcaacatagaattacc

SEQ ID NO: 162291 - DNA, 120 bp, Artificial Sequence
  ENSG00000107614_20 (sequence is synthesized)
ctatgattcagcgattccacctctggctatagatccaaaagaattgaaagcagggacttgaacagatatttgtacaccagcgtttataacaccattatttacagtagccaaaaggtagaa

SEQ ID NO: 162292 - DNA, 120 bp, Artificial Sequence
  ENSG00000107614_21 (sequence is synthesized)
gcagcccaagtgtcatcccattcacccatgaatggatgcaggaattgtgttccgtgcatgcagtggaatagtaccagccttccgcaggaaggaaattctgacatatgcggtgacatggat

SEQ ID NO: 162293 - DNA, 120 bp, Artificial Sequence
  ENSG00000107614_22 (sequence is synthesized)
gaaccttgagtacattatgcgaagtgaaataagccaccctgtggggatggagaatgggtagttagtgcataatggatacaaagtttctgattggggtgatgagaaagttctggaggtgga

SEQ ID NO: 162294 - DNA, 120 bp, Artificial Sequence
  ENSG00000107614_23 (sequence is synthesized)
tggggaggatggttgcacaacagtgtgagtgtacttaatgccactgcaactgtatatttaaaaatagttaaaatgataaattttacattatgtatattttactgcaattgaaaaaatcat

SEQ ID NO: 162295 - DNA, 120 bp, Artificial Sequence
  ENSG00000107614_24 (sequence is synthesized)
actctattaccaatttttcagaactcatagataaatatgaatgtagggaagctgtaagccagcccatatacagaaactatcactatctacatttttcatatgtgttcagacagagcctat

SEQ ID NO: 162296 - DNA, 120 bp, Artificial Sequence
  ENSG00000107614_25 (sequence is synthesized)
tacaagtctcataaatttcagtaaacaatcacaaattattttggcacactttcatgtaggttctgttcactgctgaaatattctaaataaaatggtttagagttttactgtaactatgaa

SEQ ID NO: 162297 - DNA, 120 bp, Artificial Sequence
  ENSG00000107614_26 (sequence is synthesized)
taattatgctataattatagtatcccacattcggttgagcaacattatacaaaataagtgtcgagttactgtgcaccaactataaatacttgaaaggtctgtagagacatttgcttacaa

SEQ ID NO: 162298 - DNA, 120 bp, Artificial Sequence
  ENSG00000107614_27 (sequence is synthesized)
actggtagacagaatgtagcttagtggaattcttaaattatgggaatgtattcacaggaagacggtgattcttgcccttaattcataattgaaaatatgcagtaacaagcataaaactca

SEQ ID NO: 162299 - DNA, 120 bp, Artificial Sequence
  ENSG00000107614_28 (sequence is synthesized)
catcttaatgaagatgtatctaccagtgtcattcaattagcagatgtatatgtatgcataattaatttggaaaatgttattttatggaatgtctgctatatgcttttggtaataatgctg

SEQ ID NO: 162300 - DNA, 120 bp, Artificial Sequence
  ENSG00000107614_29 (sequence is synthesized)
tatataaaatttgcactggaaattctgtttcctgatatttggacttgtacatttattcagatgttggaaaacatagcttctcattttcaggagaactatgtgtaattcagtcttcaccat

SEQ ID NO: 162301 - DNA, 120 bp, Artificial Sequence
  ENSG00000107614_30 (sequence is synthesized)
accttacagtaaaccgatttttcgttctccttttcccatcatccctgctcttttaaacggcttgccagataattgtaaggtatttattaccctgcttcatatttttagtatgtcttcagg

SEQ ID NO: 162302 - DNA, 120 bp, Artificial Sequence
  ENSG00000107614_31 (sequence is synthesized)
atccaaaactaattctaagagatgaccaaatcaattaatgtaaacaaaatgagtcatagttggaaaatgatttcgaagaggtgggtagtcattgtaggaggggtcagagcctgacaatcc

SEQ ID NO: 162303 - DNA, 120 bp, Artificial Sequence
  ENSG00000107614_32 (sequence is synthesized)
tcagtggcaggcaagaaagaggaatgatggcatcaccttcacagaggaccctggccatggtgttctgtctgtgaaatcagaccttcaccatgggcactgccctatgtctggaaagatgag

SEQ ID NO: 162304 - DNA, 120 bp, Artificial Sequence
  ENSG00000107614_33 (sequence is synthesized)
aaaatacctccaaccttcagccaacttattcttcctcaaaaaggagagccttctaaagaggcaaaaacagtagttgaaattgtgaacagtgagggtccacccagcacttttttagaaatt

SEQ ID NO: 162305 - DNA, 120 bp, Artificial Sequence
  ENSG00000107614_34 (sequence is synthesized)
tgagggtaaactgttgcttgaaattatccaacttttcaaagaggtaaagttatttagtagagaggcttttaagttgccctgaaaggctgtattgctaccatgtgggatgtaaaattggat

SEQ ID NO: 162306 - DNA, 120 bp, Artificial Sequence
  ENSG00000107614_35 (sequence is synthesized)
ggggttagagatgagtgcaggcaattcaacgcattggtaggggtggaagttctcagcagaaatcaccatctgggtttttgctcccatctcaacctagttgaggtctagagtgattaagct

SEQ ID NO: 162307 - DNA, 120 bp, Artificial Sequence
  ENSG00000107614_36 (sequence is synthesized)
ggagacttctgaggagagagaaatgaactaaagataaatacaactgatttaattttagccatagcagaacagaacaaagaagcaaccacatttcatctaatatcaagcacctactaaagg

SEQ ID NO: 162308 - DNA, 120 bp, Artificial Sequence
  ENSG00000107614_37 (sequence is synthesized)
atgcattctgcaggccagctgcatctgcatccaaaccaaagtcactctggttgctcttttgctttgataacttaagagtttagaaacaagcggtttctaaaaaagccaagataacacaat

SEQ ID NO: 162309 - DNA, 120 bp, Artificial Sequence
  ENSG00000107614_38 (sequence is synthesized)
aaggaccaaattttaatcccacatagacaaagagattaaagtgggttttcctgaattgcttatgttatgaacaggttaccttgtcataatttggccttcggcttgggattctaactgttt

SEQ ID NO: 162310 - DNA, 120 bp, Artificial Sequence
  ENSG00000107614_39 (sequence is synthesized)
taggccaccagttatgacactgacttactaatagctttggactttgaaactgtgtgagggtcatatagcctcagcagttttcttgtagcctgtgattgcattgagattatataattttta

SEQ ID NO: 162311 - DNA, 120 bp, Artificial Sequence
  ENSG00000107614_40 (sequence is synthesized)
aagacatggcctttggacctctgtctactagttaatctcttccatctaccattcaaatgtgctatatacaactatcatatcagcttcttagcaagcacttttctggacctctgtcacacc

SEQ ID NO: 162312 - DNA, 85 bp, Artificial Sequence
  ENSG00000107614_41 (sequence is synthesized)
cagcttcttagcaagcacttttctggacctctgtcacacccaccaagatgtctagttatgcctttcatttgagagtttccctttg

SEQ ID NO: 162313 - DNA, 90 bp, Artificial Sequence
  ENSG00000107614_42 (sequence is synthesized)
ggctggtctcgaacacctgacctcaagttaatccacccaccttggcttccctaagtgctgggttcctttgcatgttttttaaaaaggcat

SEQ ID NO: 162314 - DNA, 120 bp, Artificial Sequence
  ENSG00000107614_43 (sequence is synthesized)
gcccagcctccctttgcatgttttttaaaaaggcattaagcatcttgcacatgttctttagtttcagtttgcatgagtcaacctgtgtgcatcattttccctttcactatttcttgtctt

SEQ ID NO: 162315 - DNA, 120 bp, Artificial Sequence
  ENSG00000107614_44 (sequence is synthesized)
tgctggtgaaattttaaagcttcagtttaaaaaaaaaaagaaaaagtattttttgttgttgttgtttctagcttccgtttctctctttaggctgtctaggaacattttaaggtactcatg

SEQ ID NO: 162316 - DNA, 120 bp, Artificial Sequence
  ENSG00000107614_45 (sequence is synthesized)
ctcttcaaaatcttacacaatcaagatccaaactccatcaccattcatgtcttagcttgtgaatttatttctttttaaatatatttgttcaagaaatatgagcatgtacaatgagctgtt

SEQ ID NO: 162317 - DNA, 120 bp, Artificial Sequence
  ENSG00000107614_46 (sequence is synthesized)
ttggctttgtattccccaagttctcatatacattggctttatatttaccatagattctgagtcttactttcagccacatccagcacttactgaagtctccctcaagtacaccacacttga

SEQ ID NO: 162318 - DNA, 120 bp, Artificial Sequence
  ENSG00000107614_47 (sequence is synthesized)
ctcctaaagcttccaaaatctcatttttcctataaatatgagaccggaaattttcacaaaaattacaagataggaactgagttctcccatagaactcttttctgaataagcctagggttt

SEQ ID NO: 162319 - DNA, 120 bp, Artificial Sequence
  ENSG00000107614_48 (sequence is synthesized)
tttcatttctttgcttgtacctagcatggcttcagtgtttacttcaaatatttgctctgtattttgtttgcattttgatttctatttttatcaggacagattgaaattataagagtgtac

SEQ ID NO: 162320 - DNA, 120 bp, Artificial Sequence
  ENSG00000107614_49 (sequence is synthesized)
atagagaacatgtttgtttagctaaattagctctataatcagatgagatcacctagagggtcagaggatgagagtgaaagagagaaagagaaaaagaagagcagaggcttggagctgact

SEQ ID NO: 162321 - DNA, 120 bp, Artificial Sequence
  ENSG00000107614_50 (sequence is synthesized)
tatctgaaggttccgtcctcaggtctctttctacccttcacttttcatgccatttttcttagagattctcaccctttcctacaacttcagccattttgccgatgacacccagatgactct

SEQ ID NO: 162322 - DNA, 120 bp, Artificial Sequence
  ENSG00000107614_51 (sequence is synthesized)
aaatctgctgttttcctaagtcctattctagaatcttcatgctgggacatttttaacttggatatcttgctattcaagttgtatcggatttgcatcaaatttagcatgcttgcaacctaa

SEQ ID NO: 162323 - DNA, 120 bp, Artificial Sequence
  ENSG00000107614_52 (sequence is synthesized)
aagcttcataaccaaagatcatcttcaccttccttctcactctgcattccattggtcagcttctgttaaaatggccttcctaaggcaggcctctgaacgatcatttatttttaggaaaac

SEQ ID NO: 162324 - DNA, 120 bp, Artificial Sequence
  ENSG00000107614_53 (sequence is synthesized)
ttataaaaagtcactgagatttaaaaacacccacacatatatttgcaatcatatttgtgtgcttggttaaacatgtcaacatttaacagatttgagccttctaaatttaatccagcatga

SEQ ID NO: 162325 - DNA, 120 bp, Artificial Sequence
  ENSG00000107614_54 (sequence is synthesized)
atgtcgtttttactaaaatatttgctattttactcacttagctggttccttacacaagtccagttaaatttcacatgtgaaaaaaatgactgaaaacactgaatggaatgtgatactcct

SEQ ID NO: 162326 - DNA, 120 bp, Artificial Sequence
  ENSG00000107614_55 (sequence is synthesized)
tgtgtagtagaaatgagttgactttcatatttaagagctgatcctatgaatgagtagacaataagctgaatagctgttacgatctgagttttaaaaatggaaaatgtttcatgttttaga

SEQ ID NO: 162327 - DNA, 120 bp, Artificial Sequence
  ENSG00000107614_56 (sequence is synthesized)
gaatgtaaacttccacaagggcagagattgttaatacgttgtccccccagtgacttaaaacagtactggcacatagtaagcactcaataaatagttgttgaatgagtgaatgtaggaacc

SEQ ID NO: 162328 - DNA, 120 bp, Artificial Sequence
  ENSG00000107614_57 (sequence is synthesized)
atactggaatcaatattgaagctacatagaaagcaccacactgtggagttcaaacaatgtctttaagttgttctcttgaaaactatttaatttgtctgttactgccacttcttccatgcc

SEQ ID NO: 162329 - DNA, 120 bp, Artificial Sequence
  ENSG00000107614_58 (sequence is synthesized)
cagaggaacagccaaagttactcaagtctggaacacatgatttaaaaaataattctgggataggcttttggcttttggaaagtagcgcaaataaaactttttaaaatactgtattctgac

SEQ ID NO: 162330 - DNA, 120 bp, Artificial Sequence
  ENSG00000107614_59 (sequence is synthesized)
ttctggtcttgacaagagagtgtagatttatttctccctgctcctccctgaaaagtgtaattataaactctgggtaagtataattataaaataatgcaagaggaatcagaaggagaattc

SEQ ID NO: 162331 - DNA, 120 bp, Artificial Sequence
  ENSG00000107614_60 (sequence is synthesized)
tgaaaggtgggaccaggaagacacactgcggagggaccccaagactagaggaacaacatggttccaagacatctgacccctcacccaacagaggaaggttacccaggcttgatgtttccc

SEQ ID NO: 162332 - DNA, 120 bp, Artificial Sequence
  ENSG00000107614_61 (sequence is synthesized)
gacctacaaccacacaatagaagacagcccagagaggctcgttcctacagaagagggaactgaagtctggtcggtaataccagatgagtctggctctaccagcacgggggtatatcagga

SEQ ID NO: 162333 - DNA, 120 bp, Artificial Sequence
  ENSG00000107614_62 (sequence is synthesized)
atcccactgacaaacatccagacctgagacttgtcttttgtgctgagagatgagcatccaggggcctctggcaaaaagcatctaacccaggaagattttttattaccctgagcctgagac

SEQ ID NO: 162334 - DNA, 120 bp, Artificial Sequence
  ENSG00000107614_63 (sequence is synthesized)
tcccttctcccagagataccatgggacctggcttgggagaaaatccttctttccctaaagtagcatcatgaaggaccattcgggaaccccagcagcaccagataaaccaagcagaccaaa

SEQ ID NO: 162335 - DNA, 120 bp, Artificial Sequence
  ENSG00000107614_64 (sequence is synthesized)
ataacactgcaaaggctttaaaaactaaattaccactggactcatagcccacaaaaactaagccagggcttgcatgctaaacacaaatggagtgactgcctactaaaaataaaagattaa

SEQ ID NO: 162336 - DNA, 120 bp, Artificial Sequence
  ENSG00000107614_65 (sequence is synthesized)
aataatagacaaaaggttcaggatacgatgtaaaatagcctgtcataccaagaaccagaaaaatcacaacttgaataagaaatgacagtcaacagatgacaacactgagacaaatcagat

SEQ ID NO: 162337 - DNA, 120 bp, Artificial Sequence
  ENSG00000107614_66 (sequence is synthesized)
gttggaattacttgacaaggattttaagcaactctcataaaaatgcttcaacaggtaattacaagttgtcttgccacaaaaaatagaaaagctcagcaaagaaatagaagttaacaaaag

SEQ ID NO: 162338 - DNA, 120 bp, Artificial Sequence
  ENSG00000107614_67 (sequence is synthesized)
aaccattatggtaggtgcactatatgccaatttttaagaatagaaataaatggcagttatgtaactgaaaaataaccaaaatagaaaacattctgtggtaacagataatttgattagatc

SEQ ID NO: 162339 - DNA, 120 bp, Artificial Sequence
  ENSG00000107614_68 (sequence is synthesized)
ctggacattttgtctgttacattaactttattttcagaaatttaattatgatgtgtcttggcatgaatttctttcaaagtggcagatatttcaaagtgaatgtaatatcctgtttggtgt

SEQ ID NO: 162340 - DNA, 120 bp, Artificial Sequence
  ENSG00000107614_69 (sequence is synthesized)
tcattcaccttcttgaatctgtacatttatatcttttgctaaacttgagatcagtagtagagaggaaatgacagaagatagaaatcagtgaacctaaggacggatcagtagaatttacct

SEQ ID NO: 162341 - DNA, 120 bp, Artificial Sequence
  ENSG00000107614_70 (sequence is synthesized)
gatctaaatgatagggcaaagataggctgacaaaaaaaattaacagagccttggggacctgtgggacaataacagaagaaccaacatttatatgtttggggtgccagaagtagaggggaa

SEQ ID NO: 162342 - DNA, 120 bp, Artificial Sequence
  ENSG00000107614_71 (sequence is synthesized)
cagaagtagaggggaaaaaaatggagctgaaagagcatttaaataatggctggaaacatcccaaatttggcaaaaccttaaaagcagctggaggctgggcgcggtggctgacacctgtaa

SEQ ID NO: 162343 - DNA, 87 bp, Artificial Sequence
  ENSG00000107614_72 (sequence is synthesized)
tggctgacacctgtaatcccagcactttaggaggcgaaggggggcagatcataaggtcaggagatagagaccatccttcaaaaaaat

SEQ ID NO: 162344 - DNA, 120 bp, Artificial Sequence
  ENSG00000107614_73 (sequence is synthesized)
ataaataaataaataaaagcagctggagaaaaatgacacgttgccatggggcgggggacacaatttggatgacagtagatgtctcatccaaaaccatgaggaccagaaggaggtggcatt

SEQ ID NO: 162345 - DNA, 120 bp, Artificial Sequence
  ENSG00000107614_74 (sequence is synthesized)
gtcaactatgaattctatatctagccaaactatccttcaagagatctctgttttatctatatatgtatcgatacacatatacctctatgcagctctttacaattattagggcgagcaggt

SEQ ID NO: 162346 - DNA, 120 bp, Artificial Sequence
  ENSG00000107614_75 (sequence is synthesized)
agttaacatggaattaggcttatctgatatgtgaaataatcaaagatgaaaggaagacacctaacgtatagctaatgattataactgtgaaattattcatctaaaaatagattggaataa

SEQ ID NO: 162347 - DNA, 120 bp, Artificial Sequence
  ENSG00000107614_76 (sequence is synthesized)
aataatgatagcagttatgttagagtaatagcattttaatttttcttgtttatatttttcaattgaatgtgatcttttttgttgtttttgttttcatcaatgtggcataatattagtttt

SEQ ID NO: 162348 - DNA, 120 bp, Artificial Sequence
  ENSG00000107614_77 (sequence is synthesized)
atcatttaaaatgttctttctttcaaaacactcagtttcaagtctttactgtagagtctgttcattgtaagcttgtaagttgctacctcatttgcatcttgatgctatgtaatataatcc

SEQ ID NO: 162349 - DNA, 120 bp, Artificial Sequence
  ENSG00000107614_78 (sequence is synthesized)
cctcccctgctgacttttttcctccagagcagaagctacatcttgcccatttgtgtatcctcagtacctttctcagatgctgacagatagtgggtacctaataaataattgtccaattaa

SEQ ID NO: 162350 - DNA, 120 bp, Artificial Sequence
  ENSG00000107614_79 (sequence is synthesized)
ctgacttagatatgagtatgctgagtatggtaatagaattgtaggttctttcatggcttgggggattgtttgaataattctgtcagccaaaaagaaaagaagtgctgggcatggtgcctc

SEQ ID NO: 162351 - DNA, 84 bp, Artificial Sequence
  ENSG00000107614_80 (sequence is synthesized)
gaataaaaccctatctctactaaaggtacaaaaaaaaaaaaaaaatagctggatgtggtggcatgtgcctgtaatctcagctat

SEQ ID NO: 162352 - DNA, 78 bp, Artificial Sequence
  ENSG00000107614_81 (sequence is synthesized)
aaaaccctatctctactaaaggtacaaaaaaaaaaaaaaaatagctggatgtggtggcactcactggaacctgggagg

SEQ ID NO: 162353 - DNA, 120 bp, Artificial Sequence
  ENSG00000107614_82 (sequence is synthesized)
aaaaaaaaaaaaaaaaaagcacactagatgttactggaagaatatttaatgccaaaattgtgtataactcctagggtattgtttatgtctcttctaaacatagtctaggaattgttgaca

SEQ ID NO: 162354 - DNA, 120 bp, Artificial Sequence
  ENSG00000107614_83 (sequence is synthesized)
gtttatgtctcttctaaacatagtctaggaattgttgacaaagcttgatttagcagtacttccgtaacaaatatggtccaagtcactataaagaaagcatacaaaggtgttgttttttat

SEQ ID NO: 162355 - DNA, 120 bp, Artificial Sequence
  ENSG00000107614_84 (sequence is synthesized)
agatcttagaataacggcattgaaaaagacagaagtgaggtcatctcatcctttctgccattgatgacaacaccttaaatcttcccacagatctatgtggcacttcaattaacaaatccc

SEQ ID NO: 162356 - DNA, 120 bp, Artificial Sequence
  ENSG00000107614_85 (sequence is synthesized)
ctgggaatgatgcccctttgtaaggcatcagccttgttaaatcactcctctaaccgtaaatcacatccgtaatgcaaagcttcctctcacaagataaagatgcctgtgtgtactgcttct

SEQ ID NO: 162357 - DNA, 120 bp, Artificial Sequence
  ENSG00000107614_86 (sequence is synthesized)
gcgtctatcttcccaattaaaggtacaagaggcagagtctgaagagtgccaggtatccccaaactttgttttctttttcttttttttcattttccttcccagaagagaaccaaactgttt

SEQ ID NO: 162358 - DNA, 120 bp, Artificial Sequence
  ENSG00000107614_87 (sequence is synthesized)
ttttcttccccccatcggtggtgacatcctcacctctcttgctctcctcccctaatagaacacaaaatatcatcacaaagatgtactttccccttttcctaagatcagatccaatataag

SEQ ID NO: 162359 - DNA, 120 bp, Artificial Sequence
  ENSG00000107614_88 (sequence is synthesized)
ttgtttgcagttatttaccacctacatttcttctgtcattcatgctgaagtctgagtgcaatcagacattttcctttgattatcgtatgaatggtgtctaaatatttaacttcaccgcct

SEQ ID NO: 162360 - DNA, 120 bp, Artificial Sequence
  ENSG00000107614_89 (sequence is synthesized)
tgtttggggaattttaggggtcaccaagtagaaaactcattttgtcctttttaggttgatttggaacaggatggcaggagggttcacctatggtaaactccgcttcattgcttcacacct

SEQ ID NO: 162361 - DNA, 120 bp, Artificial Sequence
  ENSG00000107614_90 (sequence is synthesized)
tggaaaccaagcttggattaatccaatggagctgctgaagtccccattccgggagctgttggaggtagagaaagctctgttgatttttttactagcttttggagcctttaatcctagcaa

SEQ ID NO: 162362 - DNA, 120 bp, Artificial Sequence
  ENSG00000107614_91 (sequence is synthesized)
ttagtatctcctctgctatggctgatccttataatgatgcgagaccctccagtgcatattttatgttttctgtaacatttgcttgagttacaattaggaagctgtgtgtgcacacgtgtg

SEQ ID NO: 162363 - DNA, 120 bp, Artificial Sequence
  ENSG00000107614_92 (sequence is synthesized)
tatacatgtgccacgaacacccctgtgctcctcctccaaagccctattcccctattgcgtttgtccctctggatttgaatttcgttatttttttctcattgtttatgaagggattatatt

SEQ ID NO: 162364 - DNA, 120 bp, Artificial Sequence
  ENSG00000107614_93 (sequence is synthesized)
acttaaaaaaaaaaacttgaaaaaagtggaaaagttctccaaactctcaacaatctgctttctcaggaaaagctctgccaaacctcagcaatttaaatgttaatgattaactcataattc

SEQ ID NO: 162365 - DNA, 120 bp, Artificial Sequence
  ENSG00000107614_94 (sequence is synthesized)
tttttcattctactcaaagataattgtagtcattgtaataatgagcatggagaacaaatgtctgctttatgtgccttgagccaagaccacactgctttcaaaaagatcagttcatcacag

SEQ ID NO: 162366 - DNA, 120 bp, Artificial Sequence
  ENSG00000107614_95 (sequence is synthesized)
tagtagacttggtaatttcctacatggtaatgcacttcccatgaaatgagcaaaagaatagttttaaatgtaccttgatttccatcattattttatgtaatccttcatggaaaatgaaag

SEQ ID NO: 162367 - DNA, 120 bp, Artificial Sequence
  ENSG00000107614_96 (sequence is synthesized)
aattggaacaatgttatattgccctgaaattttgcagaaaatcacaaaactgacatatgtaaatgtatcttttaagcaatgttacgtccctgaaaaagagaatgaattaagtgtcatgaa

SEQ ID NO: 162368 - DNA, 120 bp, Artificial Sequence
  ENSG00000107614_97 (sequence is synthesized)
ggttaaaagatcgttatattcacaaatgtttccattaatgactaaaaaccagattaattctacagtgttctgttttaaactgatatgaaaatgaaaagggactaaaaaaagcacaaaagc

SEQ ID NO: 162369 - DNA, 120 bp, Artificial Sequence
  ENSG00000107614_98 (sequence is synthesized)
cagattgaagctataacatgtaatgggagctagcattaggggtgtgagaatcttgccaatttgtccatcctccaacgcacctctgcatctcaaccctctcctcatttttatgactcccac

SEQ ID NO: 162370 - DNA, 120 bp, Artificial Sequence
  ENSG00000107614_99 (sequence is synthesized)
attgatccagtcctccagataaattcagctggcctagcagaaatatcacataaggattattgcactcaagataaaagaacatccccctattaaaaagattaaatcaacattctttaacct

SEQ ID NO: 162371 - DNA, 120 bp, Artificial Sequence
  ENSG00000107614_100 (sequence is synthesized)
gccacttaaggccttctgtcgatgtctcttcctttacccagccactttccttcaaggtcaccctgctggacaagtggaacaacctttttttttttttcttttttttttggcagagtttcg

SEQ ID NO: 162372 - DNA, 75 bp, Artificial Sequence
  ENSG00000107614_101 (sequence is synthesized)
gtagagacagggtttcaccattttggctggtctcaaattcctgacctcaacgaggcactgagcccggccagtgga

SEQ ID NO: 162373 - DNA, 120 bp, Artificial Sequence
  ENSG00000107614_102 (sequence is synthesized)
acaggtacgaggcactgagcccggccagtggaaccactttctatagtgtgcccatactgggccttggacatctttcctagtttggtacctgctgtttacttaacagcatgctactgtgta

SEQ ID NO: 162374 - DNA, 120 bp, Artificial Sequence
  ENSG00000107614_103 (sequence is synthesized)
tctgtgccatcttgtcacacttgtctttgtaatgttgcctaactctggctctccagatttgtacattacgactttattgtaaatcagagaaggtcaataaatttacttctttcaaatttc

SEQ ID NO: 162375 - DNA, 120 bp, Artificial Sequence
  ENSG00000107614_104 (sequence is synthesized)
ctacttagcccattaggaattcttttgatgcatcttgtcaacagtcatttgaagttcattgcacacaactgcaaaacaaaataattgtggatatctgagaatgaggcccttttccatttg

SEQ ID NO: 162376 - DNA, 120 bp, Artificial Sequence
  ENSG00000107614_105 (sequence is synthesized)
aaagctgtatacctgcacaagtggtggctgccattgatgtcaacactgtcgctaatgaagtatacaagtataattttcctcacacacagttacttgccaagacgattgaaagacctcttg

SEQ ID NO: 162377 - DNA, 120 bp, Artificial Sequence
  ENSG00000107614_106 (sequence is synthesized)
tccagtggaacaaaaactcttaataaaaatagataaaaatttttctagaatgaaatttacaatataacatccatgagcccttctggaacagatgactgcatcacttaatctagctgagca

SEQ ID NO: 162378 - DNA, 120 bp, Artificial Sequence
  ENSG00000107614_107 (sequence is synthesized)
aaacagctcctgcgcgccgccgtgtccacccctccagacgctgactcccttctcctggcgccgagtctggctcgaggggccgcacatggcgcctcaaagggcccagttgggagtcgggat

SEQ ID NO: 162379 - DNA, 120 bp, Artificial Sequence
  ENSG00000107614_108 (sequence is synthesized)
caggaatgaagctgccgtgttaggaggaaaactatggttagaaaatagctgaaaatgttgtaaagctttgcagtgtagaaataataatgtaatcggagtgggaagaggcagtgagacaca

SEQ ID NO: 162380 - DNA, 120 bp, Artificial Sequence
  ENSG00000107614_109 (sequence is synthesized)
aaaaatatgtctttgcagataaatgaaactatcaattttttaggacattattcagtgttgttgtcagggtctcagcagagctgggaaagagaaagctcagctgtcaagagcgttaaagta

SEQ ID NO: 162381 - DNA, 120 bp, Artificial Sequence
  ENSG00000107614_110 (sequence is synthesized)
tttgaatgttcaggcttctaagtgacagaaaagcagcttgtctgaaaaatgatttttttctggcttctaaccagtgttaattcacttggaaaccaaggcagttttctcccctttactgaa

SEQ ID NO: 162382 - DNA, 120 bp, Artificial Sequence
  ENSG00000107614_111 (sequence is synthesized)
ctctggatttcttttccaatcaaggcccctgacaccaaagaaggaaatggagcgtaaatcaggctacagagtggctgccattcattcgggaagccttattgttttccgtcctttgttccc

SEQ ID NO: 162383 - DNA, 120 bp, Artificial Sequence
  ENSG00000107614_112 (sequence is synthesized)
ttgttttcaaagggcagtagtcactttggtaatactgaaccttggtaaggagcacagagcccagagtcagactgaatgatttcatatcccagccccaccttaaccgttcccttctttagt

SEQ ID NO: 162384 - DNA, 120 bp, Artificial Sequence
  ENSG00000107614_113 (sequence is synthesized)
ttacttctctgtaaaatgaggatgatcataactcctgcttcatagagttattgtgatagttaaatgagtcaatgtttatgaaattcttatctaatatctgagacataatgtaaaatttgt

SEQ ID NO: 162385 - DNA, 120 bp, Artificial Sequence
  ENSG00000107614_114 (sequence is synthesized)
tttagctttcatttttagaatgagccatgtatttacttttataatctttatttcataaatatttttctcattttttaaaattttaagttggtgaaatagaatttttcaaagctctttgaa

SEQ ID NO: 162386 - DNA, 120 bp, Artificial Sequence
  ENSG00000107614_115 (sequence is synthesized)
tatatatgtataatacttagaaaaacagcctttgaaattactgaacctccttctaaaatacgtgatatgtttttggagttgagcttaccctgatgtcaccactgagcagcaccgtgacac

SEQ ID NO: 162387 - DNA, 120 bp, Artificial Sequence
  ENSG00000107614_116 (sequence is synthesized)
aactgtccctcatgtgtgtttccaacattattgaccctgggtccaaaaatgggcattgtttgagctgtttgtctactggcaatgatggatctgcattgatccttccaaaccctctgtcct

SEQ ID NO: 162388 - DNA, 120 bp, Artificial Sequence
  ENSG00000107614_117 (sequence is synthesized)
aatctccttggatttcctccagagttcggtatgtgggatacgtgcagaattcagctttcatgtattaaaactctcaaaaatctttagggacttgtgtgtctaggacttgcctaaacaaat

SEQ ID NO: 162389 - DNA, 120 bp, Artificial Sequence
  ENSG00000107614_118 (sequence is synthesized)
gggctcaagaaacctctttcctttcctgatcatgccatttatggcatctttctgccctctttcccctcataactgcctcattcggttctctactgactcattctccccctctctaactcc

SEQ ID NO: 162390 - DNA, 120 bp, Artificial Sequence
  ENSG00000107614_119 (sequence is synthesized)
agtagtgggtcacagaggttggcatggctagaagggtcacattggcaactccttgcctctttccacagatggctgtgcatagcatcccctttccagcttattttcttttccagaggtcct

SEQ ID NO: 162391 - DNA, 120 bp, Artificial Sequence
  ENSG00000107614_120 (sequence is synthesized)
ctcctaatcaccccacactagagcttgtgaaagaatgctttcgattggctttttataaattaaaaggcagttgagggattattttcgaagggtgggggtgtattggtatttattctcctc

SEQ ID NO: 162392 - DNA, 120 bp, Artificial Sequence
  ENSG00000107614_121 (sequence is synthesized)
agagatacacctgtgtcagctgtgtgcccctatccttccctacaaggggtaggtggagaaagaggaggtggagaggctgtctaggaaggagctttcataatggaatgaaagggggactca

SEQ ID NO: 162393 - DNA, 120 bp, Artificial Sequence
  ENSG00000107625_0 (sequence is synthesized)
cctttcacgctgtcgctgcccgtaggtggttgtggccactgtgcccggagggaggcggcggtggccagtaatgcctgggaaactcctctggggggacattatggagctggaagcaccctt

SEQ ID NO: 162394 - DNA, 120 bp, Artificial Sequence
  ENSG00000107625_1 (sequence is synthesized)
ggaggagtccgagagccagaagaaggagaggcaaaagagtgacagaaggaagtcaaggcaccattatgactcggatgagaaatcagaaacaagagaaaatggtgttacagatgacctgga

SEQ ID NO: 162395 - DNA, 120 bp, Artificial Sequence
  ENSG00000107625_2 (sequence is synthesized)
tgctcccaaggccaaaaaatctaaaatgaaagagaagctaaatggagacactgaagaaggatttaatagactttcagatgaattctccaaatctcataagtcaagaagaaaagatctacc

SEQ ID NO: 162396 - DNA, 120 bp, Artificial Sequence
  ENSG00000107625_3 (sequence is synthesized)
aaatggagatatagatgaatatgaaaaaaaatcaaagcgagtatcatctttagatacttctactcataaatcaagtgataataaactagaggagaccttaacacgtgaacagaaagaagg

SEQ ID NO: 162397 - DNA, 120 bp, Artificial Sequence
  ENSG00000107625_4 (sequence is synthesized)
agccttctccaattttcctatttctgaagagactataaagcttctgaaaggtcgaggggtaacatatctctttcctattcaagttaagacctttggtcctgtatatgaaggaaaagattt

SEQ ID NO: 162398 - DNA, 120 bp, Artificial Sequence
  ENSG00000107625_5 (sequence is synthesized)
aatagctcaagcacggacaggaacaggaaagacattctcttttgccatccccttaattgaaagactccaaagaaatcaagaaacaattaaaaaaagccgctcaccaaaggtacttgtttt

SEQ ID NO: 162399 - DNA, 120 bp, Artificial Sequence
  ENSG00000107625_6 (sequence is synthesized)
ggctccaacaagggaactggcaaaccaagtagccaaagacttcaaagatataactaggaaactcagcgtggcgtgtttttatggtggaacatcatatcaaagccaaattaatcatattcg

SEQ ID NO: 162400 - DNA, 120 bp, Artificial Sequence
  ENSG00000107625_7 (sequence is synthesized)
aaatggtattgacatcttggttggaacacctggtcgtatcaaagaccatctgcagagtggccgattggatctttctaaactgcgacatgttgtgcttgatgaagtggatcagatgttaga

SEQ ID NO: 162401 - DNA, 120 bp, Artificial Sequence
  ENSG00000107625_8 (sequence is synthesized)
tttaggtttcgctgaacaagttgaagatattattcatgaatcctacaaaactgattctgaagacaatcctcagactttacttttttctgcaacttgcccacagtgggtatacaaagttgc

SEQ ID NO: 162402 - DNA, 120 bp, Artificial Sequence
  ENSG00000107625_9 (sequence is synthesized)
aaaaaaatacatgaaatccagatatgaacaggttgaccttgttggaaaaatgactcaaaaggctgcaactactgtggaacatttggccatccagtgtcattggtctcagaggccagcagt

SEQ ID NO: 162403 - DNA, 120 bp, Artificial Sequence
  ENSG00000107625_10 (sequence is synthesized)
taaaacagaatgcccagtgtttacatggggacattgcacagtcacaaagagaaattacactaaaaggcttcagagaaggtagttttaaagttttggtggcaaccaatgtggctgcccgtg

SEQ ID NO: 162404 - DNA, 120 bp, Artificial Sequence
  ENSG00000107625_11 (sequence is synthesized)
gtttggacattcctgaagttgacctggtgattcaaagttctcctcctcaggatgttgagtcctatatccatcgctctggacgcacaggtagagctggacggacagggatttgtatatgtt

SEQ ID NO: 162405 - DNA, 120 bp, Artificial Sequence
  ENSG00000107625_12 (sequence is synthesized)
tttatcaaccaagagaaagaggtcaactaagatatgtggaacaaaaagcaggaattacttttaaacgtgtaggtgttccttctacaatggatttagttaaatctaaaagcatggatgcca

SEQ ID NO: 162406 - DNA, 120 bp, Artificial Sequence
  ENSG00000107625_13 (sequence is synthesized)
tcaggtctctggcttccgtttcttacgctgctgttgattttttccgaccatcagctcagagactgatagaagagaaaggtgcagtggatgcattggctgcagctttagcccacatttctg

SEQ ID NO: 162407 - DNA, 120 bp, Artificial Sequence
  ENSG00000107625_14 (sequence is synthesized)
gtgcatcaagctttgaaccacgatctttgatcacctctgataaggggtttgtgaccatgactctggaaagcctagaggaaatacaggatgtcagctgtgcttggaaagaacttaacagaa

SEQ ID NO: 162408 - DNA, 120 bp, Artificial Sequence
  ENSG00000107625_15 (sequence is synthesized)
agctgagtagtaatgcagtgtctcagattaccagaatgtgcctcctgaaaggaaatatgggtgtttgctttgatgttcctacaactgagtcagaaaggttacaggcagagtggcatgatt

SEQ ID NO: 162409 - DNA, 120 bp, Artificial Sequence
  ENSG00000107625_16 (sequence is synthesized)
ccgactggatactctcagtgccagccaaattacctgaaattgaagaatattatgatggaaacacatcttctaattccagacagaggagtggctggtcaagtggtcgatcaggccggtcag

SEQ ID NO: 162410 - DNA, 120 bp, Artificial Sequence
  ENSG00000107625_17 (sequence is synthesized)
gccggtcaggtggtcgatctggcggccggtcaggtagacagagtcgacaaggaagtcgctcaggaagtcgacaagatggtagaagacgaagtgggaatagaaatcgatcaagaagtgggg

SEQ ID NO: 162411 - DNA, 120 bp, Artificial Sequence
  ENSG00000107625_18 (sequence is synthesized)
gccacaaacggagttttgactgagtatttgatagttaatctaccagtgtgagcttgcctatttctgcctaatcatgtacattatccaccaaaaattaggtcatcatagttgaggtatgtg

SEQ ID NO: 162412 - DNA, 120 bp, Artificial Sequence
  ENSG00000107625_19 (sequence is synthesized)
tctgctatttgcaaagaagttggtcgtatttttttaaaaagtatttcacaagaatggaacaaatctacttatccagttatacctttgaataaaaaaacctccttttattgtctcttttca

SEQ ID NO: 162413 - DNA, 120 bp, Artificial Sequence
  ENSG00000107625_20 (sequence is synthesized)
acagttaatcatattcgaaatggtattgacatcttggttggaacacctggtcgtatcaaagaccatctgcagagtggccgattggatctttctaaactgcgacatgttgtgcttgatgaa

SEQ ID NO: 162414 - DNA, 120 bp, Artificial Sequence
  ENSG00000107625_21 (sequence is synthesized)
taactgaaatggccatgaatccacacataaaacaggatgttgagtcctatatccatcgctctggacgcacaggtagagctggacggacagggatttgtatatgtttttatcaaccaagag

SEQ ID NO: 162415 - DNA, 120 bp, Artificial Sequence
  ENSG00000107625_22 (sequence is synthesized)
aggagtccgagagccagaagaaggagaggcaaaagagctttatggatatcgcaatttcggataagggattatggacctgtacttcccttatagggttgttatgaagatttaaacaagata

SEQ ID NO: 162416 - DNA, 120 bp, Artificial Sequence
  ENSG00000107643_0 (sequence is synthesized)
attgcttgccatcatgagcagaagcaagcgtgacaacaatttttatagtgtagagattggagattctacattcacagtcctgaaacgatatcagaatttaaaacctataggctcaggagc

SEQ ID NO: 162417 - DNA, 120 bp, Artificial Sequence
  ENSG00000107643_1 (sequence is synthesized)
tcaaggaatagtatgcgcagcttatgatgccattcttgaaagaaatgttgcaatcaagaagctaagccgaccatttcagaatcagactcatgccaagcgggcctacagagagctagttct

SEQ ID NO: 162418 - DNA, 120 bp, Artificial Sequence
  ENSG00000107643_2 (sequence is synthesized)
tatgaaatgtgttaatcacaaaaatataattggccttttgaatgttttcacaccacagaaatccctagaagaatttcaagatgtttacatagtcatggagctcatggatgcaaatctttg

SEQ ID NO: 162419 - DNA, 120 bp, Artificial Sequence
  ENSG00000107643_3 (sequence is synthesized)
ccaagtgattcagatggagctagatcatgaaagaatgtcctaccttctctatcagatgctgtgtggaatcaagcaccttcattctgctggaattattcatcgggacttaaagcccagtaa

SEQ ID NO: 162420 - DNA, 120 bp, Artificial Sequence
  ENSG00000107643_4 (sequence is synthesized)
tatagtagtaaaatctgattgcactttgaagattcttgacttcggtctggccaggactgcaggaacgagttttatgatgacgccttatgtagtgactcgctactacagagcacccgaggt

SEQ ID NO: 162421 - DNA, 120 bp, Artificial Sequence
  ENSG00000107643_5 (sequence is synthesized)
catccttggcatgggctacaaggaaaacgttgacatttggtcagttgggtgcatcatgggagaaatgatcaaaggtggtgttttgttcccaggtacagatcatattgatcagtggaataa

SEQ ID NO: 162422 - DNA, 120 bp, Artificial Sequence
  ENSG00000107643_6 (sequence is synthesized)
agttattgaacagcttggaacaccatgtcctgaattcatgaagaaactgcaaccaacagtaaggacttacgttgaaaacagacctaaatatgctggatatagctttgagaaactcttccc

SEQ ID NO: 162423 - DNA, 120 bp, Artificial Sequence
  ENSG00000107643_7 (sequence is synthesized)
tgatgtccttttcccagctgactcagaacacaacaaacttaaagccagtcaggcaagggatttgttatccaaaatgctggtaatagatgcatctaaaaggatctctgtagatgaagctct

SEQ ID NO: 162424 - DNA, 120 bp, Artificial Sequence
  ENSG00000107643_8 (sequence is synthesized)
ccaacacccgtacatcaatgtctggtatgatccttctgaagcagaagctccaccaccaaagatccctgacaagcagttagatgaaagggaacacacaatagaagagtggaaagaattgat

SEQ ID NO: 162425 - DNA, 120 bp, Artificial Sequence
  ENSG00000107643_9 (sequence is synthesized)
atataaggaagttatggacttggaggagagaaccaagaatggagttatacgggggcagccctctcctttaggtgcagcagtgatcaatggctctcagcatccatcatcatcgtcgtctgt

SEQ ID NO: 162426 - DNA, 120 bp, Artificial Sequence
  ENSG00000107643_10 (sequence is synthesized)
caatgatgtgtcttcaatgtcaacagatccgactttggcctctgatacagacagcagtctagaagcagcagctgggcctctgggctgctgtagatgactacttgggccatcggggggtgg

SEQ ID NO: 162427 - DNA, 120 bp, Artificial Sequence
  ENSG00000107643_11 (sequence is synthesized)
gagggatggggagtcggttagtcattgatagaactactttgaaaacaattcagtggtcttatttttgggtgatttttcaaaaaatgtagaattcattttgtagtaaagtagtttattttt

SEQ ID NO: 162428 - DNA, 120 bp, Artificial Sequence
  ENSG00000107643_12 (sequence is synthesized)
tttaatttcaagtgatgtaatttaaaacctaagttgtgtttcaaaacagcaacaaaactgtattgtattttttttgctgtaattaactgtataatgtaaacctaattattttatcatggt

SEQ ID NO: 162429 - DNA, 120 bp, Artificial Sequence
  ENSG00000107643_13 (sequence is synthesized)
ttaaattttttgcatatttgctttatcttatgctgctgatttttttaactgaatttgtaagattttgtttatcaaagcaactattatgtggtgacttgcctatatcatgaattatttaag

SEQ ID NO: 162430 - DNA, 120 bp, Artificial Sequence
  ENSG00000107643_14 (sequence is synthesized)
atttttatagttttttttaattagaatttatttcagatgttttgttcatgatactatccttcagggttatgtgcttatcaatgaaataaccccagaggagtgagggaaaataacttgtag

SEQ ID NO: 162431 - DNA, 120 bp, Artificial Sequence
  ENSG00000107643_15 (sequence is synthesized)
ccagttatattcaggaataactactgtaaatgatgaacgtgttaggagacctccaatatttgctacttgccaatcctaatttagttacaagaattggtaggcaatcctacttaattttgg

SEQ ID NO: 162432 - DNA, 120 bp, Artificial Sequence
  ENSG00000107643_16 (sequence is synthesized)
caaaagccccgtcatctaaatggcagaataactcagagcatgtctttgaagatgctgggcgtctaccaccaccttatgtccccaccctacccaacaaaaataagtaaaaagaatatggtg

SEQ ID NO: 162433 - DNA, 120 bp, Artificial Sequence
  ENSG00000107643_17 (sequence is synthesized)
tattctacaaatttgtggcatgctcaaagtttatgatcacataaaggcaagaggatacttcatgaataatacatttcaatgcaaataaacagatggttcacttctactagctatgagcct

SEQ ID NO: 162434 - DNA, 120 bp, Artificial Sequence
  ENSG00000107643_18 (sequence is synthesized)
gtttttgtatacactgagttaatctactcaggctgtaggtcccagcaatgttctagagtctggtctttccctttcctgcagcttcgggtccttggacctttcctgtttcctattacttgg

SEQ ID NO: 162435 - DNA, 120 bp, Artificial Sequence
  ENSG00000107643_19 (sequence is synthesized)
agtgtctgtcagttgagcaccagttgttctggtgtttcatttgattctacttgtagcataatcatttatacgagctattgggaggttccaaaccctacctagatttgtgtaggtgatgta

SEQ ID NO: 162436 - DNA, 120 bp, Artificial Sequence
  ENSG00000107643_20 (sequence is synthesized)
tcaaatgagcaatataccgttcatctgaaaatagtagcacacagccatatataggatatcattttctaaggactgtttcttcacattgagcagagcaggcataaatggtggttatttagt

SEQ ID NO: 162437 - DNA, 120 bp, Artificial Sequence
  ENSG00000107643_21 (sequence is synthesized)
ctaagtcttttatttttttatacctgattttcaacataacacgcaatgtggatgtcgagtagtgttaagaatggtgctgctcctgacaagtgtatgttaactgtttacattttctatctg

SEQ ID NO: 162438 - DNA, 120 bp, Artificial Sequence
  ENSG00000107643_22 (sequence is synthesized)
tagaattatttctctattactgaacttttcctaagtaaaatgtctttgaagtctcgttatttctgaaatacgttgtctgtaatagacccaggcaccttttaaattatctctggaacaaga

SEQ ID NO: 162439 - DNA, 120 bp, Artificial Sequence
  ENSG00000107643_23 (sequence is synthesized)
caacatgcaatgtctgaaaatttgcttggcattttattcatatatttagtgcaaaattatttttgagtgagatattttacatcactgttaatgtgcaatatttaagattaaaatacatta

SEQ ID NO: 162440 - DNA, 120 bp, Artificial Sequence
  ENSG00000107643_24 (sequence is synthesized)
gcttttttatatactttgaagtagcaagtttgttttcgatggcttagagtcatgatttccagcttcccagcctttttatcagtcccttttctaatacaacaaggtgcattaatttgatta

SEQ ID NO: 162441 - DNA, 120 bp, Artificial Sequence
  ENSG00000107643_25 (sequence is synthesized)
ggcaaattagagttctaagacacttcttgaattgtagacagaaaatattggattcacaatttcagcagaaatttgagaatgagtgtgtttatattaatttcacaattagctgtattttct

SEQ ID NO: 162442 - DNA, 120 bp, Artificial Sequence
  ENSG00000107643_26 (sequence is synthesized)
gtagcatagattatgtcactgttgcactttcacagcagacatgctttcagaaggttctcatattttatgtttgattgctgataagccatctctattgatacagattttggttaagtaagg

SEQ ID NO: 162443 - DNA, 120 bp, Artificial Sequence
  ENSG00000107643_27 (sequence is synthesized)
aaaaccaggtgtgtgtctgtatcatttattgtaaatgccagctgccacttgccaaccatcatgttcagttcaattcaaagaaaacaaactctcattacttagtgtaaactaaaatactta

SEQ ID NO: 162444 - DNA, 120 bp, Artificial Sequence
  ENSG00000107643_28 (sequence is synthesized)
acaaattatatcctaaaaacaaggtctctttgttaaatgttgcatgccctaggttttaaattactacatccaaatacagttttcgtcttaaatttgttaagctaaatatatgttggttct

SEQ ID NO: 162445 - DNA, 120 bp, Artificial Sequence
  ENSG00000107643_29 (sequence is synthesized)
ttttattttggaatcctttaagcatcttaaacattttttttttgaagagaagttacaaataacatttctatcaggtagtacttgtatgaaaccacctttcttattctataattttgattt

SEQ ID NO: 162446 - DNA, 120 bp, Artificial Sequence
  ENSG00000107643_30 (sequence is synthesized)
ttcaattttatatacttaatatactcactgtcttactatcagaaagttattttgaccaagatttttattatcttcatagattcagaaagagatgctaattctgtaccaatgtcttcctgg

SEQ ID NO: 162447 - DNA, 120 bp, Artificial Sequence
  ENSG00000107643_31 (sequence is synthesized)
ttactattctcttccctctaatatatactggccatttgtaaaaccattgtgttgttgggatcacttagttatactatacgcagatagagcatctcaactctgtcatagtgtttgctgaac

SEQ ID NO: 162448 - DNA, 120 bp, Artificial Sequence
  ENSG00000107643_32 (sequence is synthesized)
agttttcagtgtcatgcacctttggctgctaattgttcctgacgtgcactcttccgagttggtaaaggcacagtgtgttcatgccagacttctaagagaaacaccagcctcttaaatcag

SEQ ID NO: 162449 - DNA, 120 bp, Artificial Sequence
  ENSG00000107643_33 (sequence is synthesized)
aagcctacacacaacccccttaacaatccaaagaagcttgatggtgtgcaaagaagcatcctgccagccttgtcattgttctgttctatgctaatcctgctgtgttgtctaaaagatgga

SEQ ID NO: 162450 - DNA, 120 bp, Artificial Sequence
  ENSG00000107643_34 (sequence is synthesized)
gggaagaggacatcagtgtctgatagtgaaatcatcagcaggaaagtgaagctctttccttggttacagataagacttggtttacactattggccagtatctgctaaacatatgaagact

SEQ ID NO: 162451 - DNA, 120 bp, Artificial Sequence
  ENSG00000107643_35 (sequence is synthesized)
taactattcagtgttgcctaggcattcgcctgcacaacattttgaggttagaacatagaatattttcagaaatactgttgtagtttgtgagtgttgttcattagttacacattagctata

SEQ ID NO: 162452 - DNA, 120 bp, Artificial Sequence
  ENSG00000107643_36 (sequence is synthesized)
gagtggatgcatgaagccccatgacaccagtaaacttctcttaccagtaggtaaaccaaacaccattctgtcattagcagccctcttaaatgttgcctctccgtatcctgttgcattttt

SEQ ID NO: 162453 - DNA, 120 bp, Artificial Sequence
  ENSG00000107643_37 (sequence is synthesized)
gtgtgcattgtgtttctactgatctctcttaggtttttacggaatcaaaggaaactaatttttccttaatagcaagaaagatgaagaggtaaagggcattgaagcagaaatgtatagttt

SEQ ID NO: 162454 - DNA, 120 bp, Artificial Sequence
  ENSG00000107643_38 (sequence is synthesized)
ggggtacgattagaaaactcgtaaggaaaacagaagtcctaatttcaaactgactgctcttcgttaagtgctcttaaggagagtctagtaacagtaacactttctggccatttctagttt

SEQ ID NO: 162455 - DNA, 120 bp, Artificial Sequence
  ENSG00000107643_39 (sequence is synthesized)
agattctcttcgttactgaaacttttgagaaatattacctgtggattaattttgcacaatgttctattctcataatgacttacaaattaaactaggtttttattgaactacctcacacta

SEQ ID NO: 162456 - DNA, 120 bp, Artificial Sequence
  ENSG00000107643_40 (sequence is synthesized)
attttctatgctttcccaagtaagctgttgccctgttagatctttactgagtgaattataaatgtgtgttaaatactttctagccaatgttgacacaataccagtaagtatgtaaagtat

SEQ ID NO: 162457 - DNA, 120 bp, Artificial Sequence
  ENSG00000107643_41 (sequence is synthesized)
ataccttacatcagtaagagacacgtgtaaaatctttgactgtatgtcttgcaaaattgtgctcgttgacattattactgtttttgtaagtagaaacctgctcgtgatatcggtccattt

SEQ ID NO: 162458 - DNA, 120 bp, Artificial Sequence
  ENSG00000107643_42 (sequence is synthesized)
acattttacaaaaggagtaaatcttagtaaaaattttacgaagaaataaattacttttgtaggcccaatatttggtatatttttgagaagctgttaatcttttagctgaataatgaagtt

SEQ ID NO: 162459 - DNA, 120 bp, Artificial Sequence
  ENSG00000107643_43 (sequence is synthesized)
agactgaattacgtgtctccctggactgtgacatctattttctcattacagtttatcctggtcagcagggtgtcacacctggaaacctgagtatgatagctgacatttgcttttctccct

SEQ ID NO: 162460 - DNA, 120 bp, Artificial Sequence
  ENSG00000107643_44 (sequence is synthesized)
ctgcgatgtcattcctcctccattcctctccttccctgtgttccgttccctctcctttcctctagacaaaacaaaatggggcactttttagggaatgctgagatcattattgtggttttt

SEQ ID NO: 162461 - DNA, 120 bp, Artificial Sequence
  ENSG00000107643_45 (sequence is synthesized)
catcattcatgccctagtcattaaacatgcaccactggaatgtaaacaatgttatctagtatgtcaattggttataatattttaaataaaaaagaaaaaagtggtatgaaaattatgaaa

SEQ ID NO: 162462 - DNA, 120 bp, Artificial Sequence
  ENSG00000107643_46 (sequence is synthesized)
cggcgaccaccccggacggcccctgtccccgctggcgggcttccctgtcgccgttcgctgcgctgccggtcttgcagccttacagtcatttgtaatggttacctcagattcccctgctgt

SEQ ID NO: 162463 - DNA, 120 bp, Artificial Sequence
  ENSG00000107643_47 (sequence is synthesized)
ggttaacgttaaacctaggaggtcagatgctctaagtgaacatgtttagtgctgtgcctgacaaaagcaagcaatcaaaatgggacttccttgagggcaggcctgtcttgcatctgtttc

SEQ ID NO: 162464 - DNA, 120 bp, Artificial Sequence
  ENSG00000107643_48 (sequence is synthesized)
tccaccacctagcctggaatataactggccttatgggtttctagaaggaaaatcacagaggtaaagcatcatttcatcacatcctgtcaaggatgaagaaactaaggaatcagaagttgc

SEQ ID NO: 162465 - DNA, 120 bp, Artificial Sequence
  ENSG00000107643_49 (sequence is synthesized)
acctgggtgcgctccgctgcccgccagcccgcctgccgccgcgagccccgcccgcctgtcctctcgcgtcctcttcgcgtgggtcctgcctccgcggcgggagaagaaaatggagcgggg

SEQ ID NO: 162466 - DNA, 120 bp, Artificial Sequence
  ENSG00000107643_50 (sequence is synthesized)
aactgtgaaggagcttctggtttttatatggtgatttattatcatgttagagaaatttgtgactttaatatgcataaccgaaatgtggtaatattaatatttttacataagtagaaagta

SEQ ID NO: 162467 - DNA, 120 bp, Artificial Sequence
  ENSG00000107643_51 (sequence is synthesized)
agtctgcttccttccttaacttaatcttaagttcccaagtttcccaccccagacacagacacattagtgctctgtctcatatttttttccatggtttgtgaatacacaaatgtgtttagt

SEQ ID NO: 162468 - DNA, 120 bp, Artificial Sequence
  ENSG00000107643_52 (sequence is synthesized)
gggaaaaggcatattcacaaggttacaataagtgagttttaggccttggccttcagggtcctggagtgtaaagactagaggaaaggagaccaagaaatcctaaccttacaacttagcaaa

SEQ ID NO: 162469 - DNA, 120 bp, Artificial Sequence
  ENSG00000107643_53 (sequence is synthesized)
aaactgaatcttttttataagggtcagagctttagaaaatttttttaaacctaagctaaacaaagaatggcaaaagaaaatgccacttttatcgaagcctttatttttattacaactgat

SEQ ID NO: 162470 - DNA, 120 bp, Artificial Sequence
  ENSG00000107643_54 (sequence is synthesized)
tattttctgttagtgtagaaaactcagtaaaacaggatgtgttctagaaatattgtctaggagatataatcatgttttctgataaattgacagaaaaggaaaaattttgtatattattat

SEQ ID NO: 162471 - DNA, 120 bp, Artificial Sequence
  ENSG00000107643_55 (sequence is synthesized)
agcattgtgtgcagtttgcagttagagccactatggatagtaattgtcattattcttagttgcttatcattttatttagaatttgtgagtttaagcttccattttaaggtaaaatcagtt

SEQ ID NO: 162472 - DNA, 120 bp, Artificial Sequence
  ENSG00000107643_56 (sequence is synthesized)
agtttgaacacacaataaataaggttaataaagcttatttattgatcatttctgtccacctacaatcattgccttttgcagggtgcctgtgagatataaaatttataactgccacatcct

SEQ ID NO: 162473 - DNA, 120 bp, Artificial Sequence
  ENSG00000107643_57 (sequence is synthesized)
atgtccttttcccagctgactcagaacacaacaaacttaaaggtactttttacaaatatgtacatttaatcccatttggggtgtgtagtgtgtgtgtatgggtttgtgtgtttatatgta

SEQ ID NO: 162474 - DNA, 120 bp, Artificial Sequence
  ENSG00000107643_58 (sequence is synthesized)
ttcatattcttatgggacatgaacccaaggttttctctggatggtggggaaaaaaatgaggtttttgttttttttttctttaatcttatatattttaatcatatgtataagataatttta

SEQ ID NO: 162475 - DNA, 120 bp, Artificial Sequence
  ENSG00000107643_59 (sequence is synthesized)
cagtaatatttttaaaacatatgctttttaaaaaatctcaaattgctgaaagttattaataatttgagaatctttacaaatatatgtacattaacaccattatgtttgcagccagtcagg

SEQ ID NO: 162476 - DNA, 120 bp, Artificial Sequence
  ENSG00000107643_60 (sequence is synthesized)
gttattttcttaatgtttacagaacatattgcattcttagagttagaatgacagttaggtttggaggagaccttttaattttaaataaaaatgtagatacatgatgatgatgtttttctg

SEQ ID NO: 162477 - DNA, 120 bp, Artificial Sequence
  ENSG00000107643_61 (sequence is synthesized)
tttcttcatgaagactacgtcaaataaactaatgaacatattcgagcccctcctacacaaaataaagttacctcccactgttttttgcaatcttgcctggatacctaaccagagaactag

SEQ ID NO: 162478 - DNA, 120 bp, Artificial Sequence
  ENSG00000107643_62 (sequence is synthesized)
gatgttgaatgctctgggggaacatcctaactcaggtataaaacaaattactgtatccaaaggaaaacagaattctgtgatctgtgatataaataaaatgtggcaatttcaagagctaga

SEQ ID NO: 162479 - DNA, 120 bp, Artificial Sequence
  ENSG00000107643_63 (sequence is synthesized)
tttataagtcatctgtgtggctaatatttcaaataactacagagttaaaatactcccagcatactgacttggttattattgccttgtgtttttcagccaccaccaaagatccctgacaag

SEQ ID NO: 162480 - DNA, 120 bp, Artificial Sequence
  ENSG00000107643_64 (sequence is synthesized)
tttttgtttgtacatttttctcagaagagggttcactacttttatacaattctcaaaagattccatgacccaaagaagatgataaatagtgttgatgtggcatccaccattaaggttaag

SEQ ID NO: 162481 - DNA, 120 bp, Artificial Sequence
  ENSG00000107643_65 (sequence is synthesized)
gtggcatccaccattaaggttaagtgtggtgtgccctgtgagtctgaatgtctacttaagaaccttaagtagacattaagaaccttaagaaggttttttgtttgtttttgtttttttgtt

SEQ ID NO: 162482 - DNA, 90 bp, Artificial Sequence
  ENSG00000107643_66 (sequence is synthesized)
ccgagtagctgggactgcaggcgcctgcccccaaatggggtttcaccttgttggtcaggcttgtctcaaattcctgacctcaggtgatcc

SEQ ID NO: 162483 - DNA, 120 bp, Artificial Sequence
  ENSG00000107643_67 (sequence is synthesized)
catgagccaccacacatggccgaaggttcttcttaagtagacattcagactcacaaggcacatcgcagttaacatcagaatcacttctgatgataatataagtgaagaatataagacagg

SEQ ID NO: 162484 - DNA, 120 bp, Artificial Sequence
  ENSG00000107643_68 (sequence is synthesized)
aggcgcatatattaataccagcagagcagctcccagtgtgtctcttcagttggaacagttgttgcagtggtctacttgctgtccagaagcctgataagagaaaaagattcccatggagaa

SEQ ID NO: 162485 - DNA, 120 bp, Artificial Sequence
  ENSG00000107643_69 (sequence is synthesized)
atgttcttcgaagtgataaccatgcttactcataaggagttgaaatgtagcttacctgctagttttcctccaataaaaatgtgtttatctttcattctgatttgttgtgaagcttttgca

SEQ ID NO: 162486 - DNA, 120 bp, Artificial Sequence
  ENSG00000107643_70 (sequence is synthesized)
cactctaatttaaatcttggtagcatatatctagttgagtacccacagtgcaccaggctctattccagggcccaggaaatggaagtcagtaagacacgtggttcaagccctccctgagac

SEQ ID NO: 162487 - DNA, 120 bp, Artificial Sequence
  ENSG00000107643_71 (sequence is synthesized)
agatggtagtacagaatggtatgtggtatgatgtgctgtagcacaagttgctggtagagtgaaaaagaaagcttctaccccagcactatcaaaccaacttcagaaacagtgaattacagg

SEQ ID NO: 162488 - DNA, 120 bp, Artificial Sequence
  ENSG00000107643_72 (sequence is synthesized)
tgactgtcattgtaaggacactgtttgaagtacttcacatgtataaaaatttccacttaaaccatacatgcgttgtgagattggctcttagactttgaaaagttcatttttgtttacttc

SEQ ID NO: 162489 - DNA, 120 bp, Artificial Sequence
  ENSG00000107643_73 (sequence is synthesized)
ttgaggtgaaattcatgtaacaaaattaaccattctaaagtggcatttttagtacattcacagtgctgtacaactaccacccatattaaattctaaaatattttcattacccccaaaaaa

SEQ ID NO: 162490 - DNA, 120 bp, Artificial Sequence
  ENSG00000107643_74 (sequence is synthesized)
gaagaatgggaaaaggcatattcacaaggttacaataaggtgcctgtgagatataaaatttataactgccacatcctttcttaggaatttttaaatttctattttcttgtaatatgaata

SEQ ID NO: 162491 - DNA, 120 bp, Artificial Sequence
  ENSG00000107651_0 (sequence is synthesized)
agtggtgtggtaccgggtacccggagacgtgtatcggacggtgggccgcagccatggccgagagaaaacctaacggtggcagcggcggcgcctccacttcctcatcgggcactaacttac

SEQ ID NO: 162492 - DNA, 120 bp, Artificial Sequence
  ENSG00000107651_1 (sequence is synthesized)
ttttctcctcctcggccacggagttcagcttcaatgtgcccttcatcccagtcacccaggcctccgcttctccggcctccctgctcttaccgggagaggattccacagatgttggtgagg

SEQ ID NO: 162493 - DNA, 120 bp, Artificial Sequence
  ENSG00000107651_2 (sequence is synthesized)
aggacagcttccttggtcagacttctattcacacatctgccccacagacatttagttacttctctcaggtatcaagcagcagtgatccttttgggaatattggacagtcaccattaacaa

SEQ ID NO: 162494 - DNA, 120 bp, Artificial Sequence
  ENSG00000107651_3 (sequence is synthesized)
ctgcagcaacctcagttggacaatcaggattccccaagcccctgactgctctcccttttacaactggatcccaagatgtctcgaatgcattttcaccatccatttcgaaggctcaacctg

SEQ ID NO: 162495 - DNA, 120 bp, Artificial Sequence
  ENSG00000107651_4 (sequence is synthesized)
gtgctccaccttcctcactgatgggaataaattcttatctgccttctcagccaagtagtctccctccttcatattttgggaaccaaccccaaggaattccccaaccaggatacaatccat

SEQ ID NO: 162496 - DNA, 120 bp, Artificial Sequence
  ENSG00000107651_5 (sequence is synthesized)
atcgccatacccctggcagcagcagggctaatccttacattgcaccaccccagctgcagcagtgccaaacaccaggccctcctgctcatcctccaccttctggaccccctgttcagatgt

SEQ ID NO: 162497 - DNA, 120 bp, Artificial Sequence
  ENSG00000107651_6 (sequence is synthesized)
accagatgcctccaggatctttgccaccggttccttcttcagtgcagtcaccggcacagcagcaggtacctgccagacctggggctccctctgttcaagtgccatctccttttctacttc

SEQ ID NO: 162498 - DNA, 120 bp, Artificial Sequence
  ENSG00000107651_7 (sequence is synthesized)
aaaaccaatatgagcctgttcagccccactggttttactgcaaggaggtagaatacaaacaactgtggatgccttttagtgtgttcgactctttgaatcttgaagaaatctataattcag

SEQ ID NO: 162499 - DNA, 120 bp, Artificial Sequence
  ENSG00000107651_8 (sequence is synthesized)
ttcagccagatccggagagcgtggttcttggcacggatggagggcgctacgatgtttacctctatgaccgaataaggaaggctgcctactgggaagaggagccagccgaagtgagacgct

SEQ ID NO: 162500 - DNA, 120 bp, Artificial Sequence
  ENSG00000107651_9 (sequence is synthesized)
gtacttggttttacaagggggacacagatagtcgatttattccctatactgaggagttcagtgaaaaactagaggctgaatataaaaaagctgtaaccactaatcagtggcaccgaagat

SEQ ID NO: 162501 - DNA, 120 bp, Artificial Sequence
  ENSG00000107651_10 (sequence is synthesized)
tagagtttccaagtggagagacaattgttatgcacaatccaaaggttattgttcagttccagccctcctcagtgccagatgaatggggcaccacgcaagatggacagacaaggcccaggg

SEQ ID NO: 162502 - DNA, 120 bp, Artificial Sequence
  ENSG00000107651_11 (sequence is synthesized)
ttgtaaagcgtggaattgatgataaccttgatgaaattcccgacggggagatgcctcaagttgaccatttggtgtttgtggtgcatggcattggacctgtgtgtgacttacgctttagga

SEQ ID NO: 162503 - DNA, 120 bp, Artificial Sequence
  ENSG00000107651_12 (sequence is synthesized)
gcattattgagtgtgtggatgattttagggtggtttctctcaaattgctgcggacacatttcaagaaatctttagatgacgggaaagtaagcagagtggagttccttccagttcattggc

SEQ ID NO: 162504 - DNA, 120 bp, Artificial Sequence
  ENSG00000107651_13 (sequence is synthesized)
atagttctttgggtggggacgccacaggtgtggacaggaatattaagaaaatcactttgccaagtattggtcgatttcgtcactttaccaatgaaactttgctagatattttattttata

SEQ ID NO: 162505 - DNA, 120 bp, Artificial Sequence
  ENSG00000107651_14 (sequence is synthesized)
acagccccacctactgtcagacaattgtggaaaaagtaggaatggagataaaccatctgcatgcactctttatgagtcggaacccagacttcaaaggaggtgtctctgttgctggtcaca

SEQ ID NO: 162506 - DNA, 120 bp, Artificial Sequence
  ENSG00000107651_15 (sequence is synthesized)
gtttaggttctttaatattgtttgacatcctgtctaatcaaaaagatttgaatttatcaaagtgccctggacctcttgctgttgctaatggagttgtgaagcagctacattttcaggaaa

SEQ ID NO: 162507 - DNA, 120 bp, Artificial Sequence
  ENSG00000107651_16 (sequence is synthesized)
agcagatgcctgaagagccaaagctgactttggatgagtcgtatgaccttgttgttgaaaataaagaagtcctaactttgcaagaaactctggaagcacttagcctctctgaatatttta

SEQ ID NO: 162508 - DNA, 120 bp, Artificial Sequence
  ENSG00000107651_17 (sequence is synthesized)
gcacttttgaaaaggaaaagattgatatggagtccctgcttatgtgtacagttgatgacctgaaggaaatggggataccccttggacccagaaagaagatagctaactttgtagaacata

SEQ ID NO: 162509 - DNA, 120 bp, Artificial Sequence
  ENSG00000107651_18 (sequence is synthesized)
aagcagccaaactgaaaaaagcagcgtcagaaaagaaggcagtggcggccacttctacaaaaggacaagagcaaagtgcccagaagactaaagacatggcttccctcccctcagaatcca

SEQ ID NO: 162510 - DNA, 120 bp, Artificial Sequence
  ENSG00000107651_19 (sequence is synthesized)
atgagccaaagaggaaacttccagttggtgcttgcgtgtcttctgtgtgtgtgaattatgaatcttttgaagttggcgccggacaggtttctgttgcttacaactcattagattttgaac

SEQ ID NO: 162511 - DNA, 120 bp, Artificial Sequence
  ENSG00000107651_20 (sequence is synthesized)
cagagatattctttgccttggggtctccaattgctatgtttctcactattcgaggagttgataggatagatgagaattacagccttcctacctgtaaagggttcttcaatatttatcatc

SEQ ID NO: 162512 - DNA, 120 bp, Artificial Sequence
  ENSG00000107651_21 (sequence is synthesized)
cgcttgatccagtggcatatagattagaacctatgattgttccagatttggacctaaaagctgttctcattccacatcacaaaggcagaaaaagacttcatttagaattgaaagagagtc

SEQ ID NO: 162513 - DNA, 120 bp, Artificial Sequence
  ENSG00000107651_22 (sequence is synthesized)
tctctcgtatgggatctgatttgaagcagggttttattagctctctcaaaagtgcttggcagacattaaatgagtttgcccgtgctcatacgtcttcaacccagttgcaagaagaattgg

SEQ ID NO: 162514 - DNA, 120 bp, Artificial Sequence
  ENSG00000107651_23 (sequence is synthesized)
agaaggtggccaatcagatcaaagaagaagaagaaaagcaagtagttgaagcagaaaaggttgttgaaagtccagatttttccaaggatgaggactacttaggaaaggttggaatgttaa

SEQ ID NO: 162515 - DNA, 120 bp, Artificial Sequence
  ENSG00000107651_24 (sequence is synthesized)
atggaggccgccgaattgactacgttctccaagaaaaaccaatagagagttttaatgaataccttttcgctcttcagagtcacttatgctattgggaatctgaagatactgctctgttac

SEQ ID NO: 162516 - DNA, 120 bp, Artificial Sequence
  ENSG00000107651_25 (sequence is synthesized)
tacttaaagaaatttatcgaacaatgaacattagtccagaacagccccagcattgatcaaacttcagttttactgtactttcttgtctgcacagaaagtcccagtacaacttccattgct

SEQ ID NO: 162517 - DNA, 120 bp, Artificial Sequence
  ENSG00000107651_26 (sequence is synthesized)
gagaaaatcctcagaggactttcccacttcgctcctgtgatggatgacagaagagtgattcattaacaattgctcagccacaattctcggatatagggattcaaaagacaggacacagaa

SEQ ID NO: 162518 - DNA, 120 bp, Artificial Sequence
  ENSG00000107651_27 (sequence is synthesized)
ctaacacagtgaaaaaaatcagtaccacatttggacagtataggtgagaaaacataattataaaaatgatgccatgaaaaattccacagatcagtttagttgtatagttgtcaaagttat

SEQ ID NO: 162519 - DNA, 120 bp, Artificial Sequence
  ENSG00000107651_28 (sequence is synthesized)
atgtgatatcaatgaagaaatatttgtagcatgtaaacggttatttctgtttcttaaaaagtattgttagtgggctattaaacttggatttttctttttattaatgcagtatgttctttt

SEQ ID NO: 162520 - DNA, 120 bp, Artificial Sequence
  ENSG00000107651_29 (sequence is synthesized)
atgtgaattgtacttctgagctgccttaatgcaaggtcatttatatttgttaagaggaaataatcaagatcactcatatcccaactgaatctgaggttttataaatccctcaaacgattg

SEQ ID NO: 162521 - DNA, 120 bp, Artificial Sequence
  ENSG00000107651_30 (sequence is synthesized)
ctgagagcctgattgtggaaagaagtgagatgcaccttattttcaagaagtcctgggaagcgctctcctagcacgtccatttccaggaggagaagcaagcagatgagaggttttccattt

SEQ ID NO: 162522 - DNA, 120 bp, Artificial Sequence
  ENSG00000107651_31 (sequence is synthesized)
tgtcatccaaggtagctgtgcacttgccttgttgctgaagttccaataatgtgaaaaccaaagtagaggtttttttcttcttctttttgttttctattaatttcacttataccaaagtgt

SEQ ID NO: 162523 - DNA, 120 bp, Artificial Sequence
  ENSG00000107651_32 (sequence is synthesized)
ttgaaagtatgaaatgtgttgcttctgagttatataaggctacttcatgacaagactgctttgtaatatttcactttgttttactacaaattcagatcactttgttttactataaattca

SEQ ID NO: 162524 - DNA, 120 bp, Artificial Sequence
  ENSG00000107651_33 (sequence is synthesized)
gattatccaaatattttcctaatactatgtgggaatgctgattttcttttgttacgtagtggaaacattttgcattgtttacatagttctcatggaacatggaaatttttgaaagtgata

SEQ ID NO: 162525 - DNA, 120 bp, Artificial Sequence
  ENSG00000107651_34 (sequence is synthesized)
tatgatacacattttttgtgtatgtattctaattagtgtgaataaagcagtaacattaatgcattttttaagcagcaaacttatgtatttctcttgtcttccttaaaagtgtccccatga

SEQ ID NO: 162526 - DNA, 120 bp, Artificial Sequence
  ENSG00000107651_35 (sequence is synthesized)
actcagtgtttattcccttttcattttgagtacctgcttatatggtcagtatgtaacgttagcattggctcctaatggtagaattagaacagcaagattgtagagctgtaattgactcca

SEQ ID NO: 162527 - DNA, 120 bp, Artificial Sequence
  ENSG00000107651_36 (sequence is synthesized)
gacaacatagatttcagccacctcattctacagctgaggccaggacaataaatgcctttcccagactgggtagtggcagatctgggatggaatatggttttcttgattccctttcagcct

SEQ ID NO: 162528 - DNA, 120 bp, Artificial Sequence
  ENSG00000107651_37 (sequence is synthesized)
tcatttctctctctcaggactactactttttaattacttttcacttaatttcccaatactgatgaaataaagaaaaatgagggttatttatatacatttcaataaaatccaatttgattt

SEQ ID NO: 162529 - DNA, 120 bp, Artificial Sequence
  ENSG00000107651_38 (sequence is synthesized)
ttcaacttacatctgatttttgtttgtgtcattcagcctgtcttctgagtaatgggcagagaaggaccagggttcgtagaagaagcatgtggcagctgagtggcagcagtcttgcccttt

SEQ ID NO: 162530 - DNA, 120 bp, Artificial Sequence
  ENSG00000107651_39 (sequence is synthesized)
cattttaatacttgagtacacagaaaatagaatttttgagtgactctgcctgtggatatatatactcatacatacatatatatatatacacacacacatatgtatgtatgtatgtattac

SEQ ID NO: 162531 - DNA, 120 bp, Artificial Sequence
  ENSG00000107651_40 (sequence is synthesized)
tattcagtctcttaaaaaccaaaaaacagtagatcccctgagggtagagtctttatgtatgaacatattgttcactgttgtaaccaccttgcaggatttcagtctataaactaggtgaga

SEQ ID NO: 162532 - DNA, 120 bp, Artificial Sequence
  ENSG00000107651_41 (sequence is synthesized)
atccagctgctgagtgaagcttgatctctgcctcttcctcaggagcagctcatcccctgacaacctcccctcccagcccctaatctggtttaatgccctccttttccccagataaagaaa

SEQ ID NO: 162533 - DNA, 120 bp, Artificial Sequence
  ENSG00000107651_42 (sequence is synthesized)
gtcatgtctgtagttattccaaaagtgtttcatgtgtagagtttggcacaaaaagtaaaaagcgccagcatctgaagtcaaaggtgaaagagtcatcacagtactgatgaagacacccag

SEQ ID NO: 162534 - DNA, 120 bp, Artificial Sequence
  ENSG00000107651_43 (sequence is synthesized)
gcctcgtcagctatgttaacgtgctgtatgacaagaggaacctgctttctaagtctgctggacacgcgtgcttcttgaatccaaccagacaagcatgttttctcaaaaccacagtataag

SEQ ID NO: 162535 - DNA, 120 bp, Artificial Sequence
  ENSG00000107651_44 (sequence is synthesized)
acaaggaaactgcacagattcgagtgatttttgaggtaagtatgttattggaaaggtgtgatctatatagaaccctgtacatgaaaaggaggagatgccgctatcttggcagggatgatc

SEQ ID NO: 162536 - DNA, 120 bp, Artificial Sequence
  ENSG00000107651_45 (sequence is synthesized)
atgtatttgaaatagtaactcacagcatttggtctcatgataagagtactgaagattatcccagaaaacctaggatgattggtatttatagtaccattgtttcaggtttttatgacttga

SEQ ID NO: 162537 - DNA, 120 bp, Artificial Sequence
  ENSG00000107651_46 (sequence is synthesized)
ggcatctaactatcttaatgctgtactttagtgtttaccaagcagctttctggtggaaacttgaactgcagacactgagtgttttggttttcctccaagttatagttctcattgtaactt

SEQ ID NO: 162538 - DNA, 120 bp, Artificial Sequence
  ENSG00000107651_47 (sequence is synthesized)
aataagttggcattccagcttagtttgagtcagtttcccagggctgggtcctcagaggagagtggatagaattcagttcctctatgagctggggtgctgacattgtgttcctgctgttga

SEQ ID NO: 162539 - DNA, 120 bp, Artificial Sequence
  ENSG00000107651_48 (sequence is synthesized)
gtgttcctgctgttgactgtccctgcggtgcacgggacagactgtcagctaacctgtcttcatgacatttctataatactcctcagggggttaaccccatctctactaaaaataaaaaaa

SEQ ID NO: 162540 - DNA, 61 bp, Artificial Sequence
  ENSG00000107651_49 (sequence is synthesized)
tgtgcctgtagtcccagctggatctcgccactgcactctagcctgagtgacagagcgagac

SEQ ID NO: 162541 - DNA, 120 bp, Artificial Sequence
  ENSG00000107651_50 (sequence is synthesized)
agactctgtctcaaaaaaaaataaatgaataaaaaataaaacagcaactcttgcagatttcccgaatgtattggtcccagagaacactgaaaataatgtcatgttgttaacaccagtggg

SEQ ID NO: 162542 - DNA, 120 bp, Artificial Sequence
  ENSG00000107651_51 (sequence is synthesized)
agtttgggaaataattccagctctttaatacttctttcagcttcagattaagtgaaatgagtttcacatatttcaatatatgaaattttatgatgacacataaaacaggccaggggttat

SEQ ID NO: 162543 - DNA, 120 bp, Artificial Sequence
  ENSG00000107651_52 (sequence is synthesized)
tgaggacacatctgtgagatagtgggcaatgctacatattcgttagtggatgtgctgcagttcaggttcatggacaggtgggactggtgtggttgggataacccaccatgtttgtctttc

SEQ ID NO: 162544 - DNA, 120 bp, Artificial Sequence
  ENSG00000107651_53 (sequence is synthesized)
atttcttgtataaagagtggtttttaaaagaccttactatggaattttcacaaatactcaaaagtatggagaatggtacagtgaatccccatgtgcccttttcccagcttcaggggtggt

SEQ ID NO: 162545 - DNA, 60 bp, Artificial Sequence
  ENSG00000107651_54 (sequence is synthesized)
gtgaatccccatgtgcccttttcccagcttcaggggtggtgtcagtgatggggagggacc

SEQ ID NO: 162546 - DNA, 86 bp, Artificial Sequence
  ENSG00000107651_55 (sequence is synthesized)
gatcatgggggctgtttcccaagatctgatggttttaaaagtggcagttttccctgcactctctcctgccaccttgtgaagaaggt

SEQ ID NO: 162547 - DNA, 120 bp, Artificial Sequence
  ENSG00000107651_56 (sequence is synthesized)
atgattgtaagtttcctgaggtctccccaaccatgcagaactgtgagtcacttgaaccccttttgtttataaattgcccagtctcaggtagtaccttgatagcagtgtgaaaatggacta

SEQ ID NO: 162548 - DNA, 120 bp, Artificial Sequence
  ENSG00000107651_57 (sequence is synthesized)
accttgatagcagtgtgaaaatggactaatacagtcagggacctaaaagacaggtaaagagatgtggccaggtgaagacggaaaaaggacagtgcattccagacctgtggaaagacgcga

SEQ ID NO: 162549 - DNA, 120 bp, Artificial Sequence
  ENSG00000107651_58 (sequence is synthesized)
ggttggaaagaacatcacaactggggcgactgaagaaattatgttgttaagcacgaaatgcagagagagagctatgtgaatgtgttgagtgtgattttcattaaacaatttttaaagaaa

SEQ ID NO: 162550 - DNA, 120 bp, Artificial Sequence
  ENSG00000107651_59 (sequence is synthesized)
gaacagagagagcctgctgcctccacctcttgttctagttcgcttttatatgccaagagggacaaattgttcctctaatttgataggggtaatgaggcttattctctttgaagggtcatg

SEQ ID NO: 162551 - DNA, 120 bp, Artificial Sequence
  ENSG00000107651_60 (sequence is synthesized)
aatttctttggcaagtttgtgatgacgaaagggatatctagaatattgccattaggaaaatccaaacaaattcccatcttttatgtaggtttaaaaattttttttgataggggagatgcc

SEQ ID NO: 162552 - DNA, 120 bp, Artificial Sequence
  ENSG00000107651_61 (sequence is synthesized)
gatattctttgccttggggtctccaattgctatgtttctcactattcgaggagttgataggatagatgagaattacagccttcctacctgtaaagggttcttcaatatttatcatccgaa

SEQ ID NO: 162553 - DNA, 120 bp, Artificial Sequence
  ENSG00000107651_62 (sequence is synthesized)
gtttctttaaaaaatgtaggtcctatatacattggtgagtaacatcattcacagtggagcggactttacttacaagacagcttgttttgatgctgttcacagagaagattactttttaag

SEQ ID NO: 162554 - DNA, 120 bp, Artificial Sequence
  ENSG00000107651_63 (sequence is synthesized)
tggtgtcatcactcatgaggtgctaatcgtggcatctgtgtctaaagatagaatatgatttgcagagacacatcacagatctaataaggtgcttgtgtcaagccttcaatagaacctagg

SEQ ID NO: 162555 - DNA, 120 bp, Artificial Sequence
  ENSG00000107651_64 (sequence is synthesized)
ccgctgggatttgttgttgatagaagatgccaagcatatggacattttcaaattagtattcagtaaaaggcttgaaattaacctctgatttgtgaaaataaataaatagaattggaagaa

SEQ ID NO: 162556 - DNA, 120 bp, Artificial Sequence
  ENSG00000107669_0 (sequence is synthesized)
cgctgcattgtggggtggcggcggcggccgcgctagcgacgcggggccgggcggctgagcgttcgcggggccgaggccatggctttctgggcggggggttcgcccagcgtcgtggactat

SEQ ID NO: 162557 - DNA, 120 bp, Artificial Sequence
  ENSG00000107669_1 (sequence is synthesized)
ttctgggcggggggttcgcccagcgtcgtggactatttccctagcgaggacttctaccgctgcggctactgcaagaacgagtcgggcagccgctccaatggcatgtgggcacattccatg

SEQ ID NO: 162558 - DNA, 120 bp, Artificial Sequence
  ENSG00000107669_2 (sequence is synthesized)
acagtacaggattatcaggatctcatagaccgaggatggcgaagaagtggaaaatatgtgtacaaacctgtcatgaatcaaacatgttgtcctcagtacacaataaggtgccgaccttta

SEQ ID NO: 162559 - DNA, 120 bp, Artificial Sequence
  ENSG00000107669_3 (sequence is synthesized)
caatttcagccttcaaaatctcacaagaaggttttgaaaaaaatgttgaaatttctagctaaaggggaggttcccaaaggaagttgtgaggatgagcccatggattccacaatggatgat

SEQ ID NO: 162560 - DNA, 120 bp, Artificial Sequence
  ENSG00000107669_4 (sequence is synthesized)
gctgttgcgggtgactttgcattgataaataaactggatatacagtgtgatcttaaaacactcagtgatgacatcaaagagagtttagagagtgaaggaaaaaattcaaagaaagaagaa

SEQ ID NO: 162561 - DNA, 120 bp, Artificial Sequence
  ENSG00000107669_5 (sequence is synthesized)
cctcaggaattacttcagtcacaagatttcgtaggagagaagttgggctctggtgaaccgtcacattcagttaaagttcacacagttcctaagccaggcaaaggggctgatttgagtaag

SEQ ID NO: 162562 - DNA, 120 bp, Artificial Sequence
  ENSG00000107669_6 (sequence is synthesized)
cctccatgtcgaaaagcaaaggaaatccggaaagaaaggaaaaggttaaaactaatgcagcagaacccagctggagaacttgagggtttccaggctcaaggtcacccaccatctttgttt

SEQ ID NO: 162563 - DNA, 120 bp, Artificial Sequence
  ENSG00000107669_7 (sequence is synthesized)
ccaccaaaggctaaatccaaccagccaaaatcactcgaagatttaatttttgagtctttaccagagaatgcatcacacaagttagaggtgagggtggtgagatcatctccaccaagttcg

SEQ ID NO: 162564 - DNA, 120 bp, Artificial Sequence
  ENSG00000107669_8 (sequence is synthesized)
cagttcaaagccacacttctggagtcttaccaggtctataaacgttaccagatggttattcacaagaacccacctgatacgccaaccgaaagccagttcacaagattcctttgcagttca

SEQ ID NO: 162565 - DNA, 120 bp, Artificial Sequence
  ENSG00000107669_9 (sequence is synthesized)
cccttggaggcagagactccccctaatgggccagattgtggctatggctcctttcaccagcagtactggcttgacggaaagatcattgctgtgggggtgattgacatcctcccaaactgt

SEQ ID NO: 162566 - DNA, 120 bp, Artificial Sequence
  ENSG00000107669_10 (sequence is synthesized)
gtatcatctgtgtatttgtactacgatcctgattattcgtttttgtctttgggcgtctactctgcactacgagaaattgcttttactaggcagcttcatgagaaaacttctcaactcagc

SEQ ID NO: 162567 - DNA, 120 bp, Artificial Sequence
  ENSG00000107669_11 (sequence is synthesized)
tattattatatgggtttctacattcattcatgtcccaagatgaaatataagggtcagtatagaccttctgatttgctgtgccctgagacatatgtttgggtacccattgagcaatgcctg

SEQ ID NO: 162568 - DNA, 120 bp, Artificial Sequence
  ENSG00000107669_12 (sequence is synthesized)
ccttcacttgaaaactccaagtactgccgtttcaaccaggacccagaagcagtggatgaggatcgcagtacggaacctgaccgattgcaggtgtttcacaagagagccatcatgccttac

SEQ ID NO: 162569 - DNA, 120 bp, Artificial Sequence
  ENSG00000107669_13 (sequence is synthesized)
ggtgtttataagaaacagcagaaagacccaagtgaggaggctgctgttctgcagtacgccagcctggtggggcagaagtgctccgagcggatgctgctgttcagaaactgacctgttcac

SEQ ID NO: 162570 - DNA, 120 bp, Artificial Sequence
  ENSG00000107669_14 (sequence is synthesized)
ctctgccgggaagttcctgtgttgtgctgatgatttgtgccaggatacatattcagtacctgtggggaaataactgtcaccacccacaaattagacattttttattttgactatctatgg

SEQ ID NO: 162571 - DNA, 120 bp, Artificial Sequence
  ENSG00000107669_15 (sequence is synthesized)
cttttaaaaaatattttgtggcaatgtatctgtgagaatctcatagttaatataaagattttaaaactgcattatgacctagcccccataattgggatttatcattttggaggattcttt

SEQ ID NO: 162572 - DNA, 120 bp, Artificial Sequence
  ENSG00000107669_16 (sequence is synthesized)
ctagagcaagatacgctcaaattctcctgtttgtattttgtaaaatgaagaagtgaatctaagtaacttaatcacagttgtgcattttttttggttctgttagagaaattaaaacagact

SEQ ID NO: 162573 - DNA, 120 bp, Artificial Sequence
  ENSG00000107669_17 (sequence is synthesized)
gtttcctcaggcccattttaaactgaacttatgctaggaaaccttaagtatggggaaggtagaaagttcatttcatcacttagaaaatatgtcttctcaagaacaaaactgtgctgttac

SEQ ID NO: 162574 - DNA, 120 bp, Artificial Sequence
  ENSG00000107669_18 (sequence is synthesized)
aactcagtgttcaatgtgaaattgctgccaaatgttatgtagtttaatagagaacttgaaaaaataaaacattaaaatggagcttgtgttagcatcaggtatccatttgttcaggacagt

SEQ ID NO: 162575 - DNA, 120 bp, Artificial Sequence
  ENSG00000107669_19 (sequence is synthesized)
cctgttcatgtctgttgtcttggcatagttttttcccctagaatatagtactcccttttactctaaaaaatatcccagtttggacaataaaatacataattactctagttatattatttg

SEQ ID NO: 162576 - DNA, 120 bp, Artificial Sequence
  ENSG00000107669_20 (sequence is synthesized)
aaaaatgtaagaaattgaatttttttaaagaaaaatgttggttcctgccttgatctaagtctcatccaaaggaaataaatagtcactagttttttatcttacaactcaggacatttgtct

SEQ ID NO: 162577 - DNA, 120 bp, Artificial Sequence
  ENSG00000107669_21 (sequence is synthesized)
ttggttattaatggaaattagtatgtgattactttcatagttatgccacaaatcacattgaagaaggaatcattccgacctctgttccaggacaagagctagaacaatccatttcttgtc

SEQ ID NO: 162578 - DNA, 120 bp, Artificial Sequence
  ENSG00000107669_22 (sequence is synthesized)
ctttgatttgagagtcacagtcagggtggcttctgccacccttagtaactcagagcagaggccagccccctccttccctcactttcttttgctgagtcctttgcccacctgtcaaggtgg

SEQ ID NO: 162579 - DNA, 120 bp, Artificial Sequence
  ENSG00000107669_23 (sequence is synthesized)
caggcactgtgctgggtacaggaggacagtcagacatgtcccttcttagctatagtcgagctgtctgggaaacaggatgaaaaacaggagggttattttcttgtgccctctttgtcagct

SEQ ID NO: 162580 - DNA, 120 bp, Artificial Sequence
  ENSG00000107669_24 (sequence is synthesized)
gatcccctcttctgctaccagctatttggccagcaagccgtttttagtccccactttgcccatttttctgttttggttcatcgtttcttaaaagccatgttataaaacatggtagtttga

SEQ ID NO: 162581 - DNA, 120 bp, Artificial Sequence
  ENSG00000107669_25 (sequence is synthesized)
atcctgttgctaattttaaactttcctctaaaatgtactgaattttgacaaaaatttgaaaatatcctcagctaactagaataaaaaggatcataaaacaatgattttaaaactgaaatc

SEQ ID NO: 162582 - DNA, 120 bp, Artificial Sequence
  ENSG00000107669_26 (sequence is synthesized)
tctagaaactcaacatccaagtcagccgcatttcttcattcagagtgtgtgtgtcacacctgccaaggtgctgcgtactctgctaaccgagctagagtagtgagcaaagccattttctct

SEQ ID NO: 162583 - DNA, 120 bp, Artificial Sequence
  ENSG00000107669_27 (sequence is synthesized)
gatcacaagattttacatttttctgggattttgacctgcaaagtagtctcgtaagagcatttgagagacttacttggaactgccttcagaatctatagagccttttttctctttttcctc

SEQ ID NO: 162584 - DNA, 120 bp, Artificial Sequence
  ENSG00000107669_28 (sequence is synthesized)
taaaatgaaaagagcttcattttatgattataacaaaagtgacactgtaagcagttagaacattaagaagtataaataaaaagtaaaaatcatctacaaccctaccatactcagaaggag

SEQ ID NO: 162585 - DNA, 120 bp, Artificial Sequence
  ENSG00000107669_29 (sequence is synthesized)
aaaagaactgtcatgtatgtatacacacatacctatgtaattttaatataaatagaattatgttctacatgctgttttatttcctcaacagtaaattatggacatgtctgaaatgtgaaa

SEQ ID NO: 162586 - DNA, 120 bp, Artificial Sequence
  ENSG00000107669_30 (sequence is synthesized)
taaatttcaaaataaggcttcagaaagtgtagtaagtaatctctgcattattaaaaataagcagggtagggctggtacttggctcgcttagcatttgaatgtccaacttggtgttatcac

SEQ ID NO: 162587 - DNA, 120 bp, Artificial Sequence
  ENSG00000107669_31 (sequence is synthesized)
tgtatcttccctccatttgtctttgtgattagcatgtaaaatggtattcataaagatcacaacccttgaatatcagatgaagagaaaacttgactccaacatcttaccacaactctggtt

SEQ ID NO: 162588 - DNA, 120 bp, Artificial Sequence
  ENSG00000107669_32 (sequence is synthesized)
tcttcctgcagaattcattttcagaggaaaatgatgaatcatccctgtctgtgaaccactgtgctttccttgagggtggcattgtaggttgacaccagcaaagactcagagtgacttgag

SEQ ID NO: 162589 - DNA, 120 bp, Artificial Sequence
  ENSG00000107669_33 (sequence is synthesized)
cattggagatccttctacttggctgctgtattcatgcattatgttggtttgagaatagctagtgtattgatccaagtagtcaaagtgtcttaaaaggacacctatttgtccttttgagcc

SEQ ID NO: 162590 - DNA, 120 bp, Artificial Sequence
  ENSG00000107669_34 (sequence is synthesized)
ccagctgagtgaatactgatagtggactagaaaagcatagtcaagaaaagtgacccaccttgttacttgaccagcagtctagctgagagatctgattttatgttcgtaactttctgtaaa

SEQ ID NO: 162591 - DNA, 120 bp, Artificial Sequence
  ENSG00000107669_35 (sequence is synthesized)
gaaagacacaaggacttttcaaagacagtttatatctttccaaggcaggaagctttgcatttgcaatcttagtgttgtgtccctttctgattttcaaatacatcacacctgccttcctgt

SEQ ID NO: 162592 - DNA, 120 bp, Artificial Sequence
  ENSG00000107669_36 (sequence is synthesized)
tttgggagcaaagatgtaatttcaattccccttgctaccgtccttatttaaattatttccattctaagagatttttgttatttttttaaatgtaatctgagcacttttttgtattctaaa

SEQ ID NO: 162593 - DNA, 120 bp, Artificial Sequence
  ENSG00000107669_37 (sequence is synthesized)
atatgttgtacatttgattaaaattatttagataaatattactatgttgacttttaaatagctttatcctatttttcattcattttgcaaatatttgttgtgtgtagtttcttaacgtgt

SEQ ID NO: 162594 - DNA, 120 bp, Artificial Sequence
  ENSG00000107669_38 (sequence is synthesized)
tgtgtagtttcttaacgtgtcagaatctattatgtaaaagaacctttccagatttctgaacagtatatgctttgattttataggctttatattatttcagtatgaataaagataaggaat

SEQ ID NO: 162595 - DNA, 120 bp, Artificial Sequence
  ENSG00000107669_39 (sequence is synthesized)
atgaaacagttaactaaaatgtatctgtcgttgctaacttgaaaaatgaagtagaaacagttggaaaatgtttgaattagaagttattcaagtgcacactcttttctaaaagaaagccaa

SEQ ID NO: 162596 - DNA, 120 bp, Artificial Sequence
  ENSG00000107669_40 (sequence is synthesized)
tgactataaggcaaaagaagtttgactgcatgtggtattttttgctcttgtatatgctttttgaacaagctatttgataaagcctgaatggaaaaaataaagctgtttctatctgcagtg

SEQ ID NO: 162597 - DNA, 120 bp, Artificial Sequence
  ENSG00000107669_41 (sequence is synthesized)
acctgcttgtgttcttgtattcagggcactggagtgcgtgccagctggtctggaagcagctccagcaagtcacttacacggtggccaggggcggcctgactttcaatccgagacccgccg

SEQ ID NO: 162598 - DNA, 120 bp, Artificial Sequence
  ENSG00000107669_42 (sequence is synthesized)
ggaatgactttgggataatcacaacctccggtcctcagtttccttacctgtgaaatggggctgataacgcacagctgtgggaagcaccggcccaaacgcagggcttggggacacgaccac

SEQ ID NO: 162599 - DNA, 120 bp, Artificial Sequence
  ENSG00000107669_43 (sequence is synthesized)
cgctctccacccctcccgccgcgggccccagcgcttcgccgaggtcggccccgggcgccaagaggcgtggtcggcccgagcggaccctcgcggcggccatggcgtcggtggtggaataca

SEQ ID NO: 162600 - DNA, 84 bp, Artificial Sequence
  ENSG00000107669_44 (sequence is synthesized)
tgcctgccttcacttgaaaactccaagtactgccgtttcaaccaggacccagaagcagcaccctcacagacacaccgaggatcg

SEQ ID NO: 162601 - DNA, 120 bp, Artificial Sequence
  ENSG00000107669_45 (sequence is synthesized)
aaaaagcattaaaattctgtaaacattaatggtcttcctgcatcctgtttataagcaaatttgaaatttaaaaaatttgtgtgatgttagaaggcagcaataaatgtagaaaattaaaaa

SEQ ID NO: 162602 - DNA, 120 bp, Artificial Sequence
  ENSG00000107672_0 (sequence is synthesized)
agtttctggcgcgaacttccgccgttccgaagttgcacggtgaattggcgctatgtctggggacagcagcggccgcgggccagagggccggggccggggccgcgacccgcatcgggatcg

SEQ ID NO: 162603 - DNA, 120 bp, Artificial Sequence
  ENSG00000107672_1 (sequence is synthesized)
cacccgctcccgctcccgctcgcggtcccctttgtcgcccaggtcccgccgcggctctgcgcgggagcgcagagaggccccagagcgcccgagcctggaggacacagagccgtcggattc

SEQ ID NO: 162604 - DNA, 120 bp, Artificial Sequence
  ENSG00000107672_2 (sequence is synthesized)
cggggacgagatgatggacccggccagcttggaggcggaggccgaccaaggcctgtgccgccagatccgccatcagtaccgggcgctcatcaactccgtccaacaaaaccgtgaggacat

SEQ ID NO: 162605 - DNA, 120 bp, Artificial Sequence
  ENSG00000107672_3 (sequence is synthesized)
actgaatgccggtgacaaattaacagaggtccttgaagaggctaacactctgtttaatgaagtgtcccgagcaagagaagcagtcctggatgcccactttcttgttttggcttcagattt

SEQ ID NO: 162606 - DNA, 120 bp, Artificial Sequence
  ENSG00000107672_4 (sequence is synthesized)
gggcaaagagaaagcaaagcagctgcgctcagacctgagctcctttgacatgttaagatatgttgaaactctactcacacatatgggtgtaaatccgctagaagctgaagaactcatccg

SEQ ID NO: 162607 - DNA, 120 bp, Artificial Sequence
  ENSG00000107672_5 (sequence is synthesized)
acacctttaataaaacccatacattccactttctgttgggttcaatatacggagagtgccctgtgccaaagccacgagttgatcgtccaagaaaagttcctgtgatacaagaggagaggg

SEQ ID NO: 162608 - DNA, 120 bp, Artificial Sequence
  ENSG00000107672_6 (sequence is synthesized)
caatgcctgcccagttaagaagaatggaagaatctcatcaagaagcaacagagaaagaagtagaaagaatcttgggattgttgcagacatattttcgagaagatcctgataccccaatgt

SEQ ID NO: 162609 - DNA, 120 bp, Artificial Sequence
  ENSG00000107672_7 (sequence is synthesized)
ccttctttgactttgtggttgatcctcattctttcccccgtacagtggaaaacatctttcatgtttccttcattatacgggatggttttgcaagaataagacttgaccaagaccgactgc

SEQ ID NO: 162610 - DNA, 120 bp, Artificial Sequence
  ENSG00000107672_8 (sequence is synthesized)
cagtaatagagcctgttagtattaatgaagaaaatgagggatttgaacataacacacaagttagaaatcaaggaattatagctttgagttaccgtgactgggaggagattgtgaagacct

SEQ ID NO: 162611 - DNA, 120 bp, Artificial Sequence
  ENSG00000107672_9 (sequence is synthesized)
ttgagatttcagagcctgtgattactccaagtcagaggcagcagaagccaagtgcttgatgctagctgaaggactcaaatggatagtgaagtccaaaacggaaagcggcatgtatcgtac

SEQ ID NO: 162612 - DNA, 120 bp, Artificial Sequence
  ENSG00000107672_10 (sequence is synthesized)
atattgtatgattcaacatttttaaaggcagattgtttttagtaaaatgtagcttttgatagttaataaatttgtcatggttgtctttgattaaaggaaactcaccgccatattcacaaa

SEQ ID NO: 162613 - DNA, 120 bp, Artificial Sequence
  ENSG00000107672_11 (sequence is synthesized)
ctgtccccgccctgcgccgggcgcggggggagggcaccggaggcaggtgccgggcggaggcccggcgcggcgttagtagagacgcgccgggtgccagcccctcgccgcaccttaaattgt

SEQ ID NO: 162614 - DNA, 120 bp, Artificial Sequence
  ENSG00000107672_12 (sequence is synthesized)
gcccctcgccgcaccttaaattgttgacaaagtgctcccactttgtggctggagccgtacgaccttggcgcgggtccccgagtggcgggctggaaaagctggaggccagagccgttcgcg

SEQ ID NO: 162615 - DNA, 120 bp, Artificial Sequence
  ENSG00000107672_13 (sequence is synthesized)
gactcgcccgagcccagccagccagtggggagaggcaggacgcggactccgcgtgctttgattgcgcccggcagtcctcggcgtgggctcccggcctcgcagcggcagctgcagctgcag

SEQ ID NO: 162616 - DNA, 120 bp, Artificial Sequence
  ENSG00000107672_14 (sequence is synthesized)
cggcacgcgagagctgtcaaatgcacgttctcggaccccacccggacccgcggaattcgaatctctgggtgggtccgcgcaactgtggagtggccctccaggtgatggtgtgtattgctt

SEQ ID NO: 162617 - DNA, 120 bp, Artificial Sequence
  ENSG00000107672_15 (sequence is synthesized)
gcaaagtttgagaaccactcagttatggagcactcagaggctgcagccggagtccagccctttgggttaaggttagagggagctagggtttccttttaaaattcatgctgcataaagggt

SEQ ID NO: 162618 - DNA, 120 bp, Artificial Sequence
  ENSG00000107672_16 (sequence is synthesized)
agggtggcctttctccttttccgggtcattttggttaaaaagataaagatgttcgaagtaattactcagagcgcaggggccggggcttggctttactgttgcaggtgataaccttgtcaa

SEQ ID NO: 162619 - DNA, 120 bp, Artificial Sequence
  ENSG00000107672_17 (sequence is synthesized)
agaaagaatcttgggattgttgcagacatattttcgagaagatcgagacagtctcactctttcgcccagactggaatgcagtggcaccatctcaactcactgcaacctccacctcctgga

SEQ ID NO: 162620 - DNA, 120 bp, Artificial Sequence
  ENSG00000107672_18 (sequence is synthesized)
tagctgggattacaggcgcacgcgccaccacatctggctaattttttttctgtatttttagtagagacattgtttcgccatgttggccaagctagtcttgaacccctgacctcaggtgat

SEQ ID NO: 162621 - DNA, 120 bp, Artificial Sequence
  ENSG00000107672_19 (sequence is synthesized)
cagatggaatgactggctactgtaataatactacagcagctccataatgcatgaaatcctaaaaagtatgtaatattataagtatcttttcaatacaggtttcattgctattattcatca

SEQ ID NO: 162622 - DNA, 120 bp, Artificial Sequence
  ENSG00000107672_20 (sequence is synthesized)
gtgaaccttaaattgctttttcttgtagggacaaagattatttggtattgtagaggtgacagtcatgatgccgttgtttggagacttttgaaactttgatatgaaagttcataaacacta

SEQ ID NO: 162623 - DNA, 78 bp, Artificial Sequence
  ENSG00000107672_21 (sequence is synthesized)
caggtggatgcaggtagatcatctgagctcaggaattcaagatcagcctgggcaacatggcgagaacccatctctacc

SEQ ID NO: 162624 - DNA, 120 bp, Artificial Sequence
  ENSG00000107672_22 (sequence is synthesized)
accgtgactgggaggtaaagctctgcctgttgcccctgcatagttctgactctgccttcacttgcagtaagcccagtgcctaaatgttcattattgtctgccaggagattgtgaagacct

SEQ ID NO: 162625 - DNA, 120 bp, Artificial Sequence
  ENSG00000107672_23 (sequence is synthesized)
aatgaattttcaatgtagattaacttttacaatattgtatcttgctcaactacctgaagatactgaaaacatggccagcgtctaaaattttgatggattcatctatatcattgattcaac

SEQ ID NO: 162626 - DNA, 120 bp, Artificial Sequence
  ENSG00000107672_24 (sequence is synthesized)
atctgctgtaaatattaacaaagaaatgatataatttccctcagatcttaatttagaaagttggtgattgcagtcatttttgtagtatccctctttctaatcacgttttgtcagatgccg

SEQ ID NO: 162627 - DNA, 120 bp, Artificial Sequence
  ENSG00000107672_25 (sequence is synthesized)
gcaccttcttttctctttgaggttctatgaatctttcattcttacctgaataatttcacactctccattactcatgtcctcctaaggtctcctgtggagagtgaatatttccatcgcact

SEQ ID NO: 162628 - DNA, 120 bp, Artificial Sequence
  ENSG00000107679_0 (sequence is synthesized)
gtgcgcagtgcgcgggctggccgtcgcggacgccgctccgggcagccgagcctctgtgggagccggggccgcggcggcgcgggtgctccgggccgaggccgcgtgtaatgttcaagctca

SEQ ID NO: 162629 - DNA, 120 bp, Artificial Sequence
  ENSG00000107679_1 (sequence is synthesized)
caagctcagaaatgccttatgtggatcgtcagaatcgcatttgtggttttctagacattgaagaaaatgaaaacagtgggaaatttcttcgaaggtacttcatactggataccagagaag

SEQ ID NO: 162630 - DNA, 120 bp, Artificial Sequence
  ENSG00000107679_2 (sequence is synthesized)
atagtttcgtgtggtacatggataatccacagaacctaccttctggatcatcacgtgttggagccattaagcttacctacatttcaaaggttagcgatgctactaagctaaggccaaagg

SEQ ID NO: 162631 - DNA, 120 bp, Artificial Sequence
  ENSG00000107679_3 (sequence is synthesized)
cggagttctgttttgttatgaatgcaggaatgaggaagtacttcctacaagccaatgatcagcaggacctagtggaatgggtaaatgtgttaaacaaagctataaaaattacagtaccaa

SEQ ID NO: 162632 - DNA, 120 bp, Artificial Sequence
  ENSG00000107679_4 (sequence is synthesized)
agcagtcagactcacagcctaattctgataacctaagtcgccatggtgaatgtgggaaaaagcaagtgtcttacagaactgatattgttggtggcgtacccatcattactcccactcaga

SEQ ID NO: 162633 - DNA, 120 bp, Artificial Sequence
  ENSG00000107679_5 (sequence is synthesized)
aagaagaagtaaatgaatgtggtgaaagtattgacagaaataatctgaaacggtcacaaagccatcttccttactttactcctaaaccacctcaagatagtgcggttatcaaagctggat

SEQ ID NO: 162634 - DNA, 120 bp, Artificial Sequence
  ENSG00000107679_6 (sequence is synthesized)
attgtgtaaaacaaggagcagtgatgaaaaactggaagagaagatattttcaattggatgaaaacacaataggctacttcaaatctgaactggaaaaggaacctcttcgtgtaataccac

SEQ ID NO: 162635 - DNA, 120 bp, Artificial Sequence
  ENSG00000107679_7 (sequence is synthesized)
ttaaagaggttcataaagtccaggaatgtaagcaaagcgacataatgatgagggacaacctctttgaaattgtaacaacgtctcgaactttctatgtgcaggctgatagccctgaagaga

SEQ ID NO: 162636 - DNA, 120 bp, Artificial Sequence
  ENSG00000107679_8 (sequence is synthesized)
tgcacagttggattaaagcagtctctggcgccattgtagcacagcggggtcccggcagatctgcgtcttctgagcatccccccggtccttcagaatccaaacacgctttccgtcctacca

SEQ ID NO: 162637 - DNA, 120 bp, Artificial Sequence
  ENSG00000107679_9 (sequence is synthesized)
acgcagccaccgccacctcacattccacagcctctcgcagcaactctttggtctcaacctttaccatggagaagcgaggattttacgagtctcttgccaaggtcaagccagggaacttca

SEQ ID NO: 162638 - DNA, 120 bp, Artificial Sequence
  ENSG00000107679_10 (sequence is synthesized)
aggtccagactgtctctccaagagaaccagcttccaaagtgactgaacaagctctgttaagacctcaaagtaaaaatggccctcaggaaaaagattgtgacctagtagacttggacgatg

SEQ ID NO: 162639 - DNA, 120 bp, Artificial Sequence
  ENSG00000107679_11 (sequence is synthesized)
cgagccttccggtcagtgacgtgtgaggcagaagcgcacggagcctgcctgcctctgccgtcctcagtttcctttcatgaggcttctagccaaagatgataaagggggaaatggttttta

SEQ ID NO: 162640 - DNA, 120 bp, Artificial Sequence
  ENSG00000107679_12 (sequence is synthesized)
gtgcgtatattatactgcctcttaggtgtactctttataagctggtaaaccaagaatctagggagtggccaaactaaatataatttctttaaaaaagaaagaaaaaggaaaaatccaaaa

SEQ ID NO: 162641 - DNA, 120 bp, Artificial Sequence
  ENSG00000107679_13 (sequence is synthesized)
tatctcagtatcatctgtctgaagcattgtgtgttctcattcgggtggtaacaatgtatgtgtaatatttttttcttagtgattttgacagtttaaatgtttaacaacttaaagcattaa

SEQ ID NO: 162642 - DNA, 120 bp, Artificial Sequence
  ENSG00000107679_14 (sequence is synthesized)
aaatgcttattaataactttggtcatttaaaaaatgctacaatgacttcctattaaaggttcaatatttacacattcttattggttgatattaccacatgaaatattgccagaccaagat

SEQ ID NO: 162643 - DNA, 120 bp, Artificial Sequence
  ENSG00000107679_15 (sequence is synthesized)
acctaaactcatgatgtctgtggtgctgtaaaatttatactaaaatgtggactattttgaaattataaccatttttgatgccctgaatcttgaggtgacttattttgcatagaggatatg

SEQ ID NO: 162644 - DNA, 120 bp, Artificial Sequence
  ENSG00000107679_16 (sequence is synthesized)
gatagaccaacagtaagggttgtgggttataccggcatagagaaaagaagaaaactagaattgaaacaactgtgtcttagacatttgtttgaaaaagcttcatcaggccttggagcagtc

SEQ ID NO: 162645 - DNA, 120 bp, Artificial Sequence
  ENSG00000107679_17 (sequence is synthesized)
actgctttattccgcaaaaattatttggtaggaaatttttgggagatctgattttcttatccaagttttgtaaatagttgttatttctatatttggattggtgaaagacctcaagtttat

SEQ ID NO: 162646 - DNA, 120 bp, Artificial Sequence
  ENSG00000107679_18 (sequence is synthesized)
atgtaaagacataactgcccttagtcatgaaattgttgtgacctctactttttgtcactaatagcctacattcaagtgcctgtgttttttcatcttgtttaggaatgttttgagattaat

SEQ ID NO: 162647 - DNA, 120 bp, Artificial Sequence
  ENSG00000107679_19 (sequence is synthesized)
gtgcttaaaagtcctacgtgactgattttaaacattgtgataaaattaattttcagtagaatagttgaatgtgttaagataggattttatgttagagataccagaatgctggtattctac

SEQ ID NO: 162648 - DNA, 120 bp, Artificial Sequence
  ENSG00000107679_20 (sequence is synthesized)
tacttgtgcaatatatatgttttaaaaaacaaatttgagaatacatttaatcatagggatatagatataagcacctctctaaagaatctttagtttccgacgttgaattatagaccagtt

SEQ ID NO: 162649 - DNA, 74 bp, Artificial Sequence
  ENSG00000107679_21 (sequence is synthesized)
aaagaatctttagtttccgacgttgaattatagaccagtttgagtaagtactgctttttttttttggagacggg

SEQ ID NO: 162650 - DNA, 61 bp, Artificial Sequence
  ENSG00000107679_22 (sequence is synthesized)
tcactacagcctccacctcgtgggttcaaacagttgtgctgcctcagcttcccgagtagct

SEQ ID NO: 162651 - DNA, 90 bp, Artificial Sequence
  ENSG00000107679_23 (sequence is synthesized)
aagtaccgtttttgaggttcagtcttaaacatttgctttaagaaaacagtcttgaatttcacatgctgctatttttatattttgccattt

SEQ ID NO: 162652 - DNA, 120 bp, Artificial Sequence
  ENSG00000107679_24 (sequence is synthesized)
cttgaatttcacatgctgctatttttatattttgccattttacagtactgttttgttttgaattcatgcatatcattgaaaatttctcgttttcattttcttagatgacttcttgtctga

SEQ ID NO: 162653 - DNA, 120 bp, Artificial Sequence
  ENSG00000107679_25 (sequence is synthesized)
gacagaaaaatttcctactacagcagtgcagtccagaggttaagatgtattagaattatacaatatcagtttaaaaatctgtatgcataaagaatgcaccactcaacttttttattcata

SEQ ID NO: 162654 - DNA, 120 bp, Artificial Sequence
  ENSG00000107679_26 (sequence is synthesized)
agctaatatttttttaaagttacattaagattttttctcttttgcagctacatttgaaagtgatagaataaagagattttaatgagttatcactttttcagctgatatattcattttaat

SEQ ID NO: 162655 - DNA, 120 bp, Artificial Sequence
  ENSG00000107679_27 (sequence is synthesized)
ggcttttttgaaagttcctttttcatgaacacacccgagaaatcttaaatagacactttgcaatatttaagaacctaatgctgtttaattttggtacagcttccacattgcatgttcact

SEQ ID NO: 162656 - DNA, 120 bp, Artificial Sequence
  ENSG00000107679_28 (sequence is synthesized)
ttagtatttgcaatttgatatatttcatggtggcaaaatattagctctgttttgggacattttaaaatagaactatccttgttcgatagcataggaaaatgttctggtgattgtcagggt

SEQ ID NO: 162657 - DNA, 120 bp, Artificial Sequence
  ENSG00000107679_29 (sequence is synthesized)
ctcctaatatttatctcaattcttttataagtctatggaaattatttaattattttaaaacgtacacacttttcttgtaaatatgtcacatctgagttcaaaaaaattactttgaatacc

SEQ ID NO: 162658 - DNA, 120 bp, Artificial Sequence
  ENSG00000107679_30 (sequence is synthesized)
ttaatatttgctgcatttttttccgtatatataacatgtcttctttcagaatgggaatatatgtgtgcctcccaacatttactgttaaagtgtgttatctttatatgtcaaactggttga

SEQ ID NO: 162659 - DNA, 120 bp, Artificial Sequence
  ENSG00000107679_31 (sequence is synthesized)
acactgtaatgagaataaactgcacagagtttattctgacttatttctcattttgtttggttcagcccttgtgtgatgaagtaaatacaatgattaggggtgtgtttggttaattgactt

SEQ ID NO: 162660 - DNA, 120 bp, Artificial Sequence
  ENSG00000107679_32 (sequence is synthesized)
cagtttacatatttaaggacagagtaattatttggtcatctttgcaagaataagaaacttcagatctgtgaattcttaatgcatccctgcatgtgaaattatagaaggaaaaatgatttt

SEQ ID NO: 162661 - DNA, 120 bp, Artificial Sequence
  ENSG00000107679_33 (sequence is synthesized)
tttttgataggggaaagaacttgcttatttttcttaattaaaaaacatgttctcaaaagcagaattatcatatgttagcctcagagcatcgtgtggatcatctgggctgctcacagtgct

SEQ ID NO: 162662 - DNA, 120 bp, Artificial Sequence
  ENSG00000107679_34 (sequence is synthesized)
ccatgattatttagacggcatgatgtaaggcggaaagcagagggcatcttaatctccgggtgggcagttgagatgcactcaaaaaactatgtcgggtgttagaggctgctccttgcaaac

SEQ ID NO: 162663 - DNA, 120 bp, Artificial Sequence
  ENSG00000107679_35 (sequence is synthesized)
gttccctattggtgataaatattccacgtctgttgcggtgaacaccatatacagggcctagtgcagtgcttggtgcacttggtaaagcttaaatacttctccagtgaggacaaggcatta

SEQ ID NO: 162664 - DNA, 120 bp, Artificial Sequence
  ENSG00000107679_36 (sequence is synthesized)
ctgtagaatgtgtgaacttcccacattagagaaaagtgtatacctatttgttagataaattgtacttttgaatttctggaatattctttccttaaagcaacttgccttcaatgattcgag

SEQ ID NO: 162665 - DNA, 120 bp, Artificial Sequence
  ENSG00000107679_37 (sequence is synthesized)
ataccttcttttgcttgttgtgtctaatccattgtcagatcctgctgcttttccctggcatgttcataccttgttctctgaaattcagccgggaatgactttgaaccagtatgtctgctc

SEQ ID NO: 162666 - DNA, 120 bp, Artificial Sequence
  ENSG00000107679_38 (sequence is synthesized)
acctattcatgtcctgttggggctctcctggactaccctattcctgtcattgtgcagagtaggtatcaaagtagacatcttcatctgttgccttttcctgaaaagctgaatgacgactta

SEQ ID NO: 162667 - DNA, 120 bp, Artificial Sequence
  ENSG00000107679_39 (sequence is synthesized)
aagatcagctaggccaagcccccaccatcaatgctaactgagataaattgagaccccagaaaggaggaggatttgcctggcccatggggcacgttagcaacgaagctgtaactgttggct

SEQ ID NO: 162668 - DNA, 120 bp, Artificial Sequence
  ENSG00000107679_40 (sequence is synthesized)
tctcactgtacttgggagcatcattaggatctgtgcccagggtgtagctagagtaatccagccaaatataccaggttgcttcctaataacctatggcattccgcacctcctctccaaaac

SEQ ID NO: 162669 - DNA, 120 bp, Artificial Sequence
  ENSG00000107679_41 (sequence is synthesized)
acataggcttagtgttctttttttttttctcagtctttttctgaaggccatttgttgtgtgaaatggctttcttcatcttagaccttcagatctctgttgaatcaagtgacttgtgaatg

SEQ ID NO: 162670 - DNA, 120 bp, Artificial Sequence
  ENSG00000107679_42 (sequence is synthesized)
tctagccatgcaacagcagctcacgtacttcctgtgtgtgttctaatatgctgctgctacaaatggatggaatacattgtcctagaatgcaaggaccttgaggtttgtgtctgcgtttca

SEQ ID NO: 162671 - DNA, 120 bp, Artificial Sequence
  ENSG00000107679_43 (sequence is synthesized)
cctgttaggttttctgtagttctgttagacgatggatatgtttatgtttgatacccctttattgcagcatgttcagcactttcaaaaaggagagcatttagtatttggttctatttagga

SEQ ID NO: 162672 - DNA, 120 bp, Artificial Sequence
  ENSG00000107679_44 (sequence is synthesized)
agggcttttaattatttccaagaacttatctaggtttagcaaatgaagctttaatttttttagtatgtcctacctatttttctgaaatattattttcttaccaaaagtgccattgcgtgt

SEQ ID NO: 162673 - DNA, 120 bp, Artificial Sequence
  ENSG00000107679_45 (sequence is synthesized)
gtaagccatgttttcttgttcacgccagccatgggaggtgataatagcctgggtaacaatttcagtcatacttgtccaggagcctgcttccttgaaagtgactgatgttccggtgttcct

SEQ ID NO: 162674 - DNA, 120 bp, Artificial Sequence
  ENSG00000107679_46 (sequence is synthesized)
ttctttcccattgggtcttggacacctgattgttaccatggtgtttgtccactgctgctatggtcttgttgatgctgctccaaatatgtagctgtgttttctggatacataatttttatt

SEQ ID NO: 162675 - DNA, 120 bp, Artificial Sequence
  ENSG00000107679_47 (sequence is synthesized)
taaagcttattcctggacacattttgtccatttttgaaaagatctaaactaatttgactagtagaattaggctaacaatacatggttcaaggaaaaatactgccttttgtaataaaagtt

SEQ ID NO: 162676 - DNA, 120 bp, Artificial Sequence
  ENSG00000107679_48 (sequence is synthesized)
tcttcttgcctagtgtctcattggtctgaatataatggctgtcttagacccggcatcctggcgcctgtcttcaactctagttctgccgtatgtgactttaggcaagtgtgtgtgtttcgg

SEQ ID NO: 162677 - DNA, 120 bp, Artificial Sequence
  ENSG00000107679_49 (sequence is synthesized)
aacttcattttctacattatataaaatggaattggataaaagctacatctgtcttggtaattattattattaactgatgcaactttttttcctttgaaaagtattttttttattatttaa

SEQ ID NO: 162678 - DNA, 120 bp, Artificial Sequence
  ENSG00000107679_50 (sequence is synthesized)
taatccagtcgatcattgttggacatttgggaaaagtatttttaatgtttttatcctaaacccaaaataagaagggaaagctgtaaacatttttgctttaacaaaaaggaaatccctttc

SEQ ID NO: 162679 - DNA, 120 bp, Artificial Sequence
  ENSG00000107679_51 (sequence is synthesized)
ttagcttttctttcacttctagttgcagttcaggaattttctgtaagtggtgcttgtacctttatcaaaagttctgttaacagttggtgaggcaagaaatatttgtatcaaaaatgcaaa

SEQ ID NO: 162680 - DNA, 120 bp, Artificial Sequence
  ENSG00000107679_52 (sequence is synthesized)
gatatgacagcttaataccagatctcagtgttcagaagtttagtccatataggatttgtgtatgttatctattttttaaatgattaaattgtatgttttaaacctcaagtaagacacatg

SEQ ID NO: 162681 - DNA, 120 bp, Artificial Sequence
  ENSG00000107679_53 (sequence is synthesized)
ttgaaaatatggctgaattgaggctagcatttacagttttgattgatgaaatctgtattttttgatacatttaatagtgccttactgtggtatattcatgtggtaatagcgccaccttct

SEQ ID NO: 162682 - DNA, 120 bp, Artificial Sequence
  ENSG00000107679_54 (sequence is synthesized)
ggttatatcattgctaaatttaaaatttggaaatttggagtctgtttattgcctccatcgtagaaaattagataagatatgtgattgcctaggatagttttgaaattaatataaaattca

SEQ ID NO: 162683 - DNA, 120 bp, Artificial Sequence
  ENSG00000107679_55 (sequence is synthesized)
aatggggaatatttagtatttggtcctatttggaaagagctttaattatttccaagaacttacctgggtttagaaaatgaagttttggttttttaattatgtcctacctgtcaatttctg

SEQ ID NO: 162684 - DNA, 90 bp, Artificial Sequence
  ENSG00000107679_56 (sequence is synthesized)
gtcccagctattcaggaagctgaggcaattggaacacttgagcttaggggtttgagatcagcctgggcagaataatgagacaagatattg

SEQ ID NO: 162685 - DNA, 120 bp, Artificial Sequence
  ENSG00000107679_57 (sequence is synthesized)
atctcaaaaaaaaaaaaagaaaagaaaaagatattgtgtaccctttactcagtttccccccaacagcatcttgaaaaactaatacaatattataaccaagatactgacactgatacagtc

SEQ ID NO: 162686 - DNA, 120 bp, Artificial Sequence
  ENSG00000107679_58 (sequence is synthesized)
aagatgcagaacagttccatcatcacaaaggcccctctttgttgttctttttatagtcacatccatctcctattctgcaggtttggaagcagacttagccacttgtccagagtcagatta

SEQ ID NO: 162687 - DNA, 120 bp, Artificial Sequence
  ENSG00000107679_59 (sequence is synthesized)
ggcttgaaatgtatctttctgataccaaagtttgggctcttaacacactacttctactgtctcagtagaagtcttgaaaacttctcttttaaaatagtacttccagattactaaatgagt

SEQ ID NO: 162688 - DNA, 120 bp, Artificial Sequence
  ENSG00000107679_60 (sequence is synthesized)
tgaattcagtctgttttcaacatttctagaaccatactatttcaaatgacatattatttatacatacctttaaatttaacatttgagaatcaatcataggtacgtatcaaattacaactt

SEQ ID NO: 162689 - DNA, 120 bp, Artificial Sequence
  ENSG00000107679_61 (sequence is synthesized)
ccctgaaagatttcaagccctgacatttgataaataaggttaccagaataaatagtaagtaacagattgaaatagctttaagatgctggattcttgctttggaaacagctatagggcctg

SEQ ID NO: 162690 - DNA, 120 bp, Artificial Sequence
  ENSG00000107679_62 (sequence is synthesized)
gttataaagataatcacttggtataggctaacaggttttttccatgtggagaagctttgacctgatggagttgggtcaattggtgtcttcagtgtacgacatgcagcacacaggagacct

SEQ ID NO: 162691 - DNA, 120 bp, Artificial Sequence
  ENSG00000107679_63 (sequence is synthesized)
aagaagacgacaaagatgtccacgaggaatctgccgaaagaaaatataaagtaatatgtgataaaatctagcatggaaaactacgcatcagagactgagatggcccatgggtgatggtgt

SEQ ID NO: 162692 - DNA, 120 bp, Artificial Sequence
  ENSG00000107679_64 (sequence is synthesized)
gggtaagataagtgttgtgatggagagggcctttggggggtcccatgagagaaaaaggtacttctaagtaaaagccatgtgactttataaatttctaaatgttgattcaggggtcctaag

SEQ ID NO: 162693 - DNA, 120 bp, Artificial Sequence
  ENSG00000107679_65 (sequence is synthesized)
tgatggagaaagtttacattgttctcttaaggctccattgcctctttccctcccgaactgtggtatgtatacctctaatgcacgttttctttagtggggaggaaaggaggggctgtggag

SEQ ID NO: 162694 - DNA, 120 bp, Artificial Sequence
  ENSG00000107679_66 (sequence is synthesized)
tttttttttttttttttttgcctgtctttggtaccttatcttcatgttatgaatgtaacctattccctgtggaaacatttattattatttccaaatagggcctttggtcccaatggcgtc

SEQ ID NO: 162695 - DNA, 120 bp, Artificial Sequence
  ENSG00000107679_67 (sequence is synthesized)
ttccaaatagggcctttggtcccaatggcgtctgtttctttttgacttctacatacgtcatgctcacggtcttggttcgtattgtcactcatgccattttttcttcccatttgctttttg

SEQ ID NO: 162696 - DNA, 120 bp, Artificial Sequence
  ENSG00000107679_68 (sequence is synthesized)
cctgtctagtttgaaggtggaagattttccgatgaatcagatatggcaagtgaaaggaagtgaagaattaagggtaatgacaaggttttcagcccgaacaactagaagccatgaactgag

SEQ ID NO: 162697 - DNA, 120 bp, Artificial Sequence
  ENSG00000107679_69 (sequence is synthesized)
gtagcaaagattgcaggtagagcaggtttgatggaaaagatcatgattgcagtattggttgcagtattgagtgttagggttgacatgtcagacatccaagtagaaatggcaggcaggcag

SEQ ID NO: 162698 - DNA, 120 bp, Artificial Sequence
  ENSG00000107679_70 (sequence is synthesized)
ttggatatgcaaatttggaattgagagaaatcattattggaaataaaaatgtgggagtcttcaaagtattcggtgctattgaaggctttgaaactggatgagatcatctttagagagaat

SEQ ID NO: 162699 - DNA, 120 bp, Artificial Sequence
  ENSG00000107679_71 (sequence is synthesized)
gaagatgaaagaagaaaagagaaccatggaatgagccctggggcgctccaatattaagagctttggaagaagaggaggaagtagccatgatgaatgagaaggtgtgaccaccacatcaac

SEQ ID NO: 162700 - DNA, 120 bp, Artificial Sequence
  ENSG00000107679_72 (sequence is synthesized)
aggatatcaagagtacgttgtgtcttagaagccaagtgaagaaaatgaagtgaggaggagatcggatgtttcaaattctgctcgcaggtcaagttaagaggcagcctgagaaatgccctt

SEQ ID NO: 162701 - DNA, 120 bp, Artificial Sequence
  ENSG00000107679_73 (sequence is synthesized)
tgtgtttggcaacgtggacagtacagatgtcattggtgatcttgccagggcctgttctgatggagtggtggggacaaatagaactctttttgaggcattttgctgcaagaggactggaga

SEQ ID NO: 162702 - DNA, 120 bp, Artificial Sequence
  ENSG00000107679_74 (sequence is synthesized)
aaggtgacggttgctagtagcaaaagtagtcttttcttcttaagacagtggcttggccagacacggtggttcacgcctgtaatcccagttttggaggtctaggtgggagaatagcttgaa

SEQ ID NO: 162703 - DNA, 90 bp, Artificial Sequence
  ENSG00000107679_75 (sequence is synthesized)
aatcccagttttggaggtctaggtgggagaatagcttgaatctaggagttcaagaccatcctgggcaacatggcaaaatagggtgtggtg

SEQ ID NO: 162704 - DNA, 85 bp, Artificial Sequence
  ENSG00000107679_76 (sequence is synthesized)
tagagtgagtcactgtctcaaaaaacaaacagaaaacaataacaaaagatggtggcttatttgttgatgaaatgacccagtagga

SEQ ID NO: 162705 - DNA, 120 bp, Artificial Sequence
  ENSG00000107679_77 (sequence is synthesized)
aagatggtggcttatttgttgatgaaatgacccagtaggaaaagaaagattgatgatgtagaagagtacagaattgttggaacaagtccttgaggaggtgagatgagatggaagctaggg

SEQ ID NO: 162706 - DNA, 120 bp, Artificial Sequence
  ENSG00000107679_78 (sequence is synthesized)
cacaagttggcttgacttcttcaaatgcacaggtgtttatctggggtaggaaggcacagtatgtggtgcagccactggttaagtgggtagacgtggaggggtaagtctctgaaagtctct

SEQ ID NO: 162707 - DNA, 120 bp, Artificial Sequence
  ENSG00000107679_79 (sequence is synthesized)
gccttagtctcagtaaactaggaaacaaaattcgcaactgcaagtaaggtggggaaaggtgtgaaaggcatgagagaatagatgtctaggattggggagaaggaatggactagggacatt

SEQ ID NO: 162708 - DNA, 120 bp, Artificial Sequence
  ENSG00000107679_80 (sequence is synthesized)
taggatattctgagcagcactgaaaacccactgagctctgtgtgcatgaatgacagtgttcaataactgataactgtagtcatttttgtcacgctcctgacttcagtggaaaagcctcta

SEQ ID NO: 162709 - DNA, 120 bp, Artificial Sequence
  ENSG00000107679_81 (sequence is synthesized)
gtgcaggcatgtccaatcttttggcttccctgggccccagtggaagaagaagaattgtcttgggtcatacatgaaatacactaacattaatgatagctgatgagctaaaaaaaaaaaaat

SEQ ID NO: 162710 - DNA, 120 bp, Artificial Sequence
  ENSG00000107679_82 (sequence is synthesized)
cgcaaaaaaatctcataatgtttttaagaaagtttacaaatctgtgttgggccgcattcaaagccgtcctgggccacatgcggcccgtgggctgtgggttggacaagcttgctctagtgg

SEQ ID NO: 162711 - DNA, 120 bp, Artificial Sequence
  ENSG00000107679_83 (sequence is synthesized)
ttccccatgctgctggcttttgggctgagaaatattttatcaggttaaagaagtatccaactattcatattttgttgagtttttttcttaagaatggtgattgaattttgttaaatatct

SEQ ID NO: 162712 - DNA, 120 bp, Artificial Sequence
  ENSG00000107679_84 (sequence is synthesized)
tcaatatgtctggaaataatatttttatccctctttaatttggtgaaagctgttaatccagttctcaatatttaaccatcattacatttctggaataaatcccatttggtcaagatatgt

SEQ ID NO: 162713 - DNA, 120 bp, Artificial Sequence
  ENSG00000107679_85 (sequence is synthesized)
tattttaaaaatctgctagattttgtttgctattagggatttttgcataaatataaatgatactggtctgcatttttcttttgtgtagctctagtctttgtaggttttgtggtgttttac

SEQ ID NO: 162714 - DNA, 120 bp, Artificial Sequence
  ENSG00000107679_86 (sequence is synthesized)
tgttttactagcttcatagaaaatacttgaaaggtttttttttttttttaaattttaagctgttacagaacagcttcaaaagaattggtattctaggctgggcacagtggctcacgcctg

SEQ ID NO: 162715 - DNA, 120 bp, Artificial Sequence
  ENSG00000107679_87 (sequence is synthesized)
gtgaaactccatctcaaaaaaaaaaagttggtattctatactccttaaagagttagtggacttccgctaggaaatcctctcaacctggtgctcttttgagggtgtgccattgacaacctc

SEQ ID NO: 162716 - DNA, 120 bp, Artificial Sequence
  ENSG00000107679_88 (sequence is synthesized)
cctcctcatttcctctatgagaattgatatgcttaggctttctatcttttctggggtcagttttgatcaattatatccatagaaaattatacattttatctaagtttttaaatgtatttg

SEQ ID NO: 162717 - DNA, 120 bp, Artificial Sequence
  ENSG00000107679_89 (sequence is synthesized)
catggagctgagcacaatatacagaacttatttaaggagaaatgcattactgcagatcccactttgttcttcaactcaaaatatccaatgctgtgaagattgcttatatgacaagttgtg

SEQ ID NO: 162718 - DNA, 120 bp, Artificial Sequence
  ENSG00000107679_90 (sequence is synthesized)
ctatcttctgatttttacctggaagcaatgtgatcacaaacataccaccagattaaagtggtagtactcaggtaacaggaggccatccaaattaaatttaggagtctttaaaaaattatc

SEQ ID NO: 162719 - DNA, 120 bp, Artificial Sequence
  ENSG00000107679_91 (sequence is synthesized)
aaaattcaatgtaaaaagtataatttcttgtaaagaacatgtggttcctggagaacatgtctaggttccccatttgagaaacactgtcctagtgaatagcatttgaacttatcctacgtt

SEQ ID NO: 162720 - DNA, 120 bp, Artificial Sequence
  ENSG00000107679_92 (sequence is synthesized)
cattgcccttccatgtccaccttctcacacagtgcttctgtgtatatctggcactccagttcaactgaacctttccatctccctgtttcccaccttcctgctattatttgtgctgtttct

SEQ ID NO: 162721 - DNA, 120 bp, Artificial Sequence
  ENSG00000107679_93 (sequence is synthesized)
tctgcctggaacgccactttcctaataattgttgcctgttaattccacaccttcaattctcaccaaaatgccactttctccttgaagtgttggaattgctttctcatctttcccatcaca

SEQ ID NO: 162722 - DNA, 120 bp, Artificial Sequence
  ENSG00000107679_94 (sequence is synthesized)
caagccttggtgaccccaaaacactggattcccttctcccttcccatgccaacgttcagtacagttcattggaacagaattcactttaagctttgctcttaaactttggcctagtaaata

SEQ ID NO: 162723 - DNA, 120 bp, Artificial Sequence
  ENSG00000107679_95 (sequence is synthesized)
gcttttctcctttcactgtagtcccttttaaaagccaaagacttcaaaatttggaagagattagaaaatgaaaacagtccaaatccagctctttgttgattagattggcccaaaggggac

SEQ ID NO: 162724 - DNA, 120 bp, Artificial Sequence
  ENSG00000107679_96 (sequence is synthesized)
ataaataagacaagcaaaatgcaaacgaattctagtagtaatggccactgtataagcactgcaccagtgcagtggtttcagcagctggtcctgggcccctttcatacttaatgtatgttt

SEQ ID NO: 162725 - DNA, 120 bp, Artificial Sequence
  ENSG00000107679_97 (sequence is synthesized)
ggttttacgtttaattttaggtgctaacaattacctcatgggcccctcttaagtctgctgtgagagaaatcctaatcccctaaggcagtggttctcaaagtgtggtccctgagaccaaca

SEQ ID NO: 162726 - DNA, 120 bp, Artificial Sequence
  ENSG00000107679_98 (sequence is synthesized)
atgtcaacattactgagaacttgctagaagtgcaaattattgctcccatcccagtcctactgaatcagattttctgggattagggcaggcaatctgttttaacaaggcctacaggtgatt

SEQ ID NO: 162727 - DNA, 120 bp, Artificial Sequence
  ENSG00000107679_99 (sequence is synthesized)
ctgacatccattaaagtttgagatcggctgggcatggttgctcacacctataatcgcagcactttgggaagccgaggcgagaagattgcttgagttcaggagttcgagatgagcctaggt

SEQ ID NO: 162728 - DNA, 120 bp, Artificial Sequence
  ENSG00000107679_100 (sequence is synthesized)
aacatagtgagacatcgtctctactaaaattcaaaaagaattaggcatggtggtgtgtgtctgtagtcccagcgacttgcattgcgtgctgaggtgagaggatcgcttgagcctgggaga

SEQ ID NO: 162729 - DNA, 78 bp, Artificial Sequence
  ENSG00000107679_101 (sequence is synthesized)
ttgagatcctctgccctaagatatccattatccattacatgtaaggaattaacttctctcctatgcgaccaggatggc

SEQ ID NO: 162730 - DNA, 120 bp, Artificial Sequence
  ENSG00000107679_102 (sequence is synthesized)
atgtaaggaattaacttctctcctatgcgaccaggatggcctttgttacatagtatccttagagctgagaaaacagttacctaaatcactgcctgtgttctgtggttcagataaagaacc

SEQ ID NO: 162731 - DNA, 120 bp, Artificial Sequence
  ENSG00000107679_103 (sequence is synthesized)
cactgaaagaggctgcgtgcatgaaccggctctgaccaactgaacatgaaacacaggttggaataaaaatatttttttatttgatggtcttccatatagacagaatttcatcaggaatca

SEQ ID NO: 162732 - DNA, 120 bp, Artificial Sequence
  ENSG00000107679_104 (sequence is synthesized)
aagaaaggtggttaccacatataaacaccaactaaactctgagctttctggcaactgaaaaggaaaacgttgagttctagaatagcctttgttgtttgatgcaactaaccatatcacctt

SEQ ID NO: 162733 - DNA, 120 bp, Artificial Sequence
  ENSG00000107679_105 (sequence is synthesized)
ttagagctagagaaccgtccaggtattaaatgtttggaatcttttatgatgtggattgtgctacaggggacactgagtaacgtggggaccaatgtccttcacagtttttgtagaaaaatt

SEQ ID NO: 162734 - DNA, 120 bp, Artificial Sequence
  ENSG00000107679_106 (sequence is synthesized)
tttaggtggtcttccatattcacccttagaagcaaggacaacccttcgagtgtaattccgtggagatgatttccttctgactcaaacacccatagcttccctgtctgtccatttcgtgag

SEQ ID NO: 162735 - DNA, 120 bp, Artificial Sequence
  ENSG00000107679_107 (sequence is synthesized)
ctcctcattaccttccatgactcacttttccatgtgacacggagcctccctggcttccactgctgatactgaccattcctttctttgttctctatgctgccgtggacacagagccaccat

SEQ ID NO: 162736 - DNA, 120 bp, Artificial Sequence
  ENSG00000107679_108 (sequence is synthesized)
cgctgttaactgtactagagtctttactttttttttcttttgtgagcctaagccttcctcaagacaagaatctttgttttgtttaaaaaaagaatagccttaatgtttttttttctgatt

SEQ ID NO: 162737 - DNA, 120 bp, Artificial Sequence
  ENSG00000107679_109 (sequence is synthesized)
ttaaagtgaacaccctattgtagaacatccatgtaagcaaaaagaaaaaaaataaaaatgatttgtaatttctccaagaaatgacctgtgttgacatttcagtgattatacttccaagtc

SEQ ID NO: 162738 - DNA, 120 bp, Artificial Sequence
  ENSG00000107679_110 (sequence is synthesized)
ttttactaaatgtgtacgtaaatagctttatttttgtgtgtgtaaaaatctgtagcctctgtaaacaagccaaatgtcatatacaccccacacaaaacaataaaagcaaaaatcaccaga

SEQ ID NO: 162739 - DNA, 120 bp, Artificial Sequence
  ENSG00000107679_111 (sequence is synthesized)
attttacattgagtcagtgatccatttgagttagtttttttcctcatagacagtcgattattccagtcttgtttgttgaaaagactgtcctttctctacaaaattgccttggcaccttgg

SEQ ID NO: 162740 - DNA, 120 bp, Artificial Sequence
  ENSG00000107679_112 (sequence is synthesized)
ttgaaaattaactgttctctcttcctgtttactagaagaatttttaaaagaccggtgttatttttttccttaagggattggtagaattcacatatgaactatttctaggctttgactttt

SEQ ID NO: 162741 - DNA, 120 bp, Artificial Sequence
  ENSG00000107679_113 (sequence is synthesized)
ctttttggggttttagtagtgaattcatttgctttagtagaaataggtacttcagattttcttttttgtcttgtgtcagttttttcaaagttgtgttttttcaaagaatttgtttacttc

SEQ ID NO: 162742 - DNA, 120 bp, Artificial Sequence
  ENSG00000107679_114 (sequence is synthesized)
taaattgtcaaatttgtttgcatgaattcttattacccacttaatgtctatagggtgtgtagtgtgtacttcctaatattggtgatttgctttctctctttcacttggttcacatagcta

SEQ ID NO: 162743 - DNA, 120 bp, Artificial Sequence
  ENSG00000107679_115 (sequence is synthesized)
tagatttatcaatttgatcttttcaagaaacagcttttggttttaatttgtattgtttgttttcaattttattagtttcttttctgatatttattattccctttctattttgggtttact

SEQ ID NO: 162744 - DNA, 120 bp, Artificial Sequence
  ENSG00000107679_116 (sequence is synthesized)
ttacctttttctagctttttagggtggagtttatgccattcatattagaccttttctaataaaaatatcttaagactataaattttctttcaaaatcacctttagctgcatactacaaat

SEQ ID NO: 162745 - DNA, 120 bp, Artificial Sequence
  ENSG00000107679_117 (sequence is synthesized)
tttgacttttaaaatttttcatttagttaagaatgttttctgatttcccttttgatttcttcttttacccatattttatttaaaagtgtattttaattttcaaatagctattcaggtgat

SEQ ID NO: 162746 - DNA, 120 bp, Artificial Sequence
  ENSG00000107679_118 (sequence is synthesized)
aatttcatctatagcactaaaaaccaatgaaaattctgacatatatttgtttataaaattccttgaatgctctgtatattgtatttatatggtatatacctgagggcttttctgtagcat

SEQ ID NO: 162747 - DNA, 120 bp, Artificial Sequence
  ENSG00000107679_119 (sequence is synthesized)
aaaagaacagttcattatttttcactgttctctgggttgaaggagctcatttgggcagctccatcttgggggtctctctcttgtagttgcagtcagatggcagctggaatgagagtcatc

SEQ ID NO: 162748 - DNA, 120 bp, Artificial Sequence
  ENSG00000107679_120 (sequence is synthesized)
tgaaggcttgactgggctggatggtcaagatagcctcttcactcactctgctagaatgactgggacagctgggtgtgggctggtcacctctctccgcacagcttcttcatgggactagtt

SEQ ID NO: 162749 - DNA, 120 bp, Artificial Sequence
  ENSG00000107679_121 (sequence is synthesized)
ggctttcacacaacggggcagtctgaaggcagtcagatttcctacatgacagctgacttctagagtgagcattctaagacattgagttttttcaagtagataatttatttgctctactct

SEQ ID NO: 162750 - DNA, 120 bp, Artificial Sequence
  ENSG00000107679_122 (sequence is synthesized)
ttcaaactaagaagtaagataaatgtatggggccagtcattgtagaaactgcctgtctggctcttgctgattgaattcctttggtgcagtttagcatgttcctctgtgttctgcatctcc

SEQ ID NO: 162751 - DNA, 120 bp, Artificial Sequence
  ENSG00000107679_123 (sequence is synthesized)
tctggcgccattgtagcacagcggggtcccggcagatctgcgtcttctatgcggcaggccagaaggctgtcgaacccttgtatacagaggagcatccccccggtccttcagaatccaaac

SEQ ID NO: 162752 - DNA, 120 bp, Artificial Sequence
  ENSG00000107679_124 (sequence is synthesized)
tggtgtcctgtagttctaccagtactctattaacaggaattagctatatgacaagcaaactatttaagttaaatgtttctacaccactacttcagtgattgtcagtagtatttgtcatag

SEQ ID NO: 162753 - DNA, 120 bp, Artificial Sequence
  ENSG00000107679_125 (sequence is synthesized)
tgtttctgaaagactgcaaggttccacgtgccctttaaatcattggagaagactaaatcatgttcaacattataattgatgctgagcagattttattacattttattcacagccttaaaa

SEQ ID NO: 162754 - DNA, 120 bp, Artificial Sequence
  ENSG00000107679_126 (sequence is synthesized)
atgtataatttaaatacagactatgtgctaaacagtctacagatagaaataatgattaactgagtaccttatttactgaatagatcacataagaaaagcaaaaatatatgttaaaaattt

SEQ ID NO: 162755 - DNA, 120 bp, Artificial Sequence
  ENSG00000107679_127 (sequence is synthesized)
atgatacctctgattctttcatccactttagtgaggtgttaatgtgagattctgctgttaccacagtcattgttttcctgtacttgtgaacgatttatcattgatccaagtattggaatt

SEQ ID NO: 162756 - DNA, 120 bp, Artificial Sequence
  ENSG00000107679_128 (sequence is synthesized)
ccttctttaaatttctaatgaaaagttttgttttgaaacttctgatttgttttaagaattttgctattcttttttctgctgactttggattcatccattgagtctttcaacatttattga

SEQ ID NO: 162757 - DNA, 120 bp, Artificial Sequence
  ENSG00000107679_129 (sequence is synthesized)
atacactatggttttggtaatagtctctgtcttgaagccaggaaagactgaatatgccacaatcccagaatcatgggtaggaatggagaaagggaagaaaacagcaaagagctgtaagcc

SEQ ID NO: 162758 - DNA, 120 bp, Artificial Sequence
  ENSG00000107679_130 (sequence is synthesized)
aatagtaagtgtgccaataaacagggtctagagcacagcagttgggcttggaagagttacacacacttggctagaatgtattatagtcaggatctgaatctatattccctaatgcccctg

SEQ ID NO: 162759 - DNA, 120 bp, Artificial Sequence
  ENSG00000107679_131 (sequence is synthesized)
agcctatttccttacctcttaggtgggggtagagcccctatgcatagggtagacaggagtagtaaaggagaaaaatgtgtgaactagtacctgcccgagtaagcactcattacgtgatag

SEQ ID NO: 162760 - DNA, 120 bp, Artificial Sequence
  ENSG00000107679_132 (sequence is synthesized)
ctatattataaaatattattctaacagaaaaattagtgtgataacttaaggagtacatacatggactataatttttatatgtatctgtcaaccgtatgcaaacggatgaataattagaaa

SEQ ID NO: 162761 - DNA, 120 bp, Artificial Sequence
  ENSG00000107679_133 (sequence is synthesized)
ttcttgtactgttctgtagtttcagaataagtctagtttttagaggtaaatatagtttatttggttgtgatgcttttggttaatgatatttttcttaaatacatttttaagtaaaaagat

SEQ ID NO: 162762 - DNA, 120 bp, Artificial Sequence
  ENSG00000107679_134 (sequence is synthesized)
cctatcttcaaagcagcattccaccttgaaagatctgaagatctcagaatcctctagtctataaatttcctctaaaggggctgtcctcttggggggttagccccacgtggagtagggaga

SEQ ID NO: 162763 - DNA, 120 bp, Artificial Sequence
  ENSG00000107679_135 (sequence is synthesized)
gaagggcatccacatggggaaggggtggtggcagagatgggagaatggtcacatacacagtgatttataaaatcaggaactatattaagtataatagaagccaagtcttttcagagaaac

SEQ ID NO: 162764 - DNA, 120 bp, Artificial Sequence
  ENSG00000107679_136 (sequence is synthesized)
aatactttttggtgaatgaatgtatatctgtatatatgatgaggaatgagatatttacatagtttcaaagtacctatctactaaaataggtattaagtattgtacaaggggaaaaagagt

SEQ ID NO: 162765 - DNA, 120 bp, Artificial Sequence
  ENSG00000107679_137 (sequence is synthesized)
aacattacagtgaggaaagtggtgtaaagaattctgtctgtaaaagtcaatatttaaccctctgtatttctttctcttgagattttctttacctatttcacattgactcataaatcactt

SEQ ID NO: 162766 - DNA, 120 bp, Artificial Sequence
  ENSG00000107679_138 (sequence is synthesized)
cacataagatgtttttatcttccctgaaggtagaatcagaaattgaaattccctcttcgccttgtttgagttgcatccttatttaaaatattgtagggtgatctgagtcctgaaatagct

SEQ ID NO: 162767 - DNA, 120 bp, Artificial Sequence
  ENSG00000107679_139 (sequence is synthesized)
tattggagacattgaatgcaattctgtagtataaatgtctatcctacgtcttctttttgtatgggatctttgagaagggaacttatactttgtttgaatgaagtcaccagaacagcattg

SEQ ID NO: 162768 - DNA, 120 bp, Artificial Sequence
  ENSG00000107679_140 (sequence is synthesized)
tccattagaactttctgcacaaatggaaatgtgccgtatctgtattgtccaagggcactagctacatgtagctgttgagtgctggaaatgtggctagtgtgactgaggaactgacttaat

SEQ ID NO: 162769 - DNA, 120 bp, Artificial Sequence
  ENSG00000107679_141 (sequence is synthesized)
ttcattttaattaatttatatttacatcattacacacaatggccactgtattggccagcagagcactagtgtataggaaggggatattttaagattcacctcaggagtcagctcttctgg

SEQ ID NO: 162770 - DNA, 120 bp, Artificial Sequence
  ENSG00000107679_142 (sequence is synthesized)
gaagcttttagactctgggttaagtgtcttctctttatatgccctgtggtaccctatgcatacttgtatcataatgctcttcccagagttttgcaatcacgtgcattcttgtctttgcaa

SEQ ID NO: 162771 - DNA, 120 bp, Artificial Sequence
  ENSG00000107679_143 (sequence is synthesized)
ctaaattaaatgagcttcttaagggtaaagactcttgtagtcttttatgatcacagggcctggcacttgatagacaataagtgtctttgaatgaatgaaaaatggcatagcatagcaaga

SEQ ID NO: 162772 - DNA, 120 bp, Artificial Sequence
  ENSG00000107679_144 (sequence is synthesized)
aatgccattttagtatggggctttctcaaagcttaagagcctcaactggaagtagtagttacttggttcagaaagtacctgccttgttgtctcaggaggctatccttgtgcttggttagc

SEQ ID NO: 162773 - DNA, 120 bp, Artificial Sequence
  ENSG00000107679_145 (sequence is synthesized)
aggttgtctcatagattttatttaaagccaatactcccgggaagagtcattcatgcagcagacattcattgagctctccatgaacctggtgcactgttctgggaactgaaaataaaagag

SEQ ID NO: 162774 - DNA, 120 bp, Artificial Sequence
  ENSG00000107679_146 (sequence is synthesized)
aataattagcaaagttctctggccttcaggagttcagttttggtggggaaattgacgtgtgcccccatcatcaacagtagttttaataattaggaatatttttagtatttagaaattgca

SEQ ID NO: 162775 - DNA, 120 bp, Artificial Sequence
  ENSG00000107679_147 (sequence is synthesized)
gataaagctgaaaacctttaaaggtcagtaattataactatacttaagttttcctaattttacggagtatagtttatctcctatggtagttctttgttcttcctctcaaatttcacagaa

SEQ ID NO: 162776 - DNA, 120 bp, Artificial Sequence
  ENSG00000107679_148 (sequence is synthesized)
taatgcccagcatacaggttttcaaaacttagtatttctgtaatagttcttgtttcagctccccctcccccagttttaacatttctgaaatcttagcagtatgtcttagagttgctaagg

SEQ ID NO: 162777 - DNA, 120 bp, Artificial Sequence
  ENSG00000107679_149 (sequence is synthesized)
acgaggggcagccaggctgcagctgtgctgtagttgactgcttgccatatgcacagtacctttgggtaaaatccagaagacaccggcatcagcatgtgcagaaaagggtgctggcagctt

SEQ ID NO: 162778 - DNA, 120 bp, Artificial Sequence
  ENSG00000107679_150 (sequence is synthesized)
gggaggaaatctcagggacaccatgaaacattcttaaatactgcatcaccaacactctttttggcacaaagaatggcttggagtgaaaaatatggacattggtggctccaagtcaaaaag

SEQ ID NO: 162779 - DNA, 120 bp, Artificial Sequence
  ENSG00000107679_151 (sequence is synthesized)
tgattcagaagatctggaatctgaatgtgaaatcttaaaaactataaccagtttatcttgtctatatttttcttttttatatatgctcaagaataatatatgataaaaatgtttaaagtg

SEQ ID NO: 162780 - DNA, 120 bp, Artificial Sequence
  ENSG00000107679_152 (sequence is synthesized)
taaatgggctcttttataaaaccttttcatcatggaaaagtgtaaacatacccttttagtagatagaaataatacatggaacctgcatatacccatcacctagatgtcataattgttaac

SEQ ID NO: 162781 - DNA, 120 bp, Artificial Sequence
  ENSG00000107679_153 (sequence is synthesized)
acatggctcagcttgtcttgtttcttctgtttcaccacccacttcctgcttcatattttgaggcaaatcctagatgtctcccatttcatctgtaaatatctcagtgtgtatctctaaaag

SEQ ID NO: 162782 - DNA, 120 bp, Artificial Sequence
  ENSG00000107679_154 (sequence is synthesized)
atcatttaaaaattttaaaaataagtataaaagacttaagtgcacagccgaaaaattggtgaaaatatttgcaacatgtattagagataaaacttacaaggaatcttaaaaactgagggg

SEQ ID NO: 162783 - DNA, 120 bp, Artificial Sequence
  ENSG00000107679_155 (sequence is synthesized)
ggaaccagtgtagctttgtgtgggtgtcagagcccacgcaggacaaggaggctgtcctcttggggggttagccccacgcggagtagggagagaagggcatccacatggggaggggtggtg

SEQ ID NO: 162784 - DNA, 120 bp, Artificial Sequence
  ENSG00000107679_156 (sequence is synthesized)
gcagagatgggagaatggtcacatacacactgattgataaaatcaagaactatattaaggataatagaagccaaatcttgtcagagaaacaatactttttggtgaatggatgtatatctg

SEQ ID NO: 162785 - DNA, 120 bp, Artificial Sequence
  ENSG00000107679_157 (sequence is synthesized)
tatgtatgatgaggaatgaaatatttacatagtttcaaagtacctgtctactaaaataggtattaagtgttgtacaagggggaaaagaataacattacagtgaggaaacctggcagatac

SEQ ID NO: 162786 - DNA, 120 bp, Artificial Sequence
  ENSG00000107679_158 (sequence is synthesized)
cactttactcaggtggtcagatgattaaagtgaatgtcattggtaatgaggtaaattgaaatcacctgacaggatagtggaagacgaagacagcatcacttctgtgaaatccctgcccaa

SEQ ID NO: 162787 - DNA, 120 bp, Artificial Sequence
  ENSG00000107679_159 (sequence is synthesized)
ggtatgtaatcagaatcccatcatgaggcacacccaaatgagggacattctacaaaataactaccttgcaatcttcatagagtgaagattatgaaagtcaaggaataatgaggaactgtt

SEQ ID NO: 162788 - DNA, 120 bp, Artificial Sequence
  ENSG00000107679_160 (sequence is synthesized)
ccagactgagggaaagaaaatatttgacaagcagatggtattcgtgcttctgaactgaattcttttgctctaataaaagacattttgggcacagttttctgattctgatgattgtattgt

SEQ ID NO: 162789 - DNA, 120 bp, Artificial Sequence
  ENSG00000107679_161 (sequence is synthesized)
gattatgtaagagaatgtaggaaaagtattcaggggtagtgtgggacaggtcagcaactcactctgaaatggttcaggaaaatcagttctttatgctgtattttcaatccttgtataaat

SEQ ID NO: 162790 - DNA, 120 bp, Artificial Sequence
  ENSG00000107679_162 (sequence is synthesized)
tcgtgtttgtttcaaagattaaaaaaagagagaaaatggaggggaaaatacctggtaggcaaatgaacaaaagacatgaataggcaattcatttaaaaattaaaataggtcttaaaatat

SEQ ID NO: 162791 - DNA, 120 bp, Artificial Sequence
  ENSG00000107679_163 (sequence is synthesized)
ttaaaaaaattcagcatcactgataattagagaaatgcaaattaaaactgcaatgaaatattctcatctgtcatgagaaggttgtggctgagttaagagattggcaaatccccacccacc

SEQ ID NO: 162792 - DNA, 120 bp, Artificial Sequence
  ENSG00000107679_164 (sequence is synthesized)
ctgcccaaaagcaactgtaaatgccattctgtaaacaaaaggaatcaggaacccttggtgatgtgactgatttcagagctggggcagataaagtacaagctgagctcagaaagtgaagtt

SEQ ID NO: 162793 - DNA, 120 bp, Artificial Sequence
  ENSG00000107679_165 (sequence is synthesized)
gtgccagaggataaggaagtggctcagagaatgaatggaacatgtcaaaaggacacagaaattaccttgaaggagctgaccaaaatgcagacaatttaaacaacaaaataagtaatgata

SEQ ID NO: 162794 - DNA, 120 bp, Artificial Sequence
  ENSG00000107679_166 (sequence is synthesized)
gtaatggaatataacccatagaataaaaatgagtcataaataaataaatggagaaggaaaaatatttccttagagtaaaattctatttaatatatgtagatggattgatggggttagaaa

SEQ ID NO: 162795 - DNA, 120 bp, Artificial Sequence
  ENSG00000107679_167 (sequence is synthesized)
aatcaccatttggcagccactagtaatggtttcaggcaggagttttcagggtttgataaaactagttgcaaaattatgatgggaaacctggtattactataggttccaggtatctcccca

SEQ ID NO: 162796 - DNA, 120 bp, Artificial Sequence
  ENSG00000107679_168 (sequence is synthesized)
caagatacttaacagtgacaaagggaaaaagtaattttacagctactggcaaacatgaccttaagcaacagatcagggttaacacaccagtgacaggacaagccaccatcgggtgtgtac

SEQ ID NO: 162797 - DNA, 120 bp, Artificial Sequence
  ENSG00000107679_169 (sequence is synthesized)
ctcctaatagtggtccactgagaagaacagtgtcatgtctgtggcttcctgtcaaaagtgtataaactgaatctcagcacgaataacaggcaaacccagactgggaggtgttctacaaaa

SEQ ID NO: 162798 - DNA, 120 bp, Artificial Sequence
  ENSG00000107679_170 (sequence is synthesized)
ataactggcctgcacttctttaaactctgaaaaacgaatgaagaactattccacagttaaaggcgacatgacagctacatacatggtatgatcctggatttaactctggatcagaaaatg

SEQ ID NO: 162799 - DNA, 120 bp, Artificial Sequence
  ENSG00000107679_171 (sequence is synthesized)
gtttttgtgctgtaaagaatacaggtagggcaattaatgaaatctgaagatggtctgtagattatagtattgcatcagtgttgagtttccagttttcataattgcactgtggttatgcaa

SEQ ID NO: 162800 - DNA, 120 bp, Artificial Sequence
  ENSG00000107679_172 (sequence is synthesized)
gagcacatccatgttttaggaaatacacactgaagcgtttagtaaaggtacatcatatttacaacttaaccttcaagcatttcaggaatctatatatatacatatactctgtcacacaca

SEQ ID NO: 162801 - DNA, 120 bp, Artificial Sequence
  ENSG00000107679_173 (sequence is synthesized)
tatataaacataaacagataatgataaagcaaatgtaaaatatcaacagtttagaaaacaaggtgtaggttatgcagaaattctttgtactgtttttctcagtctcttattaagtgtgaa

SEQ ID NO: 162802 - DNA, 120 bp, Artificial Sequence
  ENSG00000107679_174 (sequence is synthesized)
attaagtgtgaaattatttcaaaattaaactattttgtaaaactttttaaaaaagatctatgatttttttttttttttttaaaaaagcactcccagctgggcgtggtggctcacgcctgt

SEQ ID NO: 162803 - DNA, 120 bp, Artificial Sequence
  ENSG00000107679_175 (sequence is synthesized)
aaaaaaaacaaaaaaaacaacaacactctgtcatggtttagttttatttttggtgctacataaagtaatggtatgtcttaatctcacgctgtcatattcaatgaaatatgtatattgtat

SEQ ID NO: 162804 - DNA, 120 bp, Artificial Sequence
  ENSG00000107679_176 (sequence is synthesized)
tgtatattgtattttatggaatgtatactagaaatatgctattaggaaccagttttatatttgtatcttatatctactttgtaaccttgggtgagatacttaacatgtctaatctgcagt

SEQ ID NO: 162805 - DNA, 120 bp, Artificial Sequence
  ENSG00000107679_177 (sequence is synthesized)
ttcagcacatgaatagtagtacatgtgttgtagggttggggaaagtgtgagataaaacatttaaaagctagcagatgtctcagcacttagtaaacattcaattttgtatttatataaaag

SEQ ID NO: 162806 - DNA, 120 bp, Artificial Sequence
  ENSG00000107679_178 (sequence is synthesized)
tgatatttgtaaaatcacaaatttaagtcaaagaagcaggatgtgcacttgctctgctgccttgtatatcaaagtgacattccagaaaaggagatgctgtgcatactggtacgtgggtcc

SEQ ID NO: 162807 - DNA, 120 bp, Artificial Sequence
  ENSG00000107679_179 (sequence is synthesized)
gtcggggaaagtctgatggctaatagcttttaattagttacactgcccttaaggccagaaataatgtgaataagggccgtatgcagtttttcttgtttcaaacaacagtgtatataaggt

SEQ ID NO: 162808 - DNA, 120 bp, Artificial Sequence
  ENSG00000107679_180 (sequence is synthesized)
tatagtgtttgagctattcagatgctggatggtttaagaaggtagatttatttctgagatgtgcttcagaaaagaagtgtgattttcacatgggtcttcaaataagacagctaacctttg

SEQ ID NO: 162809 - DNA, 120 bp, Artificial Sequence
  ENSG00000107679_181 (sequence is synthesized)
attagaggtgaaataaacataaacaagcttgttgcacttgaggttaaaaaaatatgacaactgtaattcaccagcttaataaaagggtactgtatatagagttattggtggggttatatg

SEQ ID NO: 162810 - DNA, 120 bp, Artificial Sequence
  ENSG00000107679_182 (sequence is synthesized)
ttcaggaagtgggagtatttgttatgaattagtgaactagaactaagtatttagagaaagggaaatgcttttaatttagatgttaagtgtgtactttcaagttggattatttttgcacat

SEQ ID NO: 162811 - DNA, 120 bp, Artificial Sequence
  ENSG00000107679_183 (sequence is synthesized)
gttttagaattttgatttttctattatatcattttttggtaaccttattaaaaaaacccatagtaaaagtagacagtagatttatatagtttcactaatagtaggcatcctgtatttaag

SEQ ID NO: 162812 - DNA, 120 bp, Artificial Sequence
  ENSG00000107679_184 (sequence is synthesized)
gtaggcatcctgtatttaagtttaaattgtactttttgcatacttcattgaattatttaaatggaaaattttaaaaaaagatttgggccggctgtgttggctcacacctgtaatcccagc

SEQ ID NO: 162813 - DNA, 74 bp, Artificial Sequence
  ENSG00000107679_185 (sequence is synthesized)
tggtgtgcaggcttgtaatcctagcttacagtgagctgagatcgtgttactgcactccagcctgggtgacagag

SEQ ID NO: 162814 - DNA, 120 bp, Artificial Sequence
  ENSG00000107679_186 (sequence is synthesized)
gggccaggcgcgaggtggcggcggctgcggggctgccgggctgctggagcgcggttcccgctgtggcgagcggggaggcgtccgcagaggggcggtgggtgctgtctggctcttgctgat

SEQ ID NO: 162815 - DNA, 80 bp, Artificial Sequence
  ENSG00000107719_0 (sequence is synthesized)
acgggccggggcgcgcaggtcccgtcgccggtgagcacgggctccctctcgcgtggcctcgccgggtccgcctggcctgc

SEQ ID NO: 162816 - DNA, 120 bp, Artificial Sequence
  ENSG00000107719_1 (sequence is synthesized)
ccacctccggagccacctctgcccccgcatgggctggcgaagttgggaggagcgagctggagccagagcgcgcgccgggcgcgccccgtcgctgcctgactcggcgcccgcagttcgggc

SEQ ID NO: 162817 - DNA, 120 bp, Artificial Sequence
  ENSG00000107719_2 (sequence is synthesized)
gcagcacgccggccgcaggagcacggatgccccccggagccgcgggctggcaggtctggggtcctgaggctgctggcagactatgggtacaacggccagcacagcccagcagacggtctc

SEQ ID NO: 162818 - DNA, 120 bp, Artificial Sequence
  ENSG00000107719_3 (sequence is synthesized)
ggcaggcaccccatttgagggcctacagggcagtggcacgatggacagtcggcactccgtcagcatccactccttccagagcactagcttgcataacagcaaggccaagtccatcatccc

SEQ ID NO: 162819 - DNA, 120 bp, Artificial Sequence
  ENSG00000107719_4 (sequence is synthesized)
caacaaggtggcccctgttgtgatcacgtacaactgcaaggaggagttccagatccatgatgagctgctcaaggctcattacacgttgggccggctctcggacaacacccctgagcacta

SEQ ID NO: 162820 - DNA, 120 bp, Artificial Sequence
  ENSG00000107719_5 (sequence is synthesized)
cctggtgcaaggccgctacttcctggtgcgggatgtcactgagaagatggatgtgctgggcaccgtgggaagctgtggggcccccaacttccggcaggtgcagggtgggctcactgtgtt

SEQ ID NO: 162821 - DNA, 120 bp, Artificial Sequence
  ENSG00000107719_6 (sequence is synthesized)
cggcatgggacagcccagcctctcagggttcaggcgggtcctccagaaactccagaaggacggacatagggagtgtgtcatcttctgtgtgcgggaggaacctgtgcttttcctgcgtgc

SEQ ID NO: 162822 - DNA, 120 bp, Artificial Sequence
  ENSG00000107719_7 (sequence is synthesized)
agatgaggactttgtgtcctacacacctcgagacaagcagaaccttcatgagaacctccagggccttggacccggggtccgggtggagagcctggagctggccatccggaaagagatcca

SEQ ID NO: 162823 - DNA, 120 bp, Artificial Sequence
  ENSG00000107719_8 (sequence is synthesized)
cgactttgcccagctgagcgagaacacataccatgtgtaccataacaccgaggacctgtggggggagccccatgctgtggccatccatggtgaggacgacttgcatgtgacggaggaggt

SEQ ID NO: 162824 - DNA, 120 bp, Artificial Sequence
  ENSG00000107719_9 (sequence is synthesized)
gtacaagcggcccctcttcctgcagcccacctacaggtaccaccgcctgcccctgcccgagcaagggagtcccctggaggcccagttggacgcctttgtcagtgttctccgggagacccc

SEQ ID NO: 162825 - DNA, 120 bp, Artificial Sequence
  ENSG00000107719_10 (sequence is synthesized)
cagcctgctgcagctccgtgatgcccacgggcctcccccagccctcgtcttcagctgccagatgggcgtgggcaggaccaacctgggcatggtcctgggcaccctcatcctgcttcaccg

SEQ ID NO: 162826 - DNA, 120 bp, Artificial Sequence
  ENSG00000107719_11 (sequence is synthesized)
cagtgggaccacctcccagccagaggctgcccccacgcaggccaagcccctgcctatggagcagttccaggtgatccagagctttctccgcatggtgccccagggaaggaggatggtgga

SEQ ID NO: 162827 - DNA, 120 bp, Artificial Sequence
  ENSG00000107719_12 (sequence is synthesized)
agaggtggacagagccatcactgcctgtgccgagttgcatgacctgaaagaagtggtcttggaaaaccagaagaagttagaaggtatccgaccggagagcccagcccagggaagcggcag

SEQ ID NO: 162828 - DNA, 120 bp, Artificial Sequence
  ENSG00000107719_13 (sequence is synthesized)
ccgacacagcgtctggcagagggcgctgtggagcctggagcgatacttctacctgatcctgtttaactactaccttcatgagcagtacccgctggcctttgccctcagtttcagccgctg

SEQ ID NO: 162829 - DNA, 120 bp, Artificial Sequence
  ENSG00000107719_14 (sequence is synthesized)
gctgtgtgcccaccctgagctgtaccgcctgcccgtgacgctgagctcagcaggccctgtggctccgagggacctcatcgccaggggctccctacgggaggacgatctggtctccccgga

SEQ ID NO: 162830 - DNA, 120 bp, Artificial Sequence
  ENSG00000107719_15 (sequence is synthesized)
cgcgctcagcactgtcagagagatggatgtggccaacttccggcgggtgccccgcatgcccatctacggcacggcccagcccagcgccaaggccctggggagcatcctggcctacctgac

SEQ ID NO: 162831 - DNA, 120 bp, Artificial Sequence
  ENSG00000107719_16 (sequence is synthesized)
ggacgccaagaggaggctgcggaaggttgtctgggtgagccttcgggaggaggccgtgttggagtgtgacgggcacacctacagcctgcggtggcctgggccccctgtggctcctgacca

SEQ ID NO: 162832 - DNA, 120 bp, Artificial Sequence
  ENSG00000107719_17 (sequence is synthesized)
gctggagaccctggaggcccagctgaaggcccatctaagcgagcctcccccaggcaaggagggccccctgacctacaggttccagacctgccttaccatgcaggaggtcttcagccagca

SEQ ID NO: 162833 - DNA, 120 bp, Artificial Sequence
  ENSG00000107719_18 (sequence is synthesized)
ccgcagggcctgtcctggcctcacctaccaccgcatccccatgccggacttctgtgccccccgagaggaggactttgaccagctgctggaggccctgcgggccgccctctccaaggaccc

SEQ ID NO: 162834 - DNA, 120 bp, Artificial Sequence
  ENSG00000107719_19 (sequence is synthesized)
ctgcgatggtggtggctgtcctggccttctggcacatccaaggcttccccgaggtgggtgaggaggagctcgtgagtgtgcctgatgccaagttcactaagggtgaatttcaggtagtaa

SEQ ID NO: 162835 - DNA, 120 bp, Artificial Sequence
  ENSG00000107719_20 (sequence is synthesized)
tgaaggtggtgcagctgctacccgatgggcaccgtgtgaagaaggaggtggacgcagcgctggacactgtcagcgagaccatgacgcccatgcactaccacctgcgggagatcatcatct

SEQ ID NO: 162836 - DNA, 120 bp, Artificial Sequence
  ENSG00000107719_21 (sequence is synthesized)
gcacctaccgccaggcgaaggcagcgaaagaggcgcaagaaatgcggaggctgcagctgcggagcctgcagtacttggagcgctatgtctgcctgattctcttcaacgcgtacctccacc

SEQ ID NO: 162837 - DNA, 120 bp, Artificial Sequence
  ENSG00000107719_22 (sequence is synthesized)
tggagaaggccgactcctggcagaggcccttcagcacctggatgcaggaggtggcatcgaaggctggcatctacgagatccttaacgagctgggcttccccgagctggagagcggggagg

SEQ ID NO: 162838 - DNA, 120 bp, Artificial Sequence
  ENSG00000107719_23 (sequence is synthesized)
accagcccttctccaggctgcgctaccggtggcaggagcagagctgcagcctcgagccctctgcccccgaggacttgctgtagggggccttactccctgtccccccacccacagggcccc

SEQ ID NO: 162839 - DNA, 120 bp, Artificial Sequence
  ENSG00000107719_24 (sequence is synthesized)
acgcaggcctggggtgtctgaggtgctcttggctgggagcggccctgaggggtgctggccttgaaatgattcccccacttcctggagagactgagcggagttgggagcctttttagaaag

SEQ ID NO: 162840 - DNA, 120 bp, Artificial Sequence
  ENSG00000107719_25 (sequence is synthesized)
aactttttataggacagggagacagcacagccatcccttgcaaaccaccaaggtgtgtggctgacctccagggaggagcactcactggagtgctcacaaggtgcacactgctgtgtgtac

SEQ ID NO: 162841 - DNA, 120 bp, Artificial Sequence
  ENSG00000107719_26 (sequence is synthesized)
cttgcagacaggccggcgttcagcctccaaggggctcactcccccagttgccaaacactgtggatctctctgtcctcttctcccctctctcagattggcctggcagcccctggcacagag

SEQ ID NO: 162842 - DNA, 120 bp, Artificial Sequence
  ENSG00000107719_27 (sequence is synthesized)
cagacccggccactggtagctccccacttccttactcctgctgctctgccattgccgctccccttgttgctgcccaagcactgccctcgggcgtctggcagcctgaggtgggtggagggg

SEQ ID NO: 162843 - DNA, 120 bp, Artificial Sequence
  ENSG00000107719_28 (sequence is synthesized)
acagtgttctggatagatctattatgtgaaaggcagcttcacccagttttctggactctcatgcccccatctccgacctgggagacttcaggaatgacaacctacccagcctggtggggc

SEQ ID NO: 162844 - DNA, 120 bp, Artificial Sequence
  ENSG00000107719_29 (sequence is synthesized)
tggcaggatggtggaggtttctcaaggagctggagacttcagggagcccctctcatggggaggaaagagcttccagggggcgaacgcagcacagaggaagaggcctgctccacttgtctg

SEQ ID NO: 162845 - DNA, 120 bp, Artificial Sequence
  ENSG00000107719_30 (sequence is synthesized)
ggaacctgggcaggaggcacagaggaagccaaggcctggagctgcaggtcccccggcatctctctctgtcccggcagcccaggatggcctggtgcccccacctgctgcagcaggagcccc

SEQ ID NO: 162846 - DNA, 120 bp, Artificial Sequence
  ENSG00000107719_31 (sequence is synthesized)
aaggagtgctagctgagggtggttgctggggtggtcctcatggacagtgaggtgtgcaagggtgcactgagggtggtgggaggggatcacctgggttccaggccatccttgctgagcatc

SEQ ID NO: 162847 - DNA, 120 bp, Artificial Sequence
  ENSG00000107719_32 (sequence is synthesized)
tttgagcctgccttccggtgggagcagaaaaggccagaccctgctgagttagaggctgctgggatccactgtttccacacagcgggaaggctgctgggaacaggtggcagagaagtgcca

SEQ ID NO: 162848 - DNA, 120 bp, Artificial Sequence
  ENSG00000107719_33 (sequence is synthesized)
tgtttgcgttgagccttgcagctcttccagctggggactggtgcttgctgaaacccaggagctgaacagtgaggaggctgtccaccttgcttggctcactgggaccaggaaagcctgtct

SEQ ID NO: 162849 - DNA, 120 bp, Artificial Sequence
  ENSG00000107719_34 (sequence is synthesized)
ttggttaggctcgtgtacttctgcaggaaaaaaaaaaaaggatgtgtcattggtcatgatatttgaaaaggggaggaggccgaagttgttcccatttatccagtattggaaaatatttga

SEQ ID NO: 162850 - DNA, 120 bp, Artificial Sequence
  ENSG00000107719_35 (sequence is synthesized)
cccccttggctgaattcttttgcagaactactgtgtgtctgttcactaccttttcaggtttattgtttttatttttgcatgaattaagacgttttaatttctttgcagacaaggtctaga

SEQ ID NO: 162851 - DNA, 120 bp, Artificial Sequence
  ENSG00000107719_36 (sequence is synthesized)
tgcggagtcagagatgggactgaatggggagggatcctttgtgttctcatggttggctctgactttcagctgtgttgggaccactggctgatcacatcacctctctgcctcagtttcccc

SEQ ID NO: 162852 - DNA, 120 bp, Artificial Sequence
  ENSG00000107719_37 (sequence is synthesized)
atctgtaaaatgggagaataatacttgcctacctacctcacaggggtgttgtgaggattcatttgtgattttttttttttttgtacagagcttttaagcattaaaaacagctaaatgtga

SEQ ID NO: 162853 - DNA, 120 bp, Artificial Sequence
  ENSG00000107731_0 (sequence is synthesized)
ctagggcgccggagccgcacgcagccgcggggctccgagaggcgcgcactggggctgggactgcgcggcgccgccgctgcgagcgccactgagcggtcgcgcaacttcggaggcacagcg

SEQ ID NO: 162854 - DNA, 120 bp, Artificial Sequence
  ENSG00000107731_1 (sequence is synthesized)
tcgcgcaacttcggaggcacagcgccggagccaggcgagcgctcagagacccggagccagaggggcgcgccggagcctcgttcgagagccggcgccaggcacccaccgcgctccgagtgc

SEQ ID NO: 162855 - DNA, 80 bp, Artificial Sequence
  ENSG00000107731_2 (sequence is synthesized)
caggcggccctccgcgcagcgtggcttccgctgcccccacggaaggcacgggctggcgctgccgggcgccggggaggacg

SEQ ID NO: 162856 - DNA, 120 bp, Artificial Sequence
  ENSG00000107731_3 (sequence is synthesized)
actggggccagggagacagccctgggggagaggcgcccgaaccaggccgcgggagcatgggggcccggagcggagctcggggcgcgctgctgctggcactgctgctctgctgggacccga

SEQ ID NO: 162857 - DNA, 120 bp, Artificial Sequence
  ENSG00000107731_4 (sequence is synthesized)
ggctgagccaagcaggcactgattctggcagcgaggtgctccctgactccttcccgtcagcgccagcagagccgctgccctacttcctgcaggagccacaggacgcctacattgtgaaga

SEQ ID NO: 162858 - DNA, 120 bp, Artificial Sequence
  ENSG00000107731_5 (sequence is synthesized)
acaagcctgtggagctccgctgccgcgccttccccgccacacagatctacttcaagtgcaacggcgagtgggtcagccagaacgaccacgtcacacaggaaggcctggatgaggccaccg

SEQ ID NO: 162859 - DNA, 120 bp, Artificial Sequence
  ENSG00000107731_6 (sequence is synthesized)
gcctgcgggtgcgcgaggtgcagatcgaggtgtcgcggcagcaggtggaggagctctttgggctggaggattactggtgccagtgcgtggcctggagctccgcgggcaccaccaagagtc

SEQ ID NO: 162860 - DNA, 120 bp, Artificial Sequence
  ENSG00000107731_7 (sequence is synthesized)
gccgagcctacgtccgcatcgcctacctgcgcaagaacttcgatcaggagcctctgggcaaggaggtgcccctggaccatgaggttctcctgcagtgccgcccgccggagggggtgcctg

SEQ ID NO: 162861 - DNA, 120 bp, Artificial Sequence
  ENSG00000107731_8 (sequence is synthesized)
tggccgaggtggaatggctcaagaatgaggatgtcatcgaccccacccaggacaccaacttcctgctcaccatcgaccacaacctcatcatccgccaggcccgcctgtcggacactgcca

SEQ ID NO: 162862 - DNA, 120 bp, Artificial Sequence
  ENSG00000107731_9 (sequence is synthesized)
actatacctgcgtggccaagaacatcgtggccaaacgccggagcaccactgccaccgtcatcgtctacgtgaatggcggctggtccagctgggcagagtggtcaccctgctccaaccgct

SEQ ID NO: 162863 - DNA, 120 bp, Artificial Sequence
  ENSG00000107731_10 (sequence is synthesized)
gtggccgaggctggcagaagcgcacccggacctgcaccaaccccgctccactcaacggaggggccttctgcgagggccaggcattccagaagaccgcctgcaccaccatctgcccagtcg

SEQ ID NO: 162864 - DNA, 120 bp, Artificial Sequence
  ENSG00000107731_11 (sequence is synthesized)
atggggcgtggacggagtggagcaagtggtcagcctgcagcactgagtgtgcccactggcgtagccgcgagtgcatggcgcccccaccccagaacggaggccgtgactgcagcgggacgc

SEQ ID NO: 162865 - DNA, 120 bp, Artificial Sequence
  ENSG00000107731_12 (sequence is synthesized)
tgctcgactctaagaactgcacagatgggctgtgcatgcaaaataagaaaactctaagcgaccccaacagccacctgctggaggcctcaggggatgcggcgctgtatgcggggctcgtgg

SEQ ID NO: 162866 - DNA, 120 bp, Artificial Sequence
  ENSG00000107731_13 (sequence is synthesized)
tggccatcttcgtggtcgtggcaatcctcatggcggtgggggtggtggtgtaccgccgcaactgccgtgacttcgacacagacatcactgactcatctgctgccctgactggtggtttcc

SEQ ID NO: 162867 - DNA, 120 bp, Artificial Sequence
  ENSG00000107731_14 (sequence is synthesized)
accccgtcaactttaagacggcaaggcccagcaacccgcagctcctacacccctctgtgcctcctgacctgacagccagcgccggcatctaccgcggacccgtgtatgccctgcaggact

SEQ ID NO: 162868 - DNA, 120 bp, Artificial Sequence
  ENSG00000107731_15 (sequence is synthesized)
ccaccgacaaaatccccatgaccaactctcctctgctggaccccttacccagccttaaggtcaaggtctacagctccagcaccacgggctctgggccaggcctggcagatggggctgacc

SEQ ID NO: 162869 - DNA, 120 bp, Artificial Sequence
  ENSG00000107731_16 (sequence is synthesized)
tgctgggggtcttgccgcctggcacataccctagcgatttcgcccgggacacccacttcctgcacctgcgcagcgccagcctcggttcccagcagctcttgggcctgccccgagacccag

SEQ ID NO: 162870 - DNA, 120 bp, Artificial Sequence
  ENSG00000107731_17 (sequence is synthesized)
ggagcagcgtcagcggcacctttggctgcctgggtgggaggctcagcatccccggcacaggggtcagcttgctggtgcccaatggagccattccccagggcaagttctacgagatgtatc

SEQ ID NO: 162871 - DNA, 120 bp, Artificial Sequence
  ENSG00000107731_18 (sequence is synthesized)
tactcatcaacaaggcagaaagtaccctcccgctttcagaagggacccagacagtattgagcccctcggtgacctgtggacccacaggcctcctgctgtgccgccccgtcatcctcacca

SEQ ID NO: 162872 - DNA, 120 bp, Artificial Sequence
  ENSG00000107731_19 (sequence is synthesized)
tgccccactgtgccgaagtcagtgcccgtgactggatctttcagctcaagacccaggcccaccagggccactgggaggaggtggtgaccctggatgaggagaccctgaacacaccctgct

SEQ ID NO: 162873 - DNA, 120 bp, Artificial Sequence
  ENSG00000107731_20 (sequence is synthesized)
actgccagctggagcccagggcctgtcacatcctgctggaccagctgggcacctacgtgttcacgggcgagtcctattcccgctcagcagtcaagcggctccagctggccgtcttcgccc

SEQ ID NO: 162874 - DNA, 120 bp, Artificial Sequence
  ENSG00000107731_21 (sequence is synthesized)
ccgccctctgcacctccctggagtacagcctccgggtctactgcctggaggacacgcctgtagcactgaaggaggtgctggagctggagcggactctgggcggatacttggtggaggagc

SEQ ID NO: 162875 - DNA, 120 bp, Artificial Sequence
  ENSG00000107731_22 (sequence is synthesized)
cgaaaccgctaatgttcaaggacagttaccacaacctgcgcctctccctccatgacctcccccatgcccattggaggagcaagctgctggccaaataccaggagatccccttctatcaca

SEQ ID NO: 162876 - DNA, 120 bp, Artificial Sequence
  ENSG00000107731_23 (sequence is synthesized)
tttggagtggcagccagaaggccctccactgcactttcaccctggagaggcacagcttggcctccacagagctcacctgcaagatctgcgtgcggcaagtggaaggggagggccagatat

SEQ ID NO: 162877 - DNA, 120 bp, Artificial Sequence
  ENSG00000107731_24 (sequence is synthesized)
tccagctgcataccactctggcagagacacctgctggctccctggacactctctgctctgcccctggcagcactgtcaccacccagctgggaccttatgccttcaagatcccactgtcca

SEQ ID NO: 162878 - DNA, 120 bp, Artificial Sequence
  ENSG00000107731_25 (sequence is synthesized)
tccgccagaagatatgcaacagcctagatgcccccaactcacggggcaatgactggcggatgttagcacagaagctctctatggaccggtacctgaattactttgccaccaaagcgagcc

SEQ ID NO: 162879 - DNA, 120 bp, Artificial Sequence
  ENSG00000107731_26 (sequence is synthesized)
ccacgggtgtgatcctggacctctgggaagctctgcagcaggacgatggggacctcaacagcctggcgagtgccttggaggagatgggcaagagtgagatgctggtggctgtggccaccg

SEQ ID NO: 162880 - DNA, 120 bp, Artificial Sequence
  ENSG00000107731_27 (sequence is synthesized)
acggggactgctgagcctcctgggacagcgggctggcagggactggcaggaggcaggtgcagggaggcctggggcagcctcctgatggggatgtttggcctctgcttcctcccagttcac

SEQ ID NO: 162881 - DNA, 120 bp, Artificial Sequence
  ENSG00000107731_28 (sequence is synthesized)
gccagagttgcctctcctcctcctcttccccaacccccagaccatgaccagccttagaaaatccatgtactctgttgttagagggcccagagttccttctccacccccgctctctctctc

SEQ ID NO: 162882 - DNA, 120 bp, Artificial Sequence
  ENSG00000107731_29 (sequence is synthesized)
ttggcctgagatctctgtgcaggaaccaagatggggctgaagcctctggaggcagttggttgggggcgggcaggcaggaggccctccctccacccccccaccctcagcccggcaacttct

SEQ ID NO: 162883 - DNA, 120 bp, Artificial Sequence
  ENSG00000107731_30 (sequence is synthesized)
gggttccatgggttttagttccgttctcgttttcttcctccgttattgatttctcctttctccctaagcccccttctgcttccacgcccttttcctctttgaagagtcaagtacaattca

SEQ ID NO: 162884 - DNA, 120 bp, Artificial Sequence
  ENSG00000107731_31 (sequence is synthesized)
gacaaactgctttctcctgtccaaaagcaaaaaggcaaaggaaagaaagaaagcttcagaccgctagtaaggctcaaagaagaagaaaaacaccaaaaccacaagggaaaagaaaaaccc

SEQ ID NO: 162885 - DNA, 120 bp, Artificial Sequence
  ENSG00000107731_32 (sequence is synthesized)
agtttcttaggaaacgcaaacgatttattatccagattatttggataagtcctttttaagaaaaaaaaagaaaatgaaaaacaacacaaaaaaaatagaaaactcttttcttgagtgtgg

SEQ ID NO: 162886 - DNA, 78 bp, Artificial Sequence
  ENSG00000107731_33 (sequence is synthesized)
acaacacaaaaaaaatagaaaactcttttcttgagtgtggatgagaatgggcacgctcacacttctggccaggagtga

SEQ ID NO: 162887 - DNA, 120 bp, Artificial Sequence
  ENSG00000107731_34 (sequence is synthesized)
agtactttgctgctaacgaatccatcttggactaaattctgacaaggcctcagtttccccagttgtgcagggagtaggtcagacagggttttcactgtctagatttagctggttagattt

SEQ ID NO: 162888 - DNA, 120 bp, Artificial Sequence
  ENSG00000107731_35 (sequence is synthesized)
tcctctaaaatcttaagcagatgctgaatccataaagccaaggagtgctgagggctggagtgggtgggccctccctcccacagccccagggagatacatctggactcctgggaatctgga

SEQ ID NO: 162889 - DNA, 120 bp, Artificial Sequence
  ENSG00000107731_36 (sequence is synthesized)
ttaagaaagttgggatgaaagaggaggactgctcaggccagttgtgagccagggagaatgttccagtctggttttggtctggtggctcctagaaagggatgtggcccagaagtgggactc

SEQ ID NO: 162890 - DNA, 120 bp, Artificial Sequence
  ENSG00000107731_37 (sequence is synthesized)
aaacagagagatgaagtaggggaggggagtcctccacgggcatctctctcctggcggctggatagctttaccctagggtggggccagccctgacaccctcatcccctcctcagcccagca

SEQ ID NO: 162891 - DNA, 120 bp, Artificial Sequence
  ENSG00000107731_38 (sequence is synthesized)
gcctctagagcagcgtggtgctctcttgatggccaggaatccagaatctgcccttccccaaccttggtttctccttctgtaaagcagagtgatggctgagaagtcctctctagctgcaga

SEQ ID NO: 162892 - DNA, 120 bp, Artificial Sequence
  ENSG00000107731_39 (sequence is synthesized)
agcctgagcttcccggtgtcagtcagctctgcaacgtgggagccttggaggcgggtggcctggctgtgcttcatatgcccaggagtggagaaggaggctgagaagctggtttcccagctc

SEQ ID NO: 162893 - DNA, 120 bp, Artificial Sequence
  ENSG00000107731_40 (sequence is synthesized)
tgatctccacaggcacctcctataaccctcctctcacccaccccgctacggtctgagagatctgaaataacctttcccagtgggcagggttgccagggttgaggggacagcacataccac

SEQ ID NO: 162894 - DNA, 120 bp, Artificial Sequence
  ENSG00000107731_41 (sequence is synthesized)
ccccacccaacctgttcgaggggccctgcatggcacgggatgagtccctgccctgtgcagctgcctggcagtggctgggacaaggatcttgcagccagcacagaggcctcttcaaaggcc

SEQ ID NO: 162895 - DNA, 120 bp, Artificial Sequence
  ENSG00000107731_42 (sequence is synthesized)
tctccctcttggcactccaggcaaggcaggtgcccgcttccccaacacctccaggcagtgaccctagggcatgccccagcaggtctccgagcagccactgggacccgtctcagcacatcc

SEQ ID NO: 162896 - DNA, 120 bp, Artificial Sequence
  ENSG00000107731_43 (sequence is synthesized)
tggcctttgaaagtctgatatcctgagaggagggcaggttttagggccgcagttccagccagcgtccccagcctggcttccctgccatggactcagtagctcgtggggcttcttaccacc

SEQ ID NO: 162897 - DNA, 120 bp, Artificial Sequence
  ENSG00000107731_44 (sequence is synthesized)
caccagccccgctggggtgcggcctggctgtgggcaaaggaggacttgcctggagatttgagagaagattccttctaccagggctgctgaggggccaggcctgcatcaggggctaggctc

SEQ ID NO: 162898 - DNA, 120 bp, Artificial Sequence
  ENSG00000107731_45 (sequence is synthesized)
tggctgggcccggaggctgagactaaggctttcgaccctggtgcctccatgtggatgctgcctcagacaaaggcagtgagccttccctgccaaagtgcccatcccatgggctcggcctca

SEQ ID NO: 162899 - DNA, 120 bp, Artificial Sequence
  ENSG00000107731_46 (sequence is synthesized)
ctggtcactgttagcccatgaacacgtgtgggcctcggtcacgtggctttgagggcagtctgaccaggctagaccacacgtgccgtgacagggggtgccattcccctcgcaggctctaat

SEQ ID NO: 162900 - DNA, 120 bp, Artificial Sequence
  ENSG00000107731_47 (sequence is synthesized)
gtgcccacatgtagcctggcagtccaaagaccaagaatcaacttgcaaatctgccattaaactgctgtgcgacttcaggcatatcactgccttctctgggcttcagtgtccttttcatac

SEQ ID NO: 162901 - DNA, 120 bp, Artificial Sequence
  ENSG00000107731_48 (sequence is synthesized)
ctagaagtctgcggtctgaggctctttgggttcagacacactgttctaggcttctgtaggggaccttgtgatctgccgtgcccctcctccctgttcttttctgtcctccccaccccaccc

SEQ ID NO: 162902 - DNA, 120 bp, Artificial Sequence
  ENSG00000107731_49 (sequence is synthesized)
tcagaagctgcttgctctgcccccaggacaggagcttgacggatgaagtgcagccagccacccaggtgccatttccagtctgacttccagaaatgtgcaccatgtcctagagcacagacc

SEQ ID NO: 162903 - DNA, 120 bp, Artificial Sequence
  ENSG00000107731_50 (sequence is synthesized)
cattggctggagcctcctgggagggttcaaaccatcagctctatgagaaatgcccagaaaggctttgccgactccatccgtctgtggaggctgcctgcctccggggtgggatgggtggtt

SEQ ID NO: 162904 - DNA, 120 bp, Artificial Sequence
  ENSG00000107731_51 (sequence is synthesized)
tctcctccaattcagacccaagaggtagcccccgagggcatgtacctggtgggaagcagctcaggtacccttgggggttgcagggcccttacgcaggtatttctctctctctcctctctg

SEQ ID NO: 162905 - DNA, 120 bp, Artificial Sequence
  ENSG00000107731_52 (sequence is synthesized)
gggtgcgtgtgtgcgtgcgcgtgtgcgtgcctatgcttttctctgtgggcacatcaggatgcccctcggagagcatgtgcacgtgtccccacctgagcgagcgtgtgtgtgtgctcctct

SEQ ID NO: 162906 - DNA, 120 bp, Artificial Sequence
  ENSG00000107731_53 (sequence is synthesized)
gcgtcccaggtttggacgtctagggtttggtgtgcctgtcttctgccctccctgagcccacagggtcagtcaatgtatcttctacgtgcctctccctctgccttctctcacagtgccccc

SEQ ID NO: 162907 - DNA, 120 bp, Artificial Sequence
  ENSG00000107731_54 (sequence is synthesized)
ggctccagagctcaggggtaggggttctcctgagggtgcaggggatccttctcatctcctggaccctccagggcactctggtccctattccccagctcctaggcagctgagccgggtccc

SEQ ID NO: 162908 - DNA, 120 bp, Artificial Sequence
  ENSG00000107731_55 (sequence is synthesized)
ttaggggaggtgaccaggagctttggtgcagggagctcttggtggggcaaagggctggacccctgccaggtctgtggacatggttatatgcccgggagaggggggtgcagggccccaggg

SEQ ID NO: 162909 - DNA, 120 bp, Artificial Sequence
  ENSG00000107731_56 (sequence is synthesized)
atggcccccaatcccacctctgtttattctgtaaactgcaacctataaataacctttagcattcctattgtaacaaaattaatttttatgaaataaattatatttcctagtctaataaaa

SEQ ID NO: 162910 - DNA, 120 bp, Artificial Sequence
  ENSG00000107736_0 (sequence is synthesized)
gatcgcggacttgagcggcggcggcggctcgggagagagggacgcgggctgcaggcgcgatgcttggctagaggacgcgtccgacggcggccggacgctgaggtggtcggggctagtcag

SEQ ID NO: 162911 - DNA, 120 bp, Artificial Sequence
  ENSG00000107736_1 (sequence is synthesized)
gcctgggcatggagcgcggggtggcagagcctctggacgtttggggcgcgcccagtccgagcccccggcgcgcctgaagttgcgagcggcgagcggcgagcggcgagcggcccgcggaga

SEQ ID NO: 162912 - DNA, 120 bp, Artificial Sequence
  ENSG00000107736_2 (sequence is synthesized)
aagttgcgagcggcgagcggcgagcggcgagcggcccgcggagacccaggagctgccggcacgccgcggatgagccttcgcgccggcgggaagacgcggcggtggccagggccagagcag

SEQ ID NO: 162913 - DNA, 120 bp, Artificial Sequence
  ENSG00000107736_3 (sequence is synthesized)
ggcgaggcgaggcgcggcgccgctgcacacacgcacacggagccatggggcgccatgttgccaccagctgccacgtggcctggcttttggtgctgatctctggatgctggggccaggtga

SEQ ID NO: 162914 - DNA, 120 bp, Artificial Sequence
  ENSG00000107736_4 (sequence is synthesized)
accggctgcccttcttcaccaaccacttctttgatacatacctgctgatcagcgaggacacgcctgtgggttcttctgtgacccagttgctggcccaagacatggacaatgaccccctgg

SEQ ID NO: 162915 - DNA, 120 bp, Artificial Sequence
  ENSG00000107736_5 (sequence is synthesized)
tgtttggcgtgtctggggaggaggcctctcgcttctttgcagtggagcctgacactggcgtggtgtggctccggcagccactggacagagagaccaagtcagagttcaccgtggagttct

SEQ ID NO: 162916 - DNA, 120 bp, Artificial Sequence
  ENSG00000107736_6 (sequence is synthesized)
ctgtcagcgaccaccagggggtgatcacacggaaggtgaacatccaggttggggatgtgaatgacaacgcgcccacatttcacaatcagccctacagcgtccgcatccctgagaatacac

SEQ ID NO: 162917 - DNA, 120 bp, Artificial Sequence
  ENSG00000107736_7 (sequence is synthesized)
cagtggggacgcccatcttcatcgtgaatgccacagaccccgacttgggggcagggggcagcgtcctctactccttccagcccccctcccaattcttcgccattgacagcgcccgcggta

SEQ ID NO: 162918 - DNA, 120 bp, Artificial Sequence
  ENSG00000107736_8 (sequence is synthesized)
tcgtcacagtgatccgggagctggactacgagaccacacaggcctaccagctcacggtcaacgccacagatcaagacaagaccaggcctctgtccaccctggccaacttggccatcatca

SEQ ID NO: 162919 - DNA, 120 bp, Artificial Sequence
  ENSG00000107736_9 (sequence is synthesized)
tcacagatgtccaggacatggaccccatcttcatcaacctgccttacagcaccaacatctacgagcattctcctccgggcacgacggtgcgcatcatcaccgccatagaccaggataaag

SEQ ID NO: 162920 - DNA, 120 bp, Artificial Sequence
  ENSG00000107736_10 (sequence is synthesized)
gacgtccccggggcattggctacaccatcgtttcagggaataccaacagcatctttgccctggactacatcagcggagtgctgaccttgaatggcctgctggaccgggagaaccccctgt

SEQ ID NO: 162921 - DNA, 120 bp, Artificial Sequence
  ENSG00000107736_11 (sequence is synthesized)
acagccatggcttcatcctgactgtgaagggcacggagctgaacgatgaccgcaccccatctgacgctacagtcaccacgaccttcaatatcctggttattgacatcaatgacaatgccc

SEQ ID NO: 162922 - DNA, 120 bp, Artificial Sequence
  ENSG00000107736_12 (sequence is synthesized)
cggagttcaacagctccgagtacagcgtggccatcactgagctggcacaggtcggctttgcccttccactcttcatccaggtggtggacaaggatgagaatttgggcctgaacagcatgt

SEQ ID NO: 162923 - DNA, 120 bp, Artificial Sequence
  ENSG00000107736_13 (sequence is synthesized)
ttgaggtgtacttggtggggaacaactcccaccacttcatcatctccccgacctccgtccaggggaaggcggacattcgtattcgggtggccatcccactggactacgagaccgtggacc

SEQ ID NO: 162924 - DNA, 120 bp, Artificial Sequence
  ENSG00000107736_14 (sequence is synthesized)
gctacgactttgatctctttgccaatgagagtgtgcctgaccatgtgggctatgccaaggtgaagatcactctcatcaatgaaaatgacaaccggcccatcttcagccagccactgtaca

SEQ ID NO: 162925 - DNA, 120 bp, Artificial Sequence
  ENSG00000107736_15 (sequence is synthesized)
acatcagcctgtacgagaacgtcaccgtggggacctctgtgctgacagtcctggcaactgacaatgatgcaggcacctttggggaagtcagctacttcttcagtgatgaccctgacaggt

SEQ ID NO: 162926 - DNA, 120 bp, Artificial Sequence
  ENSG00000107736_16 (sequence is synthesized)
tctcgctggacaaggacacgggactcatcatgctgattgccaggctggactatgagctcatccagcgcttcaccctgacgatcattgcccgggacgggggcggcgaggagaccacaggcc

SEQ ID NO: 162927 - DNA, 120 bp, Artificial Sequence
  ENSG00000107736_17 (sequence is synthesized)
gggtcaggatcaatgtgttggatgtcaacgacaacgtgcccaccttccagaaggatgcctacgtgggtgctctgcgggagaacgagccttctgtcacacagctggtgcggctccgggcaa

SEQ ID NO: 162928 - DNA, 120 bp, Artificial Sequence
  ENSG00000107736_18 (sequence is synthesized)
cagatgaagactcccctcccaacaaccagatcacctacagcattgtcagtgcatctgcctttggcagctacttcgacatcagcctgtacgagggctatggagtgatcagcgtcagtcgcc

SEQ ID NO: 162929 - DNA, 120 bp, Artificial Sequence
  ENSG00000107736_19 (sequence is synthesized)
ccctggattatgaacagatatccaatgggctgatttatctgacggtcatggccatggatgctggcaacccccctctcaacagcaccgtccctgtcaccatcgaggtgtttgatgagaatg

SEQ ID NO: 162930 - DNA, 120 bp, Artificial Sequence
  ENSG00000107736_20 (sequence is synthesized)
acaaccctcccaccttcagcaagcccgcctacttcgtctccgtggtggagaacatcatggcaggagccacggtgctgttcctgaatgccacagacctggaccgctcccgggagtacggcc

SEQ ID NO: 162931 - DNA, 120 bp, Artificial Sequence
  ENSG00000107736_21 (sequence is synthesized)
aggagtccatcatctactccttggaaggctccacccagtttcggatcaatgcccgctcaggggaaatcaccaccacgtctctgcttgaccgagagaccaagtctgaatacatcctcatcg

SEQ ID NO: 162932 - DNA, 120 bp, Artificial Sequence
  ENSG00000107736_22 (sequence is synthesized)
ttcgcgcagtggacgggggtgtgggccacaaccagaaaactggcatcgccaccgtaaacatcaccctcctggacatcaatgacaaccaccccacgtggaaggacgcaccctactacatca

SEQ ID NO: 162933 - DNA, 120 bp, Artificial Sequence
  ENSG00000107736_23 (sequence is synthesized)
acctggtggagatgacccctccagactctgatgtgaccacggtggtggctgttgacccagacctgggggagaatggcaccctggtgtacagcatccagccacccaacaagttctacagcc

SEQ ID NO: 162934 - DNA, 120 bp, Artificial Sequence
  ENSG00000107736_24 (sequence is synthesized)
tcaacagcaccacgggcaagatccgcaccacccacgccatgctggaccgggagaaccccgacccccatgaggccgagctgatgcgcaaaatcgtcgtctctgttactgactgtggcaggc

SEQ ID NO: 162935 - DNA, 120 bp, Artificial Sequence
  ENSG00000107736_25 (sequence is synthesized)
cccctctgaaagccaccagcagtgccacagtgtttgtgaacctcttggatctcaatgacaatgaccccacctttcagaacctgccttttgtggccgaggtgcttgaaggcatcccggcgg

SEQ ID NO: 162936 - DNA, 120 bp, Artificial Sequence
  ENSG00000107736_26 (sequence is synthesized)
gggtctccatctaccaagtggtggccatcgacctcgatgagggcctgaacggcctggtgtcctaccgcatgccggtgggcatgccccgcatggacttcctcatcaacagcagcagcggcg

SEQ ID NO: 162937 - DNA, 120 bp, Artificial Sequence
  ENSG00000107736_27 (sequence is synthesized)
tggtggtcaccaccaccgagctggaccgcgagcgcatcgcggagtaccagctgcgggtggtggccagtgatgcaggcacgcccaccaagagctccaccagcacgctcaccatccatgtgc

SEQ ID NO: 162938 - DNA, 120 bp, Artificial Sequence
  ENSG00000107736_28 (sequence is synthesized)
tggatgtgaacgacgagacgcccaccttcttcccggccgtgtacaatgtgtctgtgtccgaggacgtgccacgcgagttccgggtggtctggctgaactgcacggacaacgacgtgggcc

SEQ ID NO: 162939 - DNA, 120 bp, Artificial Sequence
  ENSG00000107736_29 (sequence is synthesized)
tcaatgcagagctcagctacttcatcacaggtggcaacgtggatgggaagttcagcgtgggttaccgcgatgccgttgtgagaaccgtggtgggcctggaccgggagaccacagccgcct

SEQ ID NO: 162940 - DNA, 120 bp, Artificial Sequence
  ENSG00000107736_30 (sequence is synthesized)
acatgctcatcctggaggccatcgacaacggccctgtagggaagcgacacacgggcacagccaccgtgttcgtcactgtcctggatgtgaatgacaaccggcccatctttctgcagagca

SEQ ID NO: 162941 - DNA, 120 bp, Artificial Sequence
  ENSG00000107736_31 (sequence is synthesized)
gctatgaggccagcgtccctgaggacatccctgaaggccacagcatcttgcagctgaaagccacggacgcagatgagggcgagtttgggcgtgtgtggtaccgcatcctccatggtaacc

SEQ ID NO: 162942 - DNA, 120 bp, Artificial Sequence
  ENSG00000107736_32 (sequence is synthesized)
atggcaacaacttccggatccatgtcagcaatgggctcctgatgcgagggccccggcccctggaccgggagcggaactcatcccacgtgctgatagtggaggcctacaaccacgacctgg

SEQ ID NO: 162943 - DNA, 120 bp, Artificial Sequence
  ENSG00000107736_33 (sequence is synthesized)
gccccatgcggagctccgtcagggtgattgtgtacgtggaggacatcaacgatgaggcccccgtgttcacacagcagcagtacagccgtctggggcttcgagagaccgcaggcattggaa

SEQ ID NO: 162944 - DNA, 120 bp, Artificial Sequence
  ENSG00000107736_34 (sequence is synthesized)
cgtcagtcatcgtggtccaagccacagaccgagactctggggatggtggcctggtgaactaccgcatcctgtcgggcgcagaggggaagtttgagattgacgagagcacagggcttatca

SEQ ID NO: 162945 - DNA, 120 bp, Artificial Sequence
  ENSG00000107736_35 (sequence is synthesized)
tcaccgtgaattacctggactacgagaccaagaccagctacatgatgaatgtgtcggccactgaccaggccccgcccttcaaccagggcttctgcagcgtctacatcactctgctcaacg

SEQ ID NO: 162946 - DNA, 120 bp, Artificial Sequence
  ENSG00000107736_36 (sequence is synthesized)
agctggacgaggccgtgcagttctccaatgcctcatacgaggctgccatcctggagaatctggcactgggtactgagattgtgcgggtccaggcctactccatcgacaacctcaaccaaa

SEQ ID NO: 162947 - DNA, 120 bp, Artificial Sequence
  ENSG00000107736_37 (sequence is synthesized)
tcacgtaccgcttcaacgcctacaccagcacccaggccaaagccctcttcaagatagacgccatcacgggtgtgatcacagtccagggcctggtggaccgtgagaagggcgacttctata

SEQ ID NO: 162948 - DNA, 120 bp, Artificial Sequence
  ENSG00000107736_38 (sequence is synthesized)
ccttgacagtggtggcagatgacggcggccccaaggtggactccaccgtgaaggtctacatcactgtgctggacgagaatgacaacagcccccggtttgacttcacctccgactcggcgg

SEQ ID NO: 162949 - DNA, 120 bp, Artificial Sequence
  ENSG00000107736_39 (sequence is synthesized)
tcagcatacccgaggactgccctgtgggccagcgagtggctactgtcaaggcctgggaccctgatgctggcagcaatgggcaggtggtcttctccctggcctctggcaacatcgcggggg

SEQ ID NO: 162950 - DNA, 120 bp, Artificial Sequence
  ENSG00000107736_40 (sequence is synthesized)
cctttgagatcgtcaccaccaatgactccattggcgaagtgtttgtggccaggcccctggacagagaagagctggatcactacatcctccaggttgtggcttctgaccgaggcacccctc

SEQ ID NO: 162951 - DNA, 120 bp, Artificial Sequence
  ENSG00000107736_41 (sequence is synthesized)
cacggaagaaggaccacatcctgcaggtgaccatcctggacatcaatgacaaccctccagtcatcgagagcccctttggatacaatgtcagtgtgaatgagaacgtgggtggaggtactg

SEQ ID NO: 162952 - DNA, 120 bp, Artificial Sequence
  ENSG00000107736_42 (sequence is synthesized)
ctgtggtccaggtgagagccactgaccgtgacatcgggatcaacagtgttctgtcctactacatcaccgagggcaacaaggacatggccttccgcatggaccgcatcagcggtgagatcg

SEQ ID NO: 162953 - DNA, 120 bp, Artificial Sequence
  ENSG00000107736_43 (sequence is synthesized)
ccacacggcctgccccgcctgaccgcgagcgccagagcttctaccacctggtggccactgtggaggacgagggcaccccaaccctgtcggccaccacgcacgtgtacgtgaccattgtgg

SEQ ID NO: 162954 - DNA, 120 bp, Artificial Sequence
  ENSG00000107736_44 (sequence is synthesized)
atgagaatgataacgcgcccatgttccagcagccccactatgaggtgctgctggatgagggcccagacacgctcaacaccagcctcatcaccatccaggcactggacctggatgagggtc

SEQ ID NO: 162955 - DNA, 120 bp, Artificial Sequence
  ENSG00000107736_45 (sequence is synthesized)
ccaacggcacagtcacctatgccatcgtcgcaggcaacatcgtcaacaccttccgcatcgacagacacatgggtgtcatcactgctgccaaagagctggactacgagatcagccacggcc

SEQ ID NO: 162956 - DNA, 120 bp, Artificial Sequence
  ENSG00000107736_46 (sequence is synthesized)
gacaatgtgcctaccttcccccgggactatgagggaccatttgaagtcactgagggccagccggggcccagagtgtggaccttcctggcccatgaccgagactcaggacccaacgggcag

SEQ ID NO: 162957 - DNA, 120 bp, Artificial Sequence
  ENSG00000107736_47 (sequence is synthesized)
gtggagtacagcatcatggatggagaccctctgggggagtttgtgatctctcctgtggagggggtgctaagggtccggaaggacgtggagctggaccgggagaccatcgccttctacaac

SEQ ID NO: 162958 - DNA, 120 bp, Artificial Sequence
  ENSG00000107736_48 (sequence is synthesized)
ctgaccatctgtgcccgtgaccgggggatgcccccactcagctccacaatgctggtggggatccgggtgctggacatcaacgacaacgaccctgtgctgctgaacctgcccatgaacatc

SEQ ID NO: 162959 - DNA, 120 bp, Artificial Sequence
  ENSG00000107736_49 (sequence is synthesized)
accatcagcgagaacagccctgtctccagctttgtcgcccatgtcctggccagtgacgctgacagtggctgcaatgcacgcctcaccttcaacatcactgcgggcaaccgcgagcgggcc

SEQ ID NO: 162960 - DNA, 120 bp, Artificial Sequence
  ENSG00000107736_50 (sequence is synthesized)
ttcttcatcaatgccacgacagggatcgtcactgtgaaccggcccctggaccgcgagcggatcccagagtacaagctgaccatttctgtgaaggacaacccggagaatccacgcatagcc

SEQ ID NO: 162961 - DNA, 120 bp, Artificial Sequence
  ENSG00000107736_51 (sequence is synthesized)
aggagggattatgacttgcttctgatcttcctttctgatgagaatgacaaccaccccctcttcactaaaagcacctaccaggcagaggtgatggaaaactctcccgctggcacccctctc

SEQ ID NO: 162962 - DNA, 120 bp, Artificial Sequence
  ENSG00000107736_52 (sequence is synthesized)
acggtgctcaatgggcccatcctggccctggatgcagaccaagacatctacgccgtggtgacctaccagctgctgggtgcccagagtggcctctttgacatcaacagcagcaccggtgtg

SEQ ID NO: 162963 - DNA, 120 bp, Artificial Sequence
  ENSG00000107736_53 (sequence is synthesized)
gtgaccgtgaggtcaggtgtcatcattgaccgggaggcattctcgccacccatcctggagctgctgctgctggctgaggacatcgggctgctcaacagcacggcccacctgctcatcacc

SEQ ID NO: 162964 - DNA, 120 bp, Artificial Sequence
  ENSG00000107736_54 (sequence is synthesized)
atcctggatgacaatgacaaccggcccacctttagccctgccaccctcactgtccatctgctagagaactgcccgcctggattctcagtccttcaagtcacagccacagatgaggacagt

SEQ ID NO: 162965 - DNA, 120 bp, Artificial Sequence
  ENSG00000107736_55 (sequence is synthesized)
ggcctcaatggggagctggtctaccgaatagaagctggggctcaggaccgcttcctcattcatctggtcaccggggtcatccgtgttggtaatgccaccatcgacagagaggagcaggag

SEQ ID NO: 162966 - DNA, 120 bp, Artificial Sequence
  ENSG00000107736_56 (sequence is synthesized)
tcctacaggctaacggtggtggccaccgaccggggcaccgttcctctctcgggcacagccattgtcaccattctgatcgatgacatcaatgactcccgccccgagttcctcaaccccatc

SEQ ID NO: 162967 - DNA, 120 bp, Artificial Sequence
  ENSG00000107736_57 (sequence is synthesized)
cagacagtgagcgtgctggagtcggctgagccaggcactgtcattgccaatatcacggccattgaccacgacctcaacccaaagctagagtaccacattgtcggcattgtggccaaggac

SEQ ID NO: 162968 - DNA, 120 bp, Artificial Sequence
  ENSG00000107736_58 (sequence is synthesized)
gacactgatcgcctggtgcccaaccaggaggacgcctttgctgtgaatatcaacacaggatctgtaatggtgaagtcccccatgaatcgggagctggttgccacctatgaggtcactctc

SEQ ID NO: 162969 - DNA, 120 bp, Artificial Sequence
  ENSG00000107736_59 (sequence is synthesized)
tcagtgattgacaatgccagcgacctaccagagcgctctgtcagtgtgccaaatgccaagctgactgtcaacgtcctggacgtcaatgacaatacgccccagttcaagccctttgggatc

SEQ ID NO: 162970 - DNA, 120 bp, Artificial Sequence
  ENSG00000107736_60 (sequence is synthesized)
acctactacatggagcggatcctggagggggccacccctgggaccacactcattgctgtggcagccgtggaccctgacaagggccttaatgggctggtcacctacaccctgctggacctg

SEQ ID NO: 162971 - DNA, 120 bp, Artificial Sequence
  ENSG00000107736_61 (sequence is synthesized)
gtgcccccagggtatgtccagctggaggactcctcggcagggaaggtcattgccaaccggacagtggactacgaggaggtgcactggctcaactttaccgtgagggcctcagacaacggg

SEQ ID NO: 162972 - DNA, 120 bp, Artificial Sequence
  ENSG00000107736_62 (sequence is synthesized)
tccccgccccgggcagctgagatccctgtctacctggaaatcgtggacatcaatgacaacaaccccatctttgaccagccctcctaccaggaggctgtctttgaggatgtgcctgtgggc

SEQ ID NO: 162973 - DNA, 120 bp, Artificial Sequence
  ENSG00000107736_63 (sequence is synthesized)
acaatcatcctgacagtcactgccactgatgctgactcaggcaactttgcactcattgagtacagccttggagatggagagagcaagtttgccatcaaccccaccacgggtgacatctat

SEQ ID NO: 162974 - DNA, 120 bp, Artificial Sequence
  ENSG00000107736_64 (sequence is synthesized)
gtgctgtcttctctggaccgggagaagaaggaccactatatcctgactgccttggccaaagacaaccctggggatgtagccagcaaccgtcgcgaaaattcagtgcaggtggtgatccaa

SEQ ID NO: 162975 - DNA, 120 bp, Artificial Sequence
  ENSG00000107736_65 (sequence is synthesized)
gtgctggatgtcaatgactgccggccacagttctccaagccccagttcagcacaagcgtgtatgagaatgagccggcgggcacctcggtcatcaccatgatggccactgaccaggatgaa

SEQ ID NO: 162976 - DNA, 120 bp, Artificial Sequence
  ENSG00000107736_66 (sequence is synthesized)
ggtcccaatggagagttgacctactcacttgagggccctggcgtggaggccttccatgtggacatggactcgggcttggtgaccacacagcggccactgcagtcctacgagaagttcagt

SEQ ID NO: 162977 - DNA, 120 bp, Artificial Sequence
  ENSG00000107736_67 (sequence is synthesized)
ctgaccgtggtggccacagatggtggagagcccccactctggggcaccaccatgctcctggtggaggtcatcgacgtcaatgacaaccgccctgtctttgtgcgcccacccaacggcacc

SEQ ID NO: 162978 - DNA, 120 bp, Artificial Sequence
  ENSG00000107736_68 (sequence is synthesized)
atcctccacatcagagaggagatcccgctgcgctccaacgtgtacgaggtctacgccacggacaaggatgagggcctcaacggggcggtgcgctacagcttcctgaagactgcgggcaac

SEQ ID NO: 162979 - DNA, 120 bp, Artificial Sequence
  ENSG00000107736_69 (sequence is synthesized)
cgggactgggagttcttcatcatcgacccaatcagcggcctcatccagactgctcagcgcctggaccgcgagtcgcaggcggtgtacagcctcatcttggtggccagcgacctgggccag

SEQ ID NO: 162980 - DNA, 120 bp, Artificial Sequence
  ENSG00000107736_70 (sequence is synthesized)
ccagtgccatacgagactatgcagccgctgcaggtggccctggaggacatcgatgacaacgaaccccttttcgtgaggcctccaaaaggcagcccccagtaccagctgctgacagtgcct

SEQ ID NO: 162981 - DNA, 120 bp, Artificial Sequence
  ENSG00000107736_71 (sequence is synthesized)
gagcactcaccacgcggcaccctcgtgggcaacgtgacaggcgcagtggatgcagatgagggccccaacgcgatcgtgtactacttcatcgcagccggcaacgaagagaagaacttccat

SEQ ID NO: 162982 - DNA, 120 bp, Artificial Sequence
  ENSG00000107736_72 (sequence is synthesized)
ctgcagcccgatgggtgtctgctggtgctgcgggacctggaccgggagcgagaagccatcttctccttcatcgtcaaggcctccagcaatcgcagctggacacctccccgtggaccctcc

SEQ ID NO: 162983 - DNA, 120 bp, Artificial Sequence
  ENSG00000107736_73 (sequence is synthesized)
ccaaccctcgacctggttgctgacctcacactgcaggaggtgcgcgttgtgctagaggacatcaacgaccagccaccacgcttcaccaaggctgagtacactgcaggggtggccaccgac

SEQ ID NO: 162984 - DNA, 120 bp, Artificial Sequence
  ENSG00000107736_74 (sequence is synthesized)
gccaaggtgggctcagagttgatccaggtgctggccctggatgcagacattggcaacaacagccttgtcttctacagcattctggccatccactacttccgggcccttgccaacgactct

SEQ ID NO: 162985 - DNA, 120 bp, Artificial Sequence
  ENSG00000107736_75 (sequence is synthesized)
gaagatgtgggccaggtcttcaccatggggagcatggacggcattctgcgcaccttcgacctcttcatggcctacagccccggctacttcgtggtggacattgtggcccgagacctggca

SEQ ID NO: 162986 - DNA, 120 bp, Artificial Sequence
  ENSG00000107736_76 (sequence is synthesized)
ggccacaacgacacggccatcatcggcatctacatcctgagggacgaccagcgcgtcaagatcgtcattaacgagatccccgaccgtgtgcgcggcttcgaggaggagttcatccacctg

SEQ ID NO: 162987 - DNA, 120 bp, Artificial Sequence
  ENSG00000107736_77 (sequence is synthesized)
ctctccaacatcactggggccattgtcaatactgacaatgtgcagttccatgtggacaagaagggccgggtgaactttgcgcagacagaactgcttatccacgtggtgaaccgcgatacc

SEQ ID NO: 162988 - DNA, 120 bp, Artificial Sequence
  ENSG00000107736_78 (sequence is synthesized)
aaccgcatcctggacgtggaccgggtgatccagatgatcgatgagaacaaggagcagctacggaatcttttccggaactacaacgtcctggacgtgcagcctgccatctctgtccggctg

SEQ ID NO: 162989 - DNA, 120 bp, Artificial Sequence
  ENSG00000107736_79 (sequence is synthesized)
ccggatgacatgtctgccctgcagatggcgatcatcgtcctggctatcctcctgttcctggccgccatgctctttgtcctcatgaactggtactacaggactgtacacaagaggaagctc

SEQ ID NO: 162990 - DNA, 120 bp, Artificial Sequence
  ENSG00000107736_80 (sequence is synthesized)
aaggccattgtggctggctcagctgggaatcgtggcttcatcgacatcatggacatgcctaacaccaacaagtactcctttgatggagccaaccctgtgtggctggatcccttctgtcgg

SEQ ID NO: 162991 - DNA, 120 bp, Artificial Sequence
  ENSG00000107736_81 (sequence is synthesized)
aacctggagctggccgcccaggcggagcatgaggatgacctaccggagaacctgagtgagatcgccgacctgtggaacagccccacgcgcacccatggaacttttgggcgtgagccagca

SEQ ID NO: 162992 - DNA, 120 bp, Artificial Sequence
  ENSG00000107736_82 (sequence is synthesized)
gctgtcaagcctgatgatgaccgatacctgcgggctgccatccaggagtatgacaacattgccaagctgggccagatcattcgtgaggggccaatcaagggctcgctgctgaaggtggtc

SEQ ID NO: 162993 - DNA, 120 bp, Artificial Sequence
  ENSG00000107736_83 (sequence is synthesized)
ctggaggattacctgcggctcaaaaagctctttgcacagcggatggtgcaaaaagcctcctcctgccactcctccatctctgagctgatacagactgagctggacgaggagccaggagac

SEQ ID NO: 162994 - DNA, 120 bp, Artificial Sequence
  ENSG00000107736_84 (sequence is synthesized)
cacagcccagggcagggtagcctgcgcttccgccacaagccaccagtggagctcaaggggcccgatgggatccatgtggtgcacggcagcacgggcacgctgctggccaccgacctcaac

SEQ ID NO: 162995 - DNA, 120 bp, Artificial Sequence
  ENSG00000107736_85 (sequence is synthesized)
agcctgcccgaggaagaccagaagggcctgggccgctcgctggagacgctgaccgctgccgaggccactgccttcgagcgcaacgcccgcacagaatccgccaaatccacacccctgcac

SEQ ID NO: 162996 - DNA, 120 bp, Artificial Sequence
  ENSG00000107736_86 (sequence is synthesized)
aaacttcgcgacgtgatcatggagacccccctggagatcacagagctgtgactagacagggaagccttgtgggtgtgagcagcacccatccaccgtcccctcccagggagcaagggcagg

SEQ ID NO: 162997 - DNA, 120 bp, Artificial Sequence
  ENSG00000107736_87 (sequence is synthesized)
gacagggccggtcgggggggaccctccaaggccaggccttggggacaaccttggcttggccctggcagcccgcatcagctgctcagatcccacttttgccagacgctcattcagcatctg

SEQ ID NO: 162998 - DNA, 120 bp, Artificial Sequence
  ENSG00000107736_88 (sequence is synthesized)
acctctaccttcataagatctgttatttttataagaaaaccaaacaaaaatgttaagcatctaaggacaaggtaaggagggtcactggggcccaagagtctggggaccagcttggctcag

SEQ ID NO: 162999 - DNA, 120 bp, Artificial Sequence
  ENSG00000107736_89 (sequence is synthesized)
gctgagctgaaagaggccaaacaggccctcctccctcccagctccaccccgcaagcaccatcccctccggctaagcaggcgcaagggaggcccagcgcggacatcccctgctggccggac

SEQ ID NO: 163000 - DNA, 120 bp, Artificial Sequence
  ENSG00000107736_90 (sequence is synthesized)
acccgactccagtccaagtctcgctacatttccgccacatccctctctgctggacgtccaggtggaggtggcatccccacgtggacaagaaagtcaatgtcaatgaacaagcattctctc

SEQ ID NO: 163001 - DNA, 120 bp, Artificial Sequence
  ENSG00000107736_91 (sequence is synthesized)
catttcactggcttcccaaatgtgtgcccagcttataaacagaagtgactgatgttccctccggttttgaatgtggagtgtttgtgtgtgttccttttttaaattaagttattccctcaa

SEQ ID NO: 163002 - DNA, 120 bp, Artificial Sequence
  ENSG00000107736_92 (sequence is synthesized)
acaggaaagggacatggagctgatacgtgtacttcttggaaggcccagaggaatgatagaagaatcaacatggctgtgacaaagcactaaaacagcatgtcttctctgccccctcctcct

SEQ ID NO: 163003 - DNA, 120 bp, Artificial Sequence
  ENSG00000107736_93 (sequence is synthesized)
cagccctccactcctcccttgcccactttgctaccttttcttcttgccagagcctcagcccctgagctctccactccaaatgggcttccacttgctcccctggtttccttcccagtgcct

SEQ ID NO: 163004 - DNA, 120 bp, Artificial Sequence
  ENSG00000107736_94 (sequence is synthesized)
cttcccctccccactccctgtttccacccctccctccctcctcccaccccgtcagctctgagtccccaccatcctccctgccctgctctgctccatccctgctgcaccctgaactaactg

SEQ ID NO: 163005 - DNA, 120 bp, Artificial Sequence
  ENSG00000107736_95 (sequence is synthesized)
atgttaaccctcttctctcttcctcatggctggcaggcccacaggtttgagctctgtttctctgtcacttcccacctcatctcttctctgcctcaccccattgccttcctccatgcccac

SEQ ID NO: 163006 - DNA, 120 bp, Artificial Sequence
  ENSG00000107736_96 (sequence is synthesized)
cacacccccaccacccttcctgtcctgtggggcctgggccaaggccgtggcccagcctttgcagactgaatgcagccgccctctccccatcctcgctccccagcctgggggacagggagc

SEQ ID NO: 163007 - DNA, 120 bp, Artificial Sequence
  ENSG00000107736_97 (sequence is synthesized)
atcttgcagcacccgccctggcctctgaagggagcctcctcgatcatcttcaatcccttcctgattgatcccaacgtgggtgccctgaagaggggccaccaagacggctgccaagaccat

SEQ ID NO: 163008 - DNA, 120 bp, Artificial Sequence
  ENSG00000107736_98 (sequence is synthesized)
gcttggagagccctgtttgctcctcctcccagctggcacccaggcatctgttccaccaggagggaggcagctgctcccacagggcaccaggcagatgctggcagcacccgggaaacccaa

SEQ ID NO: 163009 - DNA, 120 bp, Artificial Sequence
  ENSG00000107736_99 (sequence is synthesized)
ggaagagagccccgaggttttgccccagcactgggccagcacagatgccaggacagtgtcttggccccggtgtaggctgagcatttcacttgactaaagggaacctttgccatttggcaa

SEQ ID NO: 163010 - DNA, 120 bp, Artificial Sequence
  ENSG00000107736_100 (sequence is synthesized)
cttctccatgctgggctttggcacctggagggcaaggcttctgtggcgagcgagggtgctgcttctaggaggtggttacgagccccaggttgtaccctgtggagcctcaggccaaaggcc

SEQ ID NO: 163011 - DNA, 120 bp, Artificial Sequence
  ENSG00000107736_101 (sequence is synthesized)
cagatgaccacgagtgcacatctcttgaccagaagtctttcatcaagcagcagcgagggggtctgcagagaggaaggtgctcttctgaggatcatctttgggaaagggcgctggcctggg

SEQ ID NO: 163012 - DNA, 120 bp, Artificial Sequence
  ENSG00000107736_102 (sequence is synthesized)
catgcaaggagcttcggggggtgagtgtgtgtcccagactgcttgggccactgtcttcctgcagcctgcagcaccggtctctgaagcaggaggatctacaggtagacctagggggatgtg

SEQ ID NO: 163013 - DNA, 120 bp, Artificial Sequence
  ENSG00000107736_103 (sequence is synthesized)
ggggcatgtttgtggacaccccattacatcttggtagattccatgtagtcacagtggctgcggttgtcctcggggcccggcaggggctgtcgagggacggtgggccggccatggcggaag

SEQ ID NO: 163014 - DNA, 120 bp, Artificial Sequence
  ENSG00000107736_104 (sequence is synthesized)
ctgtgcagggagaggcgcaaggagcccaggcgcttccagagccggagctggggctcactggggctcccagggtggtggggcatgcactcgtgagccctgcggcggctcgggtccagcgcg

SEQ ID NO: 163015 - DNA, 120 bp, Artificial Sequence
  ENSG00000107736_105 (sequence is synthesized)
gccggcttgcagagcgtcatgaacagcagacaggtggccagcaggaggaagatgcaggccagggcgatgagcatggggagggggtcagttgcctctgcaagggtcccgggagtgacggga

SEQ ID NO: 163016 - DNA, 120 bp, Artificial Sequence
  ENSG00000107736_106 (sequence is synthesized)
gctgagagaaaggcgagggggctgatggctggggagctggcgaggctggggccctctgtgctcatggctcctgcaacagcaacaagacagaagctcaaaggcagatcagctggacccagg

SEQ ID NO: 163017 - DNA, 120 bp, Artificial Sequence
  ENSG00000107736_107 (sequence is synthesized)
gcagcgggtatagggaagacttacctagggaatgtggatgggggcaaggcactgttaaactggacagcatcatggccacatcacaggttaagacagcaaggtccagagacatcacaagtc

SEQ ID NO: 163018 - DNA, 120 bp, Artificial Sequence
  ENSG00000107736_108 (sequence is synthesized)
taagtgtacacacagctgagcagtgatggagctgggcccaagctcaggccctcttcctgttccaccctgtgcccatctgccatgcagacaagagggcggtggcctgtccgcattttcaaa

SEQ ID NO: 163019 - DNA, 120 bp, Artificial Sequence
  ENSG00000107736_109 (sequence is synthesized)
tcaatcctcatgaatcatcacagggtcttaggcctggaaacttaagaccaactctgtcaataacttgctctgtggccaggaacgagttatggatggtaagaggccgcagctgccagggtc

SEQ ID NO: 163020 - DNA, 120 bp, Artificial Sequence
  ENSG00000107736_110 (sequence is synthesized)
cctagcagtaatctaataccaaagctgcaaactgggggcccacgggtgtgtttagttgggtccttgccatgtttttatcaatgtaattatgaatattttcaaaataataacagatttcac

SEQ ID NO: 163021 - DNA, 120 bp, Artificial Sequence
  ENSG00000107736_111 (sequence is synthesized)
gacgccatcacggtgaggggctgggggcagggagcaccatttcttccaatctaaccaacattggttgagctccttctgtgtgcacagcactctcctctttgtcataaaatgtccttgaga

SEQ ID NO: 163022 - DNA, 120 bp, Artificial Sequence
  ENSG00000107736_112 (sequence is synthesized)
tggccaagtgtggtgttaggtacctgtagtcccagctgcttgagaggctggggcaggaagattgcttcagctcaggagtttggaggctgcagtgagctgcgtttgcaccactgcactcca

SEQ ID NO: 163023 - DNA, 120 bp, Artificial Sequence
  ENSG00000107736_113 (sequence is synthesized)
gcccgggcaacagagtgagaccttgtctcttacaaagaaacaaaaaaaagtccccgagatcaatatccctgtaacacatccattttcatatgtaggagtaagataaagtttatacctatg

SEQ ID NO: 163024 - DNA, 120 bp, Artificial Sequence
  ENSG00000107736_114 (sequence is synthesized)
ctcagctacttcatcacaggtgctgccccggcctccgcccacctgtgcaggcctcctggggccctgcctccacccctcccagatggacagccagactaggtgggggcaggtgagggtgga

SEQ ID NO: 163025 - DNA, 120 bp, Artificial Sequence
  ENSG00000107736_115 (sequence is synthesized)
aaagaggtcagggctctactgttgggctttagcctctggtggtgcctcccgaggatttgctcctggctcttcccaagggctttgcagctggatcactctggactggctccctggggacct

SEQ ID NO: 163026 - DNA, 120 bp, Artificial Sequence
  ENSG00000107736_116 (sequence is synthesized)
cctgaacctgttggttgcagggacggggagcatctaccaaggttcattctagagggaggtaaggccccatgattcctagggaggagccctgagccccactccccgccccaagtctgggtg

SEQ ID NO: 163027 - DNA, 120 bp, Artificial Sequence
  ENSG00000107736_117 (sequence is synthesized)
acagagcagtgacttggaggaatgtggcctcatccttccttggggacctgttgagaattcccacctgtttagaggcagatggttttgatctccctaaatgaaatggttttagctcaaaaa

SEQ ID NO: 163028 - DNA, 120 bp, Artificial Sequence
  ENSG00000107736_118 (sequence is synthesized)
ttcatggatgaggctgggcatgggagagtgacttgcccgaggtcgcacagctttaacttcgagccacctggcttctagggcaggctcagcctccctcgagggtgacgagatcttgctcat

SEQ ID NO: 163029 - DNA, 120 bp, Artificial Sequence
  ENSG00000107736_119 (sequence is synthesized)
actgtggtgaggcacccagagggattttgtccaagggacctcagcaatcagggaaggaggcacccccaaatccctgagctgtgtttgttggtgtattaaataaagtttttggactcttca

SEQ ID NO: 163030 - DNA, 120 bp, Artificial Sequence
  ENSG00000107736_120 (sequence is synthesized)
tgtcggtgagcgatgggggtggccacagggaggagcgggtgggccagggcagctccgcctccgagtgaggggaacaagatgggtgagaatggaattccacacagcaggcgaatccttgac

SEQ ID NO: 163031 - DNA, 120 bp, Artificial Sequence
  ENSG00000107736_121 (sequence is synthesized)
atcttgcaggaagacttggcctccccctgcatatctcccgccccacccagaagggcctttcagagtagcggggagaaagagacgtcacaatttcccggaaaggagttgagaagagagcca

SEQ ID NO: 163032 - DNA, 120 bp, Artificial Sequence
  ENSG00000107736_122 (sequence is synthesized)
gggcccagcaaggcccagaacagagctgctttcacagagcccttggccgaggctcccctcttgggaagtaaacaggcacaagaagaaagggctcctttgcccagggagcaggcgcaacag

SEQ ID NO: 163033 - DNA, 120 bp, Artificial Sequence
  ENSG00000107736_123 (sequence is synthesized)
ctccaaggctcagagggagagaagggaggaccctgaaaacaatttgggtgtgcacccacacctctgcccagaggcctcagttgctgggtggggagggaggcccggagtgaatgagtctct

SEQ ID NO: 163034 - DNA, 120 bp, Artificial Sequence
  ENSG00000107736_124 (sequence is synthesized)
ttaccaactatggggtttccgactcggaggctgagccaaacagggaatctgggcctgcccactggggcaggctcccgggcttgggagggacagaagcgtgggaggctggcaatgctcccc

SEQ ID NO: 163035 - DNA, 120 bp, Artificial Sequence
  ENSG00000107736_125 (sequence is synthesized)
tccctgcatcgggaccaggaggcgggcaggaaagggctggggagcagggagctgactcccagaaacacagagagcccagaaagccctgaggatttgcgagagtgtggtggctagctccag

SEQ ID NO: 163036 - DNA, 120 bp, Artificial Sequence
  ENSG00000107736_126 (sequence is synthesized)
aaggaggaagtagagggttctctcgatcagggcctcagcttgtgaggacttggagcatacccccctggcctggtgcctgaaacccaattgagagccctccccctcctggacttttccttc

SEQ ID NO: 163037 - DNA, 120 bp, Artificial Sequence
  ENSG00000107736_127 (sequence is synthesized)
agggcctgctggtgaggtggatggctacaggctgaatccagcctaggatttgcagggaggccccaggggaagcaaaccaggaagaggttactgagcaggaagggaggaaggaacaaaacc

SEQ ID NO: 163038 - DNA, 120 bp, Artificial Sequence
  ENSG00000107736_128 (sequence is synthesized)
cttagggaggaggcctgccccactttctaaacccaaagacttggtttctatttacacaatactactcttactgaaatcctagagccagcgagttaatatagggcagccctgagttctccc

SEQ ID NO: 163039 - DNA, 120 bp, Artificial Sequence
  ENSG00000107736_129 (sequence is synthesized)
atttctcagggagaaatgcagcgtctcaggatgacttctccaaggtcctcttggtaagtttcttgtgaagccggactcactttttgagatcagattgacttggaaggaagggacagtggg

SEQ ID NO: 163040 - DNA, 120 bp, Artificial Sequence
  ENSG00000107736_130 (sequence is synthesized)
cttctccaatagagcctgcttggagagaaatctttctagagtcatctgagggaagatgaggctctgtgttatgccagcttccaccaagactcctgcctcagagggtggggacacacccag

SEQ ID NO: 163041 - DNA, 120 bp, Artificial Sequence
  ENSG00000107736_131 (sequence is synthesized)
gctgggccacgcttcactctgtacacagaagcctcatacttctgtgcacagaactggggagtcaaagtgaggggctggacaatgtctggctctctgcaagctcccaagctggtaggaaag

SEQ ID NO: 163042 - DNA, 120 bp, Artificial Sequence
  ENSG00000107736_132 (sequence is synthesized)
agaagacatagacaaaaaggacccatgctgccaagagaatgttccttttcctccccaagagaggtaggagacagtaggggcggctccaggcaggagggcttcacagagtgggtgtgtgtg

SEQ ID NO: 163043 - DNA, 120 bp, Artificial Sequence
  ENSG00000107736_133 (sequence is synthesized)
aagcataagccacagttagtgggtgacaggtctttcagttttcctggagttttggatcaagatgaggctagaaagattaattggagccagctcccagagggcactgcacactgcgctgag

SEQ ID NO: 163044 - DNA, 120 bp, Artificial Sequence
  ENSG00000107736_134 (sequence is synthesized)
gagctttggctatatccatttggcattagggagccagtgaaggttttggagctggggagtggcaagccagagctcactccttggggagacgtggctggctgcactgtgggtcacagcagg

SEQ ID NO: 163045 - DNA, 120 bp, Artificial Sequence
  ENSG00000107736_135 (sequence is synthesized)
atgggggtggggcagctttgtggtgggatcctggccagctgactgggacaggagctgggcagcccaggtcctccctctgcccacccttcaaatttgggacctgaccaaagtgtttaaccc

SEQ ID NO: 163046 - DNA, 120 bp, Artificial Sequence
  ENSG00000107736_136 (sequence is synthesized)
tcgcgttgtgaggagaggtcaagggtttgggattctgagaagcccatcctggggtgggactgctttgacgggtcatcagcaaagcactcaccaaaaccacagatagcatccctagtgtgg

SEQ ID NO: 163047 - DNA, 120 bp, Artificial Sequence
  ENSG00000107736_137 (sequence is synthesized)
gcaggacttgggaccccacagctgtcctggagaggtccagaccatcccaccctcggggaggctgccgctttccctgggtgaggtgtggagctgctgtgagctgtcctcctccgagtccag

SEQ ID NO: 163048 - DNA, 120 bp, Artificial Sequence
  ENSG00000107736_138 (sequence is synthesized)
tccctgtgtctggggctgagcagccgctgccccctgtagacagggcactgacctccagctccccaccctcccccacaggcccaccacacaccttatttcacctgcctggccccgtgggga

SEQ ID NO: 163049 - DNA, 120 bp, Artificial Sequence
  ENSG00000107736_139 (sequence is synthesized)
ttcctgtgactgcttccccatgcagtccaacttgctcccacgacaggtgggaaactgaggtccgaagaggggatttggcattagggagccagtgaaggttttagaggtggggagtgacaa

SEQ ID NO: 163050 - DNA, 120 bp, Artificial Sequence
  ENSG00000107736_140 (sequence is synthesized)
gccagagctcactccttgggaaggcttggctggctgcattgtgggtcacagtagggtggggtggggcagcttggtggtgggaaggccaaggccacattgtgagccaatggccaagtgaag

SEQ ID NO: 163051 - DNA, 120 bp, Artificial Sequence
  ENSG00000107736_141 (sequence is synthesized)
gtcagaagcaggtctcctgactcctggccccatggccttgccacccctctggcccccagccctttcggagctcagtgagctgctctgggaacaggtgggaaataaacccacaaggagttg

SEQ ID NO: 163052 - DNA, 120 bp, Artificial Sequence
  ENSG00000107736_142 (sequence is synthesized)
acaagggggctggaaaccccccagggacatcatacacctgacagggcatttcctttcccactgaagatcatcccattagacgcagtgcagcagacggtccttgtcgatggaaaaccaggc

SEQ ID NO: 163053 - DNA, 120 bp, Artificial Sequence
  ENSG00000107736_143 (sequence is synthesized)
tgagcttttggctcaatatgtctggggttgtaataaaaatgctcacagatcctggccagcagataacacatgaccagagggtacagatgagcagggccacctggagagcactggctgggc

SEQ ID NO: 163054 - DNA, 120 bp, Artificial Sequence
  ENSG00000107736_144 (sequence is synthesized)
cctctcaaggaagtggaggggcctcagcccagaatggtgctgtcagtgccggagtgcaggcccagtgtggtcagctctgtcagtttcccaagagaagccagaaatctggatttttttaaa

SEQ ID NO: 163055 - DNA, 120 bp, Artificial Sequence
  ENSG00000107736_145 (sequence is synthesized)
ggcaaacattctagacgtttaaatgttggcagctaattcaaatttgttgaaggcaagaaagaagagaggtggggtgggggagaacacagcaaaagccaaataaacttgatttcaaaataa

SEQ ID NO: 163056 - DNA, 120 bp, Artificial Sequence
  ENSG00000107736_146 (sequence is synthesized)
agttggttgtgtcatcctggaaccaattgtgattctggtatgccggggagggatcacactccccctagtggacccaggggttggggtcagccccgcctgaattacaccgtctgagaatgg

SEQ ID NO: 163057 - DNA, 120 bp, Artificial Sequence
  ENSG00000107736_147 (sequence is synthesized)
ggaaggggcttctattctaagacaagggattgaatgctaagcagatccaagtggtagatgtgtgctacacaagctcagagtcttgcccagtcggtgctcaataaatgtcacggagtttaa

SEQ ID NO: 163058 - DNA, 120 bp, Artificial Sequence
  ENSG00000107736_148 (sequence is synthesized)
cacagaggtgcagagaggtgacataacttccccaacatcacctgcttagtaagcatcatgggaggggcagagccacgtgacccaagcttatgaggaggctgtgggcccaccccagccaca

SEQ ID NO: 163059 - DNA, 120 bp, Artificial Sequence
  ENSG00000107736_149 (sequence is synthesized)
agtcccagattctactggggaccgtcatcctttgtggggattgggagggtttggccaggagcacccctgggaagggcagattttagggggttcttctcaggctgaacctggcctggtctg

SEQ ID NO: 163060 - DNA, 120 bp, Artificial Sequence
  ENSG00000107738_0 (sequence is synthesized)
gaggcttccccgcgccggccgcgtcccgcccgctccccggcaccagaagttcctctgcgcgtccgacggcgacatgggcgtccccacggccctggaggccggcagctggcgctggggatc

SEQ ID NO: 163061 - DNA, 120 bp, Artificial Sequence
  ENSG00000107738_1 (sequence is synthesized)
tggggatccctgctcttcgctctcttcctggctgcgtccctaggtccggtggcagccttcaaggtcgccacgccgtattccctgtatgtctgtcccgaggggcagaacgtcaccctcacc

SEQ ID NO: 163062 - DNA, 120 bp, Artificial Sequence
  ENSG00000107738_2 (sequence is synthesized)
tgcaggctcttgggccctgtggacaaagggcacgatgtgaccttctacaagacgtggtaccgcagctcgaggggcgaggtgcagacctgctcagagcgccggcccatccgcaacctcacg

SEQ ID NO: 163063 - DNA, 120 bp, Artificial Sequence
  ENSG00000107738_3 (sequence is synthesized)
ttccaggaccttcacctgcaccatggaggccaccaggctgccaacaccagccacgacctggctcagcgccacgggctggagtcggcctccgaccaccatggcaacttctccatcaccatg

SEQ ID NO: 163064 - DNA, 120 bp, Artificial Sequence
  ENSG00000107738_4 (sequence is synthesized)
cgcaacctgaccctgctggatagcggcctctactgctgcctggtggtggagatcaggcaccaccactcggagcacagggtccatggtgccatggagctgcaggtgcagacaggcaaagat

SEQ ID NO: 163065 - DNA, 120 bp, Artificial Sequence
  ENSG00000107738_5 (sequence is synthesized)
gcaccatccaactgtgtggtgtacccatcctcctcccaggatagtgaaaacatcacggctgcagccctggctacgggtgcctgcatcgtaggaatcctctgcctccccctcatcctgctc

SEQ ID NO: 163066 - DNA, 120 bp, Artificial Sequence
  ENSG00000107738_6 (sequence is synthesized)
ctggtctacaagcaaaggcaggcagcctccaaccgccgtgcccaggagctggtgcggatggacagcaacattcaagggattgaaaaccccggctttgaagcctcaccacctgcccagggg

SEQ ID NO: 163067 - DNA, 120 bp, Artificial Sequence
  ENSG00000107738_7 (sequence is synthesized)
atacccgaggccaaagtcaggcaccccctgtcctatgtggcccagcggcagccttctgagtctgggcggcatctgctttcggagcccagcacccccctgtctcctccaggccccggagac

SEQ ID NO: 163068 - DNA, 120 bp, Artificial Sequence
  ENSG00000107738_8 (sequence is synthesized)
gtcttcttcccatccctggaccctgtccctgactctccaaactttgaggtcatctagcccagctgggggacagtgggctgttgtggctgggtctggggcaggtgcatttgagccagggct

SEQ ID NO: 163069 - DNA, 120 bp, Artificial Sequence
  ENSG00000107738_9 (sequence is synthesized)
ggctctgtgagtggcctccttggcctcggccctggttccctccctcctgctctgggctcagatactgtgacatcccagaagcccagcccctcaacccctctggatgctacatggggatgc

SEQ ID NO: 163070 - DNA, 120 bp, Artificial Sequence
  ENSG00000107738_10 (sequence is synthesized)
tggacggctcagcccctgttccaaggattttggggtgctgagattctcccctagagacctgaaattcaccagctacagatgccaaatgacttacatcttaagaagtctcagaacgtccag

SEQ ID NO: 163071 - DNA, 120 bp, Artificial Sequence
  ENSG00000107738_11 (sequence is synthesized)
cccttcagcagctctcgttctgagacatgagccttgggatgtggcagcatcagtgggacaagatggacactgggccaccctcccaggcaccagacacagggcacggtggagagacttctc

SEQ ID NO: 163072 - DNA, 120 bp, Artificial Sequence
  ENSG00000107738_12 (sequence is synthesized)
ccccgtggccgccttggctcccccgttttgcccgaggctgctcttctgtcagacttcctctttgtaccacagtggctctggggccaggcctgcctgcccactggccatcgccaccttccc

SEQ ID NO: 163073 - DNA, 120 bp, Artificial Sequence
  ENSG00000107738_13 (sequence is synthesized)
cagctgcctcctaccagcagtttctctgaagatctgtcaacaggttaagtcaatctggggcttccactgcctgcattccagtccccagagcttggtggtcccgaaacgggaagtacatat

SEQ ID NO: 163074 - DNA, 120 bp, Artificial Sequence
  ENSG00000107738_14 (sequence is synthesized)
tggggcatggtggcctccgtgagcaaatggtgtcttgggcaatctgaggccaggacagatgttgccccacccactggagatggtgctgagggaggtgggtggggccttctgggaaggtga

SEQ ID NO: 163075 - DNA, 120 bp, Artificial Sequence
  ENSG00000107738_15 (sequence is synthesized)
gtggagaggggcacctgccccccgccctccccatcccctactcccactgctcagcgcgggccattgcaagggtgccacacaatgtcttgtccaccctgggacacttctgagtatgaagcg

SEQ ID NO: 163076 - DNA, 120 bp, Artificial Sequence
  ENSG00000107738_16 (sequence is synthesized)
ggatgctattaaaaactacatggggaaacaggtgcaaaccctggagatggattgtaagagccagtttaaatctgcactctgctgctcctcccccacccccaccttccactccatacaatc

SEQ ID NO: 163077 - DNA, 120 bp, Artificial Sequence
  ENSG00000107738_17 (sequence is synthesized)
tgggcctggtggagtcttcgcttcagagccattcggccaggtgcgggtgatgttcccatctcctgcttgtgggcatgccctggctttgtttttatacacataggcaaggtgagtcctctg

SEQ ID NO: 163078 - DNA, 120 bp, Artificial Sequence
  ENSG00000107738_18 (sequence is synthesized)
tggaattgtgattgaaggattttaaagcaggggaggagagtagggggcatctctgtacactctgggggtaaaacagggaaggcagtgcctgagcatggggacaggtgaggtggggctggg

SEQ ID NO: 163079 - DNA, 120 bp, Artificial Sequence
  ENSG00000107738_19 (sequence is synthesized)
ccaggtactgtggagagcatagtccagcctgggcatttgtctcctagcagcctacactggctctgctgagctgggcctgggtgctgaaagccaggatttggggctaggcgggaagatgtt

SEQ ID NO: 163080 - DNA, 120 bp, Artificial Sequence
  ENSG00000107738_20 (sequence is synthesized)
cgcccaattgcttggggggttggggggatggaaaaggggagcacctctaggctgcctggcagcagtgagccctgggcctgtggctacagccagggaaccccacctggacacatggccctg

SEQ ID NO: 163081 - DNA, 120 bp, Artificial Sequence
  ENSG00000107738_21 (sequence is synthesized)
cttctaagccccccagttaggcccaaaggaatggtccactgagggcctcctgctctgcctgggctgggccaggggctttgaggagagggtaaacataggcccggagatggggctgacacc

SEQ ID NO: 163082 - DNA, 120 bp, Artificial Sequence
  ENSG00000107738_22 (sequence is synthesized)
tcgagtggccagaatatgcccaaaccccggcttctcccttgtccctaggcagaggggggtcccttcttttgttccctctggtcaccacaatgcttgatgccagctgccataggaagaggg

SEQ ID NO: 163083 - DNA, 120 bp, Artificial Sequence
  ENSG00000107738_23 (sequence is synthesized)
tgctggctggccatggtggcacacacctgtcctcccagcactttgcagggctgaggtggaaggaccgcttaagcccaggtgttcaaggctgctgtgagctgtgttcgagccactacactc

SEQ ID NO: 163084 - DNA, 120 bp, Artificial Sequence
  ENSG00000107738_24 (sequence is synthesized)
cagcctggggacggagcaaaactttgcctcaaaacaaattttaaaaagaaagaaagaaggaaagagggtatgtttttcacaattcatgggggcctgcatggcaggagtggggacaggaca

SEQ ID NO: 163085 - DNA, 120 bp, Artificial Sequence
  ENSG00000107738_25 (sequence is synthesized)
cctgctgttcctggagtcgaaggacaagcccacagcccagattccggttctcccaactcaggaagagcatgccctgccctctggggaggctggcctggccccagccctcagctgctgacc

SEQ ID NO: 163086 - DNA, 120 bp, Artificial Sequence
  ENSG00000107738_26 (sequence is synthesized)
ttgaggcagagacaacttctaagaatttggctgccagaccccaggcctggctgctgctgtgtggagagggaggcggcccgcagcagaacagccaccgcacttcctcctcagcttcctctg

SEQ ID NO: 163087 - DNA, 120 bp, Artificial Sequence
  ENSG00000107738_27 (sequence is synthesized)
gtgcggccctgccctctcttctctggacccttttacaactgaacgcatctgggcttcgtggtttcctgttttcagcgaaatttactctgagctcccagttccatcttcatccatggccac

SEQ ID NO: 163088 - DNA, 120 bp, Artificial Sequence
  ENSG00000107738_28 (sequence is synthesized)
aggccctgcctacaacgcactagggacgtccctccctgctgctgctggggaggggcaggctgctggagccgccctctgagttgcccgggatggtagtgcctctgatgccagccctggtgg

SEQ ID NO: 163089 - DNA, 120 bp, Artificial Sequence
  ENSG00000107738_29 (sequence is synthesized)
ctgtgggctggggtgcatgggagagctgggtgcgagaacatggcgcctccagggggcgggaggagcactaggggctggggcaggaggctcctggagcgctggattcgtggcacagtctga

SEQ ID NO: 163090 - DNA, 120 bp, Artificial Sequence
  ENSG00000107738_30 (sequence is synthesized)
ggccctgagagggaaatccatgcttttaagaactaattcattgttaggagatcaatcaggaattaggggccatcttacctatctcctgacattcacagtttaatagagacttcctgcctt

SEQ ID NO: 163091 - DNA, 120 bp, Artificial Sequence
  ENSG00000107738_31 (sequence is synthesized)
tattccctcccagggagaggctgaaggaatggaattgaaagcaccatttggagggttttgctgacacagcggggactgctcagcactccctaaaaacacaccatggaggccactggtgac

SEQ ID NO: 163092 - DNA, 120 bp, Artificial Sequence
  ENSG00000107738_32 (sequence is synthesized)
tgctggtgggcaggctggccctgcctgggggagtccgtggcgatgggcgctggggtggaggtgcaggagccccaggacctgcttttcaaaagacttctgcctgaccagagctcccactac

SEQ ID NO: 163093 - DNA, 120 bp, Artificial Sequence
  ENSG00000107738_33 (sequence is synthesized)
atgcagtggcccagggcagaggggctgatacatggcctttttcagggggtgctcctcgcggggtggacttgggagtgtgcagtgggacagggggctgcaggggtcctgccaccaccgagc

SEQ ID NO: 163094 - DNA, 120 bp, Artificial Sequence
  ENSG00000107738_34 (sequence is synthesized)
accaacttggcccctggggtcctgcctcatgaatgaggccttccccagggctggcctgactgtgctgggggctgggttaacgttttctcagggaaccacaatgcacgaaagaggaactgg

SEQ ID NO: 163095 - DNA, 120 bp, Artificial Sequence
  ENSG00000107738_35 (sequence is synthesized)
ggttgctaaccaggatgctgggaacaaaggcctcttgaagcccagccacagcccagctgagcatgaggcccagcccatagacggcacaggccacctggcccattccctgggcattccctg

SEQ ID NO: 163096 - DNA, 120 bp, Artificial Sequence
  ENSG00000107738_36 (sequence is synthesized)
ctttgcattgctgcttctcttcaccccatggaggctatgtcaccctaactatcctggaatgtgttgagagggattctgaatgatcaatatagcttggtgagacagtgccgagatagatag

SEQ ID NO: 163097 - DNA, 120 bp, Artificial Sequence
  ENSG00000107738_37 (sequence is synthesized)
ccatgtctgccttgggcacgggagagggaagtggcagcatgcatgctgtttcttggccttttctgttagaatacttggtgctttccaacacactttcacatgtgttgtaacttgtttgat

SEQ ID NO: 163098 - DNA, 120 bp, Artificial Sequence
  ENSG00000107738_38 (sequence is synthesized)
ccacccccttccctgaaaatcctgggaggttttattgctgccatttaacacagagggcaatagaggttctgaaaggtctgtgtcttgtcaaaacaagtaaacggtggaactacgactaaa

SEQ ID NO: 163099 - DNA, 120 bp, Artificial Sequence
  ENSG00000107738_39 (sequence is synthesized)
tgggttctctgttttcttctgtcctcatcctgcacccagaccctgtttggaactctggcctcatcaccccaagccctcagaaccccccggtcctcctccttttctgctgctgcacatccc

SEQ ID NO: 163100 - DNA, 120 bp, Artificial Sequence
  ENSG00000107738_40 (sequence is synthesized)
ttctgcttcctccttggtgcaatccccagaagcccactctccttccatctgctctggagtctctgctcctcttgactctctggagtggctgtgccttggcagtgacctttggccagggca

SEQ ID NO: 163101 - DNA, 120 bp, Artificial Sequence
  ENSG00000107738_41 (sequence is synthesized)
agtgcctcatgacaggtactgggtgccccaggcagctaagtgccgccctgcccaccagccccctatggcttgggaaggctgggggtcctcttggcctagaattaaactacttcagatttc

SEQ ID NO: 163102 - DNA, 120 bp, Artificial Sequence
  ENSG00000107742_0 (sequence is synthesized)
agttgttatacggcttttgtcttaacgaagccacccattacggtatgatgatgtcaaacgtgatgctgatgctacagttacagcccctgctggcgcagcctctctgattctctctccctc

SEQ ID NO: 163103 - DNA, 120 bp, Artificial Sequence
  ENSG00000107742_1 (sequence is synthesized)
tccgcgtccagtgctgggctttttcagacaagtgcatctcctaaccaggtcacatttcagccgcgacccactctccgccagtcaccggaggcagaccgcgggaggagagctgaggacagc

SEQ ID NO: 163104 - DNA, 120 bp, Artificial Sequence
  ENSG00000107742_2 (sequence is synthesized)
cgcgtgcgcttcgccagcagcggggtgggaggaaggacattaaaatactgcagaagtcaagacccccccaggtcgaacccagaccacgatgcgcgccccgggctgcgggcggctggtgct

SEQ ID NO: 163105 - DNA, 120 bp, Artificial Sequence
  ENSG00000107742_3 (sequence is synthesized)
gccgctgctgctcctggccgcggcagccctggccgaaggcgacgccaaggggctcaaggagggcgagacccccggcaatttcatggaggacgagcaatggctgtcgtccatctcgcagta

SEQ ID NO: 163106 - DNA, 120 bp, Artificial Sequence
  ENSG00000107742_4 (sequence is synthesized)
cagcggcaagatcaagcactggaaccgcttccgagacgaagtggaggatgactatatcaagagctgggaggacaatcagcaaggagatgaagccctggataccaccaaggacccctgcca

SEQ ID NO: 163107 - DNA, 120 bp, Artificial Sequence
  ENSG00000107742_5 (sequence is synthesized)
gaaggtgaagtgcagccgccacaaggtgtgcattgcccagggctaccagcgggccatgtgcatcagtcgcaagaagctggagcacaggatcaagcagccgaccgtgaaactccatggaaa

SEQ ID NO: 163108 - DNA, 120 bp, Artificial Sequence
  ENSG00000107742_6 (sequence is synthesized)
caaagactccatctgcaagccctgccacatggcccagcttgcctctgtctgcggctcagatggccacacttacagctctgtgtgtaagctggagcaacaggcgtgcctgagcagcaagca

SEQ ID NO: 163109 - DNA, 120 bp, Artificial Sequence
  ENSG00000107742_7 (sequence is synthesized)
gctggcggtgcgatgcgagggcccctgcccctgccccacggagcaggctgccacctccaccgccgatggcaaaccagagacttgcaccggtcaggacctggctgacctgggagatcggct

SEQ ID NO: 163110 - DNA, 120 bp, Artificial Sequence
  ENSG00000107742_8 (sequence is synthesized)
gcgggactggttccagctccttcatgagaactccaagcagaatggctcagccagcagtgtagccggcccggccagcgggctggacaagagcctgggggccagctgcaaggactccattgg

SEQ ID NO: 163111 - DNA, 120 bp, Artificial Sequence
  ENSG00000107742_9 (sequence is synthesized)
ctggatgttctccaagctggacaccagtgctgacctcttcctggaccagacggagctggccgccatcaacctggacaagtacgaggtctgcatccgtcccttcttcaactcctgtgacac

SEQ ID NO: 163112 - DNA, 120 bp, Artificial Sequence
  ENSG00000107742_10 (sequence is synthesized)
ctacaaggatggccgggtctctactgctgagtggtgcttctgcttctggagggagaagcccccctgcctggcagagctggagcgcatccagatccaggaggccgccaagaagaagccagg

SEQ ID NO: 163113 - DNA, 120 bp, Artificial Sequence
  ENSG00000107742_11 (sequence is synthesized)
catcttcatcccgagctgcgacgaggatggctactaccggaagatgcagtgtgaccagagcagcggtgactgctggtgtgtggaccagctgggcctggagctgactggcacgcgcacgca

SEQ ID NO: 163114 - DNA, 120 bp, Artificial Sequence
  ENSG00000107742_12 (sequence is synthesized)
tgggagccccgactgcgatgacatcgtgggcttctcgggggactttggaagcggtgtcggctgggaggatgaggaggagaaggagacggaggaagcaggcgaggaggccgaggaggagga

SEQ ID NO: 163115 - DNA, 120 bp, Artificial Sequence
  ENSG00000107742_13 (sequence is synthesized)
gggcgaggcaggcgaggctgacgacgggggctacatctggtagacgccctcaggagccggctgccgggggggactcaacagcagagctctgagcagcagcaggcaacttcgagaacggat

SEQ ID NO: 163116 - DNA, 120 bp, Artificial Sequence
  ENSG00000107742_14 (sequence is synthesized)
ccagaaatgcagtcagaaggaccctgctccacctggggggactgggagtgtgagtgtgcatggcatgtgtgtggcacagatggctgggacgggtgacagtgtgagtgcatgtgtgcatgc

SEQ ID NO: 163117 - DNA, 120 bp, Artificial Sequence
  ENSG00000107742_15 (sequence is synthesized)
atgtgtgtatgtgtgtgtgtgtgtggcatgcgctgacaaatgtgtccttgatccacactgctcctggcagagtgagtcacccaaaggccccttcggcctccttgtagctgttttctttcc

SEQ ID NO: 163118 - DNA, 120 bp, Artificial Sequence
  ENSG00000107742_16 (sequence is synthesized)
ttttgttgttggttttaaaatacattcacacacaaatacaaattgacaggtcaaaatccatgaaatgagatcccccagccgtgtcctccagcccagccctgaccccttggtttctaccct

SEQ ID NO: 163119 - DNA, 120 bp, Artificial Sequence
  ENSG00000107742_17 (sequence is synthesized)
ggctccccttggtttctaccctggctcaaccgacccctgtctgcccttctccctcttgcttctgaggtcaagctctggcctgcgagcctgtccccattgcaaaggggagggaggggcagg

SEQ ID NO: 163120 - DNA, 120 bp, Artificial Sequence
  ENSG00000107742_18 (sequence is synthesized)
gagctgtctaccagctgaggtcctcccaaaactgggccgatgtggtgtgacatccccaccagcctcagatgagacgggccaggacgcccagccacagcaagccctgtccctttgccggat

SEQ ID NO: 163121 - DNA, 120 bp, Artificial Sequence
  ENSG00000107742_19 (sequence is synthesized)
ccccaaacactagagaagctctcctaacccaaggcggagaatgaaggtggtggcggcagaggaggagggcagcagctgagaggccagggacagggtgcctcgccaagctgtctgaggtct

SEQ ID NO: 163122 - DNA, 120 bp, Artificial Sequence
  ENSG00000107742_20 (sequence is synthesized)
gtcccaggtggcccaggtggtgcaggtagaacagggtgaggagagggggtcggctcagcaggaggaggctgtggctgcagagcctgggggagcttttaggtgttgagatggggcagctct

SEQ ID NO: 163123 - DNA, 120 bp, Artificial Sequence
  ENSG00000107742_21 (sequence is synthesized)
gaatcctagaccctggaatagcctgtcccttttctctgggtctcgtggtggagccatgatctgggctgctctcttggggacactgggtggtggttacacagttgacctctgcctggctcc

SEQ ID NO: 163124 - DNA, 120 bp, Artificial Sequence
  ENSG00000107742_22 (sequence is synthesized)
ccacttgagggcgcctgagggccaggagcagcaggcaaggagcctgggtctaggctaagggggtgtgtgcccacctcctccctgacccttaacactcctgtcctgcccagaccaacagag

SEQ ID NO: 163125 - DNA, 120 bp, Artificial Sequence
  ENSG00000107742_23 (sequence is synthesized)
agagctgtccctgagaccccggagagaagcagctgccgaaagctgcagcctttccgcactctgagaccatgatcttcctcctgccaggggagagccacccacaggccatgtccagcccca

SEQ ID NO: 163126 - DNA, 120 bp, Artificial Sequence
  ENSG00000107742_24 (sequence is synthesized)
cttccctcagcccccagggcttccttctggcccctctgaggattccctagggctgccccgcagaggggcttccccaagctctgttttgaagcctgcaatgtggaaaagtgagaagtcaga

SEQ ID NO: 163127 - DNA, 120 bp, Artificial Sequence
  ENSG00000107742_25 (sequence is synthesized)
gggaacaggacaggtgcagccgggctctgaggccacacctcacacctcgctgttccccaacatcccctgagcagtgtgagctcatctcaccagatgagaagaggccctgtgcatttcttt

SEQ ID NO: 163128 - DNA, 120 bp, Artificial Sequence
  ENSG00000107742_26 (sequence is synthesized)
tgtttgtttgttgctgttttcccccacccatccagttctcctcagcaaagcaaattccttaacacctttggtggagaatttcttacccagacttggggctgtgatgcccttcagtgcgtg

SEQ ID NO: 163129 - DNA, 120 bp, Artificial Sequence
  ENSG00000107742_27 (sequence is synthesized)
gtgagtgcagcgtgtgtgcgtgtgcctgtgtgtgaacctgggggccatcctggtggcctgggagcgtgaggagaggccccctgtgtgctgggtgagtggtgggtgtggggtcaatgcagt

SEQ ID NO: 163130 - DNA, 120 bp, Artificial Sequence
  ENSG00000107742_28 (sequence is synthesized)
gaggctctctgggtgaggctcccaacctggcagtccccagcctcccagcatctgtgagcgtctgttggactttacagaagagcctcatcctgtctgcccctcactctgccctggaatcaa

SEQ ID NO: 163131 - DNA, 120 bp, Artificial Sequence
  ENSG00000107742_29 (sequence is synthesized)
catcttccgagtccttcttgggggaaatagcagagccccacttaactccataaactgcttcccattccgcagcccagttctgattgttgaggtgtcgcgtcgttccaggtcccccagtcc

SEQ ID NO: 163132 - DNA, 120 bp, Artificial Sequence
  ENSG00000107742_30 (sequence is synthesized)
cctctttctcctgtcctctctctgtccttcacctccccactccagccccggctcagttcagggaaatgctgttccacatcagccctctgctctctgaggcagccgcgcctctgactcgga

SEQ ID NO: 163133 - DNA, 120 bp, Artificial Sequence
  ENSG00000107742_31 (sequence is synthesized)
gctacttgaaacttctgctcttgctaggattggagtctacctatctcttccatttgtcccagctggagttctggaactttcctcctcggggtgggggtgggggttgttaaggatgctggg

SEQ ID NO: 163134 - DNA, 120 bp, Artificial Sequence
  ENSG00000107742_32 (sequence is synthesized)
gggcctggggaaggaaggagttcagaggaagggtgtcccctgtcctcttgatgtcaccctccgctcctgggacacgtgctctctctgtctctgggtcttctggctgtgcacgtttgtgtg

SEQ ID NO: 163135 - DNA, 120 bp, Artificial Sequence
  ENSG00000107742_33 (sequence is synthesized)
tccttgtaaatatgttttaggaagaaagcaaaagggactgaactagcctctggtaggattgcaggggtccagccttgcctgtttccgaagcccccacactgcctttcgccctactgagac

SEQ ID NO: 163136 - DNA, 120 bp, Artificial Sequence
  ENSG00000107742_34 (sequence is synthesized)
tggtcccctcaaaaggtagacaaaacagcagctccctgtggagctgaagggcggcctcaaagtggctttttgttagacaaggttaaggtttcctcatgagcaaggttgcagatcggtcct

SEQ ID NO: 163137 - DNA, 120 bp, Artificial Sequence
  ENSG00000107742_35 (sequence is synthesized)
tcctcagctccttgatttgtgaccttgaccaaggggcctgccacccagcccctccagtgccctctcctcgatgcctcgctccttcctgcccccactcccctggcttaggcaggtagggga

SEQ ID NO: 163138 - DNA, 120 bp, Artificial Sequence
  ENSG00000107742_36 (sequence is synthesized)
attagggccatgctggaagaagcttaaccatgtgttcaaagaacggtttcttgcttgcttggtcctggaactccccttggctgccccaggcctccttggcccatgggtgctgggggaggt

SEQ ID NO: 163139 - DNA, 120 bp, Artificial Sequence
  ENSG00000107742_37 (sequence is synthesized)
ggatgtcagatctggtaggttgcagcagagaaaataaatgtgccttgagagaccactcagagagggtccaagggtgatggagaaggaagcatggcctgggagcttggaagggaggggtgg

SEQ ID NO: 163140 - DNA, 120 bp, Artificial Sequence
  ENSG00000107742_38 (sequence is synthesized)
tgggtggcggcatcttgactgccccctgttgtcccacacgtggggggtggtcaccccccttcactccagcccgcctgccttcagccttccatgagcttcacctgcttccaacttcacttt

SEQ ID NO: 163141 - DNA, 120 bp, Artificial Sequence
  ENSG00000107742_39 (sequence is synthesized)
ggagggggtggggtccgttggcatcaacacggggaccctctgcttcaccaaagcccgagccctcagcccctggggagaacaaatggctgagctttgatacctggggtcgtcgagaggctg

SEQ ID NO: 163142 - DNA, 120 bp, Artificial Sequence
  ENSG00000107742_40 (sequence is synthesized)
cgggctggcggcagtcccaggggagagacaccacagaaggagacccagacatcccgaggaagttcccagcagagcaaactgctttccagcctgaagcctgcttaaactgtgtgatgtgca

SEQ ID NO: 163143 - DNA, 120 bp, Artificial Sequence
  ENSG00000107742_41 (sequence is synthesized)
ataactgagcttagagttaggaattgtgttcaagtgcttggatttccgtctgtagatttaactgctgaaattgtatctctcagtaattttagatgtcttttaaaaaattgaaaaacaaag

SEQ ID NO: 163144 - DNA, 120 bp, Artificial Sequence
  ENSG00000107742_42 (sequence is synthesized)
tgttagactgtgtgcgtgtgcgttgatgggcactcaagagtcccgtgagtcatccagccctgcctttcccctgcgcccccatcctctcacgtcccgccccgcctccacttggggaccctg

SEQ ID NO: 163145 - DNA, 120 bp, Artificial Sequence
  ENSG00000107742_43 (sequence is synthesized)
cctcgtgtcgtctttatctgcctattactcagcctaaggaaacaagtacactccacacatgcataaaggaaatcaaatgttatttttaagaaaatggaaaataaaaactttataaacacc

SEQ ID NO: 163146 - DNA, 120 bp, Artificial Sequence
  ENSG00000107742_44 (sequence is synthesized)
cagcggcaagatcaagcactggaaccgcttccgagacgttccctcgtccgacccacccagtacaacgcaggccacaccatgacctctcccgttttctccttaaactgcgtgcatccacaa

SEQ ID NO: 163147 - DNA, 120 bp, Artificial Sequence
  ENSG00000107742_45 (sequence is synthesized)
tgttaccgtcagacaagtgactgtttctccccaaagtcaaactggcaggttgtaattcacagaggacagcaggaaccacgggcagccaggtctccaggctgagtggccgggccccgcgat

SEQ ID NO: 163148 - DNA, 120 bp, Artificial Sequence
  ENSG00000107742_46 (sequence is synthesized)
gggctgctgatctccgccttcgccccacatgcgacctgtccagccgcaggagcctggagccccgcgaggccttcccgaagcacctgcaggcccagcgcagatgagccgcagtctcctgcc

SEQ ID NO: 163149 - DNA, 120 bp, Artificial Sequence
  ENSG00000107742_47 (sequence is synthesized)
gcttcctgggcagcagcccggccacagcagcgagggggcggcagcaggccggcccatccggaatccatgtgtcactggcctaggcctccctccgactcgctggctgtttgatctgccaaa

SEQ ID NO: 163150 - DNA, 120 bp, Artificial Sequence
  ENSG00000107742_48 (sequence is synthesized)
atgggaccagtgaaggtcagagggaaaagaaatgcttaatcagaacaggaaaggtttaaaataaaagattcctccccacctcccttcttccacctgcttccaatagccagctccgtgggt

SEQ ID NO: 163151 - DNA, 120 bp, Artificial Sequence
  ENSG00000107742_49 (sequence is synthesized)
gagaataaatgacttactgcttgaccccatggcactgggctacccacctgtctctctgtattggtgccaaccacttcccccttcctctcatgctcatcagaagaaaggcactagatttga

SEQ ID NO: 163152 - DNA, 120 bp, Artificial Sequence
  ENSG00000107742_50 (sequence is synthesized)
acctgcagccctggctggaactacctgagagttggagccagaccctgtctgtccctgacctcggacaggtgcaggtggggagtggggcctggaagagacactatggtcagtgtaagctgg

SEQ ID NO: 163153 - DNA, 120 bp, Artificial Sequence
  ENSG00000107742_51 (sequence is synthesized)
gaaaaggccctggtcagaacctggctttagcaggcagctgtggcagaagcagttcttagcgaaggccgaggaattgttagatgctccataggcggtgctgtgtcctatcaggagaactga

SEQ ID NO: 163154 - DNA, 120 bp, Artificial Sequence
  ENSG00000107745_0 (sequence is synthesized)
gtttcatctctatggctgtcagaggtgggcggctttgaccgagaggctgctggagctcgtgtttggacgcgatgtttcgtctgaactcactttctgctttggcagaactggctgtgggtt

SEQ ID NO: 163155 - DNA, 120 bp, Artificial Sequence
  ENSG00000107745_1 (sequence is synthesized)
ctcgatggtaccatggaggatcacagcccatccagatccggcgaagactaatgatggtggctttcctgggagcatctgcagtaactgcaagtactggtcttttgtggaagagggcccatg

SEQ ID NO: 163156 - DNA, 120 bp, Artificial Sequence
  ENSG00000107745_2 (sequence is synthesized)
cagaatctccaccatgtgtagacaacctaaaaagtgacatcggtgataaagggaagaataaagatgaaggggatgtttgtaaccatgagaaaaagactgcagatcttgcccctcacccag

SEQ ID NO: 163157 - DNA, 120 bp, Artificial Sequence
  ENSG00000107745_3 (sequence is synthesized)
aagagaaaaagaagaaacgttctggattcagagacagaaaagtgatggaatatgagaataggattcgagcctactccacgccagacaaaatcttccgatattttgccaccttgaaagtca

SEQ ID NO: 163158 - DNA, 120 bp, Artificial Sequence
  ENSG00000107745_4 (sequence is synthesized)
tcagtgagcctggtgaagcagaagtgtttatgacaccagaagattttgtgcgatccataacacccaatgaaaaacaaccagaacacttgggtctggatcaatatataataaaacgctttg

SEQ ID NO: 163159 - DNA, 120 bp, Artificial Sequence
  ENSG00000107745_5 (sequence is synthesized)
atggaaagaaaatttcccaggaacgagaaaaatttgctgatgaaggcagtatattttacacccttggagaatgtgggctcatatccttttcagactacattttcctcacaactgttcttt

SEQ ID NO: 163160 - DNA, 120 bp, Artificial Sequence
  ENSG00000107745_6 (sequence is synthesized)
ccactcctcagagaaattttgaaattgccttcaagatgtttgatttgaatggagatggagaagtagatatggaagaatttgaacaggttcagagcatcattcgctcccaaaccagtatgg

SEQ ID NO: 163161 - DNA, 120 bp, Artificial Sequence
  ENSG00000107745_7 (sequence is synthesized)
gtatgcgccacagagatcgtccaactactggcaacaccctcaagtctggcttgtgttcagccctcacaacctacttttttggagctgatctgaagggaaagctgacaatcaaaaacttcc

SEQ ID NO: 163162 - DNA, 120 bp, Artificial Sequence
  ENSG00000107745_8 (sequence is synthesized)
tcgaatttcagcgtaaactgcagcatgatgttctgaagcttgagtttgaacgccatgaccctgtggatgggagaattactgagaggcagtttggtggcatgctacttgcctacagtgggg

SEQ ID NO: 163163 - DNA, 120 bp, Artificial Sequence
  ENSG00000107745_9 (sequence is synthesized)
gaggtggagaacttctttactttcctaaagaacattaatgatgtggacactgcattgagtttttaccatatggctggagcatctcttgataaagtgaccatgcagcaggtggccaggaca

SEQ ID NO: 163164 - DNA, 120 bp, Artificial Sequence
  ENSG00000107745_10 (sequence is synthesized)
gtggctaaagtggagctctcagaccacgtgtgtgatgtggtgtttgcactctttgactgtgatggcaatggcgaactgagcaataaggaatttgtttccatcatgaagcaacggctgatg

SEQ ID NO: 163165 - DNA, 120 bp, Artificial Sequence
  ENSG00000107745_11 (sequence is synthesized)
agaggcctggaaaagcccaaagacatgggtttcactcgcctcatgcaggccatgtggaaatgtgcacaggaaactgcctgggacttcgctttacccaaacagtaaccccacactgcaaga

SEQ ID NO: 163166 - DNA, 120 bp, Artificial Sequence
  ENSG00000107745_12 (sequence is synthesized)
ggggacccctccacccccagtaccctggaccccctccgcagagtctcggcagagccctttgtgctgctgcttctggaagtagtcccccttcctcccgggatgacctcaggactctgtcgg

SEQ ID NO: 163167 - DNA, 120 bp, Artificial Sequence
  ENSG00000107745_13 (sequence is synthesized)
tttcccctctttacccttccccgtccccgtgttctgctgggctctgattctgcccaatgagtatccccataggttctcaaaaacatgaacaagtctgtaaagctcagacatttgtcagcc

SEQ ID NO: 163168 - DNA, 120 bp, Artificial Sequence
  ENSG00000107745_14 (sequence is synthesized)
tcaacagcaccacccattcaagcatcctgtggataaagaattcagggaaccatccacacacctgccaaccctgggaagcatccagttctcaaatcgtttttgctatggatttatactaac

SEQ ID NO: 163169 - DNA, 120 bp, Artificial Sequence
  ENSG00000107745_15 (sequence is synthesized)
aagaacattccttgacttccctcctgctggtgttttaaagccacaagtagggaagatatctggcaggcagaaagaagtctgtgatgataaacaatgatgaggatgacctaggcaccctac

SEQ ID NO: 163170 - DNA, 120 bp, Artificial Sequence
  ENSG00000107745_16 (sequence is synthesized)
gctagtgtgagaagcctgcgccccaggaaggatctgtgttagtccctgggatggctccaaggcctgctctaggaaggcagcatgctcagtgggaacacagcaagattcagaatttaaagt

SEQ ID NO: 163171 - DNA, 120 bp, Artificial Sequence
  ENSG00000107745_17 (sequence is synthesized)
agttgcttcatggctctgtgcactcccttttcttcctcgcagcctccctaagatgactccagtgtgaccctgtgcttagtgagcaatagtgattgagctcatgttccctgcaagtgccat

SEQ ID NO: 163172 - DNA, 120 bp, Artificial Sequence
  ENSG00000107745_18 (sequence is synthesized)
ttcctctccaggatgggcctctaaagctgaggcctggctcagagcctgtttgccctctgtcttaaacaattgtaaatatcacttaaattataaccatttgcaataaacatccccaaagtt

SEQ ID NO: 163173 - DNA, 120 bp, Artificial Sequence
  ENSG00000107745_19 (sequence is synthesized)
aagactttattattttgcttttctgagctaatcaatgactttaatttggaaaagcaactaaatatttggagaaaaccatgaaaagaatatatacttacagacgggccaaggagatcttca

SEQ ID NO: 163174 - DNA, 120 bp, Artificial Sequence
  ENSG00000107745_20 (sequence is synthesized)
aggacactcctaaagaaaatttcccaggaacgagaaaaatttgctgatgaaggcagtatattttacacccttggagaatgtgggctcatatccttttcagactacattttcctcacaact

SEQ ID NO: 163175 - DNA, 120 bp, Artificial Sequence
  ENSG00000107745_21 (sequence is synthesized)
gttctttccaataagtaataccatattgaagcaacagaacgttaatattactaagctaagaagatggtgtctctgaaagcaaagctaaatcatttaaggcaaagcatgttgaaacaaaaa

SEQ ID NO: 163176 - DNA, 120 bp, Artificial Sequence
  ENSG00000107745_22 (sequence is synthesized)
cttcatggggagaagatgagtacttgaaatatcaagacaattgcagaaggctgtgccctgagagaatggaagaactgggaaagagaaaaggaagtcagaagcttaagtgaccatgcagca

SEQ ID NO: 163177 - DNA, 120 bp, Artificial Sequence
  ENSG00000107745_23 (sequence is synthesized)
ttatttgtttactaccacgtatacctctgtaggagaaggtggattgtttttcaaactaagaaacaaaacctgttctgaagtgggcctgtatatgtgcaatggcagagggttctaacattg

SEQ ID NO: 163178 - DNA, 120 bp, Artificial Sequence
  ENSG00000107745_24 (sequence is synthesized)
aaattattttctaatgttcatattgaactagtgttgaaatgaaaacataatttttgtcttaaaattttcatcatcttgaaaactgtaaaggatccattgattttgaatggccatgagaga

SEQ ID NO: 163179 - DNA, 120 bp, Artificial Sequence
  ENSG00000107745_25 (sequence is synthesized)
ctttttaatcatatgtttcagatggttcatcttcactttcaagttatcacttctttgctattttctatcatgttctaagccaaaagtactcttggaatgtgaggttaaaggaggtagtta

SEQ ID NO: 163180 - DNA, 120 bp, Artificial Sequence
  ENSG00000107745_26 (sequence is synthesized)
acagggtcagaaagaaaagtaaagggtcaattttacagaggaggaagaaagcacttcagaaagaagaaagaaccaggcatggttctacaaagcacaatgaacaggaagtcagaaggacaa

SEQ ID NO: 163181 - DNA, 71 bp, Artificial Sequence
  ENSG00000107745_27 (sequence is synthesized)
atgatccgcccgccttggcttcgcaaagtgctgggattacagaaaatttcccaggaacgagaaaaatttgc

SEQ ID NO: 163182 - DNA, 80 bp, Artificial Sequence
  ENSG00000107758_0 (sequence is synthesized)
gggaaagagggtccgccatgttccccggcggcgccgccgcttggctctggtagccgccgcccccgcccccaaccccgccc

SEQ ID NO: 163183 - DNA, 120 bp, Artificial Sequence
  ENSG00000107758_1 (sequence is synthesized)
ccacccccgcccccgccgccccctcccggggctgaccgcgtcgtcaaagctgtccctttccccccaacacatcgcttgacatctgaagaagtatttgatttggatgggatacccagggtt

SEQ ID NO: 163184 - DNA, 120 bp, Artificial Sequence
  ENSG00000107758_2 (sequence is synthesized)
atttgatttggatgggatacccagggttgatgttctgaagaaccacttggtgaaagaaggtcgagtagatgaagaaattgcgcttagaattatcaatgagggtgctgccatccttcggag

SEQ ID NO: 163185 - DNA, 120 bp, Artificial Sequence
  ENSG00000107758_3 (sequence is synthesized)
agagaaaaccatgatagaagtagaagctccaatcacagtgtgtggtgacatccatggccaattttttgatctgatgaaactttttgaagtaggaggatcacctgctaatacacgatacct

SEQ ID NO: 163186 - DNA, 120 bp, Artificial Sequence
  ENSG00000107758_4 (sequence is synthesized)
ttttcttggcgattatgtggacagaggttattttagtatagagtgtgtcttatatttatgggttctgaagattctatacccaagcacattatttcttctgagaggcaaccatgaatgcag

SEQ ID NO: 163187 - DNA, 120 bp, Artificial Sequence
  ENSG00000107758_5 (sequence is synthesized)
acaccttactgaatattttacctttaagcaggaatgtaaaattaagtattcggaaagagtctatgaagcttgtatggaagcttttgatagtttgcctcttgctgcacttttaaaccaaca

SEQ ID NO: 163188 - DNA, 120 bp, Artificial Sequence
  ENSG00000107758_6 (sequence is synthesized)
gtttctttgtgttcatggtggactttcaccagaaatacacacactggatgatattaggagattagatagattcaaagagccacctgcatttggaccaatgtgtgacttgttatggtccga

SEQ ID NO: 163189 - DNA, 120 bp, Artificial Sequence
  ENSG00000107758_7 (sequence is synthesized)
tccttctgaagattttggaaatgaaaaatcacaggaacattttagtcacaatacagttcgaggatgttcttatttttataactatccagcagtgtgtgaatttttgcaaaacaataattt

SEQ ID NO: 163190 - DNA, 120 bp, Artificial Sequence
  ENSG00000107758_8 (sequence is synthesized)
gttatcgattattagagctcatgaagctcaagatgcaggctatagaatgtacagaaaaagtcaaactacagggttcccttcattaataacaattttttcggcacctaattacttagatgt

SEQ ID NO: 163191 - DNA, 120 bp, Artificial Sequence
  ENSG00000107758_9 (sequence is synthesized)
ctacaataataaagctgctgtattaaagtatgaaaataatgtgatgaatattcgacagtttaactgttctccacatccttactggttgcctaattttatggatgtcttcacgtggtcttt

SEQ ID NO: 163192 - DNA, 120 bp, Artificial Sequence
  ENSG00000107758_10 (sequence is synthesized)
accgtttgttggagaaaaagtgacagaaatgttggtaaatgttctgagtatttgctctgatgatgaactaatgactgaaggtgaagaccagtttgatggttcagctgcagcccggaaaga

SEQ ID NO: 163193 - DNA, 120 bp, Artificial Sequence
  ENSG00000107758_11 (sequence is synthesized)
aatcataagaaacaaaattcgagcaattggcaagatggcaagagtcttctctgttctcagggaggagagtgaaagtgtgctgacactcaagggcctgactcccacagggatgttgcctag

SEQ ID NO: 163194 - DNA, 120 bp, Artificial Sequence
  ENSG00000107758_12 (sequence is synthesized)
tggagtgttagctggaggacggcagaccctgcaaagtgccacagttgaggctattgaggctgaaaaagcaatacgaggattctctccaccacatagaatctgcagttttgaagaggcaaa

SEQ ID NO: 163195 - DNA, 120 bp, Artificial Sequence
  ENSG00000107758_13 (sequence is synthesized)
gggtttggataggatcaatgagagaatgccacctcggaaagatgctgtacagcaagatggtttcaattctctgaacaccgcacatgccactgagaaccacgggacgggcaaccatactgc

SEQ ID NO: 163196 - DNA, 120 bp, Artificial Sequence
  ENSG00000107758_14 (sequence is synthesized)
gggactctcacatctcgggccccaaatggacagatcacccgaggagctggaggggtcggccaagctgactgtaaatttcacagtctctctgaagaaaccattgtgcttctgagaccctag

SEQ ID NO: 163197 - DNA, 120 bp, Artificial Sequence
  ENSG00000107758_15 (sequence is synthesized)
cccccttcctggatggaggcttgagggccctgggacatgtgctatctgataagattgggtcatcgctgccaaggtggagagcagtgagcaaggggcttggggcaatttccagtggagggc

SEQ ID NO: 163198 - DNA, 120 bp, Artificial Sequence
  ENSG00000107758_16 (sequence is synthesized)
atccacacctccattttatgcttgtggttcacacatttaagtttacaaatcagatttcttttccccttcagtagaattagattttgtttttcaatcatgatttcaaatgcaatcctaaga

SEQ ID NO: 163199 - DNA, 120 bp, Artificial Sequence
  ENSG00000107758_17 (sequence is synthesized)
gctaatgtggacttttctttttccatgaaatgtctttaaaggatgaattagcatggtcttaaaatacatttctgaggttactagctgtattttgaattgtgagcaaaatgccgagaaacc

SEQ ID NO: 163200 - DNA, 120 bp, Artificial Sequence
  ENSG00000107758_18 (sequence is synthesized)
cagttggcatttatacaaaatgttgacctcaggtctatagttcttaaatgtggctaattctgtaacatagtcttggtattttttaattatgaatgcatatcctatttccaggcaggctct

SEQ ID NO: 163201 - DNA, 120 bp, Artificial Sequence
  ENSG00000107758_19 (sequence is synthesized)
cttacttgaacacaaatccaaaaactaatttagagtcttttttgcccagatcttttaagacttacaccccagagatttaagaagaaaacctctaaatttcaaaattatgaagaattacag

SEQ ID NO: 163202 - DNA, 120 bp, Artificial Sequence
  ENSG00000107758_20 (sequence is synthesized)
aattactcatttaaggtactttaaaagaagtttgtacattgtcaaagtaaattttaattcaaatcatgtctgtaaaacttgacgtattttgtgtatgcatgttttcattttgcaaatatt

SEQ ID NO: 163203 - DNA, 120 bp, Artificial Sequence
  ENSG00000107758_21 (sequence is synthesized)
taatatatagacctatgatgtacaggtacgacatgtataggttacctagatgttatgagaaattttagtttattgtgagtactcaagttgcttagagagccaccagggtgatttgctgct

SEQ ID NO: 163204 - DNA, 120 bp, Artificial Sequence
  ENSG00000107758_22 (sequence is synthesized)
ggctttctatcatttttatgttttaatgcaaaggaaattttaaaatgttctggaagtgtttttgattaagcaatgcagcctagaagcaatggttctgttcaatcattcagatgttagtgg

SEQ ID NO: 163205 - DNA, 120 bp, Artificial Sequence
  ENSG00000107758_23 (sequence is synthesized)
aagcataaaagtcaagactgcatgttgaaacctttcttttgatagttactgaactgcttggttaaactaaatggaaccatgtgctaatttttcacaattattgacctgtattgattgcca

SEQ ID NO: 163206 - DNA, 120 bp, Artificial Sequence
  ENSG00000107758_24 (sequence is synthesized)
ctgtagtttggtatttccctttactttggtggcctgcttccctcatgccctggaatacaactcagagctccaggcagcggaaccatctattgttttgtttgccagaaagtgcaccctgta

SEQ ID NO: 163207 - DNA, 120 bp, Artificial Sequence
  ENSG00000107758_25 (sequence is synthesized)
tggtctcctgtctaagttggaaatattatgcatgtgcaggactattcgagtattttataaacagtagcacacaataaattccatgcatgggccgctgctcctatctctgtgttgggtttt

SEQ ID NO: 163208 - DNA, 120 bp, Artificial Sequence
  ENSG00000107758_26 (sequence is synthesized)
atttggaagatgcaatctgatttgtccttttgatgcaaatcagaaaatcctgttactagagctgggatgtcctccggagattatctcgtggatagttcatggtaatttgattaattaaat

SEQ ID NO: 163209 - DNA, 120 bp, Artificial Sequence
  ENSG00000107758_27 (sequence is synthesized)
tctttataaattttgccttaaaaaaaacttttgttatatacttgttttacatgagcattagtaactgagcactagaggactttgaatgcctactgtaggcctcctaagtctaatatttaa

SEQ ID NO: 163210 - DNA, 120 bp, Artificial Sequence
  ENSG00000107758_28 (sequence is synthesized)
gatcactgtttattgtcttttaattgaaagaaaatatgttattgtctagaattttgttatagtggtattgggaatttactgggtgttctaacaataagaaaaatattagtgataattgca

SEQ ID NO: 163211 - DNA, 120 bp, Artificial Sequence
  ENSG00000107758_29 (sequence is synthesized)
agaccctgcaaagtggtaatgatgttatgcaacttgctgtgcctcagatggactggggcacacctcactcttttgctaacaattcacataatgcatgcagggaattccttctgtttttta

SEQ ID NO: 163212 - DNA, 120 bp, Artificial Sequence
  ENSG00000107758_30 (sequence is synthesized)
gttcctgtctcagcagctgacctagacagggtactgtattagctagtgtctcattaatacctgatcagggcagaaaactgatagaatgggtattcctttcaattgaaaataatggtcagt

SEQ ID NO: 163213 - DNA, 120 bp, Artificial Sequence
  ENSG00000107758_31 (sequence is synthesized)
tcctcagcttttcatgaaatgatatgggagcagctcatatcataatgtctgaaatatttatttattcatctgtctaattcacccttttcttttaaaagccccagtttcagaatgtgaatc

SEQ ID NO: 163214 - DNA, 120 bp, Artificial Sequence
  ENSG00000107758_32 (sequence is synthesized)
agggatattcctgttactaaaatggaaatgtaattccaagtttcttttttaattttttaaatttatgtcattgtattggactatgcttatatttaaaactacttaatttagagttaacta

SEQ ID NO: 163215 - DNA, 120 bp, Artificial Sequence
  ENSG00000107758_33 (sequence is synthesized)
cctgcttaggccccagaacattacttatgcccttcagttaccaaaagatttgtgcaaggttttgtaccctggtaaatgatgccaaagtttgttttctgtggtgtttgtcaaatgttctat

SEQ ID NO: 163216 - DNA, 120 bp, Artificial Sequence
  ENSG00000107758_34 (sequence is synthesized)
gtataattaactgtctgtaacatgctgtttccttcctctgcagatgtagctgctttcctaaatctgtctgtctttctttaggttagctgtatgtctgtaaaagtatgttcaattaaatta

SEQ ID NO: 163217 - DNA, 120 bp, Artificial Sequence
  ENSG00000107758_35 (sequence is synthesized)
ctccatcagacacttgtctgtcttgcaatgtagaagcagctttgtagcaccttgttttgaggtttgctgcatttgttgctgcactttgtgcattctgaacatgaatgtaacattagatat

SEQ ID NO: 163218 - DNA, 120 bp, Artificial Sequence
  ENSG00000107758_36 (sequence is synthesized)
taagtcattgttataaggggttgaatttaaatcctgtaagtcaaaattgaaagggtgttattaagtgtgcctttattttgcatgaaaataaaaagaattatacgtaaagcattcctgtaa

SEQ ID NO: 163219 - DNA, 120 bp, Artificial Sequence
  ENSG00000107758_37 (sequence is synthesized)
aaaaggtataatttttatttttaaaaaaaatttgttttattactgttacatttactccagtttactatcataggcacatacttgctaaaggaaaccaaagtctagtttcactgtggttac

SEQ ID NO: 163220 - DNA, 120 bp, Artificial Sequence
  ENSG00000107758_38 (sequence is synthesized)
agctctccttgtgtcagtgggtgtggacataagagtctcaaagatattttagttagctgtttacagcccccatgtgaggctgtctgggggactgggagaagatttataaatagcccaatg

SEQ ID NO: 163221 - DNA, 120 bp, Artificial Sequence
  ENSG00000107758_39 (sequence is synthesized)
tcttcagctgttggattttctttttttttttttctttagcttaaatcttttatgaaggggtggagagattgctttgcttgaaatgggcccttctgcatatcttaacaccatttttgggca

SEQ ID NO: 163222 - DNA, 120 bp, Artificial Sequence
  ENSG00000107758_40 (sequence is synthesized)
ttccaccgaaattcttggggaaatttagtagccttcattttagcaatattagtcattttaatagctgttctatactttaagagaaatcataaagagaaattcagattgtaacccaatatt

SEQ ID NO: 163223 - DNA, 120 bp, Artificial Sequence
  ENSG00000107758_41 (sequence is synthesized)
ccttctcttatataaaaaatatgtataaaattttagtagtgatgcctttctaatttagaggaacacttgttagtacataataggctttttgagagaaaataaatgctatttaagaaattc

SEQ ID NO: 163224 - DNA, 120 bp, Artificial Sequence
  ENSG00000107771_0 (sequence is synthesized)
gcgatgctggttgctgcggctcgggcggcggggctggcggggatgtgacgggcggcccttcgtctcaccttccgtcctcgggcccgcaggtcgcagggcggcctgcagctgggccgcggc

SEQ ID NO: 163225 - DNA, 120 bp, Artificial Sequence
  ENSG00000107771_1 (sequence is synthesized)
cgaggaggcagcgcgacctccgcacgattctttcaacttttaagaacaaatgcaccttatagctcatggaagaaaaaacacaaatcaagacatttttgggttccaagttgccaaagtatg

SEQ ID NO: 163226 - DNA, 120 bp, Artificial Sequence
  ENSG00000107771_2 (sequence is synthesized)
gaacaaaatctgtaagaagtacattgcagccaatgccaaatgggacacctgttaatttattaggaacttccaagaatagtaatgtcaaaagttacatcaaaaataatggctctgattgtc

SEQ ID NO: 163227 - DNA, 120 bp, Artificial Sequence
  ENSG00000107771_3 (sequence is synthesized)
catcatctcattcatttaattggaggaaagcaaataaatatcagctttgtgcacaaggtgtcgaagagcctaacaatactcaaaattcacatgataaaataattgatcctgaaaaacgtg

SEQ ID NO: 163228 - DNA, 120 bp, Artificial Sequence
  ENSG00000107771_4 (sequence is synthesized)
ttcctactcaaggaatgtttgataaaaatgggataaagggaggtttgaaaagtgtttctttattcacatcaaagttagcaaagccatccactatgtttgtgtcatctacagaggagttaa

SEQ ID NO: 163229 - DNA, 120 bp, Artificial Sequence
  ENSG00000107771_5 (sequence is synthesized)
accaaaagtctttttctggaccatctaatttgggtaaattcaccaaaggcacattattaggaaggacttcatattcttcgatcaatactccaaaatcacagttgaatggattttatggaa

SEQ ID NO: 163230 - DNA, 120 bp, Artificial Sequence
  ENSG00000107771_6 (sequence is synthesized)
accgatcagctggtagcatgcaaaggcctagagcgaactcctgtgccaccagaagcagttctggagaaagcttagctcaatccccagacagtagtaaatctattaattgtgaaaaaatgg

SEQ ID NO: 163231 - DNA, 120 bp, Artificial Sequence
  ENSG00000107771_7 (sequence is synthesized)
taaggtcacaaagtttttcacattccattcagaattcattccttccaccttcatctataaccagatcacattcctttaatagagctgtggatcttacaaagccttatcagaaccaacagc

SEQ ID NO: 163232 - DNA, 120 bp, Artificial Sequence
  ENSG00000107771_8 (sequence is synthesized)
tatccattagagtgcctctacggtcaagtatgctaacaagaaattcccggcagccagaagtactcaatgggaatgaacatttggggtatggatttaataggccttatgctgctggtggaa

SEQ ID NO: 163233 - DNA, 120 bp, Artificial Sequence
  ENSG00000107771_9 (sequence is synthesized)
agaagttggctttaccaaatggcccaggtgtaacttctactttaggttatagaatggttcatccctctctactgaaatctagccgatctccattttctgggactatgacagttgatggaa

SEQ ID NO: 163234 - DNA, 120 bp, Artificial Sequence
  ENSG00000107771_10 (sequence is synthesized)
ataaaaattcacctgctgacacatgtgtagaggaagatgctacagttttggctaaggacagagctgctaataaggaccaagaactgattgaaaatgaaagttatagaacaaaaaacaacc

SEQ ID NO: 163235 - DNA, 120 bp, Artificial Sequence
  ENSG00000107771_11 (sequence is synthesized)
agaccatgaaacatgatgctaaaatgagatacctgagtgatgatgtggatgacatttccttgtcgtctttgtcatcttctgataagaatgatttaagtgaagactttagtgatgatttta

SEQ ID NO: 163236 - DNA, 120 bp, Artificial Sequence
  ENSG00000107771_12 (sequence is synthesized)
tagatatagaagactccaacagaactagaataactccagaggaaatgtctctcaaagaagagaaacatgaaaatgggccaccacaggatatgtttgattcccccaaggaaaatgaaaaag

SEQ ID NO: 163237 - DNA, 120 bp, Artificial Sequence
  ENSG00000107771_13 (sequence is synthesized)
ccttcagtaaaactgatgaatggatagatataagtgtctctgacaggagtgaatgtacaaaacatacttctgggaataatttggtttcaccagatacagactacagagctggttcttcgt

SEQ ID NO: 163238 - DNA, 120 bp, Artificial Sequence
  ENSG00000107771_14 (sequence is synthesized)
ttgaactctctccatctgatagctctgatggaacatacatgtgggatgaagaaggcttggaacccattggaaatgtccatccagttgggagctatgagtcctctgaaatgaacagcatag

SEQ ID NO: 163239 - DNA, 120 bp, Artificial Sequence
  ENSG00000107771_15 (sequence is synthesized)
atattttgaataatcttgaatcatgtgaccttgaggatgatgatcttatgcttgatgtggatctgcctgaggatgcacctcttgaaaatgtggagtgtgacaatatgaaccgctttgacc

SEQ ID NO: 163240 - DNA, 120 bp, Artificial Sequence
  ENSG00000107771_16 (sequence is synthesized)
gaccagacagaaatgttcggcagcctcaggaaggtttttggaaaaggccaccccagaggtggagtggacaggagcattaccacctcagccaccctgaccactatcatcaccatggaaaaa

SEQ ID NO: 163241 - DNA, 120 bp, Artificial Sequence
  ENSG00000107771_17 (sequence is synthesized)
gtgacttgagcagaggctctccctatagagaatctcctttgggtcattttgaaagctatggagggatgccctttttccaggctcagaagatgtttgttgatgtaccagaaaatacagtga

SEQ ID NO: 163242 - DNA, 120 bp, Artificial Sequence
  ENSG00000107771_18 (sequence is synthesized)
tactggatgagatgacccttcggcacatggttcaggattgcactgctgtaaaaactcagttactcaaactgaaacgtctcctgcatcagcatgatggaagtggttcattgcatgatattc

SEQ ID NO: 163243 - DNA, 120 bp, Artificial Sequence
  ENSG00000107771_19 (sequence is synthesized)
aactgtcattgccatccagtccagaaccagaagatggtgataaagtatataagaatgaagatttattaaatgaaataaaacaacttaaagacgaaataaagaaaaaagatgaaaagatcc

SEQ ID NO: 163244 - DNA, 120 bp, Artificial Sequence
  ENSG00000107771_20 (sequence is synthesized)
aactattagaacttcagcttgcaactcagcatatctgccaccaaaaatgtaaagaggaaaaatgcacttatgctgataaatatacccaaacaccctggagacgaattcctggtgggtatt

SEQ ID NO: 163245 - DNA, 120 bp, Artificial Sequence
  ENSG00000107771_21 (sequence is synthesized)
ctgctccctccttctctccttggcagggctccttccaggggatcccacggactgttccaccgcaccgcagacagacctcaagtactacagccttccagcagccttcccagacccacagat

SEQ ID NO: 163246 - DNA, 120 bp, Artificial Sequence
  ENSG00000107771_22 (sequence is synthesized)
cacacccagggaaaactaataaagccacaacgtatcgaggcccgcagtgaatgctcaatccaagacatgcatcagggcggtgcacatccggaagaaagctttacacacgtcttgcaccaa

SEQ ID NO: 163247 - DNA, 120 bp, Artificial Sequence
  ENSG00000107771_23 (sequence is synthesized)
gaaagcaactatggtttggaagagcagcctttttcatcaggcccacaattaacaatggatgtggctaagagtacaccttctgaagcaaacttaaacattactgtaaatgctcaagagcct

SEQ ID NO: 163248 - DNA, 120 bp, Artificial Sequence
  ENSG00000107771_24 (sequence is synthesized)
tatcatttggcaaacaatcaaattagtgacatgcagtttatacccacttctcttcagacacctcccgagtcaagtacagtagaccaggctaagagagttggaagaaatcagtctccgcca

SEQ ID NO: 163249 - DNA, 120 bp, Artificial Sequence
  ENSG00000107771_25 (sequence is synthesized)
gtgggttatatgtctcagcccaagtccttgcagcttttaaagccatccatattgagttctttggtaccgcctccagtttctgaatcatctccaagtaggactcccacttgtaaaaagtca

SEQ ID NO: 163250 - DNA, 120 bp, Artificial Sequence
  ENSG00000107771_26 (sequence is synthesized)
ccaataatcacaacatgtaattcagcaaaacttcagccaacatctagtcaaacaaatcttgcaaataatcagaatctgaaagcatctaagctccgccccccctcaggctctttcaaacaa

SEQ ID NO: 163251 - DNA, 120 bp, Artificial Sequence
  ENSG00000107771_27 (sequence is synthesized)
aaacaaacaaacagcccccaactagagcctcaaagcttccaggccaagacaagcatcccaaggccactaacacaacgaaaagaaatcatgcagaatccaaatggcaatttgcattctggg

SEQ ID NO: 163252 - DNA, 120 bp, Artificial Sequence
  ENSG00000107771_28 (sequence is synthesized)
gattgtttggcctctaatcgatattctcgtcttcctaaaccaaagatacattaagtacatagccatcacctgccaatttgtttcttaaaaacaatctcttctgtaatagctttatgtgca

SEQ ID NO: 163253 - DNA, 120 bp, Artificial Sequence
  ENSG00000107771_29 (sequence is synthesized)
gcttgcagcttgctactgtggtggaggttccattgaaagcctgcaaatcttaaattaaaatgtggaagcttctactagtttggctccttcattttatatcctggttgaagtacatgccat

SEQ ID NO: 163254 - DNA, 120 bp, Artificial Sequence
  ENSG00000107771_30 (sequence is synthesized)
ttgagcataattatctcaggtaaacacgaaagtttgcttacccatttcagaggcctgccaaaggcccaaatcatgttatccatccctctccacgtcagaaaattcataatattttactga

SEQ ID NO: 163255 - DNA, 120 bp, Artificial Sequence
  ENSG00000107771_31 (sequence is synthesized)
tactattttaactaaagatatggtgataatggaagatggtagtctgtaagcagagttctggccagtgttttgtatatttaaaaggtctatgcaaaagctttgtgatgaataaaggagatt

SEQ ID NO: 163256 - DNA, 120 bp, Artificial Sequence
  ENSG00000107771_32 (sequence is synthesized)
aggcttttaatggaaagtctatgtaagttttatttttccttgccagggtcagtcagctaatgttactgttgattcatttcccaaattccccagactgaaagtgtttcttattacatataa

SEQ ID NO: 163257 - DNA, 120 bp, Artificial Sequence
  ENSG00000107771_33 (sequence is synthesized)
atcagttatatattcctttacatcttgttttacaaacacatgtgcatgcacacacacatatacacacacataccatttatgtttgtatttgttactgggtaaattttggagcgcttgaga

SEQ ID NO: 163258 - DNA, 120 bp, Artificial Sequence
  ENSG00000107771_34 (sequence is synthesized)
tacaccttgaaacctgtacctaaagatgtattcatttgtaacatatgttggtgctagagttttgctggtaattcaggcttgaacccttaggcttgtggatccatgatagccattttaagg

SEQ ID NO: 163259 - DNA, 120 bp, Artificial Sequence
  ENSG00000107771_35 (sequence is synthesized)
ttccacagcattatgtctttaattgtaatatttatatttattgattttctgctaatatctgaagactgaaataatgaacttgaaacatttgcacaaaactttgatggggtataaatatac

SEQ ID NO: 163260 - DNA, 120 bp, Artificial Sequence
  ENSG00000107771_36 (sequence is synthesized)
catatatagggattgtaaactattttctatagcaaaacaagttaaaatattttgagaaaaataacaaatttaaataagactatcttgagaaagctggagttcataatattctccccctcc

SEQ ID NO: 163261 - DNA, 120 bp, Artificial Sequence
  ENSG00000107771_37 (sequence is synthesized)
ttgagaaagctggagttcataatattctccccctcccccatctccagtctcctaggtttcccttttctgtgttttttgtttttttctgtttgttttttgagacagagtcttgctccattg

SEQ ID NO: 163262 - DNA, 120 bp, Artificial Sequence
  ENSG00000107771_38 (sequence is synthesized)
ctgacctcaagtgatccacccacctcgtctatggtgtatttttgaaagacaattttttaaaggtagatttgggaaaaaaatagaattgaagatgggaaattttgttttattaaaaaggtg

SEQ ID NO: 163263 - DNA, 120 bp, Artificial Sequence
  ENSG00000107771_39 (sequence is synthesized)
aagatgggaaattttgttttattaaaaaggtgctagaagatgtttcaaagacaatattcttattttaatacgctgtagaaggtaggtgtggaacctccatgctaccatgtgcacaaacct

SEQ ID NO: 163264 - DNA, 120 bp, Artificial Sequence
  ENSG00000107771_40 (sequence is synthesized)
aattatgctttgggtcacttgtcagttcagtaaatctgccttcctcttctcccaaatcatgtcatctttaggttgttcacctgcagctgctttaaatgaattagtatctttcagatagat

SEQ ID NO: 163265 - DNA, 120 bp, Artificial Sequence
  ENSG00000107771_41 (sequence is synthesized)
aaccttacaaggagaatgtttgttttgagcagctgaccaaaaatatatcaaacaggattatggccaaaaagtcactcaaatttctagagattcctttaaaagatgtatgttgatgaaatt

SEQ ID NO: 163266 - DNA, 120 bp, Artificial Sequence
  ENSG00000107771_42 (sequence is synthesized)
gcccctttataagaaaaacaacagcaagtcttttagtagaaatttgaaagaagtgtttgctaccattttgacccattattcccttacctatcagatgaatttgccattcactggatagaa

SEQ ID NO: 163267 - DNA, 120 bp, Artificial Sequence
  ENSG00000107771_43 (sequence is synthesized)
accattcttggatttggtaagaggtgagcaagacaaatcttgtaccatactcttatgtaccagcacttctgatggagaagcagtgaagttcagaacgttcttcacatagtccagatactg

SEQ ID NO: 163268 - DNA, 120 bp, Artificial Sequence
  ENSG00000107771_44 (sequence is synthesized)
ttagagtcaggcaaatcagcaaagcactttgttatggagatgacccatgatggctgcagttgtaagtgggcatacatgttctatcattttgaaggagaaagaaaaccgttctcacatgtt

SEQ ID NO: 163269 - DNA, 120 bp, Artificial Sequence
  ENSG00000107771_45 (sequence is synthesized)
gcaaatatgtgaatcatactatattcccctaaagtaaaaccagtgacttagtggtttttggtttatttagaagttggtttagacccttatgaaacattatttacgagttggccttatcct

SEQ ID NO: 163270 - DNA, 120 bp, Artificial Sequence
  ENSG00000107771_46 (sequence is synthesized)
taagggaaaagttctaaatttttaaatttatttttaattccctagtctgagggaaatgtctttattgtccattacataaaaatgttgactccagtaatttatttttctctattttttcct

SEQ ID NO: 163271 - DNA, 120 bp, Artificial Sequence
  ENSG00000107771_47 (sequence is synthesized)
ccatgtatttactccatttttctctattttttccttccctgatggatttgcagaaatgttaaccaattagctcaacttttctctacctttgttgagtcttaatcttttagaagataggct

SEQ ID NO: 163272 - DNA, 120 bp, Artificial Sequence
  ENSG00000107771_48 (sequence is synthesized)
tatcgtatatttatgaagcataatatattaaaagaaaacaaatctaggatgcttgcatgacataaagtatttgcctgcagttttcattaaaaactgcaagaatatcatgcttgtctgctt

SEQ ID NO: 163273 - DNA, 120 bp, Artificial Sequence
  ENSG00000107771_49 (sequence is synthesized)
cttagtaaatgttaagtctgaaatggaagtgaggatgtaactctactgaataatcaaagatcatcttagatttggcttgatctgtgtttattgcttctattaatgtaaatcaactctgtg

SEQ ID NO: 163274 - DNA, 120 bp, Artificial Sequence
  ENSG00000107771_50 (sequence is synthesized)
ccaaatcctcctccacaaaccatttattgtcttagttctagtggtatcaatgaagatagttacagtatatgaattctaagtcctgaggaagaaattttatggggtttgttaagtttcaca

SEQ ID NO: 163275 - DNA, 120 bp, Artificial Sequence
  ENSG00000107771_51 (sequence is synthesized)
ttcgtgaaagaggaaattagtagagtattcagactttgatatttggctgttaatgggatgcatatcaaatttttaaaagaaggcttggcctaaggagtttattggtacaggtgcagatga

SEQ ID NO: 163276 - DNA, 120 bp, Artificial Sequence
  ENSG00000107771_52 (sequence is synthesized)
ttttaaggcattaaaggattatagagttatgtcatttagactgtttctaataactgagaccatctaacatttttcttttggagtctcatttttatttgtgcaatattttcaggcatatag

SEQ ID NO: 163277 - DNA, 120 bp, Artificial Sequence
  ENSG00000107771_53 (sequence is synthesized)
gctactgttcattgtatttatatatatattagaatttactaagtactttaacaagtaaaaatctgaatatgaaagaaaatatcagatttgcactttaaatgagcttaattgcttgaagtt

SEQ ID NO: 163278 - DNA, 120 bp, Artificial Sequence
  ENSG00000107771_54 (sequence is synthesized)
gtgcctgaaatatcgaattgcctcctattgggtgtggctttgttgaaataaatttgtaattgttgctgtttgaagatatcagtacagctgttcacagaaatatattcccagcatgtcact

SEQ ID NO: 163279 - DNA, 120 bp, Artificial Sequence
  ENSG00000107771_55 (sequence is synthesized)
tttccattaaagcactaagttttctttgaatgttccattgttccgataagtattttacttttttctcagtacatcagagagagcgtgatccccctacagctgtcacttccaaatgttcct

SEQ ID NO: 163280 - DNA, 120 bp, Artificial Sequence
  ENSG00000107771_56 (sequence is synthesized)
gtagcataaatggtgttacagacactgaggtgcactcttggtttctgagcagagttgtcatactggtttcctggtctctagggcactggggatgtactttgaaatcaccgaacaggcttg

SEQ ID NO: 163281 - DNA, 120 bp, Artificial Sequence
  ENSG00000107771_57 (sequence is synthesized)
caattaagatcaataaggctgcagcaccatttcaatttactttccatcttacccagtagtttttgtgtttttaaattcgtttgggtggttatgtttgcatgcttaagcacacatttgaaa

SEQ ID NO: 163282 - DNA, 120 bp, Artificial Sequence
  ENSG00000107771_58 (sequence is synthesized)
attaattatagctgtactacccgatgtttttccttggggatgatggccttgttcctttttaaattctgatgcttgaattctattttctagtgatttttcacatctccctttaagtttttg

SEQ ID NO: 163283 - DNA, 120 bp, Artificial Sequence
  ENSG00000107771_59 (sequence is synthesized)
ctgcagcaatttgagagagtacttttgattaaatgattctgatggtgggcaccaatctacaactatgtcattaactgaagatacatgttttaatcttgttgggaataagcttacccactt

SEQ ID NO: 163284 - DNA, 120 bp, Artificial Sequence
  ENSG00000107771_60 (sequence is synthesized)
tctccttggtaaagcgtttacttaacaaaataatacccgagaatgtaaggtctctaagtcattactaacaaagagcaaaaataatatctgcagtattgtttttcccattgattttaagtc

SEQ ID NO: 163285 - DNA, 120 bp, Artificial Sequence
  ENSG00000107771_61 (sequence is synthesized)
agtttagagtacaaactgtatattagaatttgcctgtaaaatgaattctaaaaagcagatgtaaagtctctcctgaaaatgttggcatagtaaataaaaataaagttcataattataaaa

SEQ ID NO: 163286 - DNA, 120 bp, Artificial Sequence
  ENSG00000107771_62 (sequence is synthesized)
agtgccttgggtacaactatgtctgagtaggcagccggtaacacaatgtctcccttgtgcaaagtaactctcttagtgagtgctcagatatgtgaggaaaaagtatttggtggagtgtga

SEQ ID NO: 163287 - DNA, 120 bp, Artificial Sequence
  ENSG00000107771_63 (sequence is synthesized)
attttgtaaaaaatttatgaattaactttactactttgagaaatggaaattcatatttgttaagagcctataaaatatctgactctaatatgaaataaagcatggagaatatatgacatt

SEQ ID NO: 163288 - DNA, 120 bp, Artificial Sequence
  ENSG00000107771_64 (sequence is synthesized)
agtcatttcaagtatccatgtccattgcagctgctctggaactcacaggaagatctcagtttttgcaaactcatggaagaatcacctggcatgatggaagtggttcattgcatgatattc

SEQ ID NO: 163289 - DNA, 120 bp, Artificial Sequence
  ENSG00000107779_0 (sequence is synthesized)
agagattggaatccgcctgccgggcttggcgaaggagaagggaggaggcaggagcgaggagggaggagggccaagggcgggcaggaaggcttaggctcggcgcgtccgtccgcgcgcggc

SEQ ID NO: 163290 - DNA, 120 bp, Artificial Sequence
  ENSG00000107779_1 (sequence is synthesized)
gcttaggctcggcgcgtccgtccgcgcgcggcgaagatcgcacggcccgatcgaggggcgaccgggtcggggccgctgcacgccaagggcgaaggccgattcgggccccacttcgccccg

SEQ ID NO: 163291 - DNA, 120 bp, Artificial Sequence
  ENSG00000107779_2 (sequence is synthesized)
gggctggaggatgcgttccctggggtccggacttatgaaaatatgcatcagtttaatactgtcttggaattcatgagatggaagcataggtcaaagctgtttggagaaaatcagaagtac

SEQ ID NO: 163292 - DNA, 120 bp, Artificial Sequence
  ENSG00000107779_3 (sequence is synthesized)
agttttatctagccacatcttggaggagtcgtaagaaagcagtgggagttgaagtcattgtcaagtgcttgcgatcttttacaagaaaatctcactgaatgatagtcatttaaattggtg

SEQ ID NO: 163293 - DNA, 120 bp, Artificial Sequence
  ENSG00000107779_4 (sequence is synthesized)
aagtagcaagaccaattattaaaggtgacagtacacaggaaacattacaattgaacaatgcctcagctatacatttacatcagattattgggagcctatttgttcatcatttctcgtgtt

SEQ ID NO: 163294 - DNA, 120 bp, Artificial Sequence
  ENSG00000107779_5 (sequence is synthesized)
caaggacagaatctggatagtatgcttcatggcactgggatgaaatcagactccgaccagaaaaagtcagaaaatggagtaaccttagcaccagaggataccttgccttttttaaagtgc

SEQ ID NO: 163295 - DNA, 120 bp, Artificial Sequence
  ENSG00000107779_6 (sequence is synthesized)
tattgctcagggcactgtccagatgatgctattaataacacatgcataactaatggacattgctttgccatcatagaagaagatgaccagggagaaaccacattagcttcagggtgtatg

SEQ ID NO: 163296 - DNA, 120 bp, Artificial Sequence
  ENSG00000107779_7 (sequence is synthesized)
aaatatgaaggatctgattttcagtgcaaagattctccaaaagcccagctacgccggacaatagaatgttgtcggaccaatttatgtaaccagtatttgcaacccacactgccccctgtt

SEQ ID NO: 163297 - DNA, 120 bp, Artificial Sequence
  ENSG00000107779_8 (sequence is synthesized)
gtcataggtccgttttttgatggcagcattcgatggctggttttgctcatttctatggctgtctgcataattgctatgatcatcttctccagctgcttttgttacaaacattattgcaag

SEQ ID NO: 163298 - DNA, 120 bp, Artificial Sequence
  ENSG00000107779_9 (sequence is synthesized)
agcatctcaagcagacgtcgttacaatcgtgatttggaacaggatgaagcatttattccagttggagaatcactaaaagaccttattgaccagtcacaaagttctggtagtgggtctgga

SEQ ID NO: 163299 - DNA, 120 bp, Artificial Sequence
  ENSG00000107779_10 (sequence is synthesized)
ctacctttattggttcagcgaactattgccaaacagattcagatggtccggcaagttggtaaaggccgatatggagaagtatggatgggcaaatggcgtggcgaaaaagtggcggtgaaa

SEQ ID NO: 163300 - DNA, 120 bp, Artificial Sequence
  ENSG00000107779_11 (sequence is synthesized)
gtattctttaccactgaagaagccagctggtttcgagaaacagaaatctaccaaactgtgctaatgcgccatgaaaacatacttggtttcatagcggcagacattaaaggtacaggttcc

SEQ ID NO: 163301 - DNA, 120 bp, Artificial Sequence
  ENSG00000107779_12 (sequence is synthesized)
tggactcagctctatttgattactgattaccatgaaaatggatctctctatgacttcctgaaatgtgctacactggacaccagagccctgcttaaattggcttattcagctgcctgtggt

SEQ ID NO: 163302 - DNA, 120 bp, Artificial Sequence
  ENSG00000107779_13 (sequence is synthesized)
ctgtgccacctgcacacagaaatttatggcacccaaggaaagcccgcaattgctcatcgagacctaaagagcaaaaacatcctcatcaagaaaaatgggagttgctgcattgctgacctg

SEQ ID NO: 163303 - DNA, 120 bp, Artificial Sequence
  ENSG00000107779_14 (sequence is synthesized)
ggccttgctgttaaattcaacagtgacacaaatgaagttgatgtgcccttgaataccagggtgggcaccaaacgctacatggctcccgaagtgctggacgaaagcctgaacaaaaaccac

SEQ ID NO: 163304 - DNA, 120 bp, Artificial Sequence
  ENSG00000107779_15 (sequence is synthesized)
ttccagccctacatcatggctgacatctacagcttcggcctaatcatttgggagatggctcgtcgttgtatcacaggagggatcgtggaagaataccaattgccatattacaacatggta

SEQ ID NO: 163305 - DNA, 120 bp, Artificial Sequence
  ENSG00000107779_16 (sequence is synthesized)
ccgagtgatccgtcatacgaagatatgcgtgaggttgtgtgtgtcaaacgtttgcggccaattgtgtctaatcggtggaacagtgatgaatgtctacgagcagttttgaagctaatgtca

SEQ ID NO: 163306 - DNA, 120 bp, Artificial Sequence
  ENSG00000107779_17 (sequence is synthesized)
gaatgctgggcccacaatccagcctccagactcacagcattgagaattaagaagacgcttgccaagatggttgaatcccaagatgtaaaaatctgatggttaaaccatcggaggagaaac

SEQ ID NO: 163307 - DNA, 120 bp, Artificial Sequence
  ENSG00000107779_18 (sequence is synthesized)
tctagactgcaagaactgtttttacccatggcatgggtggaattagagtggaataaggatgttaacttggttctcagactctttcttcactacgtgttcacaggctgctaatattaaacc

SEQ ID NO: 163308 - DNA, 120 bp, Artificial Sequence
  ENSG00000107779_19 (sequence is synthesized)
tttcagtactcttattaggatacaagctgggaacttctaaacacttcattctttatatatggacagctttattttaaatgtggtttttgatgcctttttttaagtgggtttttatgaact

SEQ ID NO: 163309 - DNA, 120 bp, Artificial Sequence
  ENSG00000107779_20 (sequence is synthesized)
gcatcaagacttcaatcctgattagtgtctccagtcaagctctgggtactgaattgcctgttcataaaacggtgctttctgtgaaagccttaagaagataaatgagcgcagcagagatgg

SEQ ID NO: 163310 - DNA, 120 bp, Artificial Sequence
  ENSG00000107779_21 (sequence is synthesized)
agaaatagactttgccttttacctgagactttcagttcgtttgtattctacctttgtaaaacagcctatagatgatgatgtgtttgggatactgcttattttatgatagtttgtcctgtg

SEQ ID NO: 163311 - DNA, 120 bp, Artificial Sequence
  ENSG00000107779_22 (sequence is synthesized)
tccttagtgatgtgtgtgtgtctccatgcacatgcacgccgggattcctctgctgccatttgaattagaagaaaataatttatatgcatgcacaggaagatattggtggccggtggtttt

SEQ ID NO: 163312 - DNA, 120 bp, Artificial Sequence
  ENSG00000107779_23 (sequence is synthesized)
gtgctttaaaaatgcaatatctgaccaagattcgccaatctcatacaagccatttactttgcaagtgagatagcttccccaccagctttattttttaacatgaaagctgatgccaaggcc

SEQ ID NO: 163313 - DNA, 120 bp, Artificial Sequence
  ENSG00000107779_24 (sequence is synthesized)
aaaagaagtttaaagcatctgtaaatttggactgttttccttcaaccaccattttttttgtggttattatttttgtcacggaaagcatcctctccaaagttggagcttctattgccatga

SEQ ID NO: 163314 - DNA, 120 bp, Artificial Sequence
  ENSG00000107779_25 (sequence is synthesized)
accatgcttacaaagaaagcacttcttattgaagtgaattcctgcatttgatagcaatgtaagtgcctataaccatgttctatattctttattctcagtaacttttaaaagggaagttat

SEQ ID NO: 163315 - DNA, 120 bp, Artificial Sequence
  ENSG00000107779_26 (sequence is synthesized)
ttatattttgtgtataatgtgctttatttgcaaatcacccactcctttacaaccatactttatatatgtacatacattcatactgtagaaaccagctcatgtgtacctcatatcccatcc

SEQ ID NO: 163316 - DNA, 120 bp, Artificial Sequence
  ENSG00000107779_27 (sequence is synthesized)
ttaagagaagaaatgttataaagtagaactaaatataaattttcagaattaatgcattcaaagtaatatatcaaatccaggactttgttaacttcaggtaaaaacttcattagggtaata

SEQ ID NO: 163317 - DNA, 120 bp, Artificial Sequence
  ENSG00000107779_28 (sequence is synthesized)
tcatctcaattttttcaaatgaaaggattctctaattagaaatttatatgtcagagctgttataaatttatcaactgtcaaatatgttctggacagctaaatcatttgagatttttggtt

SEQ ID NO: 163318 - DNA, 120 bp, Artificial Sequence
  ENSG00000107779_29 (sequence is synthesized)
ttttgatttctattccctaacttgtgaagacaatgaaaaatcaggcagaaatatttagtatctagtcagtatctgtagctacactgtataactgttcttcaataaaatggttcatatttt

SEQ ID NO: 163319 - DNA, 120 bp, Artificial Sequence
  ENSG00000107779_30 (sequence is synthesized)
atagatgccttgttatctcaagaaatctgatttacataaacttatacttctttaatgctttttaaatatttattctgagcaaacaattcatgagtacatcaagtgagatagttttatttg

SEQ ID NO: 163320 - DNA, 120 bp, Artificial Sequence
  ENSG00000107779_31 (sequence is synthesized)
attataacataaaataaatgtgattatatcacatcatcatcaaaaaggtttaaattaaatgggaggaaatcagcatatgtccacccattaccaaaatttgactatcatttaaggttaaaa

SEQ ID NO: 163321 - DNA, 120 bp, Artificial Sequence
  ENSG00000107779_32 (sequence is synthesized)
cttacaaatttgtctgcacatcaaatttcacaaatttgaaaattgccttaaccattttgattaataagtttcatctgccataattaaagtctgaagtgttcatcaagataagtaaatttg

SEQ ID NO: 163322 - DNA, 120 bp, Artificial Sequence
  ENSG00000107779_33 (sequence is synthesized)
catatggataatacccaataacttgttttttcagaatttttcaccatatgtatactgagaaatacaaatattttaatctgcgttgccgtatgatatgattgcacttagaacacccaattt

SEQ ID NO: 163323 - DNA, 120 bp, Artificial Sequence
  ENSG00000107779_34 (sequence is synthesized)
cgttgccgtatgatatgattgcacttagaacacccaatttacttaaatcttggtttacttttgacttgataccataatctttaaaatcatttgtcatctttttttttttttttttgagac

SEQ ID NO: 163324 - DNA, 70 bp, Artificial Sequence
  ENSG00000107779_35 (sequence is synthesized)
atttgtcatcttaataaaaatataaagacaggcaaagtttattggaaatgttcaaatggtgtgtggaagc

SEQ ID NO: 163325 - DNA, 120 bp, Artificial Sequence
  ENSG00000107779_36 (sequence is synthesized)
ggcaaagtttattggaaatgttcaaatggtgtgtggaagcaaaaaattacagccagtatatgagaccactattatggttttttaaaattaacttggtctagtaaaagtgatatcaagagt

SEQ ID NO: 163326 - DNA, 120 bp, Artificial Sequence
  ENSG00000107779_37 (sequence is synthesized)
gagttaatcttagaaacttgctcagtaaaaacattttctagtataacatgttctttaaaaagcaaatgctgccgtctttggaatcttaatctaaaaatgtggccgggcgcggtggctcac

SEQ ID NO: 163327 - DNA, 120 bp, Artificial Sequence
  ENSG00000107779_38 (sequence is synthesized)
agcgaaactccatctcaaataaacaaacaaataaataacaaaaaacaaaaatgttgcattaaacttagttcttgtctctcctttccactcttattcttaaatctgaagctcatcgactaa

SEQ ID NO: 163328 - DNA, 120 bp, Artificial Sequence
  ENSG00000107779_39 (sequence is synthesized)
gtgaaatatttaaagaatatgataggccagcaagaagaagtattatgtagtaccatagttagtaaattcgtaaaaccttggaagccattatttggtcccacttgcaatttagtgtttttg

SEQ ID NO: 163329 - DNA, 120 bp, Artificial Sequence
  ENSG00000107779_40 (sequence is synthesized)
aagtgtgtagcttcattcagatagctctttaaataattaaaatataaaagcaaacaacccaaactacctgactataaacaggaaaagttaaccctcaaagagagttcttgtgaattctct

SEQ ID NO: 163330 - DNA, 120 bp, Artificial Sequence
  ENSG00000107779_41 (sequence is synthesized)
ttatgctggcaaatagctctaggattaaaggcacattagggtttccttcagtttgtttattctaagcttttactgtgctttttactgaacaagtttctgatgtataaaacttgcatctga

SEQ ID NO: 163331 - DNA, 120 bp, Artificial Sequence
  ENSG00000107779_42 (sequence is synthesized)
tttctttggaaatattttcacaaaagttattttaatcagtatttttacattgcctttccagtgtccagaagtgtttctaaacttagaaagtgacctatagttttttaaaattatgttttc

SEQ ID NO: 163332 - DNA, 120 bp, Artificial Sequence
  ENSG00000107779_43 (sequence is synthesized)
gaatcatgcatctttgggttggcccaggatcaaatttgatattgaataatttattccagggcagctttcataaacatacttcatagatgttgttttgaaatgtttctaaatatctaaaat

SEQ ID NO: 163333 - DNA, 120 bp, Artificial Sequence
  ENSG00000107779_44 (sequence is synthesized)
catttcaacagcagaaatgatttttattttaacaaaagattatgatagcccttgtagtgtttaaaagtggtcatatttattactgactttgagtcaggtgttaaaatagcagtgccacag

SEQ ID NO: 163334 - DNA, 120 bp, Artificial Sequence
  ENSG00000107779_45 (sequence is synthesized)
ctcgtctcttgccttagtgtgctgctgtgagagtcacagtggaaactgcagggaggaggtgtgttcctaagaaccaaaatccagcacagcatcctgtgaagccacgtgtaatgatggtcc

SEQ ID NO: 163335 - DNA, 120 bp, Artificial Sequence
  ENSG00000107779_46 (sequence is synthesized)
cataaggaaagtatgtgaatatggctcttgtaaaggattaactattgtaattttagcttatgctctgtattctgttttctatggaattatttaagcccttttagtgacctttgtcctggc

SEQ ID NO: 163336 - DNA, 120 bp, Artificial Sequence
  ENSG00000107779_47 (sequence is synthesized)
ccatttaaaaactaaaatgtagtatatattgtataaaatggaaatatcattattgcttcattaggggaaactgtacataggcattgaaagaagggtaaaagcaagcagttttatcaggca

SEQ ID NO: 163337 - DNA, 120 bp, Artificial Sequence
  ENSG00000107779_48 (sequence is synthesized)
gttgtaaaacaccaaaaatatagattcgtctttgacgtgtaacacactaaatgtattttgtacagcatctggtttaaaaggtgccttaagagtttaccattacttgctttgttctatata

SEQ ID NO: 163338 - DNA, 120 bp, Artificial Sequence
  ENSG00000107779_49 (sequence is synthesized)
cagattatgtccaatgtatcattttgaagtaaataaccttattttagtatactttagtgatgtgttttgtgatgctacactcagacggtattgtgcatcagaagtcatctgttgagattt

SEQ ID NO: 163339 - DNA, 120 bp, Artificial Sequence
  ENSG00000107779_50 (sequence is synthesized)
ttgtaatgattaagttagtgtatatacatatgttcctgagatgtacacttcaactaccagaaacccagtatggagcacaggtaggtacacgcttgccctgtggagatagagaacttctaa

SEQ ID NO: 163340 - DNA, 86 bp, Artificial Sequence
  ENSG00000107779_51 (sequence is synthesized)
gtaggtacacgcttgccctgtggagatagagaacttctaaacctatcacggtgcaggggtttttcctttaaaaaacaagacaaaac

SEQ ID NO: 163341 - DNA, 120 bp, Artificial Sequence
  ENSG00000107779_52 (sequence is synthesized)
tggccaaaacattgttttctgattatggaaatgtactcatggcagaaaatttgggaaacaacagcaaataataaagcaaataaaaatcactcaaaattctattgccagacattatcacta

SEQ ID NO: 163342 - DNA, 120 bp, Artificial Sequence
  ENSG00000107779_53 (sequence is synthesized)
tatacatttgagtgtttcttttcaatctttttttttgagagagtcttgctctgtcactcagggtggagtgcagtagcgcgatctcggctcagtgcaacctctgccccctgggttcaagtg

SEQ ID NO: 163343 - DNA, 83 bp, Artificial Sequence
  ENSG00000107779_54 (sequence is synthesized)
tattcttttttatgttgcattttttgtaatattaggatcctagtatgccattaaatagccattgagaactttttttttaatga

SEQ ID NO: 163344 - DNA, 120 bp, Artificial Sequence
  ENSG00000107779_55 (sequence is synthesized)
tatgccattaaatagccattgagaactttttttttaatgactgcacaatatttgactaagaagatggagtaatttctgtgctcaatcccctattgaatatttggattattttcattgttt

SEQ ID NO: 163345 - DNA, 120 bp, Artificial Sequence
  ENSG00000107779_56 (sequence is synthesized)
tgaaaaatagatattaagcatccttatacataaatctttattttcttatattacatttctgaaaatgagactagtggatatgaacttttaaaagatcctttaagatggaaaaactaaggt

SEQ ID NO: 163346 - DNA, 120 bp, Artificial Sequence
  ENSG00000107779_57 (sequence is synthesized)
tcttggaaaacattgccatattgctactcacaaagcttttcattttcattcctgctagcagttcatgagcttagagcgatgggatgcatttacctggccttaagatgctcctgctgcaat

SEQ ID NO: 163347 - DNA, 120 bp, Artificial Sequence
  ENSG00000107779_58 (sequence is synthesized)
gggaagtgaagccttggatagctttcctcctcctgtgcaatactttcttgtcattttcccacctgcactgagtcccaccgccagtcagggctgttttcaggtgtatgtgaattcatccca

SEQ ID NO: 163348 - DNA, 120 bp, Artificial Sequence
  ENSG00000107779_59 (sequence is synthesized)
gcagtgtgccttctgctgccttttcctagggaactgaacatgttaaatcacagacgcgatgtggcactgattattgttcctcaaaagaaatgcgtgtctgaagatagcctcttacagatt

SEQ ID NO: 163349 - DNA, 120 bp, Artificial Sequence
  ENSG00000107779_60 (sequence is synthesized)
cctcacgggagtctctgttcagtgtcattgtaagtttctcagaataatcgcaggcgctctgatgcagcctggtaaagaagactcagtgatttctgggaactgcaaatgcttgccagcttt

SEQ ID NO: 163350 - DNA, 120 bp, Artificial Sequence
  ENSG00000107779_61 (sequence is synthesized)
ccttctgtctgtggaaacactgaataaatgtattcatttctcctttccagcaatctgttagtctcactgctccattccaaggtttctttaatattattaacagagcagacattaagaaac

SEQ ID NO: 163351 - DNA, 120 bp, Artificial Sequence
  ENSG00000107779_62 (sequence is synthesized)
agaattgtctaatccttgttcttccaaaataggtttaatccttgtagatagtttcaagcagacagtaagtcagttactaagttttcacttggagaaacatttgctgatagtagtagcata

SEQ ID NO: 163352 - DNA, 120 bp, Artificial Sequence
  ENSG00000107779_63 (sequence is synthesized)
ttgaccatttctgacatgtcatccttatatcaagttaggtgcacgctcctacacagccttggctcagcgcttggagcatacagtcttgactgggtggacataaaccgctgaaagtggcca

SEQ ID NO: 163353 - DNA, 120 bp, Artificial Sequence
  ENSG00000107779_64 (sequence is synthesized)
gcagtgagcagaggccacctactatcagcggcactgctgcaggcatggagacttaaatgtgtgagtgctggtataagcagaagtgggagagtcacctcgatgctgggatccagatggcgg

SEQ ID NO: 163354 - DNA, 120 bp, Artificial Sequence
  ENSG00000107779_65 (sequence is synthesized)
cttatttcaagtgcagtggcacatacaaaaaatatttttggaagggagcaaggactagggctgaaaggttcattcataatctttttttctttttttttttaggtggagtctcgctctgtc

SEQ ID NO: 163355 - DNA, 62 bp, Artificial Sequence
  ENSG00000107779_66 (sequence is synthesized)
acccaggctggagcgcaatggggtacctgagaagttgggattacaggcgtgcaccaccacac

SEQ ID NO: 163356 - DNA, 120 bp, Artificial Sequence
  ENSG00000107779_67 (sequence is synthesized)
tgagccactgcgcccagcccataatctccttttgacataggaattgttaattcacatattccatcaacctattgctcctctgaatcttagcagcttcttggtctttgttcaaatgaaatc

SEQ ID NO: 163357 - DNA, 120 bp, Artificial Sequence
  ENSG00000107779_68 (sequence is synthesized)
taagtcaattccatatctctcaatgtcgctacatccacctcagtgcttatatcctaattttgtcttttttagagacagtcttgcactgtcacccaggctagtgtgcagtggctgttcaca

SEQ ID NO: 163358 - DNA, 78 bp, Artificial Sequence
  ENSG00000107779_69 (sequence is synthesized)
ttgcactgtcacccaggctagtgtgcagtggctgttcacaggcataatcataacgcactgtagcctcaaactcctgat

SEQ ID NO: 163359 - DNA, 120 bp, Artificial Sequence
  ENSG00000107779_70 (sequence is synthesized)
tctaaacattatgcaggaagctcaaagtgaaaatcaatatggaatgtttatattgaaaatatttttggctgggtgcagtggctaatgcctctaatcccagcactctgggaggctgaggcg

SEQ ID NO: 163360 - DNA, 120 bp, Artificial Sequence
  ENSG00000107779_71 (sequence is synthesized)
tcaggagcagcctggccaacatatagtgaaaccctgtctctaaggtacaaaaattagctgggtgtggtggtactcgcctgtagtcccagctccttgggaagctgaggcaggagaatcact

SEQ ID NO: 163361 - DNA, 120 bp, Artificial Sequence
  ENSG00000107779_72 (sequence is synthesized)
acacacacacacatatatatatatatattcaagcaatgtgaagaaaatattgggcccccttgtttttctttaatggaagagccatttttaaaagccagtttagaatccagatgatgacat

SEQ ID NO: 163362 - DNA, 120 bp, Artificial Sequence
  ENSG00000107779_73 (sequence is synthesized)
gatgacatctgttgctctactgtatgactgaaatgcaggtcagtgttgaaaaacataaaaaattggaagtctccactgaaagacctacactgctgtgggagggattttaatcaagacatt

SEQ ID NO: 163363 - DNA, 120 bp, Artificial Sequence
  ENSG00000107779_74 (sequence is synthesized)
tcaaaagcaatttttattacttgatcctgtcctcatacttggctaggagttcagctggagatagaatctaactctgaagatgatactccatgatcttctagcatcccttgtcaccagtga

SEQ ID NO: 163364 - DNA, 120 bp, Artificial Sequence
  ENSG00000107779_75 (sequence is synthesized)
gaagtctgatgtggatctaataagtgacatgttatacaggttaacttattttcaagaaatagaattttctttttattattgatgttggaagttgaaactggccatatctaaatatattca

SEQ ID NO: 163365 - DNA, 120 bp, Artificial Sequence
  ENSG00000107779_76 (sequence is synthesized)
ttctgtttcttagtactaatgggatcttttcttagacctgggaaattttctcccattatttcttttgtttcttcccttttttctttcttttccttttctctttctagaactttctagaac

SEQ ID NO: 163366 - DNA, 120 bp, Artificial Sequence
  ENSG00000107779_77 (sequence is synthesized)
aaatctcaggtcccctagatgtttcttccataattgttactatgcttctcatatgtttcatcctaccttctacttttgtcagcccatctgagtttatttcaacagccaaatgttttattt

SEQ ID NO: 163367 - DNA, 120 bp, Artificial Sequence
  ENSG00000107779_78 (sequence is synthesized)
tgaaatgattccaggcttccattaaagtttcatcaatagtataaggactgccatttacccttcacccagattcataaactgctaacattgcacaattgctttgtcattctgtgtgtgtgt

SEQ ID NO: 163368 - DNA, 120 bp, Artificial Sequence
  ENSG00000107779_79 (sequence is synthesized)
gtacaggaatcacagagactcatcttgtaatgtttgtaatgtccatgtatcgtgtatgcacacatttttttctgacctattagaagcaaattacagagctaatacccctttatccctaaa

SEQ ID NO: 163369 - DNA, 120 bp, Artificial Sequence
  ENSG00000107779_80 (sequence is synthesized)
tacttcagggatgttctattacttaaccaattatgtacaattatcagaaccaggaaagttcacattgatacaatagcaatgaccaacaataccataatctatagaccttactgaagtttt

SEQ ID NO: 163370 - DNA, 77 bp, Artificial Sequence
  ENSG00000107779_81 (sequence is synthesized)
gaccaacaataccataatctatagaccttactgaagttttgctaattgttattttggtgtggttgggttttttgttt

SEQ ID NO: 163371 - DNA, 120 bp, Artificial Sequence
  ENSG00000107779_82 (sequence is synthesized)
gcgatcctcccgcctcagcctcccaaagggctatgattacaggcatgagccaccatgctggcctcatttcccctttccttctcaaaaggattctggctttccctactgcattcatccacg

SEQ ID NO: 163372 - DNA, 120 bp, Artificial Sequence
  ENSG00000107779_83 (sequence is synthesized)
cacgtccactacccgctccaagagagctgagtaattgtcaagccaggtttggggagctttcttgatggaggggatggaaggagggtggtgctcaggctacagcagggagagcttttctgt

SEQ ID NO: 163373 - DNA, 120 bp, Artificial Sequence
  ENSG00000107779_84 (sequence is synthesized)
ttttgagctaaagacataacagggtgcagaggctgagaaaaggagagttctaagcaacatgtcacgagctatgtagcctcttcacactgcttctgaaataaaatctaacagtaggagtga

SEQ ID NO: 163374 - DNA, 120 bp, Artificial Sequence
  ENSG00000107779_85 (sequence is synthesized)
agaaaatcagaagtacagttttatctagccacatcttggaggatattacttttttggtccctattaaactatgtggcagcaagtcacaaaggaggaatcagaaagtaacctgctccccac

SEQ ID NO: 163375 - DNA, 120 bp, Artificial Sequence
  ENSG00000107789_0 (sequence is synthesized)
gcactccactgaccgtcccgacgatgctacgcgcgcccggctgcctcctccggacctccgtagcgcctgccgcggccctggctgcggcgctgctctcgtcgcttgcgcgctgctctcttc

SEQ ID NO: 163376 - DNA, 120 bp, Artificial Sequence
  ENSG00000107789_1 (sequence is synthesized)
tagagccgagggacccggtggcctcgtcgctcagcccctatttcggcaccaagactcgctacgaggatgtcaaccccgtgctattgtcgggccccgaggctccgtggcgggaccctgagc

SEQ ID NO: 163377 - DNA, 120 bp, Artificial Sequence
  ENSG00000107789_2 (sequence is synthesized)
tgctggaggggacctgcaccccggtgcagctggtcgccctcattcgccacggcacccgctaccccacggtcaaacagatccgcaagctgaggcagctgcacgggttgctgcaggcccgcg

SEQ ID NO: 163378 - DNA, 120 bp, Artificial Sequence
  ENSG00000107789_3 (sequence is synthesized)
ggtccagggatggcggggctagtagtaccggcagccgcgacctgggtgcagcgctggccgactggcctttgtggtacgcggactggatggacgggcagctagtagagaagggacggcagg

SEQ ID NO: 163379 - DNA, 120 bp, Artificial Sequence
  ENSG00000107789_4 (sequence is synthesized)
atatgcgacagctggcgctgcgtctggcctcgctcttcccggcccttttcagccgtgagaactacggccgcctgcggctcatcaccagttccaagcaccgctgcatggatagcagcgccg

SEQ ID NO: 163380 - DNA, 120 bp, Artificial Sequence
  ENSG00000107789_5 (sequence is synthesized)
ccttcctgcaggggctgtggcagcactaccaccctggcttgccgccgccggacgtcgcagatatggagtttggacctccaacagttaatgataaactaatgagattttttgatcactgtg

SEQ ID NO: 163381 - DNA, 120 bp, Artificial Sequence
  ENSG00000107789_6 (sequence is synthesized)
agaagtttttaactgaagtagaaaaaaatgctacagctctttatcacgtggaagccttcaaaactggaccagaaatgcagaacattttaaaaaaagttgcagctactttgcaagtgccag

SEQ ID NO: 163382 - DNA, 120 bp, Artificial Sequence
  ENSG00000107789_7 (sequence is synthesized)
taaatgatttaaatgcagatttaattcaagtagcctttttcacctgttcatttgacctggcaattaaaggtgttaaatctccttggtgtgatgtttttgacatagatgatgcaaaggtat

SEQ ID NO: 163383 - DNA, 120 bp, Artificial Sequence
  ENSG00000107789_8 (sequence is synthesized)
tagaatatttaaatgatctgaaacaatattggaaaagaggatatgggtatactattaacagtcgatccagctgcaccttgtttcaggatatctttcagcacttggacaaagcagttgaac

SEQ ID NO: 163384 - DNA, 120 bp, Artificial Sequence
  ENSG00000107789_9 (sequence is synthesized)
agaaacaaaggtctcagccaatttcttctccagtcatcctccagtttggtcatgcagagactcttcttccactgctttctctcatgggctacttcaaagacaaggaacccctaacagcgt

SEQ ID NO: 163385 - DNA, 120 bp, Artificial Sequence
  ENSG00000107789_10 (sequence is synthesized)
atttgtgctttaccactgtgaaaatgctaagactcctaaagaacaattccgagtgcagatgttattaaatgaaaaggtgttacctttggcttactcacaagaaactgtttcattttatga

SEQ ID NO: 163386 - DNA, 120 bp, Artificial Sequence
  ENSG00000107789_11 (sequence is synthesized)
agatctgaagaaccactacaaggacatccttcagagttgtcaaaccagtgaagaatgtgaattagcaagggctaacagtacatctgatgaactatgagtaactgaagaacatttttaatt

SEQ ID NO: 163387 - DNA, 120 bp, Artificial Sequence
  ENSG00000107789_12 (sequence is synthesized)
ctttaggaatctgcaatgagtgattacatgcttgtaataggtaggcaattccttgattacaggaagcttttatattacttgagtatttctgtcttttcacagaaaaacattgggtttctc

SEQ ID NO: 163388 - DNA, 120 bp, Artificial Sequence
  ENSG00000107789_13 (sequence is synthesized)
tctgggtttggacatgaaatgtaagaaaagatttttcactggagcagctctcttaaggagaaacaaatctatttagagaaacagctggccctgcaaatgtttacagaaatgaaattcttc

SEQ ID NO: 163389 - DNA, 120 bp, Artificial Sequence
  ENSG00000107789_14 (sequence is synthesized)
ctacttatataagaaatctcacactgagatagaattgtgatttcataataacacttgaaaagtgctggagtaacaaaatatctcagttggaccatccttaacttgattgaactgtctagg

SEQ ID NO: 163390 - DNA, 120 bp, Artificial Sequence
  ENSG00000107789_15 (sequence is synthesized)
aactttacagattgttctgcagttctctcttcttttcctcaggtaggacagctctagcattttcttaatcaggaatattgtggtaagctgggagtatcactctggaagaaagtaacatct

SEQ ID NO: 163391 - DNA, 120 bp, Artificial Sequence
  ENSG00000107789_16 (sequence is synthesized)
ccagatgagaatttgaaacaagaaacagagtgttgtaaaaggacaccttcactgaagcaagtcggaaagtacaatgaaaataaatatttttggtatttatttatgaaatatttgaacatt

SEQ ID NO: 163392 - DNA, 120 bp, Artificial Sequence
  ENSG00000107789_17 (sequence is synthesized)
ttttcaataattcctttttacttctaggaagtctcaaaagaccatcttaaattattatatgtttggacaattagcaacaagtcagatagttagaatcgaagtttttcaaatccattgctt

SEQ ID NO: 163393 - DNA, 120 bp, Artificial Sequence
  ENSG00000107789_18 (sequence is synthesized)
agctaactttttcattctgtcacttggcttcgatttttatattttcctattatatgaaatgtatcttttggttgtttgatttttctttctttctttgtaaatagttctgagttctgtcaa

SEQ ID NO: 163394 - DNA, 120 bp, Artificial Sequence
  ENSG00000107789_19 (sequence is synthesized)
atgccgtgaaagtatttgctataataaagaaaattcttgtgactttactaccaggacttttctcttccccatgtcaaaatacaatcaataattgatggtaaaagtttggaaattcaagca

SEQ ID NO: 163395 - DNA, 120 bp, Artificial Sequence
  ENSG00000107789_20 (sequence is synthesized)
gcgttttgtgctgctgtcagtagtttttgtccaaagcagaatctttgtaaagtaatacagagttgggaaggttaattgagaaaataaaatactctgtttagactttggcttagagtgaaa

SEQ ID NO: 163396 - DNA, 120 bp, Artificial Sequence
  ENSG00000107789_21 (sequence is synthesized)
aaatagattccatatgttgaattctctctcaccttgtaagtagaaactttgctgatttttagtttgctttctaaagttttccgtgcctgacagaaacagtacttattaatgtatgatgca

SEQ ID NO: 163397 - DNA, 120 bp, Artificial Sequence
  ENSG00000107789_22 (sequence is synthesized)
atttcattgcgtagcatctctacaacacatttaatcttcaatctctatttctttagccttttctagctattctcatgcgttacagccattataaatggggaataattttaccccaagagt

SEQ ID NO: 163398 - DNA, 120 bp, Artificial Sequence
  ENSG00000107789_23 (sequence is synthesized)
ccttgtttcaggatatctttcagcacttggacaaagcagttgaacagaaacaaagatgaaaaacctgagaaatgtggtcttcgcctttgcgttggaaaagaattgatgccttatttaaga

SEQ ID NO: 163399 - DNA, 120 bp, Artificial Sequence
  ENSG00000107796_0 (sequence is synthesized)
gaacaccacccagtgtggagcagcccagccaagcactgtcaggaatcctgtgaagcagctccagctatgtgtgaagaagaggacagcactgccttggtgtgtgacaatggctctgggctc

SEQ ID NO: 163400 - DNA, 120 bp, Artificial Sequence
  ENSG00000107796_1 (sequence is synthesized)
tgtaaggccggctttgctggggacgatgctcccagggctgttttcccatccattgtgggacgtcccagacatcagggggtgatggtgggaatgggacaaaaagacagctacgtgggtgac

SEQ ID NO: 163401 - DNA, 120 bp, Artificial Sequence
  ENSG00000107796_2 (sequence is synthesized)
gaagcacagagcaaaagaggaatcctgaccctgaagtacccgatagaacatggcatcatcaccaactgggacgacatggaaaagatctggcaccactctttctacaatgagcttcgtgtt

SEQ ID NO: 163402 - DNA, 120 bp, Artificial Sequence
  ENSG00000107796_3 (sequence is synthesized)
gcccctgaagagcatcccaccctgctcacggaggcacccctgaaccccaaggccaaccgggagaaaatgactcaaattatgtttgagactttcaatgtcccagccatgtatgtggctatc

SEQ ID NO: 163403 - DNA, 120 bp, Artificial Sequence
  ENSG00000107796_4 (sequence is synthesized)
caggcggtgctgtctctctatgcctctggacgcacaactggcatcgtgctggactctggagatggtgtcacccacaatgtccccatctatgagggctatgccttgccccatgccatcatg

SEQ ID NO: 163404 - DNA, 120 bp, Artificial Sequence
  ENSG00000107796_5 (sequence is synthesized)
tgactacctcatgaagatcctgactgagcgtggctattccttcgttactactgctgagcgtgagattgtccgggacatcaaggagaaactgtgttatgtagctctggactttgaaaatga

SEQ ID NO: 163405 - DNA, 120 bp, Artificial Sequence
  ENSG00000107796_6 (sequence is synthesized)
gatggccactgccgcatcctcatcctcccttgagaagagttacgagttgcctgatgggcaagtgatcaccatcggaaatgaacgtttccgctgcccagagaccctgttccagccatcctt

SEQ ID NO: 163406 - DNA, 120 bp, Artificial Sequence
  ENSG00000107796_7 (sequence is synthesized)
catcgggatggagtctgctggcatccatgaaaccacctacaacagcatcatgaagtgtgatattgacatcaggaaggacctctatgctaacaatgtcctatcagggggcaccactatgta

SEQ ID NO: 163407 - DNA, 120 bp, Artificial Sequence
  ENSG00000107796_8 (sequence is synthesized)
ccctggcattgccgaccgaatgcagaaggagatcacggccctagcacccagcaccatgaagatcaagatcattgcccctccggagcgcaaatactctgtctggatcggtggctccatcct

SEQ ID NO: 163408 - DNA, 120 bp, Artificial Sequence
  ENSG00000107796_9 (sequence is synthesized)
caccttccagcagatgtggatcagcaaacaggaatacgatgaagccgggccttccattgtccaccgcaaatgcttctaaaacactttcctgctcctctctgtctctagcacacaactgtg

SEQ ID NO: 163409 - DNA, 120 bp, Artificial Sequence
  ENSG00000107796_10 (sequence is synthesized)
cacacaactgtgaatgtcctgtggaattatgccttcagttcttttccaaatcattcctagccaaagctctgactcgttacctatgtgttttttaataaatctgaaataggctactggtaa

SEQ ID NO: 163410 - DNA, 120 bp, Artificial Sequence
  ENSG00000107796_11 (sequence is synthesized)
caaccggggtccccctccagcgaccctaaagcttcccagacttccgcttcaattcctgtccgcaccccacgcccacctcaacgtggagcgcagtggtctccgaggagcgccggagctgcc

SEQ ID NO: 163411 - DNA, 120 bp, Artificial Sequence
  ENSG00000107796_12 (sequence is synthesized)
ccgcctgcccagcggggtcagcacttcgcatcaaggcccaagaaaagcaagtcctccagcgttctgagcacccgggcctgagggaaggtcctaacagcccccgggagccagtctccaacg

SEQ ID NO: 163412 - DNA, 120 bp, Artificial Sequence
  ENSG00000107796_13 (sequence is synthesized)
cctctgtgttcatgtttatccccagattgtctatctctttctgcccagaagttatgtaaccttgttacaaatagacctctaatgattaaggtccaggagtaaatgccaatttcacatata

SEQ ID NO: 163413 - DNA, 120 bp, Artificial Sequence
  ENSG00000107796_14 (sequence is synthesized)
acaaagtctgcccctttttcatgtcctttttgtctaaatatagtcattatcatcatcatcatcatcatcaaatcatttcatcaccatcagaaatgcttatacattatcctgatgtatacc

SEQ ID NO: 163414 - DNA, 120 bp, Artificial Sequence
  ENSG00000107796_15 (sequence is synthesized)
aaagctactgtttggaaagaaactaaaataaaagtccaggtcacttaaccatacagggctgatgttagatgaaagcaagcatcgataccaaatgcaattttacataatattacctgtcaa

SEQ ID NO: 163415 - DNA, 120 bp, Artificial Sequence
  ENSG00000107796_16 (sequence is synthesized)
caaaatatatttggacagccgcatggtaattttacacattatgtgtaaacaaagtattggtggcatcacatggtaaaaactcagtaatttcacctcagaaattcttcttcacatcagaaa

SEQ ID NO: 163416 - DNA, 120 bp, Artificial Sequence
  ENSG00000107796_17 (sequence is synthesized)
tcgttactactggtgaggcctgtgggagataagggggagaggggagcagtgtgttgctcagtaacttccaggaccatcctcactatccaaggagatgatgggatgaagttttgcaaatgg

SEQ ID NO: 163417 - DNA, 120 bp, Artificial Sequence
  ENSG00000107796_18 (sequence is synthesized)
caaggcctggctctaatgcacagagcaaagcacatctttctttgctgtgtgaagttgcaaaatgattacactatttccttgaggagaacagttatagacacccagtgttatgcattagtc

SEQ ID NO: 163418 - DNA, 120 bp, Artificial Sequence
  ENSG00000107796_19 (sequence is synthesized)
actgctggggaaataactggctcacattgctcaactgtacttttacttgttaatgttcattctgggttattacccattgaaaaaaaaatccttgtagccataaaaaatgatgagttcatg

SEQ ID NO: 163419 - DNA, 120 bp, Artificial Sequence
  ENSG00000107798_0 (sequence is synthesized)
actgcgactcgagacagcggcccggcaggacagctccagaatgaaaatgcggttcttggggttggtggtctgtttggttctctggaccctgcattctgaggggtctggagggaaactgac

SEQ ID NO: 163420 - DNA, 120 bp, Artificial Sequence
  ENSG00000107798_1 (sequence is synthesized)
agctgtggatcctgaaacaaacatgaatgtgagtgaaattatctcttactggggattccctagtgaggaatacctagttgagacagaagatggatatattctgtgccttaaccgaattcc

SEQ ID NO: 163421 - DNA, 120 bp, Artificial Sequence
  ENSG00000107798_2 (sequence is synthesized)
tcatgggaggaagaaccattctgacaaaggtcccaaaccagttgtcttcctgcaacatggcttgctggcagattctagtaactgggtcacaaaccttgccaacagcagcctgggcttcat

SEQ ID NO: 163422 - DNA, 120 bp, Artificial Sequence
  ENSG00000107798_3 (sequence is synthesized)
tcttgctgatgctggttttgacgtgtggatgggcaacagcagaggaaatacctggtctcggaaacataagacactctcagtttctcaggatgaattctgggctttcagttatgatgagat

SEQ ID NO: 163423 - DNA, 120 bp, Artificial Sequence
  ENSG00000107798_4 (sequence is synthesized)
ggcaaaatatgacctaccagcttccattaacttcattctgaataaaactggccaagaacaagtgtattatgtgggtcattctcaaggcaccactataggttttatagcattttcacagat

SEQ ID NO: 163424 - DNA, 120 bp, Artificial Sequence
  ENSG00000107798_5 (sequence is synthesized)
ccctgagctggctaaaaggattaaaatgttttttgccctgggtcctgtggcttccgtcgccttctgtactagccctatggccaaattaggacgattaccagatcatctcattaaggactt

SEQ ID NO: 163425 - DNA, 120 bp, Artificial Sequence
  ENSG00000107798_6 (sequence is synthesized)
atttggagacaaagaatttcttccccagagtgcgtttttgaagtggctgggtacccacgtttgcactcatgtcatactgaaggagctctgtggaaatctctgttttcttctgtgtggatt

SEQ ID NO: 163426 - DNA, 120 bp, Artificial Sequence
  ENSG00000107798_7 (sequence is synthesized)
taatgagagaaatttaaatatgtctagagtggatgtatatacaacacattctcctgctggaacttctgtgcaaaacatgttacactggagccaggctgttaaattccaaaagtttcaagc

SEQ ID NO: 163427 - DNA, 120 bp, Artificial Sequence
  ENSG00000107798_8 (sequence is synthesized)
ctttgactggggaagcagtgccaagaattattttcattacaaccagagttatcctcccacatacaatgtgaaggacatgcttgtgccgactgcagtctggagcgggggtcacgactggct

SEQ ID NO: 163428 - DNA, 120 bp, Artificial Sequence
  ENSG00000107798_9 (sequence is synthesized)
tgcagatgtctacgacgtcaatatcttactgactcagatcaccaacttggtgttccatgagagcattccggaatgggagcatcttgacttcatttggggcctggatgccccttggaggct

SEQ ID NO: 163429 - DNA, 120 bp, Artificial Sequence
  ENSG00000107798_10 (sequence is synthesized)
tttgcttcatttctgtaaaacacttgtttttctttcccaggtcttttgtttttttatatccaagaaaatgataactttgaagatgcccagttcactctagtttcaattagaaacatacta

SEQ ID NO: 163430 - DNA, 120 bp, Artificial Sequence
  ENSG00000107798_11 (sequence is synthesized)
gctattttttctttaattagggctggaataggaagccagtgtctcaaccatagtattgtctctttaagtcttttaaatatcactgatgtgtaaaaaggtcattatatccattctgttttt

SEQ ID NO: 163431 - DNA, 120 bp, Artificial Sequence
  ENSG00000107798_12 (sequence is synthesized)
aaaatttaaaatatattgactttttgcccttcataggacaaagtaatatatgtgttggaattttaaaattgtgttgtcattggtaaatctgtcactgacttaagcgaggtataaaagtac

SEQ ID NO: 163432 - DNA, 120 bp, Artificial Sequence
  ENSG00000107798_13 (sequence is synthesized)
gcagttttcatgtccttgccttaaagagctctctagtctaacggtcttgtagttagagatctaaatgacattttatcatgttttcctgcagcaggtgcatagtcaaatccagaaatatca

SEQ ID NO: 163433 - DNA, 120 bp, Artificial Sequence
  ENSG00000107798_14 (sequence is synthesized)
cagctgtgccagtaataaggatgctaacaattaattttatcaaacctaactgtgacagctgtgatttgacacgttttaattgctcaggttaaatgaaatagttttccggcgtcttcaaaa

SEQ ID NO: 163434 - DNA, 120 bp, Artificial Sequence
  ENSG00000107798_15 (sequence is synthesized)
acaaattgcactgataaaacaaaaacaaaagtatgttttaaatgctttgaagactgatacactcaaccatctatattcatgagctctcaatttcatggcaggccatagttctacttatct

SEQ ID NO: 163435 - DNA, 120 bp, Artificial Sequence
  ENSG00000107798_16 (sequence is synthesized)
gagaagcaaatccctgtggagactataccactattttttctgagattaatgtactcttggagcccgctactgtcgttattgatcacatctgtgtgaagccaaagccccgtggttgcccat

SEQ ID NO: 163436 - DNA, 120 bp, Artificial Sequence
  ENSG00000107798_17 (sequence is synthesized)
gagaagtgtccttgttcattttcacccaaatgaagtgtgaacgtgatgttttcggatgcaaactcagctcagggattcattttgtgtcttagttttatatgcatccttatttttaataca

SEQ ID NO: 163437 - DNA, 120 bp, Artificial Sequence
  ENSG00000107798_18 (sequence is synthesized)
cctgcttcacgtccctatgttgggaagtccatatttgtctgcttttcttgcagcatcatttccttacaatactgtccggtggacaaaatgacaattgatatgtttttctgatataattac

SEQ ID NO: 163438 - DNA, 120 bp, Artificial Sequence
  ENSG00000107798_19 (sequence is synthesized)
tttagctgcactaacagtacaatgcttgttaatggttaatataggcagggcgaatactactttgtaacttttaaagtcttaaacttttcaataaaattgagtgagacttataggcccaaa

SEQ ID NO: 163439 - DNA, 120 bp, Artificial Sequence
  ENSG00000107798_20 (sequence is synthesized)
agagctgtggacctgccagcctgcgaggcggaggacgggctccatctcttagaaacgcctacggcgcatgctctatggggtcaactggggggctggcaagcggcagcgctggtctggggc

SEQ ID NO: 163440 - DNA, 120 bp, Artificial Sequence
  ENSG00000107798_21 (sequence is synthesized)
ggagtctccgaggcacttcccggtggctggctgctctgattggctgaacaaatagtccgagggtggtgggcatccgccctcccgacaaggcagaccaggccccctgcaggtcccctatcc

SEQ ID NO: 163441 - DNA, 120 bp, Artificial Sequence
  ENSG00000107798_22 (sequence is synthesized)
gtctgatctcttttctaaccatacctggaagatggaatgctggacccaggaggaaaggccatgtgaagataaagaaaaggctgccatctccaggtcaggaagagaggtctcaccagaaac

SEQ ID NO: 163442 - DNA, 120 bp, Artificial Sequence
  ENSG00000107798_23 (sequence is synthesized)
caacttggacttctagcatctagaacttgagaaactgggatgctactccagaagaagacaaatcagtgcctctgtacaaagggatctttgtgctgccaaaagagtagaaaagtttatccc

SEQ ID NO: 163443 - DNA, 120 bp, Artificial Sequence
  ENSG00000107798_24 (sequence is synthesized)
tcaagttttggaaacctactcaaaagaagaagaaatattgctatcacagaatccctgaattagtatacacctagccgctgtaacaaagatgctcaaaaacataaatgacactgtaaaaga

SEQ ID NO: 163444 - DNA, 120 bp, Artificial Sequence
  ENSG00000107798_25 (sequence is synthesized)
agtttatttcttgttcacataactgtccaaggctggtgttcctgggcaacttccagttctcttccatgcaatgattcaaggacacagagttcttccatcctgtgactctaccatccccta

SEQ ID NO: 163445 - DNA, 78 bp, Artificial Sequence
  ENSG00000107798_26 (sequence is synthesized)
gagctgtacaaagatgctgatgaggggctgcagcatgcaattcacttcaccagcagtcactaagagtctcgctctgta

SEQ ID NO: 163446 - DNA, 120 bp, Artificial Sequence
  ENSG00000107798_27 (sequence is synthesized)
cttcacctcctgggttcaagaaattcacctgcctcagcctcccgaatagttgggactgcagaggaaaggccatgtgaagataaagaaaaggctgccatctccaggtcaggaagagaggtc

SEQ ID NO: 163447 - DNA, 120 bp, Artificial Sequence
  ENSG00000107798_28 (sequence is synthesized)
tcaccagaaaccaacttggacttctagcatctagaactatgtttattgtaaggattaaatcagctaaaccaagaaaagcctcagggatggtgcctggcaaactgcacgctgttaatacat

SEQ ID NO: 163448 - DNA, 120 bp, Artificial Sequence
  ENSG00000107798_29 (sequence is synthesized)
acaccttcctgctacactaaagcagagagaattacctcctgaatcatgtttgcagaacttctgggcacagtgactcaactcccagctattcttgtcatggattttttctcttggagccaa

SEQ ID NO: 163449 - DNA, 120 bp, Artificial Sequence
  ENSG00000107798_30 (sequence is synthesized)
tccagccatggagatcactggtcttgtgacttattttttctctttcagtatgaaatcattagaactgagaaaatgaaaacattcctgttattacttcctgagagaaagaaacttagtaac

SEQ ID NO: 163450 - DNA, 120 bp, Artificial Sequence
  ENSG00000107798_31 (sequence is synthesized)
atgctttggtaggaattgttcttctttttcctgctgtgtccctcttgctggtcccaccagggctcttggtcctgagcctgatttacaccaggagcataatctgatcaaaaagagggaaac

SEQ ID NO: 163451 - DNA, 120 bp, Artificial Sequence
  ENSG00000107798_32 (sequence is synthesized)
taaagaaaaaaggcaggattgtatgaggggttctcacaatggcagtacataatcccttatacctcgtattatgtagacccctgtgtttccaagttacctttgtaatttaggtaagtgagc

SEQ ID NO: 163452 - DNA, 120 bp, Artificial Sequence
  ENSG00000107798_33 (sequence is synthesized)
taaaatttaaaaattccttattctcctttcagatatggctggagtcatttgtttcatattttcctttcaccttttacttgccctaaatctggttcagaactttttgtgggagcattaagt

SEQ ID NO: 163453 - DNA, 120 bp, Artificial Sequence
  ENSG00000107798_34 (sequence is synthesized)
aaatcgaaactaaacgtaagcttcagaaaccgaaacttaatagaagagctcaagagccgcggccagacgtttgcggagtccagggtctttcggagttgaatttgcagctgggctccttca

SEQ ID NO: 163454 - DNA, 120 bp, Artificial Sequence
  ENSG00000107798_35 (sequence is synthesized)
ctttggtctcggcttttatctgcctccctgataggtttttggtcttggtgacttcaagaatgaagctgcggactctcgctgtgagtgctacagttgttaaagatggcgtgtctggagttt

SEQ ID NO: 163455 - DNA, 120 bp, Artificial Sequence
  ENSG00000107798_36 (sequence is synthesized)
gctgatgaggggctgcagcatgcaattcacttcaccagcagtcactaaggtctgatctcttttctaaccatacctggaagatggaatgctggacccagggtatgcatagaaaatgggagt

SEQ ID NO: 163456 - DNA, 120 bp, Artificial Sequence
  ENSG00000107798_37 (sequence is synthesized)
gcagacaacagattatgggacttgccagtctccataatcagaaggctttgacatatcaatgcaccagggatcttaccaaactaaattttaagcacttatagctcaagattctccctctga

SEQ ID NO: 163457 - DNA, 120 bp, Artificial Sequence
  ENSG00000107798_38 (sequence is synthesized)
gatgaaacatacttccaccctgtcatgtgtcagcttcagaagatatcaattgctcaagaaagtgttggacaagcagaaaagcacactgaacatttctggacttgtgaaagagctctgaat

SEQ ID NO: 163458 - DNA, 120 bp, Artificial Sequence
  ENSG00000107798_39 (sequence is synthesized)
agctcctgattctgcagaaaacacgaaactgagctgtacaaagatgctgatgaggggctgcagcatgcaattcacttcaccagcagtcactaagaatgaaaatgcggttcttggggttgg

SEQ ID NO: 163459 - DNA, 120 bp, Artificial Sequence
  ENSG00000107807_0 (sequence is synthesized)
gatgtcccagagtcaacagcgagcgagcagccggagcggggaagcagaagccagagaggggaagaatacggcgccccctctctccctcccctcccccttctactttagcctttctgcgca

SEQ ID NO: 163460 - DNA, 120 bp, Artificial Sequence
  ENSG00000107807_1 (sequence is synthesized)
cgcacttcgcttccaagtctccgcgcagccaggagccgctgttgcctcccagcccctgctagctgccccccgagccgagcgcagcgagcgccgccgcccgggccccccggtggggccagg

SEQ ID NO: 163461 - DNA, 120 bp, Artificial Sequence
  ENSG00000107807_2 (sequence is synthesized)
gcatggagcacctgggtccgcaccacctccacccgggtcacgcagagcccattagcttcggcatcgaccagatcctcaacagcccggaccagggtggctgcatgggacccgcctcgcgcc

SEQ ID NO: 163462 - DNA, 120 bp, Artificial Sequence
  ENSG00000107807_3 (sequence is synthesized)
tccaggacggagaatacggccttggctgcttggtcggaggcgcctacacttacggcggcgggggctccgcggccgcgacgggggctggaggagcgggggcctatggtactggaggtcccg

SEQ ID NO: 163463 - DNA, 120 bp, Artificial Sequence
  ENSG00000107807_4 (sequence is synthesized)
ctggaggtcccggcggccccggaggcccggcaggcggcggcggcgcctgcagcatgggtcctctgaccggctcctacaacgtgaacatggccttggcaggcggccccggtcctggcggcg

SEQ ID NO: 163464 - DNA, 120 bp, Artificial Sequence
  ENSG00000107807_5 (sequence is synthesized)
gggcactcagcgctgcgggggtaatccgggtgccggcacacaggccgctcgccggagccgtggcccacccccagcccctggccaccggcttgcccaccgtgccctctgtgcctgccatgc

SEQ ID NO: 163465 - DNA, 120 bp, Artificial Sequence
  ENSG00000107807_6 (sequence is synthesized)
tgcctgccatgccgggcgtcaacaacctcactggcctcaccttcccctggatggagagtaaccgcagatacacaaaggacaggttcacaggtcacccctatcagaaccggacgcccccca

SEQ ID NO: 163466 - DNA, 120 bp, Artificial Sequence
  ENSG00000107807_7 (sequence is synthesized)
agaagaagaagccgcgcacgtccttcacacgcctgcagatctgcgagctggagaagcgcttccaccgccagaagtacctggcctcggccgagcgcgccgccctggccaaggcgctcaaaa

SEQ ID NO: 163467 - DNA, 120 bp, Artificial Sequence
  ENSG00000107807_8 (sequence is synthesized)
cgggaggccgagaggcagcaagcgaaccgcatcctcctgcagttgcagcaggaggccttccagaagagcctggcacagccgctgcccgctgaccctctgtgcgtgcacaactcgtcgctc

SEQ ID NO: 163468 - DNA, 120 bp, Artificial Sequence
  ENSG00000107807_9 (sequence is synthesized)
ttcgccctgcagaatctgcagccgtggtctgacgactcgaccaaaatcactagcgtcacgtcggtggcgtcggcctgcgagtgagcctgcccattctgccctgtgggaccccaggcccac

SEQ ID NO: 163469 - DNA, 120 bp, Artificial Sequence
  ENSG00000107807_10 (sequence is synthesized)
tcaggggtcactgaggcctgagacccaggactcctccccaccctcctggcctcagactgcacccaggaggggaacactgccctcgcacggccccgaagggcccccacatttgtgccgaca

SEQ ID NO: 163470 - DNA, 120 bp, Artificial Sequence
  ENSG00000107807_11 (sequence is synthesized)
ctgttctcccttcggtggaagagctcaagggacaaggacacgcgcccccctcccagaggcgtcccgcacctgtctgaactgttaagaaatctgtttttgtttatttcattttattttaat

SEQ ID NO: 163471 - DNA, 120 bp, Artificial Sequence
  ENSG00000107807_12 (sequence is synthesized)
ttttaacgtgggattcagagaaaggcaagggaggtaagggaggaggagcttctggggtccccagggctgtcatctgaatttgccctgggaaaccccttctctgtgacccacttctcatca

SEQ ID NO: 163472 - DNA, 120 bp, Artificial Sequence
  ENSG00000107807_13 (sequence is synthesized)
cacacatggaaacccataggcccacacacaggtggtgtcactgtccctcctggtgtcaccccagagccacacatgggcatctatgggagagtgtcaaccagacagagggtcacagtgttt

SEQ ID NO: 163473 - DNA, 120 bp, Artificial Sequence
  ENSG00000107807_14 (sequence is synthesized)
acactttggaccttacgatcaggcacaggtcaggggtgacacagactcatcctgaacagcatggcactccctccagcacaaacacaaggtcatggccacactgtgacacactacaccaca

SEQ ID NO: 163474 - DNA, 120 bp, Artificial Sequence
  ENSG00000107807_15 (sequence is synthesized)
cacaacagccaacagctacaacagcctcacttggtctgccaggcccccaccacacatcccagcccaatccaggtacgcacagacaggttttcacataaatgcagcccatttctccagaac

SEQ ID NO: 163475 - DNA, 120 bp, Artificial Sequence
  ENSG00000107807_16 (sequence is synthesized)
ccatttgaggggtgggggggtgttaatttatgcacttataaggtgttttctgtgtaaccattttataaagtgcttgtgtaatttatgtgaaaaaaataaataaaagcctccggatccgga

SEQ ID NO: 163476 - DNA, 120 bp, Artificial Sequence
  ENSG00000107807_17 (sequence is synthesized)
ctgttatcttgggcacgaacaatgcaccggtaggctggtgatcggtggcgggaagactactcccgggacattgggtactaagtggtggccgctgccgccttctctgctgcccgctcccgc

SEQ ID NO: 163477 - DNA, 120 bp, Artificial Sequence
  ENSG00000107807_18 (sequence is synthesized)
ctgctccccttagggttccctggatcctagaccacgatccttccgtccgggctgggaagcagccacaaattgagcccaggtcacccctatcagaaccggacgccccccaagaagaagaag

SEQ ID NO: 163478 - DNA, 120 bp, Artificial Sequence
  ENSG00000107807_19 (sequence is synthesized)
agccatggccccacgattctaccacaacatttctgacgctgggaaaggagtgggggatgcggcctcagaccttggaacgctaaagagggagccagggctagctcgggggttggggggact

SEQ ID NO: 163479 - DNA, 120 bp, Artificial Sequence
  ENSG00000107815_0 (sequence is synthesized)
gcttccgaggtcaaggcgagtagcatgtgcgggagactcacgttgccggcgaagtgggagagagaaaagtggtaacctggggctgggggccggcgcggcggagctcggagtagtagagcg

SEQ ID NO: 163480 - DNA, 120 bp, Artificial Sequence
  ENSG00000107815_1 (sequence is synthesized)
gagtgaagacacgggggaggatagagactggcattcctttgggccgggggattggcgggagtcgtgctgggtgctctcgccgtgttgaggtcccagtgaggggaaggagaagcggaagag

SEQ ID NO: 163481 - DNA, 120 bp, Artificial Sequence
  ENSG00000107815_2 (sequence is synthesized)
ggtctctagtcggggcctagggcaaagggactacaaaaaggatgcagatgactatagaaatgaggacgacgaggagatgctgtggaggagcagtagaggtgagaagatgatgcaaagaaa

SEQ ID NO: 163482 - DNA, 120 bp, Artificial Sequence
  ENSG00000107815_3 (sequence is synthesized)
ctgtgtcagtgaggaactgtatagagggtcatagaggtgaggtggcggagagaaactaactaacggaccatagaggtgggggagccattgtagaaggacgtggacgcgaaagggtcgtgt

SEQ ID NO: 163483 - DNA, 120 bp, Artificial Sequence
  ENSG00000107815_4 (sequence is synthesized)
agatgggcatatgtgtgaagcagcaacgtagaggggctgaagaggagaaattcatggagagaaagaatgcacctagagtgagctctgcagagtgctgcgtgggatatccctagagtttgg

SEQ ID NO: 163484 - DNA, 120 bp, Artificial Sequence
  ENSG00000107815_5 (sequence is synthesized)
tctagtgaaggcacgctaaccaggcacctaaggcatttcaagtagtgacttcccacatttggctaggaatgtgggtcctcctccgaagtgggtaccccctccgtatcttgttacccctgc

SEQ ID NO: 163485 - DNA, 120 bp, Artificial Sequence
  ENSG00000107815_6 (sequence is synthesized)
gtggggagtggatgggtcggaggggcctgccccgaaacttggccccaggccctcctcgcagacgttacaggaaggagactctccaagccttggatatgccagtgttgcctgtaactgcaa

SEQ ID NO: 163486 - DNA, 120 bp, Artificial Sequence
  ENSG00000107815_7 (sequence is synthesized)
ctgaaatccgccagtatttgcgggggcatgggatccccttccaggatggtcacagttgcctgcgggcactgagcccctttgcagagtcttcacagctcaaaggccagactggtgttacca

SEQ ID NO: 163487 - DNA, 120 bp, Artificial Sequence
  ENSG00000107815_8 (sequence is synthesized)
cttccttcagcctcttcattgacaagaccacaggccactttctctgcatgaccagcctagcagaagggagctgggaagacttccaggccagcgtggaggggcgaggggatggggccaggg

SEQ ID NO: 163488 - DNA, 120 bp, Artificial Sequence
  ENSG00000107815_9 (sequence is synthesized)
aggggtttctgcttagcaaggcaccagaatttgaggacagcgaggaggtccggaggatctggaaccgagcaatacctctctgggagctgcctgatcaggaggaggttcagctggctgata

SEQ ID NO: 163489 - DNA, 120 bp, Artificial Sequence
  ENSG00000107815_10 (sequence is synthesized)
caatgtttggccttaccaaggttacagatgacacactcaagcgtttcagtgtgcgatatctgcgacctgctcgcagtcttgtcttcccttggttctcccctgggggctcaggattacgag

SEQ ID NO: 163490 - DNA, 120 bp, Artificial Sequence
  ENSG00000107815_11 (sequence is synthesized)
gcctgaagctcctagaggctaaatgccagggggatggagtgagctacgaggaaaccactattccccgacccagcgcctaccacaatctgtttggattaccactgattagtcgtcgagatg

SEQ ID NO: 163491 - DNA, 120 bp, Artificial Sequence
  ENSG00000107815_12 (sequence is synthesized)
ctgaggtggtactgacgagtcgtgagcttgacagcctggccttgaaccagtccacggggctgcctacccttactctaccccgaggaacgacctgcttaccccctgccttactcccttacc

SEQ ID NO: 163492 - DNA, 120 bp, Artificial Sequence
  ENSG00000107815_13 (sequence is synthesized)
tggaacagttccggcggattgtattctggttgggggatgaccttcggtcctgggaagccgccaagttgtttgcacgaaaactgaaccccaaacgatgcttcttggtgcgaccaggagacc

SEQ ID NO: 163493 - DNA, 120 bp, Artificial Sequence
  ENSG00000107815_14 (sequence is synthesized)
agcaaccccgtcccctggaggccctgaacggaggcttcaatctttctcgtattcttcgtaccgccctgcctgcctggcacaagtccatcgtatctttccggcagcttcgggaggaggtgc

SEQ ID NO: 163494 - DNA, 120 bp, Artificial Sequence
  ENSG00000107815_15 (sequence is synthesized)
tgtggagcaagcagctggcctccgctggagccgctttccagacctcaatcgtatcttgaagggacatcgaaagggcgagctgacggtcttcacagggccaacaggcagtggaaagacgac

SEQ ID NO: 163495 - DNA, 120 bp, Artificial Sequence
  ENSG00000107815_16 (sequence is synthesized)
attcatcagtgagtatgccctggatttgtgttcccagggggtgaacacactgtggggtagcttcgagatcagcaatgtgagactagcccgggtcatgctgacacagtttgccgaggggcg

SEQ ID NO: 163496 - DNA, 120 bp, Artificial Sequence
  ENSG00000107815_17 (sequence is synthesized)
gctggaagatcaactggacaaatatgatcactgggctgaccgctttgaggacctgcccctctatttcatgactttccatggacagcaaagcatcaggactgtaatagatacaatgcaaca

SEQ ID NO: 163497 - DNA, 120 bp, Artificial Sequence
  ENSG00000107815_18 (sequence is synthesized)
tgcagtctacgtctatgacatttgtcatgtgatcatcgacaacctgcagttcatgatgggtcacgagcagctgtccacagacaggatcgcagctcaagactacatcatcggggtctttcg

SEQ ID NO: 163498 - DNA, 120 bp, Artificial Sequence
  ENSG00000107815_19 (sequence is synthesized)
gaagtttgcaacagacaataactgccatgtgacactggtcattcacccccggaaagaggatgatgacaaggaactgcagacagcgtccatttttggctcagccaaagcaagccaggaagc

SEQ ID NO: 163499 - DNA, 120 bp, Artificial Sequence
  ENSG00000107815_20 (sequence is synthesized)
agacaatgttctgatcctgcaggacaggaagctggtaaccgggccagggaaacggtatctgcaggtgtccaagaaccgctttgatggagatgtaggtgtcttcccgcttgagttcaacaa

SEQ ID NO: 163500 - DNA, 120 bp, Artificial Sequence
  ENSG00000107815_21 (sequence is synthesized)
gaactccctcaccttctccattccaccaaagaacaaggcccggctcaagaagatcaaggatgacactggaccagtggccaaaaagccctcttctggcaaaaagggggctacgacacagaa

SEQ ID NO: 163501 - DNA, 120 bp, Artificial Sequence
  ENSG00000107815_22 (sequence is synthesized)
ctctgagatttgctcaggccaggcccccactcccgaccagccagacacctccaagcgttcaaagtgaaggccgtgcagagctggtcactgaaatgagcctgataggataggctggagcat

SEQ ID NO: 163502 - DNA, 120 bp, Artificial Sequence
  ENSG00000107815_23 (sequence is synthesized)
aaaactctgcaagggctcctctatcctgtggtcctgagctgtgtgcccttctcagtctgaggggcctaacctagagcaggtttccatagtgagaaaattcaatgtagcagactactgaga

SEQ ID NO: 163503 - DNA, 120 bp, Artificial Sequence
  ENSG00000107815_24 (sequence is synthesized)
aactactgtgttgctcaggctttgtttgaggtcctgtatatacagcactgaaaagagagataaagtccctgcctgcatgcattctggcggaagagacaagcaagcaatgaacaaattagc

SEQ ID NO: 163504 - DNA, 120 bp, Artificial Sequence
  ENSG00000107815_25 (sequence is synthesized)
agaaaacctagttttagtgaaaaatgctgtaaagaaaatagaaatgcgatagagtgctggcaggctagtgtagataagtggtctgaaaaggtgtctctgagccgagggcatgtgagctgg

SEQ ID NO: 163505 - DNA, 120 bp, Artificial Sequence
  ENSG00000107815_26 (sequence is synthesized)
ggcctaaacaactagaaggagagagccacgtgaacatccggcgaaggggacccaggcagagagaaaaggaaatccaagccctgaggtaggaatgagcaggtcagattcaaggcagtgagg

SEQ ID NO: 163506 - DNA, 120 bp, Artificial Sequence
  ENSG00000107815_27 (sequence is synthesized)
tcaggccgcatgaacctggaggggaatcggggacttcatgcgaaactccagcctaggctttcaaagtcaaagggtgatacagtgggtaccaagctcctctgctccccactttgtagagcc

SEQ ID NO: 163507 - DNA, 120 bp, Artificial Sequence
  ENSG00000107815_28 (sequence is synthesized)
tagcatgaggtggcatgtactagaattggatcctaggtgcttagccctgcaatatcagggcctcactggtgggagctgcctcgggctgggttgcttggtcatagagccatagaaggaagc

SEQ ID NO: 163508 - DNA, 120 bp, Artificial Sequence
  ENSG00000107815_29 (sequence is synthesized)
tgtcagcccggagtgcctgccacctagacactgatgccattgtgtgctgcctcaagactgctggagtcaggacattttatagagccttttccagttttactaaaaaatttttccattgcc

SEQ ID NO: 163509 - DNA, 120 bp, Artificial Sequence
  ENSG00000107815_30 (sequence is synthesized)
ccgcttggacatacaacacacacttctcaggcagctggcctctaggcacacatgctgtgctctcctattttctgagatgtgtgcaggatcgcagctcaagactacatcatcggggtcttt

SEQ ID NO: 163510 - DNA, 120 bp, Artificial Sequence
  ENSG00000107815_31 (sequence is synthesized)
agctgctgcacatagcgacccagtccgttgtggagaacgctggccaagaagcggctcggagtcccgcgcgccgtcatagctacagcttggaggccgcggagcctaagcagcgaggagagg

SEQ ID NO: 163511 - DNA, 120 bp, Artificial Sequence
  ENSG00000107815_32 (sequence is synthesized)
caggcaggaggcaatgcctctggggccatgacatgaggaatatatgtgctggaaatacaaaggctgatagttggttcttatgctcttcttgtcccccaggagctcacatcctctcctggg

SEQ ID NO: 163512 - DNA, 120 bp, Artificial Sequence
  ENSG00000107816_0 (sequence is synthesized)
cgccgcgccgtggccctttgtgctggaacaatgaccagctgccgctggccccggggccccggctggggttgagggtgaccaccgccgccgccgcgtcgagccgaaccgagcccccagaca

SEQ ID NO: 163513 - DNA, 120 bp, Artificial Sequence
  ENSG00000107816_1 (sequence is synthesized)
cccagacacgcagtcacagggcgtcggagggagggctcccgactgccgccgagcagcccctacgtgcgccccggcggattcgcgtgacgcgggtgcttgcgcgtgtccgcgccccggggc

SEQ ID NO: 163514 - DNA, 80 bp, Artificial Sequence
  ENSG00000107816_2 (sequence is synthesized)
gtgcttgcgcgtgtccgcgccccggggcggagacgcccctcggaccctcccctgcgcggtgccgcccactcgcaccgggc

SEQ ID NO: 163515 - DNA, 80 bp, Artificial Sequence
  ENSG00000107816_3 (sequence is synthesized)
gcggcgcgcctgtggagcgctgggggcggcctggggctgagcatggagcagcgcggcggaggtgaggggggccgggtctg

SEQ ID NO: 163516 - DNA, 120 bp, Artificial Sequence
  ENSG00000107816_4 (sequence is synthesized)
aggggggccgggtctgggaggcggcctggggagcccccaacttatgcgcggtggaatccagccggggggacggcgttccccagtcgcccccactttctggaaggggggctggactctgga

SEQ ID NO: 163517 - DNA, 120 bp, Artificial Sequence
  ENSG00000107816_5 (sequence is synthesized)
gaatgggtcaggggctcctggcttcccgccgcagaatgggaactcgtgatcgcagacttgaccccgcttgactggtccttggagtttgggtgggagggagactttccccaactcttcaga

SEQ ID NO: 163518 - DNA, 120 bp, Artificial Sequence
  ENSG00000107816_6 (sequence is synthesized)
tccgtctccggccctgaaccagctccagccctctgctctcctcagcccactaaaaggggggtgctcctgggccagagtgattgctcagggagtgctggggagaatgaggggttcccatct

SEQ ID NO: 163519 - DNA, 120 bp, Artificial Sequence
  ENSG00000107816_7 (sequence is synthesized)
cccacagccacaaacgcatttctcaaaatggagcctccacttgcccctccttctctttcgggctccaagagcgggagccggcctggctgggcctggctttccagactcctggctctggct

SEQ ID NO: 163520 - DNA, 120 bp, Artificial Sequence
  ENSG00000107816_8 (sequence is synthesized)
ccctggatgtgtggctctcagggcccggctctgtggcactttggacttatgggccctcggctccgtggggttggggggccctggctcactgggtcccgctggctgtccccttgtcggcct

SEQ ID NO: 163521 - DNA, 120 bp, Artificial Sequence
  ENSG00000107816_9 (sequence is synthesized)
gaccctcgggcctctccgagtctttgtctcttttgggtccctgtctttctctgagcctgtctccttccttcaattttcactttctccgtgctcgctgaagtggggaaatgcaacagaggt

SEQ ID NO: 163522 - DNA, 120 bp, Artificial Sequence
  ENSG00000107816_10 (sequence is synthesized)
gccagcccccttggccccctaagaagtcccttccccactgttcactccacaccctggagtgggcccagagaggggaggggagggggttctctatctgctctgctgggggctggggtgtgt

SEQ ID NO: 163523 - DNA, 120 bp, Artificial Sequence
  ENSG00000107816_11 (sequence is synthesized)
ggggtggtctgagccccagccctacagaggggcctgtggtcactccctgctcctggcctacccctcccccagctccccgcagctcctgccccagcgtggacacctcttcctggttcgcag

SEQ ID NO: 163524 - DNA, 120 bp, Artificial Sequence
  ENSG00000107816_12 (sequence is synthesized)
tgtcttttgacttgggtgggaaggagggcggtggatttaatggagggcatgcgagaaagaaggggaacagatcaggcaaaggagttagataatgtcccacctctccccacacgccgaaga

SEQ ID NO: 163525 - DNA, 120 bp, Artificial Sequence
  ENSG00000107816_13 (sequence is synthesized)
gagaaggaaacaggctccccccaccaatgggccctcaagccacccaggctcccaccactctcatacctgcgtgcccacgttcacaggctccactgcaccactcaccttcctagtcacaca

SEQ ID NO: 163526 - DNA, 120 bp, Artificial Sequence
  ENSG00000107816_14 (sequence is synthesized)
caaacacaggagctcacacataaactcatgaacttactgacaagtctgtccaggcaccgtctctcccacacaccacaaattcacttgttagatccacatttataactttcacaggctttc

SEQ ID NO: 163527 - DNA, 120 bp, Artificial Sequence
  ENSG00000107816_15 (sequence is synthesized)
taatgacccctgatccacatactcttctaagatatacacatgtgaattcacacatgaactcatatgtatgtgaatgaactgatatatcaaacatgcatagactcacatgatgttttcaca

SEQ ID NO: 163528 - DNA, 120 bp, Artificial Sequence
  ENSG00000107816_16 (sequence is synthesized)
cacattttcatacacacgtgttcattttcatgctcctgtgcatgtagtcacacaacaaataactaaatgcacacactcctactcccagtgcaattctctgtccacttcttggccccgctc

SEQ ID NO: 163529 - DNA, 120 bp, Artificial Sequence
  ENSG00000107816_17 (sequence is synthesized)
tgcatgatgacttcagcagatgcctaagtcctggtcatcagcggcctcgggactgggactagggagggggttccgggtggaggcttgcagctgcttccaggaaggagcagagcctgggga

SEQ ID NO: 163530 - DNA, 120 bp, Artificial Sequence
  ENSG00000107816_18 (sequence is synthesized)
ggtggagccctcttgcctgggctctgtggaagtgaggttttggagcagcctccagaggtgaaggcagggcatctaccttcctcccctcagggttagtttggggaccttctgaagctgtag

SEQ ID NO: 163531 - DNA, 120 bp, Artificial Sequence
  ENSG00000107816_19 (sequence is synthesized)
ggtttcagagaggttggcagtggggcagagcctgtggaggctccttcaggccttcaggcctcaccgattgggtgtgcagaggctaggagttgtcatggaaactggtatgagcctgcatcc

SEQ ID NO: 163532 - DNA, 120 bp, Artificial Sequence
  ENSG00000107816_20 (sequence is synthesized)
acctctgggaggcaggagaccccaaaggacacctgtggactccctaagagccgcgggtttcttatttagccagatcgacagagaggcagtttagccgcctttctgtctgagagaaactga

SEQ ID NO: 163533 - DNA, 120 bp, Artificial Sequence
  ENSG00000107816_21 (sequence is synthesized)
ggcccagcagagggaggcagggcactgcctggccttggctctttgttccctaattaccatctgaggtgctgattgcacccctgaggtacctctgcccaaactgccctgtaatgaggccac

SEQ ID NO: 163534 - DNA, 120 bp, Artificial Sequence
  ENSG00000107816_22 (sequence is synthesized)
ctggctgagaggaccagggacctgtgcttcaagctggtagagaaggcccctccctcacctgagtcctggcctctgtggaggatgcaggattgggcttgggcctgggtctttgctgccagg

SEQ ID NO: 163535 - DNA, 120 bp, Artificial Sequence
  ENSG00000107816_23 (sequence is synthesized)
tggggcccagggggaattgagattcattccagcacttgaagggggagtcttggtggggatcagggcttgttactgatgtcaaggaggtgtttggtcaggatcagtgggtcaggaggggtc

SEQ ID NO: 163536 - DNA, 120 bp, Artificial Sequence
  ENSG00000107816_24 (sequence is synthesized)
tcaaggtggagggactctgacaccactgccctgcttacaggtcgcctgcgaggccgctggccaggcctgagcctctgccaccatggccattgtgcagactctgccagtgccactggagcc

SEQ ID NO: 163537 - DNA, 120 bp, Artificial Sequence
  ENSG00000107816_25 (sequence is synthesized)
tgctcctgaagctgccactgccccacaagctccagtcatgggtagtgtgagcagccttatctcaggccggccctgtcccggggggccagctcctccccgccaccacggccctcctgggcc

SEQ ID NO: 163538 - DNA, 120 bp, Artificial Sequence
  ENSG00000107816_26 (sequence is synthesized)
caccttcttccgccagcaggatggcctgctacggggtggctatgaggcacaggagccgctgtgcccagctgtgccccctaggaaggctgtccctgtcaccagcttcacctacatcaatga

SEQ ID NO: 163539 - DNA, 120 bp, Artificial Sequence
  ENSG00000107816_27 (sequence is synthesized)
ggacttccggacagagtcaccccccagcccaagcagtgatgttgaggatgcccgagagcagcgggcacacaatgcccacctccgcggcccaccaccaaagctcatccctgtctctggaaa

SEQ ID NO: 163540 - DNA, 120 bp, Artificial Sequence
  ENSG00000107816_28 (sequence is synthesized)
gctggagaagaacatggagaagatcctgatccgcccaacagccttcaagccagtgctgcccaaacctcgaggggctccgtccctgcctagcttcatgggtcctcgggccaccgggctgtc

SEQ ID NO: 163541 - DNA, 120 bp, Artificial Sequence
  ENSG00000107816_29 (sequence is synthesized)
tgggagccagggcagcctgacgcagctgtttgggggccctgcctcctcctcctcctcttcctcctcctcttcagctgctgacaaacccctggcatttagtggctgggccagtggctgccc

SEQ ID NO: 163542 - DNA, 120 bp, Artificial Sequence
  ENSG00000107816_30 (sequence is synthesized)
atcagggacgctatccgactctggccgaaactcactgtccagcctgcccacctacagcaccggaggtgccgagccaaccaccagctccccaggcgggcacctgccttcccatggctctgg

SEQ ID NO: 163543 - DNA, 120 bp, Artificial Sequence
  ENSG00000107816_31 (sequence is synthesized)
gcgaggggcactgcctgggccagcccgaggggtccctactgggccctcccactcagacagtggccggtcctcctccagcaagagcacaggctccctagggggccgtgtggctggggggct

SEQ ID NO: 163544 - DNA, 120 bp, Artificial Sequence
  ENSG00000107816_32 (sequence is synthesized)
tttgggcagtggtactcgggcctcccctgacagcagctcctgtggggagcgctcaccaccacccccgcctccacctccttcggatgaggccctgctgcactgtgtcctggaaggaaagct

SEQ ID NO: 163545 - DNA, 120 bp, Artificial Sequence
  ENSG00000107816_33 (sequence is synthesized)
ccgagaccgggaggcagagcttcagcagctgcgggacagtctggacgagaatgaggctaccatgtgccaggcatacgaggagcggcagcggcactggcagcgagagcgtgaggccctgcg

SEQ ID NO: 163546 - DNA, 120 bp, Artificial Sequence
  ENSG00000107816_34 (sequence is synthesized)
agaggactgtgcggcccaggcacagcgggcacagcgggcccaacagctgctgcagctgcaggtgttccagctgcagcaggagaagcggcaattgcaggacgacttcgcacagctgctgca

SEQ ID NO: 163547 - DNA, 120 bp, Artificial Sequence
  ENSG00000107816_35 (sequence is synthesized)
ggagcgcgaacagctggagcggcgctgcgccaccttggagcgggagcagcgggagctcgggccgaggcttgaggagaccaagtgggaggtgtgccagaaatcaggcgagatctccctgct

SEQ ID NO: 163548 - DNA, 120 bp, Artificial Sequence
  ENSG00000107816_36 (sequence is synthesized)
gaagcagcagctgaaagagtctcaggcagagctggtgcagaagggcagcgagctggtggctctgcgggtggcgctgcgggaggcccgtgctacgctgcgggtcagtgagggccgtgcgcg

SEQ ID NO: 163549 - DNA, 120 bp, Artificial Sequence
  ENSG00000107816_37 (sequence is synthesized)
gggtctacaggaggccgcccgagctcgggagctggagctggaagcctgttcccaggagctgcagcgacaccgccaggaagctgagcagctgcgggagaaagctgggcagttggatgctga

SEQ ID NO: 163550 - DNA, 120 bp, Artificial Sequence
  ENSG00000107816_38 (sequence is synthesized)
ggcggccggactccgggagccccctgtgccacctgccaccgctgacccattcctcctggcagagagtgatgaggccaaagtgcagcgggcagcagccggggttgggggcagcttgcgggc

SEQ ID NO: 163551 - DNA, 120 bp, Artificial Sequence
  ENSG00000107816_39 (sequence is synthesized)
ccaggtggagcgattgcgggtggagctgcagcgggagcggcggcggggtgaggagcagcgggacagctttgagggggagcggctggcctggcaggcagagaaggagcaggtgatccgcta

SEQ ID NO: 163552 - DNA, 120 bp, Artificial Sequence
  ENSG00000107816_40 (sequence is synthesized)
ccagaagcagctgcagcacaactacatccagatgtaccggcgcaaccggcagctagagcaggagctgcagcagctcagcctggagctggaggcccgggagctcgctgacctgggcctggc

SEQ ID NO: 163553 - DNA, 120 bp, Artificial Sequence
  ENSG00000107816_41 (sequence is synthesized)
cgagcaggccccctgcatctgcctggaggagatcactgctactgagatctagggccctcagcaaccagctctgtagggagctctgccagaggggcagcagctgcagatccacttaggccc

SEQ ID NO: 163554 - DNA, 120 bp, Artificial Sequence
  ENSG00000107816_42 (sequence is synthesized)
cagggtccacggatggccccaaaggctgagggccccaaagccacttgtctcctaggatccaggcctctgggcttctgccaagaactcagggtggccctatgacttggaggagcaagatca

SEQ ID NO: 163555 - DNA, 120 bp, Artificial Sequence
  ENSG00000107816_43 (sequence is synthesized)
gaccgctcaaaggtccccgtgttcactgttacccagaggctcttgttactacccacttcattccccaccgctgccagtgccactgccaaccctgttcacaggcgcttccagcccactcca

SEQ ID NO: 163556 - DNA, 120 bp, Artificial Sequence
  ENSG00000107816_44 (sequence is synthesized)
gccaggggagcagggaagaagaaggggctccctcctcttcacattccccccgaccccaaagccagagaaagccagatggcaccagctgctccggatgtgcctgcccacattgggggacag

SEQ ID NO: 163557 - DNA, 120 bp, Artificial Sequence
  ENSG00000107816_45 (sequence is synthesized)
ggccgggcctgggctcggttcccaggtttgagctctgcagcctctctcctggagtgagggggctgaagtcagaccaaaggaagaactcagaaatgtcttgtttatttgtgtttgtgacca

SEQ ID NO: 163558 - DNA, 120 bp, Artificial Sequence
  ENSG00000107816_46 (sequence is synthesized)
agcagcctctcccttcacccaggtttatggcctcgttttcacttgtatatttttcacactgtaaatttcttgtacaaacccaaagaaaaaattaaaaaaaatttttttgtttaaaaataa

SEQ ID NO: 163559 - DNA, 120 bp, Artificial Sequence
  ENSG00000107816_47 (sequence is synthesized)
ccaggtcgggccaggcgggcgccgggagctgggagccgggagcccagagttcggaacctagagttcggagccggctagggagccggcgttgtcgcggcgaggaggtgggcgcgctggagc

SEQ ID NO: 163560 - DNA, 120 bp, Artificial Sequence
  ENSG00000107816_48 (sequence is synthesized)
tatttgtgaagcacggcgtgtaagaagttgtctgtgtgagtgactgtgaatagaggctgtcaatgcgtgaaagatggttaggagactaagtgcacttgagactgtgactgggtgcgaagg

SEQ ID NO: 163561 - DNA, 120 bp, Artificial Sequence
  ENSG00000107816_49 (sequence is synthesized)
actgcggattgttgtggaagcctgtgcccaacaggcctgtgacaccgtgtctgtgtgtgaggtggactggaagattatggaaagaaggaacgcggacccacgtgacggctgagactgcgg

SEQ ID NO: 163562 - DNA, 120 bp, Artificial Sequence
  ENSG00000107816_50 (sequence is synthesized)
ctggagaaggtgaggaccggctcttccttgtgggcctgggtagaacgggagtcctcgcttgggaaactggaatttagaagcttatatagaggaaagagtgtgggctccagattcaccaga

SEQ ID NO: 163563 - DNA, 120 bp, Artificial Sequence
  ENSG00000107816_51 (sequence is synthesized)
cctgggtcctaatcccagctctctctcattctggatgtgtgacctcagggaagtcacttaacctgagcctcagtttctagaactgacatgaaggtcaaataatgtatagcatagtgccta

SEQ ID NO: 163564 - DNA, 120 bp, Artificial Sequence
  ENSG00000107816_52 (sequence is synthesized)
cgggcggcgcgcctgtggagcgctgggggcggcctggggctgagcatggagcagcgcggcggaggtcgcctgcgaggccgctggccaggcctgagcctctgccaccatggccattgtgca

SEQ ID NO: 163565 - DNA, 120 bp, Artificial Sequence
  ENSG00000107819_0 (sequence is synthesized)
attccggcacctcccttaggcgccagggacagccgagcgttacctggtcccgggcagcggagttctttacccaccccagttctggttctgacgccctagctcattccgcaaatttagggc

SEQ ID NO: 163566 - DNA, 120 bp, Artificial Sequence
  ENSG00000107819_1 (sequence is synthesized)
ttgggtctggcttgttcccctccggctcgaaccacctcttctctgagccgagccagctaccggggctcctggaattgccacccctccctgggcacccttgaggcctccgtggagggacgt

SEQ ID NO: 163567 - DNA, 120 bp, Artificial Sequence
  ENSG00000107819_2 (sequence is synthesized)
cacggggcagagcgggacgtgagcctgagtttgctgcaggcgtgctctgtgtggtggctgggttctgccaatccccgtgcccaccgggtgggcgcggccgggaagctcctgcccctccct

SEQ ID NO: 163568 - DNA, 120 bp, Artificial Sequence
  ENSG00000107819_3 (sequence is synthesized)
gctggtcggcgtcacgcgtgacgtcccgcgtgatggctgggagggcccggcggcgacagcggaggcagagaggaaggcggttctgagagcttcagagagcgatggaaagcaaaatgggtg

SEQ ID NO: 163569 - DNA, 120 bp, Artificial Sequence
  ENSG00000107819_4 (sequence is synthesized)
aattgcctttagacatcaacatccaggaacctcgctgggaccaaagtactttcctgggcagagcccggcactttttcactgttactgatcctcgaaatctgctgctgtccggggcacagc

SEQ ID NO: 163570 - DNA, 120 bp, Artificial Sequence
  ENSG00000107819_5 (sequence is synthesized)
tggaagcttctcggaacatcgtgcagaactacagggccggcgtggtgaccccagggatcaccgaggaccagctgtggagggccaagtatgtgtatgactccgccttccatccggacacag

SEQ ID NO: 163571 - DNA, 120 bp, Artificial Sequence
  ENSG00000107819_6 (sequence is synthesized)
gggagaaggtggtcctgattggccgcatgtcagcccaggtgcccatgaacatgaccatcactggctgcatgctcacattctacaggaagaccccaaccgtggtgttctggcagtgggtga

SEQ ID NO: 163572 - DNA, 120 bp, Artificial Sequence
  ENSG00000107819_7 (sequence is synthesized)
atcagtccttcaatgccattgttaactactccaaccgcagtggtgacactcccatcactgtgaggcagctggggacagcctatgtgagtgccaccactggagctgtggccacggccctgg

SEQ ID NO: 163573 - DNA, 120 bp, Artificial Sequence
  ENSG00000107819_8 (sequence is synthesized)
gactcaaatccctcaccaagcacctgccccccttggtcggcagatttgtgccctttgcagcagtggcagctgccaactgcatcaacatccccctgatgaggcagagagagctgcaggtgg

SEQ ID NO: 163574 - DNA, 120 bp, Artificial Sequence
  ENSG00000107819_9 (sequence is synthesized)
gcatcccggtggctgatgaggcaggtcagaggcttggctactcggtgactgcagccaagcagggaatcttccaggtggtgatttcaagaatctgcatggcgattcctgccatggccatcc

SEQ ID NO: 163575 - DNA, 120 bp, Artificial Sequence
  ENSG00000107819_10 (sequence is synthesized)
caccactgatcatggacactctggagaagaaagacttcctgaagcgccgcccctggctgggggcacccctgcaggtgggactggtgggcttctgcctggtatttgcaacccccctgtgct

SEQ ID NO: 163576 - DNA, 120 bp, Artificial Sequence
  ENSG00000107819_11 (sequence is synthesized)
gtgccctattcccccagaagagctccatacacataagcaacctggaaccagagctgagagctcagatccatgagcaaaaccccagcgttgaagtggtctactacaacaaggggctttgag

SEQ ID NO: 163577 - DNA, 120 bp, Artificial Sequence
  ENSG00000107819_12 (sequence is synthesized)
gggccttggtgggcagatggcaattgagggtagcaacctattagggtgggggagggacctccataaggcttttcctcccttctctggtttcaaagatcagagcacataacccctcctgtg

SEQ ID NO: 163578 - DNA, 120 bp, Artificial Sequence
  ENSG00000107819_13 (sequence is synthesized)
cttgagtgtccatgcatatacatacatgatacacatgtgtatgtgtacattgggtcctgaaagctagaagcaggcatgctagcctagtatgttctgacatctggcttcccttctcagcct

SEQ ID NO: 163579 - DNA, 120 bp, Artificial Sequence
  ENSG00000107819_14 (sequence is synthesized)
catgtccacctgcctgccagccaggctacaggtgtgacttccttctctaaactgttacaccagccaagttatttttgatggcacctcatcccttctagaaataggaggagccccaggatc

SEQ ID NO: 163580 - DNA, 120 bp, Artificial Sequence
  ENSG00000107819_15 (sequence is synthesized)
tcaggacagagacttatagacactagtaggacaaagcgggctgaatccttcaggtttctgatacctagctccccaagctgactgggctggcagaggagaacatgttgagacaagggaggc

SEQ ID NO: 163581 - DNA, 120 bp, Artificial Sequence
  ENSG00000107819_16 (sequence is synthesized)
aggggacttatgcatccctcagtgccatcccttgtatcctggaatagctccatttcccctcctcctctctaccagacaaaggagtgcctgtgtcctgtactgccctcgctgtctccccca

SEQ ID NO: 163582 - DNA, 120 bp, Artificial Sequence
  ENSG00000107819_17 (sequence is synthesized)
ccaccctacttgacagcgtgggcatcttcaggcacagccttgggagttcctggtgtgctctgacatcatgacctcaaatctaaatcctccaatcccaactccctttcccaaacaaaaagc

SEQ ID NO: 163583 - DNA, 120 bp, Artificial Sequence
  ENSG00000107819_18 (sequence is synthesized)
cacagaggcagagcaagcattcccctttaagagcttccactgcaccccctcccaagggacacagcggtaggaatggtgcttaaactccacaggtatcagagagggtgtaactaggacatc

SEQ ID NO: 163584 - DNA, 120 bp, Artificial Sequence
  ENSG00000107819_19 (sequence is synthesized)
ctcaagggcagctaggccccgaatgtacaatgttaagacagggaattttgtgttccattgacttttttttttttttttaatggagtttcactattttgcccaggctggagtgcgatggtg

SEQ ID NO: 163585 - DNA, 65 bp, Artificial Sequence
  ENSG00000107819_20 (sequence is synthesized)
tgattctcttgcctcagtctcccgagtagtggaaattacaggtgtgtgctaccacatcttgctag

SEQ ID NO: 163586 - DNA, 120 bp, Artificial Sequence
  ENSG00000107819_21 (sequence is synthesized)
ttccactgacatttcttagacattcagcaaaacccccaccttaacctcttttctttcttgagggttggtcctgtccccacctccaccctcccaccccctggaagaggaagggcccgggca

SEQ ID NO: 163587 - DNA, 120 bp, Artificial Sequence
  ENSG00000107819_22 (sequence is synthesized)
tcagtggctagtccaaataaaatatgggcttggggatggaatgggtggtggtaagttcacagagtgtagttagatcccaactcccatgacctctggcttcagtggtgggtggggcagggc

SEQ ID NO: 163588 - DNA, 120 bp, Artificial Sequence
  ENSG00000107819_23 (sequence is synthesized)
agatgaaagggcttcagtgggaacctctgagagcattttcctgttccccctatcaaccgcccccagtgataacatctgtgaagccagccattactcaataaactgcaaacttgtctactt

SEQ ID NO: 163589 - DNA, 120 bp, Artificial Sequence
  ENSG00000107819_24 (sequence is synthesized)
ctgatgcagaaaccaataaacaaggaggcacccaataaatacattcttagaaagtgtaatatgtgctttgtaggaaagcaatgggggtagtgtaattgagattcatgggggagagctgtt

SEQ ID NO: 163590 - DNA, 120 bp, Artificial Sequence
  ENSG00000107819_25 (sequence is synthesized)
tagataggatgatcagagaaggggtctttaatgccgcaaaggatgaggagagagccaaataacgcagagaagagtgtttggggtacagaaaacagtcagtgcaagggcactgcagtagga

SEQ ID NO: 163591 - DNA, 120 bp, Artificial Sequence
  ENSG00000107819_26 (sequence is synthesized)
ggggcttgcacatttgaggaacaggttggtggtccctgtggccagagcaaattgagaagagtgccgaggaagagatgtgcttggaaagggtcagattcatgccactgggatgggaagagg

SEQ ID NO: 163592 - DNA, 120 bp, Artificial Sequence
  ENSG00000107819_27 (sequence is synthesized)
taagtggaggttcacaggaggtttcctgaagaaatcagctcctggaggaagtgagggaagaaaaaaaagggccagggagtgccatggcaaccaattctgagaggtgagaggtcatgggat

SEQ ID NO: 163593 - DNA, 120 bp, Artificial Sequence
  ENSG00000107819_28 (sequence is synthesized)
gccggggagggtgatcagcagacaggcctggctggagtggaagggcgtgatctggaggtcccagccctgtcattgccttgggagaaagaaaacggccacaggtctaagggctccaaggca

SEQ ID NO: 163594 - DNA, 120 bp, Artificial Sequence
  ENSG00000107819_29 (sequence is synthesized)
aggctgatgggatagagctatggtgggtgaaatggggtgacagtgaggcaggggacacaagccgttccattgtctttctgtctctccacagcgccgcccctggctgggggcacccctgca

SEQ ID NO: 163595 - DNA, 120 bp, Artificial Sequence
  ENSG00000107819_30 (sequence is synthesized)
gtgaccaggccccaactctctctccagcctcgcctgattctctaagacttgccagcccttctcctgacccctgcaccgcctcctccaccttcgttcattcagcaagaatgaactgggctg

SEQ ID NO: 163596 - DNA, 120 bp, Artificial Sequence
  ENSG00000107819_31 (sequence is synthesized)
aggacaaaggaaggaaaccaacttcatcagtgttactccagtggcttctgacacacagaaggggactgtcatagtcatgcttgatctcatgctcattcttttaccccctagtgcctccat

SEQ ID NO: 163597 - DNA, 120 bp, Artificial Sequence
  ENSG00000107819_32 (sequence is synthesized)
actgagaggtacacacgggtgaacacgcacacacagacatgaacaggacacgaaagcaaagcacaggaacaagctctggctcattcacagaatcatttattcacaaatgtattgagtgcc

SEQ ID NO: 163598 - DNA, 120 bp, Artificial Sequence
  ENSG00000107819_33 (sequence is synthesized)
aggaggaggcctggcaggcactccactgattctgggagtgggggaatgacagtgagccagtccttctggcagtagaaggagaggatttttcagcctgggaggaggtgggatggcaatccc

SEQ ID NO: 163599 - DNA, 120 bp, Artificial Sequence
  ENSG00000107821_0 (sequence is synthesized)
ggctgggggaaatgacccgggagggtcccatgcggctacataaaattggcagccttagaactagtgggaaggcgggtgcgcgaagtcgaggggcggagagagggggccggaggagctgct

SEQ ID NO: 163600 - DNA, 120 bp, Artificial Sequence
  ENSG00000107821_1 (sequence is synthesized)
ttctgaatccaagttcgtgggctctctcagaagtcctcaggacggagcagaggtggccggcgggcccggctgactgcgcctctgctttctttccataaccttttctttcggactcgaatc

SEQ ID NO: 163601 - DNA, 120 bp, Artificial Sequence
  ENSG00000107821_2 (sequence is synthesized)
acggctgctgcgaagggtctagttccggacactagggtgcccgaacgcgctgatgccccgagtgctcgcagggcttcccgctaaccatgctgccgccgccgcggcccgcagctgccttgg

SEQ ID NO: 163602 - DNA, 120 bp, Artificial Sequence
  ENSG00000107821_3 (sequence is synthesized)
cgctgcctgtgctcctgctactgctggtggtgctgacgccgcccccgaccggcgcaaggccatccccaggcccagattacctgcggcgcggctggatgcggctgctagcggagggcgagg

SEQ ID NO: 163603 - DNA, 120 bp, Artificial Sequence
  ENSG00000107821_4 (sequence is synthesized)
gctgcgctccctgccggccagaagagtgcgccgcgccgcggggctgcctggcgggcagggtgcgcgacgcgtgcggctgctgctgggaatgcgccaacctcgagggccagctctgcgacc

SEQ ID NO: 163604 - DNA, 120 bp, Artificial Sequence
  ENSG00000107821_5 (sequence is synthesized)
tggaccccagtgctcacttctacgggcactgcggcgagcagcttgagtgccggctggacacaggcggcgacctgagccgcggagaggtgccggaacctctgtgtgcctgtcgttcgcaga

SEQ ID NO: 163605 - DNA, 120 bp, Artificial Sequence
  ENSG00000107821_6 (sequence is synthesized)
gtccgctctgcgggtccgacggtcacacctactcccagatctgccgcctgcaggaggcggcccgcgctcggcccgatgccaacctcactgtggcacacccggggccctgcgaatcggggc

SEQ ID NO: 163606 - DNA, 120 bp, Artificial Sequence
  ENSG00000107821_7 (sequence is synthesized)
ttggacatccagctgccaggggatgacccccacatctctgtgcagtttaggggtggaccccagaggtttgaggtgactggctggctgcagatccaggctgtgcgtcccagtgatgagggc

SEQ ID NO: 163607 - DNA, 120 bp, Artificial Sequence
  ENSG00000107821_8 (sequence is synthesized)
acttaccgctgccttggccgcaatgccctgggtcaagtggaggcccctgctagcttgacagtgctcacacctgaccagctgaactctacaggcatcccccagctgcgatcactaaacctg

SEQ ID NO: 163608 - DNA, 120 bp, Artificial Sequence
  ENSG00000107821_9 (sequence is synthesized)
gttcctgaggaggaggctgagagtgaagagaatgacgattactactaggtccagagctctggcccatgggggtgggtgagcggctatagtgttcatccctgctcttgaaaagacctggaa

SEQ ID NO: 163609 - DNA, 120 bp, Artificial Sequence
  ENSG00000107821_10 (sequence is synthesized)
aggggagcagggtcccttcatcgactgctttcatgctgtcagtagggatgatcatgggaggcctatttgactccaaggtagcagtgtggtaggatagagacaaaagctggaggagggtag

SEQ ID NO: 163610 - DNA, 120 bp, Artificial Sequence
  ENSG00000107821_11 (sequence is synthesized)
ggagagaagctgagaccaggaccggtggggtacaaaggggcccatgcaggagatgccctggccagtaggacctccaacaggttgtttcccaggctggggtgggggcctgagcagacacag

SEQ ID NO: 163611 - DNA, 120 bp, Artificial Sequence
  ENSG00000107821_12 (sequence is synthesized)
aggtgcaggcaccaggattctccacttcttccagccctgctgggccacagttctaactgcccttcctcccaggccctggttcttgctatttcctggtccccaacgtttatctagcttgtt

SEQ ID NO: 163612 - DNA, 120 bp, Artificial Sequence
  ENSG00000107821_13 (sequence is synthesized)
tgccctttccccaaactcatcttccagaacttttccctctctcctaagccccagttgcacctactaactgcagtcccttttgctgtctgccgtcttttgtacaagagagagaacagcgga

SEQ ID NO: 163613 - DNA, 120 bp, Artificial Sequence
  ENSG00000107821_14 (sequence is synthesized)
gcatgacttagttcagtgcagagagataggtgaggccagctcgagatcttataccactctgtattggacaaaggctagcacagggctaggcaccaataaagatttctaatgatgcacaga

SEQ ID NO: 163614 - DNA, 120 bp, Artificial Sequence
  ENSG00000107821_15 (sequence is synthesized)
actgctggcttgccccgggtccttaagccagcgacagtttttattgccgaacccaggctggaagcgggcggccctaggagccgcgcacaacagcgcaagcgggctggataccgggagccg

SEQ ID NO: 163615 - DNA, 120 bp, Artificial Sequence
  ENSG00000107821_16 (sequence is synthesized)
attccagggcgcccacagaagcagaatcagaggggtaggcgggggtggggcgtgctgttcggcgctgtggccaaaatccgcccggcgctgaaagaggggacgtgggtgtgagtcccagca

SEQ ID NO: 163616 - DNA, 120 bp, Artificial Sequence
  ENSG00000107821_17 (sequence is synthesized)
cccatagctcctaccgcgtccacctgcagagcagaggctcctcaccaaaagccccaccccaccggagagggtcacgcaggtcccggggaatccgcactccttaatcgcgttagccgactt

SEQ ID NO: 163617 - DNA, 120 bp, Artificial Sequence
  ENSG00000107821_18 (sequence is synthesized)
tgtaggtgttcaggagcagcctcctagcagcctcagttttcccctccccgccctgctggttcaagcaccacagcctggaatgggagaactgttgtccaccgccccctccctccccgcacc

SEQ ID NO: 163618 - DNA, 120 bp, Artificial Sequence
  ENSG00000107821_19 (sequence is synthesized)
ccgcctctgctgcagcggacccgctttaataatgtcgctggaaagtgacacgcgatttattattaaagtaatgcgggcgcagggacgggaaaggtttaataaacgtgctgagatgccgag

SEQ ID NO: 163619 - DNA, 120 bp, Artificial Sequence
  ENSG00000107821_20 (sequence is synthesized)
aatcagaggggttgctcacacccgagatgtgaggttccaggagcgccgacccagagttgccaggcctgaaggcgggagaggctcagtcgcaccctacatttcccacctccaagattttaa

SEQ ID NO: 163620 - DNA, 120 bp, Artificial Sequence
  ENSG00000107821_21 (sequence is synthesized)
gtatagttcgcttgaaatccctggaatgcgctttcttctggctcctacccggagatccggagtccggacaaaccggggcaggaagggtccgtcggaccagctcctcccaagccgaggctt

SEQ ID NO: 163621 - DNA, 120 bp, Artificial Sequence
  ENSG00000107821_22 (sequence is synthesized)
cctctctcctccatctagagcagggtgtgaagaggaagccagagggggctgtctgaaaatgaccctgaccccctcctcgggctgtcgtgaggaggagggccgcttcgcccggctgctcgt

SEQ ID NO: 163622 - DNA, 120 bp, Artificial Sequence
  ENSG00000107821_23 (sequence is synthesized)
caccgcgaaggctccaaagaagtgttgcgcagccgtgctggtataactgagggtgtcctggcgaagcccagcccctggcgccctggtgaccgggggggtcgatgtgcggactgggcagaa

SEQ ID NO: 163623 - DNA, 120 bp, Artificial Sequence
  ENSG00000107821_24 (sequence is synthesized)
ctggagcccgaagctggagagcgcccctcaaaaagaagcctggaagcccgagagatgaacccgactcagagagggccaagactgcagaccttggggaccgaggacaccctcaccacgctg

SEQ ID NO: 163624 - DNA, 120 bp, Artificial Sequence
  ENSG00000107821_25 (sequence is synthesized)
gtgggggctggggggatggcgcgggcggtggcgtgcggggaagcgcctggggaacacctggctctgcaagttttgtgccttagcggaaagaggcgacatctctggcaagttgggagtaca

SEQ ID NO: 163625 - DNA, 120 bp, Artificial Sequence
  ENSG00000107821_26 (sequence is synthesized)
ggaagtagcgaaggagtgccatctggtggatccttctggtagtgacactcagacctgggccaggggccttgagacaatttacttgactggaaaaatctgaataaaaaaaagatgcttcaa

SEQ ID NO: 163626 - DNA, 120 bp, Artificial Sequence
  ENSG00000107821_27 (sequence is synthesized)
catgctattctcagacctcccgccttcacccccagggccccagatcgtgtcacatccatatgacacttggaatgtgacagggcaggatgtgatctttggctgtgaagtgtttgcctaccc

SEQ ID NO: 163627 - DNA, 120 bp, Artificial Sequence
  ENSG00000107821_28 (sequence is synthesized)
ggagcagaggtggccggcgggcccggctgactgcgcctctgctttctttccataaccttttctttcggactcgaatcacggctgctgcgaagggtctagttccggacactagactggatg

SEQ ID NO: 163628 - DNA, 80 bp, Artificial Sequence
  ENSG00000107829_0 (sequence is synthesized)
cgctcatgggcagccagggccgctcggggccccccgggaacggcgggcccggcgagggcgagggcggagaggcgaggaag

SEQ ID NO: 163629 - DNA, 120 bp, Artificial Sequence
  ENSG00000107829_1 (sequence is synthesized)
agggcggagaggcgaggaagctgcaggaagggagggtggcgagggggaagcgaaggaaggggaaggggaagggaaaagcgagagcggggcaaggcggaagaggaagcggggcggaaggga

SEQ ID NO: 163630 - DNA, 120 bp, Artificial Sequence
  ENSG00000107829_2 (sequence is synthesized)
agcccgggccgcagacggcgaaggaggcagccgggccgggggctgacgcgggagcgagggcatgcccaagggaggaagcagagggaggcagaagcgtggaggaaggggcgagaggcatcg

SEQ ID NO: 163631 - DNA, 120 bp, Artificial Sequence
  ENSG00000107829_3 (sequence is synthesized)
tcaagggagtcgaggggagcgcaggggccgggaaggaggcacaaggaagagagtatgggaagaaggaggaatggagggtcagggctaggcggcgggagggcgccaggccgggaagagcac

SEQ ID NO: 163632 - DNA, 120 bp, Artificial Sequence
  ENSG00000107829_4 (sequence is synthesized)
gcacagggacgagggggtcaggcttgggccgacatcgcggggacaggggtggccatggcggcggcggccggggaggaggaggaggaggaggaggcggctcgggagtcggctgcccgcccg

SEQ ID NO: 163633 - DNA, 120 bp, Artificial Sequence
  ENSG00000107829_5 (sequence is synthesized)
cggggcctgcgctctggcgcctgccggaggagctgctgctgctcatctgctcctacctggacatgcgggccctcggccgcctggcccaggtgtgccgctggctgcggcgcttcaccagct

SEQ ID NO: 163634 - DNA, 120 bp, Artificial Sequence
  ENSG00000107829_6 (sequence is synthesized)
gcgatctgctctggcgccggatagcccgggcctcgctcaactccggcttcacgcggctcggcaccgacctgatgaccagtgtcccagtgaaggaacgagtgaaggtgtctcagaactgga

SEQ ID NO: 163635 - DNA, 120 bp, Artificial Sequence
  ENSG00000107829_7 (sequence is synthesized)
gactggggcgctgccgagaggggattctgctgaagtggagatgcagtcagatgccctggatgcagctagaggatgattctctgtacatatcccaggctaatttcatcctggcctaccagt

SEQ ID NO: 163636 - DNA, 120 bp, Artificial Sequence
  ENSG00000107829_8 (sequence is synthesized)
tccgtccagatggtgccagcttgaatcgtcggcctctgggagtctttgctgggcatgatgaggacgtttgccactttgtgctggccaactcgcatattgttagtgcaggaggggatggga

SEQ ID NO: 163637 - DNA, 120 bp, Artificial Sequence
  ENSG00000107829_9 (sequence is synthesized)
ggacggccaaggtgtggcctttggcctcaggccggctggggcagtgcttacacaccatccagactgaagaccgagtctggtccattgctatcagcccattactcagctcttttgtgacag

SEQ ID NO: 163638 - DNA, 120 bp, Artificial Sequence
  ENSG00000107829_10 (sequence is synthesized)
ggacggcttgttgcgggcacttctcacccctgagaatctgggacctcaacagtgggcagctgatgacacacttgggcagtgactttcccccaggggctggggtgctggatgtcatgtatg

SEQ ID NO: 163639 - DNA, 120 bp, Artificial Sequence
  ENSG00000107829_11 (sequence is synthesized)
agtcccctttcacactgctgtcctgtggctatgacacctatgttcgctactgggacctccgcaccagcgtccggaaatgtgtcatggagtgggaggagccccacgacagcaccctgtact

SEQ ID NO: 163640 - DNA, 120 bp, Artificial Sequence
  ENSG00000107829_12 (sequence is synthesized)
gcctgcagacagatggcaaccacctgctggccacaggttcctcctactacggtgttgtacggctgtgggaccggcgtcaaagggcctgcctgcacgccttcccgctgacgtcgactcccc

SEQ ID NO: 163641 - DNA, 120 bp, Artificial Sequence
  ENSG00000107829_13 (sequence is synthesized)
tcagcagccctgtgtactgcctgcgtctcaccaccaagcatctctatgctgccctgtcttacaacctccacgtcctggattttcaaaacccatgaccgtcagggccacccctgcctctgg

SEQ ID NO: 163642 - DNA, 120 bp, Artificial Sequence
  ENSG00000107829_14 (sequence is synthesized)
gccagggaaaccagctactcagggacttctcttgcctggagggtgcagtgatagctcctcctcactgccccactgtgctcctgggcctgtgaccccagtgctcaggcaccttgcactaga

SEQ ID NO: 163643 - DNA, 120 bp, Artificial Sequence
  ENSG00000107829_15 (sequence is synthesized)
ggcttctgactcctgggactttggagcttaccagagatgcagtccctcccaggaacctgttggagaggcaggacctgctgctttagagtgcggctgaacccgggccttgcgtccctgttt

SEQ ID NO: 163644 - DNA, 120 bp, Artificial Sequence
  ENSG00000107829_16 (sequence is synthesized)
ggccagagcaaggatctggcctggagaggcccatcctataccccttattagagccatgacagcctacagagtgaggtgaggtgctcccaccttcccagatggttcctttctgccccttcc

SEQ ID NO: 163645 - DNA, 120 bp, Artificial Sequence
  ENSG00000107829_17 (sequence is synthesized)
tggaaggaaaggtgaggctgccaatagcctcctggcaccagccagacctcacccttgaccaacctctcggggctgggggttcattcctggggcactgtggcctggttttgctttgaaacc

SEQ ID NO: 163646 - DNA, 120 bp, Artificial Sequence
  ENSG00000107829_18 (sequence is synthesized)
aagaaagagcaaagggaacccagcagttctgagtgagttctgagccagccctacctcaggctggctgttgagacatgctacaattttcatttttgtaaaaataaagcttgattgttcaca

SEQ ID NO: 163647 - DNA, 120 bp, Artificial Sequence
  ENSG00000107829_19 (sequence is synthesized)
cagctctgatctccagcaggattaaagttgctcccctctctattgatttaccttgatgctaatttaggcctgtggccagtcagaggcctgccataggccttaagagatgcctggccgggc

SEQ ID NO: 163648 - DNA, 87 bp, Artificial Sequence
  ENSG00000107829_20 (sequence is synthesized)
cagaggcctgccataggccttaagagatgcctggccgggcgcgttggctcacgcctgtaattccagcactttcaatcgagaccagac

SEQ ID NO: 163649 - DNA, 120 bp, Artificial Sequence
  ENSG00000107829_21 (sequence is synthesized)
ccagcctggtgacagagggagattcctctcaaaaaaaaaagagatgcctgtgtctgtgctggcgcccttcacctggcccccactcctcaaatctggagagtccaattgcctgctcgaatg

SEQ ID NO: 163650 - DNA, 120 bp, Artificial Sequence
  ENSG00000107829_22 (sequence is synthesized)
atttccaagtggctattatgtttccagcccaaggtaattggctttaccagttattaatggattaccctaaatagaaaaatgtttggggagggaggagagggcaacacctcctgactttgt

SEQ ID NO: 163651 - DNA, 120 bp, Artificial Sequence
  ENSG00000107829_23 (sequence is synthesized)
agtttggttcttcagtatccactggctgcttcccaggctggcagtcacttggggcatggcacagtgactgttttggcactcccactctatagtttagtggctgctggcagccttgaagaa

SEQ ID NO: 163652 - DNA, 120 bp, Artificial Sequence
  ENSG00000107829_24 (sequence is synthesized)
gctaggatgatggggcatgtccctggaggaagtcttggcttgagtcatgaaagccccaggatagctcgtatggcctttttatcagcctagggctgaagagcagacacctgccctgcaatt

SEQ ID NO: 163653 - DNA, 120 bp, Artificial Sequence
  ENSG00000107829_25 (sequence is synthesized)
tttattgtaaatcagtggtttggccagtgcctgccctaacatctcccccatcagcaactggcaggccaacctccccaccccagccaaagccactggcttctccagggccctctctgtgga

SEQ ID NO: 163654 - DNA, 120 bp, Artificial Sequence
  ENSG00000107829_26 (sequence is synthesized)
aatccatctcctcactgacatgcttgggatcagaggagccacaggtgctgggctgggccacagcagatgggctgttgcccccacattgctaatgtgttattagtatgtccagtcttcctt

SEQ ID NO: 163655 - DNA, 120 bp, Artificial Sequence
  ENSG00000107829_27 (sequence is synthesized)
cccccccatgaaagacatgcagggacatggcccattcctaacaccactgctttcaacttgcttgcttgctgtttaagtttcaagcccaggtttcctgaaggcttcccctctccaccctac

SEQ ID NO: 163656 - DNA, 120 bp, Artificial Sequence
  ENSG00000107829_28 (sequence is synthesized)
caaatcctctaacaagagttgtctggctcataggttcaagttctaggccagcactacagccagcctggcccactgcgtggatcctttataccaggcttgtgcctccatttaaagtgagac

SEQ ID NO: 163657 - DNA, 120 bp, Artificial Sequence
  ENSG00000107829_29 (sequence is synthesized)
tctgcagattgtatatgttgaggtttttagggctctaaagggacactctgggcaacagggtcagcctgctccttctcgtgtgcctctcggcgttgtttgttattggcctcagaggactct

SEQ ID NO: 163658 - DNA, 120 bp, Artificial Sequence
  ENSG00000107829_30 (sequence is synthesized)
ggcggactcccatcccactctccagaagccctggctgcctggcttctggggactccgccccacctatgtagtagcatatacccatccaagggattcactcatctttcatattttttcctt

SEQ ID NO: 163659 - DNA, 120 bp, Artificial Sequence
  ENSG00000107829_31 (sequence is synthesized)
taaaaccttcaggaatgcccctcagctgctcctacttctgaccacgggcagcaccttccagccccagcaacctgttccctggagcccttttctgtgccctgccattgtgctcttgggatt

SEQ ID NO: 163660 - DNA, 120 bp, Artificial Sequence
  ENSG00000107829_32 (sequence is synthesized)
cctaaacaggagcccgacaggctcgctctctcctgggctcaaacttgtcacgtctagagatctgtttttatggtgtgcagagaccactcaacctagtctgtgcagcaggcccagctgtgg

SEQ ID NO: 163661 - DNA, 120 bp, Artificial Sequence
  ENSG00000107829_33 (sequence is synthesized)
ctgagctcgtgggtcttctggccaggcaccactgggggctacacccctcacagtgctccaagatgtcttcccacagctcctctgatggctcccttggccacttctctcattctggcttaa

SEQ ID NO: 163662 - DNA, 120 bp, Artificial Sequence
  ENSG00000107829_34 (sequence is synthesized)
gagggtggggggagcaggctggagccccacaggctgggggctgtgatcacggaggcgtgctagccccgggctgggggccagctagaccaggaacaccagggacagctcgctaagctgctt

SEQ ID NO: 163663 - DNA, 120 bp, Artificial Sequence
  ENSG00000107829_35 (sequence is synthesized)
tttcccaatctggacatccagtggttccaggattgtcatgcattctccattagattgctttggcatcactgtgaacatttttgatagtttaaaggacaggcttttctccttggctttctt

SEQ ID NO: 163664 - DNA, 120 bp, Artificial Sequence
  ENSG00000107829_36 (sequence is synthesized)
agtcaagtatggagagagaacagttactccttcctggtctcctaatctctttacttgtattctggatgctcctgaatcctgactcagtaagcccatgaaattttctgtggttggcaataa

SEQ ID NO: 163665 - DNA, 120 bp, Artificial Sequence
  ENSG00000107831_0 (sequence is synthesized)
cggcccgcgggacggcgtgacccgccgggctctcggtgccccggggccgcgcgccatgggcagcccccgctccgcgctgagctgcctgctgttgcacttgctggtcctctgcctccaagc

SEQ ID NO: 163666 - DNA, 120 bp, Artificial Sequence
  ENSG00000107831_1 (sequence is synthesized)
aagcccaggaaggcccgggcaggggccctgcgctgggcagggagctcgcttccctgttccgggctggccgggagccccagggtgtctcccaacaggtaactgttcagtcctcacctaatt

SEQ ID NO: 163667 - DNA, 120 bp, Artificial Sequence
  ENSG00000107831_2 (sequence is synthesized)
ttacacagcatgtgagggagcagagcctggtgacggatcagctcagccgccgcctcatccggacctaccaactctacagccgcaccagcgggaagcacgtgcaggtcctggccaacaagc

SEQ ID NO: 163668 - DNA, 120 bp, Artificial Sequence
  ENSG00000107831_3 (sequence is synthesized)
agtccgaggagccgagacgggcctctacatctgcatgaacaagaaggggaagctgatcgccaagagcaacggcaaaggcaaggactgcgtcttcacggagattgtgctggagaacaacta

SEQ ID NO: 163669 - DNA, 120 bp, Artificial Sequence
  ENSG00000107831_4 (sequence is synthesized)
cacagcgctgcagaatgccaagtacgagggctggtacatggccttcacccgcaagggccggccccgcaagggctccaagacgcggcagcaccagcgtgaggtccacttcatgaagcggct

SEQ ID NO: 163670 - DNA, 120 bp, Artificial Sequence
  ENSG00000107831_5 (sequence is synthesized)
gccccggggccaccacaccaccgagcagagcctgcgcttcgagttcctcaactacccgcccttcacgcgcagcctgcgcggcagccagaggacttgggcccccgagccccgataggtgct

SEQ ID NO: 163671 - DNA, 120 bp, Artificial Sequence
  ENSG00000107831_6 (sequence is synthesized)
gccaccggctccggcagcggcgcacagcgattcggtgcggcgcggcgagcacgacgttccacgggacccgcggagccgcgtcgtgatcgccgccggcctcccgcacccgcaccctctccg

SEQ ID NO: 163672 - DNA, 120 bp, Artificial Sequence
  ENSG00000107831_7 (sequence is synthesized)
aactcaagcaagatgagctgtgcgctgctctgcaggctggggaggtgctgggggagccctgggttccggttgttgatattgtttgctgttgggtttttgctgtttttttttttttttttt

SEQ ID NO: 163673 - DNA, 120 bp, Artificial Sequence
  ENSG00000107833_0 (sequence is synthesized)
agtttgaagaaggctcttacagcatggccgccggtactgcagctgccttagcgtttttgagtcaggagagccgaacgcgggccgggggtgtcgggggcctacgggtcccggccccggtca

SEQ ID NO: 163674 - DNA, 120 bp, Artificial Sequence
  ENSG00000107833_1 (sequence is synthesized)
ctatggacagttttttcttcggctgtgagctctccggccacacccgctccttcacctttaaggtagaggaagaggatgatgcggagcacgtgctggcactaaccatgctctgcctcaccg

SEQ ID NO: 163675 - DNA, 120 bp, Artificial Sequence
  ENSG00000107833_2 (sequence is synthesized)
agggagccaaagacgagtgtaatgtggtagaagttgtggcccggaaccatgaccatcaggagatcgcagtccctgtggccaacctcaagctgtcctgccaacccatgctcagtctggatg

SEQ ID NO: 163676 - DNA, 120 bp, Artificial Sequence
  ENSG00000107833_3 (sequence is synthesized)
gtcgggctctggccctgtgcggatcactgggcggcaccagattgttacgatgagcaatgatgtttctgaggaggagagcgaggaagaggaagaggacagtgatgaggaagaagttgagct

SEQ ID NO: 163677 - DNA, 120 bp, Artificial Sequence
  ENSG00000107833_4 (sequence is synthesized)
gtgccccatccttcctgccaaaaagcaggggggcaggccctagccctcctaggtcagctccatgtgccatgcaccgccatgcaccctgttccctgacaagtttcaacaattgtaaatatt

SEQ ID NO: 163678 - DNA, 120 bp, Artificial Sequence
  ENSG00000107833_5 (sequence is synthesized)
tcttccttgaagaggagagcttgggtgggggttgggtgggagggacttgggtctttggtgctaggagagggcctgtgctccacacagccgtggttttctgattttcaccatgcccggggc

SEQ ID NO: 163679 - DNA, 120 bp, Artificial Sequence
  ENSG00000107833_6 (sequence is synthesized)
ctcccttcccacctgcctgtgagaattggaggttagtgcctgaagctcagagctacacatttttaatagtttttacatttttggataaaggttgaaataaagtggtgtggagtttttgca

SEQ ID NO: 163680 - DNA, 120 bp, Artificial Sequence
  ENSG00000107833_7 (sequence is synthesized)
gccggtactgcagctgccttagcgtttttgagtcaggagagccgaacgcgggccgggggtgtcgggggcctacgggtcccggccccggtcactatggacagttttttcttcgctctgcct

SEQ ID NO: 163681 - DNA, 80 bp, Artificial Sequence
  ENSG00000107854_0 (sequence is synthesized)
agcttccgccgccgcgtcgtttcaggacccggacggcggattcgcgctgcctccgccgccgcggggcagccggggggcag

SEQ ID NO: 163682 - DNA, 120 bp, Artificial Sequence
  ENSG00000107854_1 (sequence is synthesized)
tgcgccggatccggtgacagcagggagccaagcggcccgggccctgagcgcgtcttctccggggggcctcgccctcctgctcgcggggccggggctcctgctccggttgctggcgctgtt

SEQ ID NO: 163683 - DNA, 120 bp, Artificial Sequence
  ENSG00000107854_2 (sequence is synthesized)
ggatcatgtcgggtcgccgctgcgccggcgggggagcggcctgcgcgagcgccgcggccgaggccgtggagccggccgcccgagagctgttcgaggcgtgccgcaacggggacgtggaac

SEQ ID NO: 163684 - DNA, 120 bp, Artificial Sequence
  ENSG00000107854_3 (sequence is synthesized)
ccgcaacggggacgtggaacgagtcaagaggctggtgacgcctgagaaggtgaacagccgcgacacggcgggcaggaaatccaccccgctgcacttcgccgcaggttttgggcggaaaga

SEQ ID NO: 163685 - DNA, 120 bp, Artificial Sequence
  ENSG00000107854_4 (sequence is synthesized)
cgtagttgaatatttgcttcagaatggtgcaaatgtccaagcacgtgatgatgggggccttattcctcttcataatgcatgctcttttggtcatgctgaagtagtcaatctccttttgcg

SEQ ID NO: 163686 - DNA, 120 bp, Artificial Sequence
  ENSG00000107854_5 (sequence is synthesized)
acatggtgcagaccccaatgctcgagataattggaattatactcctctccatgaagctgcaattaaaggaaagattgatgtttgcattgtgctgttacagcatggagctgagccaaccat

SEQ ID NO: 163687 - DNA, 120 bp, Artificial Sequence
  ENSG00000107854_6 (sequence is synthesized)
ccgaaatacagatggaaggacagcattggatttagcagatccatctgccaaagcagtgcttactggtgaatataagaaagatgaactcttagaaagtgccaggagtggcaatgaagaaaa

SEQ ID NO: 163688 - DNA, 120 bp, Artificial Sequence
  ENSG00000107854_7 (sequence is synthesized)
aatgatggctctactcacaccattaaatgtcaactgccacgcaagtgatggcagaaagtcaactccattacatttggcagcaggatataacagagtaaagattgtacagctgttactgca

SEQ ID NO: 163689 - DNA, 120 bp, Artificial Sequence
  ENSG00000107854_8 (sequence is synthesized)
acatggagctgatgtccatgctaaagataaaggtgatctggtaccattacacaatgcctgttcttatggtcattatgaagtaactgaacttttggtcaagcatggtgcctgtgtaaatgc

SEQ ID NO: 163690 - DNA, 120 bp, Artificial Sequence
  ENSG00000107854_9 (sequence is synthesized)
aatggacttgtggcaattcactcctcttcatgaggcagcttctaagaacagggttgaagtatgttctcttctcttaagttatggtgcagacccaacactgctcaattgtcacaataaaag

SEQ ID NO: 163691 - DNA, 120 bp, Artificial Sequence
  ENSG00000107854_10 (sequence is synthesized)
tgctatagacttggctcccacaccacagttaaaagaaagattagcatatgaatttaaaggccactcgttgctgcaagctgcacgagaagctgatgttactcgaatcaaaaaacatctctc

SEQ ID NO: 163692 - DNA, 120 bp, Artificial Sequence
  ENSG00000107854_11 (sequence is synthesized)
tctggaaatggtgaatttcaagcatcctcaaacacatgaaacagcattgcattgtgctgctgcatctccatatcccaaaagaaagcaaatatgtgaactgttgctaagaaaaggagcaaa

SEQ ID NO: 163693 - DNA, 120 bp, Artificial Sequence
  ENSG00000107854_12 (sequence is synthesized)
catcaatgaaaagactaaagaattcttgactcctctgcacgtggcatctgagaaagctcataatgatgttgttgaagtagtggtgaaacatgaagcaaaggttaatgctctggataatct

SEQ ID NO: 163694 - DNA, 120 bp, Artificial Sequence
  ENSG00000107854_13 (sequence is synthesized)
tggtcagacttctctacacagagctgcatattgtggtcatctacaaacctgccgcctactcctgagctatgggtgtgatcctaacattatatcccttcagggctttactgctttacagat

SEQ ID NO: 163695 - DNA, 120 bp, Artificial Sequence
  ENSG00000107854_14 (sequence is synthesized)
gggaaatgaaaatgtacagcaactcctccaagagggtatctcattaggtaattcagaggcagacagacaattgctggaagctgcaaaggctggagatgtcgaaactgtaaaaaaactgtg

SEQ ID NO: 163696 - DNA, 120 bp, Artificial Sequence
  ENSG00000107854_15 (sequence is synthesized)
tactgttcagagtgtcaactgcagagacattgaagggcgtcagtctacaccacttcattttgcagctgggtataacagagtgtccgtggtggaatatctgctacagcatggagctgatgt

SEQ ID NO: 163697 - DNA, 120 bp, Artificial Sequence
  ENSG00000107854_16 (sequence is synthesized)
gcatgctaaagataaaggaggccttgtacctttgcacaatgcatgttcttatggacattatgaagttgcagaacttcttgttaaacatggagcagtagttaatgtagctgatttatggaa

SEQ ID NO: 163698 - DNA, 120 bp, Artificial Sequence
  ENSG00000107854_17 (sequence is synthesized)
atttacacctttacatgaagcagcagcaaaaggaaaatatgaaatttgcaaacttctgctccagcatggtgcagaccctacaaaaaaaaacagggatggaaatactcctttggatcttgt

SEQ ID NO: 163699 - DNA, 120 bp, Artificial Sequence
  ENSG00000107854_18 (sequence is synthesized)
taaagatggagatacagatattcaagatctgcttaggggagatgcagctttgctagatgctgccaagaagggttgtttagccagagtgaagaagttgtcttctcctgataatgtaaattg

SEQ ID NO: 163700 - DNA, 120 bp, Artificial Sequence
  ENSG00000107854_19 (sequence is synthesized)
ccgcgatacccaaggcagacattcaacacctttacatttagcagctggttataataatttagaagttgcagagtatttgttacaacacggagctgatgtgaatgcccaagacaaaggagg

SEQ ID NO: 163701 - DNA, 120 bp, Artificial Sequence
  ENSG00000107854_20 (sequence is synthesized)
acttattcctttacataatgcagcatcttacgggcatgtagatgtagcagctctactaataaagtataatgcatgtgtcaatgccacggacaaatgggctttcacacctttgcacgaagc

SEQ ID NO: 163702 - DNA, 120 bp, Artificial Sequence
  ENSG00000107854_21 (sequence is synthesized)
agcccaaaagggacgaacacagctttgtgctttgttgctagcccatggagctgacccgactcttaaaaatcaggaaggacaaacacctttagatttagtttcagcggatgatgtcagcgc

SEQ ID NO: 163703 - DNA, 120 bp, Artificial Sequence
  ENSG00000107854_22 (sequence is synthesized)
tcttctgacagcagccatgcccccatctgctctgccctcttgttacaagcctcaagtgctcaatggtgtgagaagcccaggagccactgcagatgctctctcttcaggtccatctagccc

SEQ ID NO: 163704 - DNA, 120 bp, Artificial Sequence
  ENSG00000107854_23 (sequence is synthesized)
atcaagcctttctgcagccagcagtcttgacaacttatctgggagtttttcagaactgtcttcagtagttagttcaagtggaacagagggtgcttccagtttggagaaaaaggaggttcc

SEQ ID NO: 163705 - DNA, 120 bp, Artificial Sequence
  ENSG00000107854_24 (sequence is synthesized)
aggagtagattttagcataactcaattcgtaaggaatcttggacttgagcacctaatggatatatttgagagagaacagatcactttggatgtattagttgagatggggcacaaggagct

SEQ ID NO: 163706 - DNA, 120 bp, Artificial Sequence
  ENSG00000107854_25 (sequence is synthesized)
gaaggagattggaatcaatgcttatggacataggcacaaactaattaaaggagtcgagagacttatctccggacaacaaggtcttaacccatatttaactttgaacacctctggtagtgg

SEQ ID NO: 163707 - DNA, 120 bp, Artificial Sequence
  ENSG00000107854_26 (sequence is synthesized)
caattcttatagatctgtctcctgatgataaagagtttcagtctgtggaggaagagatgcaaagtacagttcgagagcacagagatggaggtcatgcaggtggaatcttcaacagataca

SEQ ID NO: 163708 - DNA, 120 bp, Artificial Sequence
  ENSG00000107854_27 (sequence is synthesized)
atattctcaagattcagaaggtttgtaacaagaaactatgggaaagatacactcaccggagaaaagaagtttctgaagaaaaccacaaccatgccaatgaacgaatgctatttcatgggt

SEQ ID NO: 163709 - DNA, 120 bp, Artificial Sequence
  ENSG00000107854_28 (sequence is synthesized)
ctccttttgtgaatgcaattatccacaaaggctttgatgaaaggcatgcgtacataggtggtatgtttggagctggcatttattttgctgaaaactcttccaaaagcaatcaatatgtat

SEQ ID NO: 163710 - DNA, 120 bp, Artificial Sequence
  ENSG00000107854_29 (sequence is synthesized)
atggaattggaggaggtactgggtgtccagttcacaaagacagatcttgttacatttgccacaggcagctgctcttttgccgggtaaccttgggaaagtctttcctgcagttcagtgcaa

SEQ ID NO: 163711 - DNA, 120 bp, Artificial Sequence
  ENSG00000107854_30 (sequence is synthesized)
tgaaaatggcacattctcctccaggtcatcactcagtcactggtaggcccagtgtaaatggcctagcattagctgaatatgttatttacagaggagaacaggcttatcctgagtatttaa

SEQ ID NO: 163712 - DNA, 120 bp, Artificial Sequence
  ENSG00000107854_31 (sequence is synthesized)
ttacttaccagattatgaggcctgaaggtatggtcgatggataaatagttattttaagaaactaattccactgaacctaaaatcatcaaagcagcagtggcctctacgttttactccttt

SEQ ID NO: 163713 - DNA, 120 bp, Artificial Sequence
  ENSG00000107854_32 (sequence is synthesized)
gctgaaaaaaaatcatcttgcccacaggcctgtggcaaaaggataaaaatgtgaacgaagtttaacattctgacttgataaagctttaataatgtacagtgttttctaaatatttcctgt

SEQ ID NO: 163714 - DNA, 120 bp, Artificial Sequence
  ENSG00000107854_33 (sequence is synthesized)
tttttcagcactttaacagatgccattccaggttaaactgggttgtctgtactaaattataaacagagttaacttgaaccttttatatgttatgcattgattctaacaaactgtaatgcc

SEQ ID NO: 163715 - DNA, 120 bp, Artificial Sequence
  ENSG00000107854_34 (sequence is synthesized)
ctcaacagaactaattttactaatacaatactgtgttctttaaaacacagcatttacactgaatacaatttcatttgtaaaactgtaaataagagcttttgtactagcccagtatttatt

SEQ ID NO: 163716 - DNA, 120 bp, Artificial Sequence
  ENSG00000107854_35 (sequence is synthesized)
tacattgctttgtaatataaatctgttttagaactgcagcggtttacaaaattttttcatatgtattgttcatctatacttcatcttacatcgtcatgattgagtgatctttacatttga

SEQ ID NO: 163717 - DNA, 120 bp, Artificial Sequence
  ENSG00000107854_36 (sequence is synthesized)
ttccagaggctatgttcagttgttagttgggaaagattgagttatcagatttaatttgccgatgggagcctttatctgtcattagaaatctttctcatttaagaacttatgaatatgctg

SEQ ID NO: 163718 - DNA, 120 bp, Artificial Sequence
  ENSG00000107854_37 (sequence is synthesized)
aagatttaatttgtgatacctttgtatgtatgagacacattccaaagagctctaactatgataggtcctgattactaaagaagcttctttactggcctcaatttctagctttcatgttgg

SEQ ID NO: 163719 - DNA, 120 bp, Artificial Sequence
  ENSG00000107854_38 (sequence is synthesized)
aaaattttctgcagtccttctgtgaaaattagagcaaagtgctcctgttttttagagaaactaaatcttgctgttgaacaattattgtgttcttttcatggaacataagtaggatgttac

SEQ ID NO: 163720 - DNA, 120 bp, Artificial Sequence
  ENSG00000107854_39 (sequence is synthesized)
atttccagggtgggaagggtaatcctaaatcatttcccaatctattctaattaccttaaatctaaaggggaaaaaaaaaatcacaaacaggactgggtagttttttatcctaagtatatt

SEQ ID NO: 163721 - DNA, 120 bp, Artificial Sequence
  ENSG00000107854_40 (sequence is synthesized)
ttttcctgttctttttacttggttttattgctgtatttatagccaatctatacatcatgggtaaacttaacccagaactataaaatgtagttgtctcagtcccctccaggcctcctgaat

SEQ ID NO: 163722 - DNA, 120 bp, Artificial Sequence
  ENSG00000107854_41 (sequence is synthesized)
gggcaagtgcagtgaaacaggtgcttcttgctcctgggttttctctccatgatgttatgcccaattggaaatatgctgtcagtttgtgcaccatatggtgaccacgcctgtgctcagttt

SEQ ID NO: 163723 - DNA, 120 bp, Artificial Sequence
  ENSG00000107854_42 (sequence is synthesized)
ggcagctatagaaggaaatgctgtcccataaaatgccattcctattttctaatataaaactcttttccaggaagcatgcttaagcatcttgttacagagacatacatccattatggcttg

SEQ ID NO: 163724 - DNA, 120 bp, Artificial Sequence
  ENSG00000107854_43 (sequence is synthesized)
gcaatctcttttatttgttgactctagctcccttcaaagtcgaggaaagatctttactcacttaatgaggacattccccatcactgtctgtaccagttcacctttattttacgttttatt

SEQ ID NO: 163725 - DNA, 120 bp, Artificial Sequence
  ENSG00000107854_44 (sequence is synthesized)
cagtctgtaaattaactggccctttgcagtaacttgtacataaagtgctagaaaatcatgttccttgtcctgagtaagagttaatcagagtaaatgcatttctggagttgtttctgtgat

SEQ ID NO: 163726 - DNA, 120 bp, Artificial Sequence
  ENSG00000107854_45 (sequence is synthesized)
gtaaattatgatcattatttaagaagtcaaatcctgatcttgaagtgctttttatacagctctctaataattacaaatatccgaaagtcatttcttggaacacaagtggagtatgccaaa

SEQ ID NO: 163727 - DNA, 120 bp, Artificial Sequence
  ENSG00000107854_46 (sequence is synthesized)
ttttatatgaatttttcagattatctaagcttccaggttttataattagaagataatgagagaattaatggggtttatatttacattatctctcaactatgtagcccatattactcaccc

SEQ ID NO: 163728 - DNA, 120 bp, Artificial Sequence
  ENSG00000107854_47 (sequence is synthesized)
tatgagtgaatctggaattgcttttcatgtgaaatcattgtggtctatgagtttacaatactgcaaactgtgttattttatctaatccattgcttaatgagtgtgtttttccatgaatga

SEQ ID NO: 163729 - DNA, 120 bp, Artificial Sequence
  ENSG00000107854_48 (sequence is synthesized)
atataccgtggttcatatgttagcatggcagcattttcagatagctttttgtttgttgggaagttggggttttggggggagggggagtattagtacgttgcatgaaatagcttactttat

SEQ ID NO: 163730 - DNA, 120 bp, Artificial Sequence
  ENSG00000107854_49 (sequence is synthesized)
aatgatggaattgctttttcttttgtcttgtgatttttttttttgaagtgaaatttaactttttgtgcaagtagtactattatacccatcttcagtgtcttacttgtactgtatcacatt

SEQ ID NO: 163731 - DNA, 120 bp, Artificial Sequence
  ENSG00000107854_50 (sequence is synthesized)
ccataccctcatttaattcttaataaaactgttcacttgtttttctgggtagcatggtaattactggaatagtataaatgtgttgaatggtctttgagaaaatgaattaagattacaata

SEQ ID NO: 163732 - DNA, 120 bp, Artificial Sequence
  ENSG00000107854_51 (sequence is synthesized)
aaccacaattgcaggaaaacaatgtagttctgagtctaatagtgataaagaatgcagtttgaagtttgaaatattgaatattgtagctgtacttgctcattaaaatgaaagtagctgtga

SEQ ID NO: 163733 - DNA, 120 bp, Artificial Sequence
  ENSG00000107859_0 (sequence is synthesized)
tgaggctcactccctccgagagtccaggagcgcccgagcggagaggcggcccgggagcaggggggcggcccccactccggccgggtgcccggcccctggcccctgcctgccctctagatc

SEQ ID NO: 163734 - DNA, 120 bp, Artificial Sequence
  ENSG00000107859_1 (sequence is synthesized)
gccctctagatcgccgccgcagccgccgctactgggagtctgcctgttgcaggacgcactagccctccctccatggagttcggcctgctcagcgaggcagaggcccggagccctgccctg

SEQ ID NO: 163735 - DNA, 120 bp, Artificial Sequence
  ENSG00000107859_2 (sequence is synthesized)
tcgctgtcagacgctggcactccgcacccccagctcccagagcacggctgcaagggccaggagcacagcgactcagaaaaggcctcggcttcgctgcccggcggctccccagaggacggt

SEQ ID NO: 163736 - DNA, 120 bp, Artificial Sequence
  ENSG00000107859_3 (sequence is synthesized)
tcgctgaaaaagaagcagcggcggcagcgcacgcacttcaccagccagcagctacaggagctagaggcgaccttccagaggaaccgctaccccgacatgagcacgcgcgaggagatcgcc

SEQ ID NO: 163737 - DNA, 120 bp, Artificial Sequence
  ENSG00000107859_4 (sequence is synthesized)
gtgtggaccaacctcaccgaggcccgcgtgcgggtgtggttcaagaaccggcgcgccaaatggcggaagcgcgagcgcagccagcaggccgagctatgcaaaggcagcttcgcggcgccg

SEQ ID NO: 163738 - DNA, 120 bp, Artificial Sequence
  ENSG00000107859_5 (sequence is synthesized)
tcgccttcaactcggtcaacgtggggcctctggcttcgcagcccgtcttctcgccacccagctccatcgccgcctccatggtgccctccgccgcggctgccccgggcaccgtgccagggc

SEQ ID NO: 163739 - DNA, 120 bp, Artificial Sequence
  ENSG00000107859_6 (sequence is synthesized)
cccccccgggctggctccggccgccgtgtcctccggggccgtgtcctgcccttatgcctcggccgccgccgccgccgcggctgccgcctcttccccctacgtctatcgggacccgtgtaa

SEQ ID NO: 163740 - DNA, 120 bp, Artificial Sequence
  ENSG00000107859_7 (sequence is synthesized)
ccccctacgtctatcgggacccgtgtaactcgagcctggccagcctgcggctcaaagccaaacagcacgcctccttcagctaccccgctgtgcacgggccgcccccggcagccaacctta

SEQ ID NO: 163741 - DNA, 120 bp, Artificial Sequence
  ENSG00000107859_8 (sequence is synthesized)
gtccgtgccagtacgccgtggaaaggcccgtatgagcggccccgcccgtagatcatccccgagggcgggggcaacgattcacagcctccgcggactggggtcattttgactggcttgctc

SEQ ID NO: 163742 - DNA, 120 bp, Artificial Sequence
  ENSG00000107859_9 (sequence is synthesized)
ccgccccagggtctgaaaggggtgtttgggcagctggggggcaccggctcaggagagggccttcccctcccagccctgaggggtggactaggccctacacacagaccgcgcccctgggac

SEQ ID NO: 163743 - DNA, 120 bp, Artificial Sequence
  ENSG00000107859_10 (sequence is synthesized)
taaagccaggaacagggaccagctccccgggggccaactcacccttggcccatcccgccttctccaggcttcccctccctcgttttcaaagataaatgaaataaacgtgcgcggactgtc

SEQ ID NO: 163744 - DNA, 120 bp, Artificial Sequence
  ENSG00000107862_0 (sequence is synthesized)
agttaccacgtcagtgagctgacagggaaggtacccggctctactgcccgtcccggacgactcatcctggcggactgtgcagtcccaccctgacttcggcctcaatttccaggaaacagg

SEQ ID NO: 163745 - DNA, 120 bp, Artificial Sequence
  ENSG00000107862_1 (sequence is synthesized)
ctccttctcttctcccatctgctaccagagccgggagagctgctcggagacgcctccggggtgcgggctggacatgagcagcggctgccggtcctgggactaggccccgccattttggat

SEQ ID NO: 163746 - DNA, 120 bp, Artificial Sequence
  ENSG00000107862_2 (sequence is synthesized)
ccgctgacaggtttgccaagatggtggataagaatatttacatcattcaaggggagattaacattgtggttggggccatcaaacgaaatgcccgatggagcacccatacaccactggatg

SEQ ID NO: 163747 - DNA, 120 bp, Artificial Sequence
  ENSG00000107862_3 (sequence is synthesized)
aagaacgggatcctctgctgcatagtttcggtcatctaaaggaggttttaaacagtataacagaactctcagaaattgagcccaatgtattccttcgaccttttctggaagtgattcgct

SEQ ID NO: 163748 - DNA, 120 bp, Artificial Sequence
  ENSG00000107862_4 (sequence is synthesized)
ctgaagataccactggccctatcactggactggcactcacctctgtcaacaagttcctgtcctatgcactcatagatcccacccatgagggcacagcagagggcatggagaacatggcag

SEQ ID NO: 163749 - DNA, 120 bp, Artificial Sequence
  ENSG00000107862_5 (sequence is synthesized)
atgctgtcacccatgctcgttttgtgggcacggatcctgccagtgatgaagttgtcctgatgaaaatccttcaggttctacggactctgctgctaaccccagtgggtgcccacctaacca

SEQ ID NO: 163750 - DNA, 120 bp, Artificial Sequence
  ENSG00000107862_6 (sequence is synthesized)
atgaatctgtgtgtgagattatgcagtcttgcttccggatctgctttgaaatgaggctcagtgagttattgagaaaatccgcagagcacactctcgtagacatggtgcagctgctcttca

SEQ ID NO: 163751 - DNA, 120 bp, Artificial Sequence
  ENSG00000107862_7 (sequence is synthesized)
caaggttacctcagtttaaagaagaacccaagaactatgtggggaccaacatgaagaagctgaaaatgagagccggaggcatgagtgattcatccaaatggaagaaacagaagagatccc

SEQ ID NO: 163752 - DNA, 120 bp, Artificial Sequence
  ENSG00000107862_8 (sequence is synthesized)
ctcggcccccacgccatatgaccaaagtcacaccaggttcagagctgcccactcccaatggaaccaccttatcatctaacctcactggtggcatgcccttcattgatgtgcccactccca

SEQ ID NO: 163753 - DNA, 120 bp, Artificial Sequence
  ENSG00000107862_9 (sequence is synthesized)
tctcctctgcaagttcagaagctgcctcagcagtggtcagtccctctacagacagtggcctggaattctcctcccaaaccacttccaaggaagaccttactgatctagagcaacctggct

SEQ ID NO: 163754 - DNA, 120 bp, Artificial Sequence
  ENSG00000107862_10 (sequence is synthesized)
ctccagggtacagcacagctacagagcctggaagcagtgagctaggtgttcccgagcagcctgacctccaggaagggacccatgtggaaaagtcccagtcagcatctgtggagtccatcc

SEQ ID NO: 163755 - DNA, 120 bp, Artificial Sequence
  ENSG00000107862_11 (sequence is synthesized)
ctgaagtgttagaggagtgcacgtcccctgccgaccactctgactctgcctctgtccatgacatggattacgtcaatccccggggcgtgcgctttacacagtcctcccagaaagaaggca

SEQ ID NO: 163756 - DNA, 120 bp, Artificial Sequence
  ENSG00000107862_12 (sequence is synthesized)
cagctttggtcccctatggtcttccctgcatccgcgagctcttccgcttcctcatctccctcaccaatccacacgaccgccataactcagaggttatgattcacatgggactgcatttgc

SEQ ID NO: 163757 - DNA, 120 bp, Artificial Sequence
  ENSG00000107862_13 (sequence is synthesized)
tgacagtggcccttgagtcagcccctgtagcccagtgccagaccctcttgggcctcatcaaggatgagatgtgccgtcacttattccagctactcagcatagagcgactaaacctttatg

SEQ ID NO: 163758 - DNA, 120 bp, Artificial Sequence
  ENSG00000107862_14 (sequence is synthesized)
ctgcttccctgcgagtatgcttcctactgtttgagagcatgcgagagcacctcaagttccaaatggagatgtacatcaaaaagcttatggagatcatcactgtggagaaccccaagatgc

SEQ ID NO: 163759 - DNA, 120 bp, Artificial Sequence
  ENSG00000107862_15 (sequence is synthesized)
cttatgagatgaaggagatggcactggaggccattgtgcagctctggcgcatccccagctttgtcacagagctctacatcaactatgattgtgactactactgttccaacctctttgagg

SEQ ID NO: 163760 - DNA, 120 bp, Artificial Sequence
  ENSG00000107862_16 (sequence is synthesized)
aactcacaaagctgctgtccaagaatgccttccctgtgtctggtcaactctatacaacacacctactatctcttgatgccctattgacagtgattgacagcaccgaggcccactgccagg

SEQ ID NO: 163761 - DNA, 120 bp, Artificial Sequence
  ENSG00000107862_17 (sequence is synthesized)
ctaaagtcctcaacagcctcacccagcaagagaagaaggagacagccagaccaagctgtgagatagtagatggcacccgagaagctagcaatactgagagaactgccagcgatgggaaag

SEQ ID NO: 163762 - DNA, 120 bp, Artificial Sequence
  ENSG00000107862_18 (sequence is synthesized)
ctgtaggcatggcctcagacatcccaggcctgcatctgccaggtggagggcggctgccaccagaacatgggaaatcaggatgcagtgatctggaggaagctgttgactctggggctgaca

SEQ ID NO: 163763 - DNA, 120 bp, Artificial Sequence
  ENSG00000107862_19 (sequence is synthesized)
aaaagtttgcccggaagccaccccgattttcctgtctcctgccagatccacgggaactaattgaaattaaaaacaaaaagaagctgctaatcactggcacagagcagttcaatcagaaac

SEQ ID NO: 163764 - DNA, 120 bp, Artificial Sequence
  ENSG00000107862_20 (sequence is synthesized)
caaagaaggggattcagtttctgcaagagaaaggcctcctcaccatcccaatggacaacacagaggttgctcagtggctccgagagaaccctcggctggacaagaagatgattggagagt

SEQ ID NO: 163765 - DNA, 120 bp, Artificial Sequence
  ENSG00000107862_21 (sequence is synthesized)
ttgtgagtgaccgcaaaaacattgacctgttggagagctttgtgagcaccttcagttttcagggtctgcgactggacgaagccctccgcctctacctggaagccttccgtttgcctgggg

SEQ ID NO: 163766 - DNA, 120 bp, Artificial Sequence
  ENSG00000107862_22 (sequence is synthesized)
aagcaccagtcatccagaggttgctggaggcattcacagagcgttggatgaattgtaatggctccccatttgccaatagcgatgcctgcttttccctggcctatgctgtcatcatgctta

SEQ ID NO: 163767 - DNA, 120 bp, Artificial Sequence
  ENSG00000107862_23 (sequence is synthesized)
atactgaccagcacaaccacaatgttcgtaaacagaatgcacccatgaccctggaggagtttcgcaaaaatctgaaaggtgtgaatggaggcaaggactttgagcaagacatcctggagg

SEQ ID NO: 163768 - DNA, 120 bp, Artificial Sequence
  ENSG00000107862_24 (sequence is synthesized)
acatgtaccatgccatcaagaatgaggaaattgtaatgcctgaggagcagacaggcttggttcgggagaactatgtgtggaatgtgctgcttcatcgaggtgccacccctgagggcatat

SEQ ID NO: 163769 - DNA, 120 bp, Artificial Sequence
  ENSG00000107862_25 (sequence is synthesized)
tcctgcgtgtgcctactgccagctatgatcttgacctcttcaccatgacctggggccccactattgctgctctctcttatgtctttgacaaaagccttgaggagacaatcatccagaaag

SEQ ID NO: 163770 - DNA, 120 bp, Artificial Sequence
  ENSG00000107862_26 (sequence is synthesized)
tggcctcagcgatgtgtttgacaatctcatcatctctctatgcaaattcacagctctcagcagtgagtctattgagaacctgcccagtgtatttggaagcaaccctaaagcccatattgc

SEQ ID NO: 163771 - DNA, 120 bp, Artificial Sequence
  ENSG00000107862_27 (sequence is synthesized)
agccaagacagtattccatttggcccatcgtcatggtgacatcctgcgggagggctggaagaatatcatggaggccatgctgcagctcttccgagcccaactactgcccaaggctatgat

SEQ ID NO: 163772 - DNA, 120 bp, Artificial Sequence
  ENSG00000107862_28 (sequence is synthesized)
agaggtagaagatttcgtggatcccaatggcaagatctctctacagcgggaagagacaccatcaaaccgaggagagtcaacagtgctgagctttgtgagctggctaacactgagtggtcc

SEQ ID NO: 163773 - DNA, 120 bp, Artificial Sequence
  ENSG00000107862_29 (sequence is synthesized)
tgagcagtctagtgttcggggcccatccactgaaaaccaagaggccaagagagtggccttagagtgtataaagcaatgtgacccagaaaaaatgatcacagaaagcaagttcctccagct

SEQ ID NO: 163774 - DNA, 120 bp, Artificial Sequence
  ENSG00000107862_30 (sequence is synthesized)
ggagtcactacaggagctcatgaaggctctggtctcagtgacaccagatgaagagacatatgatgaggaagatgctgctttctgcctagagatgctgctaaggattgtgttggagaacag

SEQ ID NO: 163775 - DNA, 120 bp, Artificial Sequence
  ENSG00000107862_31 (sequence is synthesized)
ggatcgtgtgggctgtgtgtggcagactgttcgagaccatctataccacctctgtgttcaggcacaagatttctgcttccttgtggagcgggcagtggtggggttgctacgcctggccat

SEQ ID NO: 163776 - DNA, 120 bp, Artificial Sequence
  ENSG00000107862_32 (sequence is synthesized)
tcggcttctccggagagaagagatcagtgctcaggtgctgctctccctgcgcattttgctactgatgaagcccagtgtgctatcccgagtcagccaccaggttgcgtatgggctccatga

SEQ ID NO: 163777 - DNA, 120 bp, Artificial Sequence
  ENSG00000107862_33 (sequence is synthesized)
actcctgaagaccaatgcagccaacatccactcaggtgatgactgggccacactcttcacactgctggagtgcatcggctcaggtgtgaagcctccagctgctctgcaggccacagccag

SEQ ID NO: 163778 - DNA, 120 bp, Artificial Sequence
  ENSG00000107862_34 (sequence is synthesized)
ggcagatgcacctgatgccggggcccagtcagatagtgagctcccatcctaccatcagaatgacgtgagcctggatcgagggtacacttccgactcagaggtctacactgaccatggcag

SEQ ID NO: 163779 - DNA, 120 bp, Artificial Sequence
  ENSG00000107862_35 (sequence is synthesized)
gccgggcaagatacaccgatcagccacagatgccgatgtggtcaacagtggttggttagtggttgggaaggatgacgttgataactccaagccagggcccagccgcccaggcccttcacc

SEQ ID NO: 163780 - DNA, 120 bp, Artificial Sequence
  ENSG00000107862_36 (sequence is synthesized)
cctgatcaatcaatacagcctaacagtgggactggatttggggccacacgacactaagtctctgcttaagtgtgtggaatcgctgtccttcattgtgcgtgatgctgcccacatcacacc

SEQ ID NO: 163781 - DNA, 120 bp, Artificial Sequence
  ENSG00000107862_37 (sequence is synthesized)
tgacaactttgagctctgcgtcaagactctccggatctttgtggaggccagtctgaatggcggatgcaagtcccaggagaaacgtggcaagagtcacaaatatgacagcaaagggaaccg

SEQ ID NO: 163782 - DNA, 120 bp, Artificial Sequence
  ENSG00000107862_38 (sequence is synthesized)
cttcaagaagaaatccaaagagggatcaatgcttcgccggcctcgaacctccagccaacatgcctctcggggcgggcagagtgatgatgatgaggacgaaggcgtgcctgccagctacca

SEQ ID NO: 163783 - DNA, 120 bp, Artificial Sequence
  ENSG00000107862_39 (sequence is synthesized)
tacggtgtctttacaggtcagtcaggacttgctagacctgatgcacaccctgcacacgcgggcagcctctatctacagctcatgggcggaggagcaacgccacctggagacaggtggcca

SEQ ID NO: 163784 - DNA, 120 bp, Artificial Sequence
  ENSG00000107862_40 (sequence is synthesized)
gaagattgaagctgattctcgcaccctctgggcccactgctggtgccctttactgcagggtattgcctgcctgtgctgcgatgcccggcgccaggtacggatgcaggcactgacctatct

SEQ ID NO: 163785 - DNA, 120 bp, Artificial Sequence
  ENSG00000107862_41 (sequence is synthesized)
gcagcgagcactacttgtacatgatctgcaaaagctagatgccctggaatgggagtcctgttttaacaaggtgctgtttcctctacttaccaagctcttggagaacatcagccctgcaga

SEQ ID NO: 163786 - DNA, 120 bp, Artificial Sequence
  ENSG00000107862_42 (sequence is synthesized)
tgtgggtgggatggaggagacccggatgagggcttccacattgctctctaaggtcttcctgcagcacctgtctccactgctgtcactctctacctttgcggccctctggctcaccatctt

SEQ ID NO: 163787 - DNA, 120 bp, Artificial Sequence
  ENSG00000107862_43 (sequence is synthesized)
ggacttcatggacaagtacatgcacgcaggctccagcgacttactgtcagaggcgatccctgagtctctgaagaacatgcttctggtgatggacacagcggagattttccacagtgcaga

SEQ ID NO: 163788 - DNA, 120 bp, Artificial Sequence
  ENSG00000107862_44 (sequence is synthesized)
tgcacggggaggcggcccctcggccctctgggagatcacctgggaacgcattgactgttttctccctcacctacgagatgaactcttcaagcagaccgtcatccaggaccccatgcccat

SEQ ID NO: 163789 - DNA, 120 bp, Artificial Sequence
  ENSG00000107862_45 (sequence is synthesized)
ggagcctcaaggccaaaagcctctcgcctcagcccacctgacttccgctgctggcgacactaggacacctggccatccaccgcccccagagattccatctgagctgggggcctgtgactt

SEQ ID NO: 163790 - DNA, 120 bp, Artificial Sequence
  ENSG00000107862_46 (sequence is synthesized)
tgagaagcccgagagcccccgagccgccagcagcagctccccaggatcaccagtggcctcaagccccagcaggctgagccccacccccgacgggcctccacccttggctcagcccccact

SEQ ID NO: 163791 - DNA, 120 bp, Artificial Sequence
  ENSG00000107862_47 (sequence is synthesized)
gatcctgcagcccttggcctccccactgcaggtgggcgtgccacctatgactctgcccatcatcctcaaccctgcgctcatcgaggccacctcaccagtgcccctcctggccacaccccg

SEQ ID NO: 163792 - DNA, 120 bp, Artificial Sequence
  ENSG00000107862_48 (sequence is synthesized)
ccccacagatcccatacccacctctgaggtcaactaaggcaggtcactcagagatcaggaccagtgcttcccaccaggctttccttgaccccacttctggctgtcctgcgggccacaagc

SEQ ID NO: 163793 - DNA, 120 bp, Artificial Sequence
  ENSG00000107862_49 (sequence is synthesized)
tcttcaggccaagtcagagctgctgttgctgccacttggatggggacctgaaaaagagaatgttgatagccccagctaagacccccaatcagctgtgggacctttttcctcctctgcgct

SEQ ID NO: 163794 - DNA, 120 bp, Artificial Sequence
  ENSG00000107862_50 (sequence is synthesized)
ccattcctgggggttcagcctgagagtgaactcagctgtcatctgcagcctctgcctccagcccggcagctctggggaggcatccgtgtgccggccctgcagtgcctgcccacggtcagg

SEQ ID NO: 163795 - DNA, 120 bp, Artificial Sequence
  ENSG00000107862_51 (sequence is synthesized)
cattgaaaactaagcccaaccactctgcactttgtttcccactcccattagccctgggccacctcctccagttcttcctcttttactaattagttggtcagtttggagagttgactggca

SEQ ID NO: 163796 - DNA, 120 bp, Artificial Sequence
  ENSG00000107862_52 (sequence is synthesized)
ccatggagggtaggcaggtgggggctgggtgggggactgcccacaggagcatgtacatatggaaaaacagaacaacagtggactttttatgatataataaatgtcttagtaccagcatca

SEQ ID NO: 163797 - DNA, 120 bp, Artificial Sequence
  ENSG00000107862_53 (sequence is synthesized)
tcatcatactcctacctgagccatcttgcggtgattcataaaccactgagttggccctacatctgtagcccattagagacagcttggaagacagctacttcaggggagtaagttccaagt

SEQ ID NO: 163798 - DNA, 120 bp, Artificial Sequence
  ENSG00000107862_54 (sequence is synthesized)
tatgcttcctactgtttgagagcatgcgagagcacctcaagttccaaatggaggtgagtttcttgatgtggaaagaaaagggggaaaaaaaatagggagatatatggcatcttcagtggg

SEQ ID NO: 163799 - DNA, 80 bp, Artificial Sequence
  ENSG00000107863_0 (sequence is synthesized)
gcttctgtcacttggcgttcgcgggcgccggagctgggccccggcccggcccggcgaggcgaggggagagtccggcggcc

SEQ ID NO: 163800 - DNA, 120 bp, Artificial Sequence
  ENSG00000107863_1 (sequence is synthesized)
gtccggctcacgccgggcgggcgggcggggcgcgctgtcccggagccggccagccccgtgcggatccactcgtcccgcttcctctggatctctctaggagctgacactcgaaccttcacg

SEQ ID NO: 163801 - DNA, 120 bp, Artificial Sequence
  ENSG00000107863_2 (sequence is synthesized)
acccattcggatttttccaggactcaggagtggcactgggaagaaggggaccgctttctgcaattggcctcgacactggctgccaagaagacctgtcgcctttgtttttaagtctccaga

SEQ ID NO: 163802 - DNA, 120 bp, Artificial Sequence
  ENSG00000107863_3 (sequence is synthesized)
aatggaagaagaaggcgaagtcagttgaagtcacgagaaatcagcgaggcatttgaaggcgcttcctgaaaacctttattccctggcacgttgtctgtttcaacagccctgcccctcctc

SEQ ID NO: 163803 - DNA, 120 bp, Artificial Sequence
  ENSG00000107863_4 (sequence is synthesized)
ggagcctgcttgtggaattcttccccttcgggtgtgtggtggcattccccgccacgtccaatgtggactccaaaggatttgtcccttctttgtcatttgaaatgaaatgatggccacgcg

SEQ ID NO: 163804 - DNA, 120 bp, Artificial Sequence
  ENSG00000107863_5 (sequence is synthesized)
tcggactggtctgtctgagggagatggtgacaagctcaaggcctgcgaggtctcaaaaaataaagatggaaaagaacaaagtgaaactgtatcactgtctgaagatgaaacattctcctg

SEQ ID NO: 163805 - DNA, 120 bp, Artificial Sequence
  ENSG00000107863_6 (sequence is synthesized)
gccaggtcccaaaacagttacgttgaaaagaacatctcaaggctttggttttacattaagacattttattgtttatcccccagagtctgcaattcaattttcatataaggatgaagaaaa

SEQ ID NO: 163806 - DNA, 120 bp, Artificial Sequence
  ENSG00000107863_7 (sequence is synthesized)
tggaaacagaggaggaaaacaaagaaaccgcttggaaccaatggataccatatttgttaagcaagttaaagaaggaggacctgcttttgaagctggattatgtacaggtgaccgaattat

SEQ ID NO: 163807 - DNA, 120 bp, Artificial Sequence
  ENSG00000107863_8 (sequence is synthesized)
aaaagtcaatggagaaagtgttattggcaaaacctattcccaagtaattgctttaattcaaaacagtgatacaacattggaacttagtgttatgccaaaagatgaagacattctccaagt

SEQ ID NO: 163808 - DNA, 120 bp, Artificial Sequence
  ENSG00000107863_9 (sequence is synthesized)
gctacagtttacaaaggatgtcacagcactggcatattctcaagatgcctacctgaaaggcaacgaagcttatagcggcaatgcccgcaatatacctgaacctccaccaatctgctatcc

SEQ ID NO: 163809 - DNA, 120 bp, Artificial Sequence
  ENSG00000107863_10 (sequence is synthesized)
ctggctgccatctgccccatcagccatggcacagccagttgaaatatctcctcctgactcatcattgagcaaacagcaaaccagtacaccagtactgacacaacctggtagggcctatag

SEQ ID NO: 163810 - DNA, 120 bp, Artificial Sequence
  ENSG00000107863_11 (sequence is synthesized)
aatggaaatacaagtgcctccatcaccaacagatgttgcaaaatcaaacacagcagtgtgtgtttgcaatgaaagtgtaaggactgtcattgtgccttctgagaaggttgtagatttgtt

SEQ ID NO: 163811 - DNA, 120 bp, Artificial Sequence
  ENSG00000107863_12 (sequence is synthesized)
atccaatagaaacaaccatacaggtccttcacatagaactgaagaagtgaggtatggcgtgagtgagcagacctctttaaaaacagtgtcaagaaccacatcaccaccattatcaattcc

SEQ ID NO: 163812 - DNA, 120 bp, Artificial Sequence
  ENSG00000107863_13 (sequence is synthesized)
caccactcatctaattcatcagcctgcaggctccagatcactggaaccttctggaattttacttaagtctggaaattacagtggacattctgatggaatctcaagcagcagatctcaagc

SEQ ID NO: 163813 - DNA, 120 bp, Artificial Sequence
  ENSG00000107863_14 (sequence is synthesized)
tgtggaggctccctctgtatctgttaatcactattcgccaaattcccatcagcacatagactggaaaaactataaaacttacaaagagtatattgataacagacgattgcacataggttg

SEQ ID NO: 163814 - DNA, 120 bp, Artificial Sequence
  ENSG00000107863_15 (sequence is synthesized)
tcggacaatacaagaaagattagatagtttaagagcagcatctcaaagcacgacagattataaccaggtcgtccccaaccgcactactttgcagggacgacgtcgaagcacctctcatga

SEQ ID NO: 163815 - DNA, 120 bp, Artificial Sequence
  ENSG00000107863_16 (sequence is synthesized)
tcgagtgccccagtctgtccagatacggcaacgcagtgtgtcccaagaaagactggaagattctgtgctaatgaagtattgtccaagaagtgcatctcaaggagcactgacgtctccatc

SEQ ID NO: 163816 - DNA, 120 bp, Artificial Sequence
  ENSG00000107863_17 (sequence is synthesized)
tgttagttttagtaatcatagaactcgttcatgggattatattgagggacaggatgaaaccttagaaaatgtcaattctggaactccaatacctgattccaatggagagaaaaaacagac

SEQ ID NO: 163817 - DNA, 120 bp, Artificial Sequence
  ENSG00000107863_18 (sequence is synthesized)
ttacaagtggagtgggtttactgaacaggatgatagacgaggtatttgtgaaagacctaggcagcaagaaattcataaatcttttcgaggttccaattttactgtggctccaagcgttgt

SEQ ID NO: 163818 - DNA, 120 bp, Artificial Sequence
  ENSG00000107863_19 (sequence is synthesized)
taattctgataacaggcgaatgagtggtagaggagtgggatctgtgtcgcagtttaaaaaaattccaccagatctaaaaacattgcagtcaaacagaaattttcagactacttgtggaat

SEQ ID NO: 163819 - DNA, 120 bp, Artificial Sequence
  ENSG00000107863_20 (sequence is synthesized)
gtcactgcctcggggtatttcacaagacaggtcacctcttgtgaaagtccgaagtaattctctgaaagctccttccacgcatgtcacaaaaccatcatttagccagaaatcatttgtttc

SEQ ID NO: 163820 - DNA, 120 bp, Artificial Sequence
  ENSG00000107863_21 (sequence is synthesized)
tatcaaagaccaaagaccagtaaatcacttgcatcagaacagtctgttgaatcagcagacatgggtaaggactgacagtgcccccgatcagcaagtggagactgggaaatccccctcttt

SEQ ID NO: 163821 - DNA, 120 bp, Artificial Sequence
  ENSG00000107863_22 (sequence is synthesized)
atctggagcctctgccaagcctgcccctcagtcgagtgaaaacgctggtacttcagatttagaactacctgtcagtcaaaggaatcaagatttaagtttacaagaggctgaaactgagca

SEQ ID NO: 163822 - DNA, 120 bp, Artificial Sequence
  ENSG00000107863_23 (sequence is synthesized)
atcagatactttagataataaagaagctgtcatcctaagggaaaaacctccatctggacgccagacaccgcagcctttaaggcatcagtcttacatcttggcagtaaatgaccaggagac

SEQ ID NO: 163823 - DNA, 120 bp, Artificial Sequence
  ENSG00000107863_24 (sequence is synthesized)
cgggtcagacactacctgctggctgcccaatgatgcacgtcgagaggtccacataaaaagaatggaggaaagaaaagcctcgagtaccagtccgcctggcgattctttggcttccatccc

SEQ ID NO: 163824 - DNA, 120 bp, Artificial Sequence
  ENSG00000107863_25 (sequence is synthesized)
atttatagatgaaccaactagccctagcattgatcatgatattgcacatatccctgcctctgctgttatatcagcctctacctctcaggtcccctccatagcaacagttcctccttgcct

SEQ ID NO: 163825 - DNA, 120 bp, Artificial Sequence
  ENSG00000107863_26 (sequence is synthesized)
cacaacttcagctccattaattcgccgtcagctctcacatgaccacgaatctgttggccctcctagcctggatgctcagcccaactcaaagacagaaagatcaaaatcatatgatgaggg

SEQ ID NO: 163826 - DNA, 120 bp, Artificial Sequence
  ENSG00000107863_27 (sequence is synthesized)
tctggatgattacagagaagatgcaaaattgtcctttaagcacgtatctagtctgaagggaatcaagatcgcagacagccaaaagtcatcagaagactctgggtccagaaaagattcttc

SEQ ID NO: 163827 - DNA, 120 bp, Artificial Sequence
  ENSG00000107863_28 (sequence is synthesized)
ctcagaggtcttcagtgatgctgccaaggaagggtggcttcatttccgaccccttgtcaccgataagggcaagcgagttggtggaagtattcggccatggaaacagatgtatgttgtcct

SEQ ID NO: 163828 - DNA, 120 bp, Artificial Sequence
  ENSG00000107863_29 (sequence is synthesized)
gagcagcccatcagtgttaatgcttgcttgatagacatctcttacagtgagaccaagaggaaaaatgtgtttcgactcaccacgtccgactgtgaatgcctgtttcaggctgaagacaga

SEQ ID NO: 163829 - DNA, 120 bp, Artificial Sequence
  ENSG00000107863_30 (sequence is synthesized)
gatgatatgctagcttggatcaagacgatccaggagagcagcaacctaaacgaagaggacactggagtcactaacagggatctaattagtcgaagaataaaagaatacaacaatctgatg

SEQ ID NO: 163830 - DNA, 120 bp, Artificial Sequence
  ENSG00000107863_31 (sequence is synthesized)
agcaaagcagaacagttgccaaaaacacctcgccagagtctcagcatcaggcaaactttgcttggtgctaaatcagagccaaagactcaaagcccacactctccgaaggaagagtcggaa

SEQ ID NO: 163831 - DNA, 120 bp, Artificial Sequence
  ENSG00000107863_32 (sequence is synthesized)
aggaaacttctcagtaaagatgataccagtcccccaaaagacaaaggcacatggagaaaaggcattccaagtatcatgagaaagacatttgagaaaaagccaactgctacaggaactttc

SEQ ID NO: 163832 - DNA, 120 bp, Artificial Sequence
  ENSG00000107863_33 (sequence is synthesized)
ggcgtccgactagatgactgcccaccagctcatactaatcggtatattccattaatagttgacatatgttgcaaattagttgaagaaagaggtcttgaatatacaggtatttatagagtt

SEQ ID NO: 163833 - DNA, 120 bp, Artificial Sequence
  ENSG00000107863_34 (sequence is synthesized)
cctggaaataatgcagccatctcaagtatgcaagaagaactcaacaagggaatggctgatattgatatacaagatgataaatggcgagatttgaatgtgataagcagtttactaaaatcc

SEQ ID NO: 163834 - DNA, 120 bp, Artificial Sequence
  ENSG00000107863_35 (sequence is synthesized)
ttcttcagaaaactccctgagcctctcttcacaaatgataaatatgctgattttattgaagccaatcgtaaagaagatcctctagatcgtctgaaaacattaaaaagactaattcacgat

SEQ ID NO: 163835 - DNA, 120 bp, Artificial Sequence
  ENSG00000107863_36 (sequence is synthesized)
ttgcctgaacatcattatgaaacacttaagttcctttcagctcatctgaagacagtggcagaaaattcagaaaaaaataagatggaaccaagaaacctagcaatagtgtttggtcccacc

SEQ ID NO: 163836 - DNA, 120 bp, Artificial Sequence
  ENSG00000107863_37 (sequence is synthesized)
cttgttcgaacatcagaagacaacatgacccacatggtcacccacatgcctgaccagtacaagattgtagaaacgctcatccagcaccatgactggtttttcacagaagaaggtgctgaa

SEQ ID NO: 163837 - DNA, 120 bp, Artificial Sequence
  ENSG00000107863_38 (sequence is synthesized)
gagcctcttacaacagtgcaggaggaaagcacagtagactcccagccagtgccaaacatagatcatttactcaccaacattggaaggacaggagtctccccaggagatgtatcagattca

SEQ ID NO: 163838 - DNA, 120 bp, Artificial Sequence
  ENSG00000107863_39 (sequence is synthesized)
gctactagtgactcaacaaaatctaagggttcttggggatctggaaaggatcagtatagcagggaactgcttgtgtcctccatctttgcagctgctagtcgcaagaggaagaagccgaaa

SEQ ID NO: 163839 - DNA, 120 bp, Artificial Sequence
  ENSG00000107863_40 (sequence is synthesized)
gaaaaagcacagcctagcagctcagaagatgaactggacaatgtattttttaagaaagaaaatgtggaacagtgtcacaatgatactaaagaggagtccaaaaaagaaagtgagacactg

SEQ ID NO: 163840 - DNA, 120 bp, Artificial Sequence
  ENSG00000107863_41 (sequence is synthesized)
ggcagaaaacagaagatcatcattgccaaagaaaacagcactaggaaagaccccagcacgacaaaagatgaaaagatatcactaggaaaagagagcacgccttctgaagaaccctcacca

SEQ ID NO: 163841 - DNA, 120 bp, Artificial Sequence
  ENSG00000107863_42 (sequence is synthesized)
ccacacaactcaaaacacaacaagtcaccaactctcagctgtcgctttgccatcctgaaagagagccccaggtcacttctggcacagaagtcctcccaccttgaagagacaggctctgac

SEQ ID NO: 163842 - DNA, 120 bp, Artificial Sequence
  ENSG00000107863_43 (sequence is synthesized)
tctggcactttgctcagcacgtcttcccaggcctccctggcaaggttttccatgaagaaatcaaccagtccagaaacgaaacatagcgagtttttggccaacgtcagcaccatcacctca

SEQ ID NO: 163843 - DNA, 120 bp, Artificial Sequence
  ENSG00000107863_44 (sequence is synthesized)
gattattccaccacatcgtctgctacatacttgactagcctggactccagtcgactgagccctgaggtgcaatccgtggcagagagcaagggggacgaggcagatgacgagagaagcgaa

SEQ ID NO: 163844 - DNA, 120 bp, Artificial Sequence
  ENSG00000107863_45 (sequence is synthesized)
ctcatcagtgaagggcggcctgtggaaaccgacagcgagagcgagtttcccgtgttccccacagccttgacttcagagaggcttttccgaggaaaactgcaagaagtgactaagagcagc

SEQ ID NO: 163845 - DNA, 120 bp, Artificial Sequence
  ENSG00000107863_46 (sequence is synthesized)
cggagaaattctgaaggaagtgaattaagttgcaccgagggaagtttaacatcaagtttagatagccggagacagctcttcagttcccataaactcatcgaatgtgatactctttccagg

SEQ ID NO: 163846 - DNA, 120 bp, Artificial Sequence
  ENSG00000107863_47 (sequence is synthesized)
aaaaaatcagctagattcaagtcagatagtggaagtctaggagatgccaagaatgagaaagaagcaccttcgttaactaaagtgtttgatgttatgaaaaaaggaaagtcaactgggagt

SEQ ID NO: 163847 - DNA, 120 bp, Artificial Sequence
  ENSG00000107863_48 (sequence is synthesized)
ttactgacacccaccagaggcgaatccgaaaaacaggaacccacatggaaaacgaaaatagcagatcggttaaaactgagacccagagcccctgcggatgacatgtttggagtagggaat

SEQ ID NO: 163848 - DNA, 120 bp, Artificial Sequence
  ENSG00000107863_49 (sequence is synthesized)
cacaaagtgaatgccgagactgctaaaaggaaaagcatccggcgcagacatacactaggagggcacagagatgctaccgaaatcagcgttttgaatttttggaaagtgcatgagcagagc

SEQ ID NO: 163849 - DNA, 120 bp, Artificial Sequence
  ENSG00000107863_50 (sequence is synthesized)
ggggagagagaatctgaactttcagctgtaaaccggttaaaaccaaaatgctcagcccaggacctttccatctcagactggctggccagggaacgcctacgcaccagtacctctgacctt

SEQ ID NO: 163850 - DNA, 120 bp, Artificial Sequence
  ENSG00000107863_51 (sequence is synthesized)
agcagaggagaaatcggagatccccagacagagaacccaagcacacgagaaatagccacgaccgacacacctttgtctcttcattgcaacacaggcagttcttccagcaccttggcttca

SEQ ID NO: 163851 - DNA, 120 bp, Artificial Sequence
  ENSG00000107863_52 (sequence is synthesized)
acaaacaggccccttctttccataccaccacagtcacctgaccaaataaacggagaaagcttccagaacgtgagcaaaaatgctagttctgcagcgaatgcccaacctcataaactgtct

SEQ ID NO: 163852 - DNA, 120 bp, Artificial Sequence
  ENSG00000107863_53 (sequence is synthesized)
gaaaccccaggcagtaaagcagagtttcatccctgtctttaaactgggggtatgtccactctagcaagtaaaaaaactactgttacacgttccagtaactctgtcaatattttcttgtat

SEQ ID NO: 163853 - DNA, 120 bp, Artificial Sequence
  ENSG00000107863_54 (sequence is synthesized)
cagaattgttattatgcagccttcatttgggctggtttcatcattttgcactgtgaaatagctttacagtgcattactacagccagaagaacatatatatatatatatatatttaaaaat

SEQ ID NO: 163854 - DNA, 120 bp, Artificial Sequence
  ENSG00000107863_55 (sequence is synthesized)
atatcggatagttgtatacaaatgagcaaggtatttgttgcaacttactacatagcatatacccaaaatcactgaagaaaatcgctggcatcagtgtgcagcaaatttgttcttttggtt

SEQ ID NO: 163855 - DNA, 120 bp, Artificial Sequence
  ENSG00000107863_56 (sequence is synthesized)
tcatcactaacaaaagtgcctcatcataaaaatacagttggtttttagggtgccatattgttaaaattagataacttacttacattgaataaacgaatgcgttttattggtaacagatat

SEQ ID NO: 163856 - DNA, 120 bp, Artificial Sequence
  ENSG00000107863_57 (sequence is synthesized)
cattacatttaccagttttaacacaggtggatacagaacttccattctttagtcattccaggtggatctgagttttatattcaaacttttaatacagtttttgagttttgtgtgacttga

SEQ ID NO: 163857 - DNA, 120 bp, Artificial Sequence
  ENSG00000107863_58 (sequence is synthesized)
atttttaatctttctgtaaaatacgtaacttaaatgaacatattaaatgtgtatcttttcttcagataccagatttgatataatgttgtaacataggtgtgtagatagtggatcctggat

SEQ ID NO: 163858 - DNA, 120 bp, Artificial Sequence
  ENSG00000107863_59 (sequence is synthesized)
ggaactggcttctttatcgagaagaatataattctgcatgaggacttaatgaatccaaacctgtgtcatgcctgtgtgcatacccaattaaacactggaaataaaaattgttttggtgaa

SEQ ID NO: 163859 - DNA, 120 bp, Artificial Sequence
  ENSG00000107863_60 (sequence is synthesized)
aagtgggaggagtctatcacacggtaatgtcactagtggattctgtgatgtccctgatggacagctggaactgtaggaagaaggaggactgttgtccacactgtagctgccttgtctgca

SEQ ID NO: 163860 - DNA, 120 bp, Artificial Sequence
  ENSG00000107863_61 (sequence is synthesized)
gaaatccccgattcttgtaaatgcaaacatagttgatctgtggtgtaaagtttctcataagattattgtaaacagatcaatactactttcttaaaagtttttctgctgtttcttgttatt

SEQ ID NO: 163861 - DNA, 120 bp, Artificial Sequence
  ENSG00000107863_62 (sequence is synthesized)
agcgcgtcccggccgggcccggcgcccggccagcgtctccgcttcagctcgccgccgcgcttcggccgccgggcccgagcgggcgggaagggatctctctaggagctgacactcgaacct

SEQ ID NO: 163862 - DNA, 120 bp, Artificial Sequence
  ENSG00000107863_63 (sequence is synthesized)
attgtgccttgatgttcttcatttctttagttactaccaggtcaagtaatctagcacaaaggtctcaaaaaataaagatggaaaagaacaaagtgaaactgtatcactgtctgaagatga

SEQ ID NO: 163863 - DNA, 120 bp, Artificial Sequence
  ENSG00000107863_64 (sequence is synthesized)
tcagagaagagatgcagactgtgctataggcagtcatggcccagttcaggattttagactgcatgatcaaccacaattggagtttgttgtgcaatctgtattgtgcatggagtggtcagg

SEQ ID NO: 163864 - DNA, 120 bp, Artificial Sequence
  ENSG00000107863_65 (sequence is synthesized)
ggcgcgccaacaatgtcaacttcctgctttgctattgtccgctttgcgccccggaagcaggtctctagctcagtttctgatctaatgaatatacaagtacggtgcttattttgcagttaa

SEQ ID NO: 163865 - DNA, 120 bp, Artificial Sequence
  ENSG00000107863_66 (sequence is synthesized)
ttatgcgtaaacaatgtaaacacattaagcacaggtgctttacttagtaatgtgtcttttactaaatgttgtttaaattttaaagaaagtatctttgaagagatgatgaagagatctttg

SEQ ID NO: 163866 - DNA, 120 bp, Artificial Sequence
  ENSG00000107863_67 (sequence is synthesized)
ttctctacattttacaaaaataccattgccaagtttttgcaattaagtgacatggaaatgttatgttgattctacagtgaactcttaatgctctcatttagaatgagattcctaaagagt

SEQ ID NO: 163867 - DNA, 120 bp, Artificial Sequence
  ENSG00000107863_68 (sequence is synthesized)
ttgtcctagtgttgccttctagttcatccttggaccaaaggaagagtttagagtgcaagtgcatatccccaggaattagaatctttttttttttccttctcactatgtacagagaaaaaa

SEQ ID NO: 163868 - DNA, 120 bp, Artificial Sequence
  ENSG00000107863_69 (sequence is synthesized)
aaaaaatagaatcttatttttgtaatacgaggacaaactttatgattgccattttctaattttccaataaatattacgtttgtaaattcaccaagcagtattgttagtagtatcaattcg

SEQ ID NO: 163869 - DNA, 120 bp, Artificial Sequence
  ENSG00000107863_70 (sequence is synthesized)
ttcctaaaatgttcacaatgaacggagtctacaacttaaggggaaaatatgttatggtcttgaaatgaaacttgaaaactttagtatttagtctaaaatatttttctgatttttataaag

SEQ ID NO: 163870 - DNA, 120 bp, Artificial Sequence
  ENSG00000107863_71 (sequence is synthesized)
tttttctgatttttataaagaaagaaattgaatagaatacttaactcctttactaagcttaaatactgctgatgataaaaatataaatttcatctgggcacggtggctcacgcctgtaat

SEQ ID NO: 163871 - DNA, 120 bp, Artificial Sequence
  ENSG00000107863_72 (sequence is synthesized)
ggcgcccgagtcacccggagacgccgccgagcccacgccggccccagccaggctggctttgtgcttgcgtttttggggggcggaggggagcgaagagggggcttggaaagtgtgatccca

SEQ ID NO: 163872 - DNA, 120 bp, Artificial Sequence
  ENSG00000107863_73 (sequence is synthesized)
tttcagcctcgtgggggagaaaacttcaccgaagtgtccctgtctgggtgatgcagaaaacaacatgcacagccctctgctctacccaggaaagacatgaattaaaatgcacttgaatgg

SEQ ID NO: 163873 - DNA, 120 bp, Artificial Sequence
  ENSG00000107863_74 (sequence is synthesized)
tctttataattgtataatctgagtttttgccagacagtaaaattatggtctccatttttccatttccataacagcatttgttaatagataattgcaaaactggtagcaatttaaccaaac

SEQ ID NO: 163874 - DNA, 120 bp, Artificial Sequence
  ENSG00000107863_75 (sequence is synthesized)
tagtcaaaaggatccctcaactgcactgctatggaactggggtctgaagcacaaagataaacattatttaatgtaaaaccaaagtgacctggaagcaagattatcttaatgcctcttttg

SEQ ID NO: 163875 - DNA, 120 bp, Artificial Sequence
  ENSG00000107863_76 (sequence is synthesized)
catccatacgcatacagcataatgctcagaaaatttaagtctgacaaaaatcaacataaacatgccagtatgagtgtctcaattgtagctagggcggccaacactcttcaaagttctaca

SEQ ID NO: 163876 - DNA, 120 bp, Artificial Sequence
  ENSG00000107863_77 (sequence is synthesized)
tgtttttgtttagcacagggctcctttgccatttctatcattgagctggttctgcctacaattcacagcatcctttcatggcggtggctttctgtggtgcagcttgcatctttgtgagct

SEQ ID NO: 163877 - DNA, 120 bp, Artificial Sequence
  ENSG00000107863_78 (sequence is synthesized)
ctgactatccactgtgttctattgttttgagttttgctttcacattttgttctgtgcctgtctttccataagttttgcattgtttgtggaaagcagtaaagattggctaatactgaccat

SEQ ID NO: 163878 - DNA, 120 bp, Artificial Sequence
  ENSG00000107863_79 (sequence is synthesized)
tgattataatgggatctgagtatatagcctttcagacaacagagactgtcaatctgttttccttttcatagcagaccttagtttccctaagtatttctgacctgtaatgctttttttcta

SEQ ID NO: 163879 - DNA, 120 bp, Artificial Sequence
  ENSG00000107863_80 (sequence is synthesized)
atgtattgactccgaaattgaataattattcaaccattaggaatttgtctgaaatggtctgtaagaattcgtcttcaaatcgtgtgtttctgcttttagcattttaaaacaaggatgaga

SEQ ID NO: 163880 - DNA, 120 bp, Artificial Sequence
  ENSG00000107863_81 (sequence is synthesized)
acaaggacctgattaagaaagtataatacatgtaaatgtatgtgcatatatttaaaacacccatgctaggattcgtatcatgaattgatattactctctcctcctcttttcttgactctt

SEQ ID NO: 163881 - DNA, 120 bp, Artificial Sequence
  ENSG00000107863_82 (sequence is synthesized)
gcggaacggtttccacattctctttacctgttgttacttcctttttagaatgttatctctctgggggtccctctctttctttcagtctctttgttctcttcttactgtctcaaatatctc

SEQ ID NO: 163882 - DNA, 120 bp, Artificial Sequence
  ENSG00000107863_83 (sequence is synthesized)
ttgcaggttttatctattcccagatctataatgtctgtattctttatattacataacagcaatttatgtttccttttggatgaaaggggcattttagctgtgatatacaactactaaaca

SEQ ID NO: 163883 - DNA, 120 bp, Artificial Sequence
  ENSG00000107864_0 (sequence is synthesized)
agaggctgcacagcccgcccggaccaacgcctccgcgcctgccgccgtctggccggcgccctcccgtttccttcctccagggggaaaaaatgtctttcgggccgctttccaggaagcagc

SEQ ID NO: 163884 - DNA, 120 bp, Artificial Sequence
  ENSG00000107864_1 (sequence is synthesized)
aggatgcgccgctccactgtcggtagcaacaagctgcgcaaaccatgcaggatgatttactgatggacaaaagcaaaacccagccccagccccagcagcagcagcggcagcagcagcagc

SEQ ID NO: 163885 - DNA, 120 bp, Artificial Sequence
  ENSG00000107864_2 (sequence is synthesized)
cccaacctgagtccagcgtatccgaagccccgtccacgcccctctcctcagagacccccaagccggaggaaaacagcgcagtgccggccctcagcccagccgctgcccccccggccccca

SEQ ID NO: 163886 - DNA, 120 bp, Artificial Sequence
  ENSG00000107864_3 (sequence is synthesized)
acggcccggacaagatgcagatggaatcaccgctcctgccaggcttgagtttccatcagcctcctcagcagccgccgccgcctcaggagcccgcggcaccgggcgcgtcgctgtcgccgt

SEQ ID NO: 163887 - DNA, 120 bp, Artificial Sequence
  ENSG00000107864_4 (sequence is synthesized)
ccttcggcagcacctggtccacgggcaccaccaacgcggtagaggacagcttcttccaggggatcaccccagtcaacgggaccatgctcttccagaacttcccgcaccatgtcaacccag

SEQ ID NO: 163888 - DNA, 120 bp, Artificial Sequence
  ENSG00000107864_5 (sequence is synthesized)
tcttcggaggcactttctccccgcagatcggcctggcgcagacccagcaccaccagcagccgccgccgcctgcgcccgcgccgcagccggcacagccagcgcagccaccacaggcgcagc

SEQ ID NO: 163889 - DNA, 120 bp, Artificial Sequence
  ENSG00000107864_6 (sequence is synthesized)
ccccgcagcagcgccgctcacccgccagccccagccaggcgccctacgcgcagaggagcgccgccgcggcgtacggccaccagcccatcatgaccagcaagccgtcctcgtcttcggcgg

SEQ ID NO: 163890 - DNA, 120 bp, Artificial Sequence
  ENSG00000107864_7 (sequence is synthesized)
ttgcagccgctgctgccgcagccgccgcctcgtcggcctcgtccagctggaacacgcaccaaagcgtgaatgcagcctggagcgcaccgtccaacccctggggcggcctgcaggcgggcc

SEQ ID NO: 163891 - DNA, 120 bp, Artificial Sequence
  ENSG00000107864_8 (sequence is synthesized)
gggaccctcgccgggcggtcggtgtgggcgtgggtgtgggtgtcggggtgccttccccgctcaaccccatctcgccgctcaaaaagcccttctccagcaacgtgatcgcgccgcccaagt

SEQ ID NO: 163892 - DNA, 120 bp, Artificial Sequence
  ENSG00000107864_9 (sequence is synthesized)
tccctcgcgcggcccctctcacttccaagtcctggatggaggataacgctttccggaccgataatggtaacaatctgttgccatttcaggaccggagtaggccctatgatacttttaact

SEQ ID NO: 163893 - DNA, 120 bp, Artificial Sequence
  ENSG00000107864_10 (sequence is synthesized)
tgcactcgttggagaactccttaatggatatgataaggactgatcatgaacctctgaaaggtaaacactaccctcccagtggcccaccaatgagtttcgctgatataatgtggaggaatc

SEQ ID NO: 163894 - DNA, 120 bp, Artificial Sequence
  ENSG00000107864_11 (sequence is synthesized)
attttgcaggacgcatggggataaatttccatcatccaggaacagataatattatggcacttaacaatgccttcctggatgatagccatggtgatcaagccttgtcatctggcttaagtt

SEQ ID NO: 163895 - DNA, 120 bp, Artificial Sequence
  ENSG00000107864_12 (sequence is synthesized)
ctcccactcgctgtcaaaatggggaacgagtagaacgctactctagaaaggtgtttgttggaggacttcctcctgatattgatgaagatgagatcactgccagctttcgcaggtttggac

SEQ ID NO: 163896 - DNA, 120 bp, Artificial Sequence
  ENSG00000107864_13 (sequence is synthesized)
ctctcgtagtagactggcctcacaaagctgaaagcaagtcttattttcctcctaaaggctatgcctttctgctgttccaagaggaaagctcagtacaagctttgatagatgcctgcctag

SEQ ID NO: 163897 - DNA, 120 bp, Artificial Sequence
  ENSG00000107864_14 (sequence is synthesized)
aagaagatgggaaactctacctgtgtgtgtcaagccccaccatcaaggacaagccagtgcaaattcgaccatggaacctaagtgacagtgactttgtaatggatggttctcagcctttgg

SEQ ID NO: 163898 - DNA, 120 bp, Artificial Sequence
  ENSG00000107864_15 (sequence is synthesized)
accccagaaaaactatctttgttgggggagttccacgaccccttcgagctgttgaactggcaatgatcatggaccgtttgtacggtggtgtctgctatgctggcattgatacggacccag

SEQ ID NO: 163899 - DNA, 120 bp, Artificial Sequence
  ENSG00000107864_16 (sequence is synthesized)
agctgaagtaccccaaaggtgctggccgcgtggcattctccaatcagcagagttacattgcagccatcagcgctcgttttgtgcagcttcagcacaatgacattgacaaacgggttgaag

SEQ ID NO: 163900 - DNA, 120 bp, Artificial Sequence
  ENSG00000107864_17 (sequence is synthesized)
taaagccatatgtgctggatgatcagatgtgtgatgagtgccagggcacacgctgtggtgggaagtttgccccgttcttctgtgccaacgtcacctgtctgcagtattactgtgaatact

SEQ ID NO: 163901 - DNA, 120 bp, Artificial Sequence
  ENSG00000107864_18 (sequence is synthesized)
gctgggcgagcatacattcccgagccgggcgggagttccacaaaccgctggtgaaggagggaggcgaccgccctcgtcacgtcccgttccgctggagctgagccacgggccgacccagcc

SEQ ID NO: 163902 - DNA, 120 bp, Artificial Sequence
  ENSG00000107864_19 (sequence is synthesized)
acaagtactggagtagataacaaggagggaaaagagagggcactgcctcagggcttacagtgttctggaaatctgtgcattcgttctcgatttttaaagaagaattgggtctttttatta

SEQ ID NO: 163903 - DNA, 120 bp, Artificial Sequence
  ENSG00000107864_20 (sequence is synthesized)
ttattattattatttacagtcatattactgaactcagtgtccagtataatgcagaattgcagagtgtagaatggtactgatttgcactttgattcacacctttgtctgcttggtacctta

SEQ ID NO: 163904 - DNA, 120 bp, Artificial Sequence
  ENSG00000107864_21 (sequence is synthesized)
attttttatacctgatttgtcactcgtgacagtatgtagactgccattctcatcagcggccgtcaggctactgtctgtgattcttttgtttgttgttgtggtgttgttctgattgttttg

SEQ ID NO: 163905 - DNA, 120 bp, Artificial Sequence
  ENSG00000107864_22 (sequence is synthesized)
aactggagcatgcacttattttcagaaacttagagagttgcccctaggacaagacttaccaaaggtaatactcgtgagtaggtggcagatgtagcaaaaacttcacaacaattcagcaat

SEQ ID NO: 163906 - DNA, 120 bp, Artificial Sequence
  ENSG00000107864_23 (sequence is synthesized)
cattagctcgggtcacttagagtaaggataacccttcatgaaaataagcctttagttgctctctattttgacttgtaaggatacctcataagctggatcttttatttttccttcatgttt

SEQ ID NO: 163907 - DNA, 120 bp, Artificial Sequence
  ENSG00000107864_24 (sequence is synthesized)
gatttttgttttgccgaggattttggttagatcttttagtattatgtaaatttatgctgcaatagcttttgctgctattaaaatggtattattaataccataatactctattcaggctag

SEQ ID NO: 163908 - DNA, 120 bp, Artificial Sequence
  ENSG00000107864_25 (sequence is synthesized)
gatatcaattaaacacaaaaacccaacaacacacttttgtgattttagggatagagtcagctgccgaacggagatcagaatagacttcagaaagcttcggtggaaggtcactatttctga

SEQ ID NO: 163909 - DNA, 120 bp, Artificial Sequence
  ENSG00000107864_26 (sequence is synthesized)
ctgcatgtttacttaatcaggttgctgcatgcaataaattttatatccaatgtctagtataaaacgttcccacaatgcacaaattaagaatctatataagctataaaaatactcattttt

SEQ ID NO: 163910 - DNA, 120 bp, Artificial Sequence
  ENSG00000107864_27 (sequence is synthesized)
taaaaaaagtttttttcattcaaagaattggtaattgaccggaggaaggcatgcctcaataaatggaatgctctgaatgggaagagcccataacagaatgacctatattacaaccgatat

SEQ ID NO: 163911 - DNA, 120 bp, Artificial Sequence
  ENSG00000107864_28 (sequence is synthesized)
aaaacctaggtgtaggatattcttcaagcaaatttgtggatggtagatgaagtactttgcggtgctctgttatatattgtgaaatttattttatatagtaaagtgattatgtctaactgt

SEQ ID NO: 163912 - DNA, 120 bp, Artificial Sequence
  ENSG00000107864_29 (sequence is synthesized)
gatcaaacttaactgtttaaagcctctgtcagacattaatgaacttgacagttcataactgatatattataaactaacacatgagctcttagttacaatctcttagtgcttgcaccattt

SEQ ID NO: 163913 - DNA, 120 bp, Artificial Sequence
  ENSG00000107864_30 (sequence is synthesized)
tacatagcttcagaccttgtccagaaaaccaaagagctcatcttagcttacaaacactaagaatatatacaggatatagagataagttgtcagattgacaaactaggcacatttttaaga

SEQ ID NO: 163914 - DNA, 120 bp, Artificial Sequence
  ENSG00000107864_31 (sequence is synthesized)
aagttgtgtaatggtgatgctaaagaaatgtctgtacaaaataagatggcctgggcagagttggttgtctgagtgagaaactaactacttaattccctggatttatcctgttaagcttga

SEQ ID NO: 163915 - DNA, 120 bp, Artificial Sequence
  ENSG00000107864_32 (sequence is synthesized)
atatataaacacacacaatgattgcaagactatgtaaatctttttttaatcttcttcctatgttttggaattctggggacaatctgactggatatgacactgcagaatagatttaagtcg

SEQ ID NO: 163916 - DNA, 120 bp, Artificial Sequence
  ENSG00000107864_33 (sequence is synthesized)
ctgtgttttctgtgctgtgatgtccttgtactgtcttaagttagtgttgcttgtttttgttttgttctcccatgtttagttgcaattactggctctcaagctatagtttgttttcaaaaa

SEQ ID NO: 163917 - DNA, 120 bp, Artificial Sequence
  ENSG00000107864_34 (sequence is synthesized)
ggaaaaacaaaatagttttttactggattaaaaatgcttattttagaatcctcccctttttgaggctttttggtaataattgcttttttccagcccaggtgtggttttgtttgttttttt

SEQ ID NO: 163918 - DNA, 120 bp, Artificial Sequence
  ENSG00000107864_35 (sequence is synthesized)
ctatgtttgtgggttttttttcatctgtacaagaaattttgttatgcactactactttttgtattctagacagttttcaaaagttggcagatttttttttttgtttttaaggaaaaaggc

SEQ ID NO: 163919 - DNA, 120 bp, Artificial Sequence
  ENSG00000107864_36 (sequence is synthesized)
atgctttctgactgacatgatcttttgcaatacctcaattttgaaatataggaaagaaaatgatattttctaagtaagtttattcagaaaaatatatattaatttaattctgcaagaaaa

SEQ ID NO: 163920 - DNA, 120 bp, Artificial Sequence
  ENSG00000107864_37 (sequence is synthesized)
tgatttaacagatgggtaactttatttttttcatgcttatttgtgttttttgaaaatgaagaagttagagctttataactataatattaaagatcatatctaacctacagaaatctacct

SEQ ID NO: 163921 - DNA, 120 bp, Artificial Sequence
  ENSG00000107864_38 (sequence is synthesized)
aattatgtgaaagaagcaaaactttttgaagaagcacccctctttcatgtattaaaataacactgagatttttttaaaagctggaagattgtacagcataaagctaaagtgaaggcaaaa

SEQ ID NO: 163922 - DNA, 120 bp, Artificial Sequence
  ENSG00000107864_39 (sequence is synthesized)
aacattgtcctgaagaataggttacaaaaaataaactccatttggtgctgaaagttgtgaatagatggtggaaactactttcccttaatttgtatatttctaatcaagtgttgattgtgc

SEQ ID NO: 163923 - DNA, 120 bp, Artificial Sequence
  ENSG00000107864_40 (sequence is synthesized)
gcgactgaccaggattgtgaaagagttcttctgtttgtatttttttaaagagaacttttttagtttattaaattataacatgttcccttttgttttgtaaataaatgtgcccccaagttg

SEQ ID NO: 163924 - DNA, 120 bp, Artificial Sequence
  ENSG00000107864_41 (sequence is synthesized)
ttaatgttatattaaaagagagggtccttcaaaaaaattattttttaaaacacagaggtgttctgacctgcaacttgactgggaagcccctgggtaacacaggtcctgctgtggcctttc

SEQ ID NO: 163925 - DNA, 120 bp, Artificial Sequence
  ENSG00000107864_42 (sequence is synthesized)
cttggtgtgacacttgaactagtcgattttttgaaggctataacctaacctcgactatttgttgttatgtgcaatactgtttgtactgtttgtataaaaaatagaaaaaaaaaagaaaag

SEQ ID NO: 163926 - DNA, 120 bp, Artificial Sequence
  ENSG00000107864_43 (sequence is synthesized)
aaaaaaggcataaatctttattgcagatttattttcattgcaaactttagacattgtgattcactgaaatcatttttctactgtcaaatatgtaccttttcttcatgctggtattttttc

SEQ ID NO: 163927 - DNA, 120 bp, Artificial Sequence
  ENSG00000107864_44 (sequence is synthesized)
tttcaatagtaatgtagcctttgtactgagacaaattttcattgttatttttagaaagattttttgctaagaaaaaaattaaacatatttacatatttttcattttatttcgtattttct

SEQ ID NO: 163928 - DNA, 120 bp, Artificial Sequence
  ENSG00000107864_45 (sequence is synthesized)
ggagtgctttctcaatcattaatagagttgtttctgggagggactttcatatctggtcaatgtcataatattattttgtatttttattggaataaattaattttatgatgctaattcttt

SEQ ID NO: 163929 - DNA, 120 bp, Artificial Sequence
  ENSG00000107864_46 (sequence is synthesized)
aaaagtttatttttttcattttcagttatttttgaagctaaaacctttgtaatattgttactaaagtgtctagttttttgaaatgcaaagctttatgtattaacttgctgatgtggttta

SEQ ID NO: 163930 - DNA, 120 bp, Artificial Sequence
  ENSG00000107864_47 (sequence is synthesized)
caatagtgtgacaacgatgaaaatgcttggttatgtaaagtgattggaaatgtaatggataattgggtaataaaatgacagaatgagcagaacatgtgagattttgagaagccttttcct

SEQ ID NO: 163931 - DNA, 120 bp, Artificial Sequence
  ENSG00000107864_48 (sequence is synthesized)
ttatcacagtggtttagtgtaagactagggatgtcacagtgcagttctctagggatgtcacggtggatttatacaacaccaggtgcagccaaacctgtggccctgagaatgaagtcaccc

SEQ ID NO: 163932 - DNA, 120 bp, Artificial Sequence
  ENSG00000107864_49 (sequence is synthesized)
atgaagtcacccaaccgaagtaccactgggtttaaaatctggctaagtcaacagaatgtttcattgctttttcccctctaactcgtcattatgtcgtgtgtgtgtgtgtgtgtgtgagag

SEQ ID NO: 163933 - DNA, 120 bp, Artificial Sequence
  ENSG00000107864_50 (sequence is synthesized)
agagagagaaaaactgccaccaactgctgtccttgtgtgagacagtgcctttctcccaggccgaatcttttatgtgcactgacagtggtgatatcggagtcatacaggaagttgctaaga

SEQ ID NO: 163934 - DNA, 120 bp, Artificial Sequence
  ENSG00000107864_51 (sequence is synthesized)
ggacacggctttcgtggtgtactgcagacctcacctgcagggtctcactcatgctgcctccctgtaaggctcagttggtggcactgaggaagcacactcggatgtcaccactgtctgtgg

SEQ ID NO: 163935 - DNA, 120 bp, Artificial Sequence
  ENSG00000107864_52 (sequence is synthesized)
accctgactatgtgtcgggttgcatcttcctccacacccatgcctgcttcctgttctggtgccccttgcctttcattgtggcaactgcgtgcatgatctgtctgcctttctgctgctgct

SEQ ID NO: 163936 - DNA, 120 bp, Artificial Sequence
  ENSG00000107864_53 (sequence is synthesized)
tttccaacaccctcctcacctggaagctgggcagttaaggcacagtcattaatgtgtcattgcaatagcacctacagtcaaagcaaaaactacaactgcaaaactggtgttgcgtaaaca

SEQ ID NO: 163937 - DNA, 120 bp, Artificial Sequence
  ENSG00000107864_54 (sequence is synthesized)
gaacagccaatgacttgatccagatagatgatatgtttctactagtggttgatggcctctttcagctccatcgctatggaggcgaggttcatcaataactcagagaaacttgtgtccaga

SEQ ID NO: 163938 - DNA, 120 bp, Artificial Sequence
  ENSG00000107864_55 (sequence is synthesized)
gttggtcttgggtatgctctatgtattcagttttgtaaataatatatagattagatcaagttgtgatgtaaaattttaactcaaattgggtactactggttggaattttacattaactac

SEQ ID NO: 163939 - DNA, 120 bp, Artificial Sequence
  ENSG00000107864_56 (sequence is synthesized)
aaataaatgattaggaacagaagaaaagtggaaaattcttgcttagtggtataaagattatgcttagatttctgcctatatcttgtgttttatagcttgttagtgaggcatgggctaatg

SEQ ID NO: 163940 - DNA, 120 bp, Artificial Sequence
  ENSG00000107864_57 (sequence is synthesized)
cagaatgtactgcatttatgcaattagcaaataactgctagttttcattttatctattatattagcaacaaaaatggcatttaactgggtaaagctcctacctaaatatttgagtattgt

SEQ ID NO: 163941 - DNA, 120 bp, Artificial Sequence
  ENSG00000107864_58 (sequence is synthesized)
gacatctctacttgcaaggtttgagtgaaagattagtcacagattagtgaaaaaaatgtatctttttgttaaaactggcttatttgaatggattgttgcttttcactagcttgtatggta

SEQ ID NO: 163942 - DNA, 120 bp, Artificial Sequence
  ENSG00000107864_59 (sequence is synthesized)
tgtcagctaacatttgtttttttttttcttttataataaccaaacttctctatctcagctgcaatagtgttccatcttaccacagagtgttttataattaatgctgttgactttataccc

SEQ ID NO: 163943 - DNA, 120 bp, Artificial Sequence
  ENSG00000107864_60 (sequence is synthesized)
caaaatgggtcaagaagtggctacatgattaggggatgtttaaatttgtatgacgacaaagttaattgcaacaagtagaaaacttgggtgctaacacaggataacttctgctctttttct

SEQ ID NO: 163944 - DNA, 120 bp, Artificial Sequence
  ENSG00000107864_61 (sequence is synthesized)
ttcctggatatagttctgttggggtataaagtattaggtatttgtattttttgctgtcaaaataatggacttaacttttagagtgttcacagctaggatctctgtatttgtttttcaact

SEQ ID NO: 163945 - DNA, 120 bp, Artificial Sequence
  ENSG00000107864_62 (sequence is synthesized)
aacaactaattttaaatgtattgtatcttttattacctgttctcttagattgttttttgctagtaacccttactcagcttctgcctttggggcttggactaatattgcttgtatggaact

SEQ ID NO: 163946 - DNA, 120 bp, Artificial Sequence
  ENSG00000107864_63 (sequence is synthesized)
acagtactgtgactaaacatggagctcaatgcagctactgcttacaactgcttaaactttgtagtttggacttcatttttttctgtaataacaacttattaaatctagttgtatgaagta

SEQ ID NO: 163947 - DNA, 120 bp, Artificial Sequence
  ENSG00000107864_64 (sequence is synthesized)
acagttgtcaaagtgcttttgccagagcggtcacataatcaacctgaaagaagaaaataaatactgtatacttttaaattttatcgattcttaaaaactggacactcaaagctgcgcaaa

SEQ ID NO: 163948 - DNA, 120 bp, Artificial Sequence
  ENSG00000107864_65 (sequence is synthesized)
atttccatcatccaggaacagataatattatggcacttaacagtcgatcttctctctttccctttgaagatgccttcctggatgatagccatggtgatcaagccttgtcatctggcttaa

SEQ ID NO: 163949 - DNA, 120 bp, Artificial Sequence
  ENSG00000107872_0 (sequence is synthesized)
tgtcctcccagctaccccctccctaagcaggctgaggaagaagagatagcaagccctcacctaacttgacccctttcttgtctctccccgctgctagcttctcccttctcgctgccttgc

SEQ ID NO: 163950 - DNA, 120 bp, Artificial Sequence
  ENSG00000107872_1 (sequence is synthesized)
ggggtggggaaacgtggaaggaattctgggaaaaccagatgtctgggttctctattcccgtctggcttgattctggacaaggggcttcctctccagggcctcggtttccccatctttaaa

SEQ ID NO: 163951 - DNA, 120 bp, Artificial Sequence
  ENSG00000107872_2 (sequence is synthesized)
atggactgatagcatagacctgcccacctttcagaggtgcccgaagccttgacgagataacagatgagaagtggttttcgttgtgatgagccagctgaagcggttgcaccggagcgccag

SEQ ID NO: 163952 - DNA, 120 bp, Artificial Sequence
  ENSG00000107872_3 (sequence is synthesized)
accgtcagcggtgcagtggctctcgcgtccttcacatccccccacacccatcccgtggatgatgggggaaggcactactcctggggttccccgaagcggatcctgggactgggacctggg

SEQ ID NO: 163953 - DNA, 120 bp, Artificial Sequence
  ENSG00000107872_4 (sequence is synthesized)
gacgcggtgagaggcagccctgaagctgagtccagaggtctggggcgtcattgtcccagggcggacccagccccagaccctacaactaaacccaaggccagccgagaagcactaccactg

SEQ ID NO: 163954 - DNA, 120 bp, Artificial Sequence
  ENSG00000107872_5 (sequence is synthesized)
gcgggctgagctgagctctcattcttcttaggactctggacctttggaggaaatgaaagggacccagttggaaatatagtctttcttcgcgccccctacatctctctcccccggcggaaa

SEQ ID NO: 163955 - DNA, 120 bp, Artificial Sequence
  ENSG00000107872_6 (sequence is synthesized)
cgcggcccaaactgttacgaagtggaagaggctggatagctcttcataattaatcaggaatgggaggtttgagcaggtttacttgatgagggaaacattatagcctcgccaattcattca

SEQ ID NO: 163956 - DNA, 120 bp, Artificial Sequence
  ENSG00000107872_7 (sequence is synthesized)
ttatttcaacaattacttattgaacacctgctacgtggcagacagtaagagcctggatagtttctccccgtttttcaaagtcgctaaacgcgaccagagggcagaggagaggccggtaac

SEQ ID NO: 163957 - DNA, 120 bp, Artificial Sequence
  ENSG00000107872_8 (sequence is synthesized)
ctaagagtcctggctccgccccctccgcgtttggccttgcctgctcctcccaccaccacttcgctcagaggcggctactggctcaagaggacgacagaagccagtctctgatgcccaccg

SEQ ID NO: 163958 - DNA, 120 bp, Artificial Sequence
  ENSG00000107872_9 (sequence is synthesized)
tcggggtccacccgaaaagctttcagatcggatcctcggtgagacggcactcgattaaataggtctgtctctacaggccaaggaggcgggtttggtgcggccactccaaggccaaagcga

SEQ ID NO: 163959 - DNA, 120 bp, Artificial Sequence
  ENSG00000107872_10 (sequence is synthesized)
gaaaatcttactgcgcacgcgcaatagacagccgatggagccaccgatggagccgtccggaggggagcaagagcccggagccgtcaggttcctggacctgccctgggaagacgtgctgct

SEQ ID NO: 163960 - DNA, 120 bp, Artificial Sequence
  ENSG00000107872_11 (sequence is synthesized)
cccacacgtcctgaaccgggtcccgctgcgccagctgctccggctgcagcgcgttagccgggccttccggtcgctggtgcagcttcacctggccgggctgcgtcgcttcgatgccgcgca

SEQ ID NO: 163961 - DNA, 120 bp, Artificial Sequence
  ENSG00000107872_12 (sequence is synthesized)
ggtgggtccgcagatcccgcgggccgcattggcccggctgctgcgggatgccgaggggctgcaggagctggcactggcgccgtgtcacgaatggctgtcagacgaggacctggtgccggt

SEQ ID NO: 163962 - DNA, 120 bp, Artificial Sequence
  ENSG00000107872_13 (sequence is synthesized)
gctggcgcggaatccgcagctgcggagtgtggcgttgggcggctgcgggcaactgagtcgccgggcgcttggggctttggccgagggctgcccacgcctgcagcgcctgtcgctcgcgca

SEQ ID NO: 163963 - DNA, 120 bp, Artificial Sequence
  ENSG00000107872_14 (sequence is synthesized)
ctgtgactgggtggacgggctggcgctgcgcggcctcgctgatcgctgcccggccctggaggagctggatctcaccgcctgccgccagctcaaggacgaggccatcgtgtacctggcgca

SEQ ID NO: 163964 - DNA, 120 bp, Artificial Sequence
  ENSG00000107872_15 (sequence is synthesized)
gaggcgcggcgctggtctccgcagcctctctctggccgtcaacgccaacgtgggggacgccgcggttcaagagttggctcggaactgcccagaactccaccaccttgacctcaccggctg

SEQ ID NO: 163965 - DNA, 120 bp, Artificial Sequence
  ENSG00000107872_16 (sequence is synthesized)
cctccgcgtcggaagcgacggtgtcaggacattggccgagtactgccccgtgctgcgttcgctgcgggtgcggcactgccaccatgtggcggagtccagcctgagccgcttgcggaagcg

SEQ ID NO: 163966 - DNA, 120 bp, Artificial Sequence
  ENSG00000107872_17 (sequence is synthesized)
cggcgtggacatcgacgtggagccgccgctgcaccaggccctggtgctgctgcaggatatggcgggcttcgcaccttttgtcaacctgcaggtctgacccgcctgccaatcggagcacag

SEQ ID NO: 163967 - DNA, 120 bp, Artificial Sequence
  ENSG00000107872_18 (sequence is synthesized)
ctggactgtgtggctggggcctgacactgagctgtagggaaactgaactgtgaggacctctggtgagaggccagtgccctgccccaccctggagcttcaaataaagagctttttaccccc

SEQ ID NO: 163968 - DNA, 120 bp, Artificial Sequence
  ENSG00000107872_19 (sequence is synthesized)
accatcaactatggaaaggagatctagggaacaccgtcttgaacccgccaggggttttgagtctcggacccaggagatccaaccctgaccaccctcccaggatgcagcagggggatgtta

SEQ ID NO: 163969 - DNA, 120 bp, Artificial Sequence
  ENSG00000107872_20 (sequence is synthesized)
gaggcggctactggctcaagaggacgacagaagccagtctctgatgcccaccgcattctccagcttcaggcctcaagccctgtagccgagaaggcgaggcctaatgttacaccaccggcc

SEQ ID NO: 163970 - DNA, 120 bp, Artificial Sequence
  ENSG00000107874_0 (sequence is synthesized)
gagagctgcaccgcgcgggacaagtcgccggcggcgcccgacggagcagaagagagagcatggagctggagaggatcgtcagtgcagccctccttgcctttgtccagacacacctcccgg

SEQ ID NO: 163971 - DNA, 120 bp, Artificial Sequence
  ENSG00000107874_1 (sequence is synthesized)
aggccgacctcagtggcttggatgaggtcatcttctcctatgtgcttggggtcctggaggacctgggcccctcgggcccatcagaggagaacttcgatatggaggctttcactgagatga

SEQ ID NO: 163972 - DNA, 120 bp, Artificial Sequence
  ENSG00000107874_2 (sequence is synthesized)
tggaggcctatgtgcctggcttcgcccacatccccaggggcacaataggggacatgatgcagaagctctcagggcagctgagcgatgccaggaacaaagagaacctgcaaccgcagagct

SEQ ID NO: 163973 - DNA, 120 bp, Artificial Sequence
  ENSG00000107874_3 (sequence is synthesized)
ctggtgtccaaggtcaggtgcccatctccccagagcccctgcagcggcccgaaatgctcaaagaagagactaggtcttcggctgctgctgctgcagacacccaagatgaggcaactggcg

SEQ ID NO: 163974 - DNA, 120 bp, Artificial Sequence
  ENSG00000107874_4 (sequence is synthesized)
ggggtggatgtactcctggaggtgttccctacctgttcggtggagcaggcccagtgggtgctggccaaagctcggggggacttggaagaagctgtgcagatgctggtagagggaaaggaa

SEQ ID NO: 163975 - DNA, 120 bp, Artificial Sequence
  ENSG00000107874_5 (sequence is synthesized)
gaggggcctgcagcctgggagggccccaaccaggacctgcccagacgcctcagaggcccccaaaaggatgagctgaagtccttcatcctgcagaagtacatgatggtggatagcgcagag

SEQ ID NO: 163976 - DNA, 120 bp, Artificial Sequence
  ENSG00000107874_6 (sequence is synthesized)
gatcagaagattcaccggcccatggctcccaaggaggcccccaagaagctgatccgatacatcgacaaccaggtagtgagcaccaaaggggagcgattcaaagatgtgcggaaccctgag

SEQ ID NO: 163977 - DNA, 120 bp, Artificial Sequence
  ENSG00000107874_7 (sequence is synthesized)
gccgaggagatgaaggccacatacatcaacctcaagccagccagaaagtaccgcttccattgaggcactcgccggactctgcccgagccttctaggctcagatcccagagggatgcagga

SEQ ID NO: 163978 - DNA, 120 bp, Artificial Sequence
  ENSG00000107874_8 (sequence is synthesized)
gccctatacccctacacaggggccccctaactcctgtcccccttctctactcctttgctccatagtgttaacctactctcggagctgcctccatgggcacagtaaaggtggcccaaggaa

SEQ ID NO: 163979 - DNA, 120 bp, Artificial Sequence
  ENSG00000107874_9 (sequence is synthesized)
agatgaggtactggtagaggagggtaccgatgagggacccagggggctggaaaggggggagtattgcctcttgttaacgtttgtacccttaggcaactggcgctgaggaggagcttctgc

SEQ ID NO: 163980 - DNA, 120 bp, Artificial Sequence
  ENSG00000107882_0 (sequence is synthesized)
gacagcctgggcggacagtgcgccgtgcgcaggcgcggagctagacctcgctgcagcccccatcgcctcggggagtctcacccaccgagtccgcccgctggcccgtcagtgctctccccg

SEQ ID NO: 163981 - DNA, 120 bp, Artificial Sequence
  ENSG00000107882_1 (sequence is synthesized)
gtgctctccccgtcgtttgccctctccagttcccccagtgcctgccctacgcaccccgatggcggagctgcggcctagcggcgcccccggccccaccgcgcccccggcccctggcccgac

SEQ ID NO: 163982 - DNA, 120 bp, Artificial Sequence
  ENSG00000107882_2 (sequence is synthesized)
cttcgcttcgctctttcccccgggactgcacgccatctacggagagtgccgccgcctttaccctgaccagccgaacccgctccaggttaccgctatcgtcaagtactggttgggtggccc

SEQ ID NO: 163983 - DNA, 120 bp, Artificial Sequence
  ENSG00000107882_3 (sequence is synthesized)
agaccccttggactatgttagcatgtacaggaatgtggggagcccttctgctaacatccccgagcactggcactacatcagcttcggcctgagtgatctctatggtgacaacagagtcca

SEQ ID NO: 163984 - DNA, 120 bp, Artificial Sequence
  ENSG00000107882_4 (sequence is synthesized)
tgagtttacaggaacagatggacctagtggttttggctttgagttgacctttcgtctgaagagagaaactggggagtctgccccaccaacatggcccgcagagttaatgcagggcttggc

SEQ ID NO: 163985 - DNA, 120 bp, Artificial Sequence
  ENSG00000107882_5 (sequence is synthesized)
acgatacgtgttccagtcagagaacaccttctgcagtggggaccatgtgtcctggcacagccctttggataacagtgagtcaagaattcagcacatgctgctgacagaggacccacagat

SEQ ID NO: 163986 - DNA, 120 bp, Artificial Sequence
  ENSG00000107882_6 (sequence is synthesized)
gcagcccgtgcagacaccctttggggtagttaccttcctccagatcgttggtgtctgcactgaagagctacactcagcccagcagtggaacgggcagggcatcctggagctgctgcggac

SEQ ID NO: 163987 - DNA, 120 bp, Artificial Sequence
  ENSG00000107882_7 (sequence is synthesized)
agtgcctattgctggcggcccctggctgataactgacatgcggaggggagagaccatatttgagatcgatccacacctgcaagagagagttgacaaaggcatcgagacagatggctccaa

SEQ ID NO: 163988 - DNA, 120 bp, Artificial Sequence
  ENSG00000107882_8 (sequence is synthesized)
cctgagtggtgtcagtgccaagtgtgcctgggatgacctgagccggccccccgaggatgacgaggacagccggagcatctgcatcggcacacagccccggcgactctctggcaaagacac

SEQ ID NO: 163989 - DNA, 120 bp, Artificial Sequence
  ENSG00000107882_9 (sequence is synthesized)
agagcagatccgggagaccctgaggagaggactcgagatcaacagcaaacctgtccttccaccaatcaaccctcagcggcagaatggcctcgcccacgaccgggccccgagccgcaaaga

SEQ ID NO: 163990 - DNA, 120 bp, Artificial Sequence
  ENSG00000107882_10 (sequence is synthesized)
cagcctggaaagtgacagctccacggccatcattccccatgagctgattcgcacgcggcagcttgagagcgtacatctgaaattcaaccaggagtccggagccctcattcctctctgcct

SEQ ID NO: 163991 - DNA, 120 bp, Artificial Sequence
  ENSG00000107882_11 (sequence is synthesized)
aaggggcaggctcctgcatggacggcactttacatataaaagtatcacaggtgacatggccatcacgtttgtctccacgggagtggaaggcgcctttgccactgaggagcatccttacgc

SEQ ID NO: 163992 - DNA, 120 bp, Artificial Sequence
  ENSG00000107882_12 (sequence is synthesized)
ggctcatggaccctggttacaaattctgttgaccgaagagtttgtagagaaaatgttggaggatttagaagatttgacttctccagaggaattcaaacttcccaaagagtacagctggcc

SEQ ID NO: 163993 - DNA, 120 bp, Artificial Sequence
  ENSG00000107882_13 (sequence is synthesized)
tgaaaagaagctgaaggtctccatcctgcctgacgtggtgttcgacagtccgctacactagcctgggctgggccctgcagtggccagcagggagcccagctgctccccagtgacttccag

SEQ ID NO: 163994 - DNA, 120 bp, Artificial Sequence
  ENSG00000107882_14 (sequence is synthesized)
tgtaacagttgtgtcaacgagatctccacaaataaaaggacaagtgtgaggaagactgcgcagtgccaccccgcagcccagtggggtgccatgcacaggccacaggccctccacctcacc

SEQ ID NO: 163995 - DNA, 120 bp, Artificial Sequence
  ENSG00000107882_15 (sequence is synthesized)
tccagctcaggggccgcaccccgccgctggctaagccttgtgacccatcaggccagtgagtgggcaaatgcggaccctccctgcctgcagcctgcacagattctggtttgaggtttgact

SEQ ID NO: 163996 - DNA, 120 bp, Artificial Sequence
  ENSG00000107882_16 (sequence is synthesized)
ctggaccctggctgtgcccctaggtggagacagccctctttctcacctaccccctgccgcacagcccagcaggagggaggcggacagccagatgcagagcgagtggatgcacttcccagc

SEQ ID NO: 163997 - DNA, 120 bp, Artificial Sequence
  ENSG00000107882_17 (sequence is synthesized)
tcatctctggaagcctttgctactcaagctcctctggccgcggaacaattcctctgatcatgtttggttttcttcttccttattttattttgtagaaaccgggtggtattttattgctct

SEQ ID NO: 163998 - DNA, 120 bp, Artificial Sequence
  ENSG00000107882_18 (sequence is synthesized)
gcaaagatgtccagaagccatgtatataatgttttttaaacagaacttcattccccgttgaactttcgcattctctgacagaggcctagggctgtatctctccctgggctgccaccagag

SEQ ID NO: 163999 - DNA, 120 bp, Artificial Sequence
  ENSG00000107882_19 (sequence is synthesized)
aaggtgcttggtgttcgcctgccagcccagagccctggaggagccggctgcacagagaggcttttcttcccagctgggcctggtggagcccggggcagggggagagtagagacactccct

SEQ ID NO: 164000 - DNA, 120 bp, Artificial Sequence
  ENSG00000107882_20 (sequence is synthesized)
gaccccagcctcatcttctaggccttttccacccaaccaggcctacctgggagagggtgaggttcagcacatcacacaccatccccactgtcattcagggcctgggtctccagctctgta

SEQ ID NO: 164001 - DNA, 120 bp, Artificial Sequence
  ENSG00000107882_21 (sequence is synthesized)
accagtcctgtcccatttcctcagtccctgggcctcccagccttcaggctgtagggctgccttactaaaattgaaaaatccacctcttaacatctctttcactttggttttgctaacact

SEQ ID NO: 164002 - DNA, 120 bp, Artificial Sequence
  ENSG00000107882_22 (sequence is synthesized)
gctctctgctgccctcccatcctccctgtatccattcatgccctatctttcattctccactcctaatccctctcctttctggcatcctggcctctcgtggtcctcagcccctcaccccca

SEQ ID NO: 164003 - DNA, 120 bp, Artificial Sequence
  ENSG00000107882_23 (sequence is synthesized)
gtactgcagatctcacagtttgccttccagaagccagcctatctctagcccatggttttggagttcctctcgggttatctcccacgcctgacctggaaccagcaagcccctttcctgcct

SEQ ID NO: 164004 - DNA, 120 bp, Artificial Sequence
  ENSG00000107882_24 (sequence is synthesized)
tcttacccccaactctagggatgggactgttacaatacttcaagatcactctttacacctcttcaaagcaaagtcatgacaatgcagggctcctcattgctcccatctgcctctgctgca

SEQ ID NO: 164005 - DNA, 120 bp, Artificial Sequence
  ENSG00000107882_25 (sequence is synthesized)
cacacaggcaccagcagggatgccacaggagtgcccacagggtgcaggactccactgatgagagatccagccaaagagctgcccccaggggtatgagggcaccagctgggttctccaggg

SEQ ID NO: 164006 - DNA, 120 bp, Artificial Sequence
  ENSG00000107882_26 (sequence is synthesized)
agcaggagttggacctccatggagccactaggcctggcctcctctacacatccccagggctatctggttaattccatcaagctcagagttaaaaggcatatcagcctggagtatttggga

SEQ ID NO: 164007 - DNA, 120 bp, Artificial Sequence
  ENSG00000107882_27 (sequence is synthesized)
gagactggctgcagatccccgccagccaagatgcaagccactcgggacctgatgtcggcagctgtgcctctactgccctgaggacttaccagagggagccctactggccttcccccacca

SEQ ID NO: 164008 - DNA, 120 bp, Artificial Sequence
  ENSG00000107882_28 (sequence is synthesized)
cagcagccctgcctgtgaagctcttgtttctgacatttcacaggcagagaggtgccatcagttcgcctccattccttgccaccatgaccagcctctccctgaactctctcttgctcggga

SEQ ID NO: 164009 - DNA, 120 bp, Artificial Sequence
  ENSG00000107882_29 (sequence is synthesized)
cctgcctgagggctccctgctgcagttcgccgtacttccatctgctgggtgcctccatcgttggttgggtggggatggggcattttctgagctaagctttgtcattagtttgtgaagcac

SEQ ID NO: 164010 - DNA, 120 bp, Artificial Sequence
  ENSG00000107882_30 (sequence is synthesized)
ctggtcagcaacctgccccagacctggagggtctttgtggactgaaggtagacaccagccagcatggtggccctgttctgggggagcagggtaaggcaggaggaagtgggtgagctccga

SEQ ID NO: 164011 - DNA, 120 bp, Artificial Sequence
  ENSG00000107882_31 (sequence is synthesized)
gatgatgagcacatgaagcctgtggccccttcgtacctgcaatatgtcaggagcctcacgctcacccaagatcctgcaggggccaggctccatctcactggctctgagggcaggacaggg

SEQ ID NO: 164012 - DNA, 120 bp, Artificial Sequence
  ENSG00000107882_32 (sequence is synthesized)
tatcacacatttctcaccaggcctcctttcctatgggcattggtgcctcccagaggtttcttgggctgctggctggtgagagaggacccttaaagaagatcaagccaagctgaccttgga

SEQ ID NO: 164013 - DNA, 120 bp, Artificial Sequence
  ENSG00000107882_33 (sequence is synthesized)
ccctgtccagcacagcttctggcacaggatgcttggtgaatgtaccctttctttccctccctgcagctctgagggagcccctgaccttgtagtgggtggaggaggtaaggggcctccctc

SEQ ID NO: 164014 - DNA, 120 bp, Artificial Sequence
  ENSG00000107882_34 (sequence is synthesized)
cctaaatctgcctcttctgcaagctacttggagacttgcctagttgtacccacccctccaggtccctggtgctagagcttctgagaagggcctttccctttcctctttgcctgctatata

SEQ ID NO: 164015 - DNA, 120 bp, Artificial Sequence
  ENSG00000107882_35 (sequence is synthesized)
aggcaggctcctgtggctctgctggctcagtgtgggctgcaggaggactgcagactcagctgcaattctgaggggggtttgggaggcttgtgcgaggtctcaggcctgtgtggggagctg

SEQ ID NO: 164016 - DNA, 120 bp, Artificial Sequence
  ENSG00000107882_36 (sequence is synthesized)
gtgcctcttcctgcccgtatctttctcttccaagggcagtgctccaaggcagggactggagaagccaaggggagagtctaaaagggctagagcatttttaaaaatagacacagggtcttg

SEQ ID NO: 164017 - DNA, 120 bp, Artificial Sequence
  ENSG00000107882_37 (sequence is synthesized)
ggactggggtttcggattgagttgcaagcagggagaaaacctgaaggtcggtgcccctatggggctgaccagtagagaatttcctttactgtatttttgtgtctggtcttccctttctgg

SEQ ID NO: 164018 - DNA, 120 bp, Artificial Sequence
  ENSG00000107882_38 (sequence is synthesized)
cttctaggacatccatgccaggtgaggtgcctgggtccctgttacaagtcaggagccctgtagggagacccctccttttgtacaagtacctgaatgctgcgacaagcagatttttgtaaa

SEQ ID NO: 164019 - DNA, 120 bp, Artificial Sequence
  ENSG00000107882_39 (sequence is synthesized)
attttatattagtttttaatgtcagtggcgactcggttcctggggctgcagccagcctgggacttttgtaagaatttttgggtgactcacttagatgtcgtttccttcttgccccctctt

SEQ ID NO: 164020 - DNA, 120 bp, Artificial Sequence
  ENSG00000107882_40 (sequence is synthesized)
cctctctgtaatctaagtgcattaaacatctttgcagaagtgcctgggttgtgtgctcatttctggctgcctgaagtagtggagccggaagcccggggccctggcagagggagtgggttg

SEQ ID NO: 164021 - DNA, 120 bp, Artificial Sequence
  ENSG00000107882_41 (sequence is synthesized)
agaacatgcaggttgcttgtagaaacacacttacgtaaaaggagagagattctgggaagagtgggcctagcaggaatttggaaatttaggggtttctagttggctctacctgaagctgtg

SEQ ID NO: 164022 - DNA, 120 bp, Artificial Sequence
  ENSG00000107882_42 (sequence is synthesized)
ccttctcctctcccctgtattatcacatctcagatgaagcagtcttccttctcctgcctgaatgaacactattgaggttaggaccaataactgaagccgtatcttggatggaaaagagaa

SEQ ID NO: 164023 - DNA, 120 bp, Artificial Sequence
  ENSG00000107882_43 (sequence is synthesized)
ggaacgtctttctgccctgaggagagggtagtcagcatctccaattttcagcagctcaagaaccttggcccccacaggacttcgcagatgtcacattgcccctcagtcccctgaatgccc

SEQ ID NO: 164024 - DNA, 120 bp, Artificial Sequence
  ENSG00000107882_44 (sequence is synthesized)
ttcggacccaaccccaattccccaagcccctgaccccctagctgccggggttcccactcccagtgccacaaccccctcacctccctggcagcccctcagcgagcctgaggcccagcaccc

SEQ ID NO: 164025 - DNA, 120 bp, Artificial Sequence
  ENSG00000107882_45 (sequence is synthesized)
gctggctccccagcacatggtcccctcccatgggctgttgcccagggaaccggggcgcggtgggaacgagctgctggcctcggcatgtttcaataaagttgctgtgctgggagctactca

SEQ ID NO: 164026 - DNA, 120 bp, Artificial Sequence
  ENSG00000107882_46 (sequence is synthesized)
ctttcatagacttccttgcccacccctcctcttctcccttggcagctcttgatggcaccccttcctggggggctggtcatgaatgcctcatggattcagggcctggggcctgtgtgtagg

SEQ ID NO: 164027 - DNA, 120 bp, Artificial Sequence
  ENSG00000107882_47 (sequence is synthesized)
tatggagtgtggatgctgctacccactccagcagcttaggagcacttcctgaccttctccccctgtcacctgagacacaagtgttaactctccaggccctggctcttggtaattctggtt

SEQ ID NO: 164028 - DNA, 120 bp, Artificial Sequence
  ENSG00000107882_48 (sequence is synthesized)
ccccgtggaaatccaggttggagggatataagactttctgcaccttgggtaaaccaaggtacaagaactcaaggatgaagcaagatgggaggatgtgtggaggccactctccaatggcta

SEQ ID NO: 164029 - DNA, 120 bp, Artificial Sequence
  ENSG00000107882_49 (sequence is synthesized)
catggaaatcccaccagaattcagacagtggcatgtgtgcctggaccagggctgggcaggcctcagtgggaagagcctccccttcttagcctacccccatctgacagccctcccgttcct

SEQ ID NO: 164030 - DNA, 120 bp, Artificial Sequence
  ENSG00000107882_50 (sequence is synthesized)
cctgagtttgtgtgaccagagacctgctggcttatccggagcactttgtccttcctttgctcttctggctggagcgagcttcagagctgttgccaagcagggtaccagggcctcagagcc

SEQ ID NO: 164031 - DNA, 120 bp, Artificial Sequence
  ENSG00000107882_51 (sequence is synthesized)
ataggcctccttccagtccccaccccgtcccgggtctctaacaggtgctcaacctactccaccacactcccgagtgtcttggagggacagcatccttttttggcatttgtttgttgcggg

SEQ ID NO: 164032 - DNA, 120 bp, Artificial Sequence
  ENSG00000107882_52 (sequence is synthesized)
tggggagaggattgaacccttaacctcacctcgctcgcaagtatcaagaaagggaacctgaccctaaacctaaaggtggccatacctggtttgtgaatgtattggagaggcatgcagcat

SEQ ID NO: 164033 - DNA, 120 bp, Artificial Sequence
  ENSG00000107882_53 (sequence is synthesized)
tacagtagaggggaagagaatgatgctaggtttgtgagtttcacccagtctggggagtctgtgaagcatatgtagtcaatacagacacactttttgtccctgcatgtctacagaatttct

SEQ ID NO: 164034 - DNA, 120 bp, Artificial Sequence
  ENSG00000107882_54 (sequence is synthesized)
cctccttcaggccaggcccctcttctcccgccaccaccaaaatacaacccttaattaaaacaaacagcaaacaaaggacaccaaccacactccccagactaagccgagatagaaatggaa

SEQ ID NO: 164035 - DNA, 120 bp, Artificial Sequence
  ENSG00000107882_55 (sequence is synthesized)
gctagtgctttagggatattgtgttccataaattatcttgcctttttccactgttgttattatatcgtttcataacaaaattactttgaaccataaagttataaatacattttaaaagtc

SEQ ID NO: 164036 - DNA, 120 bp, Artificial Sequence
  ENSG00000107890_0 (sequence is synthesized)
gtctagcgggatcgcttgcttggtaacccggagggagagattggaaaccgcggagtttcctttgggaggctgcggccagccggggctgacttgttatgttgggctccggaggccgttaag

SEQ ID NO: 164037 - DNA, 120 bp, Artificial Sequence
  ENSG00000107890_1 (sequence is synthesized)
agccgagagagacatgaggtgtctctgaagcccggtcgcctgggccatgaagaagatttttagtaagaagggcgagtcgcccttgggctccttcgcgcggcggcagaggagcagcgcggg

SEQ ID NO: 164038 - DNA, 120 bp, Artificial Sequence
  ENSG00000107890_2 (sequence is synthesized)
aggcgggggcgagccgggggagggcgcctactcgcagcccggctaccacgtccgagaccgagatctcggcaagatccacaaagctgccagcgcgggtaatgtggcgaaagtgcagcagat

SEQ ID NO: 164039 - DNA, 120 bp, Artificial Sequence
  ENSG00000107890_3 (sequence is synthesized)
ccttttgctcaggaagaatggcttgaacgatagagacaagatgaacaggacggctctacatttggcctgtgccaatggtcatccagaagtagtaactctcctggtggacagaaaatgcca

SEQ ID NO: 164040 - DNA, 120 bp, Artificial Sequence
  ENSG00000107890_4 (sequence is synthesized)
gctcaatgtctgtgacaacgaaaacaggacagctctgatgaaggctgtacaatgccaggaagagaaatgtgcaactattctgctagaacatggtgctgatccaaatcttgcggatgtcca

SEQ ID NO: 164041 - DNA, 120 bp, Artificial Sequence
  ENSG00000107890_5 (sequence is synthesized)
tggcaacactgctcttcactatgctgtctataatgaggacatatcagtagcaacaaagctgcttttgtatgatgcaaatattgaagcaaaaaacaaggatgacctcacaccacttttact

SEQ ID NO: 164042 - DNA, 120 bp, Artificial Sequence
  ENSG00000107890_6 (sequence is synthesized)
tgcagtaagtggaaaaaagcagcaaatggtggaatttttaataaagaaaaaagcaaatgtaaatgcagtagataagttggaaagcagtcaccaactaatttcagaatataaagaagaaag

SEQ ID NO: 164043 - DNA, 120 bp, Artificial Sequence
  ENSG00000107890_7 (sequence is synthesized)
gatacctaaacattcttctcaaaatagtaattcagtggatgaaagctctgaagactccttaagcaggctttctggcaaaccgggtgttgatgattcatggcctacctcagatgacgaaga

SEQ ID NO: 164044 - DNA, 120 bp, Artificial Sequence
  ENSG00000107890_8 (sequence is synthesized)
cctcaattttgatactaagaatgtcccaaaaccaagcttagcaaagctaatgactgcttctcagcaatccaggaaaaatttagaagcaacatatggcactgtgagaacaggaaatagaac

SEQ ID NO: 164045 - DNA, 120 bp, Artificial Sequence
  ENSG00000107890_9 (sequence is synthesized)
tttgtttgaggatagagattccgatagtcaagatgaagttgtggttgaaagccttcctacaacatcaatcaaagtccagtgcttttctcatcctacctatcaatcacctgaccttcttcc

SEQ ID NO: 164046 - DNA, 120 bp, Artificial Sequence
  ENSG00000107890_10 (sequence is synthesized)
aaaaccttcccacaagtcgttagcaaaccctggtcttatgaaggaagaaccaacaaagccaggcattgcaaaaaaagaaaatggtattgatattattgaaagtgctccactagagcaaac

SEQ ID NO: 164047 - DNA, 120 bp, Artificial Sequence
  ENSG00000107890_11 (sequence is synthesized)
aaataatgacaatttgacttatgttgatgaagtgcacaaaaataatagaagtgatatgatgtccgcattaggattaggacaagaggaagatatagaatcaccttgggattctgagagtat

SEQ ID NO: 164048 - DNA, 120 bp, Artificial Sequence
  ENSG00000107890_12 (sequence is synthesized)
ctctgagaattttccacagaagtatgttgatcctttagctggggctgcagacggaaaagaaaaaaatataggaaatgaacaagcagaagatgtgttttatataccttcttgcatgagtgg

SEQ ID NO: 164049 - DNA, 120 bp, Artificial Sequence
  ENSG00000107890_13 (sequence is synthesized)
atcaagaaactttaagatggctaaactagaggatacaagaaatgtaggcatgccagtagcccacatggagtctcctgagagatatcttcacttgaagcctaccattgaaatgaaagattc

SEQ ID NO: 164050 - DNA, 120 bp, Artificial Sequence
  ENSG00000107890_14 (sequence is synthesized)
tgttccaaataaagcaggaggaatgaaggatgtacaaacatccaaagcagctgaacatgacttagaagtagcatcagaagaagagcaagaaagggaagggagtgaaaataaccagccaca

SEQ ID NO: 164051 - DNA, 120 bp, Artificial Sequence
  ENSG00000107890_15 (sequence is synthesized)
ggttgaagaagaaaggaaaaaacacagaaataatgaaatggaagtatcagcaaacatacatgatggtgctactgatgatgctgaagatgatgatgatgatgatggattaattcaaaaaag

SEQ ID NO: 164052 - DNA, 120 bp, Artificial Sequence
  ENSG00000107890_16 (sequence is synthesized)
aaagagtggagaaactgatcatcagcaatttcccaggaaggaaaataaagagtatgctagtagtggtcctgccttgcaaatgaaggaagtaaagagcactgaaaaagaaaaacggacctc

SEQ ID NO: 164053 - DNA, 120 bp, Artificial Sequence
  ENSG00000107890_17 (sequence is synthesized)
gaaagaatctgtgaattcaccagtgtttgggaaggccagtttactaactggtggcctgctacaagtggatgatgacagcagtttaagtgaaatagatgaggatgaaggaaggcctactaa

SEQ ID NO: 164054 - DNA, 120 bp, Artificial Sequence
  ENSG00000107890_18 (sequence is synthesized)
gaaaacatctaatgaaaagaacaaggtcaaaaaccaaatacagtctatggatgatgttgatgacttaactcagtcatctgaaacagcctcagaggattgtgagctaccccactctagtta

SEQ ID NO: 164055 - DNA, 120 bp, Artificial Sequence
  ENSG00000107890_19 (sequence is synthesized)
caagaattttatgttgctcattgaacaacttggaatggagtgtaaagattctgttagcctattgaaaatccaggatgcagctctttcatgtgaaagattattagaacttaaaaaaaatca

SEQ ID NO: 164056 - DNA, 120 bp, Artificial Sequence
  ENSG00000107890_20 (sequence is synthesized)
ctgtgaactacttacagtaaaaattaaaaaaatggaagacaaggttaatgtactacaaagggagctatctgaaacaaaagaaataaaatcacagttagagcatcaaaaagttgaatggga

SEQ ID NO: 164057 - DNA, 120 bp, Artificial Sequence
  ENSG00000107890_21 (sequence is synthesized)
acgagaactgtgctctttgagatttagcttaaaccaagaagaagagaagagaagaaatgctgatacgttgtatgaaaaaattagggaacagttaagaagaaaagaagagcaatataggaa

SEQ ID NO: 164058 - DNA, 120 bp, Artificial Sequence
  ENSG00000107890_22 (sequence is synthesized)
agaagttgaagtgaaacaacagcttgaactgagtctccaaacactggagatggaattgaggactgtaaaaagtaatttgaatcaggtcgttcaagagcgaaatgacgctcagaggcaact

SEQ ID NO: 164059 - DNA, 120 bp, Artificial Sequence
  ENSG00000107890_23 (sequence is synthesized)
ttctcgagaacagaatgccagaatgttacaagatggaattctgaccaatcacctttccaaacaaaaggagattgaaatggctcaaaagaaaatgaattctgagaattctcatagtcatga

SEQ ID NO: 164060 - DNA, 120 bp, Artificial Sequence
  ENSG00000107890_24 (sequence is synthesized)
agaagaaaaagacctatcgcataaaaatagcatgttgcaggaagaaattgctatgctaagactagaaatagacacaataaaaaatcaaaaccaggaaaaagaaaagaaatgttttgagga

SEQ ID NO: 164061 - DNA, 120 bp, Artificial Sequence
  ENSG00000107890_25 (sequence is synthesized)
ccttaaaattgtaaaagaaaagaatgaagaccttcagaagactataaaacagaatgaggaaacattaacacaaacaatatcccagtataatggacggcttagtgttctgacagctgagaa

SEQ ID NO: 164062 - DNA, 120 bp, Artificial Sequence
  ENSG00000107890_26 (sequence is synthesized)
tgcaatgctaaattctaaactggagaatgaaaagcaaagcaaggaaagactggaagcagaagttgaatcataccattctagattggctgctgctatacatgatcgtgatcaaagtgagac

SEQ ID NO: 164063 - DNA, 120 bp, Artificial Sequence
  ENSG00000107890_27 (sequence is synthesized)
ttctcaacaactatttaaaactgaaagtaaactcaatagcctagaaattgagttccatcacacgagagatgccctcagagaaaagactttgggtttagaacgggtacaaaaggacctaag

SEQ ID NO: 164064 - DNA, 120 bp, Artificial Sequence
  ENSG00000107890_28 (sequence is synthesized)
ccaaacacagtgtcaaatgaaggaaatggaacaaaagtatcaaaatgaacaagttaaagtgaataaatacattggaaagcaggagtctgtagaggagagattgtctcaactacaaagtga

SEQ ID NO: 164065 - DNA, 120 bp, Artificial Sequence
  ENSG00000107890_29 (sequence is synthesized)
gaatatgttgcttcgacaacaactggatgatgcccacaacaaggctgacaataaagagaagacagtgattaatatccaagaccagtttcatgctattgtgcaaaaacttcaagctgagag

SEQ ID NO: 164066 - DNA, 120 bp, Artificial Sequence
  ENSG00000107890_30 (sequence is synthesized)
tgaaaagcaaagtcttctgctagaagaaagaaataaggagttaatcagtgaatgtaatcacttaaaagaaagacagtatcaatatgaaaatgaaaaggcagaaagagaagttgttgtgag

SEQ ID NO: 164067 - DNA, 120 bp, Artificial Sequence
  ENSG00000107890_31 (sequence is synthesized)
acaacttcaacaagaactagctgataccctaaaaaaacaatctatgtcagaggcttcactggaggttacgtcacgttatcgtattaatttagaagatgagacacaggatttaaagaagaa

SEQ ID NO: 164068 - DNA, 120 bp, Artificial Sequence
  ENSG00000107890_32 (sequence is synthesized)
attaggtcaaatcagaaatcaattgcaagaagcacaggatcgacatacagaagctgtcagatgtgctgagaagatgcaagatcacaagcaaaagcttgaaaaagataatgccaagttaaa

SEQ ID NO: 164069 - DNA, 120 bp, Artificial Sequence
  ENSG00000107890_33 (sequence is synthesized)
agttacagtcaaaaagcaaatggacaaaattgaggagcttcagaaaaacctgttaaatgcaaatttgtctgaagatgaaaaggaacaattaaagaaacttatggaattaaaacagtcact

SEQ ID NO: 164070 - DNA, 120 bp, Artificial Sequence
  ENSG00000107890_34 (sequence is synthesized)
ggaatgtaatttggatcaagaaatgaagaaaaatgttgaattagaaagagagataactggatttaagaacctcttaaaaatgacaagaaagaagttaaatgaatatgaaaatggagaatt

SEQ ID NO: 164071 - DNA, 120 bp, Artificial Sequence
  ENSG00000107890_35 (sequence is synthesized)
tagtttccatggagatttaaaaactagtcaatttgaaatggatattcagattaataagctaaaacataagattgatgatcttacagcagaactggagactgcaggttcaaaatgtctaca

SEQ ID NO: 164072 - DNA, 120 bp, Artificial Sequence
  ENSG00000107890_36 (sequence is synthesized)
tctggatacaaagaaccaaattcttcaagaggagttgttatctatgaaaacagtacaaaagaaatgtgaaaaactacagaagaataaaaagaagttggaacaagaagtgatcaacctgag

SEQ ID NO: 164073 - DNA, 120 bp, Artificial Sequence
  ENSG00000107890_37 (sequence is synthesized)
aagtcatatagaaaggaatatggtagaacttggtcaagtcaaacagtataaacaggagattgaagaaagagcaagacaggaaatagcagaaaaattaaaagaagtcaatctatttttaca

SEQ ID NO: 164074 - DNA, 120 bp, Artificial Sequence
  ENSG00000107890_38 (sequence is synthesized)
ggcacaagcagcatctcaagaaaacttagagcagtttagagagaataattttgcttcaatgaaaagtcagatggaactcagaattaaagatctggaatctgaactctccaaaataaaaac

SEQ ID NO: 164075 - DNA, 120 bp, Artificial Sequence
  ENSG00000107890_39 (sequence is synthesized)
ttctcaagaagactttaataaaaccgaactggaaaaatataagcaactctatctagaagaattaaaagttagaaaatctttgtcaagtaaactaaccaaaactaatgagaggctagcaga

SEQ ID NO: 164076 - DNA, 120 bp, Artificial Sequence
  ENSG00000107890_40 (sequence is synthesized)
ggtcaacaccaaacttcttgtggaaaaacagcagagcagatctttgttcaccactctcactaccaggccagtcatggagccaccttgtgtgggaaatcttaataatagtttagatctcaa

SEQ ID NO: 164077 - DNA, 120 bp, Artificial Sequence
  ENSG00000107890_41 (sequence is synthesized)
cagaaaacttattccaagagaaaacttagtgatctctacctcaaatccacgggcttcaaataatagcatggagaactacttgagcaagatgcagcaggagttggaaaaaaatataactag

SEQ ID NO: 164078 - DNA, 120 bp, Artificial Sequence
  ENSG00000107890_42 (sequence is synthesized)
agaactcaaagaagctgctgctgaattggaatctggatcaatagcttcccctctagggtctactgatgagtcaaatctaaatcaagatctagtttggaaagcatcaagagaatatgtaca

SEQ ID NO: 164079 - DNA, 120 bp, Artificial Sequence
  ENSG00000107890_43 (sequence is synthesized)
ggttttaaagaaaaattatatgatctgaaagataagattttattactgggctgtttatgtgacattttgtttctcattaaatattaatatatgacatgtaaaaatattaaaggaacgtat

SEQ ID NO: 164080 - DNA, 120 bp, Artificial Sequence
  ENSG00000107890_44 (sequence is synthesized)
ttttgtatcatatatgtcagatcaaaatttatatagtattttaaacaatgttacttggcttctttaacttttaagtggattttgccaatgaaaaccaggaatattgagttttacatactc

SEQ ID NO: 164081 - DNA, 120 bp, Artificial Sequence
  ENSG00000107890_45 (sequence is synthesized)
aaactgcccaaatgtgagctgtttaaacagccaaaccactaagttgtcattaatactttagtgcagttaattgatggcttatttgtattttgtaatttttatcactatatgtagtggtag

SEQ ID NO: 164082 - DNA, 120 bp, Artificial Sequence
  ENSG00000107890_46 (sequence is synthesized)
atgtctaattggacttagacatcattttgttgtgcaggaactgtggtcattgttcatgtttggatgtattacaattgttacagtgccatcaaatttacataattttaattttaagcactg

SEQ ID NO: 164083 - DNA, 120 bp, Artificial Sequence
  ENSG00000107890_47 (sequence is synthesized)
atttatatagctgttctcagggagaaacaagatttgcctgattcaccttttctgtttgtttatttatttttaattaaccttttggaaatagccttcagtttagagaaaatttcgaagttt

SEQ ID NO: 164084 - DNA, 120 bp, Artificial Sequence
  ENSG00000107890_48 (sequence is synthesized)
tagtacaaagactttctcctccgaacaatttgagagtaaattgctgacattatgtcatcacccctgattactttagtgggcattcctacaagtcaggacattctacataactacagtgca

SEQ ID NO: 164085 - DNA, 120 bp, Artificial Sequence
  ENSG00000107890_49 (sequence is synthesized)
aaccttgcaatcagaaagtcaacattaatacattctagtttgttacttctctgtaatgtcctttatagcaaaaggatcccattctaatccatggcttgtatttagttgttgtatctgtta

SEQ ID NO: 164086 - DNA, 120 bp, Artificial Sequence
  ENSG00000107890_50 (sequence is synthesized)
gatctttcagtctggaacagttcctcagtctttccttgaccttcatgaccttgaatattttgaagagtaaagtctggtaatataagaatgtccctcaattgggtttcatggtgattagat

SEQ ID NO: 164087 - DNA, 120 bp, Artificial Sequence
  ENSG00000107890_51 (sequence is synthesized)
ttagattatatgattttttggcaggagtatcacagaagtgacccagtgatcttctcattgcatcttacctgtgaccctacagttttgatttgccctgttactggtaatgttagcattgat

SEQ ID NO: 164088 - DNA, 120 bp, Artificial Sequence
  ENSG00000107890_52 (sequence is synthesized)
cactaacagtggtatctgctgaatttctcctctgtaatgttattttttcaccttgtggttaattagtattttacagggaggtaatttgagactatgtacatatctctactccccatcgaa

SEQ ID NO: 164089 - DNA, 120 bp, Artificial Sequence
  ENSG00000107890_53 (sequence is synthesized)
ccctcaatttattcatttgcttgtatcaaataaaccatggattcatggtttattttattcagtgagttataattcattaatattgttattaaaaatttgtttttcttttaagaaatgtta

SEQ ID NO: 164090 - DNA, 120 bp, Artificial Sequence
  ENSG00000107890_54 (sequence is synthesized)
ggctggagtgctacagcatgatctcagctcactgcaatctctgcttcctgggttcacacaattcttctgcctccacctcccaagtagctgggaccacaggctttctggcaaaccgggtgt

SEQ ID NO: 164091 - DNA, 120 bp, Artificial Sequence
  ENSG00000107890_55 (sequence is synthesized)
ttattccccaaatgttaacattttactgcatttactttatcctttctcccccttctcctcctgtctttctagatgaatatgaatataggtacttaatacagattttttttctaaactgtt

SEQ ID NO: 164092 - DNA, 120 bp, Artificial Sequence
  ENSG00000107890_56 (sequence is synthesized)
aggaatttgtgccttcataggctgaagacttaaaggttggagatgctatggagccctgcagaagagggatctgctttctggcaaaccgggtgttgatgattcatggcctacctcagatga

SEQ ID NO: 164093 - DNA, 120 bp, Artificial Sequence
  ENSG00000107890_57 (sequence is synthesized)
gagatgatcatacagtttttgtttctaattatgtttatgtgatgaatcacatttaagacttgcatatgttgaaccatccctgcatccttgaaatgaaacccacttgatcatggtgaatta

SEQ ID NO: 164094 - DNA, 120 bp, Artificial Sequence
  ENSG00000107890_58 (sequence is synthesized)
ttactttgtgatgtgctgttggattcggtttgctagtattttcttgaggatttttgtatctatattcatcagagatattggtctgcagttttctttttttgttatgtccttttctggctt

SEQ ID NO: 164095 - DNA, 120 bp, Artificial Sequence
  ENSG00000107890_59 (sequence is synthesized)
tgccactggataatgctgagatagactggtgcaggacaaaggacagaactcaaagtcatccctctgctgacctgagacaaatgtgtatctgagtgcttcctccgccctattgtctatgtc

SEQ ID NO: 164096 - DNA, 120 bp, Artificial Sequence
  ENSG00000107890_60 (sequence is synthesized)
aaaatagaatgatgtagtctcccaaagctagagaatatcgactgtttccatgctgctgaaagattaagatgaggacaagtgactttgacaagcagccatttcaataaatggtcaccatgg

SEQ ID NO: 164097 - DNA, 120 bp, Artificial Sequence
  ENSG00000107890_61 (sequence is synthesized)
tctatggttgttactattattttaaaatataagcattgagtgatgttaaaacataaagagatgctttgacttgacttttttacctctgcatacatccataaggaactactttcttatatt

SEQ ID NO: 164098 - DNA, 120 bp, Artificial Sequence
  ENSG00000107890_62 (sequence is synthesized)
tttcagttcataattaataaagtatgtgctaagtatattactgctgcatagtataattctgctaatttgcaggattcatttaagaatccagtgaaggatagtgcaaaaaaaaaaagaaaa

SEQ ID NO: 164099 - DNA, 120 bp, Artificial Sequence
  ENSG00000107897_0 (sequence is synthesized)
taagcccgcggggcagggcgaggggcgggcgtcggggacattaccggacaggccttgtccggcaataccaagtttcatgcaggctcttgggaaagctggtgctgctgctgcctgattccc

SEQ ID NO: 164100 - DNA, 120 bp, Artificial Sequence
  ENSG00000107897_1 (sequence is synthesized)
gccgacagaccttgggaccggggccaacactggcagctggagatggcggacacgagatccgtgcacgagactaggtttgaggcggccgtgaaggtgatccagagtttgccgaagaatggt

SEQ ID NO: 164101 - DNA, 120 bp, Artificial Sequence
  ENSG00000107897_2 (sequence is synthesized)
tcattccagccaacaaatgaaatgatgcttaaattttatagcttctataagcaggcaactgaaggaccctgtaaactttcaaggcctggattttgggatcctattggaagatataaatgg

SEQ ID NO: 164102 - DNA, 120 bp, Artificial Sequence
  ENSG00000107897_3 (sequence is synthesized)
gatgcttggagttcactgggtgatatgaccaaagaggaagccatgattgcatatgttgaagaaatgaaaaagattattgaaactatgccaatgactgagaaagttgaagaattgctgcgt

SEQ ID NO: 164103 - DNA, 120 bp, Artificial Sequence
  ENSG00000107897_4 (sequence is synthesized)
gtcataggtccattttatgaaattgtcgaggacaaaaagagtggcaggagttctgatataacctcagatcttggtaatgttctcacttctactccaaacgccaaaaccgttaatggtaaa

SEQ ID NO: 164104 - DNA, 120 bp, Artificial Sequence
  ENSG00000107897_5 (sequence is synthesized)
gctgaaagcagtgacagtggagccgagtctgaggaagaagaggcccaagaagaagtgaaaggagcagaacaaagtgataatgataagaaaatgatgaagaagtcagcagaccataagaat

SEQ ID NO: 164105 - DNA, 120 bp, Artificial Sequence
  ENSG00000107897_6 (sequence is synthesized)
ttggaagtcattgtcactaatggctatgataaagatggctttgttcaggatatacagaatgacattcatgccagttcttccctgaatggcagaagcactgaagaagtaaagcccattgat

SEQ ID NO: 164106 - DNA, 120 bp, Artificial Sequence
  ENSG00000107897_7 (sequence is synthesized)
gaaaacttggggcaaactggaaaatctgctgtttgcattcaccaagatataaatgatgatcatgttgaagatgttacaggaattcagcatttgacaagcgattcagacagtgaagtttac

SEQ ID NO: 164107 - DNA, 120 bp, Artificial Sequence
  ENSG00000107897_8 (sequence is synthesized)
tgtgattctatggaacaatttggacaagaagagtctttagacagctttacgtccaacaatggaccatttcagtattacttgggtggtcattccagtcaacccatggaaaattctggattt

SEQ ID NO: 164108 - DNA, 120 bp, Artificial Sequence
  ENSG00000107897_9 (sequence is synthesized)
cgtgaagatattcaagtacctcctggaaatggcaacattgggaatatgcaggtggttgcagttgaaggaaaaggtgaagtcaagcatggaggagaagatggcaggaataacagcggagca

SEQ ID NO: 164109 - DNA, 120 bp, Artificial Sequence
  ENSG00000107897_10 (sequence is synthesized)
ccacaccgggagaagcgaggcggagaaactgacgaattctctaatgttagaagaggaagaggacataggatgcaacacttgagcgaaggaaccaagggccggcaggtgggaagtggaggt

SEQ ID NO: 164110 - DNA, 120 bp, Artificial Sequence
  ENSG00000107897_11 (sequence is synthesized)
gatggggagcgctggggctccgacagagggtcccgaggcagcctcaatgagcagatcgccctcgtgctgatgagactgcaggaggacatgcagaatgtccttcagagactgcagaaactg

SEQ ID NO: 164111 - DNA, 120 bp, Artificial Sequence
  ENSG00000107897_12 (sequence is synthesized)
gaaacgctgactgctttgcaggcaaaatcatcaacatcaacattgcagactgctcctcagcccacctcacagagaccatcttggtggcccttcgagatgtctcctggtgtgctaacgttt

SEQ ID NO: 164112 - DNA, 120 bp, Artificial Sequence
  ENSG00000107897_13 (sequence is synthesized)
gccatcatatggccttttattgcacagtggttggtgtatttatactatcaaagaaggagaagaaaactgaactgaggaaaatggtgttttcctcaagaagactactggaactggatgacc

SEQ ID NO: 164113 - DNA, 120 bp, Artificial Sequence
  ENSG00000107897_14 (sequence is synthesized)
tcagaatgaactggattgtggtgttcacaagaaaatcttagtttgtgatgattacattgctttttgttgtccagtagtttagtttgtgtacatatatacacatatatattttgcactaca

SEQ ID NO: 164114 - DNA, 120 bp, Artificial Sequence
  ENSG00000107897_15 (sequence is synthesized)
caaacgataacattttaaggactaatattgctgatacttgaataatcaatctctactaggttataagtagtatacacagatttaccctgcccttgaacttgaaggacattaaattattaa

SEQ ID NO: 164115 - DNA, 120 bp, Artificial Sequence
  ENSG00000107897_16 (sequence is synthesized)
tggtaacatgtttacctgattatcttccatagagtaacataagctgcttttcaaaggtaccattgtgataatgagatcaaatttataagttattatttttaattttctaaattaaataaa

SEQ ID NO: 164116 - DNA, 120 bp, Artificial Sequence
  ENSG00000107897_17 (sequence is synthesized)
agaaagaatgcaaaccaggagtgaatttcaaatgagatgtaatcgactttatatcttagtcacggagttgccatggcatgtagtagaaaaccacaggaagaatggtcatattcactttgt

SEQ ID NO: 164117 - DNA, 120 bp, Artificial Sequence
  ENSG00000107897_18 (sequence is synthesized)
gggctgcccataatctttcttgggcattcacaactcttgagtttggtgttcaggcatcattattaaaaagtggagtcctatgtaccagactgagtttttacaaatgatttgcaggctaga

SEQ ID NO: 164118 - DNA, 120 bp, Artificial Sequence
  ENSG00000107897_19 (sequence is synthesized)
cataacccactgatggaaatggtgaagaatgagcttcatgtaggtttaaaagtgtattctgagcctgtagatgattaatcaggtttttattcaatcatataaatgtattcctttgtaatc

SEQ ID NO: 164119 - DNA, 120 bp, Artificial Sequence
  ENSG00000107897_20 (sequence is synthesized)
atttttgtttaactgaggatatctagtgtctgcttcatagggtgctttgaaatataaaatgaaaacttatttatactgtttttacaacagtcaaaaaggaaacacacgaaaatcactttt

SEQ ID NO: 164120 - DNA, 120 bp, Artificial Sequence
  ENSG00000107897_21 (sequence is synthesized)
ctgcaactgatgaactatatagactggactcttaacctcttagtgcctcagtttttccttcggggtatactattttagatacacctacttcacaggagtactggagggatttgcaagcta

SEQ ID NO: 164121 - DNA, 120 bp, Artificial Sequence
  ENSG00000107897_22 (sequence is synthesized)
acgggccaaatgcttccataggaataaggcatgcccagctaacagaaatttaagtccctcttccccacctctctcatctagaccaaaaagaagactacaatttagatccttggagacttt

SEQ ID NO: 164122 - DNA, 120 bp, Artificial Sequence
  ENSG00000107897_23 (sequence is synthesized)
tcctgtatgccttccaaaacttcctgctcacttagatgtaccttgtgctttgaagatttctttgatgcagtctttgtaacaaataatttttttttttaaatggagtttctctcttgttgc

SEQ ID NO: 164123 - DNA, 120 bp, Artificial Sequence
  ENSG00000107897_24 (sequence is synthesized)
gccactgcacctggcctgtagcaaataatttttaagcattctcaagatgtatgatgttgggtttaacatcatatgttcacagtgttttaaataagaaataatctgtctttagtatacaga

SEQ ID NO: 164124 - DNA, 120 bp, Artificial Sequence
  ENSG00000107897_25 (sequence is synthesized)
atggttctttgtttgcctgaaaagtataagaatacaatttacttttcccaaactctttttccttatttttttctttcaaataactttaattatttaatcccatactgattaaaatatgtc

SEQ ID NO: 164125 - DNA, 120 bp, Artificial Sequence
  ENSG00000107897_26 (sequence is synthesized)
tgtctaaagggatctactactatttgcttttaaaaaagtgttccctatttatttaggaaaaagtgaagcaagcaactgaatttatatgtaaaaataacatttagacctgtggatcaaaga

SEQ ID NO: 164126 - DNA, 120 bp, Artificial Sequence
  ENSG00000107897_27 (sequence is synthesized)
ttattttcaaaaatgagatatcaatttggtatcagtaaaaagtgtcttttctcttagtatataaataaataaaatgcaaattaagagtgtaagcagttgtgaatcattacaagcagtctg

SEQ ID NO: 164127 - DNA, 120 bp, Artificial Sequence
  ENSG00000107897_28 (sequence is synthesized)
ggataactaactcctagggataaccatttctatcctgttccaaagtcttattttatagtttgaaaagcactttgcacacagttcttgtatataaaagtaaagatgtaattataggatata

SEQ ID NO: 164128 - DNA, 120 bp, Artificial Sequence
  ENSG00000107897_29 (sequence is synthesized)
gtgttcctgctttgtttaataagaacctcatttaaacttgacagctatggtatttttttaatgataacttcttttctgtttattgtaaaactaagttaaaaataaaaggttaatgagaaa

SEQ ID NO: 164129 - DNA, 120 bp, Artificial Sequence
  ENSG00000107897_30 (sequence is synthesized)
ggaactgacccgcttcgctcccgggcctcctccttttggggcatgttgatccgcggctgcgctccatgttccagtttcatgcaggctcttgggaaagctggtgctgctgctgcctgattc

SEQ ID NO: 164130 - DNA, 120 bp, Artificial Sequence
  ENSG00000107897_31 (sequence is synthesized)
tgcactgctgctgcggcggcggcggcgccagtgggtcctccggtgactctggggcggggctgtggggagggcacggactgacagacggactccggcggaatggggggtgtggctgctccg

SEQ ID NO: 164131 - DNA, 120 bp, Artificial Sequence
  ENSG00000107897_32 (sequence is synthesized)
ccagggtccccagggtgggagagcggctccgcggccaccgatgcccggaccccctctgtcttctgctagacatgctcttcctctcggtgagttgttttgctgtcgtcgcgggccggattc

SEQ ID NO: 164132 - DNA, 120 bp, Artificial Sequence
  ENSG00000107897_33 (sequence is synthesized)
agaagctctcagaagatttgtatgcacattaaagttgagaagctctgatgtatttaccctcgggatatagctttggccacttggacaatttgcttttatcttggtaatgttctcacttct

SEQ ID NO: 164133 - DNA, 120 bp, Artificial Sequence
  ENSG00000107902_0 (sequence is synthesized)
gtcggttgggacgcggagctgaggagcagggccgggcgccatggcaccgtggggcaagcggctggctggcgtgcgcggggtgctgcttgacatctcgggcgtgctgtacgacagcggcgc

SEQ ID NO: 164134 - DNA, 120 bp, Artificial Sequence
  ENSG00000107902_1 (sequence is synthesized)
gggcggcggcacggccatcgccggctcggtggaggcggtggccagactgaagcgttcccggctgaaggtgaggttctgcaccaacgagtcgcagaagtcccgggcagagctggtggggca

SEQ ID NO: 164135 - DNA, 120 bp, Artificial Sequence
  ENSG00000107902_2 (sequence is synthesized)
gcttcagaggctgggatttgacatctctgagcaggaggtgaccgccccggcaccagctgcctgccagatcctgaaggagcaaggcctgcgaccatacctgctcatccatgacggagtccg

SEQ ID NO: 164136 - DNA, 120 bp, Artificial Sequence
  ENSG00000107902_3 (sequence is synthesized)
ctcagaatttgatcagatcgacacatccaacccaaactgtgtggtaattgcagacgcaggagaaagcttttcttatcaaaacatgaataacgccttccaggtgctcatggagctggaaaa

SEQ ID NO: 164137 - DNA, 120 bp, Artificial Sequence
  ENSG00000107902_4 (sequence is synthesized)
acctgtgctcatatcactgggaaaagggcgttactacaaggagacctctggcctgatgctggacgttggtccctacatgaaggcgcttgagtatgcctgtggcatcaaagccgaggtggt

SEQ ID NO: 164138 - DNA, 120 bp, Artificial Sequence
  ENSG00000107902_5 (sequence is synthesized)
ggggaagccttctcctgagtttttcaagtctgccctgcaagcgataggagtggaagcccaccaggccgtcatgattggggacgatatcgtgggcgacgtcggcggtgcccagcggtgtgg

SEQ ID NO: 164139 - DNA, 120 bp, Artificial Sequence
  ENSG00000107902_6 (sequence is synthesized)
ggtacgtggacaacctcgcagaggcagtggacctgctgctgcagcacgccgacaagtgatggcctcctgggagagccccgcctcctccacccctgcctctcctccacccctgcctcccct

SEQ ID NO: 164140 - DNA, 120 bp, Artificial Sequence
  ENSG00000107902_7 (sequence is synthesized)
ccacccctgcctctcctccacccgcccaggagagccccacctcctccacccctgcctctcctccacccctgcctcccctccacctgccccagtgcccagaccaaccaaggccctgacagc

SEQ ID NO: 164141 - DNA, 120 bp, Artificial Sequence
  ENSG00000107902_8 (sequence is synthesized)
cctgccttctgccctctgccctgcatgggcaggcatttgttccctacctgggtggcctgctcccctgcctgggccctgacttcagctccctgtagtgaagtccaggagggtgggacaggc

SEQ ID NO: 164142 - DNA, 120 bp, Artificial Sequence
  ENSG00000107902_9 (sequence is synthesized)
ctgtcaggcctctgggaatctcccaaatcccagaactcaccactcaccatgggcctttaaatgcagtaaactccacctaaccagattcaggggcactatgcccactgcctcctcttcaga

SEQ ID NO: 164143 - DNA, 120 bp, Artificial Sequence
  ENSG00000107902_10 (sequence is synthesized)
ctctttgcatttcagtgaagagcctggaagaaacccaggggcctcctatgcacagatcttgcagcccagaaccaagtcagcctccctgcgactgcccaggcacactgcccaccaccccac

SEQ ID NO: 164144 - DNA, 120 bp, Artificial Sequence
  ENSG00000107902_11 (sequence is synthesized)
ccccgaaacaatgccagcccgctgctttttctatcctcccagtcacctttgcagacaaagaccaggggcagctcccgagggcactgtgaaggctcccatgccacacagtgagaactgtag

SEQ ID NO: 164145 - DNA, 120 bp, Artificial Sequence
  ENSG00000107902_12 (sequence is synthesized)
cctctgcgtccaaggcacacagggtactttctggacccactgctggacagacttgaaggtgtcatgcccggtgtgtgcaggaggaaactaacagttcagtaaactctgccttgaccagca

SEQ ID NO: 164146 - DNA, 120 bp, Artificial Sequence
  ENSG00000107902_13 (sequence is synthesized)
attcggctgacagagcatgagggggaggaatcactgatgacaggcactggcctgcccagctgggggcctttgtttattcatttggtgggcacttcctgggtgcctgctctgggtcaggcc

SEQ ID NO: 164147 - DNA, 120 bp, Artificial Sequence
  ENSG00000107902_14 (sequence is synthesized)
caccgggaagttcaggtcagtgccagctggagtcatttattcaccttccttccaggggatgaccacattctcattctgttttgttcttcaaaataaaggggatattctttccaaatcaaa

SEQ ID NO: 164148 - DNA, 120 bp, Artificial Sequence
  ENSG00000107902_15 (sequence is synthesized)
ctcctgagtttttcaagtctgccctgcaagcgataggagtggaagcccaccagttactttcagtatgaaagcaagaagcagaaatgcctgcggcttttcctgagtttttgctgcttctct

SEQ ID NO: 164149 - DNA, 120 bp, Artificial Sequence
  ENSG00000107902_16 (sequence is synthesized)
gaaaggataagaattgacaagtcctatcagtgtgttaatatatctcactggcaagacagtgtaacagcaagattacaacaatatggaggaaataataaagtcactcattttgcgaccttt

SEQ ID NO: 164150 - DNA, 120 bp, Artificial Sequence
  ENSG00000107902_17 (sequence is synthesized)
cctaagtggggctgccgttggctgggttaaaccagtaaccagtaacaggagaaatacgtcgcatctctagtgtgtggagattaccgggcctttatattaaaaaaaaattttaagtgctta

SEQ ID NO: 164151 - DNA, 120 bp, Artificial Sequence
  ENSG00000107902_18 (sequence is synthesized)
gagaacccagggctcgctgggatgctgtcctccctccctccctccctctgccaagctggtgggaaggcccttgccaaagcgcacaagaccccttcacacagcaggggcacaagctctttg

SEQ ID NO: 164152 - DNA, 120 bp, Artificial Sequence
  ENSG00000107902_19 (sequence is synthesized)
ctggcccagtgacgagcaccatccggaagtgaaggctgatgggtacgtggacaacctcgcagaggcagtggacctgctgctgcagcacgccgacaagtgatggcctcctgggagagcccc

SEQ ID NO: 164153 - DNA, 120 bp, Artificial Sequence
  ENSG00000107902_20 (sequence is synthesized)
tggagctgatgagccgtggtgtgatgcttgcctgggggtcggtgttgcctagaagtgaggaatgacctccttcacccctggctccttccggcagcctggccacttccagcatgtggaggg

SEQ ID NO: 164154 - DNA, 120 bp, Artificial Sequence
  ENSG00000107902_21 (sequence is synthesized)
ggcccgggccctggcagagacggtgtggaaccgccggccgcatgcggggctggagttcggggctgccaatgggctaaggccctgtgttcaacacatgtcgcggaactgtcgtgaaaaaaa

SEQ ID NO: 164155 - DNA, 120 bp, Artificial Sequence
  ENSG00000107902_22 (sequence is synthesized)
gactcaggaccacaggtccggggtgctcccaggggtctttcccaccgaggctgggagtgagcagcagcctaggcccagccacacctcccaggctcgggagctgccaggccaggcaaccgt

SEQ ID NO: 164156 - DNA, 120 bp, Artificial Sequence
  ENSG00000107902_23 (sequence is synthesized)
gaagggtagcagggtggggggtggaggggaggacagggagagcaggcctctcgggcctcacccacccttgcaccttccagctctagggcccacacagtaccaagccctgggctcaatgta

SEQ ID NO: 164157 - DNA, 120 bp, Artificial Sequence
  ENSG00000107902_24 (sequence is synthesized)
ctacttggcaggtggcgggatgtcccccagccaccgacgtccccctgcctgctccgcaaccccagggcctgcagaaaaggcccacgagactcagactggcagagacttaggcggaccagg

SEQ ID NO: 164158 - DNA, 120 bp, Artificial Sequence
  ENSG00000107902_25 (sequence is synthesized)
aacaggggcgcagtctccgtcccacccaaaccctaaccagagagaacacggcacgttgtgccagacggaggacggatgccagcgagggtccatgtcctcactgccgacaaggctgggaac

SEQ ID NO: 164159 - DNA, 120 bp, Artificial Sequence
  ENSG00000107902_26 (sequence is synthesized)
tgggccaagtgaagcagaggcctccacgtcagatgtgagcgccaccggcccaggtgactgcagttcttccctccttccgttcggcttgagccctccagaggatcggaaaggctgaggcct

SEQ ID NO: 164160 - DNA, 120 bp, Artificial Sequence
  ENSG00000107902_27 (sequence is synthesized)
gacctggtgccgctgtcctgggtgggtctgtcctgctggtcggttcctgcccctctcggggaggttggctggcagctggcaggtggaaagcctcctgtgttcacctcagggcagaggtgg

SEQ ID NO: 164161 - DNA, 120 bp, Artificial Sequence
  ENSG00000107902_28 (sequence is synthesized)
ggacacagggcgggacgggcgagtgtggtgcccctctggggtgggtgctcttgggtccgcctcccgtgccagagtgcgtgtcaacagttccagctgcccctcagaactgtcctggtttag

SEQ ID NO: 164162 - DNA, 120 bp, Artificial Sequence
  ENSG00000107902_29 (sequence is synthesized)
gaggtgaacacacggggcagcctacattctacgtggtttttttaacattataaaagcagcatgtgttattacaggaaatttaacagaagtatataaaaagaaaccagaagtcacccggga

SEQ ID NO: 164163 - DNA, 120 bp, Artificial Sequence
  ENSG00000107929_0 (sequence is synthesized)
agcatcctgaggttagcattacacttctcccagtggagcccatgacttctgatcaggacgctaaggttgtggctgaaccgcagacgcagagagtccaggagggcaaggacagcgctcatc

SEQ ID NO: 164164 - DNA, 120 bp, Artificial Sequence
  ENSG00000107929_1 (sequence is synthesized)
tgatgaatggtcctatatctcaaaccacttctcagacaagttccatcccacctttgagtcaggtaccagcaactaaggtttcagagctgaaccctaatgcagaagtgtggggggctcctg

SEQ ID NO: 164165 - DNA, 120 bp, Artificial Sequence
  ENSG00000107929_2 (sequence is synthesized)
tgttacatctggaagcaagcagtgctgctgacggtgtgagtgctgcatgggaggaggtggctggccaccacgcagaccgtggcccgcagggatcggatgccaatggtgatggtgaccagg

SEQ ID NO: 164166 - DNA, 120 bp, Artificial Sequence
  ENSG00000107929_3 (sequence is synthesized)
gccatgagaatgccgcattgccagacccgcaggagtcggacccagcagacatgaacgctctcgctctgggtccctcagaatatgactctctgcctgaaaatagcgagacaggaggaaatg

SEQ ID NO: 164167 - DNA, 120 bp, Artificial Sequence
  ENSG00000107929_4 (sequence is synthesized)
agtctcaaccagacagccaggaagacccccgagaagtacttaaaaaaacattggaattctgcttatctagggagaaccttgctagtgacatgtatcttatatcacagatggatagtgacc

SEQ ID NO: 164168 - DNA, 120 bp, Artificial Sequence
  ENSG00000107929_5 (sequence is synthesized)
agtatgtgccaatcacaacggtggctaacctcgaccacatcaagaagctcagcactgatgtggacttgattgtggaagtgctaagatctttacctttagtccaagtggatgaaaagggag

SEQ ID NO: 164169 - DNA, 120 bp, Artificial Sequence
  ENSG00000107929_6 (sequence is synthesized)
aaaaagtaaggccaaatcaaaatcgctgcatagtaatattgcgtgaaatatctgaatctacccccgtggaagaagtagaagcactatttaaaggagataatttaccaaaatttataaact

SEQ ID NO: 164170 - DNA, 120 bp, Artificial Sequence
  ENSG00000107929_7 (sequence is synthesized)
gtgaatttgcatataatgataattggtttattacatttgaaacagaagctgatgcacaacaggcttacaaataccttcgagaagaagtcaaaacttttcaaggaaaaccaattaaggcac

SEQ ID NO: 164171 - DNA, 120 bp, Artificial Sequence
  ENSG00000107929_8 (sequence is synthesized)
ggataaaagcaaaggcaatagctataaacacatttttgccaaagaatggatttagacccctggacgtgagcctgtatgcccagcagcgctacgcgacgtcgttctacttccctcccatgt

SEQ ID NO: 164172 - DNA, 120 bp, Artificial Sequence
  ENSG00000107929_9 (sequence is synthesized)
acagcccccagcagcagttccccctgtacagcctgatcactccccagacgtggtcagcaacgcacagctatcttgacccacccttggtaactccatttccaaatactggatttataaatg

SEQ ID NO: 164173 - DNA, 120 bp, Artificial Sequence
  ENSG00000107929_10 (sequence is synthesized)
ggtttacgtctccagcgttcaagcctgcggcgtctcctctgacttctctcagacagtatcctcctcgaagcaggaatcctagtaaatctcatctgcggcatgcgattcctagtgcagaga

SEQ ID NO: 164174 - DNA, 120 bp, Artificial Sequence
  ENSG00000107929_11 (sequence is synthesized)
ggggacctgggttattagaaagtccttcaatatttaacttcactgcagatcgattaattaatggtgtccggagtccacaaacaaggcaagcaggtcaaactagaacacggattcaaaacc

SEQ ID NO: 164175 - DNA, 120 bp, Artificial Sequence
  ENSG00000107929_12 (sequence is synthesized)
cttcagcatatgccaagagagaggctgggcctgggcgtgtggagccaggcagtctcgaatcctctcctggtttagggaggggaaggaagaattcctttggctaccggaagaaaagggagg

SEQ ID NO: 164176 - DNA, 120 bp, Artificial Sequence
  ENSG00000107929_13 (sequence is synthesized)
agaagtttacaagcagccagacacagtctccaacgccaccaaagcctccgtcgccaagcttcgagctggggctgtccagcttccctccattacctggagctgccggcaatttgaagacag

SEQ ID NO: 164177 - DNA, 120 bp, Artificial Sequence
  ENSG00000107929_14 (sequence is synthesized)
aggacttgtttgaaaacaggctatctagcttgataataggaccatccaaagaaaggaccctcagtgcagacgcaagcgtgaacacccttcctgtagtggtctccagagagccctcggtgc

SEQ ID NO: 164178 - DNA, 120 bp, Artificial Sequence
  ENSG00000107929_15 (sequence is synthesized)
cggcttcttgtgctgtatcagcaacgtacgagcgatccccctccccagctcatttacccgatgatcccaaggtggcggagaaacagagggaaacccacagtgtggacagacttccttccg

SEQ ID NO: 164179 - DNA, 120 bp, Artificial Sequence
  ENSG00000107929_16 (sequence is synthesized)
ccctcactgcgaccgcgtgtaaatcggtgcaggtgaacggagccgccacggaattgcgaaagcccagctacgcagagatttgtcagagaacgagtaaagagcctccttcttccccattgc

SEQ ID NO: 164180 - DNA, 120 bp, Artificial Sequence
  ENSG00000107929_17 (sequence is synthesized)
aaccccaaaaagaacaaaagccaaacactgttggttgtgggaaggaggaaaagaagctggcagagcccgcagagagataccgggagcccccagccctcaagtccacacctggagccccca

SEQ ID NO: 164181 - DNA, 120 bp, Artificial Sequence
  ENSG00000107929_18 (sequence is synthesized)
gagaccagaggcggccggcggggggccggccctcgccctcggccatggggaagcgtctcagccgagagcagagcactccccccaagtctcctcagtgaaaaccgtacgtctgggaggggt

SEQ ID NO: 164182 - DNA, 120 bp, Artificial Sequence
  ENSG00000107929_19 (sequence is synthesized)
cgcagagcgctgtgttaaccacaaacgagacactctcccactcagtgcgagggcgagccgctggttaggagcttgcagtgtctgaggcctgtgggatcctcaagttggttttcttctgtg

SEQ ID NO: 164183 - DNA, 120 bp, Artificial Sequence
  ENSG00000107929_20 (sequence is synthesized)
agttggattctccccctcttgaaaaaaaatcgatttttcaggatttaattaatacaaaccttattttaggttggtgcttaactggaggtgatgcataagtctgatttttttttccaagat

SEQ ID NO: 164184 - DNA, 120 bp, Artificial Sequence
  ENSG00000107929_21 (sequence is synthesized)
agaaaaagcatttatcctaacaaattggtattttttattaagcctccatgtggctctgaatgcaagctatatatagtgagtttttctaaattaagggaactctgcttttttttttttttt

SEQ ID NO: 164185 - DNA, 120 bp, Artificial Sequence
  ENSG00000107929_22 (sequence is synthesized)
ttaagtaactggtctgtaagtgcatatctctagaacgtccccgcagatgaatgagggccagtggccttggcagaggcaggtgtggcctcgtagaggcagtgctggccgcgccagggcatc

SEQ ID NO: 164186 - DNA, 120 bp, Artificial Sequence
  ENSG00000107929_23 (sequence is synthesized)
tgctgatgtgggagctgtgcttccacctaagccgttggtaggggactgtggcatttaagaatgtagagagcgcatcctttttgatctcctgggcggagtgaacctgcaggggccacccca

SEQ ID NO: 164187 - DNA, 120 bp, Artificial Sequence
  ENSG00000107929_24 (sequence is synthesized)
gaaaccttggttctgatgcactgcaagcaagtaaccagcttctcactccagtttcaagtggctattatgtaatataaattcaaagcacattgtgaatagaacctacatgaaaacatacac

SEQ ID NO: 164188 - DNA, 120 bp, Artificial Sequence
  ENSG00000107929_25 (sequence is synthesized)
tttgttgcccactgacatgttaccagaagttgtaccatgatgttgttttgacccctgtgagctgatggccccggccctgctctgtgcacatttctgtccgtgttccccagcactctggtt

SEQ ID NO: 164189 - DNA, 120 bp, Artificial Sequence
  ENSG00000107929_26 (sequence is synthesized)
ggagagagtccacatcttcagctccgtgtggacatctccctgtacctctgcatcagcacatggatttaagagttatgtaatcgtgagagaatggtgtttgtggtttttccccctctttgg

SEQ ID NO: 164190 - DNA, 120 bp, Artificial Sequence
  ENSG00000107929_27 (sequence is synthesized)
ctggtggaggataaagttcctgctcttttacctccaagacgagggcctcattgattcacttccagaagtgctgcacttctgaagaacaaggatgcactaaagttagcaagtttataataa

SEQ ID NO: 164191 - DNA, 120 bp, Artificial Sequence
  ENSG00000107929_28 (sequence is synthesized)
agttaaatataaattattttgttttaaaatgcctcaaatttttctttattctaagcagcaaacattaaaataagaatatttcctgctaaatgtaaccatacactttattccacaaaatgt

SEQ ID NO: 164192 - DNA, 120 bp, Artificial Sequence
  ENSG00000107929_29 (sequence is synthesized)
tatttaacaagactgagggttttttttaagaaaaaattatttccatccaatatttaaagacttgaattttatttaaacttgaaaatgactttgccttaacttttgtataagacagcttag

SEQ ID NO: 164193 - DNA, 120 bp, Artificial Sequence
  ENSG00000107929_30 (sequence is synthesized)
agtccatggagcccggccctgggttggcgtgagtgggtcagagttactcagttactgcgtggatctcctgtcgctagttttactgagtaagcatactgtagtacaagagctagtagtagt

SEQ ID NO: 164194 - DNA, 120 bp, Artificial Sequence
  ENSG00000107929_31 (sequence is synthesized)
ttttgtaatataccttaaagatcttcaacagttgatcttttttcagaatgttggaaaatcctgtaaatgcaaatagtcaatactgtattaaatacgtgcacttggagtgtgcttcgcttg

SEQ ID NO: 164195 - DNA, 120 bp, Artificial Sequence
  ENSG00000107929_32 (sequence is synthesized)
tacagttgtaaataatcagaacatatgaaaaaggtaccctacagagaaaattctgatacagattattgatatattataaatgttgctgttgagcgggatgtagataaactaaatgttgtg

SEQ ID NO: 164196 - DNA, 120 bp, Artificial Sequence
  ENSG00000107929_33 (sequence is synthesized)
gtttgaatattattttgatttgttgagattttcttttttctcttacatcggtgtgttgaactgattctgcctctttgctgcaaaagggaattggaaagtcttattaaaagcctccagatg

SEQ ID NO: 164197 - DNA, 120 bp, Artificial Sequence
  ENSG00000107929_34 (sequence is synthesized)
ttttcatactcttttaaaatgtatgtaaatgcatactaatcatatctaatgtgaaagagttttaaagtatatagagagcaaaaactggcaggatcgtaagtgaaggtgactagtaatcta

SEQ ID NO: 164198 - DNA, 120 bp, Artificial Sequence
  ENSG00000107929_35 (sequence is synthesized)
atttaaatcacctgcagctaagcatgattgaccctgccagaggaaaacatgcctatttgaccatttcctttaaagcagttgccattattcaaatacagagaaatagccacagggctagtg

SEQ ID NO: 164199 - DNA, 120 bp, Artificial Sequence
  ENSG00000107929_36 (sequence is synthesized)
tttttcaaatgcattttaaagaacatggggatttttttttgtagttgtcagttcactgaccaaaaaaaaaaaaaaaatcagaaataattgatctgtgaaacccaaactctcaatactcag

SEQ ID NO: 164200 - DNA, 120 bp, Artificial Sequence
  ENSG00000107929_37 (sequence is synthesized)
aaagctgggaggcaacctcgaggcctgggcctacgagctgcatcttcgctacggaagggccagggcgccatcagccattcccaaaacacaaggcctgcccgtccgccagtgagtccttgg

SEQ ID NO: 164201 - DNA, 120 bp, Artificial Sequence
  ENSG00000107929_38 (sequence is synthesized)
tttttaataatgagaagtcctttcccccaaggtgtgagcattgcagcgcagtgtgtgtgtgtggttagagccagcttagtccttcactttgtcgaccgaagtgggagctcaacagctgca

SEQ ID NO: 164202 - DNA, 120 bp, Artificial Sequence
  ENSG00000107929_39 (sequence is synthesized)
tgaggagggcagcgcgtgcattagccagtcgccactggagggctctgctgccctccggtcaatacactgtagttactgcctagccagcagcagtcttctgcatcaagaactgaaacgttg

SEQ ID NO: 164203 - DNA, 120 bp, Artificial Sequence
  ENSG00000107929_40 (sequence is synthesized)
ctcggaggtgatttttatagcatcctttttaattaaaggtgaaatacagattgctatataatgtctgaaaaaacctgatactacttcaagagtttctgctcagaagaaaatgagagttat

SEQ ID NO: 164204 - DNA, 120 bp, Artificial Sequence
  ENSG00000107929_41 (sequence is synthesized)
cataataggaagctgtggcggtccatgccaactgtgctgtgtcacatacagcgatgagagtggctttcatactttttttttttttaagttaacaccctcctttacccccagcagtatctc

SEQ ID NO: 164205 - DNA, 120 bp, Artificial Sequence
  ENSG00000107929_42 (sequence is synthesized)
aggttatagaatcagagatgcagcagtgacaaatggcattttaacttgtaaaatcgtgtgatgatgcttatcattttgaaatagaagaataaaaacctggtcccgtttcaccagacatga

SEQ ID NO: 164206 - DNA, 120 bp, Artificial Sequence
  ENSG00000107929_43 (sequence is synthesized)
atttcaagtggagtcgtcgttctctgagagtgagtgtcttgacattttcacccaggccctcctgtcatcacatcaccggctgtcactggcgggtggccgtaaacgtcctgcgttgctata

SEQ ID NO: 164207 - DNA, 120 bp, Artificial Sequence
  ENSG00000107929_44 (sequence is synthesized)
ttaggatctctgcagttcaggcttcaaaaccagttcagtgtatccgggcgacgggtagtggtggtgcatgcctgtctgtgtgccccgctggcgagctgtagttgcggcttgcgtgcctcg

SEQ ID NO: 164208 - DNA, 120 bp, Artificial Sequence
  ENSG00000107929_45 (sequence is synthesized)
cggcccactacagggctgcagacaatcgaggcgagggcgctggccgccagcagctcacagcgcgggggtcatgtggtcgctcctcgagggtttcgtttttgttctgcttcattaagactg

SEQ ID NO: 164209 - DNA, 120 bp, Artificial Sequence
  ENSG00000107929_46 (sequence is synthesized)
gaatcaagcttacatgtaaactattggtaatttaagtttccttttgtgtcattcagtgtaaaactgtctaatttgaaaaaaaatgtaggttatgaaaataaagatttaggcactgttcaa

SEQ ID NO: 164210 - DNA, 120 bp, Artificial Sequence
  ENSG00000107929_47 (sequence is synthesized)
gagctgtgtgttctcatgcgaacgggaaggagcgttggggatctggagtcccggggttgagacattttcgggcccgaaaggggaagaatccgccgccgccgccgccgccagctcgcgccc

SEQ ID NO: 164211 - DNA, 80 bp, Artificial Sequence
  ENSG00000107929_48 (sequence is synthesized)
gccctctcccctacctccggcccggcccggcccggccgcgccgcctctccctgccgtctctctcctcgccgtccccgcgt

SEQ ID NO: 164212 - DNA, 120 bp, Artificial Sequence
  ENSG00000107929_49 (sequence is synthesized)
tatatgattggatcctaaagccttctcacctacgtgggggctggctgtggcacacggggctcaccctttgtgttttagtggttcagagtgagcattaacatcagatgctcatgcggagac

SEQ ID NO: 164213 - DNA, 120 bp, Artificial Sequence
  ENSG00000107929_50 (sequence is synthesized)
agccattactgtgactgccaagatgtactgcaaaaatacatgttcctgtatcaggactttgattttgttaaaatggcactctctccaaagctgtgtccatgaagctgtttggagctaacg

SEQ ID NO: 164214 - DNA, 120 bp, Artificial Sequence
  ENSG00000107929_51 (sequence is synthesized)
ttgggtcttcatggtgatggactcatccttaggcagcagtgatgtctgcactaggaagaggctggcgggaggcggggcccctcctgtgccaggcaccgagtggatgggggactgattaac

SEQ ID NO: 164215 - DNA, 120 bp, Artificial Sequence
  ENSG00000107929_52 (sequence is synthesized)
atgttgctgccttcctcctctgtgcattgccttttcatgtcgtcttcccatttttactctttttctgatggaattaatattcttgatctgttaaggctattaatcctttgtcatatatgt

SEQ ID NO: 164216 - DNA, 120 bp, Artificial Sequence
  ENSG00000107929_53 (sequence is synthesized)
tacaaatattttctttcaatctaccatttgtcttaactctttatttagaatagtatcttttacggtgtttaattattgtgtagtaaaatctatcaatcttctcctttgttgagtgtcttg

SEQ ID NO: 164217 - DNA, 88 bp, Artificial Sequence
  ENSG00000107929_54 (sequence is synthesized)
tagtaaaatctatcaatcttctcctttgttgagtgtcttggacttgcttaagaagcctttccctactccagggtcataaagttaatag

SEQ ID NO: 164218 - DNA, 120 bp, Artificial Sequence
  ENSG00000107929_55 (sequence is synthesized)
agctgggcctaatcgtgtgtgtggtgtgcgtgcttaggcaggaacccagttttactttatgccatgtggaaagtttctttttccagtatcaccagtgagttcactgtctctccactggtc

SEQ ID NO: 164219 - DNA, 120 bp, Artificial Sequence
  ENSG00000107929_56 (sequence is synthesized)
tgcagtgctgcttctgttacttgcagacttcccacgtgtgcatggatctccacctggggtctctagggtctctattctacactgcctatttccctttctgtcctaacaccatagcattta

SEQ ID NO: 164220 - DNA, 120 bp, Artificial Sequence
  ENSG00000107929_57 (sequence is synthesized)
actcacccgtcatcctgtgttgctgagaatttccttcatagaactcatcaaagtatgattaactgtgctccctgagggcaggaattatgccatctggatcaccagcctctcccttgtcct

SEQ ID NO: 164221 - DNA, 120 bp, Artificial Sequence
  ENSG00000107929_58 (sequence is synthesized)
tagcacgccatctgcaaattagcagatactcggtaaatgtgtattaactcgaagtatattttgtgtcttctctgtgcacagcactgccctgggaagaactaggatgaggtattgacttgc

SEQ ID NO: 164222 - DNA, 120 bp, Artificial Sequence
  ENSG00000107929_59 (sequence is synthesized)
tgttgccacataacaaaccctgccagaactccctggatggaagtgaccaccgtgtatctgtggattgtctgcagggctctgctggggtcagcaggtcccacaagagagccagggctcggt

SEQ ID NO: 164223 - DNA, 120 bp, Artificial Sequence
  ENSG00000107929_60 (sequence is synthesized)
ctcctcatggctgtcagaggtttacgtattccgcctccacccaccaaagtctgaagttgttgtattccattccttgctatatccacatcttttaataatgctaaaatcccgtgtttctct

SEQ ID NO: 164224 - DNA, 120 bp, Artificial Sequence
  ENSG00000107929_61 (sequence is synthesized)
aaagcattggattgaaccaactgaagaaggaccacgtgtgttgctgggcctgcttgggcacaagccgtttccgatccaagtcaactgctggtctgcttagacgaaggtgtgtgggtgtct

SEQ ID NO: 164225 - DNA, 120 bp, Artificial Sequence
  ENSG00000107929_62 (sequence is synthesized)
ccaccacggagaggagggacagcaggtgagaccataggccaggaaggaagggcacagcctaagcgtgcagtggcttagccagagaccctcgtgcaccagccttcaggtgcttatggaact

SEQ ID NO: 164226 - DNA, 120 bp, Artificial Sequence
  ENSG00000107929_63 (sequence is synthesized)
tatgtcagcccaggccatatccaagtgtgtgatgtctcggagcatatatgccaggccagccggagaggcttagccctgccctggtggagctggagggccgcagggccgcccggtggggtc

SEQ ID NO: 164227 - DNA, 120 bp, Artificial Sequence
  ENSG00000107929_64 (sequence is synthesized)
aggaggttgtgaagaggatcctgatacaggctgggcctccctgcaggcgtgagccccggagcacggggtgagcagctccacccagaggggcttgcaggaccaagctgggacagcaaccac

SEQ ID NO: 164228 - DNA, 120 bp, Artificial Sequence
  ENSG00000107929_65 (sequence is synthesized)
caggccctggggcagatcagtgagcgtccaggagatgcagatgcagaagacagccaaattcattcacctctgcgtgggcctgtgagggcccacagagatgcattttcattcacgaccagg

SEQ ID NO: 164229 - DNA, 120 bp, Artificial Sequence
  ENSG00000107929_66 (sequence is synthesized)
atttcctcggccggagcagccgcttttcccagccgaagctcactgtgtttactacataggatgtgagtgtatagaaagactctctctaacgttagctacgcgtgcagaaatgtggggcgc

SEQ ID NO: 164230 - DNA, 120 bp, Artificial Sequence
  ENSG00000107929_67 (sequence is synthesized)
ttacaagtgtgggcagccgcagcctgttcctcacccctgtcctaacgggacatactccacgcatgcacatttaggatcaccgtgtcttctcgttggactgatctgtcattaggaccctgg

SEQ ID NO: 164231 - DNA, 120 bp, Artificial Sequence
  ENSG00000107929_68 (sequence is synthesized)
acccaagtaattgtctttgctctgaagttttgacagtaacaaaggcattccagctctttctttttcactcctgtcggtgtaacgtgccgtttttcatcctttgacttttagcccgcctgt

SEQ ID NO: 164232 - DNA, 120 bp, Artificial Sequence
  ENSG00000107929_69 (sequence is synthesized)
gccctgtctgaagggagttgtctgtggacagcacggagtggtgggtgtttgtaatccactctgccagcctcagtcttctaactgttgcgtatggaccaattacatctgccctttctcttc

SEQ ID NO: 164233 - DNA, 120 bp, Artificial Sequence
  ENSG00000107929_70 (sequence is synthesized)
tgtaaatgagaggaagcaaagatttttatggagactatcaataatctcaagaaaatacatattcaaaatggaattaaagccgtgcagtaagattgcatgtgaaacatcaacaggaagttg

SEQ ID NO: 164234 - DNA, 120 bp, Artificial Sequence
  ENSG00000107929_71 (sequence is synthesized)
ctgcgcactcctgcacctgctcgttttttaatcacatctaatttggtgggtttttatttgcgtctgtctgtgttgtgttttctgtacaaaatacctttaatatttgctaataattttcca

SEQ ID NO: 164235 - DNA, 120 bp, Artificial Sequence
  ENSG00000107929_72 (sequence is synthesized)
ctaactactctagttctttctcagaccaccatgtagtccttttatttcagtgttggtcaatagaggtttcttgagtagtaacaagaccccagctcctgtttctccatagactttaggatc

SEQ ID NO: 164236 - DNA, 120 bp, Artificial Sequence
  ENSG00000107929_73 (sequence is synthesized)
atatctcaaaccacttctcagacaagttccatcccacctttgagtcagaaaacactcctcagctaccggtgtcagaggacggtgttgtttggggatggcatgatagagacggacagttcg

SEQ ID NO: 164237 - DNA, 120 bp, Artificial Sequence
  ENSG00000107929_74 (sequence is synthesized)
taagtaccagcaactaaggtttcagagctgaaccctaatgcagaagtgtggggggctcctgtgttacatctggaagcaagcagtgctgctgacggtgtgagtgctgcatgggaggaggtg

SEQ ID NO: 164238 - DNA, 120 bp, Artificial Sequence
  ENSG00000107929_75 (sequence is synthesized)
taagatcaagcacacatgaaatagcccctgcacaggggtcgctggctggagtaaggagggagtaagtttcactccgtcctttgcttcctggccttgggcaaattaacttagaggtattgg

SEQ ID NO: 164239 - DNA, 120 bp, Artificial Sequence
  ENSG00000107929_76 (sequence is synthesized)
gcctcagtttcctcacctgttgagatgggggcattcgcacacctgcttcctggggttgtgaattcagggagggctgggagctcacatttatatgggtgtggaggcgccgattgttttttc

SEQ ID NO: 164240 - DNA, 120 bp, Artificial Sequence
  ENSG00000107929_77 (sequence is synthesized)
tcagcggtgtgaatgagttgtgttggactgtgttaggattcgacactcagcagatatgcatgtggtgttgtgccgtgccgtgctgggcccaaagtgccaggtgggtgagatgtgtttgat

SEQ ID NO: 164241 - DNA, 120 bp, Artificial Sequence
  ENSG00000107929_78 (sequence is synthesized)
aagcttgtagatcatcattgcgggagaggagataagggcctgtgatgtaagaacagtggggcatttgccgagaaagagaagggtgggcgatctgtggggcagaggatagtcctgggctct

SEQ ID NO: 164242 - DNA, 120 bp, Artificial Sequence
  ENSG00000107929_79 (sequence is synthesized)
gtgacatttttgctggagaagaccctcttcccctatgtccttgtgctgctctcccaaggctgttcacgggtggggtgaacgggcactggtaccagctccgcttagtgccggcaggactct

SEQ ID NO: 164243 - DNA, 120 bp, Artificial Sequence
  ENSG00000107929_80 (sequence is synthesized)
tttgattatgtgagtgcaaacgtgctcaataataaattctccaagtgggaaaaaaataacagtctttcactttccactcctctaggaagaattcctttggctaccggaagaaaagggagg

SEQ ID NO: 164244 - DNA, 120 bp, Artificial Sequence
  ENSG00000107929_81 (sequence is synthesized)
agaagtttacagtgagtacataaagcatatacctcttcacaagacatttaaatctaatttataccaaacctgagatttaattaaatggattaaggttaaggcacaagaatgagcatttca

SEQ ID NO: 164245 - DNA, 120 bp, Artificial Sequence
  ENSG00000107929_82 (sequence is synthesized)
aaagacttgtaacgtgaaatccactaagtaataactgacaccctggctggcctaggaggaagcaactgtagaggttttggaaatagcgatgtgctgcacaggactccacagtgcacaggc

SEQ ID NO: 164246 - DNA, 120 bp, Artificial Sequence
  ENSG00000107929_83 (sequence is synthesized)
gtgttgtgctgtggcacaggcatggccaggaacttgctgtcgcatgcactgcagcctacacacgggtgtgcacgtgagctcttctgtgtggcagctgtaccggagagtctgaaatgactg

SEQ ID NO: 164247 - DNA, 120 bp, Artificial Sequence
  ENSG00000107929_84 (sequence is synthesized)
gagccattcatttcaatgagcagagtaagcatcttccacggagcaatttgtttgtcggtgtttttccttcaaaactttcgaatactctcccactgtgtagaaagcattatctccttctgc

SEQ ID NO: 164248 - DNA, 120 bp, Artificial Sequence
  ENSG00000107929_85 (sequence is synthesized)
tataacttactggcaggacagacccaaacataagtgataggtttttgtggcggtaagtacatgagacatggtgatttttgcttgggttgattaatcagagtttctcctgtggaaaatgtt

SEQ ID NO: 164249 - DNA, 120 bp, Artificial Sequence
  ENSG00000107929_86 (sequence is synthesized)
tgtgctggtctttagtggaggatggcatggacttctccacagccagtggtgggatggcacggtggcagttagcagtacccacaaagatgggagggatggcacggtggcagttagcagtac

SEQ ID NO: 164250 - DNA, 120 bp, Artificial Sequence
  ENSG00000107929_87 (sequence is synthesized)
ccatgaaccagtggtgggacggtacggtggcagtgttagcagtacccacgaagatgggagggatggcacggtggcagttagcagtacccacgaaccagtagtgggacagcaaggtggcag

SEQ ID NO: 164251 - DNA, 120 bp, Artificial Sequence
  ENSG00000107929_88 (sequence is synthesized)
ttagcagtacccacgaagatgggagggatgcctccatgggcttgcagatgtggaattccatacaaggaatgctggaggagacctggacaaatcctggtccagcccctcaagccatcacac

SEQ ID NO: 164252 - DNA, 120 bp, Artificial Sequence
  ENSG00000107929_89 (sequence is synthesized)
aggtgctttctcatcacaaaagatacaatctctgtttagaactcagaaattgtgcctttcatgaggtcggcttagtctagtttttgtttaactagttggtaaggcagtttttaccagtta

SEQ ID NO: 164253 - DNA, 120 bp, Artificial Sequence
  ENSG00000107929_90 (sequence is synthesized)
attgcaattggaattagtgaattcctgtgaccatttggactaacaagtcaagcatctaaacacagggcactgttgtgcctgccgtgatgttttcccacagccatttctcttccgttctgt

SEQ ID NO: 164254 - DNA, 120 bp, Artificial Sequence
  ENSG00000107929_91 (sequence is synthesized)
tttgccttgcattcctgatgcatgtgttcatgactgtgacctgctttgaagcttcggcttgtggcccagtgttgtattgattacagagcatacgcccatcgtcttatgtacgtgctctca

SEQ ID NO: 164255 - DNA, 120 bp, Artificial Sequence
  ENSG00000107929_92 (sequence is synthesized)
ggacctcagaaaggtccagacgctttttctgtaaaagtgtgtgagcctcgggcctaaccacgcccatgggacctgagcagtactcagacctcacccagaggtgctcagatcctagaggat

SEQ ID NO: 164256 - DNA, 120 bp, Artificial Sequence
  ENSG00000107929_93 (sequence is synthesized)
tttaacactgccttccaagtcaagtcccatctgtgggtgatgtcattttgtaactcccacatctgggcagttgttgcctgcctcttttgcttctacaagttgagatttaaatacattttt

SEQ ID NO: 164257 - DNA, 120 bp, Artificial Sequence
  ENSG00000107929_94 (sequence is synthesized)
ggggaaggctgtctctctaataatgcttatcttctgaaaagctgtgttcacctcagaaacgtgcagatgtttaaaaccgctttgccatcatagtggccatgtgtaacttagagctttgca

SEQ ID NO: 164258 - DNA, 120 bp, Artificial Sequence
  ENSG00000107929_95 (sequence is synthesized)
ggatcattttgagcatcatattcacaatactaggttacagagagcatacaacagccagctgctcagtaggtaacaagcttactgccaaggacacctaactgggaaaagctaagctaaaat

SEQ ID NO: 164259 - DNA, 120 bp, Artificial Sequence
  ENSG00000107929_96 (sequence is synthesized)
taggcacctgtcgcgtggagcagagaagcaagcggaatgcccaacacagactggactggggtttgtgtcagcctgaattcattttcatcctttgacctgctttcacttctgacatatttt

SEQ ID NO: 164260 - DNA, 120 bp, Artificial Sequence
  ENSG00000107929_97 (sequence is synthesized)
ctctagaatctactgatgcagggattcaccttcctgtgtataaactttggagaaacattggcactttccagttaggtggatcccatgagatctttgcttcctggtcagagtagctcattg

SEQ ID NO: 164261 - DNA, 120 bp, Artificial Sequence
  ENSG00000107929_98 (sequence is synthesized)
tttcagctaaaaatagttgtattctttagttaatataaattcatttctaaactaaatgcaaactcatttcccctttctgtgccatgtgtccttcagccgaggaactgcgtactcgcaaaa

SEQ ID NO: 164262 - DNA, 120 bp, Artificial Sequence
  ENSG00000107929_99 (sequence is synthesized)
tgactgccagcttgttaaagcgggttgatagatcattttccaataaaaggtattactgcctttcttctgagatttgggcttacaaagtacactcacttcttattatactgagtttgcttt

SEQ ID NO: 164263 - DNA, 120 bp, Artificial Sequence
  ENSG00000107929_100 (sequence is synthesized)
tttaattatttaaaaatataaactttcattaagtttattttcagagaattcgagcccccttcccttttgttaaaccacttttttgatgcacgtgtgtaaaatttcttacacaggttgtgg

SEQ ID NO: 164264 - DNA, 120 bp, Artificial Sequence
  ENSG00000107929_101 (sequence is synthesized)
agagagtgtcatattttgttttttacaattatcttgtgactcacattaaaaactatgctgtagtaacacaacacttgtctgaaagtgagaaagtttaatgtctagactcaggctgccctg

SEQ ID NO: 164265 - DNA, 120 bp, Artificial Sequence
  ENSG00000107929_102 (sequence is synthesized)
ctttccatctggtgggctggagtcactccagagtgtctcccttgccttcagctgcccctgctgttcgtgagtgctggcagccatgggtggatagctctttggatgtcaccttagcctcac

SEQ ID NO: 164266 - DNA, 120 bp, Artificial Sequence
  ENSG00000107929_103 (sequence is synthesized)
tgtgtcctttgtgacacatctcttgggcagcagcatccttgagatttcagttttacagctctgctctagatggttgaagttgcttgggagaaccttcaattgagtgaggaagcccttgtc

SEQ ID NO: 164267 - DNA, 120 bp, Artificial Sequence
  ENSG00000107929_104 (sequence is synthesized)
tgggttgaatgatctgcttgtttctacagatattttccagacaggtgtggaaacgagaagctgcttggccttctctctccataccgtgaccctggggtgtcattctgttgcagagcagcc

SEQ ID NO: 164268 - DNA, 120 bp, Artificial Sequence
  ENSG00000107937_0 (sequence is synthesized)
ggaagttccgggagtgccaagtacccgcgtgcatacggctgccggcatggcacattacaacttcaagaaaattacggtggtgccgtccgccaaggacttcatagacctcacgttgtcgaa

SEQ ID NO: 164269 - DNA, 120 bp, Artificial Sequence
  ENSG00000107937_1 (sequence is synthesized)
gactcaacgaaagactccaaccgttattcataaacattaccaaatacatcgcattagacatttttacatgagaaaagtcaaatttactcaacagaattaccatgatagactttcacaaat

SEQ ID NO: 164270 - DNA, 120 bp, Artificial Sequence
  ENSG00000107937_2 (sequence is synthesized)
tctaacagatttccccaaattggatgatattcatccgttctatgctgatttgatgaatattctctacgacaaggatcattacaagttggctctggggcaaataaatattgccaaaaattt

SEQ ID NO: 164271 - DNA, 120 bp, Artificial Sequence
  ENSG00000107937_3 (sequence is synthesized)
agtggacaatgttgctaaagattatgtgcgactgatgaagtatggcgactctctctaccgctgcaaacagctgaagcgtgcggccctgggacggatgtgcacagtgatcaagaggcagaa

SEQ ID NO: 164272 - DNA, 120 bp, Artificial Sequence
  ENSG00000107937_4 (sequence is synthesized)
gcagagtttggagtatttggagcaagtgcgtcagcatttatcccgtttgccaaccattgatccgaataccaggaccctgcttttgtgtgggtacccaaatgttgggaagtccagcttcat

SEQ ID NO: 164273 - DNA, 120 bp, Artificial Sequence
  ENSG00000107937_5 (sequence is synthesized)
caacaaggtgacgagagcagacgtggatgtccagccctatgcgttcacaaccaagtctctgtttgttgggcacatggattataagtatctacgttggcaggttgtagacactcctgggat

SEQ ID NO: 164274 - DNA, 120 bp, Artificial Sequence
  ENSG00000107937_6 (sequence is synthesized)
cctggaccaccctctggaggataggaacaccatcgagatgcaggccatcactgccctggcccacctccgtgctgcggtcctgtatgtgatggatttgtctgagcagtgtgggcatgggct

SEQ ID NO: 164275 - DNA, 120 bp, Artificial Sequence
  ENSG00000107937_7 (sequence is synthesized)
gagggagcagctagaactcttccagaacatcagacctctcttcatcaacaagcctctcatagttgtagccaacaaatgtgatgtgaagagaatagctgaactttctgaagatgatcagaa

SEQ ID NO: 164276 - DNA, 120 bp, Artificial Sequence
  ENSG00000107937_8 (sequence is synthesized)
aatatttacagatttgcagtctgaaggattccctgtaatagagaccagcaccctgactgaggaaggtgttattaaagttaaaacagaggcttgcgataggcttttggctcatcgagtgga

SEQ ID NO: 164277 - DNA, 120 bp, Artificial Sequence
  ENSG00000107937_9 (sequence is synthesized)
aaccaaaatgaagggaaataaagtgaatgaggtgctgaatagactgcacctggctatcccaaccaggagggacgataaggagaggccccctttcatccctgaaggagtggtggctcgcag

SEQ ID NO: 164278 - DNA, 120 bp, Artificial Sequence
  ENSG00000107937_10 (sequence is synthesized)
gaagaggatggaaactgaggagtccaggaagaagagggaacgagatcttgagctggaaatgggagatgattatattttggatcttcagaagtactgggatttaatgaatttgtctgaaaa

SEQ ID NO: 164279 - DNA, 120 bp, Artificial Sequence
  ENSG00000107937_11 (sequence is synthesized)
acatgataagataccagaaatctgggaaggccataatatagctgattatattgatccagccatcatgaagaaattggaagaattagaaaaagaagaagagctgagaacagctgctggaga

SEQ ID NO: 164280 - DNA, 120 bp, Artificial Sequence
  ENSG00000107937_12 (sequence is synthesized)
gtatgacagtgtatctgagagtgaagacgaagagatgctggaaatccgacagctggcaaagcaaattcgagagaaaaagaagttgaaaattctggagtccaaagaaaagaatacacaggg

SEQ ID NO: 164281 - DNA, 120 bp, Artificial Sequence
  ENSG00000107937_13 (sequence is synthesized)
acccaggatgccgcgaactgctaagaaggttcagaggacagttttggagaaggagatgcgtagtcttggtgttgacatggacgataaagacgatgcccattacgcagtccaggcaagaag

SEQ ID NO: 164282 - DNA, 120 bp, Artificial Sequence
  ENSG00000107937_14 (sequence is synthesized)
atcccggagcatcactaggaaaagaaagcgggaagactctgctcccccgtcctctgtggcccggagtgggagttgctctcgaactccacgtgacgtttctggtcttagggatgtcaagat

SEQ ID NO: 164283 - DNA, 120 bp, Artificial Sequence
  ENSG00000107937_15 (sequence is synthesized)
ggtgaagaaagccaagactatgatgaagaatgctcagaagaagatgaatcggttggggaagaaaggggaggcggatagacacgtgtttgatatgaagcccaagcacttgctgtctgggaa

SEQ ID NO: 164284 - DNA, 120 bp, Artificial Sequence
  ENSG00000107937_16 (sequence is synthesized)
gaggaaagctggtaaaaaggacaggagatagtatccgtttggttggcgtggcttcgctagagtgttgctgtttatttcctggtttggcacagtatggtttcatgaaattggagctctgta

SEQ ID NO: 164285 - DNA, 120 bp, Artificial Sequence
  ENSG00000107937_17 (sequence is synthesized)
taaactgaaaaagacaaaataagtaaagcacttgttgctttgctgaaaactatggttaaccctatataggtgtgggaaatttttgtcactgcataatattacaaatattttgagtagaca

SEQ ID NO: 164286 - DNA, 120 bp, Artificial Sequence
  ENSG00000107937_18 (sequence is synthesized)
gtgtttccacatttaatggagtatcagttgcttcagattttcagaactgggaagatttactggtttaactaggttgtttttgatggagaaaaaccttattttcttttgtaagagctggga

SEQ ID NO: 164287 - DNA, 120 bp, Artificial Sequence
  ENSG00000107937_19 (sequence is synthesized)
ttcaactattttatccaaaataaacctccagaagaaagtagttttcatttacttagctcatgttttggtttagttatagtcgctatggatttggccaaataaaaaggcaaacaacatgac

SEQ ID NO: 164288 - DNA, 120 bp, Artificial Sequence
  ENSG00000107937_20 (sequence is synthesized)
atttctattttgttttaaagcaaaaatacttttgggggagtaaaatgttgctggaggcattaggcaattaaatatgggcattctcctatttctgtggcccgtccctgaagttacatgttc

SEQ ID NO: 164289 - DNA, 120 bp, Artificial Sequence
  ENSG00000107937_21 (sequence is synthesized)
agtaaaacacaaaaacaccgccaatgccacctcaaaagcacctgctggggagcgttggggtgaagagctgtggggtcggagggacctgcccaggggtccgtgtgctcctggagctccaaa

SEQ ID NO: 164290 - DNA, 120 bp, Artificial Sequence
  ENSG00000107937_22 (sequence is synthesized)
gacacacaggggtccaagagccaccacggataagttatcaagtcacacaatcaacattatagctgaggaaaggactttagttaatcacacttctggattacatgtggcaattttaaaaat

SEQ ID NO: 164291 - DNA, 80 bp, Artificial Sequence
  ENSG00000107937_23 (sequence is synthesized)
ttaatcacacttctggattacatgtggcaattttaaaaatttaccagggctgggctgggcgcaggggctcaagcctgtag

SEQ ID NO: 164292 - DNA, 120 bp, Artificial Sequence
  ENSG00000107937_24 (sequence is synthesized)
cagcctgggtgacagagagagactccgtgtgaaaaaaaaaaaaaaaataccaggtctggtttttgaaattctttctccgtattaaacaccaaaacttaacatatagtttactttgtgtta

SEQ ID NO: 164293 - DNA, 78 bp, Artificial Sequence
  ENSG00000107937_25 (sequence is synthesized)
ttttgaaattctttctccgtattaaacaccaaaacttaacatatagtttactttgtgttaaacaacaacagtatggcc

SEQ ID NO: 164294 - DNA, 84 bp, Artificial Sequence
  ENSG00000107937_26 (sequence is synthesized)
actccagcctggtcaccaggtctggtttttgaaattctttctccgtattaaacaccaaaacttaacatatagtttactttgtgt

SEQ ID NO: 164295 - DNA, 120 bp, Artificial Sequence
  ENSG00000107937_27 (sequence is synthesized)
gtattaaacaccaaaacttaacatatagtttactttgtgttaaacaacaacagtatgttttaaagcaagtatgtctttatttgtaagcatattactgaaacgatcaaatgaacagaagtg

SEQ ID NO: 164296 - DNA, 120 bp, Artificial Sequence
  ENSG00000107937_28 (sequence is synthesized)
gataaacgtcgagtcacttggctgagaccatacgcatcttccgtactgcttgtattaggatgcaagattgaatgtgtcttttttttaaaaatgcagccttgtgttgcactctgaaataag

SEQ ID NO: 164297 - DNA, 120 bp, Artificial Sequence
  ENSG00000107937_29 (sequence is synthesized)
tgatttaaaaagaaaaacatgatacagagatcccatcctgaccttggaggcttggataaagctgtggggagacagcctcatggtccagccaggctagtccgcctgcttcaggactctcaa

SEQ ID NO: 164298 - DNA, 120 bp, Artificial Sequence
  ENSG00000107937_30 (sequence is synthesized)
gatctccccaagactttcaggatcagctgctgttaatcaaacaagtgcttataaaatggaaattgggacaaaggaaatgttaaatttcctccctgcaaccaggcagatgagaaatatgga

SEQ ID NO: 164299 - DNA, 120 bp, Artificial Sequence
  ENSG00000107937_31 (sequence is synthesized)
aataaggaaaagggaaaatgaagatatgacaaagttgatgaaaaggttgaaatagtgatttatacatgatgggcaatcaagtgccccttttgccctgttttttggagagggtgtatcatt

SEQ ID NO: 164300 - DNA, 120 bp, Artificial Sequence
  ENSG00000107937_32 (sequence is synthesized)
gcctcaatggtgcgtctgcctgcactgagggcattacacatggctgactcgacctccctgcctctcacactctgtgtattttgtgaagctccacaaacggggtcacgtcatccaggtgag

SEQ ID NO: 164301 - DNA, 120 bp, Artificial Sequence
  ENSG00000107937_33 (sequence is synthesized)
gccaccaccggtacagaaacctctcggcaatggttcttagccagggggtgactttgacttcacccctcgcctccctctccagcagctcccacagctcctcctgggacaggtagaggatgc

SEQ ID NO: 164302 - DNA, 120 bp, Artificial Sequence
  ENSG00000107937_34 (sequence is synthesized)
ttttcgtttcactgggatccgggttcagagtgacgtttttcctcacaagcagaaggtaacaaatttcatgctctccccaaattctgtctgattttgccttgtggtgatagattgtcatga

SEQ ID NO: 164303 - DNA, 120 bp, Artificial Sequence
  ENSG00000107937_35 (sequence is synthesized)
acacaatgtcctctggagaaatctattgacagaaattggtgcagtgttaacaacgctaatgtaaaacacagaatttacagaaaaatagagaaaataaacacatttgttttcctcagaaaa

SEQ ID NO: 164304 - DNA, 120 bp, Artificial Sequence
  ENSG00000107937_36 (sequence is synthesized)
agcctcccatccagcttcacacactcgcaggtggatattgtgggtgggcctcagtttcaccttcttgcttacataaaggatcgagaaggtgaagaaagtgcagaacgccacatggcaccc

SEQ ID NO: 164305 - DNA, 120 bp, Artificial Sequence
  ENSG00000107937_37 (sequence is synthesized)
gggtccaccagagatcggatcccccagagaccggggtccacctaagaccgtggtccacccaaagactgagggcccccagagatgggggtacacccagagttgggttccctggaggggccc

SEQ ID NO: 164306 - DNA, 120 bp, Artificial Sequence
  ENSG00000107937_38 (sequence is synthesized)
cgggtgacgatgtgggcgagtggagggggaccccgacatgtgagggaggaagcgttccgtggtccgtgatgagccttcggattctgggtttggcgtagccccctcccctctcaggaatcc

SEQ ID NO: 164307 - DNA, 120 bp, Artificial Sequence
  ENSG00000107937_39 (sequence is synthesized)
gtatttggagcaaggtgcttgtcacgcatccgcgggaaccgtgctagcatcctgctgagaggatgcgtccttgttgaggacttgagatgtctgtttttcttgtattttggagatgacagg

SEQ ID NO: 164308 - DNA, 120 bp, Artificial Sequence
  ENSG00000107937_40 (sequence is synthesized)
gtcagttattcttcctagctttacctatgagaaacagtaataggctggtttttattgaaaataaatacttacaaatcaatagcactgataagaaaatttatatatttcatatttaatagg

SEQ ID NO: 164309 - DNA, 120 bp, Artificial Sequence
  ENSG00000107937_41 (sequence is synthesized)
taaggcatacacaaaaaagtcacgagaaaatactgaaaagtataaaaactaaggtggctcatagtttattattgacttttttatttttaaaaacacttgtatttaataggactttctgaa

SEQ ID NO: 164310 - DNA, 120 bp, Artificial Sequence
  ENSG00000107937_42 (sequence is synthesized)
ttaatgtactaggattctgttgaaacaattacttgcttattgtgtgtattcttacatgacaaattattttgactcattcggttttgttttctctcctgcatcttagaaataatttttaac

SEQ ID NO: 164311 - DNA, 120 bp, Artificial Sequence
  ENSG00000107937_43 (sequence is synthesized)
aaaatttgtgatacttggatgccttgcaggtgctttgctacagatctgtgtggtcttcatgatggccggggtgccaccctggagccgtgtttgttacagacgaggtggcagagtggcagt

SEQ ID NO: 164312 - DNA, 120 bp, Artificial Sequence
  ENSG00000107937_44 (sequence is synthesized)
aacccatgttgtagcccaaacggcatggcctgcaggcttcaaagtgcactggttccctaatgtcatcttgctaatgagaattgtctggacactgccagacatgctgttggccccacctgt

SEQ ID NO: 164313 - DNA, 120 bp, Artificial Sequence
  ENSG00000107937_45 (sequence is synthesized)
aaacttgggagatagcaattgaatatactatgtgtatactattactttctgcaactattttctccatcacttttgcattacaaaagttggagtaagatgaatatcaccataggcctggac

SEQ ID NO: 164314 - DNA, 120 bp, Artificial Sequence
  ENSG00000107938_0 (sequence is synthesized)
aagtgcggtccgcggagcgtctctggcgcttaccctgctttgggcctgcgttgctgctgctgctcctccgctcccccgtcgtatcgcctgccctggatcgaagtgatgggggatgccaag

SEQ ID NO: 164315 - DNA, 120 bp, Artificial Sequence
  ENSG00000107938_1 (sequence is synthesized)
gaggccggagccgagggtccgccggccggggccgccgctcgaggagggctcagcctcctgtcccagggagaatccgaggaatcttctgcacagggatcagctttatttcttggaggcaat

SEQ ID NO: 164316 - DNA, 120 bp, Artificial Sequence
  ENSG00000107938_2 (sequence is synthesized)
gaagtgaagagccgagctgtggtgaaatactcttctgcccctcctcgaacagcatttgcacgccttgaagagaaaacagacttgaaactcccacctgccaactggttacgagagagtgcc

SEQ ID NO: 164317 - DNA, 120 bp, Artificial Sequence
  ENSG00000107938_3 (sequence is synthesized)
aaactagggccagcaggaactaccattcttggcaacagcaagaaaagcaagccattttcaagctttggcatggcatatgactttattgattcagtgggaaatgatgtggatgttgtctct

SEQ ID NO: 164318 - DNA, 120 bp, Artificial Sequence
  ENSG00000107938_4 (sequence is synthesized)
gactctgaaaacataaaaaaactcctgaaaattccctacagcaagtcgcacgtgagcatggcagtacaccgcataggaaggactctcttactagatgagctagatattcaagaactcttt

SEQ ID NO: 164319 - DNA, 120 bp, Artificial Sequence
  ENSG00000107938_5 (sequence is synthesized)
atgagatcgtctcagactggtgactggacatggttgaaagagttttatcaaagactcattgatcagaagtggcagaggaagaaaaagagcaaagagcactggtatcaaaaggcaattctt

SEQ ID NO: 164320 - DNA, 120 bp, Artificial Sequence
  ENSG00000107938_6 (sequence is synthesized)
tccaagtttttatattacagtatcaatggtgatggagccgctcagcctgtctcatccaccgcagaacagcaggaatcgtccagttcagatcagacaaatgattcggaaggggcttcatgg

SEQ ID NO: 164321 - DNA, 120 bp, Artificial Sequence
  ENSG00000107938_7 (sequence is synthesized)
cctgctcccttcgaaatgccttcttcagtttctgaagatcccagtgcttccagtcagggtcttaaaaatgattttgttcggaatattctatggacatttgaagatatccatatgttggtc

SEQ ID NO: 164322 - DNA, 120 bp, Artificial Sequence
  ENSG00000107938_8 (sequence is synthesized)
ggctccaacatgcccatatttggaggaggcagatacccagcagtcagcttacgtctcagggataacaacaaaccaattaatgtgctaactggaattgactattggttggacaacttgata

SEQ ID NO: 164323 - DNA, 120 bp, Artificial Sequence
  ENSG00000107938_9 (sequence is synthesized)
tgcaatgtgccagagcttgtgatgtgttttcatgtaaatggaattgtacagaaatatgaaatgataaagacagaagaaattcccaatttggaaaattctaatttttctactaaagtcata

SEQ ID NO: 164324 - DNA, 120 bp, Artificial Sequence
  ENSG00000107938_10 (sequence is synthesized)
aaagacattgcacagaatattttatcatttttgaaatctaattgtaccaaagaaggacatacctattggctctttaaagcaagtggcagcgatatagtgaagctctatgacctcactact

SEQ ID NO: 164325 - DNA, 120 bp, Artificial Sequence
  ENSG00000107938_11 (sequence is synthesized)
ctttgtgaagaaactgaagacaaataccaaaatccattcacaatgccggtagccattctcttgtacaaggttgcttgcaacatgatgatgaagaagaatcaaaataagaaacactatgga

SEQ ID NO: 164326 - DNA, 120 bp, Artificial Sequence
  ENSG00000107938_12 (sequence is synthesized)
actattagaacattgcttcttaattgtctgaaattactggacaaaagtaggcatcctcaaattattgcttccgccaattacatgctttcagaactttttcaattggatgaacctaaaaag

SEQ ID NO: 164327 - DNA, 120 bp, Artificial Sequence
  ENSG00000107938_13 (sequence is synthesized)
gaagaaaattcagaatctcctttaaatgagaattctgatgaaagttatagtgaagaggaggaagagatgcccgacagtgatgaaaatggatcctatagcaccagctctgatccatcagat

SEQ ID NO: 164328 - DNA, 120 bp, Artificial Sequence
  ENSG00000107938_14 (sequence is synthesized)
gatagcaaagcagtagctataatcaagtctgttggagaactatcagtaccagaaaaatacaaatctattcatcaaatcagacccagttgtgcatttccagtttgccatgacacagaagag

SEQ ID NO: 164329 - DNA, 120 bp, Artificial Sequence
  ENSG00000107938_15 (sequence is synthesized)
cgctgtagacttgtgcttagctatgttctagagggtttaaaatctgtcgatagcagcatcaaaaaagaaagcgaccttccagcagctgaccccagcactccaatcccgttaaaatatgaa

SEQ ID NO: 164330 - DNA, 120 bp, Artificial Sequence
  ENSG00000107938_16 (sequence is synthesized)
gatgaatcctcaagagggggtcccgaggggctagagaagcagatggccttgtttttggacaaaatgggctcccttcagaagggcaattattccagtcaatctggaatgatccctggctct

SEQ ID NO: 164331 - DNA, 120 bp, Artificial Sequence
  ENSG00000107938_17 (sequence is synthesized)
tggcaacataaaatgaaacttcagctgattctcaagtcatcaaaggcctattatgttttgtccgatgctgccatgagtcttcagaaatacggaagagcattacgatacattaaattagct

SEQ ID NO: 164332 - DNA, 120 bp, Artificial Sequence
  ENSG00000107938_18 (sequence is synthesized)
ctcaatatttgacactttgtggtgatatccaactaatgctggcccagaatgcaaataatagagcagcacaccttgaagagtttcattaccaaacaaaagaagaccaggagatcctgcata

SEQ ID NO: 164333 - DNA, 120 bp, Artificial Sequence
  ENSG00000107938_19 (sequence is synthesized)
gccttcacagagagtccagttgccaaggatttgcatgggcaactgatttgtctacagacttagaaagtcaactctctgttagttgtaaatgttatgaggctgctaatgaaatcttgcagt

SEQ ID NO: 164334 - DNA, 120 bp, Artificial Sequence
  ENSG00000107938_20 (sequence is synthesized)
ttagtgacttgaaaagccaaaatccagaacactatgtacaagtattaaagagaatgggtaacattagaaatgaaattggtgtgttttacatgaatcaggctgctgcattacagagtgaga

SEQ ID NO: 164335 - DNA, 120 bp, Artificial Sequence
  ENSG00000107938_21 (sequence is synthesized)
gactagtgagcaaatctgtgtctgctgccgagcaacagttgtggaaaaaaagcttttcttgttttgaaaagggaattcacaactttgaatcaattgaggatgccaccaatgccgcccttt

SEQ ID NO: 164336 - DNA, 120 bp, Artificial Sequence
  ENSG00000107938_22 (sequence is synthesized)
tattatgtaacacgggaaggctcatgcggatttgtgcgcaggcccactgtggtgcaggggatgaactgaaacgtgaattttcaccagaagaaggcttgtattataataaggctattgatt

SEQ ID NO: 164337 - DNA, 120 bp, Artificial Sequence
  ENSG00000107938_23 (sequence is synthesized)
actatttgaaagcgctaaggtcattgggaacacgagacatacacccagctgtttgggattcagtgaactgggaattgtccactacttactttactatggcaactctacagcaagattatg

SEQ ID NO: 164338 - DNA, 120 bp, Artificial Sequence
  ENSG00000107938_24 (sequence is synthesized)
ctccgttatctagaaaagctcaggagcagattgagaaagaagtcagtgaggccatgatgaagtccctaaaatactgcgatgtggattcagtgtctgctcgacagcccctttgtcagtatc

SEQ ID NO: 164339 - DNA, 120 bp, Artificial Sequence
  ENSG00000107938_25 (sequence is synthesized)
gagctgcaaccatccatcacaggctggcctccatgtaccacagctgtctgaggaatcaggttggtgatgaacaccttaggaaacaacaccgggtgctggcagatcttcattacagcaagg

SEQ ID NO: 164340 - DNA, 120 bp, Artificial Sequence
  ENSG00000107938_26 (sequence is synthesized)
ccgcaaagctgtttcagctgctgaaagatgctccctgcgaactgcttagagtacagctagagagagtagcatttgctgaatttcagatgaccagtcagaatagcaatgttggaaagttga

SEQ ID NO: 164341 - DNA, 120 bp, Artificial Sequence
  ENSG00000107938_27 (sequence is synthesized)
aaacactatctggggctcttgatataatggtgagaactgagcacgcattccagcttatccagaaggagcttatagaagaatttggccagcctaagagtggtgacgccgctgcagctgctg

SEQ ID NO: 164342 - DNA, 120 bp, Artificial Sequence
  ENSG00000107938_28 (sequence is synthesized)
atgcttctcctagtctcaatcgagaagaagtgatgaaactcctcagtatatttgagtctcggttgtcatttcttctccttcagtccattaaactgctatcttcaactaaaaagaaaacaa

SEQ ID NO: 164343 - DNA, 120 bp, Artificial Sequence
  ENSG00000107938_29 (sequence is synthesized)
gcaataacatcgaagatgacacaattctcaaaaccaacaagcacatttactcccagcttttgagagcaactgcaaataaaaccgcgactcttctggaaagaatcaacgttatcgtccacc

SEQ ID NO: 164344 - DNA, 120 bp, Artificial Sequence
  ENSG00000107938_30 (sequence is synthesized)
tgctgggccagcttgccgccggcagtgcagcgagcagcaatgccgttcagtgactgcacagagccgtgtcccagacacgctgtcagtgccttcaacacggagccggtttgttcattcggt

SEQ ID NO: 164345 - DNA, 120 bp, Artificial Sequence
  ENSG00000107938_31 (sequence is synthesized)
gctttgtttcattaaataatagggaaatatccatttaaaacaggtatatcagtggaaacacagagttattttaagtgacagacaaattacggttgagttctgtggcttcttcacttgaag

SEQ ID NO: 164346 - DNA, 120 bp, Artificial Sequence
  ENSG00000107938_32 (sequence is synthesized)
tgctaacatcagaatcaaacttaaagcttccactatttatgtctttgagaagtatgtagtacctcggtattaacagacctgctgtgatgcagttacactttcacgtatttttgaagtatg

SEQ ID NO: 164347 - DNA, 120 bp, Artificial Sequence
  ENSG00000107938_33 (sequence is synthesized)
tcaagctacacgggtctaagatatgattattttggataaaatgttactttggtcaagagaacttttatccagatgacattacaggttcaagtgggttaaggagacctcctgtacatctac

SEQ ID NO: 164348 - DNA, 120 bp, Artificial Sequence
  ENSG00000107938_34 (sequence is synthesized)
agtgtttccttttaaattgtccagaaaaaaggtgtgttcttcataagcttcagtgcaggatttttcaaagacgagctgttgtgcaatttgctgtatttaatgcatgttctgaaaggattc

SEQ ID NO: 164349 - DNA, 120 bp, Artificial Sequence
  ENSG00000107938_35 (sequence is synthesized)
acttttgactttatatgacagttgatcaagaacaggtactacccctttttttcatttcaaacttgaaactgtgaataaggtaagaaaactattttgaataaataaactatttatttaaaa

SEQ ID NO: 164350 - DNA, 120 bp, Artificial Sequence
  ENSG00000107938_36 (sequence is synthesized)
cccttcgaaatgccttcttcagtttctgaagatcccagtgcttccagtcagggaagtgagcctcttgaaccctcatacatagtggggcatgtggcctcagcccccaaagaacaaaacctg

SEQ ID NO: 164351 - DNA, 120 bp, Artificial Sequence
  ENSG00000107938_37 (sequence is synthesized)
tgtcagtccaagttaagtacagtgccacatcagtttaaaagtgttctgggtgctttttgtttttttaacatggtcatatatgtcttccttgacgtccactcaggtgaactgctgtcctaa

SEQ ID NO: 164352 - DNA, 120 bp, Artificial Sequence
  ENSG00000107938_38 (sequence is synthesized)
attttctgctgcgtctgtgcctttttttgtgctgtgccacttaaacaatatgtccgcattgtgctccatgttgagcatgggaaaacgaatccgctgttggtgttctgtggcttactgcct

SEQ ID NO: 164353 - DNA, 120 bp, Artificial Sequence
  ENSG00000107938_39 (sequence is synthesized)
gtcacttaacatcgtgtttttgagatacatctgtgttggcacacgtagctgttcattttctcagctcagtagtcattaaatgactatatcttagtttatctagtctatgattagtgaatt

SEQ ID NO: 164354 - DNA, 120 bp, Artificial Sequence
  ENSG00000107938_40 (sequence is synthesized)
ttggggttattccagattccagtttgatgctattagaaataatctagtgccagcaggattgtacatgaatcctggtgcccaaatgcctgtatttctgagaataatctgaggccgaggata

SEQ ID NO: 164355 - DNA, 120 bp, Artificial Sequence
  ENSG00000107938_41 (sequence is synthesized)
aaggcacttccttccgagagattgcttggcttttgctgcgagtcttgggcctgtagtttctcagtgatgtttttttgtttgttttgttgattttccccccccgtaaggtaagactactta

SEQ ID NO: 164356 - DNA, 120 bp, Artificial Sequence
  ENSG00000107938_42 (sequence is synthesized)
cttaccttacagtccctttggcatgagtttacttctgggttgcctttattctgaaaagtatcttttgagatacagcttaaactggagaagttctttttctttttttttgagacagggtct

SEQ ID NO: 164357 - DNA, 120 bp, Artificial Sequence
  ENSG00000107938_43 (sequence is synthesized)
gcttactgcaacctccgcctcccaggcctccccactcttttgcatatagatatctagttgtcccagcaccatttgctgaaaagactactcctctgctgcattgtcttggcacccttaagc

SEQ ID NO: 164358 - DNA, 120 bp, Artificial Sequence
  ENSG00000107938_44 (sequence is synthesized)
ctactcctctgctgcattgtcttggcacccttaagcttgcttttgccctcaggatattaggccatctgggcaaacctgaattttggttgaggacttcctaagtcgaagtggaaagaaatc

SEQ ID NO: 164359 - DNA, 86 bp, Artificial Sequence
  ENSG00000107938_45 (sequence is synthesized)
ttctccgaggtggttggatcatttgaggtcgggagttagagagcagcctagccaacatgacaaaaccccagaaaaaaattaaaaaa

SEQ ID NO: 164360 - DNA, 120 bp, Artificial Sequence
  ENSG00000107938_46 (sequence is synthesized)
ggcgcactacaattcccgccctggccgcgaaggtggcacccgcagcgggaggcggggccgggccttcgggacaaagatcgcgagatttaatggcgagtcacagctacttcttcctggcag

SEQ ID NO: 164361 - DNA, 120 bp, Artificial Sequence
  ENSG00000107938_47 (sequence is synthesized)
attaaagacctaaatataaaagctaaaactaataagacctagtaagacccacagtgggggaaaaataactaagaagcacttagtgaagcctgaagtagttaccgtgaaggatttgttgct

SEQ ID NO: 164362 - DNA, 120 bp, Artificial Sequence
  ENSG00000107938_48 (sequence is synthesized)
gagtccagttgccaaggtgtgccacaggcttggaccacgtggttcacagtgggactgtgcagtctagctcatgcttatttgagtattcagaaaaggggtagaaatattagagttttgata

SEQ ID NO: 164363 - DNA, 60 bp, Artificial Sequence
  ENSG00000107938_49 (sequence is synthesized)
cgccaccatgcccggctatgttttattcatttcctaattttaagattaagcatgatcttg

SEQ ID NO: 164364 - DNA, 120 bp, Artificial Sequence
  ENSG00000107938_50 (sequence is synthesized)
cctggcctgctgttttattcatttcctaattttaagattaagcatgatcttgtgtatttgtataaaatggtttttaagtattttataattactgtttatataactagaactaaatataaa

SEQ ID NO: 164365 - DNA, 120 bp, Artificial Sequence
  ENSG00000107938_51 (sequence is synthesized)
gaataatctgatccgcagcagcgatatccctccctcttacctcagcacagtgtgtaaccacgctgccattaacacagtgaatgaagtaaaagatgagtcttctgaaggatttgcatgggc

SEQ ID NO: 164366 - DNA, 120 bp, Artificial Sequence
  ENSG00000107938_52 (sequence is synthesized)
taattttcatttctcagatatgtatgcattggcttagtgctggattgtcttagagtaaggcaggcctgtgaatctaaataatactattttctttttaatttgccccatagttaatgactt

SEQ ID NO: 164367 - DNA, 120 bp, Artificial Sequence
  ENSG00000107938_53 (sequence is synthesized)
cgggtagagagggtgagaaatcactacatgttttgaagtgctttttaaaacttagaggaatgtattagattatgttcagtgactagaaatactgagatatggcccatgacccctagtttg

SEQ ID NO: 164368 - DNA, 73 bp, Artificial Sequence
  ENSG00000107938_54 (sequence is synthesized)
cctcctgagtagctgagactacaagcatgttgccaacacgcctgtctcattttggcattataatatttttagt

SEQ ID NO: 164369 - DNA, 120 bp, Artificial Sequence
  ENSG00000107938_55 (sequence is synthesized)
cctcaaaattgagttttatttattagattgccaaattttatgacaaatggtcacacccactgttggagagggtacaaagatatgagcactcatataatggaggaattgaagccatttaaa

SEQ ID NO: 164370 - DNA, 120 bp, Artificial Sequence
  ENSG00000107938_56 (sequence is synthesized)
tgacattagtgaagaatgttggtggcataaatttttaaatgagtgaccttttttgattttcttttttaaatttatatatacacagaaaagagtgaataaataaacaccagaaatgtagaa

SEQ ID NO: 164371 - DNA, 120 bp, Artificial Sequence
  ENSG00000107938_57 (sequence is synthesized)
attattgctgggtgattaagtgtggttttgtttttggtttcaatataatggccatgtatttgaggattggggtaacaaggtaggaggagatacttctttttacgtaaaatttggcaagtt

SEQ ID NO: 164372 - DNA, 120 bp, Artificial Sequence
  ENSG00000107938_58 (sequence is synthesized)
gtcagaaagcagcagcacggattggcttcttgtagccttgagatgggaacacagagtggtcttcagtctactcggaataactttcttcattgaaatattttcattgacttacttttttca

SEQ ID NO: 164373 - DNA, 120 bp, Artificial Sequence
  ENSG00000107938_59 (sequence is synthesized)
tttcctcataatattgtctctttataaattatcccaaaattaaattaacatctgggtagttgtgaagtgtgttttattttaatgcagtattggtatatgtttaagctgagtcagaaatgt

SEQ ID NO: 164374 - DNA, 120 bp, Artificial Sequence
  ENSG00000107938_60 (sequence is synthesized)
agtctcggttgtcatttcttctccttcagtccattaaactgctatcttcaactaaaaagaaaacaaggtgatgcaggcatttcatcatcatatgacaactgcattggcattgacctgcta

SEQ ID NO: 164375 - DNA, 120 bp, Artificial Sequence
  ENSG00000107949_0 (sequence is synthesized)
gtgagcggcaacatggcgtccaggtctaagcggcgtgccgtggaaagtggggttccgcagccgccggatcccccagtccagcgcgacgaggaagaggaaaaagaagtcgaaaatgaggat

SEQ ID NO: 164376 - DNA, 120 bp, Artificial Sequence
  ENSG00000107949_1 (sequence is synthesized)
gaagacgatgatgacagtgacaaggaaaaggatgaagaggacgaggtcattgacgaggaagtgaatattgaatttgaagcttattccctatcagataatgattatgacggaattaagaaa

SEQ ID NO: 164377 - DNA, 120 bp, Artificial Sequence
  ENSG00000107949_2 (sequence is synthesized)
ttactgcagcagctttttctaaaggctcctgtgaacactgcagaactaacagatctcttaattcaacagaaccatattgggagtgtgattaagcaaacggatgtttcagaagacagcaat

SEQ ID NO: 164378 - DNA, 120 bp, Artificial Sequence
  ENSG00000107949_3 (sequence is synthesized)
gatgatatggatgaagatgaggtttttggtttcataagccttttaaatttaactgaaagaaagggtacccagtgtgttgaacaaattcaagagttggttctacgcttctgtgagaagaac

SEQ ID NO: 164379 - DNA, 120 bp, Artificial Sequence
  ENSG00000107949_4 (sequence is synthesized)
tgtgaaaagagcatggttgaacagctggacaagtttttaaatgacaccaccaagcctgtgggccttctcctaagtgaaagattcattaatgtccctccacagatcgctctgcccatgtac

SEQ ID NO: 164380 - DNA, 120 bp, Artificial Sequence
  ENSG00000107949_5 (sequence is synthesized)
caaaaagaaacctagcaacaaaaagaaagctgcgttaatgtttgcaaatgcagaggaagaatttttctatgaggagcagggaaaacctgaggtgcttggaggtccagacacaagaagagg

SEQ ID NO: 164381 - DNA, 120 bp, Artificial Sequence
  ENSG00000107949_6 (sequence is synthesized)
attggaaccagttccgatacagcacaatggtggttcacgggggcaagtgacagccctggtttctctgaaggctggactaattcaatcaagatcaactctaagtgatttccagggaacctt

SEQ ID NO: 164382 - DNA, 120 bp, Artificial Sequence
  ENSG00000107949_7 (sequence is synthesized)
catgactgttggaattgctctgtcataataagtcagggatatttaggaggctcatagtctcctggagggataaaacatctcggcacctagtaatggtaaattagtcaatatttgttagtt

SEQ ID NO: 164383 - DNA, 120 bp, Artificial Sequence
  ENSG00000107949_8 (sequence is synthesized)
tcgtttgagatctcaaatgttaggattttctgaagtctcagtgtctttcagagtttgagataccttgttttcattttttctaatttttaatttaaaagtaataaagaatattttgtaatg

SEQ ID NO: 164384 - DNA, 120 bp, Artificial Sequence
  ENSG00000107949_9 (sequence is synthesized)
attaggatgaaaattttatcgtcaattataagccaaaatttgctaaaattaaagtcagtatacttgaaacaagtttctagtaagttctctggggtaagatactaattactctgataaagg

SEQ ID NO: 164385 - DNA, 120 bp, Artificial Sequence
  ENSG00000107949_10 (sequence is synthesized)
ggctatcaaaaaaatccagtaaattgttcataagaagagatcagtttaagagtcaaacaatttgctttgctagtaccttagctaaagaaaaaatactattaaagatgactatcaccttta

SEQ ID NO: 164386 - DNA, 120 bp, Artificial Sequence
  ENSG00000107949_11 (sequence is synthesized)
ttgcaaatgcagaggaagaatttttctatgagaaggcaattctcaagttcaactactcagtgcaggaggagagcgacacttgtctgggaggcaaatggtcttttgatgacgtaccaatga

SEQ ID NO: 164387 - DNA, 120 bp, Artificial Sequence
  ENSG00000107949_12 (sequence is synthesized)
cgcccttgcgaactgtgatgttaattccaggcgacaagatgaacgaaatcatggataaactgaaagaatatctatctgtctaacccatttccaatggacagtgatgggcttgtttttgta

SEQ ID NO: 164388 - DNA, 120 bp, Artificial Sequence
  ENSG00000107949_13 (sequence is synthesized)
aaattaccagaaaactcagtggagatttactgaaaaactcagactttattcagattaagttcctctacaaaaagtagggttctgtcccatgtgtctctgacacatttacaaaataccagt

SEQ ID NO: 164389 - DNA, 120 bp, Artificial Sequence
  ENSG00000107949_14 (sequence is synthesized)
tttttaaaattttggtcaaattatgagtggttgatttaaaaacttttccaagaagaagaaaagcatggagtagtaatttaaagaactcaataaaaacttctattttttattttaaaataa

SEQ ID NO: 164390 - DNA, 120 bp, Artificial Sequence
  ENSG00000107949_15 (sequence is synthesized)
taatctggctaagttagcatttgaagtctgcaaagctggacttaaagagttcaaattggagctggaattgctctaagcaattccagggccttgcaattttacaattaaggaagacttaaa

SEQ ID NO: 164391 - DNA, 120 bp, Artificial Sequence
  ENSG00000107949_16 (sequence is synthesized)
tatatacatagtcagggtggcaaggtaaaaggaggtctgatttcctctgcgatgttcttcagctaagacctaaattctgaaaccgttaaaacctgaagtgcctttaaatatattatttca

SEQ ID NO: 164392 - DNA, 120 bp, Artificial Sequence
  ENSG00000107949_17 (sequence is synthesized)
tcagagccccaggttcattgtgtcacttatcaaggtctgatttagggtcctcaaggactaatcttgttagtgtttaaaagcaactaggttttgtttttggcattttagttccatcttcta

SEQ ID NO: 164393 - DNA, 120 bp, Artificial Sequence
  ENSG00000107949_18 (sequence is synthesized)
gattctgttgtcttgcagatagagatcagggagcccagctacacattcattcttctagtcccttgtactcattgtatttccttctgccttagggccttagtttgtgctgttccctgtacc

SEQ ID NO: 164394 - DNA, 120 bp, Artificial Sequence
  ENSG00000107949_19 (sequence is synthesized)
aggaactctctttgctgtttctcggtttcttgctcaaatgtcacttcaaggaaggctttcctgactgacttcttattttttaagttgttacaacattgtgtacctttgttttatagcact

SEQ ID NO: 164395 - DNA, 120 bp, Artificial Sequence
  ENSG00000107949_20 (sequence is synthesized)
tacatttatttctatgaatatttccttaatgcctatattccttcctaaatcgtaagctgcacgagagcaggatcatttgtgtctgccttactaaccttttcatcttgagtgcctggcaca

SEQ ID NO: 164396 - DNA, 120 bp, Artificial Sequence
  ENSG00000107949_21 (sequence is synthesized)
acttaataaatatttgctaagcaaatgtagtgtaacctcaaatccatgggctaagtcaagctctaggcaattccagggacttttgaagtgattttgatttttgcccacccttgtaatcag

SEQ ID NO: 164397 - DNA, 120 bp, Artificial Sequence
  ENSG00000107949_22 (sequence is synthesized)
gaaaataatttatcctttgtggctgccgtgtctggtttatttgaactggactttctcaacatttaaactaggttactctgagtgttttgttttctcaggcttttgtgtcacctgaagaaa

SEQ ID NO: 164398 - DNA, 120 bp, Artificial Sequence
  ENSG00000107949_23 (sequence is synthesized)
tagtgtgaaggtgctttgtattcttcacagatggcaatcttggcaatgtttgcctgttttaaagtctagatgtttgtagtttttctggtaacaactattttgtgtgttatttacaggaag

SEQ ID NO: 164399 - DNA, 120 bp, Artificial Sequence
  ENSG00000107949_24 (sequence is synthesized)
ccagttccgatacagcacaatggttggtctgttcccccagtattagaataaattaaaacatacaagccaggatgaatgaagccaataggaaataaaaaacaggcacacaacattatttgg

SEQ ID NO: 164400 - DNA, 120 bp, Artificial Sequence
  ENSG00000107949_25 (sequence is synthesized)
ggaaaaacacctctagtgacacattttcttcatctgcactgattatttcagcaaaagaaatctagtatgttttcatacatctgatgtataaatttgctgaactttgagttagttttctta

SEQ ID NO: 164401 - DNA, 120 bp, Artificial Sequence
  ENSG00000107949_26 (sequence is synthesized)
atcatttcaaaaggttaaatgagttgatcactatctctgctctgtgctcctcaaaatataatttcaaatggatccgatctaaatctatacctagtgcagatttgcaaaaaaagaaaagga

SEQ ID NO: 164402 - DNA, 120 bp, Artificial Sequence
  ENSG00000107949_27 (sequence is synthesized)
atagtcattaaggatacctgttaccatggctgcgattgttagcacttcatctacacagtcaaattcacaggacgctaagatagacttcgagagttgtggatcaagaggaaactctgacat

SEQ ID NO: 164403 - DNA, 120 bp, Artificial Sequence
  ENSG00000107949_28 (sequence is synthesized)
gatgattccaaattcagaaagatttccatcattatccagtgctgccagataatctaagtcttccaatgcctgcatcaaactttctggtgctaggaaaggaaaaaaataataatttaagag

SEQ ID NO: 164404 - DNA, 120 bp, Artificial Sequence
  ENSG00000107949_29 (sequence is synthesized)
tctcatatggctaagatggagaaacaggtactggacttttccctcctgcatgaaacaagcaaacaatggacaaaatatgtgaaacaacggtttgcaagccaccaaataccagggagtgaa

SEQ ID NO: 164405 - DNA, 120 bp, Artificial Sequence
  ENSG00000107949_30 (sequence is synthesized)
ggatagtgattcttgagagggcaaactcaggaggggagccctgtgattgtccagctcatgctccgaggagggtcccagctgcagtgtgcatgcggggggaacccaggtggagcctgccag

SEQ ID NO: 164406 - DNA, 120 bp, Artificial Sequence
  ENSG00000107949_31 (sequence is synthesized)
cctccctgcagtaggaaaacaatgccagggatccagggagactaaggtggccggaactcgcggtcacagtactggagagagacacacagatctaagtcgggggccagagggagctccctc

SEQ ID NO: 164407 - DNA, 120 bp, Artificial Sequence
  ENSG00000107949_32 (sequence is synthesized)
aactaggcagcacagccctactgatcagcgcatgtgtgtaaggaaccacctcaggccagagaaagagccatgtgagaagattagaaggaacagtggtgctgacacaggacctagggtagg

SEQ ID NO: 164408 - DNA, 120 bp, Artificial Sequence
  ENSG00000107949_33 (sequence is synthesized)
gcctgttcccaccaccctagctggaaaacctcatgatttatggggcactgggtagaaaacacaagtgagaaaccctagatgggcactgccacctgacacagctatacagcaggacctgaa

SEQ ID NO: 164409 - DNA, 120 bp, Artificial Sequence
  ENSG00000107949_34 (sequence is synthesized)
aggatcacactgcatcctaggacaaagctcaaaagtacctctgggactacaaaaatattcagtgcccaagaaggtaaaatgtacaatgtctagcatccagtagagaggcatgaaaagcag

SEQ ID NO: 164410 - DNA, 120 bp, Artificial Sequence
  ENSG00000107949_35 (sequence is synthesized)
gaaaatacattgcataatacagagaaaaattaatcacaactgacctggatctcagatgctagaaatagtagacaaagatgttatttcccagtgcaaataaagaaataaagatagcaagct

SEQ ID NO: 164411 - DNA, 120 bp, Artificial Sequence
  ENSG00000107951_0 (sequence is synthesized)
gtgctgttttttttttttttttttttttagcaatggcggttcccggcgtggggctcttgacccgtttgaacctgtgtgcccggagaagaactcgagtccagcggcctatcgtcaggcttt

SEQ ID NO: 164412 - DNA, 120 bp, Artificial Sequence
  ENSG00000107951_1 (sequence is synthesized)
tcgtcaggcttttgagttgcccaggaactgtggccaaagaccttaggagagacgagcagccttcagggagcgtggagacaggctttgaagacaagattcccaaaaggagattctctgaga

SEQ ID NO: 164413 - DNA, 120 bp, Artificial Sequence
  ENSG00000107951_2 (sequence is synthesized)
tgcaaaatgaaagacgagaacaggcacagcggactgttttaatacattgcccagagaaaatcagtgaaaacaagtttcttaaatatttatcccaatttggacctattaataatcatttct

SEQ ID NO: 164414 - DNA, 120 bp, Artificial Sequence
  ENSG00000107951_3 (sequence is synthesized)
tctatgaaagctttggtctctatgctgtcgtagaattttgccaaaaggaaagcataggttcactgcagaatgggactcatactccaagcacggccatggagactgcaattccattcagat

SEQ ID NO: 164415 - DNA, 120 bp, Artificial Sequence
  ENSG00000107951_4 (sequence is synthesized)
cacgtttcttcaatctgaagttgaaaaaccagacttctgaacggtcacgcgtacggtcaagtaatcagttgccacgttcaaacaagcagctttttgaattactttgttatgcagaaagta

SEQ ID NO: 164416 - DNA, 120 bp, Artificial Sequence
  ENSG00000107951_5 (sequence is synthesized)
tagacgatcagctgaacactctcttgaaggagttccagctaacagaggagaacactaagctccgatatctcacctgttctcttattgaagacatggccgccgcgtattttccagactgca

SEQ ID NO: 164417 - DNA, 120 bp, Artificial Sequence
  ENSG00000107951_6 (sequence is synthesized)
tagtcagaccctttggctcctcagtcaacacttttgggaagttaggatgtgatttggacatgtttttggatctagatgaaaccagaaacctcagcgctcacaagatctcaggaaattttc

SEQ ID NO: 164418 - DNA, 120 bp, Artificial Sequence
  ENSG00000107951_7 (sequence is synthesized)
tgatggaatttcaagtgaaaaatgttccttcagaaagaattgcaactcagaagatcctgtctgtgttaggagagtgccttgaccactttggccctggctgtgtgggtgtgcaaaaaatat

SEQ ID NO: 164419 - DNA, 120 bp, Artificial Sequence
  ENSG00000107951_8 (sequence is synthesized)
taaatgcccggtgtccgctcgtgaggttctcacaccaggcctccggatttcagtgtgatttgactacgaacaataggattgccttgacaagttccgaactcctttatatatatggtgccc

SEQ ID NO: 164420 - DNA, 120 bp, Artificial Sequence
  ENSG00000107951_9 (sequence is synthesized)
tagactcaagagtgagagccttggtgttcagtgtacggtgctgggctcgagcacattcactaacaagtagtattcctggtgcatggattacaaatttctcccttacaatgatggtcatct

SEQ ID NO: 164421 - DNA, 120 bp, Artificial Sequence
  ENSG00000107951_10 (sequence is synthesized)
tttttctccagagaagatcaccccctattcttccaacactagattccttaaaaaccctagcagatgcagaagataaatgtgtaatagaaggcaacaactgcacatttgttcgtgacttga

SEQ ID NO: 164422 - DNA, 120 bp, Artificial Sequence
  ENSG00000107951_11 (sequence is synthesized)
gtagaattaaaccttcacagaacacagaaacattagaattactactgaaggaattttttgagtattttggcaattttgctttcgataaaaattccataaatattcgacagggaagggagc

SEQ ID NO: 164423 - DNA, 120 bp, Artificial Sequence
  ENSG00000107951_12 (sequence is synthesized)
aaaacaaacctgattcttctcctctgtacattcagaatccatttgaaacttctctcaacataagcaaaaatgtaagtcaaagccagctgcaaaaatttgtagatttggcccgagaaagtg

SEQ ID NO: 164424 - DNA, 120 bp, Artificial Sequence
  ENSG00000107951_13 (sequence is synthesized)
cctggattttacaacaggaagatacagatcgaccttccatatcaagtaatcggccctgggggctggtatccctattgctaccatctgctccaaacagaaagtcctttaccaagaagaaaa

SEQ ID NO: 164425 - DNA, 120 bp, Artificial Sequence
  ENSG00000107951_14 (sequence is synthesized)
gcaataagtttgcaattgaaacagtcaaaaacttgctagaatctttaaaaggtaacagaacagaaaatttcacaaaaaccagtgggaagagaacaattagtactcagacatgatggctgc

SEQ ID NO: 164426 - DNA, 120 bp, Artificial Sequence
  ENSG00000107951_15 (sequence is synthesized)
tacattgtgtaaagaactgggcttagcctatcaaatggtctgtggacttacttggaaaaactgatttgaaactttcacagatctcagctttcatctgatgtcacttttcatgatcttctc

SEQ ID NO: 164427 - DNA, 120 bp, Artificial Sequence
  ENSG00000107951_16 (sequence is synthesized)
attggcccccttaacctggtctgaagttctgggatgttttcagtttgatcagtctgatactcagtggcactttattaaaacatcagctgtggagtgtggcggtgcacacctgtagtccca

SEQ ID NO: 164428 - DNA, 120 bp, Artificial Sequence
  ENSG00000107951_17 (sequence is synthesized)
aggcaggaggatctcttgagcccaggattttgaatccatcgtggacaacatagcaagattccatctctaaaaaaaatgaaaataaacataagccacaaggaatgggtgaaagattattgt

SEQ ID NO: 164429 - DNA, 120 bp, Artificial Sequence
  ENSG00000107951_18 (sequence is synthesized)
ggtgaaagattattgtaatgtgctttaactaaataggtaaatatactaaacaaatgctaaaactcagttttaggatgaaaccattgttgatatccacatcagtccctgtttagaaaacat

SEQ ID NO: 164430 - DNA, 120 bp, Artificial Sequence
  ENSG00000107951_19 (sequence is synthesized)
ttaaaatgacttttagttatgtacagtacgttggcaatgaatacattaagcttcaaaatttggtagtgctctcgaatatgtatatttgtatttttcaagcgaagttctcttattcacata

SEQ ID NO: 164431 - DNA, 120 bp, Artificial Sequence
  ENSG00000107951_20 (sequence is synthesized)
taaattaaagtgggttggtactgatatcaaaaaatgtttatgtttttagaacagacatttcagtcactgcattcttaggtattccaaaccaaatatgatgacatcaatagattgcatttt

SEQ ID NO: 164432 - DNA, 120 bp, Artificial Sequence
  ENSG00000107951_21 (sequence is synthesized)
aaaaatattgtttgatttttctattttcaaaaataaaattctgtttctaactaaaatgtgatattcccagtattccttcacatctcttttgagaactcccctcttcctgcaggaaagaga

SEQ ID NO: 164433 - DNA, 120 bp, Artificial Sequence
  ENSG00000107951_22 (sequence is synthesized)
catatttgtctctcagtatatgcagaaaattggttccaggaccatccacgtacacccagatctgcacacactgaactccttcagtcctgtggagcccgtgcatgggagaattccaccttg

SEQ ID NO: 164434 - DNA, 68 bp, Artificial Sequence
  ENSG00000107951_23 (sequence is synthesized)
tataggtgcccgccaccacgcccggaccgacctcgtgatcagcccacctcaacctcccaaagtgctgg

SEQ ID NO: 164435 - DNA, 120 bp, Artificial Sequence
  ENSG00000107951_24 (sequence is synthesized)
gcgtgagccaccatgcctggccgagaatactgtattttcaatccaagtttggttggaaaaaatctgtgtgtaaatggacttcgcagttgaaacccatgttgttcaatgggcaactgtata

SEQ ID NO: 164436 - DNA, 120 bp, Artificial Sequence
  ENSG00000107951_25 (sequence is synthesized)
cccatgttgttcaatgggcaactgtatattgaaatttaatttccattacattctctgtggagcaacttttttgctttgtttcgttttgtttctgagacggagttttgctcttgttgccca

SEQ ID NO: 164437 - DNA, 79 bp, Artificial Sequence
  ENSG00000107951_26 (sequence is synthesized)
ccaccttggccttttctgtggagtaactttctatttaagaagcaagtaaggcctgggcatagcggcacatgcctgtagt

SEQ ID NO: 164438 - DNA, 120 bp, Artificial Sequence
  ENSG00000107951_27 (sequence is synthesized)
ggagtaactttctatttaagaagcaagtaaggcctgggcatagcggcacatgcctgtagtcccaggtacttgggaggccgaggcacaaggactgcttgaacctgggaggcagaggctgca

SEQ ID NO: 164439 - DNA, 120 bp, Artificial Sequence
  ENSG00000107951_28 (sequence is synthesized)
tgtactccatcctgggcgacagtgagactctctcaaaggaaaagaagcaagtagtatagtgtttaaaaacagacttgagcgagactggctcaatgacaagttactcagtctcttggggcc

SEQ ID NO: 164440 - DNA, 120 bp, Artificial Sequence
  ENSG00000107951_29 (sequence is synthesized)
cctgtttgatctgtaaaatggggatcatgatcagatcaatgtgaggattaagcgagggatgtaggaaaatgctaggtcagtgcattttcctggcgcgaagtaaatgttacttctctttaa

SEQ ID NO: 164441 - DNA, 120 bp, Artificial Sequence
  ENSG00000107951_30 (sequence is synthesized)
ctgttgcctttcggtgtttgtggtatgtaattaccttttttgctactcaaaattcagatttagagtttgtagtactttaaaaatttttcccatttaaattttatgtcagaaattataatg

SEQ ID NO: 164442 - DNA, 120 bp, Artificial Sequence
  ENSG00000107951_31 (sequence is synthesized)
ggttctgcatgggatattttaagaaactcagcattgttatgaagcaaatgaattctgtgtccttgtgtctgtgctattggattgcacatttgacaccaacaaatatcagtgttctgtaca

SEQ ID NO: 164443 - DNA, 120 bp, Artificial Sequence
  ENSG00000107951_32 (sequence is synthesized)
ggcgatgtctttaaaagccatttttcatttgttctttattttgttgggctagaaatccatattgatttaaaaagcttaaaaagcataaaccacttaagggtttctaaatgaaattttttt

SEQ ID NO: 164444 - DNA, 120 bp, Artificial Sequence
  ENSG00000107951_33 (sequence is synthesized)
ttctgttcacagatatttagtcagatattttcttttttaggttggtgctaggtgtaatatggttatttaagcacataaagtatgtgtatgggttagcattttcttttctttttggtaatt

SEQ ID NO: 164445 - DNA, 120 bp, Artificial Sequence
  ENSG00000107951_34 (sequence is synthesized)
tgtaggacagccttgacactaggctgttttacttttcagaatcagatttaattatgtgattaattttaaatctacaaagacttgttttttgtttttttttttgagagcaaatcttgctct

SEQ ID NO: 164446 - DNA, 120 bp, Artificial Sequence
  ENSG00000107951_35 (sequence is synthesized)
gtgtgagccaccgcacctggcctacaaagacccttttttttttttttttttgagatgggtctccctctgtcacccaggctggagagtgcagtgatcttggctcactgaaacctccacttc

SEQ ID NO: 164447 - DNA, 70 bp, Artificial Sequence
  ENSG00000107951_36 (sequence is synthesized)
gcccacctcgaagaccttttaatacacagttttaaagtctgttcaactgaatatagactacagacaaata

SEQ ID NO: 164448 - DNA, 120 bp, Artificial Sequence
  ENSG00000107951_37 (sequence is synthesized)
tttaaagtctgttcaactgaatatagactacagacaaatatattttctcataactttagtgtatcacaacccagatttttaaaatatttttattacgtgatagtgataactagcaattat

SEQ ID NO: 164449 - DNA, 120 bp, Artificial Sequence
  ENSG00000107951_38 (sequence is synthesized)
ttgtcattgctgtttcttaattaaaaataattgcaatgttaagtaaaacttttttcaagtttttttcttctataactattactaggctttcattcagtagctttcacctgtaatgagttt

SEQ ID NO: 164450 - DNA, 120 bp, Artificial Sequence
  ENSG00000107951_39 (sequence is synthesized)
tactaagtatgtgaaagtaattttgataggagactacccagatcaaaacgatttcagctatagcccactagtataattcctggagctattatccatctttagaaaatttgagaattagcc

SEQ ID NO: 164451 - DNA, 120 bp, Artificial Sequence
  ENSG00000107951_40 (sequence is synthesized)
agagactttctaggaaataacgattagcctgaaacgttataggaaaactgtgtgtaattatctcattcaccttcagttaccataaaggagaagggaaaataaagttgagttgaaataaga

SEQ ID NO: 164452 - DNA, 120 bp, Artificial Sequence
  ENSG00000107951_41 (sequence is synthesized)
agttgcacaactgcctggcatgtgactggaggtactttgcagtcattgctgggatttcactgatgtgaccccaacgctgcctccctctccaccccacgatgttggaagaaactcaacaga

SEQ ID NO: 164453 - DNA, 120 bp, Artificial Sequence
  ENSG00000107951_42 (sequence is synthesized)
gtaaattggctgtggccaagaaaaagtctcaacgggaagccaggccgatgagaacagccacttgtcatcaggctctccctttagaagtcactgaaagggccccaggatgtggtgaggagg

SEQ ID NO: 164454 - DNA, 120 bp, Artificial Sequence
  ENSG00000107951_43 (sequence is synthesized)
gccccaggcactagaattaagagaagaactaacttgccaccagattgctcggtgaccacagaaaaatcacttcttcccctgggcctcagttttctcctcttcctcgagccgctgtgaagc

SEQ ID NO: 164455 - DNA, 120 bp, Artificial Sequence
  ENSG00000107951_44 (sequence is synthesized)
agtcctcaagcggcagttatggcagtccataaaggctcgggcacagctggaagcacacgtgacacagatgttggaacaagtccagctagagacagatgaatatactcaacatctaaaagg

SEQ ID NO: 164456 - DNA, 120 bp, Artificial Sequence
  ENSG00000107951_45 (sequence is synthesized)
agagagggcccggtggcagcagagggtatggaaaatgtcagaggaggtttgcacatggaaggaggagaagaagcatgacaggcatcgggtacaggagctggagaggactgaacccctgcc

SEQ ID NO: 164457 - DNA, 120 bp, Artificial Sequence
  ENSG00000107951_46 (sequence is synthesized)
cctggagcccccagcagggccctctgaggtggaacagcagctacaagctgaggccgagcacccgaggaaggagcaggagagtctggcaggacagctccaagctcaggtgcaaaacaatca

SEQ ID NO: 164458 - DNA, 120 bp, Artificial Sequence
  ENSG00000107951_47 (sequence is synthesized)
aggcttgagtcacctgaactgggagcaggaggagaggctgctggaacgggagacgctgcgggagcaggagaggctgcaggagctggaggagaagctgcaggagtaggagaggctgggaga

SEQ ID NO: 164459 - DNA, 120 bp, Artificial Sequence
  ENSG00000107951_48 (sequence is synthesized)
gcgggaggagagtctgcgggagcgggaggagagtctgcgggagcgggaggagaggctacgggagtgggaggagaggctgcggagcaggaggacaggctgctcgagctggggcggaaagcc

SEQ ID NO: 164460 - DNA, 120 bp, Artificial Sequence
  ENSG00000107951_49 (sequence is synthesized)
tgcaggccctgcggaaccacaccaccatcaaccacgtgctctctcagaaccatgagctcgactagcagctggctgggccacagagcggcttagaggagctggtggcgtttttcaactccg

SEQ ID NO: 164461 - DNA, 120 bp, Artificial Sequence
  ENSG00000107951_50 (sequence is synthesized)
ctggagccagtgcccaggaggagcaggtatggcttatgtgggcagctgagggagcaaagggtgtggtgccagcgcctgactcacccgggtggccttggcccagaaggagccagaggtagt

SEQ ID NO: 164462 - DNA, 120 bp, Artificial Sequence
  ENSG00000107951_51 (sequence is synthesized)
ggaaccagccccagggactggggatgagtctgtgtgtgggtagactcatcaggccctgcagggatccatggagaagttgcagagtggctttatggacctcctgaaggagaaggtggacct

SEQ ID NO: 164463 - DNA, 120 bp, Artificial Sequence
  ENSG00000107951_52 (sequence is synthesized)
gaaggagtgggtggagaaactagagcttcgatccatccacctctcaggacaggcagacaccatcagaaagtaaatcacaacatacgagggccagagggcagcgccaaagacgcggcacca

SEQ ID NO: 164464 - DNA, 120 bp, Artificial Sequence
  ENSG00000107951_53 (sequence is synthesized)
ggaggaggaggacatcatcaggctggcccaggacaaagaggagatgaagatggggcattgcagcacctctgtgggggtgggggtggggtgggtgtgagcgtgggcaggggcactggcacc

SEQ ID NO: 164465 - DNA, 120 bp, Artificial Sequence
  ENSG00000107951_54 (sequence is synthesized)
agcgtggcagctgagcacccctcccttcaggtgaaactgctggagctgcaggagctggtgttgcggcttgcaggcgatcacaacgaggggcatggcaaattcctggccgctgcccagaac

SEQ ID NO: 164466 - DNA, 120 bp, Artificial Sequence
  ENSG00000107951_55 (sequence is synthesized)
cctgctgatgatcctgctccaggggccccagcccctcaggagcttggggctgctgacaagcagggtgatttttgtgaggtgagccgacagcctggagcctgcaccaggagaggccaggga

SEQ ID NO: 164467 - DNA, 120 bp, Artificial Sequence
  ENSG00000107951_56 (sequence is synthesized)
gggttgtccccatgacaaccccactgcacagcagctcatgcagcttcttcctgtgatgcgggacccccaggagtacccaggcttgggcagcagtccctgcatgccattcttttaccaggc

SEQ ID NO: 164468 - DNA, 120 bp, Artificial Sequence
  ENSG00000107951_57 (sequence is synthesized)
ctgcatgccattcttttaccaggctgccaagaacagggagctaaacatcaccatcatctaagagctggtcaagaaattaaaaaagaagaaaaaaaagttatggggttaatctcctacaca

SEQ ID NO: 164469 - DNA, 120 bp, Artificial Sequence
  ENSG00000107951_58 (sequence is synthesized)
caagtaaaggagctgcaggagaagctgggcaagctgaaggagactgtaacctctgcccatccaagaagggctgggaggagcacctggaaggtaccagccagcagaaccagcagctacagg

SEQ ID NO: 164470 - DNA, 120 bp, Artificial Sequence
  ENSG00000107951_59 (sequence is synthesized)
tcaggccctgcagggatccatggagaagttgcaggtgagtgagtcatggcatgggccaagaaggttgggggcagagcagggcagggcaggtcgctctcaagatgtgaccccattattttg

SEQ ID NO: 164471 - DNA, 120 bp, Artificial Sequence
  ENSG00000107951_60 (sequence is synthesized)
gtacctcaacttttagaactatgtatttttttatgaacaataaagattcctgtaaaatgttcaagctacattattgtttaatgggtatagatcttcagttttacaaggtgaaaagagtta

SEQ ID NO: 164472 - DNA, 120 bp, Artificial Sequence
  ENSG00000107951_61 (sequence is synthesized)
cggagatgaatcgtggtggtggatgcataatgagatgaaggaaagtttttttctatttctagctttctaagaatgtcgtcatgctcaacacattgagtagatgttgagttttgacatttg

SEQ ID NO: 164473 - DNA, 120 bp, Artificial Sequence
  ENSG00000107951_62 (sequence is synthesized)
gatctctgtaggggaacccagggtcgccgccgttgctgaggcagaagtgagatgtgtgatgtttgtttggggcgactcctgtgtacagtaatggagttgtttagacttccatgaaattca

SEQ ID NO: 164474 - DNA, 80 bp, Artificial Sequence
  ENSG00000107954_0 (sequence is synthesized)
cgaacgcccacgccagcgaccctgactctatggccccgggggagcgcgccggagccgccgcgccgcccacccccagccgg

SEQ ID NO: 164475 - DNA, 120 bp, Artificial Sequence
  ENSG00000107954_1 (sequence is synthesized)
cccggcccagggccctgcttgtggcccccgctcccgccacggggcatgggaggcaggtagcccagcctgcgccaggacacccgtggcgggcggaacccgccaaggaccgcgaagtccaga

SEQ ID NO: 164476 - DNA, 120 bp, Artificial Sequence
  ENSG00000107954_2 (sequence is synthesized)
agtccagagaaaggaagctgaggagctgcccgcccgcccccggctgcagccccagcagggccctcccccggtggcgcgcacccgcgcgcgcacactcgcacaccgcacctcagcgcctgc

SEQ ID NO: 164477 - DNA, 120 bp, Artificial Sequence
  ENSG00000107954_3 (sequence is synthesized)
ccggcctcgcccccacccgcgagcgccgaacctcctggggccggatgccatgggtaacaacttctccagtatcccctcgctgccccgaggaaacccgagccgcgcgccgcggggccaccc

SEQ ID NO: 164478 - DNA, 120 bp, Artificial Sequence
  ENSG00000107954_4 (sequence is synthesized)
ccagaacctcaaagactctatcgggggccccttccccgtcacttctcaccgatgccaccacaagcagaagcactgtccggcagtgctgcccagcggggggctcccagccacgccgctgct

SEQ ID NO: 164479 - DNA, 120 bp, Artificial Sequence
  ENSG00000107954_5 (sequence is synthesized)
cttccacccgcacaccaagggctcccagatcctcatggacctcagccacaaggctgtcaagaggcaggccagcttctgcaacgccatcaccttcagcaaccgcccggtcctcatctacga

SEQ ID NO: 164480 - DNA, 120 bp, Artificial Sequence
  ENSG00000107954_6 (sequence is synthesized)
gcaagtcaggctgaagatcaccaagaagcagtgctgctggagcggggccctgcggctgggcttcaccagcaaggacccgtcccgcatccaccctgactcgctgcccaagtacgcctgccc

SEQ ID NO: 164481 - DNA, 120 bp, Artificial Sequence
  ENSG00000107954_7 (sequence is synthesized)
cgacctggtgtcccagagtggcttctgggccaaggcgctgcctgaggagtttgccaatgagggcaacatcatcgcattctgggtggacaagaagggccgtgtcttccaccgcatcaacga

SEQ ID NO: 164482 - DNA, 120 bp, Artificial Sequence
  ENSG00000107954_8 (sequence is synthesized)
ctcggctgttatgctgttcttcagcggggtccgcacggccgacccgctctgggccctggtggacgtctacggcctcacgcggggcgtccagctgcttgatagcgagctggtgctcccgga

SEQ ID NO: 164483 - DNA, 120 bp, Artificial Sequence
  ENSG00000107954_9 (sequence is synthesized)
ctgtctgcggccgcgctccttcaccgccctgcggcggccgtcgctgcggcgcgaggcggacgacgcgcgcctctcggtgagcctatgcgacctcaacgtgccgggcgcggacggcgacga

SEQ ID NO: 164484 - DNA, 120 bp, Artificial Sequence
  ENSG00000107954_10 (sequence is synthesized)
acgaggccgcgccggccgccggctgccccatcccgcagaactcactcaactcgcagcacagccgcgcgctgccggcgcagctcgacggcgacctgcgtttccacgccctgcgcgccggcg

SEQ ID NO: 164485 - DNA, 120 bp, Artificial Sequence
  ENSG00000107954_11 (sequence is synthesized)
cgtccgcatcctcgacgagcagacggtggcgcgcgtggagcacgggcgcgacgagcgcgcgctcgtcttcaccagccggcccgtgcgcgtggccgagaccatcttcgtcaaggtcacgcg

SEQ ID NO: 164486 - DNA, 120 bp, Artificial Sequence
  ENSG00000107954_12 (sequence is synthesized)
ctcgggtggcgcgcggcccggcgcgctgtcgttcggcgtcaccacgtgcgaccccggcacgctgcggccggccgacctgcctttcagccctgaggccctggtggaccgcaaggaattctg

SEQ ID NO: 164487 - DNA, 120 bp, Artificial Sequence
  ENSG00000107954_13 (sequence is synthesized)
ggccgtgtgccgcgtgcccgggcccctgcacagcggcgacatcctgggcctggtggtcaacgccgacggcgagctgcacctcagccacaatggcgcggccgccggcatgcagctgtgcgt

SEQ ID NO: 164488 - DNA, 120 bp, Artificial Sequence
  ENSG00000107954_14 (sequence is synthesized)
ggacgcctcgcagccgctttggatgctcttcggcctgcacgggaccatcacgcagatccgcatcctcggctccactatcctggccgagcggggtatcccatcactcccctgctcccctgc

SEQ ID NO: 164489 - DNA, 120 bp, Artificial Sequence
  ENSG00000107954_15 (sequence is synthesized)
ctccacgccaacctcgcccagtgccctgggcagccgcctgtctgaccccttgctcagcacgtgcagctctggccctctgggtagctctgctggtgggacagcccccaattcgccagtgag

SEQ ID NO: 164490 - DNA, 120 bp, Artificial Sequence
  ENSG00000107954_16 (sequence is synthesized)
cctgcccgagtcgccagtgaccccaggtctgggccagtggagcgatgagtgcaccatttgctatgaacacgcggtggacacggtcatctacacatgtggccacatgtgcctctgctacgc

SEQ ID NO: 164491 - DNA, 120 bp, Artificial Sequence
  ENSG00000107954_17 (sequence is synthesized)
cgcatacccatcttctcgggcttcagcccagtcccagctgaggaacaagccagtggggccccttctcttcctcattttggaaacttttcctcctctattaaacatgggaaactgaagccc

SEQ ID NO: 164492 - DNA, 120 bp, Artificial Sequence
  ENSG00000107954_18 (sequence is synthesized)
ttgaaggtttggggagaggggggtatcaggcagggagggggcagaggcaaatcaccgggcagagggaggggaggagaggaggccgcactctccctgtctctcccgtctctgcacccagct

SEQ ID NO: 164493 - DNA, 120 bp, Artificial Sequence
  ENSG00000107954_19 (sequence is synthesized)
cctctctgcatgctgagggctaaattgggatctcagcctgccctaatctttccccatctgaggcaggtttctaggaggtgtctgtagtccatgtggcacctttgtgagaattagaaaaca

SEQ ID NO: 164494 - DNA, 120 bp, Artificial Sequence
  ENSG00000107954_20 (sequence is synthesized)
tgtaccttcctctgggcagctgcagccctgagccaggacatgtggcctggctagtgcagcatggagtggattttaggctcatttgccctctcagccaactgcccttgagcagtgtacagc

SEQ ID NO: 164495 - DNA, 120 bp, Artificial Sequence
  ENSG00000107954_21 (sequence is synthesized)
ctgctcaacaaccgccctgggcaggccgctcctgagctgctgtctccctctctgacctatgcctaccttctctttcttcgttccctgcccactgggcatggcagctgggggtgagaggct

SEQ ID NO: 164496 - DNA, 120 bp, Artificial Sequence
  ENSG00000107954_22 (sequence is synthesized)
ggtggttgcctcccgtcctgggcaggctgcagcctcatgccatgtctctctcccactacctgatgggcacatggacaggctgcagagggctccaggttctgggcccctggctgagaaggg

SEQ ID NO: 164497 - DNA, 120 bp, Artificial Sequence
  ENSG00000107954_23 (sequence is synthesized)
gaggatcctgtcctggctgtagccttcctgccccaatcatctcgctggatgccattgcccaggggtagcccttcggtatgggctggggagaagggttggtcttctgccagggtccctaag

SEQ ID NO: 164498 - DNA, 120 bp, Artificial Sequence
  ENSG00000107954_24 (sequence is synthesized)
aacaggtttgcagctaccctctctgaccttttccccatatcttgtgctgtccagggcctaggctgatagtcagagcctgtggcacacctgggatgggccagggccctgggtggggaggtg

SEQ ID NO: 164499 - DNA, 120 bp, Artificial Sequence
  ENSG00000107954_25 (sequence is synthesized)
tgggttccctgggccaagaccagcctttttcctcagtttaattaatttatttatttggtttgtggttttgggttttttttgtttgtttgtttgtaggtgagttcccatcctctgggcccc

SEQ ID NO: 164500 - DNA, 120 bp, Artificial Sequence
  ENSG00000107954_26 (sequence is synthesized)
tagaaatgctgcctttgtgtgtggggtacctgggaaagggtgtggctgaggcagtcataatgcagtatcttcccctgactccagccacaaagctcatacccagccctaccaatcatgaac

SEQ ID NO: 164501 - DNA, 120 bp, Artificial Sequence
  ENSG00000107954_27 (sequence is synthesized)
tggaactccataaggaggggccaaattgggaggccttttggcaaacagtgtctattttacagagaggcaaaccaagcctccttagtgccctggggctgatggtcacccagagccatagag

SEQ ID NO: 164502 - DNA, 120 bp, Artificial Sequence
  ENSG00000107954_28 (sequence is synthesized)
cacccttcctcctgggccagagctgggttatcatggttggcttaggtacctcaggtggcccaggaggtcccccctccataaggacgtcaaacttccaggagggccagtgttcctagtgtg

SEQ ID NO: 164503 - DNA, 120 bp, Artificial Sequence
  ENSG00000107954_29 (sequence is synthesized)
ggccaggaacaggacagggagaccttgtgatggcggggcagggagcctgttcgtagggaagatgaggaggcaagggctgcctctcacacctccaggttctctaagttctggggagggagc

SEQ ID NO: 164504 - DNA, 120 bp, Artificial Sequence
  ENSG00000107954_30 (sequence is synthesized)
gccccacctgctgaggtcggtcctctcagccctgcctgccctggcctgggctctcccagcctcccagccctctgccccctcagatggctttttgtttttgtttttttttgcatccatcag

SEQ ID NO: 164505 - DNA, 120 bp, Artificial Sequence
  ENSG00000107954_31 (sequence is synthesized)
agactgcacctctgtgtggcaggcagggcatgggttttagtcctggccactgaccagctgtgtggccctggccgagtcgtagccccctggagcccagcttccatttctataaaatggttg

SEQ ID NO: 164506 - DNA, 120 bp, Artificial Sequence
  ENSG00000107954_32 (sequence is synthesized)
tttcgggagagaggggcaggctttctgtgtgactcgggagttcttccgtgagggctgccagggggtggtgtgccaggacctcaggctgggcctttgtgctggccttgcagtgggtgtgtg

SEQ ID NO: 164507 - DNA, 120 bp, Artificial Sequence
  ENSG00000107954_33 (sequence is synthesized)
gggaagtcactgtcccactatgggtctccactacccagtcactgaccctgggagaccccttctgtgtgggagggagcgggggctggctagcgggccccccagccagggatcccagaggct

SEQ ID NO: 164508 - DNA, 120 bp, Artificial Sequence
  ENSG00000107954_34 (sequence is synthesized)
gagggttggggagaggaagccatcatctcattacctctgtcagtgcaggggtggctgctgcttcccttgtgcacttgggtcgctgtgattgtgaataaaagtgatttcgtaccagcctga

SEQ ID NO: 164509 - DNA, 120 bp, Artificial Sequence
  ENSG00000107954_35 (sequence is synthesized)
catgccggtctccgcccgcgggggaggagacgggggaggaggaggggagcagccggccggggcgactcggtgaccagccggccggcccagcagaggtggctgcactgcccgtcgccggag

SEQ ID NO: 164510 - DNA, 75 bp, Artificial Sequence
  ENSG00000107954_36 (sequence is synthesized)
gtttggctgattgtattttctttagggccttggactttcggcttgattcgggccaaacattttggattgctgcgt

SEQ ID NO: 164511 - DNA, 120 bp, Artificial Sequence
  ENSG00000107954_37 (sequence is synthesized)
caagagctcaaggcatcaaggatcaactgcacatgttgggcacagataggccaccagggccccagcagtgctggtacaaggaagaggggcagtgcagcgcccaggatgccagattcagtg

SEQ ID NO: 164512 - DNA, 120 bp, Artificial Sequence
  ENSG00000107954_38 (sequence is synthesized)
gggaaggtcggtctgcctgccttatagttccccggaggctcccgagggctttgtctggttcagttattcctgtgcactctagttttctaccacaatgaatatatatcaagttgaaccata

SEQ ID NO: 164513 - DNA, 120 bp, Artificial Sequence
  ENSG00000107957_0 (sequence is synthesized)
cgggccggggtggcgggcggccccgggaccccggcagctggagaaggagccggagcccggccgggatgagaaggtgacgccgccgggggcgccactcgctttgtgggggaagatgctcgc

SEQ ID NO: 164514 - DNA, 120 bp, Artificial Sequence
  ENSG00000107957_1 (sequence is synthesized)
cactcgctttgtgggggaagatgctcgcctactgcgtgcaggatgccaccgtggtggacgtggagaagcggaggaacccctccaagcactacgtatacataatcaatgtgacctggtctg

SEQ ID NO: 164515 - DNA, 120 bp, Artificial Sequence
  ENSG00000107957_2 (sequence is synthesized)
actccacctcccagactatctaccggaggtacagcaagttctttgacctgcagatgcagcttttggataagtttcccattgaaggtggccagaaggaccccaagcaaaggatcatcccct

SEQ ID NO: 164516 - DNA, 120 bp, Artificial Sequence
  ENSG00000107957_3 (sequence is synthesized)
tcctcccaggcaagatcctcttccgcagaagccacatccgggacgtagctgtgaagagactgaagcccatcgatgaatactgccgggcacttgtccggctgcccccccacatctcacagt

SEQ ID NO: 164517 - DNA, 120 bp, Artificial Sequence
  ENSG00000107957_4 (sequence is synthesized)
gtgacgaagtcttccggttcttcgaggctcgacccgaggatgtcaaccctccaaaagaggactatggcagttccaagaggaaatcagtgtggctgtccagctgggctgagtcgcccaaga

SEQ ID NO: 164518 - DNA, 120 bp, Artificial Sequence
  ENSG00000107957_5 (sequence is synthesized)
aggacgtgacaggtgccgacgccaccgccgagcccatgatcctggaacagtacgtggtggtgtccaactataagaagcaggagaactcggagctgagcctccaggccggggaggtggtgg

SEQ ID NO: 164519 - DNA, 120 bp, Artificial Sequence
  ENSG00000107957_6 (sequence is synthesized)
atgtcatcgagaagaacgagagcggctggtggttcgtgagcacttctgaggagcagggctgggtccctgccacctacctggaggcccagaatggtactcgggatgactccgacatcaaca

SEQ ID NO: 164520 - DNA, 120 bp, Artificial Sequence
  ENSG00000107957_7 (sequence is synthesized)
cctctaagactggagaagaggagaagtatgtcaccgtgcagccttacaccagccaaagcaaggacgagattggctttgagaagggcgtcacagtggaggtgatccggaagaatctggaag

SEQ ID NO: 164521 - DNA, 120 bp, Artificial Sequence
  ENSG00000107957_8 (sequence is synthesized)
gctggtggtatatcagatacctgggcaaagagggctgggcgccagcatcctacctgaagaaggccaaggatgacctgccaacccggaagaagaacctggccggcccagtggagatcattg

SEQ ID NO: 164522 - DNA, 120 bp, Artificial Sequence
  ENSG00000107957_9 (sequence is synthesized)
ggaacatcatggagatcagcaacctgctgaacaagaaggcgtctggggacaaggaaactccaccagccgaaggcgagggccatgaggcccccattgccaagaaggagatcagcctgccca

SEQ ID NO: 164523 - DNA, 120 bp, Artificial Sequence
  ENSG00000107957_10 (sequence is synthesized)
tcctctgcaatgcctccaatggcagtgccgtgggcgttcctgacaggactgtctccaggctggcccagggctctccagctgtggccaggattgcccctcagcgggcccagatcagctccc

SEQ ID NO: 164524 - DNA, 120 bp, Artificial Sequence
  ENSG00000107957_11 (sequence is synthesized)
cgaacctacggacaagacctccaccacgcagagaatccagcctggggttccaactgccaaagccaccagagcccccttctgttgaggtggagtactacaccattgccgaattccagtcgt

SEQ ID NO: 164525 - DNA, 120 bp, Artificial Sequence
  ENSG00000107957_12 (sequence is synthesized)
gcatttccgatggcatcagctttcggggtggacagaaggcagaggtcattgataagaactcaggtggctggtggtacgtgcagatcggtgagaaggagggctgggcccccgcatcataca

SEQ ID NO: 164526 - DNA, 120 bp, Artificial Sequence
  ENSG00000107957_13 (sequence is synthesized)
tcgataagcgcaagaagcccaacctgagccgccgcacaagcacgctgacccggcccaaggtgcccccgccagcaccccccagcaagcccaaggaggccgaggagggccctacgggggcca

SEQ ID NO: 164527 - DNA, 120 bp, Artificial Sequence
  ENSG00000107957_14 (sequence is synthesized)
gtgagagccaggactccccgcggaagctcaagtatgaggagcctgagtatgacatccctgcattcggctttgactcagagcctgagctgagcgaggagcccgtggaggacagagcctcag

SEQ ID NO: 164528 - DNA, 120 bp, Artificial Sequence
  ENSG00000107957_15 (sequence is synthesized)
gggagaggcggcctgcccagccccaccggccctcgccggcctcttctctgcagcgggcccgcttcaaggtgggtgagtcttcagaggatgtggccctggaagaggagaccatctatgaga

SEQ ID NO: 164529 - DNA, 120 bp, Artificial Sequence
  ENSG00000107957_16 (sequence is synthesized)
atgagggcttccggccatatgcagaggacaccctgtcagccagaggctcctccggggacagcgactccccaggcagctcctcgctgtccctgaccaggaaaaactcccccaaatcaggct

SEQ ID NO: 164530 - DNA, 120 bp, Artificial Sequence
  ENSG00000107957_17 (sequence is synthesized)
cccccaagtcatcatcactcctaaagctcaaggcagagaagaatgcccaggcagaaatggggaagaaccactcctcagcctccttttcctcatccatcaccatcaacaccacttgctgct

SEQ ID NO: 164531 - DNA, 120 bp, Artificial Sequence
  ENSG00000107957_18 (sequence is synthesized)
cctcctcttcctcctcctcctcttccttgtccaaaaccagtggcgacctgaagccccgctctgcttcggacgcaggcatccgcggcactcccaaggtcagggcaaagaaggatgctgatg

SEQ ID NO: 164532 - DNA, 120 bp, Artificial Sequence
  ENSG00000107957_19 (sequence is synthesized)
cgaacgctgggctgacctcctgtccccgggccaagccatcggtccggcccaagccattcctaaaccgagcagagtcgcagagccaagagaagatggacatcagcactttacggcgccagc

SEQ ID NO: 164533 - DNA, 120 bp, Artificial Sequence
  ENSG00000107957_20 (sequence is synthesized)
tgagacccacaggccagctccgtggagggctcaagggctccaagagtgaggattcggagctgcccccgcagacggcctccgaggctcccagtgaggggtctaggagaagctcatccgacc

SEQ ID NO: 164534 - DNA, 120 bp, Artificial Sequence
  ENSG00000107957_21 (sequence is synthesized)
tcatcaccctcccagccaccactcccccatgtcccaccaagaaggaatgggaagggccagccacctcgtacatgacatgcagcgcctaccagaaggtccaggactcggagatcagcttcc

SEQ ID NO: 164535 - DNA, 120 bp, Artificial Sequence
  ENSG00000107957_22 (sequence is synthesized)
ccgcgggcgtggaggtgcaggtgctggagaagcaggagagcgggtggtggtatgtgaggtttggggagctggagggctgggccccttcccactatttggtgctggatgagaacgagcaac

SEQ ID NO: 164536 - DNA, 120 bp, Artificial Sequence
  ENSG00000107957_23 (sequence is synthesized)
ctgacccctctggcaaagagctggacacagtgcccgccaagggcaggcagaacgaaggcaaatcagacagcctggagaagatcgagaggcgcgtccaagcactgaacaccgtcaaccaga

SEQ ID NO: 164537 - DNA, 120 bp, Artificial Sequence
  ENSG00000107957_24 (sequence is synthesized)
gcaagaaggccacgccccccatcccctccaaacctcccgggggcttcggcaagacctcaggcactccagcggtgaagatgaggaacggagtgcggcaggtggcggtcaggccccagtcgg

SEQ ID NO: 164538 - DNA, 120 bp, Artificial Sequence
  ENSG00000107957_25 (sequence is synthesized)
tgtttgtgtccccgccacccaaggacaacaacctgtcctgcgccctgcggaggaatgagtcactcacggccactgatggcctccgaggcgtccgacggaactcctcctttagcactgctc

SEQ ID NO: 164539 - DNA, 120 bp, Artificial Sequence
  ENSG00000107957_26 (sequence is synthesized)
gctccgctgccgccgaggccaagggccgcctggccgaacgggctgccagccagggttcagactcacccctactgcccgcccagcgcaacagcatacccgtgtcccctgtgcgccccaagc

SEQ ID NO: 164540 - DNA, 120 bp, Artificial Sequence
  ENSG00000107957_27 (sequence is synthesized)
ccatcgagaagtctcagttcatccacaataacctcaaagatgtgtacgtctctatcgcagactacgagggggatgaggagacagcaggcttccaggagggggtgtccatggaggttctgg

SEQ ID NO: 164541 - DNA, 120 bp, Artificial Sequence
  ENSG00000107957_28 (sequence is synthesized)
agaggaaccctaatggctggtggtactgccagatcctggatggtgtgaagcccttcaaaggctgggtgccttccaactaccttgagaaaaagaactagcagagggcctgggctcttccag

SEQ ID NO: 164542 - DNA, 120 bp, Artificial Sequence
  ENSG00000107957_29 (sequence is synthesized)
cctcagtgtgcctctctggccgcccactggatgagcggtgagacgaacaaaagggaaaggaaaaaatgggggtggggggtggggggtggacaacattcaacactgcagaatgggtgacct

SEQ ID NO: 164543 - DNA, 120 bp, Artificial Sequence
  ENSG00000107957_30 (sequence is synthesized)
caaagatgccccctgtccaagccatcccacagctggaaggtaggggatgggggtgcccacactgagtgaggaagggaatggaccagggagtcccaggcctgggacccagagccaagaaag

SEQ ID NO: 164544 - DNA, 120 bp, Artificial Sequence
  ENSG00000107957_31 (sequence is synthesized)
ctgagatatcctgtgcaccatagggacttcaccaatggattacatgccatctgggacaggccatgtgggagaccccagttgtgcctttgctacagatctggaaaagacaaggtcatgggg

SEQ ID NO: 164545 - DNA, 120 bp, Artificial Sequence
  ENSG00000107957_32 (sequence is synthesized)
gcctccagtgtcctgcccctgcttggcccagttttgattgctggcatcttgccaccccaggtatccctggtattgtcctaagctgtatttgtgaattgtgctggtttcctgggcattgcc

SEQ ID NO: 164546 - DNA, 120 bp, Artificial Sequence
  ENSG00000107957_33 (sequence is synthesized)
acgcctaccacaggtgggtacattagaagccaccactggctttcaggcttgggggtgtcttctgagctcaagcctgcttctgggccaggccattgtcactgttagttgaagaaaaagcag

SEQ ID NO: 164547 - DNA, 120 bp, Artificial Sequence
  ENSG00000107957_34 (sequence is synthesized)
ttcccaggtgccagcaaagaccatctttcataactgtcactgtcttggccttgagaagagagcccgctctccgtggggcaccccatggaggacacagtaccagagtttacagagagggtg

SEQ ID NO: 164548 - DNA, 120 bp, Artificial Sequence
  ENSG00000107957_35 (sequence is synthesized)
ggcgaagccaccggtctcttcctaatctgcacagactattttgggtatttctgggcgggcagttcctttgcatgtttcgggagaggtttgttgatttggggcttatatgtcaggcctttg

SEQ ID NO: 164549 - DNA, 120 bp, Artificial Sequence
  ENSG00000107957_36 (sequence is synthesized)
gtttgcgtcttattttaggggttgtttgggggcctgggtggtcggcctcacatgggaaggggatgggtagtggatggggtttctgttgtatcttgtgggcgggtgattttgcttttgttt

SEQ ID NO: 164550 - DNA, 120 bp, Artificial Sequence
  ENSG00000107957_37 (sequence is synthesized)
ttgtttcacattcttccccctccacaagccaaagtcgtttcatttggtttccactgtgtggactgtgctggagcttggcgcctgccagaaaaatttggggctaggcaagccccaggttgc

SEQ ID NO: 164551 - DNA, 120 bp, Artificial Sequence
  ENSG00000107957_38 (sequence is synthesized)
agacatggtgaagcagagaaactgttcttctggttcctgcacaacctcagaggggcaaaaaccctccccaggaaggaggagggtgttcaggagccagacttttggagagaaggcagctcc

SEQ ID NO: 164552 - DNA, 120 bp, Artificial Sequence
  ENSG00000107957_39 (sequence is synthesized)
cagcctgctgggtgaccgccattctgcgtgtgttccccagctgggcagggctggaagccttacgtatgaagcatggagaagcagccattgtccccactatgggcagaggggggacccggc

SEQ ID NO: 164553 - DNA, 120 bp, Artificial Sequence
  ENSG00000107957_40 (sequence is synthesized)
tggccccttgggtcagactggagccaacaccgccagccaccccctctggcctgctggcaatgccacaggtgcccaagaagatggaggatccctgtgccaggagccaacctggtcttcccg

SEQ ID NO: 164554 - DNA, 120 bp, Artificial Sequence
  ENSG00000107957_41 (sequence is synthesized)
agggtcagtgccccagtgaagacagaagcgagagaataaagttccctgtaggtcctctgtcacctttgggttgtgtttttcaattgttgacatttcagaggggaccctccagaagcccag

SEQ ID NO: 164555 - DNA, 120 bp, Artificial Sequence
  ENSG00000107957_42 (sequence is synthesized)
ccggcttcccccaaggactcccccttcgctgggagtggatttccacacgtgcctttgatttcggacagattgggcctcacagccaccgattcagctgccagggtccctggactgggggtt

SEQ ID NO: 164556 - DNA, 120 bp, Artificial Sequence
  ENSG00000107957_43 (sequence is synthesized)
ggtgttttctatagaggaggaaaggccctccctcaccctgctccccacccaggcagggcagcatgggacccagtgtctcagtgccttcaaaacccacccccacccctaccctaccccacc

SEQ ID NO: 164557 - DNA, 120 bp, Artificial Sequence
  ENSG00000107957_44 (sequence is synthesized)
acaccccatcccagaggccttgcctgggcaaccctaagcccctgtccctcgccatacactgatgcctggcagctagagcaaatggctcgtgttctttgtcgaaggcctgtggtgagattg

SEQ ID NO: 164558 - DNA, 120 bp, Artificial Sequence
  ENSG00000107957_45 (sequence is synthesized)
ttttgtttccttttgttttgtgagtttgtttaaaattgaaattagttattttcttctgctggacagtattaaatagagcaggatgttgagttaatctgctagattgcagtactaatggta

SEQ ID NO: 164559 - DNA, 120 bp, Artificial Sequence
  ENSG00000107957_46 (sequence is synthesized)
cactttaaataaggtagaatggaaaaaacccagagagcaaagtgcattacttaaagatgcagtatatacttttctcatttttaaacagcacatatttattaagagaaaaaaagtaattta

SEQ ID NO: 164560 - DNA, 120 bp, Artificial Sequence
  ENSG00000107957_47 (sequence is synthesized)
tgactatttaaaataaaatttaaaagtagagtgactgtcaggtaaagaaccttcaatgtagctatcttccagggggagggccctgcagcctcgctcctcagatgtctgcactgagccagt

SEQ ID NO: 164561 - DNA, 120 bp, Artificial Sequence
  ENSG00000107957_48 (sequence is synthesized)
tcagtcactagtgcgccagccaggccaggagggagtgcagagcatgtctgccaagcacagagcatctcagttggactggaccacagtgctcccgagagcctgcctttcctgcccttcccc

SEQ ID NO: 164562 - DNA, 120 bp, Artificial Sequence
  ENSG00000107957_49 (sequence is synthesized)
accacctgcactgccccccacattctcccagccccccccaaggaccccctctccttgacccccagtgctgtaagtaatagagtcattaaaatgcaggactgaaagagacctcagaggtct

SEQ ID NO: 164563 - DNA, 120 bp, Artificial Sequence
  ENSG00000107957_50 (sequence is synthesized)
ctatcccatcccttcctgttactgcggcccaaggacaggaaacaacttttccaaaatcccacagctagttaatgacagatctccccactacattaatcccgtgctcctcctcactgccat

SEQ ID NO: 164564 - DNA, 120 bp, Artificial Sequence
  ENSG00000107957_51 (sequence is synthesized)
tatagtttattgtgtggtcatgtttacattgtgacatccagccccaaggatggctgggagttgctcaggcatccaggaaaagtggggaatgctgccatctggtgacagcatgtagatttg

SEQ ID NO: 164565 - DNA, 120 bp, Artificial Sequence
  ENSG00000107957_52 (sequence is synthesized)
ggcagtgaacagggattgccatgccccagtcttcgcacctcgccccctcaccccctaactcacagcacaaaccctgcaaacccaaagagaatattaatacttgaagcaagaagggtgcat

SEQ ID NO: 164566 - DNA, 120 bp, Artificial Sequence
  ENSG00000107957_53 (sequence is synthesized)
gccagtccttctccgacatggccagggggtaccaggccttgtgcgcctggcctcctagccctagccagggcgagagggcctttcccttgagctactgagctgctttgtgatgctgaagga

SEQ ID NO: 164567 - DNA, 120 bp, Artificial Sequence
  ENSG00000107957_54 (sequence is synthesized)
tactgccggcagcaggcagaggagggagggggcctagggctctgacccatctggaggaaaaccagatcggactaaaaaaggaaaaagaaaaacaaaatctccgcagtgtccaaacctagt

SEQ ID NO: 164568 - DNA, 120 bp, Artificial Sequence
  ENSG00000107957_55 (sequence is synthesized)
ttcccatgagttgcgactgaaaatgtgaaacgacactgtattgctgtatactgcaactttaaccataatgagcccttctgaggtcattattgaggttcatataatgcccgaagatgcagc

SEQ ID NO: 164569 - DNA, 120 bp, Artificial Sequence
  ENSG00000107957_56 (sequence is synthesized)
atttggtgctttgttttcctttccgtttcaagacctttttcttttattgcaaggggaaaaaaatgtcatctccccccacctcatccctctttgtgacagcagacctggctgtgttgcccc

SEQ ID NO: 164570 - DNA, 120 bp, Artificial Sequence
  ENSG00000107957_57 (sequence is synthesized)
tctcctcctcactattctcaccaggccatgggactttgggggcagtgagagagagctggaaaggggcaaccctgagcagcaggtgtgccccatgccctgtgggtttcccctatgtccaat

SEQ ID NO: 164571 - DNA, 120 bp, Artificial Sequence
  ENSG00000107957_58 (sequence is synthesized)
gactgtagacgggctgtcttgccaggcctcagccccgtctaccctaagcctggccccaaaggtttctctttcttcctccttgattttccatcttgacgaaggcattatatagaatcattt

SEQ ID NO: 164572 - DNA, 120 bp, Artificial Sequence
  ENSG00000107957_59 (sequence is synthesized)
taatcactttcagatgttagagcagcgtattttacaggcatttatatccattgctttcctcagcaaggcatgttactacttttatcatctaaggaaaaaagacaagggaattccagtcag

SEQ ID NO: 164573 - DNA, 120 bp, Artificial Sequence
  ENSG00000107957_60 (sequence is synthesized)
gcattattttcctattactagtgtttgcagaataggtgtaggactatttaagtttagaccttggtttggtagttcttgtttttaataaggggaaaaagataaaataacccctatttttcc

SEQ ID NO: 164574 - DNA, 120 bp, Artificial Sequence
  ENSG00000107957_61 (sequence is synthesized)
tgttattgtatttaactaatatattatttctttaaggttactcacttcccctacccctccaaataccttgcattctcaatcaaaaatggaaacaatctgagagacaggaaaagtgcaata

SEQ ID NO: 164575 - DNA, 120 bp, Artificial Sequence
  ENSG00000107957_62 (sequence is synthesized)
ttaccaagatggatgccagggctcattggggacaatggagggaataccagtggcgctcagagagcaagaggcagggagcggggtgctgaaggaatcctagctgtggaacaggtgggtggg

SEQ ID NO: 164576 - DNA, 120 bp, Artificial Sequence
  ENSG00000107957_63 (sequence is synthesized)
ttggtggagtttgatcttgtggcgttctcctctcccccttctttgggaagatgataggggtccctgccagatccacccagaagaaagggattcaggcatggggcccttgacctctaggcc

SEQ ID NO: 164577 - DNA, 120 bp, Artificial Sequence
  ENSG00000107957_64 (sequence is synthesized)
ccagtccctggagcagaggcaggccctcgggagctgttccttgttttgatttctgttgtggtgcagccagctgctcagagagacctggcctaaaaatgactcccagcagccctctctcac

SEQ ID NO: 164578 - DNA, 120 bp, Artificial Sequence
  ENSG00000107957_65 (sequence is synthesized)
cccagtgtcctgatatttgggctgtgatccttctggtgtatgtttgaatctttctaaaactgggtgccctcagttcagtttctaggcaggaagcctagaagtcaccagatctttttgggg

SEQ ID NO: 164579 - DNA, 120 bp, Artificial Sequence
  ENSG00000107957_66 (sequence is synthesized)
gatgtgagaaccttgagccgcgcacaccctggtgagacaccaattcccacaagcctgcagcagggcctggggctgagcctgggctgcccattcatctcagcgacttcagcctgagaagtg

SEQ ID NO: 164580 - DNA, 120 bp, Artificial Sequence
  ENSG00000107957_67 (sequence is synthesized)
agccctgcctgggctccacacccagagagtccatacaaattctgctccgggaagagtcggggggtctattcaagtttctctgcagacaaaacttcccacaacaggtaccaatctggcctc

SEQ ID NO: 164581 - DNA, 120 bp, Artificial Sequence
  ENSG00000107957_68 (sequence is synthesized)
cttcctcagcaccggtagagaaagcaacagaatgggaagtttcctctgggttggagcctcagagctctgcccctcaaggtgacagggacgtccctgtggcttgttccctccacctccagt

SEQ ID NO: 164582 - DNA, 120 bp, Artificial Sequence
  ENSG00000107957_69 (sequence is synthesized)
actgtatgcttgctacttcaaccccctatttggtgaatttctgcacagacacagatctctgtgcctggaatgggactgtgccctgtgcgggtctctcccttggcgtatatccatctagat

SEQ ID NO: 164583 - DNA, 120 bp, Artificial Sequence
  ENSG00000107957_70 (sequence is synthesized)
atttagtctttgagaatctcaaagcagagctctctgggaagagaactgtccacattgctaaataattaagattccctcacttttttgagggccatgtgttgtgagagagagagagagaga

SEQ ID NO: 164584 - DNA, 120 bp, Artificial Sequence
  ENSG00000107957_71 (sequence is synthesized)
gtgtgtgtgtgtgtgtgtctgtgtatgcaagtgttggtaacttcccacttgaactaaataacatggggttagagaaaaaaaaataccaggcaagctgtctccattgaacaagtccttggc

SEQ ID NO: 164585 - DNA, 120 bp, Artificial Sequence
  ENSG00000107957_72 (sequence is synthesized)
tgaacaagtccttggcaatgggcaggtcccaagggactcacagcttctggcagcaagtgtgtcattcacacacatcattctggctggagagtgcaatgtgtcatttttttttctttttgt

SEQ ID NO: 164586 - DNA, 120 bp, Artificial Sequence
  ENSG00000107957_73 (sequence is synthesized)
aattattttattaagtatttagttggaaatttcacactggcattaacaggtctagcataagtggcctaggcagtcatcccaggctccaaaatgaagatgtgcaaaagagatgccactggg

SEQ ID NO: 164587 - DNA, 120 bp, Artificial Sequence
  ENSG00000107957_74 (sequence is synthesized)
aatagaaacactgagttggttcagttaggtcatcccctgcagacgtgtcatcgagcaggctgactcccacccctcagccatgccatgggtatgagaagccccttataatgaaagctgcca

SEQ ID NO: 164588 - DNA, 120 bp, Artificial Sequence
  ENSG00000107957_75 (sequence is synthesized)
gccctttcgtccttgtttcagagggtgggtcaggtggttggggtgagaacttgctcacggtgcacccaacaagacctgcaggtgcatataagtttagtcccaactgcagggccagaccaa

SEQ ID NO: 164589 - DNA, 120 bp, Artificial Sequence
  ENSG00000107957_76 (sequence is synthesized)
acacttcctgggaagtgtgtggagggctgtgctagaccttcctgagtttctggctaaatcatcagccctgtttggtgcagtctcatgtctctgtggttcccaagctgcatgatcagagcc

SEQ ID NO: 164590 - DNA, 120 bp, Artificial Sequence
  ENSG00000107957_77 (sequence is synthesized)
agtgagaagacaggatcagtgacccacagctttggggaaaaacagccccactgttaacttccctcctgcaaacctgggtccccaggccataaggtgggcacactggtgcttacagactgg

SEQ ID NO: 164591 - DNA, 120 bp, Artificial Sequence
  ENSG00000107957_78 (sequence is synthesized)
gtggagagccctaccttccaaggtcttgatcccagcctgcctataaggttgggattagcatgcaatcccccttccccaatcctgtctttttaaaatctcaagtttgcacttaaccttgac

SEQ ID NO: 164592 - DNA, 120 bp, Artificial Sequence
  ENSG00000107957_79 (sequence is synthesized)
aacagcaccctctcctactccagtcctagaactcagtggccttagagaatggggtcccctgcactgaaggtccccgccttgctcccagttccatcctggccaataggctgcgcctcaaga

SEQ ID NO: 164593 - DNA, 120 bp, Artificial Sequence
  ENSG00000107957_80 (sequence is synthesized)
ggtgaaagagaaaaaagggagggagggaggaagaattatttagaacaaaaggatggctcgagcacgttagaggcaagtgagaggcacgttggtgagaagagcatgtgcatgtttggggta

SEQ ID NO: 164594 - DNA, 120 bp, Artificial Sequence
  ENSG00000107957_81 (sequence is synthesized)
gctggggcctactgtcccttcattagggaaggaggcttccagaagcggatgtcttctagaaagaaaaattgtgtgaaggctgaaaaggggcttggagttttgtctttgttgattagaaag

SEQ ID NO: 164595 - DNA, 120 bp, Artificial Sequence
  ENSG00000107957_82 (sequence is synthesized)
aaggaagaagtcagctctgagtgtttcaggaagaagagagcaggtagaaagggaatttagtgatttaacacccaagggtccagccatagcaggttggaaaatcctccaaatttggccaca

SEQ ID NO: 164596 - DNA, 120 bp, Artificial Sequence
  ENSG00000107957_83 (sequence is synthesized)
gaaactggctaggaaaaaactgccactcattgggccacacgctgggtccccatcagttctcaatgaatggtcattgatttacttagcagagagaagtcaccagccacaaaccaatctttg

SEQ ID NO: 164597 - DNA, 120 bp, Artificial Sequence
  ENSG00000107957_84 (sequence is synthesized)
agtttgcaggccctgattccagaatatatgcatccagctcccgggttctcagctggttttgcccacttccctttgactgtccaatccaaagccagtctctcaagttgtatggctcaaaga

SEQ ID NO: 164598 - DNA, 120 bp, Artificial Sequence
  ENSG00000107957_85 (sequence is synthesized)
gcagtgaccacaatgggtcatacagtagggacccacctccacaaattagaaccagagttcagactccattgggcacatctgggaggaaggcaacctcctttgtcgtcttgttggtaccag

SEQ ID NO: 164599 - DNA, 120 bp, Artificial Sequence
  ENSG00000107957_86 (sequence is synthesized)
tcattctcaagtatctctgacacctgtggtggttcagtttgctgagcctgccacctggtatgaattagactgggtgtgatgaacattcatccatggatataccctaccattttgcgttgc

SEQ ID NO: 164600 - DNA, 120 bp, Artificial Sequence
  ENSG00000107957_87 (sequence is synthesized)
cttataaccaaggcacactccccataagagtttactgcagagaaagaacagcaaaacagccaccctccttgaatttacaactcattatctgcaacaggttttctttaaatccaagacaca

SEQ ID NO: 164601 - DNA, 120 bp, Artificial Sequence
  ENSG00000107957_88 (sequence is synthesized)
ggatgggaaatgggtttccccaccaggtactcagaggtctgcaggaagtgactcccgggcaaggcagacttcagtaatccctgaagcgtgagcatgtggactgcatggctgggtggggac

SEQ ID NO: 164602 - DNA, 120 bp, Artificial Sequence
  ENSG00000107957_89 (sequence is synthesized)
tggtggatgtctctggagctccagaaccttggagaattcctcatggaattcccctcccagctcttagtgggctctgtggggtcaggaggagcccttcctccaggttttccttctttcctc

SEQ ID NO: 164603 - DNA, 120 bp, Artificial Sequence
  ENSG00000107957_90 (sequence is synthesized)
ctcagcagagaaactggagaaaggacattaaactcagtgcagtcgatttgagtgctgaaatatttccagaatcaatggtggtgctaaactatctccatgtttctagcatttttaatagtg

SEQ ID NO: 164604 - DNA, 120 bp, Artificial Sequence
  ENSG00000107957_91 (sequence is synthesized)
gagttggtttgtttttaatctcatcacaaaaatgcagtgcccttggggaagggaccagccccttggcctgccactttccaggtgtcctttatcactttgacgggactctttggtctgcag

SEQ ID NO: 164605 - DNA, 120 bp, Artificial Sequence
  ENSG00000107957_92 (sequence is synthesized)
aaaatgctctgtcttggcatgcttctagactgtaagatttgggttttgttttgtattttatgtttacatgcatcttatatttccctgaaaactaaataaagttttgggcctttttaaccg

SEQ ID NO: 164606 - DNA, 80 bp, Artificial Sequence
  ENSG00000107957_93 (sequence is synthesized)
acggagcccgcgcgccctccgggaccctcccccgtccctgggccggacctgtgggcgccgggagtccgggcagcgttcgg

SEQ ID NO: 164607 - DNA, 120 bp, Artificial Sequence
  ENSG00000107957_94 (sequence is synthesized)
cacaaatctgtgattacctggcgggtgaaccgctccggtggcggggagagcgggctcccagcgctgggtaggggccgggttccggcgagcgccatcccggagcgtcagtttcccagtttg

SEQ ID NO: 164608 - DNA, 120 bp, Artificial Sequence
  ENSG00000107957_95 (sequence is synthesized)
ggaagtgaggagaacctgcctcgcccttccccgccaaggcttagggaagggactatggcagttccaagaggaaatcagggtctcactctgttgctcaggctggattgcagtggcgtgatc

SEQ ID NO: 164609 - DNA, 120 bp, Artificial Sequence
  ENSG00000107959_0 (sequence is synthesized)
aagccccgccccgcgccctgcgtcgggttaagagggggttcctcgccagccaggtgctcgtcatgcgcaatgtggcgctgcggcgggcggcagggcctgtgtgtgctgaggcggctgagc

SEQ ID NO: 164610 - DNA, 120 bp, Artificial Sequence
  ENSG00000107959_1 (sequence is synthesized)
ggcggacatgcacaccacagagcgtggcgatggaacagtaaccgggcttgtgagagggctctgcagtataaactaggagacaagatccatggattcaccgtaaaccaggtgacatctgtt

SEQ ID NO: 164611 - DNA, 120 bp, Artificial Sequence
  ENSG00000107959_2 (sequence is synthesized)
cccgagctgttcctgactgcagtgaagctcacccatgatgacacaggagccaggtatttacacctggccagagaagacacgaataatctgttcagcgtgcagttccgtactactcccatg

SEQ ID NO: 164612 - DNA, 120 bp, Artificial Sequence
  ENSG00000107959_3 (sequence is synthesized)
gacagtactggtgttcctcacattcttgagcataccgtcctttgtgggtctcagaaatatccgtgcagagaccctttcttcaaaatgttgaaccggtccctctccacgttcatgaacgcc

SEQ ID NO: 164613 - DNA, 120 bp, Artificial Sequence
  ENSG00000107959_4 (sequence is synthesized)
ttcacagctagtgattatactctgtatccattttccacacaaaatcccaaggactttcagaatctcctctcggtgtatttggatgccacctttttcccatgtttacgcgagctggatttc

SEQ ID NO: 164614 - DNA, 120 bp, Artificial Sequence
  ENSG00000107959_5 (sequence is synthesized)
tggcaggaaggatggcggctggaacatgagaatccgagcgacccccagacgcccttggtctttaaaggagtcgtctttaatgagatgaagggagcgtttacagacaatgagaggatattc

SEQ ID NO: 164615 - DNA, 120 bp, Artificial Sequence
  ENSG00000107959_6 (sequence is synthesized)
tcccagcaccttcagaacagacttcttcctgaccacacgtactcagtggtctccgggggtgacccactgtgcatcccggagcttacatgggagcagcttaagcagtttcatgccactcac

SEQ ID NO: 164616 - DNA, 120 bp, Artificial Sequence
  ENSG00000107959_7 (sequence is synthesized)
tatcacccaagcaatgctaggttcttcacgtacggtaattttccattagaacagcatctgaaacaaattcacgaggaagcactgagcaaattccagaaaattgaaccaagcaccgtggtg

SEQ ID NO: 164617 - DNA, 120 bp, Artificial Sequence
  ENSG00000107959_8 (sequence is synthesized)
ccagctcagacaccctgggacaagcctagggaattccagataacatgtggcccggattcatttgctacagatccctctaaacaaacaaccatcagcgttagcttcctcttaccggacatc

SEQ ID NO: 164618 - DNA, 120 bp, Artificial Sequence
  ENSG00000107959_9 (sequence is synthesized)
accgacacatttgaagccttcacattaagtcttctgtcttcactcttgacttctgggcccaattctcccttttacaaagccttgattgaatctggccttggcacagacttttctcctgat

SEQ ID NO: 164619 - DNA, 120 bp, Artificial Sequence
  ENSG00000107959_10 (sequence is synthesized)
gttggatataatggctacacgagggaggcctactttagtgtcggcctccaagggattgcggagaaagacattgagaccgtcagaagcctcatagacagaacgattgatgaagtagttgag

SEQ ID NO: 164620 - DNA, 120 bp, Artificial Sequence
  ENSG00000107959_11 (sequence is synthesized)
aaaggatttgaagatgatcgaattgaggctttacttcataaaattgaaatacagatgaaacatcagtctaccagctttgggctgatgctgacatcatacatagcttcttgctggaaccat

SEQ ID NO: 164621 - DNA, 120 bp, Artificial Sequence
  ENSG00000107959_12 (sequence is synthesized)
gatggggaccctgtggagctcttgaagttgggaaatcagttagctaaattcagacagtgcctgcaggaaaatccaaaatttttgcaagaaaaagtaaaacagtattttaagaataaccag

SEQ ID NO: 164622 - DNA, 120 bp, Artificial Sequence
  ENSG00000107959_13 (sequence is synthesized)
cataagctgactttatcgatgaggccagatgacaagtatcacgagaagcaggcacaggtggaagccacgaagctcaagcagaaggtcgaggctctgtcccccggagacaggcagcagatc

SEQ ID NO: 164623 - DNA, 120 bp, Artificial Sequence
  ENSG00000107959_14 (sequence is synthesized)
aaggtctagaattacggagtcaacaaagcaaacctcaagatgcctcttgtctgccagcgttgaaagtttccgatattgaacccaccatacctgtcacagagttggacgtggtcctgacag

SEQ ID NO: 164624 - DNA, 120 bp, Artificial Sequence
  ENSG00000107959_15 (sequence is synthesized)
ctggagatatccctgttcagtactgcgcccagcccaccaatggcatggtgtatttccgggccttctccagcctgaacacactccccgaggagctgaggccctatgtgcccctcttctgca

SEQ ID NO: 164625 - DNA, 120 bp, Artificial Sequence
  ENSG00000107959_16 (sequence is synthesized)
gcgtcctcaccaagctgggctgcggccttcttgactaccgggagcaggctcagcagatagaattgaagaccggagggatgagtgcttctccccacgtgctccccgacgactcacacatgg

SEQ ID NO: 164626 - DNA, 120 bp, Artificial Sequence
  ENSG00000107959_17 (sequence is synthesized)
acacctacgagcaggtaggtgtgcttttctcctctctctgcctggatcgaaacctgccagacatgatgcagctatggagtgaaatatttaacaacccgtgctttgaagaagaggagcact

SEQ ID NO: 164627 - DNA, 120 bp, Artificial Sequence
  ENSG00000107959_18 (sequence is synthesized)
tcaaggtgctggtgaagatgaccgcccaggagctcgccaatggaattcctgactctgggcacctgtacgcatccatcagggcaggccggaccctcacgcccgcaggggacctgcaggaga

SEQ ID NO: 164628 - DNA, 120 bp, Artificial Sequence
  ENSG00000107959_19 (sequence is synthesized)
ccttcagcgggatggatcaggtgcggctgatgaagaggattgcagaaatgacagatatcaaacccatcctgaggaagctcccgcgtatcaagaaacacttgttaaatggtgataatatga

SEQ ID NO: 164629 - DNA, 120 bp, Artificial Sequence
  ENSG00000107959_20 (sequence is synthesized)
ggtgttcagtgaatgcgactcctcagcagatgcctcagacagaaaaagcggtcgaagacttccttagaagcatcggtcggagtaaaaaggaacggaggcctgtgcgcccacacacggtcg

SEQ ID NO: 164630 - DNA, 120 bp, Artificial Sequence
  ENSG00000107959_21 (sequence is synthesized)
agaaacctgtgcccagcagctctggtggagatgcccacgttccccatggctcccaggtcattaggaagctggtcatggaacccaccttcaagccctggcagatgaagactcacttcctga

SEQ ID NO: 164631 - DNA, 120 bp, Artificial Sequence
  ENSG00000107959_22 (sequence is synthesized)
tgcccttcccggtgaattacgtgggtgaatgcatccgaactgtcccctacacggacccagatcatgccagtcttaaaatccttgcacgtttgatgactgccaaattcttgcatacagaaa

SEQ ID NO: 164632 - DNA, 120 bp, Artificial Sequence
  ENSG00000107959_23 (sequence is synthesized)
ttcgagaaaaaggcggtgcttatggtggaggcgcaaaactcagccacaatgggattttcaccctttactcttacagggacccaaatacaatagagacgctccagtcttttgggaaggctg

SEQ ID NO: 164633 - DNA, 120 bp, Artificial Sequence
  ENSG00000107959_24 (sequence is synthesized)
tcgactgggctaagtctggaaaattcacacagcaagacatcgacgaagccaaactttctgtcttctcaaccgtagatgctcctgtcgctccttcagacaaaggaatggaccacttcttgt

SEQ ID NO: 164634 - DNA, 120 bp, Artificial Sequence
  ENSG00000107959_25 (sequence is synthesized)
acggcctctcggatgagatgaagcaggcccacagagagcagctctttgctgtcagccacgacaagctcctggccgtgagcgatagatacctcggcactgggaagagcacacacggcctgg

SEQ ID NO: 164635 - DNA, 120 bp, Artificial Sequence
  ENSG00000107959_26 (sequence is synthesized)
ccatcctcggacccgagaacccgaaaattgccaaggacccatcctggatcatccaatgagcagccgtggcgctcgactgcacaggagcccgagacaatacacctccgagctgaatatgaa

SEQ ID NO: 164636 - DNA, 120 bp, Artificial Sequence
  ENSG00000107959_27 (sequence is synthesized)
aagtcagaaatgctactgctttttccaagaatattatgtcattgagtgtcgccaaagcccttgactggcgagtcaaaaactcagatctatcttaagagtgaccaggaagaggttcattga

SEQ ID NO: 164637 - DNA, 120 bp, Artificial Sequence
  ENSG00000107959_28 (sequence is synthesized)
aataatcatgcatgaagcgccaaagatgcaccatgtagaattttcactttgtactggcaggctcgttttacctcattctagaatatttaagaatctaaaaataaagggcaactctgactt

SEQ ID NO: 164638 - DNA, 120 bp, Artificial Sequence
  ENSG00000107959_29 (sequence is synthesized)
gatacttatagatctccatctcagcctatgaagctttggaaaggattgatggtttaatccgaaaatgtaagtaattggatgtgcagtgtggcctggggctgccttaggaacaggtgtgcc

SEQ ID NO: 164639 - DNA, 120 bp, Artificial Sequence
  ENSG00000107959_30 (sequence is synthesized)
tgctgcgtgcgtggctcctcctccaagccgaccctgcagttgctgtcgtcctccctaggtggggtgtgcacagatctggaaacacacacacgagtgcacacatcaacacttgactttttg

SEQ ID NO: 164640 - DNA, 120 bp, Artificial Sequence
  ENSG00000107959_31 (sequence is synthesized)
cccagctctgccgtggccgaggttgcaggacaagcagtagacagggctgtgggctcctgttcccatccagaataatagggcgacagggaaccctgcagccagcttcagggaccactgccc

SEQ ID NO: 164641 - DNA, 120 bp, Artificial Sequence
  ENSG00000107959_32 (sequence is synthesized)
aacctgacatgcagctggggtcttccctttgtggagatgaagttgtctgcatgctgcagaaagctatgtggctgtgacaccttctgcaccctggctgagggtccgctcagatggaaaaat

SEQ ID NO: 164642 - DNA, 120 bp, Artificial Sequence
  ENSG00000107959_33 (sequence is synthesized)
gtcttcagggttttgaaggttccctgcctttctttttaaatatagctgccactgttcatccttttgtagcggtttagaaaacacctcatggtcattcccttgactcaattattgctggca

SEQ ID NO: 164643 - DNA, 120 bp, Artificial Sequence
  ENSG00000107959_34 (sequence is synthesized)
ttagcagtgtcactgtgaatgtttctttcaaaagcatgagtgctgagaggaaactgcttttcttaaaaacttaaaaaacctttagtcttcggactcccccgcccaggctaccagacattc

SEQ ID NO: 164644 - DNA, 120 bp, Artificial Sequence
  ENSG00000107959_35 (sequence is synthesized)
gagcaaaacaaaggaagtatgtatcacggtgatctgggtgaagagagtagggagtagtcataaaacatttattgaagagcttacaactggaaatgcctattttagaatggtgttttaagt

SEQ ID NO: 164645 - DNA, 120 bp, Artificial Sequence
  ENSG00000107959_36 (sequence is synthesized)
gcagacactggctgcccaagtgtcttgtgcctctggacgctaacttcctaggcgggagaaactggggtctccctggggaagggggcacatgaactctcgagggcgaaggccagagtgcac

SEQ ID NO: 164646 - DNA, 120 bp, Artificial Sequence
  ENSG00000107959_37 (sequence is synthesized)
ctgcttatgaccttcgaagtgtagagaggttggcaaagccgcagttattgaattaatggaagcaacttgtaactcaagatgcacgattttaaaaatgattcagtaaagactgacttgtaa

SEQ ID NO: 164647 - DNA, 120 bp, Artificial Sequence
  ENSG00000107959_38 (sequence is synthesized)
gttttctttggttcagggtgtgcttttctcctctctctgcctggatcgaaacctgccagacatgatgcagctatggagtgaaatatttaacaagtaactttatttgcaagagttgtccat

SEQ ID NO: 164648 - DNA, 120 bp, Artificial Sequence
  ENSG00000107959_39 (sequence is synthesized)
tcttggggtgtactagagatctttgtttgaagtactttaaaggagacagttttactcgtgtgtgttgttgttttccaagtctgacttttacttgtagttcatatggacttataaaatttc

SEQ ID NO: 164649 - DNA, 120 bp, Artificial Sequence
  ENSG00000107959_40 (sequence is synthesized)
tttggttgttaaagtactctgaaaacttaatcaactttccatgatactgaagggacgtgaggaatgggtctccaggaattttttcttctcctttttccatagcccgtgctttgaagaaga

SEQ ID NO: 164650 - DNA, 120 bp, Artificial Sequence
  ENSG00000107959_41 (sequence is synthesized)
gcagtgccttgctctcgcgccccagcacctggctgcagagtgtcacggagatgggacccctgagatggctccagtcccagtgccgtgggcagtgcgtgggagcacagccgcctctgaccc

SEQ ID NO: 164651 - DNA, 120 bp, Artificial Sequence
  ENSG00000107959_42 (sequence is synthesized)
acgttactctctggagccgcttttgctcacagcatcatcagcctcacgcggcgctgactgcatccctgctgcagaagcaggcgtgggtaggggtcagcgtggcacgtgggagctggaggt

SEQ ID NO: 164652 - DNA, 120 bp, Artificial Sequence
  ENSG00000107959_43 (sequence is synthesized)
cggggtgtgatctctgggttgttagacacatccctgtggttgaaacatgcacgtgaaatgacagtgagatgcctgtgtcccctccgggacatgagtgcacagcccacaacgcgagctccc

SEQ ID NO: 164653 - DNA, 120 bp, Artificial Sequence
  ENSG00000107959_44 (sequence is synthesized)
agcttctggtgcctccatccttgcttgtgatacgatttccacgtctgacaccctaaacacgcttcctgacatccgggcgagaagagtgcatcctgtcatttgttttactgacctgagacc

SEQ ID NO: 164654 - DNA, 120 bp, Artificial Sequence
  ENSG00000107959_45 (sequence is synthesized)
tcacccaagcaatgctaggtaatattttgttggaaaagtttgatggtggattgtgaaaagttgacttgtttgtgttcttaacagtttatggcatggcttctctcacatttagcaatgctt

SEQ ID NO: 164655 - DNA, 120 bp, Artificial Sequence
  ENSG00000107959_46 (sequence is synthesized)
aagtctaggtaagattcttggcctaagtttgcctatcttacttggacattgattttggacatttacaatgatagccctcaggaggctcagcatggtggttacaaacacagcgtttagagt

SEQ ID NO: 164656 - DNA, 120 bp, Artificial Sequence
  ENSG00000107959_47 (sequence is synthesized)
cccccagaggagggtcctggccccgcagcctgttgcctcacatctagcttggttgcgtggaaagtgggggtgcatggatggtgcccaccttgacacggggtgtgaagcttgaagccctct

SEQ ID NO: 164657 - DNA, 120 bp, Artificial Sequence
  ENSG00000107959_48 (sequence is synthesized)
ccttggcacggagaagtgctcttccaatagtggatgcagttactgaaccttaattacatcctcactttctgatacattgcttgttcttatgtcactaatacaaggtcattataataataa

SEQ ID NO: 164658 - DNA, 120 bp, Artificial Sequence
  ENSG00000107959_49 (sequence is synthesized)
atcatgccaggaaaaggcctgtctgtggaagcggcgacctggggctgatctcaccacgggcgtcttcaaggagcctgtgtctgtgctgcagaccctcccatcattgtctgccccgccttc

SEQ ID NO: 164659 - DNA, 120 bp, Artificial Sequence
  ENSG00000107959_50 (sequence is synthesized)
tgtcggaggtggatgtgttctagaatcagcttgaatgtgatgttaccgttcacagtggaaggcagaggaaattggccctgttcctagaaatgtgctttatcagagagtgtgtgttttctt

SEQ ID NO: 164660 - DNA, 120 bp, Artificial Sequence
  ENSG00000107959_51 (sequence is synthesized)
gattactttaaatgggtaagggtttataactagtaatctgttggttatttcctaaacattatttcagcctgtgctttttattttattggaacaaaacagggctaaagtaagtttttttgt

SEQ ID NO: 164661 - DNA, 120 bp, Artificial Sequence
  ENSG00000107959_52 (sequence is synthesized)
ttctccatccaaagaattacatgacttttgttataaacaatcatctgtggtatatttaaatacagaaactaggattttagtatcaagtctgggctgttggtggaggttgtactgtggtac

SEQ ID NO: 164662 - DNA, 120 bp, Artificial Sequence
  ENSG00000107960_0 (sequence is synthesized)
ggggtcgtcgccgccagcggctccgagcgccggaagggccaggtctcagggctcctggagctgcaggcggcgggaggggctacaaatgcttgactcagtgatgcagaacctttcagagtt

SEQ ID NO: 164663 - DNA, 120 bp, Artificial Sequence
  ENSG00000107960_1 (sequence is synthesized)
agctggaagccacagccctgcctcttgatgcagcctggatccagccggtgtgaagaggagaccccttccctcttgtggggtttggatcctgtgtttctagcctttgcaaaactctacatc

SEQ ID NO: 164664 - DNA, 120 bp, Artificial Sequence
  ENSG00000107960_2 (sequence is synthesized)
agggatatcctggacatgaaggagtcccgccaggtgccaggtgtatttttgtacaatggacatccaataaaacaggtagatgtcttgggaactgtcattggagtgagagaaagagatgct

SEQ ID NO: 164665 - DNA, 120 bp, Artificial Sequence
  ENSG00000107960_3 (sequence is synthesized)
ttctacagttatggagtggatgacagcactggagttataaactgcatctgctggaaaaagttgaatactgagtctgtatcagctgctccaagtgcagcaagagagctcagcttaacctca

SEQ ID NO: 164666 - DNA, 120 bp, Artificial Sequence
  ENSG00000107960_4 (sequence is synthesized)
caacttaagaagctacaagagaccattgagcagaaaacaaagatagagatcggggacacgatccgagtcagaggcagtatccgcacatacagagaagagcgagagattcatgccaccact

SEQ ID NO: 164667 - DNA, 120 bp, Artificial Sequence
  ENSG00000107960_5 (sequence is synthesized)
tactataaagtggacgacccagtgtggaacattcaaattgcaaggatgcttgagctgcccactatctacaggaaagtttatgaccagccttttcacagctcagccctagagaaagaagag

SEQ ID NO: 164668 - DNA, 120 bp, Artificial Sequence
  ENSG00000107960_6 (sequence is synthesized)
gcactaagcaatccaggcgccctggacctccccagtctcacgagtttgctgagtgaaaaagccaaagaattcctcatggagaacagagtgcagagcttttaccagcaggagctggaaatg

SEQ ID NO: 164669 - DNA, 120 bp, Artificial Sequence
  ENSG00000107960_7 (sequence is synthesized)
gtggagtctttgctgtcccttgccaatcagcctgtgattcacagtgcctcctccgaccaagtgaattttaagaaggacaccacttccaaggcaattcatagtatatttaagaatgctata

SEQ ID NO: 164670 - DNA, 120 bp, Artificial Sequence
  ENSG00000107960_8 (sequence is synthesized)
caactgctgcaggaaaaaggacttgttttccagaaagatgatggttttgataacctatactatgtaaccagagaagacaaagacctgcacagaaagatccaccggatcattcagcaggac

SEQ ID NO: 164671 - DNA, 120 bp, Artificial Sequence
  ENSG00000107960_9 (sequence is synthesized)
tgccagaaaccaaatcacatggagaagggctgtcacttcctgcacatcttggcctgtgctcgcctgagcatccgcccgggcctgagcgaggctgtgctgcagcaagttctggagctcctg

SEQ ID NO: 164672 - DNA, 120 bp, Artificial Sequence
  ENSG00000107960_10 (sequence is synthesized)
gaggaccagagtgacattgtcagcacaatggagcactactacacagcgttctgagcagagacacgcagaccagctgaggaggacaaagataaggtggcattcacccccaggctctgactt

SEQ ID NO: 164673 - DNA, 120 bp, Artificial Sequence
  ENSG00000107960_11 (sequence is synthesized)
tcagcatcatgcaggggcttatctgtctggaggcagttacctcataataaactataaaatatagtcatcttgggaatgggatttggcataaatgttgttggctcccttctgtccactatg

SEQ ID NO: 164674 - DNA, 120 bp, Artificial Sequence
  ENSG00000107960_12 (sequence is synthesized)
tccttggtgtacaatgactttgatctcagccatgacacaacaagaaaaccctccctgttgagctcctggctggactgtgcgttgttcgcagagcagaatggggaggaaacagtgttggca

SEQ ID NO: 164675 - DNA, 120 bp, Artificial Sequence
  ENSG00000107960_13 (sequence is synthesized)
gcttaactgatgtgtgtggttggagtctcttccatggcaaagggacaccacagggtagtgaacattcaggaactgaggggcatatggcctgatcacacagttctaagcttttcaaaactt

SEQ ID NO: 164676 - DNA, 120 bp, Artificial Sequence
  ENSG00000107960_14 (sequence is synthesized)
caggttatcagagaccttcctgtgggcctctcttgctggctaagaaccggtttaggggagtagttctccctggatgagtgcttacagtttctgtggctcagttaccagcagtggggttga

SEQ ID NO: 164677 - DNA, 120 bp, Artificial Sequence
  ENSG00000107960_15 (sequence is synthesized)
gacctgggtcgatgctctttacaggcctgcccagagatgggaataaacagggatccacagcgtgactatgtgtttgtcattttccttttatttccttgggaatcgaaaggtgtcccagta

SEQ ID NO: 164678 - DNA, 120 bp, Artificial Sequence
  ENSG00000107960_16 (sequence is synthesized)
catttccctgcacttacagaggtgcatgactaaatacattgtccctcgatgcccctgaagatcacggaggcagtcagccaattgcctggcaggtggtagatgttattttcagggttgccg

SEQ ID NO: 164679 - DNA, 120 bp, Artificial Sequence
  ENSG00000107960_17 (sequence is synthesized)
ctgagtgtgcaggatgtgctgacaccatccagacaaagactcggtatgtgcccagacaggtgatggagtcatgcttttgctcagaatgacaaggtaaaggaaaaacatctgaggtatgtt

SEQ ID NO: 164680 - DNA, 120 bp, Artificial Sequence
  ENSG00000107960_18 (sequence is synthesized)
gtaggcctgttctgacagcaaaatgacaaatccagccagcaaaaataaagtgtggagaaagatttggagttaattacagtcatttcacagaaggcactgccttcgtctgctgcatttgct

SEQ ID NO: 164681 - DNA, 120 bp, Artificial Sequence
  ENSG00000107960_19 (sequence is synthesized)
cttgatgtgataagctcttcgtggctcagctggagatcctttaggcctggagagttgctcctctctccgtggaaacaggacagtctttatacgcagaagtccgctgcagctcgatacgtc

SEQ ID NO: 164682 - DNA, 120 bp, Artificial Sequence
  ENSG00000107960_20 (sequence is synthesized)
aggctgagagctagaaccagtagattgcctcctgtcatagacttttgtaatgatgcaaacctttgctgatttctaacagtgattatgtagtggctgccctgcatcttctctgtgtacaga

SEQ ID NO: 164683 - DNA, 120 bp, Artificial Sequence
  ENSG00000107960_21 (sequence is synthesized)
agggtccctagcatagagtctgcctggaatgatgtcctgggcagttcttccttgaggtcagcagctgttccacgttgaatgcatctgattagtggggctgcccaggaaggagttcagaat

SEQ ID NO: 164684 - DNA, 120 bp, Artificial Sequence
  ENSG00000107960_22 (sequence is synthesized)
cagaaggtaaaaagggcatacccttgcctatagcaactctgctcttaggggtttatctcaaggagatggctacacaagtgtgaaaggatggttgcacaaggtgttcattgctgtataatc

SEQ ID NO: 164685 - DNA, 120 bp, Artificial Sequence
  ENSG00000107960_23 (sequence is synthesized)
tagaattctatattggggaaaatacctatagggaaaaagttaattacggttcttgggcacaatgaaatactatgcagctatgaaaaaaatgatgaaagcagacagacagtgttgccatgg

SEQ ID NO: 164686 - DNA, 120 bp, Artificial Sequence
  ENSG00000107960_24 (sequence is synthesized)
cacactgtccctagtagatttagtgggaagtagatagagttatagatctgtttctatagtataacaccattatctacagctccctgtgtgtatgtatatatccgtagagagagtgtatat

SEQ ID NO: 164687 - DNA, 120 bp, Artificial Sequence
  ENSG00000107960_25 (sequence is synthesized)
ttctgcatggaggtctttataaatgtagcacatgtacatatatatatatatacacacacacagtcgaccactcccttctcctggaagtactttccgcgtttggctttcaggacaccaagc

SEQ ID NO: 164688 - DNA, 120 bp, Artificial Sequence
  ENSG00000107960_26 (sequence is synthesized)
gctccttctcaggttcctttgttcagtgctctgcctccctgaggactcagtcccagacctcttttctatctggcttgctcactggggtgtctccagcagccacatggattataccatcta

SEQ ID NO: 164689 - DNA, 120 bp, Artificial Sequence
  ENSG00000107960_27 (sequence is synthesized)
catgctgtctaacacctcagtttaaacccagaatgggcctcttccctgaactgcagacccctatattcagtttgctactgacatctccacttaggtctctaatggacatctcagatttca

SEQ ID NO: 164690 - DNA, 120 bp, Artificial Sequence
  ENSG00000107960_28 (sequence is synthesized)
caggcccaaagccaggctcccaattactcctgaccccaggcttgctcctgatagtgacatgaggcagccaaatgcctaggcagagaggggagggtcccaaatgaaaccccacgttcaagc

SEQ ID NO: 164691 - DNA, 120 bp, Artificial Sequence
  ENSG00000107960_29 (sequence is synthesized)
aaagatcagcctgaaggctaaaagaccagattgctggtcctggatgaaacccaccacgcagagtgggaacttctgttcctgtttgcccaccctttcccaattgttctttctgaataacgc

SEQ ID NO: 164692 - DNA, 120 bp, Artificial Sequence
  ENSG00000107960_30 (sequence is synthesized)
cttaaccaatcgaatgttgccttttccagtaatacctacagcctgcccctccccccattctgagcccataaaaagacccagactcccccatattaaggggactttcctgcctttgggtag

SEQ ID NO: 164693 - DNA, 120 bp, Artificial Sequence
  ENSG00000107960_31 (sequence is synthesized)
ggggaccacccccacgtctcctctctgttgaaaactgtttcatcactcaataaaactcccagctttgctcactcttccactgtcagcacattctcattcttctttggtgctgggcaagaa

SEQ ID NO: 164694 - DNA, 120 bp, Artificial Sequence
  ENSG00000107960_32 (sequence is synthesized)
ctcaaccagtgtggaagccatacttggcccaggcgggtgaagtgggcgggccgtctcctgcagcaggtagcatggtcaagcgaggcccaggtgggccgtcaccagccagaggtccctggc

SEQ ID NO: 164695 - DNA, 120 bp, Artificial Sequence
  ENSG00000107960_33 (sequence is synthesized)
ttgcaaagtgaccgagaaaaaaatcctgtgccactcctttggaaaatgtccctgattcaggaagaggtagctccatccagttgctcaaaccaaatccattggcttctttctttctatcat

SEQ ID NO: 164696 - DNA, 120 bp, Artificial Sequence
  ENSG00000107960_34 (sequence is synthesized)
acctcacatccaatctgtctgcaagtcttttggctctaccttcagaatatctccagaatcttaactgcttcaccctcctccccggcctcctcagtcctctctgcttccgccctggcccct

SEQ ID NO: 164697 - DNA, 120 bp, Artificial Sequence
  ENSG00000107960_35 (sequence is synthesized)
cttgggctgttcacagcacagcagctgttgccaccctgttaatgctcccactctcctacagccttcggtcttgccccaggtaggagcctgaggctgcacagaggtcagcacggccccgct

SEQ ID NO: 164698 - DNA, 120 bp, Artificial Sequence
  ENSG00000107960_36 (sequence is synthesized)
taccctgccctcccagcccagccgcacgggccttgcacacatgcctcggcatattcctgccttagggctggtgctcctgctatttcctcttcccaggtaaccatgtgaagtgcctccctc

SEQ ID NO: 164699 - DNA, 120 bp, Artificial Sequence
  ENSG00000107960_37 (sequence is synthesized)
tgccctctttccagcctttacttgagtgtcaccttctcagtgaggcctgccctcattcctctttcgctgtttgcaacccatctcctgtcccccttcccagaactccctttcctacttcgt

SEQ ID NO: 164700 - DNA, 120 bp, Artificial Sequence
  ENSG00000107960_38 (sequence is synthesized)
ttttcttcacagtacttgatactgcctaacacactccatggtttcttacttgccctgtttattattttcccccaatagacagaatgttccatgatggcagaattctctgttttgtttcct

SEQ ID NO: 164701 - DNA, 120 bp, Artificial Sequence
  ENSG00000107960_39 (sequence is synthesized)
tccatgtccccagcacctagaacagtgcctgacgcatctcctaagcaatacgaccaataagtatgtgtctggctgccttccggctgccagtgtctgcctctttcctaggggcagtggttg

SEQ ID NO: 164702 - DNA, 120 bp, Artificial Sequence
  ENSG00000107960_40 (sequence is synthesized)
cgggggtgctttctcacatgtcttagtaggctgtgcaggctggaagtgctcagaagtcacacccccagggagcagcctcagccaacagcaccttggctgtaaatgccccagctccctcgc

SEQ ID NO: 164703 - DNA, 120 bp, Artificial Sequence
  ENSG00000107960_41 (sequence is synthesized)
cctcaggtaagcattgctgaggcacacgttccatactcttttccacagttcctccgtgggactgagcaccacccagccacccacaggagcagctaacctgataaccaccagcctcaccct

SEQ ID NO: 164704 - DNA, 120 bp, Artificial Sequence
  ENSG00000107960_42 (sequence is synthesized)
ccctgccttacttccccgctcccctttaccacatgctgacctcccagatgcatttcttgctttccggtctctgtctcaggattggctcctggatgaacacaaactaacactatgttcaca

SEQ ID NO: 164705 - DNA, 120 bp, Artificial Sequence
  ENSG00000107960_43 (sequence is synthesized)
aatatatttgggaaatgctggatgaataattatacacatcagacagattactagaaattctcaccaaagggatgcacatgttacctctgcatggtgagatctcaggtgctttttacccca

SEQ ID NO: 164706 - DNA, 120 bp, Artificial Sequence
  ENSG00000107960_44 (sequence is synthesized)
catagctatcctttggcatttttataattagcaagtgctcactcttccactgtcagtacattctcattcttcttgggcgctggacaagaattcaaccggtgtgtaagccagactcggccc

SEQ ID NO: 164707 - DNA, 120 bp, Artificial Sequence
  ENSG00000107960_45 (sequence is synthesized)
gggcagtctcaaactcctgactccttatataatttctacaaaaattataaagctatttcccactccccaccccacattcatgtaacctgaagcatgagtaaaccaagaatgaggtaggcc

SEQ ID NO: 164708 - DNA, 120 bp, Artificial Sequence
  ENSG00000107960_46 (sequence is synthesized)
tctgtcttctaagcaacatcagaactctaagaacatgagggactcttagaaaactctctggagctaaccacagctgggtcactgctcatgtactgaagaccagccagagggttcccctga

SEQ ID NO: 164709 - DNA, 120 bp, Artificial Sequence
  ENSG00000107960_47 (sequence is synthesized)
aaaggagggaaactgagcaaacattctccagttctcttagtgtgcacatgtttcaggaggtgtgaaccccacatgtagcttgtgtaggcaagaagacaaatagtgctactgtctggtcaa

SEQ ID NO: 164710 - DNA, 120 bp, Artificial Sequence
  ENSG00000107960_48 (sequence is synthesized)
ggatttgtttgaagagccatgattatgcccatatggtaagccaccagtgctccccatccctgtaagacacttctttctcattattttctcctctgatggtgtgccaggatgctggccaag

SEQ ID NO: 164711 - DNA, 120 bp, Artificial Sequence
  ENSG00000107960_49 (sequence is synthesized)
agaagccaagtggaaagaaggctgttcagtgacaaggaacctaagacttagtgccaaggactgaaaccaagtaaacttgtaattttccatgatggaaacatctacactttctcattagtg

SEQ ID NO: 164712 - DNA, 120 bp, Artificial Sequence
  ENSG00000107960_50 (sequence is synthesized)
gcctctacagcagttgccccaaagaagcgtctcattgtttttttactacatttatgtgaagcatacaggcaaactcagaaagactgtgataaggctcgccagagatgcctgcacaggtgc

SEQ ID NO: 164713 - DNA, 120 bp, Artificial Sequence
  ENSG00000107960_51 (sequence is synthesized)
tgggggaaaagcaggaccatcctgaagggagatggtgtctgtggacaaagaactctgcagtggttcttatttgcatgatttctgctggtggaggctgtaaatgtgagctcaaactcccac

SEQ ID NO: 164714 - DNA, 120 bp, Artificial Sequence
  ENSG00000107960_52 (sequence is synthesized)
ataagtgagttttcattgtaatccagaatgtttttaaatcaccctacttctattgaacttgcactatcatctgttaacctctactgtatttattaaataaacctgaataggtaaatcaca

SEQ ID NO: 164715 - DNA, 120 bp, Artificial Sequence
  ENSG00000107960_53 (sequence is synthesized)
gaaaacaaagatagagatcggggacacgatccgagtcagaggcagtatccgcacatacagagaagagcgagagattcatgccaccacttactgtaagcacaagatatttctaccaaattg

SEQ ID NO: 164716 - DNA, 120 bp, Artificial Sequence
  ENSG00000107968_0 (sequence is synthesized)
actcgtccgctccgctctggactgcgcgccacgctctggggtccggcgccctggttcctgcttctgccgctgccgccgccggatcccagtggcccggcgtgctcggctcccacaggcctg

SEQ ID NO: 164717 - DNA, 120 bp, Artificial Sequence
  ENSG00000107968_1 (sequence is synthesized)
cagccagcatcgcaccgaaccttcggggggccgcggctggagcgctcggccggcgtgggagcgccaaggccgcagatgcaatcttcttaccgcgaagaagccaggggaataggtagccac

SEQ ID NO: 164718 - DNA, 120 bp, Artificial Sequence
  ENSG00000107968_2 (sequence is synthesized)
atcttgtttgcagataagaaaggaagctaacgcagtatctgcaaagccaggagtctgactcagtacttttctcactcatgcatacaaagcagctaaaaatgacacagcttatttaccatg

SEQ ID NO: 164719 - DNA, 120 bp, Artificial Sequence
  ENSG00000107968_3 (sequence is synthesized)
cccctgacactgcactgagcactttatgagcttgaactctgttaatcctcacgaccacctcatgagactctccagaaagagcaacagtaatggagtacatgagcactggaagtgacaata

SEQ ID NO: 164720 - DNA, 120 bp, Artificial Sequence
  ENSG00000107968_4 (sequence is synthesized)
aagaagagattgatttattaattaaacatttaaatgtgtctgatgtaatagacattatggaaaatctttatgcaagtgaagagccagcagtttatgaacccagtctaatgaccatgtgtc

SEQ ID NO: 164721 - DNA, 120 bp, Artificial Sequence
  ENSG00000107968_5 (sequence is synthesized)
aagacagtaatcaaaacgatgagcgttctaagtctctgctgcttagtggccaagaggtaccatggttgtcatcagtcagatatggaactgtggaggatttgcttgcttttgcaaaccata

SEQ ID NO: 164722 - DNA, 120 bp, Artificial Sequence
  ENSG00000107968_6 (sequence is synthesized)
tatccaacactgcaaagcatttttatggacaacgaccacaggaatctggaattttattaaacatggtcatcactccccaaaatggacgttaccaaatagattccgatgttctcctgatcc

SEQ ID NO: 164723 - DNA, 120 bp, Artificial Sequence
  ENSG00000107968_7 (sequence is synthesized)
cctggaagctgacttacaggaatattggttctgattttattcctcggggcgcctttggaaaggtatacttggcacaagatataaagacgaagaaaagaatggcgtgtaaactgatcccag

SEQ ID NO: 164724 - DNA, 120 bp, Artificial Sequence
  ENSG00000107968_8 (sequence is synthesized)
tagatcaatttaagccatctgatgtggaaatccaggcttgcttccggcacgagaacatcgcagagctgtatggcgcagtcctgtggggtgaaactgtccatctctttatggaagcaggcg

SEQ ID NO: 164725 - DNA, 120 bp, Artificial Sequence
  ENSG00000107968_9 (sequence is synthesized)
agggagggtctgttctggagaaactggagagctgtggaccaatgagagaatttgaaattatttgggtgacaaagcatgttctcaagggacttgattttctacactcaaagaaagtgatcc

SEQ ID NO: 164726 - DNA, 120 bp, Artificial Sequence
  ENSG00000107968_10 (sequence is synthesized)
atcatgatattaaacctagcaacattgttttcatgtccacaaaagctgttttggtggattttggcctaagtgttcaaatgaccgaagatgtctattttcctaaggacctccgaggaacag

SEQ ID NO: 164727 - DNA, 120 bp, Artificial Sequence
  ENSG00000107968_11 (sequence is synthesized)
agacgggcaccccaccctgggtgaagcgctaccctcgctcagcctatccctcctacctgtacataatccacaagcaagcacctccactggaagacattgcagatgactgcagtccaggga

SEQ ID NO: 164728 - DNA, 120 bp, Artificial Sequence
  ENSG00000107968_12 (sequence is synthesized)
tgagagagctgatagaagcttccctggagagaaaccccaatcaccgcccaagagccgcagacctactaaaacatgaggccctgaacccgcccagagaggatcagccacgctgtcagagtc

SEQ ID NO: 164729 - DNA, 120 bp, Artificial Sequence
  ENSG00000107968_13 (sequence is synthesized)
tggactctgccctcttggagcgcaagaggctgctgagtaggaaggagctggaacttcctgagaacattgctgattcttcgtgcacaggaagcaccgaggaatctgagatgctcaagaggc

SEQ ID NO: 164730 - DNA, 120 bp, Artificial Sequence
  ENSG00000107968_14 (sequence is synthesized)
aacgctctctctacatcgacctcggcgctctggctggctacttcaatcttgttcggggaccaccaacgcttgaatatggctgaaggatgccatgtttgctctaaattaagacagcattga

SEQ ID NO: 164731 - DNA, 120 bp, Artificial Sequence
  ENSG00000107968_15 (sequence is synthesized)
tctcctggaggctggttctgctgcctctacacaggggccctgtacagtgaatggtgccattttcgaaggagcagtgtgacctcctgtgacccgtgaatgtgcctccaagcggccctgtgt

SEQ ID NO: 164732 - DNA, 120 bp, Artificial Sequence
  ENSG00000107968_16 (sequence is synthesized)
gtttgacatgtgaagctatttgatatgcaccaggtctcaaggttctcatttctcaggtgacgtgattctaaggcaggaatttgagagttcacagaaggatcgtgtctgctgactgtttca

SEQ ID NO: 164733 - DNA, 120 bp, Artificial Sequence
  ENSG00000107968_17 (sequence is synthesized)
ttcactgtgcactttgctcaaaattttaaaaataccaatcacaaggataatagagtagcctaaaattactattcttggttcttatttaagtatggaatattcattttactcagaatagct

SEQ ID NO: 164734 - DNA, 120 bp, Artificial Sequence
  ENSG00000107968_18 (sequence is synthesized)
gttttgtgtatattggtgtatattatataactctttgagcctttattggtaaattctggtatacattgaattcattataatttgggtgactagaacaacttgaagattgtagcaataagc

SEQ ID NO: 164735 - DNA, 120 bp, Artificial Sequence
  ENSG00000107968_19 (sequence is synthesized)
tggactagtgtcctaaaaatggctaactgatgaattagaagccatctgacagcaggccactagtgacagtttcttttgtgttcctatggaaacattttatactgtacatgctatgctgaa

SEQ ID NO: 164736 - DNA, 120 bp, Artificial Sequence
  ENSG00000107968_20 (sequence is synthesized)
gacattcaaaacgtgatgttttgaatgtggataaaactgtgtaaaccacataatttttgtacatcccaaaggatgagaatgtgacctttaagaaaaatgaaaacttttgtaaattattga

SEQ ID NO: 164737 - DNA, 120 bp, Artificial Sequence
  ENSG00000107968_21 (sequence is synthesized)
ttttgtaaattattgatgattttgtaattcttatgactaaattttcttttaagcatttgtatattaaaatagcatactgtgtatgttttatatcaaatgccttcatgaatctttcataca

SEQ ID NO: 164738 - DNA, 120 bp, Artificial Sequence
  ENSG00000107968_22 (sequence is synthesized)
attgtaaagtatgtgagtagtcttatgtaaagtatgtttttacattatgcaaataaaacccaatacttttgtccaatgtggttggtcaaatcaactgaataaattcagtattttgcctta

SEQ ID NO: 164739 - DNA, 120 bp, Artificial Sequence
  ENSG00000107968_23 (sequence is synthesized)
aaatcctgttgccaatccttgtatgtcagtttcccatgggtcttgaatgcaaatacaaatatcgtaaactaaatatttgtgttttctttcctagactctccagaaagagcaacagtaatg

SEQ ID NO: 164740 - DNA, 120 bp, Artificial Sequence
  ENSG00000107968_24 (sequence is synthesized)
accctgcaaccgggcagtctctttctgtttacggagagaaaggggaaatggaaaagtcggggaggcggtggctggcgtccgctgcgccgcccctgggcaggctcagacgccgtgagtcag

SEQ ID NO: 164741 - DNA, 120 bp, Artificial Sequence
  ENSG00000107968_25 (sequence is synthesized)
cgaccacaggaatctggaattttattaaacatggtacgtttctttccgatcagttgggtgctatgtgctcagctttcctactgcagcttcatttaatgcagagtggtgtttgaatttggc

SEQ ID NO: 164742 - DNA, 120 bp, Artificial Sequence
  ENSG00000107968_26 (sequence is synthesized)
ttagatgggctggcaggcatgattttaaaaaatgtaatcatcagtaagaagtacttccatgttaaagatgcaaaaaaaaaagtcttcattaaaatttctatttaaagattcttgatcata

SEQ ID NO: 164743 - DNA, 120 bp, Artificial Sequence
  ENSG00000107968_27 (sequence is synthesized)
cgtaagtatctttggacatatacctttttggctcaaagagactagttattcaggagacaaacaagctccttcctgtaatctgaagaccctccatggagggtggaaagctccctcagagca

SEQ ID NO: 164744 - DNA, 120 bp, Artificial Sequence
  ENSG00000107968_28 (sequence is synthesized)
cgcggggaagcggggacccgctgtcactgcgcctcccgctgccgacgccgcctggacggccgcactctccctgcccgagacccgactctccagaaagagcaacagtaatggagtacatga

SEQ ID NO: 164745 - DNA, 120 bp, Artificial Sequence
  ENSG00000107984_0 (sequence is synthesized)
gcagagctctgtgctccctgcagtcaggactctgggaccgcagggggctcccggaccctgactctgcagccgaaccggcacggtttcgtggggacccaggcttgcaaagtgacggtcatt

SEQ ID NO: 164746 - DNA, 120 bp, Artificial Sequence
  ENSG00000107984_1 (sequence is synthesized)
ttctctttctttctccctcttgagtccttctgagatgatggctctgggcgcagcgggagctacccgggtctttgtcgcgatggtagcggcggctctcggcggccaccctctgctgggagt

SEQ ID NO: 164747 - DNA, 120 bp, Artificial Sequence
  ENSG00000107984_2 (sequence is synthesized)
gagcgccaccttgaactcggttctcaattccaacgctatcaagaacctgcccccaccgctgggcggcgctgcggggcacccaggctctgcagtcagcgccgcgccgggaatcctgtaccc

SEQ ID NO: 164748 - DNA, 120 bp, Artificial Sequence
  ENSG00000107984_3 (sequence is synthesized)
gggcgggaataagtaccagaccattgacaactaccagccgtacccgtgcgcagaggacgaggagtgcggcactgatgagtactgcgctagtcccacccgcggaggggacgcaggcgtgca

SEQ ID NO: 164749 - DNA, 120 bp, Artificial Sequence
  ENSG00000107984_4 (sequence is synthesized)
aatctgtctcgcctgcaggaagcgccgaaaacgctgcatgcgtcacgctatgtgctgccccgggaattactgcaaaaatggaatatgtgtgtcttctgatcaaaatcatttccgaggaga

SEQ ID NO: 164750 - DNA, 120 bp, Artificial Sequence
  ENSG00000107984_5 (sequence is synthesized)
aattgaggaaaccatcactgaaagctttggtaatgatcatagcaccttggatgggtattccagaagaaccaccttgtcttcaaaaatgtatcacaccaaaggacaagaaggttctgtttg

SEQ ID NO: 164751 - DNA, 120 bp, Artificial Sequence
  ENSG00000107984_6 (sequence is synthesized)
tctccggtcatcagactgtgcctcaggattgtgttgtgctagacacttctggtccaagatctgtaaacctgtcctgaaagaaggtcaagtgtgtaccaagcataggagaaaaggctctca

SEQ ID NO: 164752 - DNA, 120 bp, Artificial Sequence
  ENSG00000107984_7 (sequence is synthesized)
tagaaatattccagcgttgttactgtggagaaggtctgtcttgccggatacagaaagatcaccatcaagccagtaattcttctaggcttcacacttgtcagagacactaaaccagctatc

SEQ ID NO: 164753 - DNA, 120 bp, Artificial Sequence
  ENSG00000107984_8 (sequence is synthesized)
caaatgcagtgaactccttttatataatagatgctatgaaaaccttttatgaccttcatcaactcaatcctaaggatatacaagttctgtggtttcagttaagcattccaataacacctt

SEQ ID NO: 164754 - DNA, 120 bp, Artificial Sequence
  ENSG00000107984_9 (sequence is synthesized)
ccaaaaacctggagtgtaagagctttgtttctttatggaactcccctgtgattgcagtaaattactgtattgtaaattctcagtgtggcacttacctgtaaatgcaatgaaacttttaat

SEQ ID NO: 164755 - DNA, 120 bp, Artificial Sequence
  ENSG00000107984_10 (sequence is synthesized)
tatttttctaaaggtgctgcactgcctatttttcctcttgttatgtaaatttttgtacacattgattgttatcttgactgacaaatattctatattgaactgaagtaaatcatttcagct

SEQ ID NO: 164756 - DNA, 120 bp, Artificial Sequence
  ENSG00000107984_11 (sequence is synthesized)
tatagttcttaaaagcataaccctttaccccatttaattctagagtctagaacgcaaggatctcttggaatgacaaatgataggtacctaaaatgtaacatgaaaatactagcttatttt

SEQ ID NO: 164757 - DNA, 120 bp, Artificial Sequence
  ENSG00000107984_12 (sequence is synthesized)
ctgaaatgtactatcttaatgcttaaattatatttccctttaggctgtgatagtttttgaaataaaatttaacatttaatatcatgaaatgttataagtagacatacattttgggattgt

SEQ ID NO: 164758 - DNA, 120 bp, Artificial Sequence
  ENSG00000107984_13 (sequence is synthesized)
gatcttagaggtttgtgtgtgtgtacgtatgtgtgtgttctacaagaacggaagtgtgatatgtttaaagatgatcagagaaaagacagtgtctaaatataagacaatattgatcagctc

SEQ ID NO: 164759 - DNA, 120 bp, Artificial Sequence
  ENSG00000107984_14 (sequence is synthesized)
tagaataactttaaagaaagacgtgttctgcattgataaactcaaatgatcatggcagaatgagagtgaatcttacattactactttcaaaaatagtttccaataaattaataataccta

SEQ ID NO: 164760 - DNA, 120 bp, Artificial Sequence
  ENSG00000107984_15 (sequence is synthesized)
gagaggggtcgggcactcagaggatgctctgaccttgaaagggtcctatctggagacgagggagtagaacgtgctgaatgtgtgcggttcagggagcatttggtaaccctgcatttggga

SEQ ID NO: 164761 - DNA, 120 bp, Artificial Sequence
  ENSG00000107984_16 (sequence is synthesized)
gcagtgggcagtaacaggttttggagaggtggacagataaggactgtgatcagcgcccgggtccaagagggcgggtacctggacgtctgggtgcctcaccctctccccgaacccttccca

SEQ ID NO: 164762 - DNA, 120 bp, Artificial Sequence
  ENSG00000107984_17 (sequence is synthesized)
aggtgagtttcatatttcaagttttgtttaacctgaaatctattgattggaatgaggatacggatacagtattttaaagaaaacccacaggaataaaatctaaattttctttgcatttgt

SEQ ID NO: 164763 - DNA, 120 bp, Artificial Sequence
  ENSG00000108001_0 (sequence is synthesized)
ccgccaagccccgagcgccgctgctcgaggaaacgctttcggccgggagctgcggccgccgccagcagttttcatgtttgggattcaggagaatattccgcgcggggggacgaccatgaa

SEQ ID NO: 164764 - DNA, 120 bp, Artificial Sequence
  ENSG00000108001_1 (sequence is synthesized)
ggaggagccgctgggcagcggcatgaacccggtgcgctcgtggatgcacacggcgggcgtggtggacgccaacacggccgcccagagcggcgtggggctggcgcgggcgcacttcgagaa

SEQ ID NO: 164765 - DNA, 120 bp, Artificial Sequence
  ENSG00000108001_2 (sequence is synthesized)
gcagccgccttccaacctccggaaatccaatttcttccacttcgtgctggcgctctacgataggcaggggcagccggtggagattgaaaggaccgcttttgtggactttgtggagaaaga

SEQ ID NO: 164766 - DNA, 120 bp, Artificial Sequence
  ENSG00000108001_3 (sequence is synthesized)
gaaagagccaaacaacgagaaaaccaacaacggcatccactataaactccagttattgtacagcaacggagtcagaacagagcaagatctgtatgttcgcctcatagattcaatgaccaa

SEQ ID NO: 164767 - DNA, 120 bp, Artificial Sequence
  ENSG00000108001_4 (sequence is synthesized)
acaggccatcgtctacgagggccaggacaagaacccggagatgtgccgtgtgctgctgacccacgagatcatgtgcagccggtgctgtgacaagaaaagttgtggcaatagaaacgaaac

SEQ ID NO: 164768 - DNA, 120 bp, Artificial Sequence
  ENSG00000108001_5 (sequence is synthesized)
gccctcagaccctgtaatcattgacagattctttctaaagtttttcctcaagtgcaatcagaactgtttgaagaatgcaggcaaccctcgagatatgcggagattccaggttgttgtatc

SEQ ID NO: 164769 - DNA, 120 bp, Artificial Sequence
  ENSG00000108001_6 (sequence is synthesized)
gacaacagtcaacgtggacggccacgtgctggccgtgtcagacaacatgtttgtgcacaacaattccaaacacgggaggcgggcccgccgcctagacccgtcagaagccactccgtgcat

SEQ ID NO: 164770 - DNA, 120 bp, Artificial Sequence
  ENSG00000108001_7 (sequence is synthesized)
caaggccatcagtcccagtgaaggctggaccacggggggtgccaccgtcatcataattggcgacaacttctttgacgggctgcaagttgtattcggaactatgttggtgtggagcgagct

SEQ ID NO: 164771 - DNA, 120 bp, Artificial Sequence
  ENSG00000108001_8 (sequence is synthesized)
gataactccccatgccatccgagtccagaccccgccgaggcacattcctggcgtcgtcgaagtgaccctctcctacaaatccaagcagttctgcaaaggtgctcctgggcgctttgtcta

SEQ ID NO: 164772 - DNA, 120 bp, Artificial Sequence
  ENSG00000108001_9 (sequence is synthesized)
caccgcccttaatgaaccaaccatagattacggctttcagaggttgcagaaagtgatcccaagacatccgggtgatcccgaaaggttacccaaggaggtgttactgaagcgggcggcgga

SEQ ID NO: 164773 - DNA, 120 bp, Artificial Sequence
  ENSG00000108001_10 (sequence is synthesized)
cctggtggaagccttatacggaatgcctcacaacaaccaggagatcatcttgaagcgagcggcggacatcgccgaggcgctgtacagcgttccccgcaatcacaaccagatccccaccct

SEQ ID NO: 164774 - DNA, 120 bp, Artificial Sequence
  ENSG00000108001_11 (sequence is synthesized)
gggcaacaaccctgcacacacgggcatgatgggcgtcaactccttcagcagccagctagccgtcaacgtgtcagagacgtcacaagccaacgaccaagtcggctacagtcgcaatacaag

SEQ ID NO: 164775 - DNA, 120 bp, Artificial Sequence
  ENSG00000108001_12 (sequence is synthesized)
cagcgtgtccccgcgaggctacgtccccagcagtactccccagcagtccaattacaacacagtcagcactagcatgaatggatatggaagtggcgccatggccagtctaggggtccctgg

SEQ ID NO: 164776 - DNA, 120 bp, Artificial Sequence
  ENSG00000108001_13 (sequence is synthesized)
ctcgcctggatttcttaatggctcctccgctaactctccctacggcatgaaacagaagagcgccttcgcgcccgtggtccggccccaagcctctcctcctccttcctgcaccagcgccaa

SEQ ID NO: 164777 - DNA, 120 bp, Artificial Sequence
  ENSG00000108001_14 (sequence is synthesized)
cgggaatggactgcaagctatgtctgggctggtagtcccgccaatgtgagggacttctgtttaccttccgcagcacccagcatcaaaggacggacttcaggggacacgtttagtatatta

SEQ ID NO: 164778 - DNA, 120 bp, Artificial Sequence
  ENSG00000108001_15 (sequence is synthesized)
agacatgctgatggaaacagtatcttcaaaaaaatcagcagcaattgaaatgctacaaaagactttgtttaaagattttatttaaactattaagaatcaacatgcaaacagcctacttct

SEQ ID NO: 164779 - DNA, 120 bp, Artificial Sequence
  ENSG00000108001_16 (sequence is synthesized)
tcatgaacaattccattttattgactgaacttttctcatattttcacatttctcagtcctgaagaataaggaaaacaaagcgacgcctattttgtataaagtttccgactccgtcttggc

SEQ ID NO: 164780 - DNA, 120 bp, Artificial Sequence
  ENSG00000108001_17 (sequence is synthesized)
catgtctagtaattgctatgtgttgggagaaactttgtgaatgcaccattttgatgatcatgaaacgctgatgaaaaatgcctccaaacatttttctgtactcatacttagattcacaat

SEQ ID NO: 164781 - DNA, 120 bp, Artificial Sequence
  ENSG00000108001_18 (sequence is synthesized)
aggaggtatgagccatcagactggaaaaaaggatgactatatgatgaggagaaactggggtggcagggagggagggagggtttatcactgcttaacttcatcttcatgaaatgaaacttt

SEQ ID NO: 164782 - DNA, 120 bp, Artificial Sequence
  ENSG00000108001_19 (sequence is synthesized)
gtaacttattgtagttagaaattgtaactttgatattgaattctcttgccttcaacaagcacactgacagagaaaaaatgctactgtctgttggttccaatattctcccactgctagagc

SEQ ID NO: 164783 - DNA, 120 bp, Artificial Sequence
  ENSG00000108001_20 (sequence is synthesized)
ttcctgttaagcaagtgtgatctgcaacattttttcaacttttgctagcactgtatactattgcattcttaggctactgtgaggtctatgtttcttgtaccagaaattgtccttttgact

SEQ ID NO: 164784 - DNA, 120 bp, Artificial Sequence
  ENSG00000108001_21 (sequence is synthesized)
tctagatccttcttccctaatgtgttttgtatgtggttataaaattgtagacttttgtgattttgccaaagttgtagctaaatatttatacacttgtcttgaatttttttcagatccact

SEQ ID NO: 164785 - DNA, 120 bp, Artificial Sequence
  ENSG00000108001_22 (sequence is synthesized)
taaaatatttagaaaaacaagttttattccttatgtgtcttataaggaataaaatggtcttcatttgacacttactttcccatgaacacttgcagttgctaagggactttattttgtaac

SEQ ID NO: 164786 - DNA, 120 bp, Artificial Sequence
  ENSG00000108001_23 (sequence is synthesized)
atatcaattataaatattgtatttatctttgaaattttgtacattgcttttcccaccttttcctttttcttctttcttgtctgtattggtttttgatcacggcctggtgttgtgatactg

SEQ ID NO: 164787 - DNA, 120 bp, Artificial Sequence
  ENSG00000108001_24 (sequence is synthesized)
ggaagagcattagccaagaacttgtctctttgatctgtttcgttaagctgaaccagtgtctttacatttcatttgtacttcaaaaaatatgctattgtttagactttccatccttttttt

SEQ ID NO: 164788 - DNA, 120 bp, Artificial Sequence
  ENSG00000108001_25 (sequence is synthesized)
ttttattttgaggaaaagtcaaattcattgtttatttttatattatttttaagttatctgaacaaatacttttgaaaaaaaagtttgttgtatagtcaaaacaaatcggtgccacccggc

SEQ ID NO: 164789 - DNA, 120 bp, Artificial Sequence
  ENSG00000108001_26 (sequence is synthesized)
cgtgacaaatcctagtagattctgtgcatgtggagcggccgcgaagaggtgacaccgtttggggctgtgtccttattttattttatttttttgtagaatgtaaaaagtcattttagatgc

SEQ ID NO: 164790 - DNA, 120 bp, Artificial Sequence
  ENSG00000108001_27 (sequence is synthesized)
cacccattgactttgccacatagctgaactgtgtttactggaaaaattcagaggcctaaagtttaaaataaaatttacttctgatgttttaattaaaatgtttgccacattaacttttct

SEQ ID NO: 164791 - DNA, 120 bp, Artificial Sequence
  ENSG00000108001_28 (sequence is synthesized)
gatgccttaaaagtgaacttctttaaagaacctttgtgctattttatcacaggcttacactacaattgttaataaatacttcatttggagatgtatggtgtaaaacacacaaacacacac

SEQ ID NO: 164792 - DNA, 120 bp, Artificial Sequence
  ENSG00000108001_29 (sequence is synthesized)
aaaaaagcacaagcccgctgcatgacccgtctctcctttctgggactatttctgctgcgtcctgcaccctcctgggcccacctccgattcacagaggtttcagggggacccaaatcactg

SEQ ID NO: 164793 - DNA, 120 bp, Artificial Sequence
  ENSG00000108001_30 (sequence is synthesized)
ctggttttcaatttttttttaacaatacatttttgtggtcagttccaacagcactgtccgtacttttaaaactggaatgacctccttcagatatcgtgcctcttagtgccaaacccacag

SEQ ID NO: 164794 - DNA, 120 bp, Artificial Sequence
  ENSG00000108001_31 (sequence is synthesized)
tgagaccaaaagtgtcaggtgtttttttttttttctttctcctttgcactaagtgctttgcagacacggcacagcaaacattttgcaaactgcagcagaaatcgaatttaaaacaaaaag

SEQ ID NO: 164795 - DNA, 120 bp, Artificial Sequence
  ENSG00000108001_32 (sequence is synthesized)
gagggactttaaaataccttcttgacaaaaatcaacaatgcacaacttacaaagtgttcattctagggacaaaattaaataaacagaatgtccccaggagtcagcaggtcacagtctggc

SEQ ID NO: 164796 - DNA, 120 bp, Artificial Sequence
  ENSG00000108001_33 (sequence is synthesized)
tttgtgatggttgacaaggtctagctacatgggaaagcctgagaagtcactttggaactaaattgcctccattttattttgtacgagtaagggtttgatctacaaaagagctcacatgga

SEQ ID NO: 164797 - DNA, 120 bp, Artificial Sequence
  ENSG00000108001_34 (sequence is synthesized)
cgcactgagaacgcctgccagcttccccatgccctcacttggtttgtgttttaggttaagtagtcaatgcccacatcacttcactgtctcaagactgagcacttcactaaatggtagatt

SEQ ID NO: 164798 - DNA, 120 bp, Artificial Sequence
  ENSG00000108001_35 (sequence is synthesized)
ttactgttaaagaccctacaataagattgttttatctgtacattttttcagatatttaactgtataaaaatgttcattttacacaatatttaattaaagtatttcttgtctgtgaatttc

SEQ ID NO: 164799 - DNA, 120 bp, Artificial Sequence
  ENSG00000108001_36 (sequence is synthesized)
cggcatagtgccgtccagccccaccatggcagcctcttcggtcaccctcccttcaaactgtagcagcacacacggcattttctcattctcacctgccaatgtcatctccgcagtgaaaca

SEQ ID NO: 164800 - DNA, 120 bp, Artificial Sequence
  ENSG00000108010_0 (sequence is synthesized)
actggattgcttctgtctggcggcggcagcatggcggcgggggcggctgaggcagctgtagcggccgtggaggaggtcggctcagccgggcagtttgaggagctgctgcgcctcaaagcc

SEQ ID NO: 164801 - DNA, 120 bp, Artificial Sequence
  ENSG00000108010_1 (sequence is synthesized)
aagtccctccttgtggtccatttctgggcaccatgggctccacagtgtgcacagatgaacgaagttatggcagagttagctaaagaactccctcaagtttcatttgtgaagttggaagct

SEQ ID NO: 164802 - DNA, 120 bp, Artificial Sequence
  ENSG00000108010_2 (sequence is synthesized)
gaaggtgttcctgaagtatctgaaaaatatgaaattagctctgttcccacttttctgtttttcaagaattctcagaaaatcgaccgattagatggtgcacatgccccagagttgaccaaa

SEQ ID NO: 164803 - DNA, 120 bp, Artificial Sequence
  ENSG00000108010_3 (sequence is synthesized)
aaagttcagcgacatgcatctagtggctccttcctacccagcgctaatgaacatcttaaagaagatctcaaccttcgcttgaagaaattgactcatgctgccccctgcatgctgtttatg

SEQ ID NO: 164804 - DNA, 120 bp, Artificial Sequence
  ENSG00000108010_4 (sequence is synthesized)
aaaggaactcctcaagaaccacgctgtggtttcagcaagcagatggtggaaattcttcacaaacataatattcagtttagcagttttgatatcttctcagatgaagaggttcgacaggga

SEQ ID NO: 164805 - DNA, 120 bp, Artificial Sequence
  ENSG00000108010_5 (sequence is synthesized)
ccaaagctcccaaattagaggaaaggctcaaagtgctgacaaataaagcttctgtgatgctctttatgaaaggaaacaaacaggaagcaaaatgtggattcagcaaacaaattctggaaa

SEQ ID NO: 164806 - DNA, 120 bp, Artificial Sequence
  ENSG00000108010_6 (sequence is synthesized)
tactaaatagtactggtgttgaatatgaaacattcgatatattggaggatgaagaagttcggcaaggattaaaagcttactcaaattggccaacataccctcagctgtatgtgaaagggg

SEQ ID NO: 164807 - DNA, 120 bp, Artificial Sequence
  ENSG00000108010_7 (sequence is synthesized)
agctggtgggaggattggatattgtgaaggaactgaaagaaaatggtgaattgctgcctatactgagaggagaaaattaataaatcttaaacttggtgcccaactattgtaagaaatatt

SEQ ID NO: 164808 - DNA, 120 bp, Artificial Sequence
  ENSG00000108010_8 (sequence is synthesized)
taattacattgggagcagttcatgatttagtcctcagaaatggactaggaatagaaaattcctgctttctcagttacatgttttgtgtatttcacaatgtcgtgctaaataaatgtatgt

SEQ ID NO: 164809 - DNA, 120 bp, Artificial Sequence
  ENSG00000108010_9 (sequence is synthesized)
tacatttttttcccaccaaaaatagaatgcaataaacatcttcaaattattaacaataattgtatgaaaaaagtgtatctttacagcagtattaaacatacagctactataattaaccca

SEQ ID NO: 164810 - DNA, 77 bp, Artificial Sequence
  ENSG00000108010_10 (sequence is synthesized)
ggtgcccaactattactatggctcattgcagcctcgacttctcggggccaagcgatcctcctgcctcagccttctga

SEQ ID NO: 164811 - DNA, 120 bp, Artificial Sequence
  ENSG00000108010_11 (sequence is synthesized)
cctcagcctcccaaagtgctggaatttacaggtaggaccaccacacttggtccacttacttataataaacattgatttggtcgttcaggttcctttggtcctcctattgagaacagtttg

SEQ ID NO: 164812 - DNA, 120 bp, Artificial Sequence
  ENSG00000108010_12 (sequence is synthesized)
tcaggttcctttggtcctcctattgagaacagtttgaagtccatgaaaattttaacaatatttttgatcctgaatctaacatatttgaaaaatagttgctccactaggcttccacagtgc

SEQ ID NO: 164813 - DNA, 120 bp, Artificial Sequence
  ENSG00000108010_13 (sequence is synthesized)
aggcttcaaatgggatggctaaattcacctcatggttcttagttttttttgtacttgtggcacattctcttcatatattaccccaccctgtttgtttgggcagttaagatgctggtactg

SEQ ID NO: 164814 - DNA, 120 bp, Artificial Sequence
  ENSG00000108010_14 (sequence is synthesized)
tctggtggcgataaggaaagggaaacagaagtcagtaattcagacaagaataaacaggatgaaatgcatctattcctaggtaagattagcccaccacctccacactgctgctgtctcttc

SEQ ID NO: 164815 - DNA, 120 bp, Artificial Sequence
  ENSG00000108010_15 (sequence is synthesized)
agctcaggctgtttttctctgttttgattgtgtaaagagtagagtgctgatttgtgtgttacagagggtggtctgtacaagtcataaagctcgacatggccttgcttcctgctaggtgtt

SEQ ID NO: 164816 - DNA, 120 bp, Artificial Sequence
  ENSG00000108010_16 (sequence is synthesized)
ttgtataagtaaaacttcttaaatgtagatagaaatagaatttttactgaaattttatgaagccattggccgcagggatgtgtgtcatggaggagggctccatacttttttggtatactt

SEQ ID NO: 164817 - DNA, 120 bp, Artificial Sequence
  ENSG00000108010_17 (sequence is synthesized)
atctcaaacttaattcatttgcatactgctttttctctaagtgccaactgtcctagtatattttctaagtcaacttttactttcactttatcctaagcaagaatatctttggcatcacag

SEQ ID NO: 164818 - DNA, 120 bp, Artificial Sequence
  ENSG00000108010_18 (sequence is synthesized)
actcagtaagcctgtttttttctaatgcacatacaaataaataaaatgcacaacttttaacataaatggctgcctccaatttgggaaatactgttctggccagaggccgttgctctgata

SEQ ID NO: 164819 - DNA, 120 bp, Artificial Sequence
  ENSG00000108010_19 (sequence is synthesized)
atgtcatgtggttagtgcattttaggaagacctcctttccctttggttgactcctgcaggacataagatatcagtgacgttatcctttgttgagccatcctggtttgagtcaggatgagt

SEQ ID NO: 164820 - DNA, 120 bp, Artificial Sequence
  ENSG00000108010_20 (sequence is synthesized)
gttgagagtttttggggagttgcccctgtgtcctatattattttatcctcttaaagtctgatggtctttggctccactgactccaggtaagttggggtgacagtgcagcatatttctatt

SEQ ID NO: 164821 - DNA, 120 bp, Artificial Sequence
  ENSG00000108010_21 (sequence is synthesized)
ttctagttgtttctggccagacatggggaaggtcaagacatcttgttcatgcaaacggattgatggccattcctaatctgattttattagtgtattttaggaagtaaagtaagattcttg

SEQ ID NO: 164822 - DNA, 120 bp, Artificial Sequence
  ENSG00000108010_22 (sequence is synthesized)
agcccagctgaacttcccctattgaattttctaacaaaaagagagtttgcgtatgggtttataattgagcctgctcttgtagaaatgttttatcagaattgaaatcctctctgatcccca

SEQ ID NO: 164823 - DNA, 120 bp, Artificial Sequence
  ENSG00000108010_23 (sequence is synthesized)
aattctagagacaaagttgttttctgaatttgagaaatctgttcagttcacaaggaaaggtgacaatgtgtcatttggatgttgtcccacacgtgaggcctcgttgggtgcttgtggtgg

SEQ ID NO: 164824 - DNA, 120 bp, Artificial Sequence
  ENSG00000108010_24 (sequence is synthesized)
gagggaccctccaggcaggctttgtatggagggttttcatgtctggacacatttctgttccgagaagcactgctgcgtttttgggagcgtggaccctggccagagcctgtggccagctct

SEQ ID NO: 164825 - DNA, 120 bp, Artificial Sequence
  ENSG00000108010_25 (sequence is synthesized)
gcctgccctccctttcttggcctgctcttttgagtatgtagtggggctttgtgtggcatcctgccaggttaaagctgcatggtgcttaggatagagctggtgctgtggggaggctcttga

SEQ ID NO: 164826 - DNA, 120 bp, Artificial Sequence
  ENSG00000108010_26 (sequence is synthesized)
tgatgggggctgccatctatttgcctgttaactcttagaaaccaaacctcaaatgtcagaatttcctttctagaagaggctggttgaataggaaccagaaaggccctcatacaggcaggg

SEQ ID NO: 164827 - DNA, 120 bp, Artificial Sequence
  ENSG00000108010_27 (sequence is synthesized)
ctgttcactcctcttgacttgcgtgtttgtgccttccttgtaggaaggcttcttagggaattgttatctgtttaggggaaataagcctgcaggaatgaacttttttttaaaataaaaact

SEQ ID NO: 164828 - DNA, 120 bp, Artificial Sequence
  ENSG00000108010_28 (sequence is synthesized)
cttgatcaaaaatggaaagaaaaaaaccagtgaaacaggctaggtagtttgtggaattctcctttgcaggtgaggggagaaagcagctatctcaagggcacagctacagattgggagctg

SEQ ID NO: 164829 - DNA, 120 bp, Artificial Sequence
  ENSG00000108010_29 (sequence is synthesized)
gggcttccatccagggtctgggacacccaaaccttaggcttgcccctcccgggaggcctccccctcagagctatgtgggatgcagttgcctttttacctgtgatgagaaactggtgaatt

SEQ ID NO: 164830 - DNA, 120 bp, Artificial Sequence
  ENSG00000108010_30 (sequence is synthesized)
gccaggattctggctctggcttcagtctgcccctttccggggattagagggcattaaccctacttcctacagccaagcagctcttcctcatgactctactttctaactccgggggttgac

SEQ ID NO: 164831 - DNA, 120 bp, Artificial Sequence
  ENSG00000108010_31 (sequence is synthesized)
tgattgatttgaagaccgccttgttgatgaatgtgttgaaacttgctatcataatgtaaatgctccttaataaaataacaggacctggtgggttcagttgccttgcccacgtgtgactta

SEQ ID NO: 164832 - DNA, 120 bp, Artificial Sequence
  ENSG00000108010_32 (sequence is synthesized)
tcagacacaagctgcagtagcttcctgatgcctcattcaccaggatgggtaactttaaagacaagttttataactggcatcccatctggtttcagagtcttgggggcttttttcatacag

SEQ ID NO: 164833 - DNA, 120 bp, Artificial Sequence
  ENSG00000108010_33 (sequence is synthesized)
ctttgtctgatatttagagacattcagattcagaagccatgagttcagttagctcatgggccgggcacgtgcactgactcactggctgcagcagaacacgttgagggagtcttggtgcac

SEQ ID NO: 164834 - DNA, 120 bp, Artificial Sequence
  ENSG00000108010_34 (sequence is synthesized)
ttaggtcactgtaaggttctagggctgggagctgggatttgaaccaggatctgtcagcgcagccccagtgctgtgcttgaagcctcgtgccacactggctttgaggtagcacgctgcaag

SEQ ID NO: 164835 - DNA, 120 bp, Artificial Sequence
  ENSG00000108010_35 (sequence is synthesized)
ttagtgagtggagttgcccaagtctggggcttctgaaatgacctggtatttttatgttcctgttagaaatggtgtggctttcacaaattaagtgccaggctgggcacaatggctcgtgct

SEQ ID NO: 164836 - DNA, 84 bp, Artificial Sequence
  ENSG00000108010_36 (sequence is synthesized)
gttgcttgagctccggagcttgagaccagcctgagcaacatggcgaaacctcatatctacaaaaaataaaaaattaactggtca

SEQ ID NO: 164837 - DNA, 120 bp, Artificial Sequence
  ENSG00000108010_37 (sequence is synthesized)
gagtgcagtggtgcagtcatggctcacggcatccttgacctcccaggctcaagatcctcccccgtcagcctcctcagtagctgagatgacaggcatgtgccaccatgcccggctgtgttt

SEQ ID NO: 164838 - DNA, 87 bp, Artificial Sequence
  ENSG00000108010_38 (sequence is synthesized)
ctcccccgtcagcctcctcagtagctgagatgacaggcatgtgccaccatgcccggctgtgttttgattttttttttttgtagagat

SEQ ID NO: 164839 - DNA, 120 bp, Artificial Sequence
  ENSG00000108010_39 (sequence is synthesized)
agtgttgggattacaggccctagccaccatgcctgacctaagatcagttttcttaaatttgacagttgctacttttcaaaattcaaacctttctaaataaaagtaagttgattatttgca

SEQ ID NO: 164840 - DNA, 120 bp, Artificial Sequence
  ENSG00000108018_0 (sequence is synthesized)
ctcccgcgatgggaaaagttggcgccggcggcggctcccaagcccggctgagcgcgctcctcgccggcgcggggctcttgatcctctgcgccccgggcgtctgcggcggcggctcctgct

SEQ ID NO: 164841 - DNA, 120 bp, Artificial Sequence
  ENSG00000108018_1 (sequence is synthesized)
gcccctcgccgcaccccagctccgctccacgctcggcctcgacccctaggggcttttcccaccaggggcggccaggcagggctcctgccacgcccctgcccctcgtagtgcgtcccctgt

SEQ ID NO: 164842 - DNA, 120 bp, Artificial Sequence
  ENSG00000108018_2 (sequence is synthesized)
tctcagtggcccccggggaccgagcgctatccctggagcgggctcggggcactggggcatccatggcggttgctgcacgctccggccggaggagacggagcggagcggatcaggagaagg

SEQ ID NO: 164843 - DNA, 120 bp, Artificial Sequence
  ENSG00000108018_3 (sequence is synthesized)
cagaacggggagagggcgcgagtcggagcccccggggagtgctaagagatggagggcagcaggagcctgggactcgggagcgggacccggacaaagccacccgcttccggatggaggagc

SEQ ID NO: 164844 - DNA, 120 bp, Artificial Sequence
  ENSG00000108018_4 (sequence is synthesized)
tgagactgaccagcaccacgtttgcgctgacgggagactcagcacacaaccaagccatggtccactggtctggccacaacagcagcgtgattctcattttgacaaagctctatgactata

SEQ ID NO: 164845 - DNA, 120 bp, Artificial Sequence
  ENSG00000108018_5 (sequence is synthesized)
acctggggagcatcacagagagctcgctttggaggtcaaccgattatggaacaacctatgagaagctgaatgataaagttggtttgaaaaccattttgagctatctctatgtgtgtccta

SEQ ID NO: 164846 - DNA, 120 bp, Artificial Sequence
  ENSG00000108018_6 (sequence is synthesized)
ccaacaagcgtaagataatgttactcacagacccggagattgagagcagtttattgatcagctcagatgaaggggcaacttatcaaaagtaccggctgaacttctacattcaaagcttgc

SEQ ID NO: 164847 - DNA, 120 bp, Artificial Sequence
  ENSG00000108018_7 (sequence is synthesized)
tttttcaccccaaacaagaagactggattctggcatacagtcaagaccaaaagttatacagctctgctgaatttgggagaagatggcagcttatccaagaaggggttgtaccaaacaggt

SEQ ID NO: 164848 - DNA, 120 bp, Artificial Sequence
  ENSG00000108018_8 (sequence is synthesized)
tctactggtctgtgatggggtcaaataaagaaccagaccttgtgcatcttgaggccagaactgtggatggtcattcacattatctaacttgccgaatgcagaactgtacagaggccaaca

SEQ ID NO: 164849 - DNA, 120 bp, Artificial Sequence
  ENSG00000108018_9 (sequence is synthesized)
ggaatcagccttttccaggctacattgacccagactctttgattgttcaggatcattatgtgtttgttcagctgacatcaggagggcggccacattactacgtgtcctaccgaaggaatg

SEQ ID NO: 164850 - DNA, 120 bp, Artificial Sequence
  ENSG00000108018_10 (sequence is synthesized)
catttgcccaaatgaagcttccgaaatatgctttgcccaaggacatgcatgttatcagcaccgatgagaatcaggtgttcgcagcggtccaagaatggaaccagaatgacacgtacaacc

SEQ ID NO: 164851 - DNA, 120 bp, Artificial Sequence
  ENSG00000108018_11 (sequence is synthesized)
tctacatctcagacacacgtggtgtctacttcaccctggccttggagaatgtccagagcagcagaggccctgagggcaacatcatgatcgacctctatgaggtagcagggataaagggaa

SEQ ID NO: 164852 - DNA, 120 bp, Artificial Sequence
  ENSG00000108018_12 (sequence is synthesized)
tgttcttggctaacaagaagattgacaaccaagtgaagactttcatcacatataacaaaggcagagactggcgtttgctgcaggcgccggacacggatctaaggggggaccccgtgcact

SEQ ID NO: 164853 - DNA, 120 bp, Artificial Sequence
  ENSG00000108018_13 (sequence is synthesized)
gcttgctgccctattgctcactacaccttcacctgaaggtctctgagaatccctacacatcagggatcattgccagcaaagacacagctccaagcatcatagtggcatcaggtaatatag

SEQ ID NO: 164854 - DNA, 120 bp, Artificial Sequence
  ENSG00000108018_14 (sequence is synthesized)
gttctgaattgtcagacactgacatcagcatgtttgtctcttcagatgcagggaacacctggagacagatctttgaagaagagcacagtgttttgtacctggatcaaggtggagtcctgg

SEQ ID NO: 164855 - DNA, 120 bp, Artificial Sequence
  ENSG00000108018_15 (sequence is synthesized)
ttgctatgaaacacacatctctcccaattcgacatctttggttgagttttgatgaagggagatcttggagcaaatacagtttcacatctattccactttttgtggatggggttctgggtg

SEQ ID NO: 164856 - DNA, 120 bp, Artificial Sequence
  ENSG00000108018_16 (sequence is synthesized)
agcctggagaagagactctcatcatgacagtgtttggacacttcagccaccgctctgaatggcagctggtcaaagtagattacaagtccatttttgatagacggtgtgccgaagaggact

SEQ ID NO: 164857 - DNA, 120 bp, Artificial Sequence
  ENSG00000108018_17 (sequence is synthesized)
acagaccttggcagctgcacagccagggggaagcatgtatcatgggagcaaaaaggatatataagaagcgaaaatcagagcggaagtgtatgcaaggaaaatatgcaggagctatggaat

SEQ ID NO: 164858 - DNA, 120 bp, Artificial Sequence
  ENSG00000108018_18 (sequence is synthesized)
ctgaaccctgtgtctgcactgaggctgattttgattgcgactatggttatgagcgacacagcaatggccagtgcctgccggcattttggttcaatccatcctctctgtcaaaggattgca

SEQ ID NO: 164859 - DNA, 120 bp, Artificial Sequence
  ENSG00000108018_19 (sequence is synthesized)
gcttgggacagagttacctcaatagtactgggtacaggaaggtggtttccaataattgcactgatggcgtaagggaacagtacactgccaaaccgcagaagtgcccagggaaagccccgc

SEQ ID NO: 164860 - DNA, 120 bp, Artificial Sequence
  ENSG00000108018_20 (sequence is synthesized)
gggggctgcggatagtcacggctgatggaaagctgacagcggaacaaggacacaacgtcactctcatggtgcaattagaagagggtgatgttcagcggacactcatccaagtggactttg

SEQ ID NO: 164861 - DNA, 120 bp, Artificial Sequence
  ENSG00000108018_21 (sequence is synthesized)
gcgatggtatcgcggtgtcttacgtcaatctcagctccatggaagatgggatcaaacacgtctatcagaacgtgggcattttccgtgtgaccgtgcaggtggacaacagtctgggttctg

SEQ ID NO: 164862 - DNA, 120 bp, Artificial Sequence
  ENSG00000108018_22 (sequence is synthesized)
acagcgccgtcctgtacttacatgtaacttgtcccttggagcacgtgcacctgtctcttccctttgtcaccacaaagaacaaagaggtcaatgcgacggcagtgctgtggcccagccaag

SEQ ID NO: 164863 - DNA, 120 bp, Artificial Sequence
  ENSG00000108018_23 (sequence is synthesized)
tgggcaccctcacttacgtgtggtggtacggaaacaacacggagcctttgatcaccttggagggaagcatatccttcagatttacttcagaaggaatgaataccatcacagtgcaggtct

SEQ ID NO: 164864 - DNA, 120 bp, Artificial Sequence
  ENSG00000108018_24 (sequence is synthesized)
cagctgggaatgccatcctacaagacacaaagaccatcgcagtatatgaggaattccggtctcttcgcttgtccttttctccaaacctggatgactacaacccggacatccctgagtgga

SEQ ID NO: 164865 - DNA, 120 bp, Artificial Sequence
  ENSG00000108018_25 (sequence is synthesized)
ggagggacatcggtcgagtcatcaaaaaatccctggtggaagccacaggggttccaggccagcacatcctggtggcggtgctccctggcttacccaccactgctgaactctttgtcctac

SEQ ID NO: 164866 - DNA, 120 bp, Artificial Sequence
  ENSG00000108018_26 (sequence is synthesized)
cctatcaggatccagctggagaaaacaaaaggtcaactgatgacctggagcagatatcagaattgctgatccacacgctcaaccaaaactcagtacacttcgagctgaagccaggagtcc

SEQ ID NO: 164867 - DNA, 120 bp, Artificial Sequence
  ENSG00000108018_27 (sequence is synthesized)
gagtccttgtccatgctgctcacttaacagcggcccccctggtggacctcactccaacccacagtggatctgccatgctgatgctgctctcagtggtgtttgtggggctggcagtgttcg

SEQ ID NO: 164868 - DNA, 120 bp, Artificial Sequence
  ENSG00000108018_28 (sequence is synthesized)
tcatctacaagtttaaaaggagagtagctttaccctcccctccctccccttctactcaacctggtgactcatctctccgattgcaaagagcaagacacgccactccgccttcaacgccaa

SEQ ID NO: 164869 - DNA, 120 bp, Artificial Sequence
  ENSG00000108018_29 (sequence is synthesized)
agcggggatctgctggggcacagtatgcaatttaaggaaaacccccaaaggctacaggcgacctgctgatcaggaaagaatttcgctcttgtcaagtacatcatccttcatgaccactaa

SEQ ID NO: 164870 - DNA, 120 bp, Artificial Sequence
  ENSG00000108018_30 (sequence is synthesized)
cctattttgccaggaagtatttccatagttgctgagaatcaaagcacaaaagaaatccctacctatgtaaatgtttgaatggaggacgccagtaaaaaaacaaaaacaaaaacaaaacaa

SEQ ID NO: 164871 - DNA, 120 bp, Artificial Sequence
  ENSG00000108018_31 (sequence is synthesized)
aacaaacactcactgcatcgggactttttaattcttcagacacagacaacaagggtttttagctttaagcctgtgcatgtggacaatactctgagaacatgtctggaggggcagtgtaca

SEQ ID NO: 164872 - DNA, 120 bp, Artificial Sequence
  ENSG00000108018_32 (sequence is synthesized)
ggtgctctattttaatggaaaacactcccctctccctctttcttcttctctctcttttttctgatcggtcgtgtttgtagaaaattcataacatatataggccaaggaaatctgcatgta

SEQ ID NO: 164873 - DNA, 120 bp, Artificial Sequence
  ENSG00000108018_33 (sequence is synthesized)
tttttggaaatattcttggctctagatttatcagctattttagcattaaaggctgatgggtggattagctaccccagctcctttcataagacacaaagacgtgcacaggagtttgaaacc

SEQ ID NO: 164874 - DNA, 120 bp, Artificial Sequence
  ENSG00000108018_34 (sequence is synthesized)
ctgagctgtttctctgttccactttccatactgtcatttcccttctaagttagctttggtagctctgttggtcagcagtggccacaaggctgctttctgcactctctgtggccacaggaa

SEQ ID NO: 164875 - DNA, 120 bp, Artificial Sequence
  ENSG00000108018_35 (sequence is synthesized)
caaagatgcgagttgaagatccctttgtgccggtagaataaggaaggaagggaggcagggaggcaaagcatgtcagaaacggaccttggtttcctgttcacctctttccaccatgattgc

SEQ ID NO: 164876 - DNA, 120 bp, Artificial Sequence
  ENSG00000108018_36 (sequence is synthesized)
ctccccttgcagctttccctactcctgccccaactgcagtaggaaatggaatcccattagttacccattgtcctgtcttcacatttgtttgtcatccatgtgtgaccatgatctgttgat

SEQ ID NO: 164877 - DNA, 120 bp, Artificial Sequence
  ENSG00000108018_37 (sequence is synthesized)
atctttgaatctcttccctccaaaccccaagtaagttgtccttcaactgttctcagtttttcttcccaaacatattgctagattctggacattaaccctgacgtttcctaaatactggcc

SEQ ID NO: 164878 - DNA, 120 bp, Artificial Sequence
  ENSG00000108018_38 (sequence is synthesized)
tggcctgtgccgcccctgcccccactactcacaagtttctgagccctttgtcagttttgtacattcccaagcatgccagcttctgtgcccatggaccttgctgcatcctgcacagcaggg

SEQ ID NO: 164879 - DNA, 120 bp, Artificial Sequence
  ENSG00000108018_39 (sequence is synthesized)
ttcagtttcatgtatctttgtcttttcctctagaacctgcctttttcaaatatccctgccttttcccacctggaaacatatactgtatgcgaaagagttgatatatgcaaagtaattcaa

SEQ ID NO: 164880 - DNA, 120 bp, Artificial Sequence
  ENSG00000108018_40 (sequence is synthesized)
acctggccatgtactttggaaaagaaagcatagagatgaattgtggtgttctcacaccttaacgaaaatctcgtgcgatctgattccagaagattcttgtgagaaatgttttgaatgtgt

SEQ ID NO: 164881 - DNA, 120 bp, Artificial Sequence
  ENSG00000108018_41 (sequence is synthesized)
gacaatttcgcagggcaatttcctcctgtgacggttgctgttacctggtatttccactctcacagtagaatagaaatgtttgtgaaataaaactgattttaactggaaggagaaacaggt

SEQ ID NO: 164882 - DNA, 120 bp, Artificial Sequence
  ENSG00000108018_42 (sequence is synthesized)
taatggactttgtgtttaagagtgtcaaacagtctgagagaataaatgggggtcttgtcttacattagggtgagagtttgattatttaggatgatcccagtgatttcatgtgtgctctct

SEQ ID NO: 164883 - DNA, 120 bp, Artificial Sequence
  ENSG00000108018_43 (sequence is synthesized)
gacctctgagtatcatagtatcattaaagtaaagatttaagtctgtataaaggaggagagttactgattggcaaaaaagattggcacaaagcatgaagaaaccccatttttcccagggta

SEQ ID NO: 164884 - DNA, 120 bp, Artificial Sequence
  ENSG00000108018_44 (sequence is synthesized)
atcatgaaagaaggctcagagaaagagggaaacaaaagcctgttcagcagaggcccctttagtattatggactgggcaaagcccactataaactataggagaaagaagttctgataaacc

SEQ ID NO: 164885 - DNA, 120 bp, Artificial Sequence
  ENSG00000108018_45 (sequence is synthesized)
tcttagtatgctcagcctccttctttgctatgtccctaagccaacagggtataacacaggccctggtgataatgagggtgtcctaaagatcctgatgtccatgacttcatgtagttcagg

SEQ ID NO: 164886 - DNA, 120 bp, Artificial Sequence
  ENSG00000108018_46 (sequence is synthesized)
cacagaaagaatagcaaagctgctgtcagaagtttgtcaggcagagatgtttatggttgaggataccccatatgaatctgggaaatgggctaggcctgaggcagtcacctatttgtagaa

SEQ ID NO: 164887 - DNA, 120 bp, Artificial Sequence
  ENSG00000108018_47 (sequence is synthesized)
ctcaattgatccccaacctgccaggcttcctatctcataggaaacatcctcattgatcctcttcagttggagtctcccaaatttaatgtggaagacaaagtgttggaaaatcaaaagagg

SEQ ID NO: 164888 - DNA, 120 bp, Artificial Sequence
  ENSG00000108018_48 (sequence is synthesized)
ctcactcaaaccagcacagggagtcctcagagttgcagttcaattcattttaattagaaaagtatgaaagaggtataacactcttattctagcacagtgccttgcctagagtagtagtat

SEQ ID NO: 164889 - DNA, 120 bp, Artificial Sequence
  ENSG00000108018_49 (sequence is synthesized)
gaaaactatttgttgaagaaataaatgaatggaaagacatagggaagaatgggctgtaaatcctaattaaaaatagaggtcgacatgagatacctggcattttgggaagtgaccaaagat

SEQ ID NO: 164890 - DNA, 120 bp, Artificial Sequence
  ENSG00000108018_50 (sequence is synthesized)
ggccagctagagattcagcatctccaggatcctcatgtgcctctcctcaaagctccctcccatctgtaggagattagtgaggcaaggtgctgctcagagaggaggacctcattgttctta

SEQ ID NO: 164891 - DNA, 120 bp, Artificial Sequence
  ENSG00000108018_51 (sequence is synthesized)
ggaccttggccagttgttctcaaagtgtggtacctggatcagcagtatcactatcacttgggctagttagagatccagattctggatccataccccatacctactgaattagaaactcta

SEQ ID NO: 164892 - DNA, 120 bp, Artificial Sequence
  ENSG00000108018_52 (sequence is synthesized)
ggggatgaatagtggtgttctctgttgctaagtgacagtgggcccagccacctattttaacaagccctcccagtgattgtgatacatactaaagtttgagaaccattgtactaggccatt

SEQ ID NO: 164893 - DNA, 120 bp, Artificial Sequence
  ENSG00000108018_53 (sequence is synthesized)
ccagctgaatctcaaacagaaggcagtaatgagagcctacaaatgggagggacctaagtgcctacctactcgctaatcgcaggtgcaaacacacaaggagtttggtgggcttaaggtcag

SEQ ID NO: 164894 - DNA, 120 bp, Artificial Sequence
  ENSG00000108018_54 (sequence is synthesized)
aggagtgtgtagggagggatgtatgtggaaggtaagattcagggcaagctaaaaatccgatactgcaacgttttccaaaatcccagaaggcaaactgtgcatgttctaccctgaaccacc

SEQ ID NO: 164895 - DNA, 120 bp, Artificial Sequence
  ENSG00000108018_55 (sequence is synthesized)
caagcaacactttctaccttgccttatttttaattggattcactgtccaaaatgcagaggtttgctttgcttttttttcagaagttccaaacagcaactttgagagcagtggggtgcttg

SEQ ID NO: 164896 - DNA, 120 bp, Artificial Sequence
  ENSG00000108018_56 (sequence is synthesized)
gcagctgttctgtgttttccaggaatccaactgagcattgaaatctctcatttgccgacttatttttataggaagccaattaaaaaaaaaaaaagttttcttatagtattggaactactt

SEQ ID NO: 164897 - DNA, 120 bp, Artificial Sequence
  ENSG00000108018_57 (sequence is synthesized)
aaaatgacttttttgatgtattttttgttaaatactatgtagtgtaatgtataattgctcttgtttattgcttttacaatcatatttattaaacagataatgtctctaaagtctttgcct

SEQ ID NO: 164898 - DNA, 120 bp, Artificial Sequence
  ENSG00000108018_58 (sequence is synthesized)
ctttgcctcaggtatttttttttttaatcctaaacccttggtgttcattctaaatatagaagtgttgcatgtataggatttcataaaggctaattgcataagaaagagtaaacaccacag

SEQ ID NO: 164899 - DNA, 120 bp, Artificial Sequence
  ENSG00000108018_59 (sequence is synthesized)
gcttgaggtttttggctgttttttactaacaaggcagaatgtatgtactacctgaattctacctgcatttcaattaactatacaatgtctgtttattaaattactttgatttaaaaatta

SEQ ID NO: 164900 - DNA, 120 bp, Artificial Sequence
  ENSG00000108018_60 (sequence is synthesized)
gttcacagcatatataatgtcctttagaatatatgtaacaacttgtaatcttttgaaaaaatacaggataaacacttctacaagtggtgtggaaaacatctaaaatattgtcaaaatctg

SEQ ID NO: 164901 - DNA, 120 bp, Artificial Sequence
  ENSG00000108018_61 (sequence is synthesized)
tcaacagtttcatactcatttcagtagaaaagcacatggttctaattgagattattcttatatgcaatgtaaattttatttagttttgttttcttatgcaaattttttctcacaaagcat

SEQ ID NO: 164902 - DNA, 120 bp, Artificial Sequence
  ENSG00000108018_62 (sequence is synthesized)
gtgttcattgttgaatgtcctttgatgcaagttaaatatatgaaacgtactttctgttaccagataatttttaaatttaaatttccttcttaaaattttgtaagtgacacagatagagcc

SEQ ID NO: 164903 - DNA, 120 bp, Artificial Sequence
  ENSG00000108018_63 (sequence is synthesized)
tcatctacaagtttaaaaggaagatcccggggattaatgtttatgcccagatgcagaatgagaaagaacaagagatgatcagtccagtcagtcactctgaaagcaggcccaatgtccctc

SEQ ID NO: 164904 - DNA, 120 bp, Artificial Sequence
  ENSG00000108018_64 (sequence is synthesized)
agactgaactaaggaggcctggccagcttatagatgagaaggtggaatcccagctcataggtaaatgattcccagtagccaccagctgttcggctgagtaggcaatggctgactctctct

SEQ ID NO: 164905 - DNA, 120 bp, Artificial Sequence
  ENSG00000108018_65 (sequence is synthesized)
ctaacccctttctggcttgacataaccactttcttttgctctaacacccctgagagaaacagctaagatggctttttccctgcttcctctgattgggatgggggaaaaacaaacaaacct

SEQ ID NO: 164906 - DNA, 120 bp, Artificial Sequence
  ENSG00000108018_66 (sequence is synthesized)
cttgcttctatctagtttttttctctcattagtttattcctccttttgcaaaaccctccctaaaatattgggcttaaaatgttaaaatgttatatgtttatgggcaaagagcaaagcatt

SEQ ID NO: 164907 - DNA, 120 bp, Artificial Sequence
  ENSG00000108018_67 (sequence is synthesized)
tgctttaatagtatataagaaggagaggcctcagaggctaaggctggtggaccagagggctgggcagggtttgcaggacatggtatgtattgactagaatgaaacatggtagcctcaact

SEQ ID NO: 164908 - DNA, 120 bp, Artificial Sequence
  ENSG00000108018_68 (sequence is synthesized)
ggatacagctcttaaggagggcaaactgctctggaacaccagtagagaagtgacataatgagagtggccagcctgatcctccagggaattttttttttttttacatctattggtagtcta

SEQ ID NO: 164909 - DNA, 120 bp, Artificial Sequence
  ENSG00000108018_69 (sequence is synthesized)
ggaactttccctcaggagatttggaacctaagattgaggacaagaggcataatgtttgcagacatccaggcagtagagcatcctgagagagaccactggtgggtgagactattacagagc

SEQ ID NO: 164910 - DNA, 120 bp, Artificial Sequence
  ENSG00000108018_70 (sequence is synthesized)
cccttaccagaagttgtaaaatggactttctcatatttcaatggctctctctctgcctgtgaagtaggcatgggaatccaacaacgaggtatagagaatctgacgttcacttgctagatt

SEQ ID NO: 164911 - DNA, 120 bp, Artificial Sequence
  ENSG00000108018_71 (sequence is synthesized)
ctgctatttattgcagcagaaattttccaggaagctagacaaacctatgaagccactattgctgatccatttctctgtctggttcctcctgtctgttggcattaggagttgaagccttat

SEQ ID NO: 164912 - DNA, 120 bp, Artificial Sequence
  ENSG00000108018_72 (sequence is synthesized)
atgtttacatctagatcctgcattgctgacaacagtgaataaattattatataaccattcatgctccactctaatgtgataatgccaaaccacctagaaggcctttacataaaattttta

SEQ ID NO: 164913 - DNA, 120 bp, Artificial Sequence
  ENSG00000108018_73 (sequence is synthesized)
atcttacttggaaaacaatgagtatgtaaacggaaacataaccctctttaaatgaatatgggaaaggtctgtggctgtgttaaggggaaatgtaaatgcagtgactggctcctatcatag

SEQ ID NO: 164914 - DNA, 120 bp, Artificial Sequence
  ENSG00000108018_74 (sequence is synthesized)
ataatgataacaactgcagtcacatctggtgtccgattttcacagtgcactttcttttatttggagaggcaaggtaataaatgtgtgattgcttggggctaaaaagaaaaaagtcttttc

SEQ ID NO: 164915 - DNA, 120 bp, Artificial Sequence
  ENSG00000108018_75 (sequence is synthesized)
tgccttcaagtccagagaagcattcaccctgtctactcattcctaaagcttctaagtgcatttttggggatcgtttggttctcagtcgcatttccgtagggtatgaagcacagcctctgt

SEQ ID NO: 164916 - DNA, 120 bp, Artificial Sequence
  ENSG00000108018_76 (sequence is synthesized)
ttgctttattaaagtagtaattcctccttctccaggaagatatcgcagcacattgcaaagtctctgacacctttccctttccagtgtcattaaatgagtaagtgttacacgttttctctt

SEQ ID NO: 164917 - DNA, 120 bp, Artificial Sequence
  ENSG00000108018_77 (sequence is synthesized)
ttatagatgagaaggtggaatcccagctcataggaagtatttccatagttgctgagaatcaaagcacaaaagaaatccctacctatgtaaatgtttgaatggaggacgccagtaaaaaaa

SEQ ID NO: 164918 - DNA, 120 bp, Artificial Sequence
  ENSG00000108018_78 (sequence is synthesized)
tgaaatggcttatgaaccctagagtgtagaagcagttgtagcttcaaggacaacaagctcccttggtgctcaagtatctcatcattatgttctctctctctctctctctggcccctctcc

SEQ ID NO: 164919 - DNA, 120 bp, Artificial Sequence
  ENSG00000108018_79 (sequence is synthesized)
accttctgcatttcatctctgccttcctctatgtttacgtttttctccagctgtacttgtctttgtagtgactcttagcagccctagcttagcagagaaattaaactctatttcctgaaa

SEQ ID NO: 164920 - DNA, 120 bp, Artificial Sequence
  ENSG00000108018_80 (sequence is synthesized)
cctcaatagtactggatgtggaacctggaatcacaaaaggaactcactgacttttcaaaagtatactagtgttaatacgaatgtattttgctttctctttatgttcagtcttgacacatt

SEQ ID NO: 164921 - DNA, 120 bp, Artificial Sequence
  ENSG00000108018_81 (sequence is synthesized)
taaacatgcattctgacctttgtaaatccagaatcacattctgaaatttggtatttaatattctgtgtcatggggcttatgcaatattatttaagaaataccataataaggaaaaaaaat

SEQ ID NO: 164922 - DNA, 120 bp, Artificial Sequence
  ENSG00000108021_0 (sequence is synthesized)
gcggagttccccgctctggcgcactggccttggctggcgggagggggccggaggggctgccggcggagcagagacacagccaccctccccaacacaccatgagcatttatgacattaaca

SEQ ID NO: 164923 - DNA, 120 bp, Artificial Sequence
  ENSG00000108021_1 (sequence is synthesized)
gagaacaggactatgtcaagaattctgagggtatacttggtgaaaatgaattaagaccaccctcccagctacattctctcttagagaagatcgagacagggtccctatcagaaaagattt

SEQ ID NO: 164924 - DNA, 120 bp, Artificial Sequence
  ENSG00000108021_2 (sequence is synthesized)
ttgagacagtgtccttgagttcagactctctcttccagagggcagtttcactcctccatacttcttacttggactcttcatctgagcatggttttcagtacagtcaagtgactttggtga

SEQ ID NO: 164925 - DNA, 120 bp, Artificial Sequence
  ENSG00000108021_3 (sequence is synthesized)
aaaatgacattttcttaaatgagtacaaaactttttaccaacaaaaaaaagcaagtagttatactcaggaagaacttcaagacacttacgggtttcttctgtttgatactgaaaagcagg

SEQ ID NO: 164926 - DNA, 120 bp, Artificial Sequence
  ENSG00000108021_4 (sequence is synthesized)
caaaattggtatgtcagtgtggactccgtgttggcagcagtgctgttaccactctgggtgatccagccaaaggtgtatacatttccaaatactccgactgtcttcattcaagaccatggt

SEQ ID NO: 164927 - DNA, 120 bp, Artificial Sequence
  ENSG00000108021_5 (sequence is synthesized)
atcatgggaaatctggttatgttgtaatttttaatataattaagtattacttttacgaactttcaggcaacaccgttattgaacgacccagacagatctgtccttatgtaattgtagctt

SEQ ID NO: 164928 - DNA, 120 bp, Artificial Sequence
  ENSG00000108021_6 (sequence is synthesized)
ttcgatacagggaatctaaaactatggcaccaccagctcataaaagcatacttgaacgcagtgaaaatgttctcatgtctccatggaaagggaaattaattgttcaagaccgtatgctat

SEQ ID NO: 164929 - DNA, 120 bp, Artificial Sequence
  ENSG00000108021_7 (sequence is synthesized)
gtgatatagctctttggtccacttacggtgcaatgattccaacacagctaccgcaggaactagattttaaatatgtaatgaaagtgtcttccttgaaaaaaagactaccagaggctgcct

SEQ ID NO: 164930 - DNA, 120 bp, Artificial Sequence
  ENSG00000108021_8 (sequence is synthesized)
tcagaaaacagaattacttggaggagaaagtctgttttcaagatttgtgcttcaatttgtatgaggtagaactgtcaaacagacaaggggaaaatatagataaattaacagaatgtatta

SEQ ID NO: 164931 - DNA, 120 bp, Artificial Sequence
  ENSG00000108021_9 (sequence is synthesized)
aaaacaagcaattggcaatcatcaaatgcttagaagatcgagggtttttcattttacttacatcatcagccttactatcagaaccagattttggaggcaagcagatgggtctgcatgggt

SEQ ID NO: 164932 - DNA, 120 bp, Artificial Sequence
  ENSG00000108021_10 (sequence is synthesized)
tacatttatttcgttcacccctgtcaacaggggtgaaagatttgaaagttgaagatgacatctcaatgaaggtgatacctattttatctacccttaattgtgccctgctagaaacaaaga

SEQ ID NO: 164933 - DNA, 120 bp, Artificial Sequence
  ENSG00000108021_11 (sequence is synthesized)
aatcacttcctgaagaaagaatccatccaaacacattagtaaagcgtcatttccaagaattgtacaaggcggacagaagcccttcattgagtgttgctcctcaggatagaatgaaagacc

SEQ ID NO: 164934 - DNA, 120 bp, Artificial Sequence
  ENSG00000108021_12 (sequence is synthesized)
ctacattcttggggaaactgcccagtggttttgacttgattcctccagctgaaaagtgcccttcagagtctttaactcagttgaactcttatttttcagaccctagtgcttacattttgg

SEQ ID NO: 164935 - DNA, 120 bp, Artificial Sequence
  ENSG00000108021_13 (sequence is synthesized)
aagtgtctactgctttggacttgctagcagagcatcctcagtctccttgtgtttcagacggaatttgtgatgctggattttccttagttatgactccagatcctgaatttcttgtctcag

SEQ ID NO: 164936 - DNA, 120 bp, Artificial Sequence
  ENSG00000108021_14 (sequence is synthesized)
aggcagaagtgagaaaagaaactgaaacaaaaaaggattctgaagaaatgttgaaagcaaagaagagagtttttccattgagtccagcgtcaaatctgagagtgcagcctaagaggaagg

SEQ ID NO: 164937 - DNA, 120 bp, Artificial Sequence
  ENSG00000108021_15 (sequence is synthesized)
ccagcatgccccacatggtgcagagtaaaaaggtgaacttgtgccgcccctttcccaaaagaactgcttccagagcagacaacagctcggactctccaacaactcttaagttagttaaag

SEQ ID NO: 164938 - DNA, 120 bp, Artificial Sequence
  ENSG00000108021_16 (sequence is synthesized)
gacagtttcctcagaaaagaaaaagaggtgcggaagtgctgactgcacagtttgtacagaaaaccaaattggataggaaaaaccaagaagctcctatttctaaagatgttccagtgccaa

SEQ ID NO: 164939 - DNA, 120 bp, Artificial Sequence
  ENSG00000108021_17 (sequence is synthesized)
caaatgctaaaagggcaaggaaacaagagaaatctccagtcaaaactgttccaagggctaagccacctgtgaagaaatctccacaaaaacagagagtaaatatagtaaaaggcaatgaga

SEQ ID NO: 164940 - DNA, 120 bp, Artificial Sequence
  ENSG00000108021_18 (sequence is synthesized)
accccagaaacagaaagcagctacaacctgtcaaaggagaaactgcttcaaagcttcaatcagaaatttcaagaggttgtcaagaagatgggattagcataaatagtgttcaaccagaaa

SEQ ID NO: 164941 - DNA, 120 bp, Artificial Sequence
  ENSG00000108021_19 (sequence is synthesized)
ataccacagcggctcacaatgatcttcctgaaaactccatcgtcaactatgactcccaggccctaaatatgttagccgatctagcattaagctctgctacttcttccacaccagtatctg

SEQ ID NO: 164942 - DNA, 120 bp, Artificial Sequence
  ENSG00000108021_20 (sequence is synthesized)
aggctagaaatcttcactgttcctctgaattgccacaaaatgatgttttgctctctaaagaaaattctttgcgaggtacatctgaccatgaatatcatagaggagttaaaactcaaaaag

SEQ ID NO: 164943 - DNA, 120 bp, Artificial Sequence
  ENSG00000108021_21 (sequence is synthesized)
gtgaattactacctaacccatcttctgataggaagagtaattctggatcagacttaacagttagccaagatgaagaaagcttggttccttgtagtcaggcccctgctaaagcccagtcag

SEQ ID NO: 164944 - DNA, 120 bp, Artificial Sequence
  ENSG00000108021_22 (sequence is synthesized)
cacttactgaggaaatgctagaatcttcagatgcaagccaaagctcttctgtttctgtggaacattcatatgccctgctccttacagaacattcaaagaaacatctacaggagagagaga

SEQ ID NO: 164945 - DNA, 120 bp, Artificial Sequence
  ENSG00000108021_23 (sequence is synthesized)
tactaagccctctgtttcccaggaatgggacaaaaagccctgaagcagcaaccccagtggggaaagtcatgccatttcggcatcagcccggccttttgcttcagcaaaagcctcctgacg

SEQ ID NO: 164946 - DNA, 120 bp, Artificial Sequence
  ENSG00000108021_24 (sequence is synthesized)
accccgtggtgaagcccaaggatcgaccaccgtctgcccgtgtgaaaaaatcttcttgctctcgtatagtgcttagctgtgatgactccgttaagatcactttcaaatgtgaaacagaat

SEQ ID NO: 164947 - DNA, 120 bp, Artificial Sequence
  ENSG00000108021_25 (sequence is synthesized)
atgcattcagtttagacagcaaatataccaacaacccactggagaaaactgtagtaagagcattacatgggccctggaatactgatttgcctgataatgtggaagaagtgaagcttttac

SEQ ID NO: 164948 - DNA, 120 bp, Artificial Sequence
  ENSG00000108021_26 (sequence is synthesized)
ttcatatgtgggtagctctgttttacagcaatcagaacaaaatcatacgatcttcccgaaaggttgtagaacacagcaacccagcaaaatatgtgtctataaatagcacgttagaatctt

SEQ ID NO: 164949 - DNA, 120 bp, Artificial Sequence
  ENSG00000108021_27 (sequence is synthesized)
gtgagctccgtgaaattgaggagtcccttggtttggaaaaatgttctgcagactctctgttggagactaacgaaatttccagggctcatgctgctgaagtatccttccgtgatcctaact

SEQ ID NO: 164950 - DNA, 120 bp, Artificial Sequence
  ENSG00000108021_28 (sequence is synthesized)
gcttgcttcctttcattaaaacaccacttacccaaggcttggaactctgtgtacaaaatgaacagaaaaaaacttttgcaagagagtgtgatccagacacccaagaagaccagaatttca

SEQ ID NO: 164951 - DNA, 120 bp, Artificial Sequence
  ENSG00000108021_29 (sequence is synthesized)
tctgttcttacaataatgaggtaactggggaagaagctaaacaagaatcattggagacttctaatcttgtgctttcgggtattggaagtacacaaactaatggaccttctgttcctagtg

SEQ ID NO: 164952 - DNA, 120 bp, Artificial Sequence
  ENSG00000108021_30 (sequence is synthesized)
aagaagaaattgttcagccactggatagcacaagagtggcttcttacagtggcactgttactcaagccacattcaccaggacttacgatgggcctggcagtcagccagtgatatgtcaga

SEQ ID NO: 164953 - DNA, 120 bp, Artificial Sequence
  ENSG00000108021_31 (sequence is synthesized)
gctctgtgtacggcacccttgaaaacaaagtggatattcttgatgcagcagtgcaaacaaaaacaggtactttacaggaccttatccaacatggcagccccataaacaatgaatgtcacc

SEQ ID NO: 164954 - DNA, 120 bp, Artificial Sequence
  ENSG00000108021_32 (sequence is synthesized)
cttccttggaaagaaaggatgataatatggggtgtgcagtgattaacccggaaccaattactctcacctttgaaaaaaatgcacatgtaccaatacagacagaaggtgtaaatactgctg

SEQ ID NO: 164955 - DNA, 120 bp, Artificial Sequence
  ENSG00000108021_33 (sequence is synthesized)
atgaacgtacaacctttaagaaggagttgattaagcaagtatcacctgctgcaagccttagacatcctgtatccacctcggaaaatgcacgaacacaaggcctgagggacattccctctc

SEQ ID NO: 164956 - DNA, 120 bp, Artificial Sequence
  ENSG00000108021_34 (sequence is synthesized)
tagtagttgcaggacagaagggcactaagtacctttgtgcctcgtcagtaggtggagagacacttgataaagcagtgtgttcattacagaaggagacgccccttccagtctctctaccat

SEQ ID NO: 164957 - DNA, 120 bp, Artificial Sequence
  ENSG00000108021_35 (sequence is synthesized)
ctgataaaacaatggtcatggaggcactatcattagctaaaagttctagtcatctatcacccagtgaagaagtgagatgcactcaggatttcctttcacagactcagagtctcctcggcc

SEQ ID NO: 164958 - DNA, 120 bp, Artificial Sequence
  ENSG00000108021_36 (sequence is synthesized)
atttcgtcaggatgccacacatcaggtgactctttagaactaaggaagaatcacaagaatggtccaaacactgaaaatatgaatttggaagcgtttgattcagtatttatcaaacaaaca

SEQ ID NO: 164959 - DNA, 120 bp, Artificial Sequence
  ENSG00000108021_37 (sequence is synthesized)
agcctgtctgtgagtagagaggtcagcctagagttatcagaggaagattctgacattgacttagctctaacaatatcaccacctacaagtcccagagaagaaatgccagctggtgaaata

SEQ ID NO: 164960 - DNA, 120 bp, Artificial Sequence
  ENSG00000108021_38 (sequence is synthesized)
gagcaatttgaggaggccccattctcaaatttagaacttcaggatgtagctgaggaaataggtgaaccggaagaggtggctctcacagaaagcagagaagtgagttctgctgacaatgtg

SEQ ID NO: 164961 - DNA, 120 bp, Artificial Sequence
  ENSG00000108021_39 (sequence is synthesized)
tcagtatatccctcagtgtcagaagaaccagtagaaaataaggagagaaagggggataatttacaaccagttactttaatactttctaaagaaaattgcacccttgagattgcagaggaa

SEQ ID NO: 164962 - DNA, 120 bp, Artificial Sequence
  ENSG00000108021_40 (sequence is synthesized)
attaatgtgacctctgattttccctttgattctgtaattgaagaagtatcaccagcgtctagtcctgaacctccagtaccagttaaagagacacgaccatatcaggctgtgactccatgc

SEQ ID NO: 164963 - DNA, 120 bp, Artificial Sequence
  ENSG00000108021_41 (sequence is synthesized)
attttaaaacttcatggtacacagtgtgagaagagcaaccaaatctcccaatgtgagtcagaagacttaggcataacagaaaaagaaaatgtttttgttggtcctacccatccagtgggg

SEQ ID NO: 164964 - DNA, 120 bp, Artificial Sequence
  ENSG00000108021_42 (sequence is synthesized)
caagataactttacccaggtacaacaaatgcaggtctctgccgaaatgcctctaatattaactgatcatccaggaagaacaggtagaccaacccttcctggtaaagtaactgaggaaatt

SEQ ID NO: 164965 - DNA, 120 bp, Artificial Sequence
  ENSG00000108021_43 (sequence is synthesized)
gtctcaagtgagcatgatgagggtttatctttctcaggaaaggtgcagtgctatggtagggagttaaaccagcctgcctcagctgccaaatgcacaggtgacttcagtccttctcctgaa

SEQ ID NO: 164966 - DNA, 120 bp, Artificial Sequence
  ENSG00000108021_44 (sequence is synthesized)
aaactggtaaaatcaggaaatccattgcagccagttagtatagagaatagaaatttggacttaaaacatcttgtcttggagtccagtgaacctccatttggtcctagaaatgttattgaa

SEQ ID NO: 164967 - DNA, 120 bp, Artificial Sequence
  ENSG00000108021_45 (sequence is synthesized)
aataagtctttgtctgacacattggtttccacaactgcaccaagtggtatagtgaatgtgtcagtaaaacagcagactagccctaaaagcagtcagaaccatctctttcccggtgatttg

SEQ ID NO: 164968 - DNA, 120 bp, Artificial Sequence
  ENSG00000108021_46 (sequence is synthesized)
aaaacagatgaaggcatttatctgcaggtgaagtccttgacagctgcctcggttgatggagcttattctacacagggatgcatgtgctcagtggtccccacgctttgttcttcctcagac

SEQ ID NO: 164969 - DNA, 120 bp, Artificial Sequence
  ENSG00000108021_47 (sequence is synthesized)
aatgctacattaacccattatgtaagaccaataaatgcagagccagtgtttcaagcacaggaaataccagcaggcagaatggccagtttgcttaagaatggtgagcctgaagctgagtta

SEQ ID NO: 164970 - DNA, 120 bp, Artificial Sequence
  ENSG00000108021_48 (sequence is synthesized)
cataaagaaaccacaggtccaggcactgctggccctcagtccaacaccacatcttctctaaaaggtgaacgcaaagccatccacacgctgcaagatgtgtcaacatgtgaaacaaaggag

SEQ ID NO: 164971 - DNA, 120 bp, Artificial Sequence
  ENSG00000108021_49 (sequence is synthesized)
ctattgaatgtcggggtttcctccctttgtgctggtccctaccaaaatacagcagacaccaaggaaaacctcagtaaagagcctttggcctcctttgtttcagaatcctttgatacttct

SEQ ID NO: 164972 - DNA, 120 bp, Artificial Sequence
  ENSG00000108021_50 (sequence is synthesized)
gtttgtggaatagccacagagcacgtagaaattgagaacagtggggaggggctcagggctgaggctggttctgaaaccctaggcagagatggagaggtcggtgtgaattccgacatgcac

SEQ ID NO: 164973 - DNA, 120 bp, Artificial Sequence
  ENSG00000108021_51 (sequence is synthesized)
tatgaactctctggagattctgatctagacctgcttggtgattgtagaaatcccagactggatttggaggattcttatactttaagaggtagttacaccaggaaaaaagatgttcccaca

SEQ ID NO: 164974 - DNA, 120 bp, Artificial Sequence
  ENSG00000108021_52 (sequence is synthesized)
gatggctatgagtcgtcgttgaacttccacaacaacaaccaagaggactggggctgctctagctgggttccaggcatggagacgagcctccctcccgggcactggactgctgcggtaaag

SEQ ID NO: 164975 - DNA, 120 bp, Artificial Sequence
  ENSG00000108021_53 (sequence is synthesized)
aaagaagagaagtgtgtgccgccttacgtccaaatccgagatctccacgggatcctcaggacttacgccaacttctctataacaaaagaactcaaagataccatgagaacttcacacggc

SEQ ID NO: 164976 - DNA, 120 bp, Artificial Sequence
  ENSG00000108021_54 (sequence is synthesized)
ctgaggaggcacccgagtttcagtgcaaactgtggcctgcccagctcctggacaagcacttggcaggtggcagacgacctcacccagaacactttagacctggagtatctgcgttttgca

SEQ ID NO: 164977 - DNA, 120 bp, Artificial Sequence
  ENSG00000108021_55 (sequence is synthesized)
cataaactaaaacagaccataaagaatggggattctcagcattctgcctcctctgccaatgtctttccaaaggagtcaccaacccagatctccattggtgctttcccttcgacaaaaatc

SEQ ID NO: 164978 - DNA, 120 bp, Artificial Sequence
  ENSG00000108021_56 (sequence is synthesized)
tctgaggccccatttctgcatcctgcacctaggagcagaagcccccttctggtaacagttgtggagtcagatcccagaccacaggggcagcccaggagaggctacacagccagcagtctg

SEQ ID NO: 164979 - DNA, 120 bp, Artificial Sequence
  ENSG00000108021_57 (sequence is synthesized)
gacagctcttcctcttggagagagagatgtagtcataatagagatcttagaaattctcaaagaaatcacactgtttcattccacctcaacaaactgaaatacaacagtactgtgaaggaa

SEQ ID NO: 164980 - DNA, 120 bp, Artificial Sequence
  ENSG00000108021_58 (sequence is synthesized)
tctcggaatgatatttcacttattctcaatgagtatgctgaattcaacaaggtgatgaagaatagcaaccaattcattttccaagacaaagagctaaatgatgtttctggagaagccact

SEQ ID NO: 164981 - DNA, 120 bp, Artificial Sequence
  ENSG00000108021_59 (sequence is synthesized)
gctcaagagatgtatctgcctttcccaggacggtcagcctcctatgaagacataatcatagacgtgtgcaccaatttgcacgtcaaactaagaagtgttgtgaaagaggcttgtaaaagt

SEQ ID NO: 164982 - DNA, 120 bp, Artificial Sequence
  ENSG00000108021_60 (sequence is synthesized)
accttcctgttctaccttgtcgaaacagaagacaaatcattctttgtaagaacaaagaaccttctgaggaaaggaggccatacagaaattgaacctcagcacttctgtcaagctttccac

SEQ ID NO: 164983 - DNA, 120 bp, Artificial Sequence
  ENSG00000108021_61 (sequence is synthesized)
agagagaatgatacactaatcatcatcatcagaaatgaagatatatcatcacatttgcatcagattccttctttgctgaagctgaagcatttccccagtgtcatctttgctggagtagac

SEQ ID NO: 164984 - DNA, 120 bp, Artificial Sequence
  ENSG00000108021_62 (sequence is synthesized)
agccctggagatgttcttgatcacacctaccaagaactgtttcgtgcaggaggctttgtgatatcagatgacaagatactagaagctgtaacattagttcaactgaaggaaattatcaaa

SEQ ID NO: 164985 - DNA, 120 bp, Artificial Sequence
  ENSG00000108021_63 (sequence is synthesized)
atcctggaaaaactaaatggaaatggaagatggaagtggttgcttcactacagggaaaataaaaagctaaaagaagatgaaagagtggattcaactgcacataagaagaacataatgttg

SEQ ID NO: 164986 - DNA, 120 bp, Artificial Sequence
  ENSG00000108021_64 (sequence is synthesized)
aagtcatttcagagtgcaaatatcattgaattgcttcattatcaccagtgtgactctcgatcatcaacaaaagcagaaattctgaaatgtttgctaaacctgcaaattcagcatattgat

SEQ ID NO: 164987 - DNA, 120 bp, Artificial Sequence
  ENSG00000108021_65 (sequence is synthesized)
gccaggtttgctgtcctcctaacagacaagcctactatccccagagaagtctttgaaaatagtggaatccttgttacagatgtaaataactttatagaaaacatagaaaaaatagcagct

SEQ ID NO: 164988 - DNA, 120 bp, Artificial Sequence
  ENSG00000108021_66 (sequence is synthesized)
ccatttaggagtagctattggtgactcaactacagcctgcctggatatggatgatgccaataaaaaattagtattttccctttggaaaacttgtgaacatgtgaatacacatgtgaacag

SEQ ID NO: 164989 - DNA, 120 bp, Artificial Sequence
  ENSG00000108021_67 (sequence is synthesized)
tcttacatttgaaaaaccaatgttctacaacttggaaagttttcattttttatattttgctgaaatatgtcacagtggcattgcagttgtctgttagctttgggttgcagtgctagatat

SEQ ID NO: 164990 - DNA, 120 bp, Artificial Sequence
  ENSG00000108021_68 (sequence is synthesized)
tgttttaaattattttcattttaaacaagatgccttctaagctattgagcttattaaaaataattttacatgtttacttagttggagcaaaaataagtctattttaacaaatagctttgt

SEQ ID NO: 164991 - DNA, 120 bp, Artificial Sequence
  ENSG00000108021_69 (sequence is synthesized)
ttttgcatgctaatgtcagaaaggcatacgatgcacattatgctctgttttaaaggttttaccacccttgtaaaaactataatcttaaatggttttatttgctgttacacaaacaacact

SEQ ID NO: 164992 - DNA, 120 bp, Artificial Sequence
  ENSG00000108021_70 (sequence is synthesized)
acataaaacattttttcctaaatggtacaaatttataaactatcatttttcacttacggtatttgtaaatactacactacaaaaatcagctttctgagaaagaaataatcatttatttat

SEQ ID NO: 164993 - DNA, 120 bp, Artificial Sequence
  ENSG00000108021_71 (sequence is synthesized)
gatattgaaaatttctacagtaaacactcaaaaccaagcaaaaaacatttgtaagatacacggtatctatttggagcaacggtttttgtaactaatgtgtttcattttttaaataaagac

SEQ ID NO: 164994 - DNA, 80 bp, Artificial Sequence
  ENSG00000108021_72 (sequence is synthesized)
gaccccggggctggggcggacggcgtgcccctgaggggggtccccgcgggagcgcggagccggcgactggtgcttcccac

SEQ ID NO: 164995 - DNA, 120 bp, Artificial Sequence
  ENSG00000108021_73 (sequence is synthesized)
gtgcgccggtgtcgcgagggcccgggaggacgcagagcacggccgggagaagcatgggaaggaggccgagccgggatctcaggtcctcgggggcggcggccacgccaaggacggcattta

SEQ ID NO: 164996 - DNA, 120 bp, Artificial Sequence
  ENSG00000108021_74 (sequence is synthesized)
tactaaaagcaattgaattgtacactttatgtgggtgaattgtatgccgtatgaattatatctcaacattgtattagaaaataaaattaatgaagcatagaagttacggagaactactgg

SEQ ID NO: 164997 - DNA, 120 bp, Artificial Sequence
  ENSG00000108021_75 (sequence is synthesized)
cagcagaaaaaaagaaatagagaaaaatgatcaagccatttcagaagtacacaagggagactagacaccatggcaaagatcataaaagtagaaatgaaattttatgcatttatgacatta

SEQ ID NO: 164998 - DNA, 120 bp, Artificial Sequence
  ENSG00000108021_76 (sequence is synthesized)
atctaaatggcttggcatcccatggataccagaatcacccaaatctgctgaagctgaagcccttatataaaatgtagtatttgcaggtaactacacaatcctcctatgtatgtaagtcag

SEQ ID NO: 164999 - DNA, 120 bp, Artificial Sequence
  ENSG00000108021_77 (sequence is synthesized)
acacaatcctcctatgtatgtaagtcagttctagattacttataatactcaatacagtataagtagttataccgtattattttttaaatcaatactggggctgggtgcagtggctcacac

SEQ ID NO: 165000 - DNA, 120 bp, Artificial Sequence
  ENSG00000108021_78 (sequence is synthesized)
aacatactgagttaacacattttcctagtagtgatagaattttcagggaagcaagaaaccaagaaaattctggctgctacctaattttaatgaagttggcgattatctgcccacaaggta

SEQ ID NO: 165001 - DNA, 120 bp, Artificial Sequence
  ENSG00000108021_79 (sequence is synthesized)
tgagaagtatagatgtgcattgctctacaaatatacaacgcaataaggcccactcgaaattcatgaaaggcttgccaagccacatggcttgattggtcgtaggtagatgcatgatgtccc

SEQ ID NO: 165002 - DNA, 120 bp, Artificial Sequence
  ENSG00000108021_80 (sequence is synthesized)
tcttagaatgaggcccatgtttaaaatccacatttacaaaaggagtaggtacaattgtgatgttttgaggtaaccaaagtgtgtcatgaaaaagaacgtcaagaagaaaggcagaggaac

SEQ ID NO: 165003 - DNA, 120 bp, Artificial Sequence
  ENSG00000108021_81 (sequence is synthesized)
tcatgagtttgaatggttaaactgaaggcaagaaaaagtcctaagaataaaactgaaaaatattttaatatgcctatgtatctttcacagagtggattcaactgcacataagaagaacat

SEQ ID NO: 165004 - DNA, 120 bp, Artificial Sequence
  ENSG00000108021_82 (sequence is synthesized)
taggggtggaattgctatttggcataaataggaattcctaaattatcactaaatgaagtaaccatctactaaaattacctattttatctaatgtgcattttcacttgctgttaacttgga

SEQ ID NO: 165005 - DNA, 120 bp, Artificial Sequence
  ENSG00000108021_83 (sequence is synthesized)
tcgtcagtacagaacataatgtaaccttagaatgcataggcgttttccccattagagcatcccgcttataaaatatttcttgttcgtattattttaagaagttctttatcaattttgtgt

SEQ ID NO: 165006 - DNA, 120 bp, Artificial Sequence
  ENSG00000108021_84 (sequence is synthesized)
gtttagatttctaactttaaacatatgaatgagatttgagtctaaaacttaacagtatttttcagtgtcaagagattggtattgtcttgagaatctcttctaaattgtcacaatggcaat

SEQ ID NO: 165007 - DNA, 120 bp, Artificial Sequence
  ENSG00000108021_85 (sequence is synthesized)
aagaatagaaaatagagctgaccgaacttggcaactatggaatgtgaggggtaagagaggaaataatcaaatataagcttttaaacttacactacagtgataattattaatagaaaagag

SEQ ID NO: 165008 - DNA, 120 bp, Artificial Sequence
  ENSG00000108039_0 (sequence is synthesized)
ctccttcgcgccggcccttccgcgggtgatcagctggtctgcgctcccctgacgtgggctggggcacgtcaccgccgaatggcagcctccagaaagccaccgcgagtaagggtgaatcac

SEQ ID NO: 165009 - DNA, 120 bp, Artificial Sequence
  ENSG00000108039_1 (sequence is synthesized)
caggattttcaactgagaaatttaagaataattgaacctaacgaggtgacacactcaggagacacaggtgtggaaacagacggcagaatgcctccaaaggtgacttcagagctgcttcgg

SEQ ID NO: 165010 - DNA, 120 bp, Artificial Sequence
  ENSG00000108039_2 (sequence is synthesized)
cagctgagacaagccatgaggaactctgagtatgtgaccgaaccgatccaggcctacatcatcccatcgggagatgctcatcagagtgagtatattgctccatgtgactgtcggcgggct

SEQ ID NO: 165011 - DNA, 120 bp, Artificial Sequence
  ENSG00000108039_3 (sequence is synthesized)
tttgtctctggattcgatggctctgcgggcacagccatcatcacagaagagcatgcagccatgtggactgacgggcgctactttctccaggctgccaagcaaatggacagcaactggaca

SEQ ID NO: 165012 - DNA, 120 bp, Artificial Sequence
  ENSG00000108039_4 (sequence is synthesized)
cttatgaagatgggtctgaaggacacaccaactcaggaagactggctggtgagtgtgcttcctgaaggatccagggttggtgtggaccccttgatcattcctacagattattggaagaaa

SEQ ID NO: 165013 - DNA, 120 bp, Artificial Sequence
  ENSG00000108039_5 (sequence is synthesized)
atggccaaagttctgagaagtgccggccatcacctcattcctgtcaaggagaacctcgttgacaaaatctggacagaccgtcctgagcgcccttgcaagcctctcctcacactgggcctg

SEQ ID NO: 165014 - DNA, 120 bp, Artificial Sequence
  ENSG00000108039_6 (sequence is synthesized)
gattacacaggcatctcctggaaggacaaggttgcagaccttcggttgaaaatggctgagaggaacgtcatgtggtttgtggtcactgccttggatgagattgcgtggctatttaatctc

SEQ ID NO: 165015 - DNA, 120 bp, Artificial Sequence
  ENSG00000108039_7 (sequence is synthesized)
cgaggatcagatgtggagcacaatccagtatttttctcctacgcaatcataggactagagacgatcatgctcttcattgatggtgaccgcatagacgcccccagtgtgaaggagcacctg

SEQ ID NO: 165016 - DNA, 120 bp, Artificial Sequence
  ENSG00000108039_8 (sequence is synthesized)
cttcttgacttgggtctggaagccgaatacaggatccaggtgcatccctacaagtccatcctgagcgagctcaaggccctgtgtgctgacctctccccaagggagaaggtgtgggtcagt

SEQ ID NO: 165017 - DNA, 120 bp, Artificial Sequence
  ENSG00000108039_9 (sequence is synthesized)
gacaaggccagctatgctgtgagcgagaccatccccaaggaccaccgctgctgtatgccttacacccccatctgcatcgccaaagctgtgaagaattcagctgagtcagaaggcatgagg

SEQ ID NO: 165018 - DNA, 120 bp, Artificial Sequence
  ENSG00000108039_10 (sequence is synthesized)
acaaagctgaggagtttcgcaggcaacaggcagactttgtggacctgagcttcccaacaatttccagtacgggacccaacggcgccatcattcactacgcgccagtccctgagacgaata

SEQ ID NO: 165019 - DNA, 120 bp, Artificial Sequence
  ENSG00000108039_11 (sequence is synthesized)
ggaccttgtccctggatgaggtgtaccttattgactcgggtgctcaatacaaggatggcaccacagatgtgacgcggacaatgcattttgggacccctacagcctacgagaaggaatgct

SEQ ID NO: 165020 - DNA, 120 bp, Artificial Sequence
  ENSG00000108039_12 (sequence is synthesized)
tcacatatgtcctcaagggccacatagctgtgagtgcagccgttttcccgactggaaccaaaggtcaccttcttgactcctttgcccgttcagctttatgggattcaggcctagattact

SEQ ID NO: 165021 - DNA, 120 bp, Artificial Sequence
  ENSG00000108039_13 (sequence is synthesized)
tgcacgggactggacatggtgttgggtcttttttgaatgtccatgagggtccttgcggcatcagttacaaaacattctctgatgagcccttggaggcaggcatgattgtcactgatgagc

SEQ ID NO: 165022 - DNA, 120 bp, Artificial Sequence
  ENSG00000108039_14 (sequence is synthesized)
ccgggtactatgaagatggggcttttggaattcgcattgagaatgttgtccttgtggttcctgtgaagaccaagtataattttaataaccggggaagcctgacctttgaacctctaacat

SEQ ID NO: 165023 - DNA, 120 bp, Artificial Sequence
  ENSG00000108039_15 (sequence is synthesized)
tggttccaattcagaccaaaatgatagatgtggattctcttacagacaaagagtgcgactggctcaacaattaccacctgacctgcagggatgtgattgggaaggaattgcagaaacagg

SEQ ID NO: 165024 - DNA, 120 bp, Artificial Sequence
  ENSG00000108039_16 (sequence is synthesized)
gccgccaggaagctctcgagtggctcatcagagagacgcaacccatctccaaacagcattaataaatacctccccggttttgtttttgtaaaatgctctggaggaaggaagaaacgtggc

SEQ ID NO: 165025 - DNA, 120 bp, Artificial Sequence
  ENSG00000108039_17 (sequence is synthesized)
agatccctgacatctttcccctttcctttccttcttccctacctcccctttttactttagactttaagaagaacagaaaatcttcttatcctctttgatattttattgcaaacactcagt

SEQ ID NO: 165026 - DNA, 120 bp, Artificial Sequence
  ENSG00000108039_18 (sequence is synthesized)
cttttatgattttttaattgttgagaacaagccaagaataaaattgctgcaccagaaggagggtccctccaaagttgaacacttggtgaaaggaagatgccccgacttctttggccagtg

SEQ ID NO: 165027 - DNA, 120 bp, Artificial Sequence
  ENSG00000108039_19 (sequence is synthesized)
atggggaatcagtgagtgctccatgatggtcatgttccaggtgctagtacatcattcatgatcaccttaatgctcatgagactatatttatgatcagtgaataaaaatgtcagaactgtg

SEQ ID NO: 165028 - DNA, 120 bp, Artificial Sequence
  ENSG00000108039_20 (sequence is synthesized)
atcattcactacgcgtaaggcatgcggaggagcatgctgcctggccttgctgcttctgcacaggagcctgagcaggggagagacattattttaccagaggcctctgtgcccaccttcatc

SEQ ID NO: 165029 - DNA, 120 bp, Artificial Sequence
  ENSG00000108039_21 (sequence is synthesized)
tgtctgttgagactgtaaaatgaagggaaataagacttctaagattttattttctcccaatccccaagcctctgccttttgggagcctcttcttaggctcagtatggcactggcattctc

SEQ ID NO: 165030 - DNA, 120 bp, Artificial Sequence
  ENSG00000108039_22 (sequence is synthesized)
tgcagggtagtcagatgggtgtccctctttcctttttgaagctgcaggaactgtatgcatagcccttgcatcttgatgactaagtttttttttttttggagacaaggtcttgctctgctg

SEQ ID NO: 165031 - DNA, 120 bp, Artificial Sequence
  ENSG00000108039_23 (sequence is synthesized)
taagtttttttttttttggagacaaggtcttgctctgctgcccaggctggagcgcagtggtgccatcacaactcactgcaactttgaactcctagactcaagcaatcctcctgcctcagc

SEQ ID NO: 165032 - DNA, 120 bp, Artificial Sequence
  ENSG00000108039_24 (sequence is synthesized)
actataggcatgtgctaccactcctggctaatttttagatttttttgtagagatgaggatcttgatgtgttgcccaggcttgtctcgaatttctggactcaagcaatcctcctgcctcag

SEQ ID NO: 165033 - DNA, 120 bp, Artificial Sequence
  ENSG00000108039_25 (sequence is synthesized)
gtgtgagccactgtgcttggcccatgactggaatttttgagtagttttctttcttggtaacagcagctgttttgtactagtccatacatcttgtgagctccatcagttccataccaaaaa

SEQ ID NO: 165034 - DNA, 120 bp, Artificial Sequence
  ENSG00000108039_26 (sequence is synthesized)
aaaacttagtagtaggttgtgaggcaacctgttttgggtggagagataatcagtaccctctcttcctgtccccctgagcctgaagcctggcatcccagtatgtggtttttttaccacgtg

SEQ ID NO: 165035 - DNA, 120 bp, Artificial Sequence
  ENSG00000108039_27 (sequence is synthesized)
gtctacaagaacccatggacccacagggccgagcctcccttccttgtgagacagaggggcactgatatgtctaggactgacagatcttcctgtggagatggggggaaatgtcattaggtg

SEQ ID NO: 165036 - DNA, 120 bp, Artificial Sequence
  ENSG00000108039_28 (sequence is synthesized)
tggccattgggcttcagcctcagctctgcctggttcaaaccgctttgctttgcactgggtattttgagttctgtgcatccccatctgttacatgcacagccaacaaaagaacactgtgct

SEQ ID NO: 165037 - DNA, 120 bp, Artificial Sequence
  ENSG00000108039_29 (sequence is synthesized)
ttgaagctgtgtgtgggagacagtcacagatgggacagtacagtttcctcacttaatgcttctgttccagcataaaaatatcagagggacttcagtttttgtttaactcaggatgaattt

SEQ ID NO: 165038 - DNA, 120 bp, Artificial Sequence
  ENSG00000108039_30 (sequence is synthesized)
cctggctggatactatcctagaattttccgtataattaaaacattaaacagtttcatgccagtggaagaaatttgcctctgcgttggcatttcttcattgtgggtggttggaagcctgtt

SEQ ID NO: 165039 - DNA, 120 bp, Artificial Sequence
  ENSG00000108039_31 (sequence is synthesized)
tagaggcggggttctggaggtactggttgtcttttttagttgttcagcttgtgtgtggactggtgcccttattgctgaagagggggtggtacctggaaatggaggacaacctcacttcag

SEQ ID NO: 165040 - DNA, 120 bp, Artificial Sequence
  ENSG00000108039_32 (sequence is synthesized)
ctgcagggcagagacttggagtgctctcatccctttgggtgtttcccagtgcagtgatattgttttgaaaacggtgtggggaaagagatcactttttgaaaatacctcatgtttgtttga

SEQ ID NO: 165041 - DNA, 120 bp, Artificial Sequence
  ENSG00000108039_33 (sequence is synthesized)
agcagaagaatatcgtgatccattccttttcccagcaaaattcctttagtttttctcccaagttgagacatccactcctgcctgtctagcagtctggggagcgagtggggaggtacctgc

SEQ ID NO: 165042 - DNA, 120 bp, Artificial Sequence
  ENSG00000108039_34 (sequence is synthesized)
tggggtcagggctgaaggaggggcctggaggctgaggcaggggcctggggctcccagagacaagcaaggctgcagtgactccaggctgctcctgtcccagttcccaggactctagctagg

SEQ ID NO: 165043 - DNA, 120 bp, Artificial Sequence
  ENSG00000108039_35 (sequence is synthesized)
tcctgttgcatctaatcgttctcatttttttagcttttagaattatctcttgaacacctattttgtttcagacacaaacagaggtagacataaagaaatgtgttacttttcctttgttga

SEQ ID NO: 165044 - DNA, 120 bp, Artificial Sequence
  ENSG00000108039_36 (sequence is synthesized)
gctctttatctcagctggggagataggttgattggatctttgaaaagtagaagtttaatattagttgaaataattcattattgcataactttctattttgatataatttcaggcttatgt

SEQ ID NO: 165045 - DNA, 120 bp, Artificial Sequence
  ENSG00000108039_37 (sequence is synthesized)
aagttgcaagaatagtacaaagagctcttgtgtgtcctcctcccagattcactaagtgtttacatttgtggaataattaatttttaattaactttgttaggccagtccctgagacgaata

SEQ ID NO: 165046 - DNA, 120 bp, Artificial Sequence
  ENSG00000108039_38 (sequence is synthesized)
cttacgatgatttcttaggaggggatgcttttgaatttttaaacttagatatgttgttttgggaggttttaggataaaatactgaagcacaatagttgagtgaaaaattaaatgaataga

SEQ ID NO: 165047 - DNA, 120 bp, Artificial Sequence
  ENSG00000108039_39 (sequence is synthesized)
aactattggattttagatagctttggtgagagcctttgggagttctcccttgctaaagatgtgtcctgtagattggtcagttgggatgaagcaattgaggaaaaagtgagcttttaatgt

SEQ ID NO: 165048 - DNA, 120 bp, Artificial Sequence
  ENSG00000108039_40 (sequence is synthesized)
aaacttagttggcctgatctgggcagggatcctagaggtcctcaggactcctggatcttaatccttttatgcagtcatggacccttttgagaatccaaggaaaactgagaaaaaaaaaaa

SEQ ID NO: 165049 - DNA, 120 bp, Artificial Sequence
  ENSG00000108039_41 (sequence is synthesized)
gtgctgaaatctgaaccctccagtaacttacctattggtttctgtttcacgttctggagccacacataataaatttaatctctaaagcgctgtacaaatacaattaagtggctctttatg

SEQ ID NO: 165050 - DNA, 120 bp, Artificial Sequence
  ENSG00000108039_42 (sequence is synthesized)
cgaatggcagcctccagaaagccaccgcgagtaagggtgaatcaccaggattttcaactgagaaatttaagaataattgaacctaacgaggtgacacactcaggagacacagacggcaga

SEQ ID NO: 165051 - DNA, 120 bp, Artificial Sequence
  ENSG00000108039_43 (sequence is synthesized)
gtgcgattccactgaatccttgcgcagcagctggactccaagctgaagctcttccctcccgctacaagcgaccccttaacatcttaagtcagacaggtgacagggattttgatttctttt

SEQ ID NO: 165052 - DNA, 120 bp, Artificial Sequence
  ENSG00000108039_44 (sequence is synthesized)
atctggaactcccttccagagctcctcagagccctagtgtgccctttctggtcctggcccacccatcactgcctgatatttcactgatgtgcttcttttttcttgcccttttaacatttt

SEQ ID NO: 165053 - DNA, 120 bp, Artificial Sequence
  ENSG00000108039_45 (sequence is synthesized)
cccttcttgttttccttagcagtaggtgtttatttatatcctgcctctctttgagcccccaaaatggtttgaaacgcatgaaagtgtctatagttcgggccacccatttgatgtcaagtt

SEQ ID NO: 165054 - DNA, 120 bp, Artificial Sequence
  ENSG00000108039_46 (sequence is synthesized)
ctccttcgcgccggcccttccgcgggtgatcagctggtctgcgctcccctgacgtgggctggggcacgtcaccgccgaatggcagcctccagaaagccaccgcgagtaagacggcagaat

SEQ ID NO: 165055 - DNA, 120 bp, Artificial Sequence
  ENSG00000108039_47 (sequence is synthesized)
tacatgcccaccagcattgtatggggcttctcacttgtccacatgcttgcctgtgtcatatttgacttaaagcttattttgacgggaaaccaatttgtcctttttttggaaagggatggc

SEQ ID NO: 165056 - DNA, 120 bp, Artificial Sequence
  ENSG00000108039_48 (sequence is synthesized)
gatttttgagtaagatctcagtgaagaaagagcagtttttatctgtttctcctgatgtgctttggttctcctaatgaggaaatagaggctaaagggaacagctctctctgcccttaatta

SEQ ID NO: 165057 - DNA, 120 bp, Artificial Sequence
  ENSG00000108039_49 (sequence is synthesized)
tcaggtcctttggcttgggagaatcctggtaactgcagaaggagcagcagctctgtactcaggcaggcctggctttggatcctgacctactattaacttagtgagtatattgctccatgt

SEQ ID NO: 165058 - DNA, 120 bp, Artificial Sequence
  ENSG00000108039_50 (sequence is synthesized)
actcttggcttaaataacaaaggttaactctaagctgcattggtgttcctcaaaaccattatgcctttgagttttagggtggactccccacttcaggcacagccatcatcacagaagagc

SEQ ID NO: 165059 - DNA, 120 bp, Artificial Sequence
  ENSG00000108039_51 (sequence is synthesized)
aaacttaagttagggaattgttggtgcttaacacagaaattcagccttacttttcagaaaaataacagatgcctaaatgtcagtggcaaggaggggagaaggctattattggtttgattt

SEQ ID NO: 165060 - DNA, 120 bp, Artificial Sequence
  ENSG00000108055_0 (sequence is synthesized)
ttttgtttggctgaggggagcgagcggcgctttgggggaggggtcgcgtaggcgcctcacctgaccctgcggccgtgcggttgctgctccggggcaggtctccttccaggccaggggccc

SEQ ID NO: 165061 - DNA, 120 bp, Artificial Sequence
  ENSG00000108055_1 (sequence is synthesized)
ggaatcatgtacataaagcaggtgattatccagggttttcgaagttacagagatcaaacaattgtagatcccttcagttcaaaacataatgtgattgtgggcagaaatggatctggaaaa

SEQ ID NO: 165062 - DNA, 120 bp, Artificial Sequence
  ENSG00000108055_2 (sequence is synthesized)
agtaactttttttatgcaattcagtttgttctcagtgatgagtttagtcatcttcgtccagaacagcggttggctttattgcatgaaggtactggtcctcgtgttatttctgcttttgtg

SEQ ID NO: 165063 - DNA, 120 bp, Artificial Sequence
  ENSG00000108055_3 (sequence is synthesized)
gagattatttttgataattcagacaaccggttaccaatcgataaagaggaagtttcacttcgaagagttattggtgccaaaaaggatcagtatttcttagacaagaagatggtcacgaaa

SEQ ID NO: 165064 - DNA, 120 bp, Artificial Sequence
  ENSG00000108055_4 (sequence is synthesized)
aatgatgtgatgaacctccttgaaagcgctggtttttctcgaagcaatccttattatattgttaaacaaggaaagatcaaccagatggcaacagcaccagattctcagagattaaagcta

SEQ ID NO: 165065 - DNA, 120 bp, Artificial Sequence
  ENSG00000108055_5 (sequence is synthesized)
ttaagagaagtagctggtactagagtgtatgacgaacgaaaggaagaaagcatctccttaatgaaagaaacagagggcaaacgggaaaaaatcaatgagttgttaaaatacattgaagag

SEQ ID NO: 165066 - DNA, 120 bp, Artificial Sequence
  ENSG00000108055_6 (sequence is synthesized)
agattacatactctagaggaagaaaaggaagaactagctcagtatcagaagtgggataaaatgagacgagccctggaatataccatttacaatcaggaacttaacgagactcgtgccaaa

SEQ ID NO: 165067 - DNA, 120 bp, Artificial Sequence
  ENSG00000108055_7 (sequence is synthesized)
cttgatgagctttctgctaagcgagagactagtggagaaaaatccagacaattaagagatgctcagcaggatgcaagagataaaatggaggatatcgaacgccaagttagagaattgaaa

SEQ ID NO: 165068 - DNA, 120 bp, Artificial Sequence
  ENSG00000108055_8 (sequence is synthesized)
acaaaaatttcagctatgaaagaagaaaaagaacagcttagtgctgaaagacaagagcagattaagcagaggactaagttggagcttaaagccaaggatttacaagatgaactagcaggc

SEQ ID NO: 165069 - DNA, 120 bp, Artificial Sequence
  ENSG00000108055_9 (sequence is synthesized)
aatagtgaacaaaggaaacgtttattaaaagagaggcagaagctgcttgaaaaaatagaagaaaagcagaaagaactggcagaaacagaacccaaattcaacagtgtgaaagagaaagaa

SEQ ID NO: 165070 - DNA, 120 bp, Artificial Sequence
  ENSG00000108055_10 (sequence is synthesized)
gaacgaggaattgctagattggctcaagctacccaggaaagaacggatctttatgcaaagcagggtcgaggaagccagtttacatcaaaagaagaaagggataagtggattaaaaaggaa

SEQ ID NO: 165071 - DNA, 120 bp, Artificial Sequence
  ENSG00000108055_11 (sequence is synthesized)
ctcaagtctttagatcaggctattaatgacaagaaaagacagattgctgctatacataaggatttggaagacactgaagcaaataaagagaaaaatctggagcagtataataaactggac

SEQ ID NO: 165072 - DNA, 120 bp, Artificial Sequence
  ENSG00000108055_12 (sequence is synthesized)
caggatcttaatgaagtcaaagctcgagtagaagaactggacagaaaatattacgaagtaaaaaataagaaagatgaactacaaagtgaaagaaactacttgtggagagaagagaatgca

SEQ ID NO: 165073 - DNA, 120 bp, Artificial Sequence
  ENSG00000108055_13 (sequence is synthesized)
gaacagcaagcacttgctgctaaaagagaagatcttgaaaagaagcaacaacttcttagagcagcaacaggaaaggccattttaaatggaatagacagcataaacaaagtgctagaccac

SEQ ID NO: 165074 - DNA, 120 bp, Artificial Sequence
  ENSG00000108055_14 (sequence is synthesized)
ttccgtcgaaaaggaataaaccagcatgttcaaaatggctatcatggtattgtaatgaataactttgaatgtgaaccagctttctacacatgcgtggaagtcactgctggaaacaggtta

SEQ ID NO: 165075 - DNA, 120 bp, Artificial Sequence
  ENSG00000108055_15 (sequence is synthesized)
ttttatcacattgttgattcagatgaagtcagcacgaagattttaatggagtttaataaaatgaatcttcctggagaggttacttttctgcctcttaacaagttagatgtcagggataca

SEQ ID NO: 165076 - DNA, 120 bp, Artificial Sequence
  ENSG00000108055_16 (sequence is synthesized)
gcctatcctgaaaccaatgatgctattcctatgatcagcaaactgaggtacaatcccagatttgacaaagctttcaaacatgtgtttggaaagactcttatttgtcgtagcatggaagtt

SEQ ID NO: 165077 - DNA, 120 bp, Artificial Sequence
  ENSG00000108055_17 (sequence is synthesized)
gtattactttggaaggtgaccaagtcagccatcggggtgctctaactgggggttattatgacacaaggaagtctcgacttgaattgcaaaaagatgttagaaaagcagaagaagaactag

SEQ ID NO: 165078 - DNA, 120 bp, Artificial Sequence
  ENSG00000108055_18 (sequence is synthesized)
gtgaacttgaagcaaagctcaatgaaaacctgcgcagaaatattgaaaggattaataatgaaattgatcagttgatgaaccaaatgcaacagatcgagacccagcaaaggaaatttaaag

SEQ ID NO: 165079 - DNA, 120 bp, Artificial Sequence
  ENSG00000108055_19 (sequence is synthesized)
catctagagatagcatattatcagaaatgaagatgctaaaagagaagaggcagcagtcagagaaaaccttcatgcctaagcaacgtagcttacagagtttggaggcaagcttgcatgcta

SEQ ID NO: 165080 - DNA, 120 bp, Artificial Sequence
  ENSG00000108055_20 (sequence is synthesized)
tggagtctaccagagagtcattgaaagcagaactgggaactgatttgctttctcaactgagtttggaagatcagaagagagtagatgcactgaatgatgagattcgtcaacttcagcagg

SEQ ID NO: 165081 - DNA, 120 bp, Artificial Sequence
  ENSG00000108055_21 (sequence is synthesized)
aaaacagacagttgctaaatgaaagaattaaattagaaggtattattactcgagtagagacttatctcaatgagaatctgagaaaacgcttggaccaagtagaacaggaacttaatgagc

SEQ ID NO: 165082 - DNA, 120 bp, Artificial Sequence
  ENSG00000108055_22 (sequence is synthesized)
tgagagagacagaagggggtactgttctcacagccacaacatcagaacttgaagccatcaataaaagagtaaaagacactatggcacgatcagaagatttggacaattccattgataaaa

SEQ ID NO: 165083 - DNA, 120 bp, Artificial Sequence
  ENSG00000108055_23 (sequence is synthesized)
cagaagctggaattaaggagcttcagaagagtatggagcgctggaaaaatatggaaaaagaacatatggatgctataaatcatgatactaaagaactggaaaagatgacaaatcggcaag

SEQ ID NO: 165084 - DNA, 120 bp, Artificial Sequence
  ENSG00000108055_24 (sequence is synthesized)
gcatgctattgaagaagaaagaagagtgtatgaagaaaattcgagaacttggatcacttccccaggaagcatttgaaaagtaccagacactgagcctcaaacagttgtttcgaaaacttg

SEQ ID NO: 165085 - DNA, 120 bp, Artificial Sequence
  ENSG00000108055_25 (sequence is synthesized)
agcagtgcaacacagaattaaagaagtacagccatgttaacaaaaaggctttggatcagtttgtaaatttctccgagcagaaagaaaagttaataaagcgtcaagaagagttagataggg

SEQ ID NO: 165086 - DNA, 120 bp, Artificial Sequence
  ENSG00000108055_26 (sequence is synthesized)
gttacaaatcaatcatggaactgatgaatgtacttgaacttcggaaatatgaagctattcagttaactttcaaacaggtatctaagaacttcagtgaagtattccagaagttagtacctg

SEQ ID NO: 165087 - DNA, 120 bp, Artificial Sequence
  ENSG00000108055_27 (sequence is synthesized)
gtggcaaagctactttggtgatgaagaaaggagatgtggagggcagtcagtctcaagatgaaggagaagggagtggtgagagtgagaggggttctggctcacaaagcagtgtcccatcag

SEQ ID NO: 165088 - DNA, 120 bp, Artificial Sequence
  ENSG00000108055_28 (sequence is synthesized)
ttgaccagtttactggagttggaattagggtgtcatttacaggaaaacaaggtgaaatgagagaaatgcaacagctttcaggtggacagaaatccttggtagcccttgctctgatttttg

SEQ ID NO: 165089 - DNA, 120 bp, Artificial Sequence
  ENSG00000108055_29 (sequence is synthesized)
ccattcagaaatgtgacccggctccattttacttgtttgatgaaattgaccaggctctggatgctcagcacagaaaggctgtgtcagatatgattatggaacttgctgtacatgctcagt

SEQ ID NO: 165090 - DNA, 120 bp, Artificial Sequence
  ENSG00000108055_30 (sequence is synthesized)
ttattacaactacttttaggcctgaactgcttgagtcagctgacaaattctatggtgtaaagttcagaaataaggttagtcatattgatgtgatcacagcagagatggccaaagactttg

SEQ ID NO: 165091 - DNA, 120 bp, Artificial Sequence
  ENSG00000108055_31 (sequence is synthesized)
tagaagatgataccacacatggttaattggaaaatactacctactggtttgggagatgtatatagtaatatgattctcatacccaggaactgtaaatttaaacctaaatatttggccaat

SEQ ID NO: 165092 - DNA, 120 bp, Artificial Sequence
  ENSG00000108055_32 (sequence is synthesized)
agttttcagacttaaagcatcatagtccttttatatttgtctttgtattttataagatactctgtaatgtcatgtttgtactgatagtttaagaatttaatttcctgtacaactttttgt

SEQ ID NO: 165093 - DNA, 120 bp, Artificial Sequence
  ENSG00000108055_33 (sequence is synthesized)
aaaatgttctgctcctattttaaatgttttgaaacatgctaaatattctttcctaattattttatcacttatactaccttttttatagcttcaattaaataatcggttttatgactaata

SEQ ID NO: 165094 - DNA, 120 bp, Artificial Sequence
  ENSG00000108055_34 (sequence is synthesized)
tctccccagttaacccgcgaagtgagcgggaccctcctgcttgcaggatacggagcgccgcctccctcggttgtttacttctgtcaaaatggtcttcccgcgcgggactccaccacaaag

SEQ ID NO: 165095 - DNA, 120 bp, Artificial Sequence
  ENSG00000108061_0 (sequence is synthesized)
gggggaggggcgggcggggggcggcggttgggcagcgtcgcttcttaggaggaggaggaagaggaggaaggagggcgagcgaggaggatggcggagtcggggctcctgacggaactctaa

SEQ ID NO: 165096 - DNA, 120 bp, Artificial Sequence
  ENSG00000108061_1 (sequence is synthesized)
tgaatcattgattgaccagcactattttaccagttggaatgaatgatcagaaatgggcatagtgcttttagatccaacatgtaacagatggatgttactccatgctgattacttcttcaa

SEQ ID NO: 165097 - DNA, 120 bp, Artificial Sequence
  ENSG00000108061_2 (sequence is synthesized)
gccagtacttttttgattgtgtaggatctttgtctcttcatctttgaattcaattactggaaaataaaaggagttcatgtagtttttgtccaggcttgagtcaccatgagtagtagttta

SEQ ID NO: 165098 - DNA, 120 bp, Artificial Sequence
  ENSG00000108061_3 (sequence is synthesized)
ggaaaagaaaaagactctaaagaaaaagatcccaaagtaccatcagccaaggaaagagaaaaggaggcaaaagcctctggaggttttgggaaagagagcaaagaaaaagaacctaagacc

SEQ ID NO: 165099 - DNA, 120 bp, Artificial Sequence
  ENSG00000108061_4 (sequence is synthesized)
aaagggaaagatgccaaagatggaaagaaggactccagtgctgcccaaccaggggtggcattttcagttgacaatacgatcaaacggccaaacccagcacctgggactagaaaaaaatcc

SEQ ID NO: 165100 - DNA, 120 bp, Artificial Sequence
  ENSG00000108061_5 (sequence is synthesized)
agcaatgcagaggtgattaaagagctcaacaaatgccgggaagagaattcaatgcgtttggacttatccaagagatctatacacatattgccatcatcaatcaaagagttgactcaatta

SEQ ID NO: 165101 - DNA, 120 bp, Artificial Sequence
  ENSG00000108061_6 (sequence is synthesized)
acagaactttatttatacagtaacaaattgcagtccctcccagcagaggtgggatgtttagtaaatctcatgacactggctctaagtgaaaattcacttaccagtttgcctgactctctt

SEQ ID NO: 165102 - DNA, 120 bp, Artificial Sequence
  ENSG00000108061_7 (sequence is synthesized)
gataacttgaagaagctgcggatgcttgatttacggcataataaactgagagaaattccttcagtggtgtataggctggattctctcaccactctttaccttcgctttaatcgtataact

SEQ ID NO: 165103 - DNA, 120 bp, Artificial Sequence
  ENSG00000108061_8 (sequence is synthesized)
actgtggaaaaggacatcaaaaacttgtcaaaactcagcatgcttagcattcgagagaacaaaattaaacaactacctgctgaaattggtgaattatgtaacctcattacgctggatgta

SEQ ID NO: 165104 - DNA, 120 bp, Artificial Sequence
  ENSG00000108061_9 (sequence is synthesized)
gctcacaatcaacttgaacaccttccaaaggagattggaaactgtacacagataaccaaccttgacttgcagcacaatgaactgctagacctcccagatactataggaaacctgtccagt

SEQ ID NO: 165105 - DNA, 120 bp, Artificial Sequence
  ENSG00000108061_10 (sequence is synthesized)
ttaagtcgtcttggtctgagatataacagactgtcagcaatacccagatcattagcaaaatgcagtgcacttgaagaattaaatttagagaacaataacatttctactttaccagagagt

SEQ ID NO: 165106 - DNA, 120 bp, Artificial Sequence
  ENSG00000108061_11 (sequence is synthesized)
cttttatcaagtcttgtgaaactgaatagtttgaccttagctagaaattgcttccagttgtatccagtgggtggtccatctcagttttctaccatctattccctcaacatggaacacaat

SEQ ID NO: 165107 - DNA, 120 bp, Artificial Sequence
  ENSG00000108061_12 (sequence is synthesized)
cgaatcaacaaaattccatttggaattttctccagagcaaaagtattaagtaagctgaatatgaaggacaatcagttaacatcacttcccttggattttggaacttggaccagtatggta

SEQ ID NO: 165108 - DNA, 120 bp, Artificial Sequence
  ENSG00000108061_13 (sequence is synthesized)
gaattgaatttagccactaatcagctcacaaagatccctgaggatgtgtctggtctcgtttctcttgaggttcttatcttatcaaacaatcttctaaagaagcttccccatggtcttgga

SEQ ID NO: 165109 - DNA, 120 bp, Artificial Sequence
  ENSG00000108061_14 (sequence is synthesized)
aaccttaggaagttaagagagttggatctagaagagaacaaattggaatccttgccaaatgaaattgcatatcttaaggatttacagaaattagtcttgacaaacaaccagttgaccact

SEQ ID NO: 165110 - DNA, 120 bp, Artificial Sequence
  ENSG00000108061_15 (sequence is synthesized)
cttcccagaggcattggtcaccttactaatctcacacatctgggccttggagagaacctacttactcaccttcctgaagaaattggtacactggagaacctagaagaactgtatttgaat

SEQ ID NO: 165111 - DNA, 120 bp, Artificial Sequence
  ENSG00000108061_16 (sequence is synthesized)
ttgttgctggggggccttctttcatcattcagttcttaaagatgcagggtccatatcgtgccatggtctgatataaatctgctggtcccacacactgttcaaaaatagactgccattaat

SEQ ID NO: 165112 - DNA, 120 bp, Artificial Sequence
  ENSG00000108061_17 (sequence is synthesized)
gtttcttatctatatctgtatctatttatgtagatattggtatatggcagatttataaaaattgcattatgtgtttctgctaatagaggaatcatagccatttagaattttttttaaatt

SEQ ID NO: 165113 - DNA, 120 bp, Artificial Sequence
  ENSG00000108061_18 (sequence is synthesized)
ctgtacaaaaggcttatataagttttctttgctgaatttgatggatgtttttctgttgtgtaatctgatatgccagtttgcttaaaacatttgccaacacattatgaagttattaaattt

SEQ ID NO: 165114 - DNA, 120 bp, Artificial Sequence
  ENSG00000108061_19 (sequence is synthesized)
aagggacagaggtagtatagttagatatactttctcttaggaaaaataatgggcaaaaatttttgttgcaacttttcatatatattttccccttaccaattgttttatccttatagtatt

SEQ ID NO: 165115 - DNA, 120 bp, Artificial Sequence
  ENSG00000108061_20 (sequence is synthesized)
gtaggccctgaaagtagaatttttctttaacttattttgagatttgagatttaaattttatgtattgtttacagtcagagtaaatcactggatttcttttgtttgttttgatttgctctg

SEQ ID NO: 165116 - DNA, 120 bp, Artificial Sequence
  ENSG00000108061_21 (sequence is synthesized)
ttttattcagtcaaatctagagtttgaatcctctgctaaagaatttgcatccactggtgtaaacagtgaaaggtatttgcttgttgaaaaaaaaaactggcaaagtgaaaagatacagtc

SEQ ID NO: 165117 - DNA, 120 bp, Artificial Sequence
  ENSG00000108061_22 (sequence is synthesized)
aaaaatctagaatttctttaattttgcttctctgacgagttgtgaagcaaaatacctgaagtgagtctttgggtaggggaagggtattgagaccttttctagtatgaatattttttaagt

SEQ ID NO: 165118 - DNA, 120 bp, Artificial Sequence
  ENSG00000108061_23 (sequence is synthesized)
ttgggggaagagaaacttgcagtgaaaaggagttttttcattcctgaaagttgcagatccacaaaactaacaggataattgggcaaataaattacatataaacacacacaatctatatat

SEQ ID NO: 165119 - DNA, 120 bp, Artificial Sequence
  ENSG00000108061_24 (sequence is synthesized)
gtatatacaatgctatatagatatgtatttattatatcataaactacagtaggtaactttaaggatttcttcctatccttgtacaatgacatgaatgtctttctttgaaaactgcaatgt

SEQ ID NO: 165120 - DNA, 120 bp, Artificial Sequence
  ENSG00000108061_25 (sequence is synthesized)
atgtatgtttcaaggttatttaacagtgtactatggttttatatcttgacttgccttgtacatctttcaattctggaatatctgtgtctaagcacaatatcttcacactgtgctgtattg

SEQ ID NO: 165121 - DNA, 120 bp, Artificial Sequence
  ENSG00000108061_26 (sequence is synthesized)
ctgctgaactaaatgcacttttccccacatatggggcactggcttcaaacaattcagttcagtatcattacttttaatctcatctttcctttcttggtagttgttaatacagttatggaa

SEQ ID NO: 165122 - DNA, 120 bp, Artificial Sequence
  ENSG00000108061_27 (sequence is synthesized)
aagaggcacattgcatagaagccattggggagttcagtggaagttctgtaagatgtgcatgtactatttgatgcgttttctttgcttcactgcttttaatacttagcagtattgttggtc

SEQ ID NO: 165123 - DNA, 120 bp, Artificial Sequence
  ENSG00000108061_28 (sequence is synthesized)
taagtcaatttgattattgaggagtctcagagcaaggtgcgttctagatgtcatcctaaaaaacacttcatatataattaatcactattttgtataattacatattgctgcttgtgtgtt

SEQ ID NO: 165124 - DNA, 120 bp, Artificial Sequence
  ENSG00000108061_29 (sequence is synthesized)
tttttttttttccatttagttgggcgttgtgttttacacaaaaccatttttgaattaaggctatgatattaagatagaaatttggactgttgttctgcttttcctggcactcaaattcat

SEQ ID NO: 165125 - DNA, 120 bp, Artificial Sequence
  ENSG00000108061_30 (sequence is synthesized)
gactagttttgaggtcaaacctatgttcgtaatgagagattttataaggatcaactaagaaatggaaggcaggtgaagatataaaaccctagaatgcttaaatgtgctgtaaaactattg

SEQ ID NO: 165126 - DNA, 120 bp, Artificial Sequence
  ENSG00000108061_31 (sequence is synthesized)
tagatgtcactggattttaccaagtaatatcctttcttttttttttccccccatctgctgtggcttttcagttaaaattttgtttataaaaggaatttgtttattacagctctacctaga

SEQ ID NO: 165127 - DNA, 120 bp, Artificial Sequence
  ENSG00000108061_32 (sequence is synthesized)
ccgggggcccccggcggacagtctctctcctctcggctccctgggcccccgggcccagtccgcagggcgccccgagtcgtgtaaatcgttggcgagggcccgggcgcagcggcggtcata

SEQ ID NO: 165128 - DNA, 120 bp, Artificial Sequence
  ENSG00000108061_33 (sequence is synthesized)
aggaggaggaggaagaggaggaaggagggcgagcgaggaggatggcggagtcggggctcctgacgcattgtttacaataaccaagatatgaaatcaacctatgtcttcattgatggaaga

SEQ ID NO: 165129 - DNA, 120 bp, Artificial Sequence
  ENSG00000108061_34 (sequence is synthesized)
atcaacctatgtcttcattgatggaagaatacacacagaaaatgtgacgttcagccttcaaatctaggaaatcctgatattggtgacatgatctgatcttggcccactgcaacctctgcc

SEQ ID NO: 165130 - DNA, 120 bp, Artificial Sequence
  ENSG00000108061_35 (sequence is synthesized)
agctaactggatattaataggactatttttgatccatttggtaatgaaaattcaggagtaaaattcacaattaccaaagttgtaaaacttttaagataatattttaaaatcatttttcat

SEQ ID NO: 165131 - DNA, 120 bp, Artificial Sequence
  ENSG00000108064_0 (sequence is synthesized)
atagtgcctcgctagtggcgggcatgataacacacgccggagggtcgcacgcgggttccagttgtgattgctggagttgtgtattgccaggaggctctccgagattggggtcgggtcact

SEQ ID NO: 165132 - DNA, 120 bp, Artificial Sequence
  ENSG00000108064_1 (sequence is synthesized)
gcctcatccaccggagcgatggcgtttctccgaagcatgtggggcgtgctgagtgccctgggaaggtctggagcagagctgtgcaccggctgtggaagtcgactgcgctcccccttcagt

SEQ ID NO: 165133 - DNA, 120 bp, Artificial Sequence
  ENSG00000108064_2 (sequence is synthesized)
tttgtgtatttaccgaggtggttttcatctgtcttggcaagttgtccaaagaaacctgtaagttcttaccttcgattttctaaagaacaactacccatatttaaagctcagaacccagat

SEQ ID NO: 165134 - DNA, 120 bp, Artificial Sequence
  ENSG00000108064_3 (sequence is synthesized)
gcaaaaactacagaactaattagaagaattgcccagcgttggagggaacttcctgattcaaagaaaaaaatatatcaagatgcttatagggcggagtggcaggtatataaagaagagata

SEQ ID NO: 165135 - DNA, 120 bp, Artificial Sequence
  ENSG00000108064_4 (sequence is synthesized)
agcagatttaaagaacagctaactccaagtcagattatgtctttggaaaaagaaatcatggacaaacatttaaaaaggaaagctatgacaaaaaaaaaagagttaacactgcttggaaaa

SEQ ID NO: 165136 - DNA, 120 bp, Artificial Sequence
  ENSG00000108064_5 (sequence is synthesized)
ccaaaaagacctcgttcagcttataacgtttatgtagctgaaagattccaagaagctaagggtgattcaccgcaggaaaagctgaagactgtaaaggaaaactggaaaaatctgtctgac

SEQ ID NO: 165137 - DNA, 120 bp, Artificial Sequence
  ENSG00000108064_6 (sequence is synthesized)
tctgaaaaggaattatatattcagcatgctaaagaggacgaaactcgttatcataatgaaatgaagtcttgggaagaacaaatgattgaagttggacgaaaggatcttctacgtcgcaca

SEQ ID NO: 165138 - DNA, 120 bp, Artificial Sequence
  ENSG00000108064_7 (sequence is synthesized)
ataaagaaacaacgaaaatatggtgctgaggagtgttaaaagtagaagattgagatgtgttcacaatggataggcacaggaaaccagttaggtctcaatacctgaagctatcgtaaaatt

SEQ ID NO: 165139 - DNA, 120 bp, Artificial Sequence
  ENSG00000108064_8 (sequence is synthesized)
aagaaaggataaagttggtaaaccttttatatttagtatctttttattcagctcatggacttctgccagcataatacttgctttggaaaacccagataaaggttcatgcaaactttattt

SEQ ID NO: 165140 - DNA, 120 bp, Artificial Sequence
  ENSG00000108064_9 (sequence is synthesized)
tgtgtttaggaactactgaggatcagagtaatccaagcaaatgtgaatcattttacctttgacaaaggtaaatcagactatgaagttttttttatacaggatgatgactatggaaagagt

SEQ ID NO: 165141 - DNA, 120 bp, Artificial Sequence
  ENSG00000108064_10 (sequence is synthesized)
actcttgtttccttatattatggaggcaggagtttcgttttcaaaattgttacaaattgtagaagccacggtgttctgtgatataagtgtgtgtttttcataaagcaggcagaactcatc

SEQ ID NO: 165142 - DNA, 120 bp, Artificial Sequence
  ENSG00000108064_11 (sequence is synthesized)
taggtaaattacagttcctaggtataattcacattgtattcagagttgatggttgtacatataagtgattgctggttttagttgcaactttgtataaaagggactgagaaatttataaac

SEQ ID NO: 165143 - DNA, 120 bp, Artificial Sequence
  ENSG00000108064_12 (sequence is synthesized)
aaacttttttcttactgtcttttttctaaagtaaaaacaaagaaattatgtgccagatttatgcatattattttatgttgcatagaataaaatttttaatctttaattttacatttccta

SEQ ID NO: 165144 - DNA, 120 bp, Artificial Sequence
  ENSG00000108064_13 (sequence is synthesized)
tattttaagacgaaacatttgttctatagcttttccctttttttaagtaaggaattttatttttttctgaattattttctctcgtgagtatattgatccagaaagaaaacttgtattatg

SEQ ID NO: 165145 - DNA, 120 bp, Artificial Sequence
  ENSG00000108064_14 (sequence is synthesized)
tgtgttttaaaatgagaaatctaaaaaacgaaaagtctccaaagtctctggaatttgaaacactttgcataacgtataaaagcctgtttaagagacagccaactatggcctgtggatcaa

SEQ ID NO: 165146 - DNA, 120 bp, Artificial Sequence
  ENSG00000108064_15 (sequence is synthesized)
atccagcctgctgcctgctttttatggcctgtgagctaggaattgtgtttataattttaaatgtttttttttaaagacttttatgatacttgaaaattaacatgaatatttagtgttcat

SEQ ID NO: 165147 - DNA, 120 bp, Artificial Sequence
  ENSG00000108064_16 (sequence is synthesized)
aaataaagtttgttgaaacacaaccaagatcattcttttacttgtctatggctgcttttctgtggcagagtagctgccacagaaactatagcccacaaagcctgatatttactgtctgtc

SEQ ID NO: 165148 - DNA, 120 bp, Artificial Sequence
  ENSG00000108064_17 (sequence is synthesized)
tgtttatggaaaaaatttatcaacccatggtctatagtatagtgtgatatgactactgttccaatgtattgaagtgttgggatagttttttcaaatgttttcagatgttcttgttttaga

SEQ ID NO: 165149 - DNA, 120 bp, Artificial Sequence
  ENSG00000108064_18 (sequence is synthesized)
atcattgtcacctttaagaggaaaaaggtcatcactagataatctaaacaaattgttgcttctcagtgttagcaaggaaaataatctagtttcaaattacattgcagtataatgaaaaag

SEQ ID NO: 165150 - DNA, 120 bp, Artificial Sequence
  ENSG00000108064_19 (sequence is synthesized)
atccatatactgtggaatgatattcttttaaaattatttgctatggcttggtaaaaatgtactttttccagtagcacatatcacaagaacctcactgtagttgaaagccatctttcttta

SEQ ID NO: 165151 - DNA, 120 bp, Artificial Sequence
  ENSG00000108064_20 (sequence is synthesized)
actttatgcgttatgcaaaatatttagaaattgtagattctagatctccagaaagactttgaagactttgatgtcacaaaaagatgacttgttatatgctgagcttgacaaaggtaggaa

SEQ ID NO: 165152 - DNA, 120 bp, Artificial Sequence
  ENSG00000108064_21 (sequence is synthesized)
tgggagagaaaaatagtagcttatgaggaaatatgaggctttaaatatataaagttggatattttaaaataacttttccctgtgggagcttctcactctgggtgcagacaggacagtgtt

SEQ ID NO: 165153 - DNA, 120 bp, Artificial Sequence
  ENSG00000108064_22 (sequence is synthesized)
ggccattggtgaaatagataggatgggtttgaggccagagcagtctgggagtagggggaaagagaaggaggtgtgctagtgtctatcacaggctttctcaattaggtttgcaggagaaaa

SEQ ID NO: 165154 - DNA, 120 bp, Artificial Sequence
  ENSG00000108064_23 (sequence is synthesized)
agccctaagtccctgtgtcatctagaatggtactaattatgtacagtccctaggagaatggagaaaatcataactcaaatcatcgactcaattctgttctcttcagatgagctcagagag

SEQ ID NO: 165155 - DNA, 120 bp, Artificial Sequence
  ENSG00000108064_24 (sequence is synthesized)
cacataggagtgtttgtaatgaggggtatgtaatgattgagatagaggaatgagttacataaacatctcgggacaaatgcagcatagaaaacatctttgtagttaccctgcggggaaatt

SEQ ID NO: 165156 - DNA, 120 bp, Artificial Sequence
  ENSG00000108064_25 (sequence is synthesized)
tcctctgagttcttttaacattaactacccgtattattttatacttaacattcatatcataccttcccaaatatattgggaagttcagtgttaagtacgtttctcaagtacttaacaact

SEQ ID NO: 165157 - DNA, 120 bp, Artificial Sequence
  ENSG00000108064_26 (sequence is synthesized)
taatatagggaggaaaggtgtaaacagtgaaaaaagagcaaaactattttatggtaattttatggtagtatcagcttgtatttggttctctgtttctaaaataatgtaatttttaatatt

SEQ ID NO: 165158 - DNA, 120 bp, Artificial Sequence
  ENSG00000108064_27 (sequence is synthesized)
ttaaataataggataacctggtttccaagcctttttttcccccgacatccagaatacacactggatccaagcctttcttaaacatcagtacatgtggaagactggcatgccatataccaa

SEQ ID NO: 165159 - DNA, 120 bp, Artificial Sequence
  ENSG00000108064_28 (sequence is synthesized)
ccaaatgccattcagctgtaacagtatacacagattttctcttataaagaataagaacatcataaccaatgaccactcatataaagtcttatttgtgtgtgtgtgtgtgtgtgtgtgcac

SEQ ID NO: 165160 - DNA, 68 bp, Artificial Sequence
  ENSG00000108064_29 (sequence is synthesized)
gtgtgtgtgtgtgtgtgcacgtgtgtgtgttagagtctcattatattgctcaggctggagggcatggg

SEQ ID NO: 165161 - DNA, 67 bp, Artificial Sequence
  ENSG00000108064_30 (sequence is synthesized)
ttttttttttaatccgttcctccttccttggcctccttaagtgctgggattataggtgtgagccacc

SEQ ID NO: 165162 - DNA, 120 bp, Artificial Sequence
  ENSG00000108064_31 (sequence is synthesized)
ctgggattataggtgtgagccaccatgcttgaccataaagccttactatttcttttggagacacagtcttgctctgtccaagctggaatgcagtgatgtgatcatggctcactgcagcct

SEQ ID NO: 165163 - DNA, 120 bp, Artificial Sequence
  ENSG00000108064_32 (sequence is synthesized)
ctcctgagtagctgggattataggtgcagaccatcaagccttgctattattttttagacttttcttaatttcatccaacaaagtagttgctgtaggagctgagtgttagaaggaaagatg

SEQ ID NO: 165164 - DNA, 120 bp, Artificial Sequence
  ENSG00000108064_33 (sequence is synthesized)
aagtagttgctgtaggagctgagtgttagaaggaaagatgctgaagaaatgaaatcaagcagggtgtatactgtcatgaataggcatacagtagtttttatacttttgttctttggagta

SEQ ID NO: 165165 - DNA, 120 bp, Artificial Sequence
  ENSG00000108064_34 (sequence is synthesized)
ccaatgttaggttttacaaaagtaatttgatgaggggaaggagggttgtgtatttattttactttctgatgtttgcttaaataatactgtgtacgtattcagcttgctgtaattctgtaa

SEQ ID NO: 165166 - DNA, 120 bp, Artificial Sequence
  ENSG00000108064_35 (sequence is synthesized)
ttacgctattgcgtttggctaactcctttttggaaatgtctttttttttgtacaaggcatgtgttagtttttactaattgctctgaatgtgtatatttagatttctgaattgaaaaaaaa

SEQ ID NO: 165167 - DNA, 120 bp, Artificial Sequence
  ENSG00000108064_36 (sequence is synthesized)
tagcgtacaataagtagatttaaagtaattagaacactttattgatttttctgatgttttctgtatctaaaatttatcaccaccaggttgtgctaaaacagcaggaagtttttatattgt

SEQ ID NO: 165168 - DNA, 120 bp, Artificial Sequence
  ENSG00000108064_37 (sequence is synthesized)
gagtgacagtacccattatttctcttaattttactaacatttactataagaatattctctcgctcttttctccactcacagccattctccctccttctcttcataacatcaagctgtcac

SEQ ID NO: 165169 - DNA, 120 bp, Artificial Sequence
  ENSG00000108064_38 (sequence is synthesized)
agacaaatctgaaaatgttacaagcacagactatgttgtatgttttgaaattttagaacagtaatgttctttttaaaattgaacttctgcagagtaagaaaatgaatacatttattactt

SEQ ID NO: 165170 - DNA, 120 bp, Artificial Sequence
  ENSG00000108064_39 (sequence is synthesized)
taaatttgtaaaattttccaaagtaaaaccatacaaagctagtgtcagtctctctcattgttcacaaataaaggacttttgttaattgattaaatcacttactatattcgatatgaaata

SEQ ID NO: 165171 - DNA, 120 bp, Artificial Sequence
  ENSG00000108064_40 (sequence is synthesized)
tataaaacatacaaccattatctaatacatttcagaatgtttcactggttacaggagccagtaaataaagttgactctaaacaggaattttaaataaactaaacattttttcatcaccaa

SEQ ID NO: 165172 - DNA, 120 bp, Artificial Sequence
  ENSG00000108064_41 (sequence is synthesized)
tattacggttgttagtctcaagtgtctacttaggatatctgtgagagaatgtattagggcaaggcttgattcatgtgaagacaaccttgtattactaataatacaagtattctaaaatta

SEQ ID NO: 165173 - DNA, 120 bp, Artificial Sequence
  ENSG00000108091_0 (sequence is synthesized)
gtctgcgccctggtgccaggcgctcagctcggcgctcccctgtgctcgcccggcgcccactcattcgcagcccggccttcgtcgccgccgcctccctgctgctcctcctcctttccccag

SEQ ID NO: 165174 - DNA, 120 bp, Artificial Sequence
  ENSG00000108091_1 (sequence is synthesized)
cccgccgcggccatggcggacagcgccagcgagagcgacacggacggggcggggggcaacagcagcagctcggccgccatgcagtcgtcctgctcgtcgacctcgggcggcggcggtggc

SEQ ID NO: 165175 - DNA, 120 bp, Artificial Sequence
  ENSG00000108091_2 (sequence is synthesized)
ggcgggggaggcggcggcggtgggaagtcggggggcattgtcatctcgccgttccgcctggaggagctcaccaaccgcctggcctcgctgcagcaagagaacaaggtgctgaagatagag

SEQ ID NO: 165176 - DNA, 120 bp, Artificial Sequence
  ENSG00000108091_3 (sequence is synthesized)
ctggagacctacaaactgaagtgcaaggcactgcaggaggagaaccgcgacctgcgcaaagccagcgtgaccatccaagccagggctgagcaggaagaagaattcattagtaacacttta

SEQ ID NO: 165177 - DNA, 120 bp, Artificial Sequence
  ENSG00000108091_4 (sequence is synthesized)
ttcaagaaaattcaggctttgcagaaggagaaagaaacccttgctgtaaattatgagaaagaagaagaattcctcactaatgagctctccagaaaattgatgcagttgcagcatgagaaa

SEQ ID NO: 165178 - DNA, 120 bp, Artificial Sequence
  ENSG00000108091_5 (sequence is synthesized)
gccgaactagaacagcatcttgaacaagagcaggaatttcaggtcaacaaactgatgaagaaaattaaaaaactggagaatgacaccatttctaagcaacttacattagaacagttgaga

SEQ ID NO: 165179 - DNA, 120 bp, Artificial Sequence
  ENSG00000108091_6 (sequence is synthesized)
cgggagaagattgaccttgaaaatacattggaacaagaacaagaagcactagttaatcgcctctggaaaaggatggataagcttgaagctgaaaagcgaatcctgcaggaaaaattagac

SEQ ID NO: 165180 - DNA, 120 bp, Artificial Sequence
  ENSG00000108091_7 (sequence is synthesized)
cagcccgtctctgctccaccatcgcctagagatatctccatggagattgattctccagaaaatatgatgcgtcacatcaggtttttaaagaatgaagtggaacggctgaagaagcaactg

SEQ ID NO: 165181 - DNA, 120 bp, Artificial Sequence
  ENSG00000108091_8 (sequence is synthesized)
agagctgctcagttacagcattcagagaaaatggcacagtatctggaggaggaacgtcacatgagagaagagaacttgaggctccagaggaagctgcagagggagatggagagaagagaa

SEQ ID NO: 165182 - DNA, 120 bp, Artificial Sequence
  ENSG00000108091_9 (sequence is synthesized)
gccctctgtcgacagctctccgagagtgagtccagcttagaaatggacgacgaaaggtattttaatgagatgtctgcacaaggattaagacctcgcactgtgtccagcccgatcccttac

SEQ ID NO: 165183 - DNA, 120 bp, Artificial Sequence
  ENSG00000108091_10 (sequence is synthesized)
acaccttctccgagttcaagcaggcctatatcacctggtctatcatatgcaagtcacacggttggtttcacgccaccaacttcactgactagagctggaatgtcttattacaattccccg

SEQ ID NO: 165184 - DNA, 120 bp, Artificial Sequence
  ENSG00000108091_11 (sequence is synthesized)
ggtcttcacgtgcagcacatgggaacatcccatggtatcacaaggccttcaccacggagaagcaacagtcctgacaaattcaaacggcccacgccgcctccatctcccaacacacagacc

SEQ ID NO: 165185 - DNA, 120 bp, Artificial Sequence
  ENSG00000108091_12 (sequence is synthesized)
ccagtccagccacctccgcctccacctccgccacccatgcagcccacggtcccctcagcagccacctcgcagcctactccttcgcaacattcggcgcacccctcctcccagccttaatgc

SEQ ID NO: 165186 - DNA, 120 bp, Artificial Sequence
  ENSG00000108091_13 (sequence is synthesized)
atgagcttagtctgaatttcaagttgggactcatccaatggagccgtctactcaacgccaaaggcttccttctctggcatatttggatatgacttatttgcactgaggttatctaggctt

SEQ ID NO: 165187 - DNA, 120 bp, Artificial Sequence
  ENSG00000108091_14 (sequence is synthesized)
cactatccattgtgttgtaaatgtttgtcagaaatgcagccagtgttgtgggtctacaacactaaccagacgactttttccatcagtgttttacttgaatcttcatgtacgtccattccc

SEQ ID NO: 165188 - DNA, 120 bp, Artificial Sequence
  ENSG00000108091_15 (sequence is synthesized)
tggctggaaccttcgctgtttggtatttggtatttcagcagcagtgtgcaatttttgcttggcccagagcttcattctcctggcttttaggtttgtaaaagaaaaagggatatctttttt

SEQ ID NO: 165189 - DNA, 120 bp, Artificial Sequence
  ENSG00000108091_16 (sequence is synthesized)
atatttttttccatgaatctgcagaaaattactgagctgttgttaccctcctctcattataatagtgtttaccaaacataccaataattcagcactacaattcagacctttgaaaatctg

SEQ ID NO: 165190 - DNA, 120 bp, Artificial Sequence
  ENSG00000108091_17 (sequence is synthesized)
gctttcagtgtagaacagaaagttagatgaatcagtgcccaagacatattttctgtttaacagaactttctacagatacattttttacaggttattttcattgtgttattgacatccatg

SEQ ID NO: 165191 - DNA, 120 bp, Artificial Sequence
  ENSG00000108091_18 (sequence is synthesized)
tctctcgtaaaacagatggcccaaagtaatgaatcatgtggctgtaccttctccacataaatgggatggataattatcgtatattaagatgtgattctcttttttatccttaatgttaat

SEQ ID NO: 165192 - DNA, 120 bp, Artificial Sequence
  ENSG00000108091_19 (sequence is synthesized)
ctacttaacctggccccctctaacatgagtcgataaatgttgtcctactcaccggtggtttcaatggctaattagaatgtgttatttgatttctgctgcagaaggcagtgtgattgtaac

SEQ ID NO: 165193 - DNA, 120 bp, Artificial Sequence
  ENSG00000108091_20 (sequence is synthesized)
aaaaacaatgcggcttccccctttcgtacttcatttgtgttctcttaaaatagagtttgaacaaatattttaaaggtgcaaaataccattagaaaatactatttgaaatggacattatcg

SEQ ID NO: 165194 - DNA, 120 bp, Artificial Sequence
  ENSG00000108091_21 (sequence is synthesized)
cattatcttggcataatggccagaaaatattgtattgcttggcagaaaagaaaataaggtctaaaggaaagtagcacattagcattgatggctgttcatttcacccagtataagcaagtg

SEQ ID NO: 165195 - DNA, 120 bp, Artificial Sequence
  ENSG00000108091_22 (sequence is synthesized)
cagtgtacaaagaagtatattctgaatacattatttccattcatttagcacaaataaatcatttggtttcactttgcagtggaacactgagtcactcttttcttaacacgtgcaacatct

SEQ ID NO: 165196 - DNA, 120 bp, Artificial Sequence
  ENSG00000108091_23 (sequence is synthesized)
ggatgaaaataacttactagagaatgtatattttatgacaagaatgtgtatctgttggatataatcagagaactgaaaagtaatttatcagtaatttttaagagtccatgttttgtgaca

SEQ ID NO: 165197 - DNA, 120 bp, Artificial Sequence
  ENSG00000108091_24 (sequence is synthesized)
accatctctaatagccaactctttattaaacacactcctaaaaataaggaaccatgacattgtagatatttaatattgtacagtatagaaacctccatttttgccttcgaatgcatattt

SEQ ID NO: 165198 - DNA, 120 bp, Artificial Sequence
  ENSG00000108091_25 (sequence is synthesized)
aagagttaacagaatgaaaaaaaaaagtcttgttggataatagtgtttgactagcgttttaagaacttgagagtaaaagcaacaataagattttttcacctcttcctgcttccaccccca

SEQ ID NO: 165199 - DNA, 120 bp, Artificial Sequence
  ENSG00000108091_26 (sequence is synthesized)
aactgagaacatcactcaattgtttggaagaaactgtaggtctatataaattttatttataatgtatgtgtaatatacataatcataatacagttctcagatgcagggaagaagtttggc

SEQ ID NO: 165200 - DNA, 120 bp, Artificial Sequence
  ENSG00000108091_27 (sequence is synthesized)
atttaatcattgaggctttaggtttttgatgtgatcagactgggccatgtcaaacccggaattttcaccaacagttcactcaccctcctggtacattgccattccaaggaattctgagag

SEQ ID NO: 165201 - DNA, 120 bp, Artificial Sequence
  ENSG00000108091_28 (sequence is synthesized)
taggcaaacaaattttgccttcatggtacagttctcagtttttcttataggagaaatatggtatatgtttataagaatcttttatgagattatagatttcaatgctgtggatagtgtctt

SEQ ID NO: 165202 - DNA, 120 bp, Artificial Sequence
  ENSG00000108091_29 (sequence is synthesized)
gcacccaaacaagaaagtccataatggaatgatcttccctcagcttcctatcgatttagttacctcttgaaagcacaaaaattaaaacattgccatatgttgaatttttaaaaagcactt

SEQ ID NO: 165203 - DNA, 120 bp, Artificial Sequence
  ENSG00000108091_30 (sequence is synthesized)
ggagtgagcgaacatttcctgataaatgccttttagagataggttcttgatattcagacatctgcagaaatgttctggttcccaaagtcatttcacttcgaaataaaacacagctccttc

SEQ ID NO: 165204 - DNA, 120 bp, Artificial Sequence
  ENSG00000108091_31 (sequence is synthesized)
aaacagcactttttccacataaatctagttgcctctccctgtggacattcagaactgatagaacaaacactactcttttgaatttgatggttcgtgtcctttaaagtgtttgaggaccta

SEQ ID NO: 165205 - DNA, 120 bp, Artificial Sequence
  ENSG00000108091_32 (sequence is synthesized)
tgcagagcctgtaacacttgggtagtacctgctaggacaatttcttggcaattgtcttactactagggatcagtaagatttagattctgagcccataatggcaacagccccctcacctat

SEQ ID NO: 165206 - DNA, 120 bp, Artificial Sequence
  ENSG00000108091_33 (sequence is synthesized)
gggaagctgacttccctcagtcgggcacttctcatgggggctgaacatggttcctgccattctgttacccactctcccaggtgagccctggattggctcccagaaggcctttgtaaaatc

SEQ ID NO: 165207 - DNA, 120 bp, Artificial Sequence
  ENSG00000108091_34 (sequence is synthesized)
agtagccgtcctgcaggcaggtgggagcaacaggggcttcagtagcttcattttcctgtcttgcagacagagacccttggctaccactgtgctgctaataggataagtactctgttgcca

SEQ ID NO: 165208 - DNA, 120 bp, Artificial Sequence
  ENSG00000108091_35 (sequence is synthesized)
gattaccatgccttttatacaaaaccaaattaacttacctaatacctgacacctctttgggctctgaactgctttctctcatcaagcatgctagcactctagacagaattctagaaattt

SEQ ID NO: 165209 - DNA, 120 bp, Artificial Sequence
  ENSG00000108091_36 (sequence is synthesized)
ggcagatagtggaagcctttaattgaacttactccttcgttgactgaaaggagttttaaattctgagctcctgagatactgactagcaaccatggaatgaatgtgtgaccagaaagtggc

SEQ ID NO: 165210 - DNA, 120 bp, Artificial Sequence
  ENSG00000108091_37 (sequence is synthesized)
tttgacaccaagtgctactgtccctttgtaattggcttctaacagaattcaaccagaaataattgataatgtgaatttttgttaattgttcacttgtaggaaaatagaacatgtatcacc

SEQ ID NO: 165211 - DNA, 120 bp, Artificial Sequence
  ENSG00000108091_38 (sequence is synthesized)
ctttgttaggtagacatgaacttttcctgcacaaagccttgcttttagagaatgcccaataaggcaagaaaaagcatagtaacttgtgctttgagagctcaatatttgtatcttatcagt

SEQ ID NO: 165212 - DNA, 120 bp, Artificial Sequence
  ENSG00000108091_39 (sequence is synthesized)
acagaagaaatatttctgtgtaacttgatcttctgtctagtacttgtcttataggtaaccaacactgaaaactttgtagtgatgactaccaaagaaatacatagtaaaacaaccttttat

SEQ ID NO: 165213 - DNA, 120 bp, Artificial Sequence
  ENSG00000108091_40 (sequence is synthesized)
ttccaaattgttaaagagccagccattgatgctgctacatgagttccatgctcaagagccattgtaagagattaaggggtttctaggtttttggtgattttttgtttgtttttttctttg

SEQ ID NO: 165214 - DNA, 120 bp, Artificial Sequence
  ENSG00000108091_41 (sequence is synthesized)
ttttttagggtttttttttcttctttaattttttgattaaaacatacacacagctgttagcataaagtcgtggggggcattttctggaatgctcagcagttctgattaactgccaagccc

SEQ ID NO: 165215 - DNA, 120 bp, Artificial Sequence
  ENSG00000108091_42 (sequence is synthesized)
aggttgcctctcatgaggcaactgaaaaaatcctgtgtcttgatagcatgggtgctgtgtgtgtgcatgtgtgtgtctgcattcatgccttaactcgggttactgcacaactttagttct

SEQ ID NO: 165216 - DNA, 120 bp, Artificial Sequence
  ENSG00000108091_43 (sequence is synthesized)
tgacttagtctgcaccgtcatctagattgtattgtacatctcggtctgaacttcatcctggcaaaaacaaagttgcaggcacaacagtttaagaatgcattcctccagaagagtatctgg

SEQ ID NO: 165217 - DNA, 120 bp, Artificial Sequence
  ENSG00000108091_44 (sequence is synthesized)
tcaggttgacccctgagccttctttggacttgatttggaacttagcctggaaagcgaaagtggactgtccaacagaaagatgtcaacaaggaaaagaggagagccaagcgctagcatgcc

SEQ ID NO: 165218 - DNA, 120 bp, Artificial Sequence
  ENSG00000108091_45 (sequence is synthesized)
ttttgcctctgcatatctgtgcacactgtatgttgttcatgatagcttgtctacaacttgactaggttggagttctggtaatagtggcaatcttgacattcttggtcagagtttagagag

SEQ ID NO: 165219 - DNA, 120 bp, Artificial Sequence
  ENSG00000108091_46 (sequence is synthesized)
atgtaagactttcaattaatgtcttatttactcctttatgttgattagtctttgatacatgtgctgaatcagaaacctaaataaagataattttttaaaatgtacctcttgagccttaaa

SEQ ID NO: 165220 - DNA, 120 bp, Artificial Sequence
  ENSG00000108091_47 (sequence is synthesized)
atatatagcatctgggacccagtttggggtaagatacactctaaggaaatatgtcttttgactgcagtgtcaatagtgaagcaatttcagccttccagataaatatttttttccagaacc

SEQ ID NO: 165221 - DNA, 120 bp, Artificial Sequence
  ENSG00000108091_48 (sequence is synthesized)
ggtattcatttcagaaagtttgccctaccttttgtaggtcagattatccacagctgcccaataaatactttccctactaggaacaatgatactacatttgggagaaagaaaattgtccgg

SEQ ID NO: 165222 - DNA, 120 bp, Artificial Sequence
  ENSG00000108091_49 (sequence is synthesized)
cacttaagagaccacaagatgcctcttagtctactagtggatgtgtggagtacaagaagttccacctggtgccactagggtgggtcgctcgtgcaggatggtttatcaggaagtctctca

SEQ ID NO: 165223 - DNA, 120 bp, Artificial Sequence
  ENSG00000108091_50 (sequence is synthesized)
agcagcaatttctcctcgtcagcgcaccatgctcatttcacagagtgtaagctgatgttcctgatgatcacacttcagcattttcaggtctgatgtgacttctgaatccaggaaaaaggc

SEQ ID NO: 165224 - DNA, 120 bp, Artificial Sequence
  ENSG00000108091_51 (sequence is synthesized)
agactcagcatggtgtgactaagcgtgacctgctgtaggtgttcagtactcaaggcttattaaatcctagtgtgtgactgtctgttaagcagggcttgcttgtaaacagttgatactcag

SEQ ID NO: 165225 - DNA, 120 bp, Artificial Sequence
  ENSG00000108091_52 (sequence is synthesized)
ttcataggaataagtatctgtaggctttaatttgatgacataaatctcagagggcttgcttggttttgagtttcaaataacaatttaaatgtcaccactaacatgtgagtgtctttgtaa

SEQ ID NO: 165226 - DNA, 120 bp, Artificial Sequence
  ENSG00000108091_53 (sequence is synthesized)
ctcttgggacagtggaggtgaatttcaacatagctgttgtgtgatggaggaaaaactggtcctctctgtggtgtggtgcacctctttcacctggcttccatcctgagctaaaacatccta

SEQ ID NO: 165227 - DNA, 120 bp, Artificial Sequence
  ENSG00000108091_54 (sequence is synthesized)
ggtctcccaactggtgacccttggagtgaggtttgtcaaacagcagagcggtgtgactcaggagtccattttataaatgccttttaactataacatcactctaaacattcaggattttga

SEQ ID NO: 165228 - DNA, 120 bp, Artificial Sequence
  ENSG00000108091_55 (sequence is synthesized)
cctcaaggtgtgaaccccaaacattttctcttaaaaactctcctaaggcctatttaaatgcaggtggttttatcgtttcctcctctctcctcttaggtattttaatgagatgtctgcaca

SEQ ID NO: 165229 - DNA, 120 bp, Artificial Sequence
  ENSG00000108091_56 (sequence is synthesized)
gacgacgaaaggtgtgtgcatgtcttatgagccttgtttttgtttaaaaaataaaacccaggttctacagaggttttctttggtatcctgttaggtgtataaggggatggcttaaatatg

SEQ ID NO: 165230 - DNA, 120 bp, Artificial Sequence
  ENSG00000108091_57 (sequence is synthesized)
tgctaatgaatgccactgcgttatagtagatgccaagaatgggataaagattgaacattttccttaaacacaaaaagatgaaaaaaatcacctctctaaaatcatttggtggggagagaa

SEQ ID NO: 165231 - DNA, 120 bp, Artificial Sequence
  ENSG00000108091_58 (sequence is synthesized)
atggagacagggttatattagagaagcagcagagtttgcatttgttgttgaattagtttaatccagtgtcatatctgtttaaagcatgggaacatattaattcctgtactgtataaggat

SEQ ID NO: 165232 - DNA, 120 bp, Artificial Sequence
  ENSG00000108091_59 (sequence is synthesized)
aagcaagctatagtgcagctcgaggaaaacagtgcatgcgtaggttgaaaagaatcagtagggacacaggtgggggttgttgaaatcccaaggacttgccttaacacacttgataacttt

SEQ ID NO: 165233 - DNA, 120 bp, Artificial Sequence
  ENSG00000108094_0 (sequence is synthesized)
ggccggccggggaggcggcctcggcgcacagtaatggcagcgctgtgagcaggggaacgcgagctgacagccgccgccgccgccgcctccgcccaccttcctcgccggggcttcgtcttt

SEQ ID NO: 165234 - DNA, 120 bp, Artificial Sequence
  ENSG00000108094_1 (sequence is synthesized)
ctttcactccttcgggctgcctccccctccccttgtcccctgccccttgccctgcttctgcagaagagcgctgacccgtaagccctgccaccccctggactggatcccgggcctccccaa

SEQ ID NO: 165235 - DNA, 120 bp, Artificial Sequence
  ENSG00000108094_2 (sequence is synthesized)
cccgatcttggccgcctctcccgcggccccattttccttcgaaggagggaagatttcaacactacacttgcacaatgtctttgaaaccaagagtagtagattttgatgaaacatggaaca

SEQ ID NO: 165236 - DNA, 120 bp, Artificial Sequence
  ENSG00000108094_3 (sequence is synthesized)
aacttttgacgacaataaaagccgtggtcatgttggaatacgtcgaaagagcaacatggaatgaccgtttctcagatatctatgctttatgtgtggcctatcctgaaccccttggagaaa

SEQ ID NO: 165237 - DNA, 120 bp, Artificial Sequence
  ENSG00000108094_4 (sequence is synthesized)
gactttatacagaaactaagatttttttggaaaatcatgttcggcatttgcataagagagttttggagtcagaagaacaagtacttgttatgtatcataggtactgggaagaatacagca

SEQ ID NO: 165238 - DNA, 120 bp, Artificial Sequence
  ENSG00000108094_5 (sequence is synthesized)
agggtgcagactatatggactgcttatataggtatctcaacacccagtttattaaaaagaataaattaacagaagcggaccttcagtatggctatggtggtgtagatatgaatgaaccac

SEQ ID NO: 165239 - DNA, 120 bp, Artificial Sequence
  ENSG00000108094_6 (sequence is synthesized)
ttatggaaataggagagctagcattggatatgtggaggaaattgatggttgaaccacttcaggccatccttatccgaatgctgctccgagaaatcaaaaatgatcgtggtggagaagacc

SEQ ID NO: 165240 - DNA, 120 bp, Artificial Sequence
  ENSG00000108094_7 (sequence is synthesized)
caaaccagaaagtaatccatggggttattaactcctttgttcatgttgaacagtataagaaaaaattccccttaaagttttatcaggaaatttttgagtctccctttctgactgaaacag

SEQ ID NO: 165241 - DNA, 120 bp, Artificial Sequence
  ENSG00000108094_8 (sequence is synthesized)
gagagtattacaaacaagaagcttcaaatttattacaagaatcaaactgctcacagtatatggaaaaggttctaggtagattaaaagatgaagaaattcgatgtcgaaaatacctacatc

SEQ ID NO: 165242 - DNA, 120 bp, Artificial Sequence
  ENSG00000108094_9 (sequence is synthesized)
caagttcatatactaaggtgattcatgaatgtcaacaacgaatggtagcagaccacttacagtttttacatgcagaatgtcataatataattcgacaagagaaaaaaaatgacatggcaa

SEQ ID NO: 165243 - DNA, 120 bp, Artificial Sequence
  ENSG00000108094_10 (sequence is synthesized)
atatgtacgtcttactccgtgctgtgtccactggtttacctcatatgattcaggagctgcaaaaccacatccatgatgagggccttcgagcaaccagcaaccttactcaggaaaacatgc

SEQ ID NO: 165244 - DNA, 120 bp, Artificial Sequence
  ENSG00000108094_11 (sequence is synthesized)
caacactatttgtggagtcagttttggaagtgcatggtaaatttgttcagcttatcaacactgttttgaatggtgatcagcattttatgagtgcgttggataaggcccttacgtcagttg

SEQ ID NO: 165245 - DNA, 120 bp, Artificial Sequence
  ENSG00000108094_12 (sequence is synthesized)
taaattacagagaacctaagtctgtttgcaaagcacctgaactgcttgctaagtactgtgacaacttactgaagaagtcagcgaaagggatgacagagaatgaagtggaagacaggctca

SEQ ID NO: 165246 - DNA, 120 bp, Artificial Sequence
  ENSG00000108094_13 (sequence is synthesized)
cgagcttcatcacagtgttcaaatacattgatgacaaggacgtctttcaaaagttctacgcaagaatgctggcaaaacgtttaattcatgggttatccatgtctatggactctgaagaag

SEQ ID NO: 165247 - DNA, 120 bp, Artificial Sequence
  ENSG00000108094_14 (sequence is synthesized)
ccatgatcaacaaattaaagcaagcctgtggttatgagtttaccagcaagctacatcggatgtatacagatatgagtgtcagcgctgatctcaacaataagttcaacaattttatcaaaa

SEQ ID NO: 165248 - DNA, 120 bp, Artificial Sequence
  ENSG00000108094_15 (sequence is synthesized)
accaagacacagtaatagatttgggaattagttttcaaatatatgttctacaggctggtgcgtggcctcttactcaggctccttcatctacgtttgcaattccccaggaattagaaaaaa

SEQ ID NO: 165249 - DNA, 120 bp, Artificial Sequence
  ENSG00000108094_16 (sequence is synthesized)
gtgtacagatgtttgaattattttatagccaacatttcagtggaaggaaacttacatggttacattatctgtgtacaggtgaagttaaaatgaactatttgggcaaaccatatgtagcca

SEQ ID NO: 165250 - DNA, 120 bp, Artificial Sequence
  ENSG00000108094_17 (sequence is synthesized)
aatcaaatcattacttgatgtgaaaatgattaaccatgattcagaaaaggaagatattgatgcagaatcttcgttttcattaaatatgaactttagcagtaaaagaacaaaatttaaaat

SEQ ID NO: 165251 - DNA, 120 bp, Artificial Sequence
  ENSG00000108094_18 (sequence is synthesized)
tactacatcaatgcagaaagacacaccacaagaaatggagcagactagaagtgcagttgatgaggaccggaaaatgtatctccaagctgctatagttcgtatcatgaaagcacgaaaagt

SEQ ID NO: 165252 - DNA, 120 bp, Artificial Sequence
  ENSG00000108094_19 (sequence is synthesized)
gcttcggcacaatgcccttattcaagaggtgattagccagtcaagagctaggtttaatcccagtatcagcatgattaagaagtgtattgaagttctgatagacaaacaatacatagaacg

SEQ ID NO: 165253 - DNA, 120 bp, Artificial Sequence
  ENSG00000108094_20 (sequence is synthesized)
cagccaggcgtcggcagatgaatacagctacgtcgcgtgatgtcgctctcctccagcgtggtgtgagaagatcattgccatcaccatttggtgtgttcctgtgggaaaaagcaggactgt

SEQ ID NO: 165254 - DNA, 120 bp, Artificial Sequence
  ENSG00000108094_21 (sequence is synthesized)
gcctccataatttggtcatttggcagcccctgttttctgctgtttacaacatcaccagtgccacgtcatgagcgtcaaagaaaatgcctagagatatttcaagctcatgtcattatgaca

SEQ ID NO: 165255 - DNA, 120 bp, Artificial Sequence
  ENSG00000108094_22 (sequence is synthesized)
tttcttaaaactttattaaaagaatgagtgaagtattgctgaaaagtggaaattcggttgggtaccatgctttttctccccttcacgtttgcagttgatgtgtcttttttttttttttta

SEQ ID NO: 165256 - DNA, 120 bp, Artificial Sequence
  ENSG00000108094_23 (sequence is synthesized)
atgtatcttaaaggacataaaatttaaaaacttaaatattgtaatatgacagataacctaataattgtatctacattaaaatgacaaacatgatactgctgcttgtcaaataaaaaaaaa

SEQ ID NO: 165257 - DNA, 120 bp, Artificial Sequence
  ENSG00000108094_24 (sequence is synthesized)
ataaagaaatagaatgccttttttatgtggatggagtatcaggttgaccacaaaatatattgactcaaagcagctaatgcatctttagttgcgtttttatctgaatggtttaattcactt

SEQ ID NO: 165258 - DNA, 120 bp, Artificial Sequence
  ENSG00000108094_25 (sequence is synthesized)
gtactcctatttaaatcctacatgaaaaatgtctagattattgttcttgactgcataggactgcattcagcataaagaatgctttatttttatggattagatatattggatctaaacatt

SEQ ID NO: 165259 - DNA, 120 bp, Artificial Sequence
  ENSG00000108094_26 (sequence is synthesized)
ttgaatcttgaagatgtaattccatcagcagtttctggtggtgtgctactccacagacatcgcagagtgtgagcaggatgcttggtgacctcaagtctggcacagagagagcttttcatt

SEQ ID NO: 165260 - DNA, 120 bp, Artificial Sequence
  ENSG00000108094_27 (sequence is synthesized)
caaaagttgtctttcttcggttgcataatccattaattctagcatagactagtaccctagctctgtggccttccctgagtcttaggaaatctatgataccaacatattccttctatatgc

SEQ ID NO: 165261 - DNA, 120 bp, Artificial Sequence
  ENSG00000108094_28 (sequence is synthesized)
ctcccctacctgttacccttacaaccctcctccaacagtttagatactagagtcactctcatcaatcacagatgtgcttagcaatgcataacctaaatacttttttaaaaaagaaaattg

SEQ ID NO: 165262 - DNA, 120 bp, Artificial Sequence
  ENSG00000108094_29 (sequence is synthesized)
tgtttattttatatatatatatatatataatatatatatatatatatctcaacagcagtgttaagagtactgcgatctattatcatatttattgtctatccacaccatcaccaccaccac

SEQ ID NO: 165263 - DNA, 120 bp, Artificial Sequence
  ENSG00000108094_30 (sequence is synthesized)
tatcatatttattgtctatccacaccatcaccaccaccaccacacccctcctccctcaacatacaatttttctttattttaaaaaaaataagagacggggtttcgccatgtttcccaggc

SEQ ID NO: 165264 - DNA, 83 bp, Artificial Sequence
  ENSG00000108094_31 (sequence is synthesized)
tccatccaacacaaaatttttaaaatcggaatattttaaagcaaatcacacaaattatttcacttataatacttcagtaaggc

SEQ ID NO: 165265 - DNA, 120 bp, Artificial Sequence
  ENSG00000108094_32 (sequence is synthesized)
aatcacacaaattatttcacttataatacttcagtaaggcctttaaaaaatccacagtgatattattactcctaacaaaaacaataattacttagtatcatctaatatgtggttcatatt

SEQ ID NO: 165266 - DNA, 120 bp, Artificial Sequence
  ENSG00000108094_33 (sequence is synthesized)
taaatttgttgttttgagatgggtcttacaattggtttattcaattgcattttttctaactcgtgtctcaagtgttttaaaaatctactgaacttataatgacttatataatgtatttct

SEQ ID NO: 165267 - DNA, 120 bp, Artificial Sequence
  ENSG00000108094_34 (sequence is synthesized)
cattttacctttcttccaaaagaggaaataatggcaaaccatataatattgtacattcactgtcaaaaagcaaacccttgttttgataacttgttgattgataaaagttttccaaattga

SEQ ID NO: 165268 - DNA, 120 bp, Artificial Sequence
  ENSG00000108094_35 (sequence is synthesized)
attgctttccgggtggcgggggggatttggcagcagcggaagaaggagaccggagggtgtgtgttgggcaaagccggaggcagaggaggacgattgttttacggatcccgtgatcggccc

SEQ ID NO: 165269 - DNA, 120 bp, Artificial Sequence
  ENSG00000108094_36 (sequence is synthesized)
gtccttctcccctttccccccctccctaccgcccctgtcccgccggggagcggcggcggccttggactttgctgtctttcctcgcggagacagatttcaacactacacttgcacaatgtc

SEQ ID NO: 165270 - DNA, 120 bp, Artificial Sequence
  ENSG00000108094_37 (sequence is synthesized)
atgttgcagttgagcccaaactgaatgctgtctgtagaaggaaacaacaaactttgtactttatgtacagagtaacatggtcaactttttggcttagatttcaacactacacttgcacaa

SEQ ID NO: 165271 - DNA, 120 bp, Artificial Sequence
  ENSG00000108094_38 (sequence is synthesized)
gtcacagtagggagtaccaggaggagaggaagcttgggtgccatgttgcagttgagcccaaactgaatgctgtctgtagaaggaaacaacaaactttgtactttatgtacagagtaacat

SEQ ID NO: 165272 - DNA, 120 bp, Artificial Sequence
  ENSG00000108094_39 (sequence is synthesized)
ggtcaactttttggcttaggtaggttatttttgtgtctttgataagggcaagatctgagattctgatcttgaagtcaagaactttgttttgtccactgtatcctcagagcttggaatggt

SEQ ID NO: 165273 - DNA, 120 bp, Artificial Sequence
  ENSG00000108094_40 (sequence is synthesized)
ggtggtcatcgtactgataagatggcatagctttatcatggaacagtctggagtataaccaccaggaggtcctgacctctgtgttgctctggtgtcattgttcctgtggacaaatgagct

SEQ ID NO: 165274 - DNA, 120 bp, Artificial Sequence
  ENSG00000108094_41 (sequence is synthesized)
gttacctccaaaatgccttgtcacagtagttggaggcagcatatgaaacacctagttcccagaatcataatctaataccgtgtctggccccaaagttataaatgggctttgccttaagtc

SEQ ID NO: 165275 - DNA, 80 bp, Artificial Sequence
  ENSG00000108100_0 (sequence is synthesized)
ctgcgcccacgcccgctgcccgcccgctcgtcggctagtcccgccgtccggcgcggacacgcgtgcccccggcttgaacc

SEQ ID NO: 165276 - DNA, 80 bp, Artificial Sequence
  ENSG00000108100_1 (sequence is synthesized)
aaccggaacctcttgccgaggcggccgccgtcgccgcagccgccggggaagcggacaccaactggggaagcgcggggggg

SEQ ID NO: 165277 - DNA, 80 bp, Artificial Sequence
  ENSG00000108100_2 (sequence is synthesized)
gtgaggtaggcgcggcggccgcagtcgcgcggacccgagcgctcctccgccgcggataggccggccgagggggagccggg

SEQ ID NO: 165278 - DNA, 80 bp, Artificial Sequence
  ENSG00000108100_3 (sequence is synthesized)
gggcctccccacacgcccccgccgcccgcgccccgcgtccacccgcgccccgctcccggggactgggagaacaggatagc

SEQ ID NO: 165279 - DNA, 120 bp, Artificial Sequence
  ENSG00000108100_4 (sequence is synthesized)
acccgcgccccgctcccggggactgggagaacaggatagcagcaggagtcggggggccgccgaagatggggaacactacctcgtgctgcgtgtcgtccagtcccaagctccggaggaatg

SEQ ID NO: 165280 - DNA, 120 bp, Artificial Sequence
  ENSG00000108100_5 (sequence is synthesized)
cccactcccggctggagtcctaccggccagacacggacctgagccgcgaggacacgggctgcaacctgcagcacatcagcgaccgggagaacatagacgatttgaacatggaattcaatc

SEQ ID NO: 165281 - DNA, 120 bp, Artificial Sequence
  ENSG00000108100_6 (sequence is synthesized)
cttcagatcatcctcgggccagcacaatattcctcagtaaatctcagacggacgtgagagaaaaacgcaagagtctcttcattaaccatcatcctccaggacaaatagcaaggaaataca

SEQ ID NO: 165282 - DNA, 120 bp, Artificial Sequence
  ENSG00000108100_7 (sequence is synthesized)
gttcctgctccaccattttcctagatgatagcacagtcagtcaaccaaacctcaagtatacaattaaatgtgtcgctcttgcaatatattatcacatcaaaaacagggacccagatggaa

SEQ ID NO: 165283 - DNA, 120 bp, Artificial Sequence
  ENSG00000108100_8 (sequence is synthesized)
ggatgctcttagatatttttgatgaaaatcttcaccctctttcgaaatccgaagtgccaccagattatgacaaacacaacccagagcagaagcagatttaccggttcgttcggacactgt

SEQ ID NO: 165284 - DNA, 120 bp, Artificial Sequence
  ENSG00000108100_9 (sequence is synthesized)
tcagtgctgctcagctgacggctgaatgtgccatcgtcaccctggtgtaccttgaaagacttttaacatacgcagagatagatatctgtccggccaactggaagcggattgttttagggg

SEQ ID NO: 165285 - DNA, 120 bp, Artificial Sequence
  ENSG00000108100_10 (sequence is synthesized)
cgatcctgctggcctccaaggtgtgggatgaccaggctgtatggaatgtggattactgccagatcctgaaagacatcacggtggaggacatgaacgagctagagcgacagtttcttgaat

SEQ ID NO: 165286 - DNA, 120 bp, Artificial Sequence
  ENSG00000108100_11 (sequence is synthesized)
tgctgcagttcaacatcaatgttccttccagtgtctatgccaagtattattttgatcttcgttctctggcagaagcgaacaacctgagctttcccttggagcccctgagcagggagaggg

SEQ ID NO: 165287 - DNA, 120 bp, Artificial Sequence
  ENSG00000108100_12 (sequence is synthesized)
ctcacaagcttgaggccatctctcgcctctgcgaggacaagtacaaggacctaagaagatccgcgaggaagcgctcagccagtgcagacaacctgactctgccccggtggtccccagcca

SEQ ID NO: 165288 - DNA, 120 bp, Artificial Sequence
  ENSG00000108100_13 (sequence is synthesized)
gccatcatctcttaactacggaggcccgccggaggccacaccatcccttagtttctcctttagtttgagaaaagacagacttggggtgggtttgtttttgttttttctttccttttcttt

SEQ ID NO: 165289 - DNA, 120 bp, Artificial Sequence
  ENSG00000108100_14 (sequence is synthesized)
acgcatagctccgtcaagctgcctggatgagcgcccatgcagcaaggcttggaggaagcgtcagtgccctggagatcccagctcgctctccccactgtcagcaacagcacttccttcgtg

SEQ ID NO: 165290 - DNA, 120 bp, Artificial Sequence
  ENSG00000108100_15 (sequence is synthesized)
gaggaagtggactcgaatcctggaggaggaaataaagggaaagggaagtcgtggagaggcagggaaaatggttaagcagcccggccctctggagtccccatgggggcggtagctgaagtt

SEQ ID NO: 165291 - DNA, 120 bp, Artificial Sequence
  ENSG00000108100_16 (sequence is synthesized)
ggcgagcgcagcggtggatgcagagctggctgcacccagggctgggccagtgtgtcctgtaagacttcttgcattccttctgctgcttttttgggatgggggtatttttgttcatttgtt

SEQ ID NO: 165292 - DNA, 120 bp, Artificial Sequence
  ENSG00000108100_17 (sequence is synthesized)
tttgccctgttttgattttggtcccacagagcaggggatgtagtttgtacccaccatggcgcagacttccaaataaatagtactggtcatttctctctgcactatttctgcgcgctgtct

SEQ ID NO: 165293 - DNA, 120 bp, Artificial Sequence
  ENSG00000108100_18 (sequence is synthesized)
tctgagctttcttcctcaccagtgggctgtgcttgttccatttctgtacacccttattttataccgtttttcttcaacaatggcgaaattgactgtagtgctgaaccaaaagtatccctt

SEQ ID NO: 165294 - DNA, 120 bp, Artificial Sequence
  ENSG00000108100_19 (sequence is synthesized)
tccctccttattcctcaccccaagaacattctagatcacatgggtgcttgtgccttccgattttcttgcatttgtttttttcctgacctgaagttgttgttacaaaatcagtcagacttt

SEQ ID NO: 165295 - DNA, 120 bp, Artificial Sequence
  ENSG00000108100_20 (sequence is synthesized)
gtgggctgaaggacacggtgcagcagagggtgtccctgtgagagttctgcagagtgctgggcatgtgcctggaactaccgagtaggagccatttctttgtacccctgcctaatccattcc

SEQ ID NO: 165296 - DNA, 120 bp, Artificial Sequence
  ENSG00000108100_21 (sequence is synthesized)
atattcttctcaatttttatatgtttactttaaatcaaagttagtctatttgtataaaatttttaaaaaatctaaaagaaaaagaaaaaaaacaagggtgggttgggtattccagtggga

SEQ ID NO: 165297 - DNA, 120 bp, Artificial Sequence
  ENSG00000108100_22 (sequence is synthesized)
agatcattgaagggaaaaatgttactatttactgaggtatttttcacagaatgattgaattaaaaaaaactcaacttgcattttcattgtgggtgcttagagaagttctacaaaattcaa

SEQ ID NO: 165298 - DNA, 120 bp, Artificial Sequence
  ENSG00000108100_23 (sequence is synthesized)
actgtgaaggtttatgcttcattaattatgaccatactttttcattttctgacgatccctgatttccttatggactcaataagaatcttttatatcaagtaaaatgaaagttgatgatag

SEQ ID NO: 165299 - DNA, 120 bp, Artificial Sequence
  ENSG00000108100_24 (sequence is synthesized)
aatatcaaatagtgaatttgatatgaaatctaagagtgtgagtcacttgcatatgtaatgctttgggtttttgcatattttcttaggtcacagtgacaggtttctgagttgtttcccttt

SEQ ID NO: 165300 - DNA, 120 bp, Artificial Sequence
  ENSG00000108100_25 (sequence is synthesized)
tcaagtctctgggaggccagtggcagcagcaggtctgtgtttcaccttcttcccatgtgagcttggaaaactttggcatcttaattagtcttgaatcatacacctgatccccaaacattg

SEQ ID NO: 165301 - DNA, 120 bp, Artificial Sequence
  ENSG00000108100_26 (sequence is synthesized)
cctgctctcaatgaaacatgctttggaaatggaagggactcagaaagtcgaaatcccaagaactccaagccaaaagtgttaggttttagtgaaatttgtgtcaggtataagcatacctgt

SEQ ID NO: 165302 - DNA, 120 bp, Artificial Sequence
  ENSG00000108100_27 (sequence is synthesized)
ttgggccagaattattatcacagcctttctgacccaaactttcaaaagcaaataaacagcatataaaacgttaattatctttccattgtaattgtgatgatctactctgtatgggtacca

SEQ ID NO: 165303 - DNA, 120 bp, Artificial Sequence
  ENSG00000108100_28 (sequence is synthesized)
aaatcaccttctctcttcaagtcaaagttgaatttagaactttgaatacaggtcaaaaaatgtagaaaatatcattttatattccctaatctatatagctgaaaaagggttgtattttct

SEQ ID NO: 165304 - DNA, 120 bp, Artificial Sequence
  ENSG00000108100_29 (sequence is synthesized)
tagctgaatatgaatacctcttaaacataaattagttcctctccagtgaagtatcttattttaccaatccatttcaggaaagaggttctgctgccgtaaaggcagaaattttatttttat

SEQ ID NO: 165305 - DNA, 120 bp, Artificial Sequence
  ENSG00000108100_30 (sequence is synthesized)
cccttttatttgaatgagagatttgaaaatcgaattatgtaaatatttcaatgcatctgctattattttgtggagtttattaaactactttaaaaaaattgtatagtctatttattgtat

SEQ ID NO: 165306 - DNA, 120 bp, Artificial Sequence
  ENSG00000108100_31 (sequence is synthesized)
gtatgtacatacagtctgatacctaaaatttaaagtggattccataaaaccagactcaagtcttgtttagactactgaatactgttttagcctgtgccctggattctacctctgtatagg

SEQ ID NO: 165307 - DNA, 120 bp, Artificial Sequence
  ENSG00000108100_32 (sequence is synthesized)
aaaattttccatattcattaattagtgttgatctgtattaattggttatgtttcttgcactaaggatgtttaaaactccgctgtaagtgtagattttagttttactggcaggatgaatca

SEQ ID NO: 165308 - DNA, 120 bp, Artificial Sequence
  ENSG00000108100_33 (sequence is synthesized)
cttgacacataggtagatacttgaggttcattttcttttctttttctacatgatgatgaatagttatgttttcttctctgatttgttcaaagtttgccaaaagaaaacacaaaaccagta

SEQ ID NO: 165309 - DNA, 120 bp, Artificial Sequence
  ENSG00000108100_34 (sequence is synthesized)
cagtacttactgataaatcgtagtgactgtaatttgtttgtaaggcgaattaatgctctacaattaaagctggattactattgaggaacacattgtcttagtgtagtttttgaatggaaa

SEQ ID NO: 165310 - DNA, 120 bp, Artificial Sequence
  ENSG00000108100_35 (sequence is synthesized)
gtttttgtcattaaggatgaaggaaacgacacaatttgttactttaattttatatttgatttaaacaacaaataaagtcattgggacaataaatatatatcccgatgaatctttttgatt

SEQ ID NO: 165311 - DNA, 120 bp, Artificial Sequence
  ENSG00000108100_36 (sequence is synthesized)
tgttttacttttcttatttttttttttttaactagaaaaagggaaagaagaagtcaggagtttaaaaccaaattggagggcagatgagaaatcctgccaagatcgggatgtgccttcatg

SEQ ID NO: 165312 - DNA, 120 bp, Artificial Sequence
  ENSG00000108100_37 (sequence is synthesized)
catgaggtgaggccagaggtgtgggcacctgtacctgcctcctcttctgggctggctttcctgtctgcctgctctcgggcttgggcagagccatctccatcctggggtttcctttaagct

SEQ ID NO: 165313 - DNA, 120 bp, Artificial Sequence
  ENSG00000108100_38 (sequence is synthesized)
aagctgaaagcaaaatttggggagtgaatgatttaaacttttcctgctgcttttggtaacttctcacctggggccatattttacagatttgaatttttttttttctttttttgagatgga

SEQ ID NO: 165314 - DNA, 81 bp, Artificial Sequence
  ENSG00000108100_39 (sequence is synthesized)
tggagtctcgctcttgtcacccaggctggtgtgcaatggtgcgatctgggctcactgcaacccccacttcccggacacagg

SEQ ID NO: 165315 - DNA, 63 bp, Artificial Sequence
  ENSG00000108100_40 (sequence is synthesized)
gcctcagcctcccgagtagctaggatcacaggcacccaccaccatgcccagctgatttttgta

SEQ ID NO: 165316 - DNA, 120 bp, Artificial Sequence
  ENSG00000108100_41 (sequence is synthesized)
aggagagatgtgagcctcgtaccaggaagatcatactgaggccaccaggttgagagccgcctggctggggggcttgtccggggacagcaggggcagaggcatggaggttcacagccagga

SEQ ID NO: 165317 - DNA, 120 bp, Artificial Sequence
  ENSG00000108100_42 (sequence is synthesized)
aatcgtgcagtgaacctgtcccctccggtcacaacatcaagagctgaactgggactagaagtcatcgccccagagctttttgctaccagaactgccgggtgaaaatctttggaagagaag

SEQ ID NO: 165318 - DNA, 120 bp, Artificial Sequence
  ENSG00000108100_43 (sequence is synthesized)
tttgagaacctgttaaacaagctctctaggtaattctgtgcacgttcagtctgagaactgctgcatctgaagaggccctccagaaaaaggaagaaaagtgggaagcactgtatacacaga

SEQ ID NO: 165319 - DNA, 120 bp, Artificial Sequence
  ENSG00000108100_44 (sequence is synthesized)
cagggagttgtgcaaatgactgactcatatttcatggatacgagtatggctgatgtaagactgcagttatctcctcctgattcaattaagcacagggaatctactagagggccctgcctc

SEQ ID NO: 165320 - DNA, 120 bp, Artificial Sequence
  ENSG00000108100_45 (sequence is synthesized)
agggtattaaaaaccagtgacatgtagcatgaaggcggatgaggcccatattgctaatgtgatgcagatgtggacgttcattgtggctttggtttttacccacaaaggctatttgaacat

SEQ ID NO: 165321 - DNA, 120 bp, Artificial Sequence
  ENSG00000108100_46 (sequence is synthesized)
gaagctgtctccctgtgttcttcataatgactgtacagtgtaaagagctaaaataactgtctgtgatggatgaaaatggctcatgtgctttgtagatacttggaagaatgttgcagtgta

SEQ ID NO: 165322 - DNA, 80 bp, Artificial Sequence
  ENSG00000108106_0 (sequence is synthesized)
ggctcagtgctgccgggcaccggggcggcgggttggtctacgctgtgcgcggcggacgtcggaggcagcggggagcggag

SEQ ID NO: 165323 - DNA, 120 bp, Artificial Sequence
  ENSG00000108106_1 (sequence is synthesized)
ttgggccccccgccccggccggcggaccgaagaacgcaggaagggggccggggggacccgcccccggccggccgcagccatgaactccaacgtggagaacctacccccgcacatcatccg

SEQ ID NO: 165324 - DNA, 120 bp, Artificial Sequence
  ENSG00000108106_2 (sequence is synthesized)
cctggtgtacaaggaggtgacgacactgaccgcagacccacccgatggcatcaaggtctttcccaacgaggaggacctcaccgacctccaggtcaccatcgagggccctgaggggacccc

SEQ ID NO: 165325 - DNA, 120 bp, Artificial Sequence
  ENSG00000108106_3 (sequence is synthesized)
atatgctggaggtctgttccgcatgaaactcctgctggggaaggacttccctgcctccccacccaagggctacttcctgaccaagatcttccacccgaacgtgggcgccaatggcgagat

SEQ ID NO: 165326 - DNA, 120 bp, Artificial Sequence
  ENSG00000108106_4 (sequence is synthesized)
ctgcgtcaacgtgctcaagagggactggacggctgagctgggcatccgacacgtactgctgaccatcaagtgcctgctgatccaccctaaccccgagtctgcactcaacgaggaggcggg

SEQ ID NO: 165327 - DNA, 120 bp, Artificial Sequence
  ENSG00000108106_5 (sequence is synthesized)
ccgcctgctcttggagaactacgaggagtatgcggctcgggcccgtctgctcacagagatccacgggggcgccggcgggcccagcggcagggccgaagccggtcgggccctggccagtgg

SEQ ID NO: 165328 - DNA, 120 bp, Artificial Sequence
  ENSG00000108106_6 (sequence is synthesized)
cactgaagcttcctccaccgaccctggggccccagggggcccgggaggggctgagggtcccatggccaagaagcatgctggcgagcgcgataagaagctggcggccaagaaaaagacgga

SEQ ID NO: 165329 - DNA, 120 bp, Artificial Sequence
  ENSG00000108106_7 (sequence is synthesized)
caagaagcgggcgctgcggcggctgtagtgggctctcttcctccttccaccgtgaccccaacctctcctgtcccctccctccaactctgtctctaagttatttaaattatggctggggtc

SEQ ID NO: 165330 - DNA, 120 bp, Artificial Sequence
  ENSG00000108106_8 (sequence is synthesized)
ggggagggtacagggggcactgggacctggatttgtttttctaaataaagttggaaaagcagcttctgtgtctcacagatgccccaggaccgctgcatggtgccatgtggctctgggagt

SEQ ID NO: 165331 - DNA, 120 bp, Artificial Sequence
  ENSG00000108106_9 (sequence is synthesized)
ttggctcccctgcacaggccctgggtccttgtaaagcctcatggactgcagcagtgggtccatctagctcaccagccttgctgtttgaggtttgggtccacctctttgttctgtggaggt

SEQ ID NO: 165332 - DNA, 120 bp, Artificial Sequence
  ENSG00000108106_10 (sequence is synthesized)
ctaaaatggggcgaggacctggagctgctcctggtggcctgagcggcactgccctatacttctccctctagaataatggccacgttggtgtggcagtggtgttcctgctcaggacggcca

SEQ ID NO: 165333 - DNA, 120 bp, Artificial Sequence
  ENSG00000108106_11 (sequence is synthesized)
ggtgccagcagtctggcatgaggctcgcctcgtctgtctggttctggactgggccaaggttcggtccccttgaatcatctgatcctgctttgtgctaaagattggtttttcccttgtggg

SEQ ID NO: 165334 - DNA, 120 bp, Artificial Sequence
  ENSG00000108106_12 (sequence is synthesized)
cagcaaagcctgttcccacatgtatttctgcacaacagatcacaaagccagcggcttaaaacaacacccacttcagactttgtgttggaagtctggacacggctgagctagtctctgctc

SEQ ID NO: 165335 - DNA, 120 bp, Artificial Sequence
  ENSG00000108106_13 (sequence is synthesized)
agtgctttgcaggctaaaattgaggtattggttgttggtgttccttagtctgggtcctcttccatgctcatggttgttggctgatttcagtcctcgtagaactagggtcttagctccaag

SEQ ID NO: 165336 - DNA, 120 bp, Artificial Sequence
  ENSG00000108106_14 (sequence is synthesized)
aagctgcccctccttgggccctggcaggtctgatttaagggcccattccctttgaggtgctcaccggattaggtcaggcccatccagatacttaagtgataatgactaaatcacaggggt

SEQ ID NO: 165337 - DNA, 120 bp, Artificial Sequence
  ENSG00000108106_15 (sequence is synthesized)
aagatcccagcttagtcttagtttctgccctcaaggggaagggattaacctgggtgtgcacaccagggggtggggaaacttcccattctattaatgcgtttaggttatttagaccaatgt

SEQ ID NO: 165338 - DNA, 86 bp, Artificial Sequence
  ENSG00000108106_16 (sequence is synthesized)
aggcgcaatggctcacgcctgtaatcccaactttaggaggtgaaaggatcacttgaggccaggagttaaagacgaacggtaaaata

SEQ ID NO: 165339 - DNA, 120 bp, Artificial Sequence
  ENSG00000108106_17 (sequence is synthesized)
agtgagatcccatctctacaaaaagtaaaatacatttacaataaaaatctacaagttctgacccataggagagtggaaaactcaaaggctgcttttgtcctgaaagaatttgcctattct

SEQ ID NO: 165340 - DNA, 120 bp, Artificial Sequence
  ENSG00000108106_18 (sequence is synthesized)
aataaaacagctgaggttgaaacggctcagcctctgaaaggggtctgacccttccttgagcccttgcctccagtgacaatctcccaagctaagggagaaaaggaaccaaaagtctgcact

SEQ ID NO: 165341 - DNA, 120 bp, Artificial Sequence
  ENSG00000108106_19 (sequence is synthesized)
cctctctacctctagcagtgcagggagcgaaggaaagacaagggaagaaacccttcagattttcagatcaaattcacatcactggccatccaagaaatcttaagctctgcgtttatcgtc

SEQ ID NO: 165342 - DNA, 120 bp, Artificial Sequence
  ENSG00000108106_20 (sequence is synthesized)
aaccatttctgcatgagggaagcaaacagtccttgctgaaggaaggtgcctgcatcctgggcctcggaacccactgaaataatttagcgaagtgcataataaaaataatatttgccctta

SEQ ID NO: 165343 - DNA, 80 bp, Artificial Sequence
  ENSG00000108106_21 (sequence is synthesized)
acgagtggtgagtttgtattgtaggatggtttttctcttctcccttttttttaaaaaacaaggatagggtaggccaggtg

SEQ ID NO: 165344 - DNA, 120 bp, Artificial Sequence
  ENSG00000108107_0 (sequence is synthesized)
gggagggcgaactgcaagagggctgccaggattagccgagggattccgaatgaagacggagtatttccgaacatacacacctctcccaagagcgtttccggagggttccgaaaatacccg

SEQ ID NO: 165345 - DNA, 120 bp, Artificial Sequence
  ENSG00000108107_1 (sequence is synthesized)
agcgggcctcggcgccctcattggccatcaccgcgagggcttacgaagaccggaaatatccaaaggtgccggggctaggcttatatagttcacgcattcaccagttcattcataaaacaa

SEQ ID NO: 165346 - DNA, 120 bp, Artificial Sequence
  ENSG00000108107_2 (sequence is synthesized)
atgtttgttgagcgcccatcatatgccaatcacagtgacaagtgctgggtgagcaatactggagagataacgctgaggtatgggtcccaggacctctcgaattggagccactcggaaatc

SEQ ID NO: 165347 - DNA, 120 bp, Artificial Sequence
  ENSG00000108107_3 (sequence is synthesized)
cagcggtagagtttcgaaaacttccgaacggttcccggaatacgctctcggccctctaaccgaagagttccgaatattcccgagcgttgagcgaattttcggcggaagcagccgaacatc

SEQ ID NO: 165348 - DNA, 120 bp, Artificial Sequence
  ENSG00000108107_4 (sequence is synthesized)
atcgagccgcctcggaggtggggaccgacaactcctgtcgtgcccgcccggagaggaagcggaaatgcgtgtacggtattaaaggcgtcgcctcgcccctcgccttcctctttccgtctc

SEQ ID NO: 165349 - DNA, 120 bp, Artificial Sequence
  ENSG00000108107_5 (sequence is synthesized)
aggtcgccgctgcgaagggagccgccgccatgtctgcgcatctgcaatggatggtcgtgcggaactgctccagtttcctgatcaagaggaataagcagacctacagcactgagcccaata

SEQ ID NO: 165350 - DNA, 120 bp, Artificial Sequence
  ENSG00000108107_6 (sequence is synthesized)
acttgaaggcccgcaattccttccgctacaacggactgattcaccgcaagactgtgggcgtggagccggcagccgacggcaaaggtgtcgtggtggtcattaagcggagatccggccagc

SEQ ID NO: 165351 - DNA, 120 bp, Artificial Sequence
  ENSG00000108107_7 (sequence is synthesized)
ggaagcctgccacctcctatgtgcggaccaccatcaacaagaatgctcgcgccacgctcagcagcatcagacacatgatccgcaagaacaagtaccgccccgacctgcgcatggcagcca

SEQ ID NO: 165352 - DNA, 120 bp, Artificial Sequence
  ENSG00000108107_8 (sequence is synthesized)
tccgcagggccagcgccatcctgcgcagccagaagcctgtgatggtgaagaggaagcggacccgccccaccaagagctcctgagccccctgcccccagagcaataaagtcagctggcttt

SEQ ID NO: 165353 - DNA, 120 bp, Artificial Sequence
  ENSG00000108107_9 (sequence is synthesized)
ctcacctgcctcgactgggcctccctttttgaaacgctctggggagctctggccctgtgtgttgtcattcaggccatgtcatcaaaactctgcatgtcaccttgtccatctggaggtgat

SEQ ID NO: 165354 - DNA, 120 bp, Artificial Sequence
  ENSG00000108107_10 (sequence is synthesized)
gtcaatggctggccatgcaggaggggtggggtagctgccttgtccctggtgagggcaagggtcactgtcttcacagaaaaagtttgctgacttgtgattgagacctactgtcccattgtg

SEQ ID NO: 165355 - DNA, 120 bp, Artificial Sequence
  ENSG00000108107_11 (sequence is synthesized)
aggtggcctgaagaatcccagctggggcagtggcttccattcagaagaagaaaggccttttctagcccagaagggtgcaggctgagggctgggccctgggccctggtgctgtagcacggt

SEQ ID NO: 165356 - DNA, 120 bp, Artificial Sequence
  ENSG00000108107_12 (sequence is synthesized)
ttggggacttggggtgttcccaagacctgggggacgacagacatcacgggaggaagatgagatgacttttgcatccagggagtgggtgcagccacatttggaggggatgggctttacttg

SEQ ID NO: 165357 - DNA, 120 bp, Artificial Sequence
  ENSG00000108107_13 (sequence is synthesized)
atgcaacctcatctctgagatgggcaacttggtgggtggtggcttataactgtaagggagatggcagccccagggtacagccagcaggcattgagcagccttagcattgtccccctactc

SEQ ID NO: 165358 - DNA, 120 bp, Artificial Sequence
  ENSG00000108107_14 (sequence is synthesized)
ccgtcctccaggtgtccccatccctcccctgtctctttgagctggctcttgtcacttaggtctcatctcagtggccgctcctgggccaccctgtcacccaagctttcctgattgcccagc

SEQ ID NO: 165359 - DNA, 120 bp, Artificial Sequence
  ENSG00000108107_15 (sequence is synthesized)
cctcttgtttcctttggcctgtttgctccctagtgtttattacagcttgtgaggccaggagtttgagaccatcctaggcaacataatgagacaccgtctctaaaataaaattagctgggt

SEQ ID NO: 165360 - DNA, 120 bp, Artificial Sequence
  ENSG00000108107_16 (sequence is synthesized)
gtggtggtgcaccgcctgtggtcccagctcctcagaggttgagtagaggctgaggtgagcggagcacttgagccaagagtatgaggctgcagtgagcccatgagccccaccactacactc

SEQ ID NO: 165361 - DNA, 120 bp, Artificial Sequence
  ENSG00000108107_17 (sequence is synthesized)
cagcctggaagacaccatgacacacagtgaggcctggatggggaaagagtcctgctgttgatcctcacatgtttcctgggcacctaactctgtcagccactgccagggaccaaggatcca

SEQ ID NO: 165362 - DNA, 120 bp, Artificial Sequence
  ENSG00000108107_18 (sequence is synthesized)
gcatccatggcacccctggttcctgccatcctggggtacccgattcaaagaaggactctgctccctgtctgagaccacccccggctctgactgagagtaaggggactgtcagggcctcga

SEQ ID NO: 165363 - DNA, 120 bp, Artificial Sequence
  ENSG00000108107_19 (sequence is synthesized)
ctgaccacttgccagcccctgtctgctgtgaattaccatttcctttgtccttcccttagttgggtctattagctcagattgagaggtgttgccttaaaactgagttgggtgacttggtac

SEQ ID NO: 165364 - DNA, 120 bp, Artificial Sequence
  ENSG00000108107_20 (sequence is synthesized)
ctgctcaggaccccccgcactgtcccaatcccactcaggcccacctccagctggcctcactccgctggtgacttcgtacctgctcaggagcccccactgtcccagtcccactcaggccca

SEQ ID NO: 165365 - DNA, 120 bp, Artificial Sequence
  ENSG00000108107_21 (sequence is synthesized)
tctctggctggcctcactgcgctgggactccgccttcataaggagagctcactgctcacgttagtagatggccccttctcgtgaggcctctcccctggcacctgcttcagttgtcctcca

SEQ ID NO: 165366 - DNA, 120 bp, Artificial Sequence
  ENSG00000108107_22 (sequence is synthesized)
cagcactgatttgcagcccacaagctggcaggtttatctgtctcatgtttgtcttgtgctggtgggcaaggggtttgtctagcacaccagcatataatgagatgcttgatgaatggtgca

SEQ ID NO: 165367 - DNA, 120 bp, Artificial Sequence
  ENSG00000108107_23 (sequence is synthesized)
agcacaccagcatataatgagatgcttgatgaatggtgcatattgaatgtataaagcccaccggtcctgagagtttgctcactggagactttctggagatggagtctcgctctgttgccc

SEQ ID NO: 165368 - DNA, 73 bp, Artificial Sequence
  ENSG00000108107_24 (sequence is synthesized)
tcccgagtagctgggattacaggtgggtgtcaccacacccagctcagtattggaactcctgacttcaaattac

SEQ ID NO: 165369 - DNA, 80 bp, Artificial Sequence
  ENSG00000108107_25 (sequence is synthesized)
ctcgaggctttctgatgtggctgctgctgctcagaaggccttgtccttaaccacctccttgcctgccctggaggcttgtg

SEQ ID NO: 165370 - DNA, 120 bp, Artificial Sequence
  ENSG00000108107_26 (sequence is synthesized)
ttgtccttaaccacctccttgcctgccctggaggcttgtgcctctaggccccaccccctgtggagtcctgctggctttctccatccctatctgaatcctccctgctgtgtggcctcccct

SEQ ID NO: 165371 - DNA, 120 bp, Artificial Sequence
  ENSG00000108107_27 (sequence is synthesized)
ggtctcatccgtaacacagcccagcttagtgggcctctgttcctgcgggtggccagcctgtctgtgtggctgggctggggaggccacgtctggtatctgaatgctatcggtgggttgggg

SEQ ID NO: 165372 - DNA, 120 bp, Artificial Sequence
  ENSG00000108107_28 (sequence is synthesized)
tggaggaaccaggagagggctggagggagggagatggtctcagccccacagagtttggagtcctcagtgtgctgagcaaacgtggagacaccatttccctcctctagacctcatcttgga

SEQ ID NO: 165373 - DNA, 120 bp, Artificial Sequence
  ENSG00000108107_29 (sequence is synthesized)
gagagagatgttggatggggccatctattccagctttattcacacaaatcatgtctgttggcctggaaattggaaaaccagttaaaccaaaaacatgatattaagaaaacaggcaggctc

SEQ ID NO: 165374 - DNA, 120 bp, Artificial Sequence
  ENSG00000108107_30 (sequence is synthesized)
accatagtaaaaatgctgaaagccaaagacaaaattgggagaacaaaagaaaagcgtcttgtcacatacagaaggtccctgataaagttagtagctgccctcatcagaaaccaggcccag

SEQ ID NO: 165375 - DNA, 120 bp, Artificial Sequence
  ENSG00000108107_31 (sequence is synthesized)
gcagtggggacacatccagagtgctgaaagaacctcccccaggtcatcctatccccaagagtgatgcccggcagcattcccagctcagggctaatggttcacggaagccaggaatcaaac

SEQ ID NO: 165376 - DNA, 120 bp, Artificial Sequence
  ENSG00000108107_32 (sequence is synthesized)
tgcctgggttccagtcccagctctgccagttatgcccagctgtggggacttgggcagctcgtttagtagcaccgtgcctcagtttcccatatgtaaaaggccattttgagtgcctttcac

SEQ ID NO: 165377 - DNA, 120 bp, Artificial Sequence
  ENSG00000108107_33 (sequence is synthesized)
agccctgcataaggcaggtgtctcagtgttcactgctgtctctccagctcttagtccagtagctgcatggtgagtgagcgtagggcgcaccctggaaggctgccaagcccaaagttgtgc

SEQ ID NO: 165378 - DNA, 120 bp, Artificial Sequence
  ENSG00000108107_34 (sequence is synthesized)
agagcgctggggactccagactccccacagcagcagagactcgggactgaggcatcctctgttcacaggacatgctggcatctactgggtcagggctctgctgctcggtggctgtgcaac

SEQ ID NO: 165379 - DNA, 120 bp, Artificial Sequence
  ENSG00000108107_35 (sequence is synthesized)
cttgggcaagttcctcaacctctctgtgtcttcgtaccctcatctgtaacatgcgtgtcgatagaccctactactcagggttgatgagaagattaaatgtgcaaaacctgcttgactgtg

SEQ ID NO: 165380 - DNA, 120 bp, Artificial Sequence
  ENSG00000108107_36 (sequence is synthesized)
cccacaaatcctgattgtaggaataaattaatgactttttataaatattttgatcagatggactcatgatcacagatgtcttcacatgcctatgactaatttgtacacaaactaatgctc

SEQ ID NO: 165381 - DNA, 120 bp, Artificial Sequence
  ENSG00000108107_37 (sequence is synthesized)
gtgtttcccaagcacctggaagacatgccagatccatgtgcagtaatgcctggtggctccaggtctgccccgccgtcctgtggggctgtgagctttcccagcctcctgcccgtgtttgtg

SEQ ID NO: 165382 - DNA, 120 bp, Artificial Sequence
  ENSG00000108107_38 (sequence is synthesized)
aatatcattctgtcctcagctgcatttccagcccaggctgtttggcgctgcccaggaatggtatcaattcccctgtttctcttgtagccagttactagaataaaatcatctactttaaaa

SEQ ID NO: 165383 - DNA, 120 bp, Artificial Sequence
  ENSG00000108107_39 (sequence is synthesized)
gggaggtgagcgttcgtcttcctcgcgtggtcgccatctccggcccgccgcgcactccctctcagtcctctgcctgccttctccccttgcgcctcaagggtcattggcggaccccaaccc

SEQ ID NO: 165384 - DNA, 120 bp, Artificial Sequence
  ENSG00000108107_40 (sequence is synthesized)
ctccccgtgaagtcgttgtgaattttcaagttattttcccctcactctcattcgccgcagctagtctcggctgcctgaattcggtcccgccgccttaggtcactcagtcccgcctgacaa

SEQ ID NO: 165385 - DNA, 120 bp, Artificial Sequence
  ENSG00000108107_41 (sequence is synthesized)
gagttctaggtcgctgtctgccctcaggggtctcccattcacccaagttcccagtcgctctcttcctctgctgtccgagcgtggcccgtggcctaacgctgctttagttctctgtgtctg

SEQ ID NO: 165386 - DNA, 120 bp, Artificial Sequence
  ENSG00000108107_42 (sequence is synthesized)
ggcatccctggcgccagggtgttggtctgggtaccggcttccctctcggccgacttgtcagctctgtgagccgcgcgcgtctgagcccgtgtcctcacctgtaaagtggagaaatgaaaa

SEQ ID NO: 165387 - DNA, 120 bp, Artificial Sequence
  ENSG00000108107_43 (sequence is synthesized)
aggacctgaacttcctcggtggttgttgagagttaaggcacggggttgatgttttcagatgaaattctcaaagcaagtcagggtggggatggatggtttcatcccacaggtgggaagatt

SEQ ID NO: 165388 - DNA, 120 bp, Artificial Sequence
  ENSG00000108107_44 (sequence is synthesized)
gctagtgatcctcctgtctcagggacacgtagtccagggagcagccaattgcttggcacttggggaccccgttctggggagtcctgaaagctttcacctcttggattgccgaatacatgg

SEQ ID NO: 165389 - DNA, 120 bp, Artificial Sequence
  ENSG00000108107_45 (sequence is synthesized)
gtggcccttcctagactaagggactggcctgagtgaggctgggcctctcagccaagctgatgttgaaccactgctgtggggatgggcctggggttcctgggaagctgttcatacccattg

SEQ ID NO: 165390 - DNA, 120 bp, Artificial Sequence
  ENSG00000108107_46 (sequence is synthesized)
cctcgctaccacacttaggaggggacaggctgggttggttgcagccatttgattcccattttgcctgtgtaggttagagaagaggtcttggggaccccactccatacattgtgctgtcag

SEQ ID NO: 165391 - DNA, 120 bp, Artificial Sequence
  ENSG00000108107_47 (sequence is synthesized)
gtgcaggcctttttggggattccctgaatgttcgtgtgagtcgggggtctctaatggaggagtccagcttcacatgtgttcttgacagggctgtattttctttttagagtgagtttttct

SEQ ID NO: 165392 - DNA, 120 bp, Artificial Sequence
  ENSG00000108107_48 (sequence is synthesized)
ggcatgagaaaggagtgttttcatggtggacagaattgggctatgagtgtggcagaagctgtgtcctcagtactccgtgatgacgagtgagcctctgtgaaatggacaggtgggaaaaca

SEQ ID NO: 165393 - DNA, 120 bp, Artificial Sequence
  ENSG00000108107_49 (sequence is synthesized)
gctacctgctggcctgcccaggcacccgccacgggcccacgctgctcagcttctcaatgtgagactgtccacacctgcgaggtgtgctaaaggtgcaggttaggtggactgaccccagga

SEQ ID NO: 165394 - DNA, 120 bp, Artificial Sequence
  ENSG00000108107_50 (sequence is synthesized)
catggtgagctggggtttggggatcaggcttggggagactggccagtgctgtggggaagggcctcccactactggttgcaatatgggctggagagggatggattcttgctttcagcctac

SEQ ID NO: 165395 - DNA, 120 bp, Artificial Sequence
  ENSG00000108107_51 (sequence is synthesized)
ccacctcagcaacaccgcagccaggtcattctgtgtcatggagccatctcgtacgctgcaggatttgggcagcacccttggcctccacccactagatgctagtggcacccccgagttgtg

SEQ ID NO: 165396 - DNA, 120 bp, Artificial Sequence
  ENSG00000108107_52 (sequence is synthesized)
acaaccctttctggtctcctgacaatgcataataccccttggggggcaaaatcacctctggctgagaaacactggtttatgaaccctatcgctattaaaaaaccactgaactgtatactt

SEQ ID NO: 165397 - DNA, 120 bp, Artificial Sequence
  ENSG00000108175_0 (sequence is synthesized)
acttactcaccccctaacgccgagttccttttcactgtctgtggacattaaaaaagcgagcggcggcggcgggcgccggggagagcgggcggccgggcggcaggcgggcgagcagcgatc

SEQ ID NO: 165398 - DNA, 80 bp, Artificial Sequence
  ENSG00000108175_1 (sequence is synthesized)
accccagccccagccggcgcggagcaggagccggagccgagcggatctcggcgccctcgctgcgctcctcccggcccgag

SEQ ID NO: 165399 - DNA, 120 bp, Artificial Sequence
  ENSG00000108175_2 (sequence is synthesized)
cctgccctacccggcggtggcggcggcgcgtcctccagcggcggcagcggcgctcgcagcgcccggactcacggcagctgtgttctgatttcgtactactgctggggctgccacctcctc

SEQ ID NO: 165400 - DNA, 120 bp, Artificial Sequence
  ENSG00000108175_3 (sequence is synthesized)
ctccagacgctctcagcagacttgagtcctggtccttctgcagaggcctgagcaggaggaagaggaggaggcccgttggcgtcggaccaatgctgcaaggggtgtgaggagaggagccgc

SEQ ID NO: 165401 - DNA, 120 bp, Artificial Sequence
  ENSG00000108175_4 (sequence is synthesized)
tgtttttcactgagctgccataccccgaaagcaggatggagctggagtgaggtggaggggccgcaagctgctgaccggcgtgtggaacactggtggtttgcagatcactgaggctggaca

SEQ ID NO: 165402 - DNA, 120 bp, Artificial Sequence
  ENSG00000108175_5 (sequence is synthesized)
acgttcatggctctcgggtagaacctagtgaaacggccagaatgaattctatggacaggcacatccagcagaccaatgaccgactgcagtgcatcaagcagcacttacagaatcctgcca

SEQ ID NO: 165403 - DNA, 120 bp, Artificial Sequence
  ENSG00000108175_6 (sequence is synthesized)
acttccacaatgccgccacggagctgctggactggtgcggagacccacgggccttccagcggcccttcgagcagagcctgatgggctgtttgacggtggtcagtcgggtggcagcccagc

SEQ ID NO: 165404 - DNA, 120 bp, Artificial Sequence
  ENSG00000108175_7 (sequence is synthesized)
aaggctttgacctggacctcggctacagactgctggctgtgtgtgctgcaaaccgagacaagttcaccccgaagtctgccgccttgttgtcctcctggtgcgaagagctcggccgcctgc

SEQ ID NO: 165405 - DNA, 120 bp, Artificial Sequence
  ENSG00000108175_8 (sequence is synthesized)
tgctgctccgacatcagaagagccgccagagcgatccccctgggaaactccccatgcagccccctctcagctccatgagctccatgaaacccactctgtcgcacagtgatgggtcgttcc

SEQ ID NO: 165406 - DNA, 120 bp, Artificial Sequence
  ENSG00000108175_9 (sequence is synthesized)
cctatgactctgtcccttggcagcagaacaccaaccagcctcccggctccctttccgtggtcaccacggtttggggagtaaccaacacatcccagagccaggtccttgggaaccctatgg

SEQ ID NO: 165407 - DNA, 120 bp, Artificial Sequence
  ENSG00000108175_10 (sequence is synthesized)
ccaatgccaacaaccccatgaatccaggcggcaaccccatggcgtcgggcatgaccaccagcaacccaggcctcaactccccacagtttgcggggcagcagcagcagttctcagccaagg

SEQ ID NO: 165408 - DNA, 120 bp, Artificial Sequence
  ENSG00000108175_11 (sequence is synthesized)
ctggccccgctcagccctacatccagcagagcatgtatggccggcccaactaccccggcagcgggggctttggggccagttaccctgggggtcctaacgcccccgcaggcatgggcatcc

SEQ ID NO: 165409 - DNA, 120 bp, Artificial Sequence
  ENSG00000108175_12 (sequence is synthesized)
ctccgcacaccaggccgcctgctgacttcactcagcccgcggcagccgctgcagcagcggcagtggcagcagcagcagccacagctacagccacagccacggccactgtggcagccctgc

SEQ ID NO: 165410 - DNA, 120 bp, Artificial Sequence
  ENSG00000108175_13 (sequence is synthesized)
aggagacacagaacaaggatataaaccagtatggaccgatgggtcccacccaggcgtataacagccaattcatgaaccagcccgggccgcgggggcctgcctccatggggggcagcatga

SEQ ID NO: 165411 - DNA, 120 bp, Artificial Sequence
  ENSG00000108175_14 (sequence is synthesized)
accccgcgagcatggcggctggcatgacgccctcggggatgagcggccctcccatgggcatgaaccagccccggccgcccggcatcagcccctttggcacacacgggcagcggatgcccc

SEQ ID NO: 165412 - DNA, 120 bp, Artificial Sequence
  ENSG00000108175_15 (sequence is synthesized)
agcagacctacccgggcccccggccccagtcccttcctattcagaacataaagaggccataccctggagagcccaactatggaaaccagcaatatggaccaaacagccagttccccaccc

SEQ ID NO: 165413 - DNA, 120 bp, Artificial Sequence
  ENSG00000108175_16 (sequence is synthesized)
agccaggccagtacccagcccccaaccccccgaggccactcacctcccccaactacccaggacagaggatgcccagccagccgagctccgggcagtacccgccccccacggtcaacatgg

SEQ ID NO: 165414 - DNA, 120 bp, Artificial Sequence
  ENSG00000108175_17 (sequence is synthesized)
ggcagtattacaagccagaacagtttaatggacaaaataacacgttctcgggaagcagctacagtaactacagccaagggaatgtcaacaggcctcccaggccggttcctgtggcaaatt

SEQ ID NO: 165415 - DNA, 120 bp, Artificial Sequence
  ENSG00000108175_18 (sequence is synthesized)
acccccactcacctgttccagggaaccccacaccccccatgacccctgggagcagcatccctccatacctgtcccccagccaagacgtcaaaccacccttcccgcctgacatcaagccaa

SEQ ID NO: 165416 - DNA, 120 bp, Artificial Sequence
  ENSG00000108175_19 (sequence is synthesized)
atatgagcgctctgccaccacccccagccaaccacaatgacgagctgcggctcacattccctgtgcgggatggcgtggtgctggagcccttccgcctggagcacaacctggcggtcagca

SEQ ID NO: 165417 - DNA, 120 bp, Artificial Sequence
  ENSG00000108175_20 (sequence is synthesized)
accatgtgttccacctgcggcccacggtccaccagacgctgatgtggaggtctgacctggagctgcagttcaagtgctaccaccacgaggaccggcagatgaacaccaactggcccgcct

SEQ ID NO: 165418 - DNA, 120 bp, Artificial Sequence
  ENSG00000108175_21 (sequence is synthesized)
cggtgcaggtcagcgtgaacgccacgcccctcaccattgagcgcggcgacaacaagacctcccacaagcccctgcacctgaagcacgtgtgccagccgggccgcaacaccatccagatca

SEQ ID NO: 165419 - DNA, 120 bp, Artificial Sequence
  ENSG00000108175_22 (sequence is synthesized)
ccgtcacggcctgctgctgctcccacctcttcgtgctgcagctggtacaccggccctccgtccgctctgtgctgcaaggactcctcaagaagcgcctcctgcccgcagagcactgtatca

SEQ ID NO: 165420 - DNA, 120 bp, Artificial Sequence
  ENSG00000108175_23 (sequence is synthesized)
cgaaaatcaagcggaatttcagcagcgtggctgcctcctcgggcaacacgaccctcaacggggaggatggggtggagcagacggccatcaaggtgtctctgaagtgccccatcacattcc

SEQ ID NO: 165421 - DNA, 120 bp, Artificial Sequence
  ENSG00000108175_24 (sequence is synthesized)
ggcgcatccagctgcctgctcgaggacacgattgcaagcatgtgcagtgctttgatctggagtcatacctgcagctgaattgcgagagagggacctggaggtgtcctgtgtgcaataaaa

SEQ ID NO: 165422 - DNA, 120 bp, Artificial Sequence
  ENSG00000108175_25 (sequence is synthesized)
ccgctctgctggagggcctggaggtggatcagtacatgtggggaatcctgaatgccatccaacactccgagtttgaagaggtcaccatcgatcccacgtgcagctggcggccggtgccca

SEQ ID NO: 165423 - DNA, 120 bp, Artificial Sequence
  ENSG00000108175_26 (sequence is synthesized)
tcaagtcggacttacacatcaaggacgaccctgatggcatcccctccaagcggttcaagaccatgagtcccagccagatgatcatgcccaatgtcatggagatgatcgcagccctgggcc

SEQ ID NO: 165424 - DNA, 120 bp, Artificial Sequence
  ENSG00000108175_27 (sequence is synthesized)
ccggcccgtccccctatcccctcccgcctcccccagggggcaccaactccaacgactacagcagccaaggcaacaactaccaaggccatggcaactttgacttcccccacgggaaccctg

SEQ ID NO: 165425 - DNA, 120 bp, Artificial Sequence
  ENSG00000108175_28 (sequence is synthesized)
gagggacatccatgaatgacttcatgcacgggcccccccagctctcccaccccccggacatgcccaacaacatggccgccctcgagaaacccctcagccaccccatgcaggaaactatgc

SEQ ID NO: 165426 - DNA, 120 bp, Artificial Sequence
  ENSG00000108175_29 (sequence is synthesized)
cacacgctggcagctctgaccagccccacccctccatacaacaaggtttgcacgtaccacaccccagcagccagtcagggcctccattacatcacagtggggctcctcctcctcctcctt

SEQ ID NO: 165427 - DNA, 120 bp, Artificial Sequence
  ENSG00000108175_30 (sequence is synthesized)
cccagcctccccggcagccgccacaggccgctcccagcagccatccacacagcgacctgacctttaacccctcctcagccttagagggtcaggccggagcgcagggagcgtccgacatgc

SEQ ID NO: 165428 - DNA, 120 bp, Artificial Sequence
  ENSG00000108175_31 (sequence is synthesized)
ttatctggacccccccgacctgccgagcaatagtaacgatgacctcctgtctctatttgagaacaactgagggccacccggtcggggccatccctccacactctgcatcctaccccacct

SEQ ID NO: 165429 - DNA, 120 bp, Artificial Sequence
  ENSG00000108175_32 (sequence is synthesized)
acccaacacacttttccacctgggagcctgtgccctcagaccgccccgcaccagagccacgggctgtggggcggggagccctcccccgctgcagccctctcagaacagaggggtagggag

SEQ ID NO: 165430 - DNA, 120 bp, Artificial Sequence
  ENSG00000108175_33 (sequence is synthesized)
ggtgcaccagtgcaccaggaaggctgtgtgggtctggagcccacgtcccacctccacacccttggcttgggcccatgcccagcgcaggcctgaagaccaccctcccgagaggaaccagcc

SEQ ID NO: 165431 - DNA, 120 bp, Artificial Sequence
  ENSG00000108175_34 (sequence is synthesized)
cggtaagagggcacacgctgatgcggcttcccggtccctccgcgtgtgccgattccagatgaccttccagtgtccccaaggttcttccatcttctagactgtaaccctgcctccctgctt

SEQ ID NO: 165432 - DNA, 120 bp, Artificial Sequence
  ENSG00000108175_35 (sequence is synthesized)
cctggtccagagcctccctccagtgactgtggagcctgagaaggcccccgggccccagcatgggccccgagccttggaggagcactggcagttggtggcagtgagaccagcccacccacc

SEQ ID NO: 165433 - DNA, 120 bp, Artificial Sequence
  ENSG00000108175_36 (sequence is synthesized)
accacccaccacagaaaagcacaaacctctgggaaagacaacgtctctcgggggccaggggtcatcggtttgacccctgacctataagccaagataccccataaacacactcagaaagca

SEQ ID NO: 165434 - DNA, 120 bp, Artificial Sequence
  ENSG00000108175_37 (sequence is synthesized)
gagaaaaaggacaagagtctgtgtttgagagggggtctgccattcctgcttggggactggtggggaagagggccaggacatcttctgagccaggacgtccctgaggctccacctccaagc

SEQ ID NO: 165435 - DNA, 120 bp, Artificial Sequence
  ENSG00000108175_38 (sequence is synthesized)
tcagacagggcccaggcttggggaacagagagagcaggtgtacacccaaccaaagtgattgtgcccttggttggggggcgcgggcatataacctgtcagaagcaaacaggagcggcaact

SEQ ID NO: 165436 - DNA, 120 bp, Artificial Sequence
  ENSG00000108175_39 (sequence is synthesized)
tctaactttgctccaagccactctctttttaaacagcaacaatttaaagctatgaagtcacctggagaaaaggaacgttgctcttggacagcaagcaaaccatttctctccgtctgttct

SEQ ID NO: 165437 - DNA, 120 bp, Artificial Sequence
  ENSG00000108175_40 (sequence is synthesized)
gtttttctcctagtccctctcctgccacctctccaagacttccgtgggacacccacttccctctgtcctagttctctttgtccaatcagatggcaagggcagtgcgtggaaaggccgggg

SEQ ID NO: 165438 - DNA, 120 bp, Artificial Sequence
  ENSG00000108175_41 (sequence is synthesized)
aggtgcagaaaccagagcccagggcaatggtgtctgtccagcccctccctctgtccctgtgctccaagctgcccccggctgcagcccaggccatggacatgtgcaccagtatgtacctgc

SEQ ID NO: 165439 - DNA, 120 bp, Artificial Sequence
  ENSG00000108175_42 (sequence is synthesized)
aggcatgggggggaggggggcgtgtttctgggcctgccccagacactgcccttggctgccagcctaccctgcctgcactcctccaccatcacaatctcacccaaactcctgctcactcaa

SEQ ID NO: 165440 - DNA, 120 bp, Artificial Sequence
  ENSG00000108175_43 (sequence is synthesized)
gcaaaagcagcctctggccttccctccaccgctttgctccatctggcttaccactctccagggcctcctggggagcctgtcctgtgttcactttgtttcaggctggtctgtgccccgtga

SEQ ID NO: 165441 - DNA, 120 bp, Artificial Sequence
  ENSG00000108175_44 (sequence is synthesized)
gccacatggcctagggtgatgccaggttgtcccgtcactggggtcccatctgtaaattctttgcgcccttcccggctgctgcctggggccctttcctgctctcccgtccgctgtgggtgg

SEQ ID NO: 165442 - DNA, 120 bp, Artificial Sequence
  ENSG00000108175_45 (sequence is synthesized)
tccccagctctcctctgtgggttttaccggaaaggtggccccagctgttgacttccagtcactgtcccagacggcacaaggttttctgtaggaaagctgccattgccccggccccttttc

SEQ ID NO: 165443 - DNA, 120 bp, Artificial Sequence
  ENSG00000108175_46 (sequence is synthesized)
ttcctttgtcccgttgtcgaggttttttcaaatagcgtgttgttcagtatgcaaatcaattattttaagaatcgcttttgtaaatatctttgtgaatattttagtatcgtctttgataat

SEQ ID NO: 165444 - DNA, 120 bp, Artificial Sequence
  ENSG00000108175_47 (sequence is synthesized)
attcaacattttcatgacctggttatagcctttgctggtgtttttaaaatacctggactcaatgacaaagaccgagtcttctttttttttaaacaaaaacaaaaaaagcaaccagggcta

SEQ ID NO: 165445 - DNA, 120 bp, Artificial Sequence
  ENSG00000108175_48 (sequence is synthesized)
tttgtacagttgaaggggtgaacagaatgggcggctgtgctgggagttggaagaccgggcagcccgctatttagagccatccctcagtcagctggcagggacaagccaacgccaggtagc

SEQ ID NO: 165446 - DNA, 120 bp, Artificial Sequence
  ENSG00000108175_49 (sequence is synthesized)
atgtggccacccttgcccagtgtctgtggcctggcaagtggccacgccctgtgtcagaccatctgggaattaagctccagacagacttacagatgccttccttaggagttcttgcttctt

SEQ ID NO: 165447 - DNA, 120 bp, Artificial Sequence
  ENSG00000108175_50 (sequence is synthesized)
gcgttgatactttgccccagaaaggcctgggattcattctggttcttatcagggtgtgtccacactctgctcacaggtggatccacggctttccagtgcggagagtcgagatgctccctg

SEQ ID NO: 165448 - DNA, 120 bp, Artificial Sequence
  ENSG00000108175_51 (sequence is synthesized)
cagcccaggccccgggcacctcctgcaaccatctctgggctcagcacctgaggcgggtttcctgggtcccctctccagcaagcctccaccagcaagctcggcccagagcttcccttccgg

SEQ ID NO: 165449 - DNA, 120 bp, Artificial Sequence
  ENSG00000108175_52 (sequence is synthesized)
ctggctctgaaccgtgcgtggtgcctacagcctgcagtctggagacaagctcttccggagtgctctgggagccaggccagggtgtgagggaggtgcagaggcatccggggcgggagcaag

SEQ ID NO: 165450 - DNA, 120 bp, Artificial Sequence
  ENSG00000108175_53 (sequence is synthesized)
ccccaggttgtgacaggtgcaggtagacaacgcccataaacagagatggtcctgaactctggagagatccttccctgatcctttcggacgactacttggagccataagtaacctcagcaa

SEQ ID NO: 165451 - DNA, 120 bp, Artificial Sequence
  ENSG00000108175_54 (sequence is synthesized)
aaacgaggcctctgcaagccacttttccatgccaagcatccacccggcccacaggcatgtttctgccgccactccgcaagatggacagggagccagcaggcaggcgggaagggccaagta

SEQ ID NO: 165452 - DNA, 120 bp, Artificial Sequence
  ENSG00000108175_55 (sequence is synthesized)
caggcaatcacccccatcttcttggtttgaagctttatccatgtatcatgttccgtgtagccattttattttttaagaaactgctaatactttctccctaatggaagccctgatccccca

SEQ ID NO: 165453 - DNA, 120 bp, Artificial Sequence
  ENSG00000108175_56 (sequence is synthesized)
gagagctacaggtctgctcccgacgggcctcgggcctgacccgtccacacagggccgtgtcaacagcagcgactcaagggacgtgtgtacatatgtaaatgagaaatagagacgtgtcaa

SEQ ID NO: 165454 - DNA, 120 bp, Artificial Sequence
  ENSG00000108175_57 (sequence is synthesized)
cagatgcattcatttctcttggaatgtgtattgtttttattttgcgaaacaaaacaaaacaaaaaaaaaagcttggaactccatcacgtggaaaaactagatcctgttggttatagcatt

SEQ ID NO: 165455 - DNA, 120 bp, Artificial Sequence
  ENSG00000108175_58 (sequence is synthesized)
tgtgagttctccacgtctgtctctctcgctcatgtaatatactctgaccctgagtggaaaggggtttttgttctgtttttattttacctacatgtactatttagcttcagtgtactagtc

SEQ ID NO: 165456 - DNA, 120 bp, Artificial Sequence
  ENSG00000108175_59 (sequence is synthesized)
ctgccacctgtgtatttttagggtgctatggaaataatgaaaagaaacggggatttcagaagaaaattgtaaccaaattcatactttgtataatttttgatatcatgatcacaggtgatt

SEQ ID NO: 165457 - DNA, 120 bp, Artificial Sequence
  ENSG00000108175_60 (sequence is synthesized)
cacacgtacacacataaacacacccaccagtgcagcctgaagtaactcccacagaaaccatcatcgtctttgtacatcgtatgtacaatgcaatcatttcatactttaaactggtcaaaa

SEQ ID NO: 165458 - DNA, 120 bp, Artificial Sequence
  ENSG00000108175_61 (sequence is synthesized)
aactaattgtgatttctagtcttgcaaagctgtatgtagttagatgatgtgacaacctctaatatttatctaataaatatgtattcagatgaaacctgtatattaggtgttcatgtggtt

SEQ ID NO: 165459 - DNA, 120 bp, Artificial Sequence
  ENSG00000108175_62 (sequence is synthesized)
attttgtatttaaagatcaaattatttgactattgctagacatttctatactctgttgtaacactgaggtatctcatttgcccatgttaatttttttctaaataaattgacaaaaacaaa

SEQ ID NO: 165460 - DNA, 120 bp, Artificial Sequence
  ENSG00000108175_63 (sequence is synthesized)
atgaggttgctgaggcatacagagagtgagcagtggtttcatcgcttccctctgtgtccttctctcactttctgggccccagtggccatgtggccacagacacactgtgtaggtggtcgg

SEQ ID NO: 165461 - DNA, 120 bp, Artificial Sequence
  ENSG00000108175_64 (sequence is synthesized)
tcatcaggcttaacgaaatggacatattcattttcagcatcactccaagatgggtcgttcccctatgactctgtcccttggcagcagaacaccaaccagcctcccggctccctttccgtg

SEQ ID NO: 165462 - DNA, 120 bp, Artificial Sequence
  ENSG00000108175_65 (sequence is synthesized)
ccctggagaggtgagtgcagcagtgggagcctgggaggtgggaactgggacacctgggcttgaagacatgggccgtgggtacggctttggaaggggtgtggcttggactccagcacactt

SEQ ID NO: 165463 - DNA, 120 bp, Artificial Sequence
  ENSG00000108175_66 (sequence is synthesized)
ggacaaagaggcaggggcttaggggtcaggtgctcctgggtttgagacctggttctgctgtttcccaactgaaagacctcgagccagtcaccctgcctcctagggctgcttgagggactt

SEQ ID NO: 165464 - DNA, 120 bp, Artificial Sequence
  ENSG00000108175_67 (sequence is synthesized)
gaggaggtgtccgtgaagtgcttggccctgggctggcatgtgccgccactcagcaagcagcagttcctcttactgtagtgactcttgtcttggctcagccactaactgggtgacctgggt

SEQ ID NO: 165465 - DNA, 120 bp, Artificial Sequence
  ENSG00000108175_68 (sequence is synthesized)
ttagttcctcctgcccacatgagagcttccccaactcctctccaagaaagagagctgagacaaaatgcttccagtctataagggctgacccgtccgggaagtgactggaaggcaggcagc

SEQ ID NO: 165466 - DNA, 120 bp, Artificial Sequence
  ENSG00000108175_69 (sequence is synthesized)
gtgtttccagtctgtaaggattgacctgttggggaagtgactggaaggcagagagcgtgtttccaatctataaggactgacccgttggggaagtgactggaaggccggcagctgtttcca

SEQ ID NO: 165467 - DNA, 120 bp, Artificial Sequence
  ENSG00000108175_70 (sequence is synthesized)
gtctataaggactgacccgtcagggaagtgactggaaggcagacagcgtgtttcttagctcttgtttccatccacacttggtcactgtataggaagtggcactgcctcttgggctgcaca

SEQ ID NO: 165468 - DNA, 120 bp, Artificial Sequence
  ENSG00000108175_71 (sequence is synthesized)
gccagctcagccaaggtgttggggaagatttggggaagtaaaacccacacctcctgccctctgggaagtgaggttttagcaggaaagaaaagtttttagcagagactcaccagggaatga

SEQ ID NO: 165469 - DNA, 120 bp, Artificial Sequence
  ENSG00000108175_72 (sequence is synthesized)
agcatagcagactgcacagaactcaatatgagtcagagaaggcaggcttcctggagggtgtgtcacaagtaaatcctcagaaaatgatgctggcagcagctggcccatctgggtacccag

SEQ ID NO: 165470 - DNA, 120 bp, Artificial Sequence
  ENSG00000108175_73 (sequence is synthesized)
gtaaggatttagtttacctgcagaagacgtagggacgtggctctgcagatgcccctcgtgaagccctggttgctccccacgaccaagcccctttttgagcagggtgtgcccagctctctg

SEQ ID NO: 165471 - DNA, 120 bp, Artificial Sequence
  ENSG00000108175_74 (sequence is synthesized)
agctcctctcagctctgtggccttcaccttgggttcacagcggctttagattccaaagaccttaagttccttgaagatctgcacatttcccctcagtatccaccttaggatgggcgggga

SEQ ID NO: 165472 - DNA, 120 bp, Artificial Sequence
  ENSG00000108175_75 (sequence is synthesized)
ggcttggcaacaagtggaggtattctgagttcaggaggggagagagaggggggggggtcaggggcttcctcatgcatccaagaagctggatcaagccccaaccctccacctggtggacac

SEQ ID NO: 165473 - DNA, 120 bp, Artificial Sequence
  ENSG00000108175_76 (sequence is synthesized)
tagttcagggaggggccagagaaggaccattggctcctgggtcctgagtttgggggagcctcaagctattggcacctctcctggcactcaggccccatgcagtttctaggccttttctca

SEQ ID NO: 165474 - DNA, 120 bp, Artificial Sequence
  ENSG00000108175_77 (sequence is synthesized)
gccaccctgtgctcaaaatcccagtgtcccactggctgtgctgggggtgcatctgttagcccacgccaaaggaggcaatctcggatgaggcttcagcagaattcctggtcattggtgtca

SEQ ID NO: 165475 - DNA, 120 bp, Artificial Sequence
  ENSG00000108175_78 (sequence is synthesized)
cccctgcacctgcacctgtgccatgcttatggctcttgcctgcctaaagagagcacaccaaaggctctccatatttttactaaattaatcatccttttcatagagtgctgctgctaccca

SEQ ID NO: 165476 - DNA, 120 bp, Artificial Sequence
  ENSG00000108175_79 (sequence is synthesized)
gctacagcactgggtggtcacagcctatgcggcctgatcctgtctggaagactggccttccttccccttgccatggcttgttcatacaatatttgaattgttggagccttaggacagggg

SEQ ID NO: 165477 - DNA, 120 bp, Artificial Sequence
  ENSG00000108175_80 (sequence is synthesized)
ttgggtcatctggtcccacagaggactctcttctctagcttggtgggcaggtaggcaccagctacgtcttctatacctcctgtggtgggtgcctcactgtcacccagagcagccaccatg

SEQ ID NO: 165478 - DNA, 120 bp, Artificial Sequence
  ENSG00000108175_81 (sequence is synthesized)
ttgcaacaacgtgagttgtagattcttccacactgacactttctgacatttatccctaagtccatcattcgtttgttgagcaagtattaagggtattttcccaggcactggggcacagcc

SEQ ID NO: 165479 - DNA, 120 bp, Artificial Sequence
  ENSG00000108175_82 (sequence is synthesized)
accaacaggacctctgggcaagagagacactcagatggggaagaagaaaccactgactcacaggatgtcatgtggccgtgagggtcacctgattttccagacagggaaggtggctggagg

SEQ ID NO: 165480 - DNA, 120 bp, Artificial Sequence
  ENSG00000108175_83 (sequence is synthesized)
gtggtgctctctcctcttctctaaattgtctgtcccgggagaagttgtcttgttccttcaccaacctggctctcccacctcctgcacaggtggcaggttgtcgatggcccagaactgaac

SEQ ID NO: 165481 - DNA, 120 bp, Artificial Sequence
  ENSG00000108175_84 (sequence is synthesized)
actaggtgtgtgttctgctctgaggggagtacgaggacaatgccacccaagttcagccttggaatgcaggggcacagggggctcctttctggaattgcatcctgttgactgtgttcctct

SEQ ID NO: 165482 - DNA, 120 bp, Artificial Sequence
  ENSG00000108175_85 (sequence is synthesized)
gtcacattggggtacacattggggagcacagccctaacccaggcaccaggagagacacaaaggtcgggggagttagaatcaggcccctcataatggtgtgagcaagaggctctgaaagtg

SEQ ID NO: 165483 - DNA, 120 bp, Artificial Sequence
  ENSG00000108175_86 (sequence is synthesized)
tccctggagttcaggggcacatgtgctccaggaagaacggcctcaaggggaggtggcctatgatctggacaggcagaacaaaatgcccctggatgtcaggacgagaaggggcccaaagca

SEQ ID NO: 165484 - DNA, 120 bp, Artificial Sequence
  ENSG00000108175_87 (sequence is synthesized)
ttatctggttttgtgggtgggaaacagcaggagcaaatgaggagaggcgggccccatcccgttgttcaggtgacctggctatgtgacgttggcaacattgaacgtgtttcccctctcctt

SEQ ID NO: 165485 - DNA, 120 bp, Artificial Sequence
  ENSG00000108175_88 (sequence is synthesized)
ctaaccacctcactcccctaactccaccgggatcactctgaccctgcgtgtgtttgccccaaggacagcgaggggtgggtgatttctgaacgtccccatgtgttcagggcgaagttcggt

SEQ ID NO: 165486 - DNA, 120 bp, Artificial Sequence
  ENSG00000108175_89 (sequence is synthesized)
ggccagaatgtcagagtggcttttctcagttcctattctcattcgtctcggatgatggtttttttttctccttttcttattcacggcactcacaaaataataaaggaaatatattttatt

SEQ ID NO: 165487 - DNA, 120 bp, Artificial Sequence
  ENSG00000108176_0 (sequence is synthesized)
agagtttacaaaggtctaggatgacatctggtgtattgactgtggccagtcttaaagctagtttttgctatgtggaacatgctgctctaattcagatttaaagagtttcttcctgttaat

SEQ ID NO: 165488 - DNA, 120 bp, Artificial Sequence
  ENSG00000108176_1 (sequence is synthesized)
tcgaagctcactgtgcctcttgtttccgagggaagaaggactgattaagtcatctaaatggatgcaatactgaattacaggtcagaagatactgaagattactacacattactgggatgt

SEQ ID NO: 165489 - DNA, 120 bp, Artificial Sequence
  ENSG00000108176_2 (sequence is synthesized)
gatgaactatcttcggttgaacaaatcctggcagaatttaaagtcagagctctggaatgtcacccagacaagcatcctgaaaaccccaaagctgtggagacttttcagaaactgcagaag

SEQ ID NO: 165490 - DNA, 120 bp, Artificial Sequence
  ENSG00000108176_3 (sequence is synthesized)
gcaaaggagattctgaccaatgaagagagtcgagcccgctatgaccactggcgaaggagccagatgtcgatgccattccagcagtgggaagctttgaatgactcagtgaagacgtcaatg

SEQ ID NO: 165491 - DNA, 120 bp, Artificial Sequence
  ENSG00000108176_4 (sequence is synthesized)
cactgggttgtcagaggtaaaaaagacctgatgctggaagaatctgacaagactcataccaccaagatggaaaatgaggaatgtaatgagcaaagagaaagaaagaaagaggagctggct

SEQ ID NO: 165492 - DNA, 120 bp, Artificial Sequence
  ENSG00000108176_5 (sequence is synthesized)
cagaaagaacccaagcccctagagaagtcagtctccccgcaaaattcagattcttcaggttttgcagatgtgaatggttggcaccttcgtttccgctggtccaaggatgctccctcagaa

SEQ ID NO: 165493 - DNA, 120 bp, Artificial Sequence
  ENSG00000108176_6 (sequence is synthesized)
ctcctgaggaagttcagaaactatgaaatatgaaatatctctgcttcaaaaaatgaggaagagcaagactgtcccctatgctgccaacatgcagtctttgtttatgtcttaaaaatgtca

SEQ ID NO: 165494 - DNA, 120 bp, Artificial Sequence
  ENSG00000108176_7 (sequence is synthesized)
tgtttatgtcatgtctgtgaattgctgagtactaattgattcctccatccttgaatcagttctcataatgctttttaaataagaaaaattcagaagatgaatttcttccaatatttgaat

SEQ ID NO: 165495 - DNA, 120 bp, Artificial Sequence
  ENSG00000108176_8 (sequence is synthesized)
aaattaaagctcttagatacagagtagattgtattatatgctttttcctattaatactacttatagaaatccattaaaaagcaatctctgtacagtgtatttaaatatttcattgacata

SEQ ID NO: 165496 - DNA, 120 bp, Artificial Sequence
  ENSG00000108176_9 (sequence is synthesized)
ctgtgatctctattagtgatggatgtacaaaaaatgttttcttacccttgacttacaatgaaatgtgaaattacttgtctgaaccccgtggggagaaataaataattttcccaaagttca

SEQ ID NO: 165497 - DNA, 120 bp, Artificial Sequence
  ENSG00000108176_10 (sequence is synthesized)
ctgtgactacatttctttcaatctctttggctgtttgtttcagtatacacactccctgttattgcttactattttatgagctctaataaatgtacttctcaagttgctcatgaattgctg

SEQ ID NO: 165498 - DNA, 120 bp, Artificial Sequence
  ENSG00000108176_11 (sequence is synthesized)
agttttaaccattgtaaattcacattctccatctttttagtttatgtcagcttgctctcttttcaaggcttagaattttcattaaaaaggcaggatctgattagtcagagaaagccatga

SEQ ID NO: 165499 - DNA, 120 bp, Artificial Sequence
  ENSG00000108176_12 (sequence is synthesized)
attattcctattaaacattctggtgaaagaattgttagactttaaaaacattgtgttatctttcttcatgtcattaaaaggcataaatatcaaaatattcactataattactgtcatata

SEQ ID NO: 165500 - DNA, 120 bp, Artificial Sequence
  ENSG00000108176_13 (sequence is synthesized)
tttattttgttcaacattgacctttatatattatagacaaaatgtaattttaaagatttaggcatgatttattacctagattctctccattggaacacttttctatgacatgggacttat

SEQ ID NO: 165501 - DNA, 120 bp, Artificial Sequence
  ENSG00000108179_0 (sequence is synthesized)
actcggccttctgggcgcgcgcgacgtcagtttgagttctgtgttctccccgcccgtgtcccgcccgacccgcgcccgcgatgctggcgctgcgctgcggctcccgctggctcggcctgc

SEQ ID NO: 165502 - DNA, 120 bp, Artificial Sequence
  ENSG00000108179_1 (sequence is synthesized)
tctccgtcccgcgctccgtgccgctgcgcctccccgcggcccgcgcctgcagcaagggctccggcgacccgtcctcttcctcctcctccgggaacccgctcgtgtacctggacgtggacg

SEQ ID NO: 165503 - DNA, 120 bp, Artificial Sequence
  ENSG00000108179_2 (sequence is synthesized)
ccaacgggaagccgctcggccgcgtggtgctggagctgaaggcagatgtcgtcccaaagacagctgagaacttcagagccctgtgcactggtgagaagggcttcggctacaaaggctcca

SEQ ID NO: 165504 - DNA, 120 bp, Artificial Sequence
  ENSG00000108179_3 (sequence is synthesized)
ccttccacagggtgatcccttccttcatgtgccaggcgggcgacttcaccaaccacaatggcacaggcgggaagtccatctacggaagccgctttcctgacgagaactttacactgaagc

SEQ ID NO: 165505 - DNA, 120 bp, Artificial Sequence
  ENSG00000108179_4 (sequence is synthesized)
acgtggggccaggtgtcctgtccatggctaatgctggtcctaacaccaacggctcccagttcttcatctgcaccataaagacagactggttggatggcaagcatgttgtgttcggtcacg

SEQ ID NO: 165506 - DNA, 120 bp, Artificial Sequence
  ENSG00000108179_5 (sequence is synthesized)
tcaaagagggcatggacgtcgtgaagaaaatagaatctttcggctctaagagtgggaggacatccaagaagattgtcatcacagactgtggccagttgagctaatctgtggccagggtgc

SEQ ID NO: 165507 - DNA, 120 bp, Artificial Sequence
  ENSG00000108179_6 (sequence is synthesized)
tggcatggtggcagctgcaaatgtccatgcacccaggtggccgcgttgggctgtcagccaaggtgcctgaaacgatacgtgtgcccactccactgtcacagtgtgcctgaggaaggctgc

SEQ ID NO: 165508 - DNA, 120 bp, Artificial Sequence
  ENSG00000108179_7 (sequence is synthesized)
tagggatgttagacctcggccaggacccaccacattgcttcctaatacccacccttcctcacgacctcatttctgggcatctttgtggacatgatgtcacccaccccttgtcaagcattg

SEQ ID NO: 165509 - DNA, 120 bp, Artificial Sequence
  ENSG00000108179_8 (sequence is synthesized)
cctgtgattgcccagcccagattcatctgtgccttggacatggtgatggtgatgggttgccatccaagtgaaagtcttttccttgaccaagggggacagtcagttttgcaaaaggactct

SEQ ID NO: 165510 - DNA, 120 bp, Artificial Sequence
  ENSG00000108179_9 (sequence is synthesized)
tttaattaacaagattgactagaagtgaaactgcaacactaacttccccgtgctgtggtgtgacctgagttggtgacacaggccacagaccccagagcttggcttttgaaacacaactca

SEQ ID NO: 165511 - DNA, 120 bp, Artificial Sequence
  ENSG00000108179_10 (sequence is synthesized)
gggcttttgtgaaggttcccccgctgagatctttcctcctggttactgtgaagcctgttggtttgctgctgtcgtttttgaggagggcccatgggggtaggagcagttgaacctgggaac

SEQ ID NO: 165512 - DNA, 120 bp, Artificial Sequence
  ENSG00000108179_11 (sequence is synthesized)
aaacctcacttgagctgtgcctagacaatgtgaattcctgtgttgctaacagaagtggcctgtaagctcctgtgctccggagggaagcatttcctggtaggctttgatttttctgtgtgt

SEQ ID NO: 165513 - DNA, 120 bp, Artificial Sequence
  ENSG00000108179_12 (sequence is synthesized)
taaagaaattcaatctactcatgatgtgttatgcataaaacatttctggaacatggatttgtgttcaccttaaatgtgaaaataaatcctattttctatggaagactggtacctggtttc

SEQ ID NO: 165514 - DNA, 120 bp, Artificial Sequence
  ENSG00000108179_13 (sequence is synthesized)
tggaagaggggtctgtgacttggagctgatctttactgagctcgccgtggcagatgccatgctcaggacgttcatgtggatggtttcatgtcatcgtgctggcaacttgtcctccctgcc

SEQ ID NO: 165515 - DNA, 120 bp, Artificial Sequence
  ENSG00000108179_14 (sequence is synthesized)
ttagagatgaggctcagacaaacgaccttagcacccatagcctatgccatgagcactggctccaccctgaatcccagctcctccccttagtgaccccaagtctgtttccctcagctgcat

SEQ ID NO: 165516 - DNA, 120 bp, Artificial Sequence
  ENSG00000108179_15 (sequence is synthesized)
aaggaggcgatatagtttgaatatttgtccccagccaaatctcatgttgaactgtaatccccagtgctggaggtggggcctgctacgaggtgtttggatcatggggacgggtatttcatg

SEQ ID NO: 165517 - DNA, 120 bp, Artificial Sequence
  ENSG00000108179_16 (sequence is synthesized)
gcttggtgctgttttcttgatggtgaattattgcaagatacggtcatttaaaattgtgtggcacctccccctgcccccttcttgctcctgctttcaccatgtgacatgcctgatccccct

SEQ ID NO: 165518 - DNA, 120 bp, Artificial Sequence
  ENSG00000108179_17 (sequence is synthesized)
tcaccttttgccatggtcataagcttcctgaggcctccctggaagctgagcagatgccagcaccatgcttcctgtacatcctgcagaaccataagccaattaaacctttttaataataaa

SEQ ID NO: 165519 - DNA, 120 bp, Artificial Sequence
  ENSG00000108179_18 (sequence is synthesized)
gctgccttgtgggtgtgtgaagatgcctggtatgaggaaggtgctgagcagagcagctgcagttgctctgtcagccaggctgccctccctgcattagccctgtatccaggcttcactgca

SEQ ID NO: 165520 - DNA, 120 bp, Artificial Sequence
  ENSG00000108179_19 (sequence is synthesized)
catggaagcccagccccaacccgctgccactccaggtcagtggcaggccctgcccgggggactgggaggtggagtctatcaagagagagctgggttgggagatggatgtgctgggggtgg

SEQ ID NO: 165521 - DNA, 120 bp, Artificial Sequence
  ENSG00000108179_20 (sequence is synthesized)
tccccacagctctgacctggcctggaagccccagcaggccctgagaggccacatgcagtcaccgtccagtatctgatgagtctccttcctccctgcgacactgtgtcctgtccatggcta

SEQ ID NO: 165522 - DNA, 120 bp, Artificial Sequence
  ENSG00000108187_0 (sequence is synthesized)
gcctcctttgtcctggatttgggagttgagcaccttcgtcgccattggctttcctcccccagctccagcctctctcatcttgggaatctgcgtcagaagtcactcgcagtcccgtcagcc

SEQ ID NO: 165523 - DNA, 120 bp, Artificial Sequence
  ENSG00000108187_1 (sequence is synthesized)
cagaagaagacgtaaagcaggctaccagcaattttgagaacttgcaaaaacagcttgcaaggaaaatgaagcttcctattttcatagcagatgcattcacagcaagagcatttcgtggga

SEQ ID NO: 165524 - DNA, 120 bp, Artificial Sequence
  ENSG00000108187_2 (sequence is synthesized)
atcctgctgctgtttgcctcctagaaaatgaattggatgaagacatgcatcagaaaattgcaagggagatgaacctctctgaaactgcttttatccgaaaactgcacccgacagacaact

SEQ ID NO: 165525 - DNA, 120 bp, Artificial Sequence
  ENSG00000108187_3 (sequence is synthesized)
ttgcacaaagttcctgctttggactgagatggtttacaccagcgagtgaggtcccactctgtggccatgccaccctggcttctgcagctgtgctgtttcacaaaataaaaaacatgaata

SEQ ID NO: 165526 - DNA, 120 bp, Artificial Sequence
  ENSG00000108187_4 (sequence is synthesized)
gcacgctcacgtttgtcactctgagtggagaactaagggccagacgagcagaggatggcatcgtcctggacttgcctctttatccagcccacccccaggacttccatgaagtagaggact

SEQ ID NO: 165527 - DNA, 120 bp, Artificial Sequence
  ENSG00000108187_5 (sequence is synthesized)
tgataaagactgccataggcaacacactggtccaggacatctgttattctccagatacccaaaagctcctcgtccgcctcagtgacgtttacaacaggtcgtttctggagaacctgaaag

SEQ ID NO: 165528 - DNA, 120 bp, Artificial Sequence
  ENSG00000108187_6 (sequence is synthesized)
tgaacacggagaatctgctgcaagttgaaaacacagggaaggtgaaagggcttattcttacccttaaaggagagcctggtgggcagacccaagcatttgacttttactcaagatattttg

SEQ ID NO: 165529 - DNA, 120 bp, Artificial Sequence
  ENSG00000108187_7 (sequence is synthesized)
caccgtgggttggtgtggctgaagacccagtgacagggtctgcacacgctgttctcagcagctactggtcccagcatctggggaagaaagaaatgcatgcttttcagtgttcccaccgag

SEQ ID NO: 165530 - DNA, 120 bp, Artificial Sequence
  ENSG00000108187_8 (sequence is synthesized)
gaggagagctgggaatttcccttcgtccagacggaagggttgacattagaggaggtgcagctgttgttttagagggcacactgacagcctagaggtggttatgctgtgacgctgctgtct

SEQ ID NO: 165531 - DNA, 120 bp, Artificial Sequence
  ENSG00000108187_9 (sequence is synthesized)
caccaagtattttctgcttaaaaagaaatgtaaggggctgcctttagcaaatgtgcgtagtagtctacttaatcctcatgttaaaaatcgaaaaatgggccaggcgcagtggctcatgcc

SEQ ID NO: 165532 - DNA, 120 bp, Artificial Sequence
  ENSG00000108187_10 (sequence is synthesized)
acagagtaagactccatccacacacacacacacacacacaaaattgaaaagtgaagacattttaatggagatttaatagtgcttccagactaatgaactaatggagttttggctccactc

SEQ ID NO: 165533 - DNA, 120 bp, Artificial Sequence
  ENSG00000108187_11 (sequence is synthesized)
atgagtgtatttgaaatgtaagtaaccagctacaaagaataatgtcacttcatttgattatgactaccaatcaagagaaggaggaatacatttctgaggagtgatactaaaccatttgag

SEQ ID NO: 165534 - DNA, 120 bp, Artificial Sequence
  ENSG00000108187_12 (sequence is synthesized)
cttaaatgagtacctgattttgcagccattaaaatgagtcaataactatgtggaaatatagaaaaatattttataatataatactaagaaagaggacagtaggccataaagtgttagcag

SEQ ID NO: 165535 - DNA, 120 bp, Artificial Sequence
  ENSG00000108187_13 (sequence is synthesized)
tgttatgctatgtctatataaataagcatgggccattaaaaatagcaaactgaaaacagttcatgtgtggggggcaagtttagaagtaattttaatgtatctaagaagtgatttccttta

SEQ ID NO: 165536 - DNA, 120 bp, Artificial Sequence
  ENSG00000108187_14 (sequence is synthesized)
ttgttgtactcaggtacgaagactaaaaatcaggatgaatccagaaaattaacacaaaaaagtatgtattaggctacttcctgtcatagtgaaattaaacactcaaagtaatgtaatctc

SEQ ID NO: 165537 - DNA, 75 bp, Artificial Sequence
  ENSG00000108187_15 (sequence is synthesized)
aaacactcaaagtaatgtaatctcaacaaggcaggaggatcacttgaacctaggagttcgagaccagcctgggca

SEQ ID NO: 165538 - DNA, 120 bp, Artificial Sequence
  ENSG00000108187_16 (sequence is synthesized)
tggcttgagaatgataatgtaaaaggaattcttctcttacttcaataaaatgggttttaacataactttaaattcagttaaatatacaatattgaatacctatagttgactttgggatgg

SEQ ID NO: 165539 - DNA, 120 bp, Artificial Sequence
  ENSG00000108187_17 (sequence is synthesized)
ggactttttcaagtcattaagagtgtttgtttaaggtgatctcattgatggtagttctcagccgtctcaaaaactgcaagctaatcagtcagacattctttaatgaccccaattttttca

SEQ ID NO: 165540 - DNA, 120 bp, Artificial Sequence
  ENSG00000108187_18 (sequence is synthesized)
ctttaattgttaccatgttttctatttttactgatttttgctaaagcatgtaagagtgaatttattatagcagtaatcttgtgtttctcctgatgtgcaataaatcaataattcaccagc

SEQ ID NO: 165541 - DNA, 120 bp, Artificial Sequence
  ENSG00000108187_19 (sequence is synthesized)
aagtgccttgaattccttggtaattatttccttttaagcgtgtaactcttattattgctaaactgctttttaagttaatggtagttgttgtccaaaggaagtctgatctgtgtttttgaa

SEQ ID NO: 165542 - DNA, 120 bp, Artificial Sequence
  ENSG00000108187_20 (sequence is synthesized)
agggctgagtacccagatttatagctcttccttagtctggctgtgctgtgtccagtcaaaccatgatttacgcagccagagtgtttctttccctgataggaagacattcccacttgttct

SEQ ID NO: 165543 - DNA, 120 bp, Artificial Sequence
  ENSG00000108187_21 (sequence is synthesized)
tccttcccctcctgttaagctctttgagcaagctgcaccctggcctgcttcacagagtctgtgtggtgagtgggctgtgaaatgggtttgtcctaatccatcttgtttatgaacaaggtc

SEQ ID NO: 165544 - DNA, 120 bp, Artificial Sequence
  ENSG00000108187_22 (sequence is synthesized)
taagtgcacttcctgtgacctttcaggtggcttgagttttgagctgccttgttcctctatctttccccatccctgccatcccttcactgaagtcttccatgaaaaacataaaatagagca

SEQ ID NO: 165545 - DNA, 120 bp, Artificial Sequence
  ENSG00000108187_23 (sequence is synthesized)
tgggcaagtgacttgacttttaaaagtctcagttccctcctctataaattgtatataatacctcatagggctataaaagcacaatgcatgttaagggcttaatacagtgcctggcaccta

SEQ ID NO: 165546 - DNA, 120 bp, Artificial Sequence
  ENSG00000108187_24 (sequence is synthesized)
gtaagtgcccaataactactagctattatattgtattattatatctttttgagacatagtctcacttcatcacccaggctagaacggagtggcatgatcccggctcactgcaacctcagc

SEQ ID NO: 165547 - DNA, 81 bp, Artificial Sequence
  ENSG00000108187_25 (sequence is synthesized)
tagctggaactacaggcgtctgaggatttcatcatgttggccaggatggtcccaaactcctgacctcaaatgatccctcct

SEQ ID NO: 165548 - DNA, 72 bp, Artificial Sequence
  ENSG00000108187_26 (sequence is synthesized)
ttttgtatttttactagagataggatttcatcatgttggccaggatggtcccaaactcctgacctcaaatga

SEQ ID NO: 165549 - DNA, 120 bp, Artificial Sequence
  ENSG00000108187_27 (sequence is synthesized)
actagctccttgagccaacacttctagattgtccaccacctgggagcagagggatgagtcaaaggtgggcagaaatgtcatgactcctactctccctctctttgggaacagtgggctgca

SEQ ID NO: 165550 - DNA, 120 bp, Artificial Sequence
  ENSG00000108187_28 (sequence is synthesized)
ctgcaaaggacgagaatgcttgatgtgggaggatggtgggtgggatggtgaaggggccacaggaggctgggcagacccttcagggctcctgttctggtcagatggcagggcctggatggc

SEQ ID NO: 165551 - DNA, 120 bp, Artificial Sequence
  ENSG00000108187_29 (sequence is synthesized)
tcagttactctctgagtaacaaaacacgtgaaattcaaaactcagcaaacaagcacttttaagactcaggaaaatgcccaaccatatccagagtgcagcttccccatggaagaaaagttc

SEQ ID NO: 165552 - DNA, 120 bp, Artificial Sequence
  ENSG00000108187_30 (sequence is synthesized)
tatccagagtgcagcttccccatggaagaaaagttccaagcagattgcacaagcacagctgcttcacaaagattttaattggcacagagtgcaagtttgtttgtttgtttgtttgtttgt

SEQ ID NO: 165553 - DNA, 120 bp, Artificial Sequence
  ENSG00000108187_31 (sequence is synthesized)
ttggactttgataaccaacatctgagtttgcttgggactgaagggtttctcagggctcagaactttcagtgctaaaaccagaacagtctcaggcaaaccaggcaggatggttggttgcct

SEQ ID NO: 165554 - DNA, 90 bp, Artificial Sequence
  ENSG00000108187_32 (sequence is synthesized)
gaacagtctcaggcaaaccaggcaggatggttggttgccttacttgaacatcccataacactttttttttttttttctcagctccctgca

SEQ ID NO: 165555 - DNA, 120 bp, Artificial Sequence
  ENSG00000108187_33 (sequence is synthesized)
atggtccaaagtgactggtataaagactctgcagagtttacttcatgctattcataatgcagaaacaaaaccagcgaccttcaatagcactttggcctttctgagtatgtgcccagcatc

SEQ ID NO: 165556 - DNA, 120 bp, Artificial Sequence
  ENSG00000108187_34 (sequence is synthesized)
attggaaagctgcgatcagaatgctattttattttatttttattttattttactttctggtctacaaagaatttgacaaccattttattttattttattattttttgagacagagtctca

SEQ ID NO: 165557 - DNA, 120 bp, Artificial Sequence
  ENSG00000108187_35 (sequence is synthesized)
cctcccaggagactttccgtttatctagctgccctagagaccagaaagctagggagagtacgccccttccccctcccgtcagcagccaagcctggcttaaaacccttcgccaccgggcgg

SEQ ID NO: 165558 - DNA, 120 bp, Artificial Sequence
  ENSG00000108187_36 (sequence is synthesized)
tttatttgcctaattcgaagctagtgttccttctcatatgtactatccccttgaaaatgtaatacaatgtcatgtatcacccatgtgaaaatgaaaggttttaaaattccttcaccctta

SEQ ID NO: 165559 - DNA, 120 bp, Artificial Sequence
  ENSG00000108187_37 (sequence is synthesized)
aagatcctccaccccaaacagccttcacctctgcctcccccaacatacagagactgtacagacacagatacagtaactgcccaataagtgtttgttgaataaaatagctgtataactttg

SEQ ID NO: 165560 - DNA, 120 bp, Artificial Sequence
  ENSG00000108219_0 (sequence is synthesized)
gggcaggctggggttgaaactcttcaccccttgcggtctgtactgcctcccaactgagcagccagggagaaggcctagagcctgtgcctttcagctagatagctggaggaactggctcct

SEQ ID NO: 165561 - DNA, 120 bp, Artificial Sequence
  ENSG00000108219_1 (sequence is synthesized)
ccctccttaggctgtgctggcctgagctgggagcctgagagctggggcagttgtctctaaagtggcttctgggattctggtaagaggacttggggtggagtcgaaagcagggagccctgt

SEQ ID NO: 165562 - DNA, 120 bp, Artificial Sequence
  ENSG00000108219_2 (sequence is synthesized)
gagttgagacgaactcttgcaatgttgccttggctggtctcgaactcatcttctgggttcaagctgtccgtctgcctcggactcccaaagtgctaggattacagcgttacatccttacta

SEQ ID NO: 165563 - DNA, 120 bp, Artificial Sequence
  ENSG00000108219_3 (sequence is synthesized)
ttcaaagtgccatccacagacctgctgatgggcagcatgagcatcacctgggagcttgctgcgctgtagaatcttgaggggtctccatccagatcagctgaatcagagtttgcattgtta

SEQ ID NO: 165564 - DNA, 120 bp, Artificial Sequence
  ENSG00000108219_4 (sequence is synthesized)
acaagattctgcttctcagaagatgcactattatagatactctaacgccaaggtcagctgctggtacaagtacctccttttcagctacaacatcatcttctggttggctggagttgtctt

SEQ ID NO: 165565 - DNA, 120 bp, Artificial Sequence
  ENSG00000108219_5 (sequence is synthesized)
gacccggatgcatggaatcgaccctgtggtgctggtcctgatggtgggcgtggtgatgttcaccctggggttcgccggctgcgtgggggctctgcgggagaatatctgcttgctcaactt

SEQ ID NO: 165566 - DNA, 120 bp, Artificial Sequence
  ENSG00000108219_6 (sequence is synthesized)
tttctgtggcaccatcgtgctcatcttcttcctggagctggctgtggccgtgctggccttcctgttccaggactgggtgagggaccggttccgggagttcttcgagagcaacatcaagtc

SEQ ID NO: 165567 - DNA, 120 bp, Artificial Sequence
  ENSG00000108219_7 (sequence is synthesized)
ctaccgggacgatatcgatctgcaaaacctcatcgactcccttcagaaagctaaccagtgctgtggcgcatatggccctgaagactgggacctcaacgtctacttcaattgcagcggtgc

SEQ ID NO: 165568 - DNA, 120 bp, Artificial Sequence
  ENSG00000108219_8 (sequence is synthesized)
cagctacagccgagagaagtgcggggtccccttctcctgctgcgtgccagatcctgcgcaaaaagttgtgaacacacagtgtggatatgatgtcaggattcagctgaagagcaagtggga

SEQ ID NO: 165569 - DNA, 120 bp, Artificial Sequence
  ENSG00000108219_9 (sequence is synthesized)
tgagtccatcttcacgaaaggctgcatccaggcgctggaaagctggctcccgcggaacatttacattgtggctggcgtcttcatcgccatctcgctgttgcagatatttggcatcttcct

SEQ ID NO: 165570 - DNA, 120 bp, Artificial Sequence
  ENSG00000108219_10 (sequence is synthesized)
ggcaaggacgctgatctcagacatcgaggcagtgaaggccggccatcacttctgaggagcagagttgagggagccgagctgagccacgctgggaggccagagcctttctctgccatcagc

SEQ ID NO: 165571 - DNA, 120 bp, Artificial Sequence
  ENSG00000108219_11 (sequence is synthesized)
gtgacgtgacctctctgtttctgcttgctggtgctgaagaccaagggtcccccttgttacctgcccaaacttgtgactgcatccctctggagtctacccagagacagagaatgtgtcttt

SEQ ID NO: 165572 - DNA, 120 bp, Artificial Sequence
  ENSG00000108219_12 (sequence is synthesized)
atgtgggagtggtgactctgaaagacagagagggctcctgtggctgccaggagggcttgactcagaccccctgcagctcaagcatgtctgcaggacaccctggtcccctctccactggca

SEQ ID NO: 165573 - DNA, 120 bp, Artificial Sequence
  ENSG00000108219_13 (sequence is synthesized)
tccagacatctgctttgggtcatccacatctgtgggtgggccgtgggtagagggacccacaggcgtggacagggcatctctctccatcaagcaaagcagcatgggggcctgcccgtaacg

SEQ ID NO: 165574 - DNA, 120 bp, Artificial Sequence
  ENSG00000108219_14 (sequence is synthesized)
ggaggcggacgtggccccgctgggcctctgagtgccagcgcagtctgctgggacatgcacatatcaggggttgtttgcaggatcctcagccatgttcaagtgaagtaagcctgagccagt

SEQ ID NO: 165575 - DNA, 120 bp, Artificial Sequence
  ENSG00000108219_15 (sequence is synthesized)
gcgtggactggtgccacgggagtgccttgtccactgtccccctgtgtccaccagctattctcctggcgccggaactgcctctggtcttgatagcattaagccctgatggcgccggtggcg

SEQ ID NO: 165576 - DNA, 120 bp, Artificial Sequence
  ENSG00000108219_16 (sequence is synthesized)
cggtgggcatggttcttcactgagagccggctctccttttcttaaagtgtgtaaatagtttatttataggggtaagaatgttctcacaccatttcacttcctcttcctctcctccagcat

SEQ ID NO: 165577 - DNA, 120 bp, Artificial Sequence
  ENSG00000108219_17 (sequence is synthesized)
tctcctctgagcagccttagatagtgtccatggctggagccgaccctttgagtccccttgagtgtcttaagaaccagcccacaacagcctctctttctcctccacatactgcagcctccc

SEQ ID NO: 165578 - DNA, 120 bp, Artificial Sequence
  ENSG00000108219_18 (sequence is synthesized)
tccatgcatcccacatacaagcactcccccactccccagcgtggcctcactgtcttctggtcttggtgctactgaaattgtcacccagaatttgaatcctgaccctccccactgcaagcc

SEQ ID NO: 165579 - DNA, 120 bp, Artificial Sequence
  ENSG00000108219_19 (sequence is synthesized)
cagggagccccagcccaagatggccagcctgaaactgttggccagggctcctcttgtggccatgtacccagggctggctggcctgccatttgcctctccccggagacagccgttcttctg

SEQ ID NO: 165580 - DNA, 120 bp, Artificial Sequence
  ENSG00000108219_20 (sequence is synthesized)
caaccacaccccgtgcctagccacaaccccaggctgcagctgctcagaagctccaggcattttgtttctggtgaccgcccctaatgggatatcggtgatcactggtccacccttcctgtc

SEQ ID NO: 165581 - DNA, 120 bp, Artificial Sequence
  ENSG00000108219_21 (sequence is synthesized)
agggcttttctggggctgctcttggaaatgaagtcttaagtactgaataactcccctggggatagctggggcatttgtctagctgggctactttctaacactttgccatagctcagacca

SEQ ID NO: 165582 - DNA, 120 bp, Artificial Sequence
  ENSG00000108219_22 (sequence is synthesized)
cttctcatcgttcagggatggactgcaaccttaatttacttgccggagtgtacattctagtgtggtgtatactggtggctgttgatgatgatttttttttttttacacaattctctgtag

SEQ ID NO: 165583 - DNA, 120 bp, Artificial Sequence
  ENSG00000108219_23 (sequence is synthesized)
actaggagaagaatgcttgtgtttttcggaagtgtgatgcttctctttgactgccaaactcttttatggaatatatctttatattaatgctgttttggtcatttttgtttggggtcacta

SEQ ID NO: 165584 - DNA, 120 bp, Artificial Sequence
  ENSG00000108219_24 (sequence is synthesized)
ttgagatattgctaagcatctcagtggtaaacgcggctgccagaggaaccaagggatagggtatgtagaccttacagaaggatggatggtaaaggcagtccatcatcagcacaatctgac

SEQ ID NO: 165585 - DNA, 120 bp, Artificial Sequence
  ENSG00000108219_25 (sequence is synthesized)
ttacatttcattgagtaattttttttttttttaagattctgtatggcagcactttcagttgcccttgtgtgccggccacagccgcacaagttggcttgtggtttatcccccgctataagt

SEQ ID NO: 165586 - DNA, 120 bp, Artificial Sequence
  ENSG00000108219_26 (sequence is synthesized)
gagagctggagaaacttcaactccataggtctagaggaaacattgttttaggttatttctgtccacccctgtgcgatactatttattgatccaagcagaagagcttggggacactgagtc

SEQ ID NO: 165587 - DNA, 120 bp, Artificial Sequence
  ENSG00000108219_27 (sequence is synthesized)
gaagtggggacatgggattgaagcctgggcactgctgctgcatgagctgtgtgtcctgggtgtgccggcctttctgtgaagggggttggtggcagtgcccacctcactagatgcctctga

SEQ ID NO: 165588 - DNA, 120 bp, Artificial Sequence
  ENSG00000108219_28 (sequence is synthesized)
cccagcctcccctgggggagtgggtggccacagaccctccctgccagagctcctggaaggctcctgcaggcctgacccatctattcctgtagacctggtttaggatgaagtctcggtgcg

SEQ ID NO: 165589 - DNA, 120 bp, Artificial Sequence
  ENSG00000108219_29 (sequence is synthesized)
atttttgcagagttgggtttatctttcaactatagacccttctggctgttctcagccatatcatgtgactctgaatagttggatgaggaatggaaagaaagcaaggatgagagccggtca

SEQ ID NO: 165590 - DNA, 120 bp, Artificial Sequence
  ENSG00000108219_30 (sequence is synthesized)
cgtggcagtctccgcccagcatcggctgtccgcacagaggcacagggcaggcctcctgtgcactccccacctagcactggcctgtcctgaatccccgccttccctggttggaggccagct

SEQ ID NO: 165591 - DNA, 120 bp, Artificial Sequence
  ENSG00000108219_31 (sequence is synthesized)
gtggcatttgcaccctcttctcacctcaccatgcacatgctaactttaaagccttggggtctttcctgtaccccctcctcaaccctggtccaccccctctcaggatcttgtcaacgttat

SEQ ID NO: 165592 - DNA, 120 bp, Artificial Sequence
  ENSG00000108219_32 (sequence is synthesized)
ttttcctgtcccgtcttcctatcgctggccttcctttcccatcctaaaaacttgccgaggccctatggctccctccctttctttcccaggcagcttcttatctgggctgtctgtacccct

SEQ ID NO: 165593 - DNA, 120 bp, Artificial Sequence
  ENSG00000108219_33 (sequence is synthesized)
tcctttgcaccacccaccatgccccacgtagctgaaagctgcttatcccaattgtcaactctggccttcttcagcctctgtagcaccagacactgcacctcctgaatgtcctctgcttct

SEQ ID NO: 165594 - DNA, 120 bp, Artificial Sequence
  ENSG00000108219_34 (sequence is synthesized)
ctgcttcagaggcccaggctcgccagttctctgacctctcccatatgtctgcttaggactctgctgcagctgtcctcaccagcctccggggaatcccactacccacagggcagggctgtg

SEQ ID NO: 165595 - DNA, 120 bp, Artificial Sequence
  ENSG00000108219_35 (sequence is synthesized)
ggctgggctgaaaaaccatctgcatggtccacaagaagcctggcactgggtttccccatgaataacaatgaaaattaatggatgcacaaccttcctggaacgtggaatttctctgggaga

SEQ ID NO: 165596 - DNA, 120 bp, Artificial Sequence
  ENSG00000108219_36 (sequence is synthesized)
ttccatgcagaggccactggggaggtggcaggcatgcatgtgactgtaggtggctgcagtgttggaaggctcccagcagagcagagagggtgtcagtctcatcagggaacccacctgatg

SEQ ID NO: 165597 - DNA, 120 bp, Artificial Sequence
  ENSG00000108219_37 (sequence is synthesized)
gcttctcagccagcagtctcagaggaacatagacgactgctgagaaaggagggaggcagcagtggtcccagcacctgaggcatcctgctgtcatgggaaggtctccgcccaaatgtcaga

SEQ ID NO: 165598 - DNA, 120 bp, Artificial Sequence
  ENSG00000108219_38 (sequence is synthesized)
tgcatcagcctgtcacccgctggtccagagctttcagctgtactggtagggggtgggtggtggagtgctgaatgaccttcacaggtgggcctttccagctctagggtcttacgggtgtcg

SEQ ID NO: 165599 - DNA, 120 bp, Artificial Sequence
  ENSG00000108219_39 (sequence is synthesized)
gtccacagaaccacggtttttaggttgtgtgtccggggctatgggaacctgtcccccatgatggatcttggtagagacacttccctctgtcatcgtgcccaggaggatgctgcaggtgac

SEQ ID NO: 165600 - DNA, 120 bp, Artificial Sequence
  ENSG00000108219_40 (sequence is synthesized)
tacctgcagccctgttctcattcatttggatgccctccagaaatctggggagccatacacctttagagccttttttgctccttatcaagttggcaaggcttggccaattcctgttcaagg

SEQ ID NO: 165601 - DNA, 73 bp, Artificial Sequence
  ENSG00000108219_41 (sequence is synthesized)
cttatcaagttggcaaggcttggccaattcctgttcaaggctgcattaaaggcatgttcaccatcctggctaa

SEQ ID NO: 165602 - DNA, 120 bp, Artificial Sequence
  ENSG00000108219_42 (sequence is synthesized)
tcaaatgcttttggcgtctccagggtgcctcaggaaaacatgaagtgggcattgtagaacttggggctactgtgtaactttggaagaaaaagttaagggtacttttaagtggatactgtt

SEQ ID NO: 165603 - DNA, 120 bp, Artificial Sequence
  ENSG00000108219_43 (sequence is synthesized)
ttgatgaaattgccaacttcagggagcccagcttggagaaggaggacgtgagtattccttacaaggctccgaaacaattctttcttcacttagttttctttctgtgctctgcatcttata

SEQ ID NO: 165604 - DNA, 82 bp, Artificial Sequence
  ENSG00000108219_44 (sequence is synthesized)
tttcttcacttagttttctttctgtgctctgcatcttatattccagcagggtcttccaatgcatggtttaataactactaga

SEQ ID NO: 165605 - DNA, 120 bp, Artificial Sequence
  ENSG00000108219_45 (sequence is synthesized)
ttgaacccgggagacagaggttgcaacgagccaagatcgagccactgcgctccggcctgggtgacaggagactccatctcaaaaaataaaattaaaaaaaaactactacaataaattatc

SEQ ID NO: 165606 - DNA, 120 bp, Artificial Sequence
  ENSG00000108219_46 (sequence is synthesized)
tatcaccttggactgtataaaacaacttttaaactagtctttttaaaaagtacacttaaataaaaatctaaacataagagaatgtaaagtgaaaagtgaaagtatgtcttctgttacgca

SEQ ID NO: 165607 - DNA, 120 bp, Artificial Sequence
  ENSG00000108219_47 (sequence is synthesized)
gaggtaactactattaggaatccttcctgaaaatgtccatgcatctactcaggtcatcacacccatggaatcattttacatactattttatgagtgttacttaatatactgatccacagt

SEQ ID NO: 165608 - DNA, 120 bp, Artificial Sequence
  ENSG00000108219_48 (sequence is synthesized)
gcgttttcacggtcacgccatcagttgtaggagtgtgccaagaacagatgggccttgcctttgtaccagaggagtccatttacagttgcaggtaatagaaaacccaattcagactggcct

SEQ ID NO: 165609 - DNA, 120 bp, Artificial Sequence
  ENSG00000108219_49 (sequence is synthesized)
aaacaatgaggggaggttttggctcttgaaactggaaagtcccaaggtggggtgagtttcaggtttgggttgatccaagtggctcagtgacgtcaacaggatcttgtttccatttctctg

SEQ ID NO: 165610 - DNA, 120 bp, Artificial Sequence
  ENSG00000108219_50 (sequence is synthesized)
ccttccacagcctccccttcatctatggtggagggaaggagtctaccacagacaaaccccgagcctccccctgatgggtggtgtggtggtgaagccagcaagggaagggatccccggaca

SEQ ID NO: 165611 - DNA, 120 bp, Artificial Sequence
  ENSG00000108219_51 (sequence is synthesized)
cacccctcctcatgctttatcccactgaaaccatgcggctgtgaaatgcagcatcctccaggagggggatgaaggccggggatgctgtcagctattgccattgcacttctgtggatgggt

SEQ ID NO: 165612 - DNA, 120 bp, Artificial Sequence
  ENSG00000108219_52 (sequence is synthesized)
gttacagttttttgcagggttttgcacttacaaggacatatatatatatatataaactacagtgttattggaattgcttcttacagtttgtaagaaaaaaacatgtttttagaggagttc

SEQ ID NO: 165613 - DNA, 120 bp, Artificial Sequence
  ENSG00000108219_53 (sequence is synthesized)
gggggatcacattttaataagtaggtactcagggctggggtgtacctgttgctgcctgaccactgctggtgtgtgtgggtataaggtgacaaaacctcctacccctgtgaggttgtttca

SEQ ID NO: 165614 - DNA, 120 bp, Artificial Sequence
  ENSG00000108219_54 (sequence is synthesized)
aggattaaatgagttgagatgggtaagcatctaacaaagatccagattatttagtatgcatcccctgaattattgctaacataattttaatgattggggaattttatctgtggctgccag

SEQ ID NO: 165615 - DNA, 120 bp, Artificial Sequence
  ENSG00000108219_55 (sequence is synthesized)
tccctacgagagagctgcctgggtcacatgtcagatagctcaagctttgaatcactgaaacgaaacggtccacttccctgtccctttaggaacaaggcttcgaggtctgtggcaagcctc

SEQ ID NO: 165616 - DNA, 120 bp, Artificial Sequence
  ENSG00000108219_56 (sequence is synthesized)
agcaggcatttggagttcaaggtctgttctctttctgtgccatagaggtggggagacaaggtagggtgttgcttcttgcctggagcgcagatgctaccagaaaccaacacaaccaaagtt

SEQ ID NO: 165617 - DNA, 120 bp, Artificial Sequence
  ENSG00000108219_57 (sequence is synthesized)
gcccgggagcccccagaagcagcagagtggccatcaactgccaaggggccagggtaggccacagaggcctggggcccaggagggatggtctgtggggagaaaggggattattgtgaacat

SEQ ID NO: 165618 - DNA, 120 bp, Artificial Sequence
  ENSG00000108219_58 (sequence is synthesized)
caacgctggggataatgtgccctgaagacagcagcatatcacgtttggacggttggtggaccccatctggtcccactcataaggagaacagaggccctggggtgtgctgggacttgcctg

SEQ ID NO: 165619 - DNA, 120 bp, Artificial Sequence
  ENSG00000108219_59 (sequence is synthesized)
aggcctcagaccgggactgggtgctcctccgcacctcctatgagggagggtgtccgtgtctgtgaggacagctcagcagggctgggaacctgggggcagtgctgggggacatgtgtgaga

SEQ ID NO: 165620 - DNA, 120 bp, Artificial Sequence
  ENSG00000108219_60 (sequence is synthesized)
ctagcgtgtgtgggccttgctcggcttgccctggtgccctgagaaaaacctggtatttgaaaatacacatggactgctggaaggtcaggaaatccagggttttgttctgaggcagtggaa

SEQ ID NO: 165621 - DNA, 120 bp, Artificial Sequence
  ENSG00000108219_61 (sequence is synthesized)
gtgttaccgtgagcctgtgttggcctctctcctcactccacctgcagccaattcagccacactgcctttgcatggaacccagggttgcaggccgcgtgtgtagatgctgatttaggccca

SEQ ID NO: 165622 - DNA, 120 bp, Artificial Sequence
  ENSG00000108219_62 (sequence is synthesized)
agcactcagctgtcagcaggaaggaccatagtgttttcttctagttttagatatgcactcgttctgtgttttaaagtcacagctgtgagccaatatgggaagaagtgaagtggcctctag

SEQ ID NO: 165623 - DNA, 120 bp, Artificial Sequence
  ENSG00000108219_63 (sequence is synthesized)
gagggactgagcaccctgtccttggaggtatgcaagcccaggctacacccttcctgtctgggatgatatggctgggggtgggctttgtgctgcgtggaccatggcaagcctttccatctc

SEQ ID NO: 165624 - DNA, 120 bp, Artificial Sequence
  ENSG00000108219_64 (sequence is synthesized)
gtgccttctgttaaagataattttttaaaaaaaggcataactcatatatattacatgtacacatgtcaaagattttatttaactcagtaattgagagtgctgctaagattaacagccagt

SEQ ID NO: 165625 - DNA, 120 bp, Artificial Sequence
  ENSG00000108219_65 (sequence is synthesized)
tcaaaagagaaatcacaatgaaccataaatctgtatggagtaaaggaaagttgaaactggctggggtttttttttttttttttttttttgaggagaaaggtcaattgaatcttattcgta

SEQ ID NO: 165626 - DNA, 120 bp, Artificial Sequence
  ENSG00000108219_66 (sequence is synthesized)
taatatgcacatccatagacaagaattattttgcattaactctacaacttagttgtaaaaatagctcaaaggcagtgaaagactagaatcagataattggaagggtgcaccctaagcaat

SEQ ID NO: 165627 - DNA, 90 bp, Artificial Sequence
  ENSG00000108219_67 (sequence is synthesized)
gactagaatcagataattggaagggtgcaccctaagcaatgcatagttctattttctttctttttacaggctggagcgcagtggtgcaat

SEQ ID NO: 165628 - DNA, 67 bp, Artificial Sequence
  ENSG00000108219_68 (sequence is synthesized)
gctgggattacaggcgtgtgttggccaggttggtctcatactcctgacctcaggtgatccacccgcc

SEQ ID NO: 165629 - DNA, 120 bp, Artificial Sequence
  ENSG00000108219_69 (sequence is synthesized)
cctcccaaaatgttgggattacaggcgtcagccaccacgcccggccccaatgcatagttttttactgaagacaaccagaatctctgttgcttattccaaatttccttccaccacttgtcc

SEQ ID NO: 165630 - DNA, 120 bp, Artificial Sequence
  ENSG00000108219_70 (sequence is synthesized)
attccaaatttccttccaccacttgtccatccagcagagccacttttaaaataggacacaggcagaaatttaaaggagtcaatatctcatggtgaaaagtgaatcctgagggttagagca

SEQ ID NO: 165631 - DNA, 120 bp, Artificial Sequence
  ENSG00000108219_71 (sequence is synthesized)
tccaccaggtgccctaggtaagggccagccactctgggaggcagcccggggcactcactgtcctctcagtagtaaatgaaatcactcaggccatgtctgctacccagagagcctgagtgt

SEQ ID NO: 165632 - DNA, 120 bp, Artificial Sequence
  ENSG00000108219_72 (sequence is synthesized)
cctcaaatgcttgttctgcctctccatccactcctgcagacacctcagtggctgcatcccaaaccgctgaactttgcttctctttctccaacccccaattccacccacatccaaaactgc

SEQ ID NO: 165633 - DNA, 120 bp, Artificial Sequence
  ENSG00000108219_73 (sequence is synthesized)
tctgccccctattcccatctcagctgagggtactatcatccaccctgtggccacatccaggaatgtgtgtatcacctgggctctgaggatgacatcagctcttctaagtcaacagaatgt

SEQ ID NO: 165634 - DNA, 120 bp, Artificial Sequence
  ENSG00000108219_74 (sequence is synthesized)
cgggtctgttctaaaagtctcatctgacaaggagatctttaaggctttactcccttaaaggctttactcccatcatgatgggataaccatcatgatggatttcagtgtcattctgtcttt

SEQ ID NO: 165635 - DNA, 120 bp, Artificial Sequence
  ENSG00000108219_75 (sequence is synthesized)
ttcttcggaatgattcctgggactcgccttgtttgcaacatgtgcattgaaatatcttttcaacataactttgttcttaattgtgtttacttcctttctctgtgaatctcagtgattcct

SEQ ID NO: 165636 - DNA, 120 bp, Artificial Sequence
  ENSG00000108219_76 (sequence is synthesized)
ggaagctgtggttggtgggggatggggtgggaggactttggtagtataaaagagtacctgcaatgaatgttctaagaaactggagtgttggggtcctccagcccttggctggtaaactct

SEQ ID NO: 165637 - DNA, 120 bp, Artificial Sequence
  ENSG00000108219_77 (sequence is synthesized)
ccactccttcctctttgcaacacaattctcataactggcaaaggtgtgcatgtaaaatttgtgactgtagtctgaggttttttttccctgtacaattccgccttcccccctgtaagcctg

SEQ ID NO: 165638 - DNA, 120 bp, Artificial Sequence
  ENSG00000108219_78 (sequence is synthesized)
taccaggagaggtctcagctgccttggaggcggtgagacacgtgggtgctcactgtggccctcaagggtgaggctggcactggggcatctggggccagaagtcctcctttagtcccaagt

SEQ ID NO: 165639 - DNA, 120 bp, Artificial Sequence
  ENSG00000108219_79 (sequence is synthesized)
ctctgccactcaagtgcatcagtgagaggtcctcatagaaaatctactgtgggcacaaagctgccaggctgatgggggtggggagcaaacgaacacccttttccccttttacaccagagg

SEQ ID NO: 165640 - DNA, 120 bp, Artificial Sequence
  ENSG00000108219_80 (sequence is synthesized)
aaagagacttagactgaggaacttgcctgctgccagacagctgggaggtggtagaaccgggcttacagcccagggtttccactctaggaactcttctcccttcctctgatgacactaact

SEQ ID NO: 165641 - DNA, 120 bp, Artificial Sequence
  ENSG00000108219_81 (sequence is synthesized)
cgcaggccatgatcaatgagcaacgatgtaggcaggcactgacgaggcacagcaggaaggcagctcagtgcccatgacggccaggaactgggtaccatttcctcagcaaaatgggatagt

SEQ ID NO: 165642 - DNA, 120 bp, Artificial Sequence
  ENSG00000108219_82 (sequence is synthesized)
aactcccacactgcagctacgcacttgggcagtggttcacaaggccagcagccacaacatcaccccagaccagcagcagctgcagcattacccccagcacttgttaaaagatgcaaattc

SEQ ID NO: 165643 - DNA, 120 bp, Artificial Sequence
  ENSG00000108219_83 (sequence is synthesized)
ggcaacaagagcgaaactctgtttcaataaataaataaaaatgcaaattgtatgccccttccttcaggcctatgggaccaaaaactgggatggggcccaataaaatgttttaaccagccc

SEQ ID NO: 165644 - DNA, 120 bp, Artificial Sequence
  ENSG00000108219_84 (sequence is synthesized)
taaaatgttttaaccagcccttcggtggttacagaaggatagagccagaatagactaaccactgtaacaaacattacctatacttgggaggctttgaaaaatgtttatttagccgggtgc

SEQ ID NO: 165645 - DNA, 120 bp, Artificial Sequence
  ENSG00000108219_85 (sequence is synthesized)
ccatctcaaaaaaaaaaaaaaaggaaagaaaaatgtttatttttttgctcatgccacagtctctggtagttgctgggaactagggtgggggattctctgctccacacagtctttcatgga

SEQ ID NO: 165646 - DNA, 120 bp, Artificial Sequence
  ENSG00000108219_86 (sequence is synthesized)
ctgctccacacagtctttcatggacccaggttcctttcctgttgtgggtccagcctcctgtagctgttggaggcatctctagtcagctggtggttggggaagaggtgaggatcagggagg

SEQ ID NO: 165647 - DNA, 120 bp, Artificial Sequence
  ENSG00000108219_87 (sequence is synthesized)
gaagatggagagtactctgcttgttctcacattctgctggccagaactcacaagccacctgaaatgatgcaaaggtctagctgtgtgtgtaggagaaagaagagaggccagatattggaa

SEQ ID NO: 165648 - DNA, 120 bp, Artificial Sequence
  ENSG00000108219_88 (sequence is synthesized)
gacagcagtggtctgtgccccaggccccatggtttagggaagtgaaccttggcactggatttcctggctttctaaatctccctttatagggaacttagggcccagtctgtggtgggtgga

SEQ ID NO: 165649 - DNA, 120 bp, Artificial Sequence
  ENSG00000108219_89 (sequence is synthesized)
tttgcctggttcacagcctctggtcagccttctttctgctccacagggcggcctggagatggtgggctccttgtcacactggttggggatgtgggctccatggggccagagatgtgtgtg

SEQ ID NO: 165650 - DNA, 120 bp, Artificial Sequence
  ENSG00000108219_90 (sequence is synthesized)
ctctgtgttcagattaagggacagacggcacatgaattccttcagtgccctccagatttggtcactggggaggggtaggctgagcagtagctcttgggtctgtagtagtgtgaccctgga

SEQ ID NO: 165651 - DNA, 120 bp, Artificial Sequence
  ENSG00000108219_91 (sequence is synthesized)
aggactgtccagctgaaaacaagagcctggggcgtggggaggggaggggttactcagggttccatgagacctgggtttaagtcctggatccatcattagcagctatgtgaacttatgcct

SEQ ID NO: 165652 - DNA, 120 bp, Artificial Sequence
  ENSG00000108219_92 (sequence is synthesized)
cactttcctcaaatatgaacttgagataatgaaattaccttcctcataatactgttctaagaattgaatgaggaaaggtttacaattcggccctggttgttccactggggagggaacaga

SEQ ID NO: 165653 - DNA, 120 bp, Artificial Sequence
  ENSG00000108219_93 (sequence is synthesized)
gattgggggcacagggctcccctggcctgggggagtctggctcactcaagttctcagtcatttgcaaggcaaggaccctgcttctccttgctctgggtccgagtagtctcaagcccagtg

SEQ ID NO: 165654 - DNA, 120 bp, Artificial Sequence
  ENSG00000108219_94 (sequence is synthesized)
ggcagggcctgtggtgtggatggactcgtctgcagtgagtcaggcagcaggcagagctggcaggctgtgtggtctctagtgggtaccaggggacctgggagggccttgtgggaggttgtc

SEQ ID NO: 165655 - DNA, 120 bp, Artificial Sequence
  ENSG00000108219_95 (sequence is synthesized)
cacggtgtgagccagtttgccatctggggtcctggagttccctcccgccctttgagttaaaaagagtcagtcctgggctgagacttaattgcgctagtgctgagtgaccttgtgtcaggg

SEQ ID NO: 165656 - DNA, 120 bp, Artificial Sequence
  ENSG00000108219_96 (sequence is synthesized)
gaaatcggatggggcaaagtgttttttaattagcaggactcactgacctttccttcactgtcagcaacttctcacagggaggcagagcaaggggggctggagccccgcatctctctaatg

SEQ ID NO: 165657 - DNA, 120 bp, Artificial Sequence
  ENSG00000108219_97 (sequence is synthesized)
gagcctatgtccaacaaggaggtggatggctggattcagggccctgggaggacttcatgtgggaagcagacctcaggaagggcccttagtgatggtgtgggccagggttctcacctcctt

SEQ ID NO: 165658 - DNA, 120 bp, Artificial Sequence
  ENSG00000108219_98 (sequence is synthesized)
agtctcctgtcctgtccatctccgcagatcctaggcaaaagaagcggagaaacactcaagccactggggtggttagggcacactggtggcaactgtttaaaaccttaactaaaacaaggt

SEQ ID NO: 165659 - DNA, 120 bp, Artificial Sequence
  ENSG00000108219_99 (sequence is synthesized)
taagcaaaaggagtttacaggctctcatagatgggaaggatgtgggagggtcacagactgagaggaaccagggctgtggctgctggaaggagcctcaccaccgccagtgtgtttcctccc

SEQ ID NO: 165660 - DNA, 120 bp, Artificial Sequence
  ENSG00000108219_100 (sequence is synthesized)
cgtcgtcggcatctctgcttctctctgcacgccagcagctctctcttagggcacgcagacctttcctctgcaggggaacacgagtgccggcagccccgagttagtgactatcatagaaac

SEQ ID NO: 165661 - DNA, 120 bp, Artificial Sequence
  ENSG00000108219_101 (sequence is synthesized)
tcagtgtatttctctcttgtttatcattccgagtcctgagtcacaggcttgtccagcactcaagactttttcttttctctattttttgaaacggattctcgctctgtcccccaggctgga

SEQ ID NO: 165662 - DNA, 120 bp, Artificial Sequence
  ENSG00000108219_102 (sequence is synthesized)
gagtatggagatgctcactaggcagacagaatcagccaccacagcccactccctcagccagtattactttgactaagttagtgaggaaccaggccccagattaagaagcagaactcacac

SEQ ID NO: 165663 - DNA, 120 bp, Artificial Sequence
  ENSG00000108219_103 (sequence is synthesized)
tgtcatctgctgtgtgcctggctggctcatgcataccttgtctatctaatgtggaccaaagccctgtggcacaccctgctggttacccccagtggttaccctggcacagaggaggaaagg

SEQ ID NO: 165664 - DNA, 120 bp, Artificial Sequence
  ENSG00000108219_104 (sequence is synthesized)
gagtcgtgggagggagaaggacttccctgggaggtctctgggctggcaagttgggtgacacaggtccggttggctgcaagcctgggctctgctgttgtaatcataaatgtgtgtgtgtgt

SEQ ID NO: 165665 - DNA, 120 bp, Artificial Sequence
  ENSG00000108219_105 (sequence is synthesized)
acagttgtttacaatgtcagcatgggtgtccttgtttgttagagatacatgccactgctcccatcatgaggaaaatcccaagccctccccatgatttttgccagtttctggggactcatg

SEQ ID NO: 165666 - DNA, 120 bp, Artificial Sequence
  ENSG00000108219_106 (sequence is synthesized)
ctcctggcagcccatgtgtccccaactcctgtgtcctttagggacctctgttgagccctgcctctattctggcagaattagagaaaattctttaaaaaaacaataaagtttaaattcatt

SEQ ID NO: 165667 - DNA, 120 bp, Artificial Sequence
  ENSG00000108219_107 (sequence is synthesized)
taaaaaaataataaaaaatctcacagcatgagttttgatgagatttggggcaaggtgggccacaaccttgggttgtatggccacctccccctcttcttcccctgttgtctctgcagctca

SEQ ID NO: 165668 - DNA, 120 bp, Artificial Sequence
  ENSG00000108219_108 (sequence is synthesized)
gaaaccccaatttcctggcctgtgttatgtggaggagctgagctcaccccctacagcttcatctccaaacctagcaaggatcctgcccagatcaggagatcctccttttaacagaagtta

SEQ ID NO: 165669 - DNA, 120 bp, Artificial Sequence
  ENSG00000108219_109 (sequence is synthesized)
tttacactccttagaaagcagtgggggtggaacgattctttttcctgatgcagagatgtaaaactgggacattgctacacataatattttaaacctgtcttccctcttaccaacgaacac

SEQ ID NO: 165670 - DNA, 120 bp, Artificial Sequence
  ENSG00000108219_110 (sequence is synthesized)
atcactagcaccatctatgccaatacatttctcaacatcaatttcagtggctgtattacattttatcctacggatgtgctctcatttataatctaaaccacttttattgaacacatcagt

SEQ ID NO: 165671 - DNA, 120 bp, Artificial Sequence
  ENSG00000108219_111 (sequence is synthesized)
tattctgaaattttcagtgttatgatggatgttgcagtaattattcttatatatgcacagaacccccagaggacatgactactgaaggctgtgctggcaggatcacaggtaaggatctag

SEQ ID NO: 165672 - DNA, 120 bp, Artificial Sequence
  ENSG00000108219_112 (sequence is synthesized)
caaattgtcccagcttcattgactgagctttcatccttgttgcactactttgagctgccattttgatcatataataatgatttagtagagctcttttttggttcaacctacctgttcttg

SEQ ID NO: 165673 - DNA, 120 bp, Artificial Sequence
  ENSG00000108219_113 (sequence is synthesized)
tatcagaactgaaatgtttgattttataaatttgaatagtggcacaatatagagttcactattcctcaatattttcaaggctgtttcttatctgttcattcttttggttaacttgggaat

SEQ ID NO: 165674 - DNA, 120 bp, Artificial Sequence
  ENSG00000108219_114 (sequence is synthesized)
tattttatcaagtctctctacttcccaatttcctttcacctttggctcgaaatgatattcaatgtatacattaacttgagttacattttgctgcataatgcttgagttacattttgagta

SEQ ID NO: 165675 - DNA, 120 bp, Artificial Sequence
  ENSG00000108219_115 (sequence is synthesized)
ttacgtgttactcataatacatattgagttacattttgctgcataatacattatccccaagtttaacaccttaaagcagcacatatatatctcatacccttctgagggtcaggaatctag

SEQ ID NO: 165676 - DNA, 120 bp, Artificial Sequence
  ENSG00000108219_116 (sequence is synthesized)
aagcagcttagctgggtgactgtggctctgggtctctcatgaggctgcagtgaaactgttggccagggctggaggatcccttccaacctcactccatgactgttggtgggaggcttcagt

SEQ ID NO: 165677 - DNA, 120 bp, Artificial Sequence
  ENSG00000108219_117 (sequence is synthesized)
tctccacctggttctcacaatataatttcccccagagtgagttatcagagagagtgtgcaaccagtaatctgttagaatatgtcacgtctgtcatatttgattggtcactcagaccaacc

SEQ ID NO: 165678 - DNA, 120 bp, Artificial Sequence
  ENSG00000108219_118 (sequence is synthesized)
ctaatagatgcgagagtgactatgcaagggtgtgagttccaggaggaaagcatcattggaaccatcttggagactggctaatacacagataaatggcacatctgacaatatggcatcttt

SEQ ID NO: 165679 - DNA, 120 bp, Artificial Sequence
  ENSG00000108219_119 (sequence is synthesized)
ctgagtgtcagtgtggtgtgttcctatatgaacttaatgctattaaacttaattaaattgtaggtatgctctcagtgaagatttttacttttacattacaggtttccacactgttaaatt

SEQ ID NO: 165680 - DNA, 120 bp, Artificial Sequence
  ENSG00000108219_120 (sequence is synthesized)
cattccaagtatttcatacatgctgttcctattatgaaaggatcttttttttcacatggcattttctaagtagttgttgcattcatataggagatgctattgattttgacacccataatt

SEQ ID NO: 165681 - DNA, 120 bp, Artificial Sequence
  ENSG00000108219_121 (sequence is synthesized)
tttcagtggagacaaggcagaaactactccagactctcacctgctgttgctgatccttacatggtggctgtgccaggctcagccgcgctgagatgacagggctgtctggccatcattggt

SEQ ID NO: 165682 - DNA, 120 bp, Artificial Sequence
  ENSG00000108219_122 (sequence is synthesized)
catatggacttcagatttgaaaggattttatgtagaagcagagtgcctgataggactctccgggacccccatttctgccctgcttggctcccactggcaaggctggctcagttcctgtca

SEQ ID NO: 165683 - DNA, 120 bp, Artificial Sequence
  ENSG00000108219_123 (sequence is synthesized)
ccttctcctggactttggccagagtccactggctgtttcccctgcctcctgctctcccagtgccctctccacaccagtgccagagctgcttctaagagatgcctcaaagcccgcttccag

SEQ ID NO: 165684 - DNA, 120 bp, Artificial Sequence
  ENSG00000108219_124 (sequence is synthesized)
cttaggaaccccagggaacatggatggtttctccattgccacttcctagccttcctggcataggaaggtctggtttgcctgcaggtccctctctgggggggtccctgctccatagatgct

SEQ ID NO: 165685 - DNA, 120 bp, Artificial Sequence
  ENSG00000108219_125 (sequence is synthesized)
gaggctccagaagtctgttcttttatatcacatttgaaaacctttgaaatgcattatagttgagtcatatgaattatgtaagtatatcctactcattgtataaaacaacacagaattgtc

SEQ ID NO: 165686 - DNA, 80 bp, Artificial Sequence
  ENSG00000108219_126 (sequence is synthesized)
cccctccgcgccccgcccccgccgctcggacggcccgagtcgcgccctcccgccccgcgccgcggaacttgctctaactt

SEQ ID NO: 165687 - DNA, 120 bp, Artificial Sequence
  ENSG00000108219_127 (sequence is synthesized)
attacctctgtaaagagcctgtctacaaatacagtcaccttctgaagtcctgggggttaggacttcagtgtatggattttgaggacacaatttagctcctaacacctctaaaattagggg

SEQ ID NO: 165688 - DNA, 120 bp, Artificial Sequence
  ENSG00000108219_128 (sequence is synthesized)
ctaatactccatcatgttgccatggaggaggctgataggtgtgagggggctggggccgattgccctgtgtggggtgggcagggctggggtgtgtgctgggatggttactgacaccccacc

SEQ ID NO: 165689 - DNA, 120 bp, Artificial Sequence
  ENSG00000108219_129 (sequence is synthesized)
ggggttagcagtggagggagctggttggctggcgactgttgcctgctggctctgtctcctggagctgagcttactggtgggatgcccgctccgagaagcacccttcttctcttcttagga

SEQ ID NO: 165690 - DNA, 120 bp, Artificial Sequence
  ENSG00000108219_130 (sequence is synthesized)
gactctggacccccttctccaggtttctctccctttagaggcacattttcctccaagccttcaagccccttctctttctccagatgtggatggtggggaagggtatcttgagaaagttgg

SEQ ID NO: 165691 - DNA, 120 bp, Artificial Sequence
  ENSG00000108219_131 (sequence is synthesized)
gctttaaatctctggagacctgaaaggaaacagccagggagcctttggtcagacaggtggtgcgatggcacagtgcccagcgaggggcagaggctgagaggagctgacgagcatctcctg

SEQ ID NO: 165692 - DNA, 120 bp, Artificial Sequence
  ENSG00000108219_132 (sequence is synthesized)
gagagtcctccttgcctgcctcctggatccctcgttcccaccctgctttgccctgctccttaccagagctcactaggggatcaggtggggacatcgtgtgtgccaaaggctcagacccct

SEQ ID NO: 165693 - DNA, 120 bp, Artificial Sequence
  ENSG00000108219_133 (sequence is synthesized)
gcaaaacctcatcgactcccttcagaaagctgtaagcacctccccagcgggcccccgatagagcatgcacctccctgtgctgcctggagctgagtctagcaggggcatcaggccttctct

SEQ ID NO: 165694 - DNA, 120 bp, Artificial Sequence
  ENSG00000108219_134 (sequence is synthesized)
gtgggttgtctgcctgcagcttggcagacagcagggaggccgtggaacaagccactccacctctggtctgttccactttgccggcttgtggttgcctggtgggccagccctttcccattg

SEQ ID NO: 165695 - DNA, 120 bp, Artificial Sequence
  ENSG00000108219_135 (sequence is synthesized)
ggattgggcaggcaagtccagctgtacccgaggccacccaccccccacgtgcccggccctcctctttcggccccagatctttccaatcctgcccaatagccataccagctgcaatcctcc

SEQ ID NO: 165696 - DNA, 120 bp, Artificial Sequence
  ENSG00000108219_136 (sequence is synthesized)
ttaggcgctgcataccgtaaggcacagcttcttccccccggctcatgactcaccatctgacgctattcctatccccttcctccccgggaccttttccccttcctccctgggaccttttcc

SEQ ID NO: 165697 - DNA, 120 bp, Artificial Sequence
  ENSG00000108231_0 (sequence is synthesized)
acagtacctcacaggtctcttcccccgagcagtgcattgctggagcgaggagaagctcacgaatcagctgcaggtctctgttttgaaaaagcagagatacagaggcagaggaaaagggtg

SEQ ID NO: 165698 - DNA, 120 bp, Artificial Sequence
  ENSG00000108231_1 (sequence is synthesized)
gactcctatgtgacctgttcttagagcaagacaatcaccatctgaattccagaagccctgttcatggttggggatattttctcgactgcatggaatcagaaagaagcaaaaggatgggaa

SEQ ID NO: 165699 - DNA, 120 bp, Artificial Sequence
  ENSG00000108231_2 (sequence is synthesized)
atgcctgcattcccctgaaaagaattgcttatttcctatgtctcttatctgcgcttttgctgactgaggggaagaaaccagcgaagccaaaatgccctgccgtgtgtacttgtaccaaag

SEQ ID NO: 165700 - DNA, 120 bp, Artificial Sequence
  ENSG00000108231_3 (sequence is synthesized)
ataatgctttatgtgagaatgccagatccattccacgcaccgttcctcctgatgttatctcattatcctttgtgagatctggttttactgaaatctcagaagggagttttttattcacgc

SEQ ID NO: 165701 - DNA, 120 bp, Artificial Sequence
  ENSG00000108231_4 (sequence is synthesized)
catcgctgcagctcttgttattcacatcgaactcctttgatgtgatcagtgatgatgcttttattggtcttccacatctagagtatttattcatagaaaacaacaacatcaagtcaattt

SEQ ID NO: 165702 - DNA, 120 bp, Artificial Sequence
  ENSG00000108231_5 (sequence is synthesized)
caagacatactttccggggactaaagtcattaattcacttgagccttgcaaacaacaatctccagacactcccaaaagatattttcaaaggcctggattctttaacaaatgtggacctga

SEQ ID NO: 165703 - DNA, 120 bp, Artificial Sequence
  ENSG00000108231_6 (sequence is synthesized)
ggggtaattcatttaattgtgactgtaaactgaaatggctagtggaatggcttggccacaccaatgcaactgttgaagacatctactgcgaaggccccccagaatacaagaagcgcaaaa

SEQ ID NO: 165704 - DNA, 120 bp, Artificial Sequence
  ENSG00000108231_7 (sequence is synthesized)
tcaatagtctctcctcgaaggattttgattgcatcattacagaatttgcaaagtctcaagacctgccttatcaatcattgtccatagacactttttcttatttgaatgatgagtatgtag

SEQ ID NO: 165705 - DNA, 120 bp, Artificial Sequence
  ENSG00000108231_8 (sequence is synthesized)
tcatcgctcagccttttactggaaaatgcattttccttgaatgggaccatgtggaaaagaccttccggaattatgacaacattacaggcacatccactgtagtatgcaagcctatagtca

SEQ ID NO: 165706 - DNA, 120 bp, Artificial Sequence
  ENSG00000108231_9 (sequence is synthesized)
attcataaaaatccaggatattgaaattctcaaaatccgaaaacccaatgacattgaaacattcaagattgaaaacaactggtactttgttgttgctgacagttcaaaagctggttttac

SEQ ID NO: 165707 - DNA, 120 bp, Artificial Sequence
  ENSG00000108231_10 (sequence is synthesized)
taccatttacaaatggaacggaaacggattctactcccatcaatccttacacgcgtggtacagggacactgatgtggaatatctagaaatagtcagaacacctcagacactcagaacgcc

SEQ ID NO: 165708 - DNA, 120 bp, Artificial Sequence
  ENSG00000108231_11 (sequence is synthesized)
tcatttaattctgtctagtagttcccagcgtcctgtaatttatcagtggaacaaagcaacacaattattcactaaccaaactgacattcctaacatggaggatgtgtacgcagtgaagca

SEQ ID NO: 165709 - DNA, 120 bp, Artificial Sequence
  ENSG00000108231_12 (sequence is synthesized)
cttctcagtgaaaggggacgtgtacatttgcttgacaagattcattggtgattccaaagtcatgaaatggggaggctcctcgttccaggatattcagaggatgccatcgcgaggatccat

SEQ ID NO: 165710 - DNA, 120 bp, Artificial Sequence
  ENSG00000108231_13 (sequence is synthesized)
ggtgttccagcctcttcaaataaataattaccaatatgcaattcttggaagtgattactcctttactcaagtgtataactgggatgcagagaaagccaaatttgtgaaatttcaggaatt

SEQ ID NO: 165711 - DNA, 120 bp, Artificial Sequence
  ENSG00000108231_14 (sequence is synthesized)
aaatgttcaggcaccaagatcattcacacatgtgtccattaataagcgtaattttctttttgcttccagttttaagggaaatacacagatttacaaacatgtcatagttgacttaagcgc

SEQ ID NO: 165712 - DNA, 120 bp, Artificial Sequence
  ENSG00000108231_15 (sequence is synthesized)
atgagacaccaaattctgtggctgccatcagaaattttctacagtacatgacccggatgaactcaatgcatgatgactcttcttatcacacttgcaaatgaatgcctttcaaacattgag

SEQ ID NO: 165713 - DNA, 120 bp, Artificial Sequence
  ENSG00000108231_16 (sequence is synthesized)
actgctagaaccaagcactaccagtatctccatccttaactgtccagtccagtgatgtgggaagttaccttttataagacaaaatttaattgtgtaactgttctttgcagtgaagatgtg

SEQ ID NO: 165714 - DNA, 120 bp, Artificial Sequence
  ENSG00000108231_17 (sequence is synthesized)
taaataagcgtttaatggtatctgttactccaaaaagaaatattaatatgtacttttccatttatttattcatgtgtacagaaacaactgccaaataaaatgtttacattttctttcata

SEQ ID NO: 165715 - DNA, 120 bp, Artificial Sequence
  ENSG00000108231_18 (sequence is synthesized)
agtaaaatgatctcaatattaattttgtcaaatgtgattctatttctgagaaaacagaatatccgtaaagtgagaggtagatgggtttgtttgcgacttcacaccaacagtgcaggttga

SEQ ID NO: 165716 - DNA, 120 bp, Artificial Sequence
  ENSG00000108231_19 (sequence is synthesized)
ttcttacaatggtaaatctgttaacctgtcatgctgtctactttaatggctatttatgaagttgttggaatcttgcaacaatgatcccaattccattccactattttactttcattttta

SEQ ID NO: 165717 - DNA, 120 bp, Artificial Sequence
  ENSG00000108231_20 (sequence is synthesized)
accccttgatgagcctttgatgaggagatgattaggagtaaaaaaatgctgcatagattatctgcataactaacactgtagcagacagccatgcagacatttttctgtatacaactccca

SEQ ID NO: 165718 - DNA, 120 bp, Artificial Sequence
  ENSG00000108231_21 (sequence is synthesized)
cacttgttcagagagacacaaacccaagctgagaatctgcattgcaggggggctggtgcaccccagatggctgtgggcgatgctttcttagcagcagagcccggtggcactgaaacaaac

SEQ ID NO: 165719 - DNA, 120 bp, Artificial Sequence
  ENSG00000108231_22 (sequence is synthesized)
gcggtgtttgagccagtctggtctgccttagagagaagactttccagtgggttccacagtcacaatcggaggttttcttgggtaaatgatgaaaacaccaaagggcaggaaatggtcatc

SEQ ID NO: 165720 - DNA, 120 bp, Artificial Sequence
  ENSG00000108231_23 (sequence is synthesized)
cagaaaagcactgactgttgaagctagcaaattgactctaatttaccttaaagctggagacccagaggtgtatgtgaagcgagctagctgaattaggaccatcttccatcctgacactca

SEQ ID NO: 165721 - DNA, 120 bp, Artificial Sequence
  ENSG00000108231_24 (sequence is synthesized)
gcctagtcctttctccatcatgtggtgccacttttcaaacattcactatctgattagaacttggcatgtagatgggaagattgatgaggggtaaagagaagaccaagaaaattaattcaa

SEQ ID NO: 165722 - DNA, 120 bp, Artificial Sequence
  ENSG00000108231_25 (sequence is synthesized)
gaaagactgaggaggaggacacgggtagggttcacctttgcaggaactgactagccttttctgagagttgtcccctctccatgtacccttcatctgccctattctatttaactctgtctc

SEQ ID NO: 165723 - DNA, 120 bp, Artificial Sequence
  ENSG00000108231_26 (sequence is synthesized)
ctctgcagccacagaaggttgcacctgtaatgtgttcccagtgttcacctgaaatgaactccaggtgtttgtcctagatgctgggctgagctcagcctgagccaagctgcacgtagggag

SEQ ID NO: 165724 - DNA, 120 bp, Artificial Sequence
  ENSG00000108231_27 (sequence is synthesized)
cactggtctttgaatgggagttcaaagagaaagaactttaagagagttctgtctcctggatatttggaattaggacagcaaaggctgagccaatttgccacaggcacaggatctgtaagg

SEQ ID NO: 165725 - DNA, 120 bp, Artificial Sequence
  ENSG00000108231_28 (sequence is synthesized)
agatgagcctaaatcaggctccttagaggcagagggattgattgagggagtgctccgaggctacacctgaagggagtgagaggagcaacatggaacaggggaagatgctatgcaaagaca

SEQ ID NO: 165726 - DNA, 120 bp, Artificial Sequence
  ENSG00000108231_29 (sequence is synthesized)
ggaaaaggcagcctgcacctgatcctagggggctgtccagagtgtgaattgtaccacagagtgtgtcctgccttgaggcaaggaggatggacttttgcatgcccccacccatctgacagt

SEQ ID NO: 165727 - DNA, 120 bp, Artificial Sequence
  ENSG00000108231_30 (sequence is synthesized)
cattggctaaggcatgtggggcaaaaccttttgggcatctccaggagagaagcttccagttggtaaaggatagtcctccagagaagggtacacatatgagctgttattaactgacaccca

SEQ ID NO: 165728 - DNA, 120 bp, Artificial Sequence
  ENSG00000108231_31 (sequence is synthesized)
aagatgaggacatcagcccagtaaaggcatcggggtgagataccaacagcatataccacagtgatggtgactggggagctgaaggcaccatctgggggcagccatcatggtccatgtgcc

SEQ ID NO: 165729 - DNA, 120 bp, Artificial Sequence
  ENSG00000108231_32 (sequence is synthesized)
ggaagagctgaggaaactggtcagaaaatgagaagagaatgacatgagagctcagaaaggagcagaggttagtttgaatggatttctgtacttgtcacaaaattatctccaactaattca

SEQ ID NO: 165730 - DNA, 120 bp, Artificial Sequence
  ENSG00000108231_33 (sequence is synthesized)
gaaggtttaggcataatttactgtaatgtagatatgatggtcaatcctgttggtgtccacaatagttctctctctggggcagtgggcatagtggtaacagcatgtgtttaagagtcaggg

SEQ ID NO: 165731 - DNA, 120 bp, Artificial Sequence
  ENSG00000108231_34 (sequence is synthesized)
agaccttgatttgcatcccaatatggcctcctctagctctaggacctgggacaagctaatcaaactcatctgcaaaatgtgaataatgatcgtcatagagtgggtttgcagattaaatac

SEQ ID NO: 165732 - DNA, 120 bp, Artificial Sequence
  ENSG00000108231_35 (sequence is synthesized)
tgtataagcctcacaagtaccccaggaggtggttactctgaatacctctattttactaatgaaattagcaacttgtccatgaacatacggctagcaagtctgacctgggagcctgcatct

SEQ ID NO: 165733 - DNA, 120 bp, Artificial Sequence
  ENSG00000108231_36 (sequence is synthesized)
gggattttggccactccattctgctaagctggtatgagttgtagaagcggtacattattgtataggagctgtaatcactgatcaggataggtggaaaatgcttacaccccatcacatctt

SEQ ID NO: 165734 - DNA, 120 bp, Artificial Sequence
  ENSG00000108231_37 (sequence is synthesized)
tctctgtgagagctgaggatgtctgtggacctctagaagaacaggtggaacagaaacccaggtgaggcagtggggcccaccaagaagttacaggtagaagacggcagtgaagtgagctga

SEQ ID NO: 165735 - DNA, 120 bp, Artificial Sequence
  ENSG00000108231_38 (sequence is synthesized)
ccaccccagcagcattggtgtgctccaacatagaagatgacaggagtcacagtgtgtgatatgcatgcattcttattgaggaacattgagggactttggcctctagaaaattacctatgt

SEQ ID NO: 165736 - DNA, 120 bp, Artificial Sequence
  ENSG00000108231_39 (sequence is synthesized)
tccaataaaacttgctgttgttaaaatgtggtcattgtttttacatcagtggagggaacactgtgtgaaaaatagctcttcaaatttctgtgtggcttttgcatcaataaaagtcagata

SEQ ID NO: 165737 - DNA, 120 bp, Artificial Sequence
  ENSG00000108231_40 (sequence is synthesized)
acatgcttagatacccccagccctgaacattatcatgagaaacctgtagccgattcatttctcttacttcatctgggaaggaatagtatcgtacttcataaaatagtgtcaaaatagtca

SEQ ID NO: 165738 - DNA, 120 bp, Artificial Sequence
  ENSG00000108231_41 (sequence is synthesized)
catgtggtctgtttctaaacgttgtttcttggacaacatacgtacagaagctgttctcttctgacaccagccactctactgagagtagttcagacacctgcaccatccttgattatctca

SEQ ID NO: 165739 - DNA, 120 bp, Artificial Sequence
  ENSG00000108231_42 (sequence is synthesized)
tttccttttttcaataatcttatgagataaggtattattatcttcacttaaaaatgaaacaactgaatttccaagaagatacattaccaaagtcacacagccagtaaatgctggagtcag

SEQ ID NO: 165740 - DNA, 120 bp, Artificial Sequence
  ENSG00000108231_43 (sequence is synthesized)
gattcaaacatagctcagaatcactccaaaagccatgctctttgtcacaattggaccgtcattgacaatggaacattctgactcagttcctattcttgcattccaaggttcattgagaac

SEQ ID NO: 165741 - DNA, 120 bp, Artificial Sequence
  ENSG00000108231_44 (sequence is synthesized)
cattttccaaactagcagtaatttctaaaacctagaaaaacaacataactaacttaaaaataagttctaaagttcatgaatgtttgcacttgagaaaccttatatttaattagtggaggt

SEQ ID NO: 165742 - DNA, 120 bp, Artificial Sequence
  ENSG00000108231_45 (sequence is synthesized)
agaagacatagacttttgagaatgttttaaagggaagttgagagaattttcaagggtttagaggctaatggtatgggctctttagttttagtttagttttttatttttattgtggaaaaa

SEQ ID NO: 165743 - DNA, 120 bp, Artificial Sequence
  ENSG00000108231_46 (sequence is synthesized)
aaaaacacctctaagaaaagtttataacgtgtatatatatggtgctggttaaaaatagaaaattacactacttggtgaccttccccagtcatacagcattagcactgtgctatgtctata

SEQ ID NO: 165744 - DNA, 120 bp, Artificial Sequence
  ENSG00000108231_47 (sequence is synthesized)
tttgtgtactagggacacatttccctttccttgacattatcaggacaattttttactcattaacctttattagaatcattctagtgatttacggaagaacaaatagaaagggaaagggaa

SEQ ID NO: 165745 - DNA, 120 bp, Artificial Sequence
  ENSG00000108231_48 (sequence is synthesized)
aaacattcctgtgatcacaggaaaagaaccagaagaaggagaaagagggggatgattaaagagaatagatggataggtttttataagaaaacttttttctgaggtggaatgaatggtgct

SEQ ID NO: 165746 - DNA, 120 bp, Artificial Sequence
  ENSG00000108231_49 (sequence is synthesized)
agaaaggaaaaggaggcgtgggctttagaaaggagaaaggatgtactggggaagagatagagctactggcactgtgggttggaggtttggttgctctccggagcaagcgaggaggaagca

SEQ ID NO: 165747 - DNA, 120 bp, Artificial Sequence
  ENSG00000108231_50 (sequence is synthesized)
ggcagaaggggcagcccaggcaagaggagggggcgcattttggagatggacactcaccagtttggttagtcatcatttgggagatatcccctagattgagcgtctgagagtgtgaatctc

SEQ ID NO: 165748 - DNA, 120 bp, Artificial Sequence
  ENSG00000108231_51 (sequence is synthesized)
tgaatctctcgtgttctgttctaaatggaaagatcaatgcccaggaatcattgttgtttttaaccaacataaagtgttgtttaaatattgagtgcacctgtaatcccagcactttgggag

SEQ ID NO: 165749 - DNA, 67 bp, Artificial Sequence
  ENSG00000108231_52 (sequence is synthesized)
tatggtggcgggcacatgtaatcccagctacggcaggctaaggcaggaaaatcacttgaacccggga

SEQ ID NO: 165750 - DNA, 88 bp, Artificial Sequence
  ENSG00000108231_53 (sequence is synthesized)
gaggtttcagtgagctgaggtcacaccacttgtctcaagaaataaaagtaaataaatatggagtgggtgttgaagtgaacaggttagg

SEQ ID NO: 165751 - DNA, 120 bp, Artificial Sequence
  ENSG00000108231_54 (sequence is synthesized)
taaataaatatggagtgggtgttgaagtgaacaggttaggaactgaaaggacaatagcaggaatctgagtagtagttcagaagaaaaaaaaaggaccacaagtcttttagtaggctggaa

SEQ ID NO: 165752 - DNA, 120 bp, Artificial Sequence
  ENSG00000108231_55 (sequence is synthesized)
atgacaaaagagactcatcactaagctttatcattaaatgcctttgtttaatttatcactacagtttacatcacctttttttttttttttccaggagccttgcaaacaacaatctccaga

SEQ ID NO: 165753 - DNA, 120 bp, Artificial Sequence
  ENSG00000108231_56 (sequence is synthesized)
tataatttttaattggcttttaaattaaaattaggatttttaaatctaaattttaactggccaaaaatttaaatttacatggactaacatttgagtcttctatggtatttatcattggga

SEQ ID NO: 165754 - DNA, 120 bp, Artificial Sequence
  ENSG00000108231_57 (sequence is synthesized)
attctgaatacatggcacccaggcattcctttgacaaagtgtgtgtcaatacggcagggagcgatgataaaggactttgacggggtgggaagagacccggctagaaatttcaaaatccct

SEQ ID NO: 165755 - DNA, 120 bp, Artificial Sequence
  ENSG00000108231_58 (sequence is synthesized)
tttttctcatgaggtccaggaaatagggctacaaaggaaaaacataaaggagtctgggaaactgacagaataaagatgaaaggttacatccttgggttggtcaatcaacagagaaatgga

SEQ ID NO: 165756 - DNA, 120 bp, Artificial Sequence
  ENSG00000108231_59 (sequence is synthesized)
acaggaagtgggggaagggagaaaagtttgccttttttctcattagactgaacaacaactctaagcttaatccccaggaatttggcttaagccccaggaagggaatgaacttaattattt

SEQ ID NO: 165757 - DNA, 120 bp, Artificial Sequence
  ENSG00000108231_60 (sequence is synthesized)
ttgaccctttttcaaacaaaagagctttcaaactttgacttttaagcctccgagtgaaagatctttgcaaggaatttgtatattttgctgtaagcaaagcaagtaatatatgcctaaact

SEQ ID NO: 165758 - DNA, 120 bp, Artificial Sequence
  ENSG00000108231_61 (sequence is synthesized)
tctcaaaagcaattcagcttcattatttgccttccagaacattagaaaggtatttaaatgtcataaggtggaagacaggaacaaatgaaaggatatatgaaaacaaaagcttttttaaaa

SEQ ID NO: 165759 - DNA, 120 bp, Artificial Sequence
  ENSG00000108231_62 (sequence is synthesized)
aattattcaggtacttgtctgtagaatatatattcaaaacaacttttctccaataacaaacaaaaagaaaatctgagtcaagtactttcttccaagcccagtatttaacttcaaatcagt

SEQ ID NO: 165760 - DNA, 120 bp, Artificial Sequence
  ENSG00000108231_63 (sequence is synthesized)
agcctaatgaaaaactttctttgttccttgcagtatttccccagcccctcctccatgtctattacctcaattcctgaatgatatggtttaattccaggagaatgcccaaatcaggattct

SEQ ID NO: 165761 - DNA, 120 bp, Artificial Sequence
  ENSG00000108231_64 (sequence is synthesized)
actcattagtgtgggtcagagttctcttgggagactaggtcagttctgggagtgtcttggaagttagaacacactccatgggtgacgtgggatgtagctcattgggggtcctttacccca

SEQ ID NO: 165762 - DNA, 120 bp, Artificial Sequence
  ENSG00000108231_65 (sequence is synthesized)
tttttgtgtcagtctataccctacactagtgaaagacaaaacaaaaaaatattgaaattggctcagtctctcatgggaatcccaagatgggtttagccttttggacctactctaatatgc

SEQ ID NO: 165763 - DNA, 120 bp, Artificial Sequence
  ENSG00000108231_66 (sequence is synthesized)
ccaaatcaagaattatcttagaagtacaaggatccatgccaacttgccttttagtggatttcttggctttcttgaaagtatcctctaaaaaacatttttaaatgtttgggcgtttaaaaa

SEQ ID NO: 165764 - DNA, 120 bp, Artificial Sequence
  ENSG00000108231_67 (sequence is synthesized)
ttatttatgtgtggtgtgaagagtaggcagcacctatcttaagaattctgtgtgaccaggaaaggaggtggaattcctgaacagaagcaatgcaaatacacagagaacttggtgagttgg

SEQ ID NO: 165765 - DNA, 120 bp, Artificial Sequence
  ENSG00000108231_68 (sequence is synthesized)
ggtcatatgtggatatgtaaatggtctatgctgtataacttattacaggcatgagcgattgtatgcctgtgttaactctgctgtgtcaaagtcatttcctatttaaactgaatttgtaga

SEQ ID NO: 165766 - DNA, 120 bp, Artificial Sequence
  ENSG00000108231_69 (sequence is synthesized)
ccacggaagaggatcaggattaattatgtctgtgaggaagaagaaaagcaaatagctcacttgattaaatacattacaataatcactacattctgtcctttagacctgtgctgtccaata

SEQ ID NO: 165767 - DNA, 120 bp, Artificial Sequence
  ENSG00000108231_70 (sequence is synthesized)
gggtagccaccagaccttatggtcactgagcacctaaaatgtgctcctagtacaactgagagactgaattttaaattttacttaattttttaacagttaaatttaaatttaaaagctgat

SEQ ID NO: 165768 - DNA, 120 bp, Artificial Sequence
  ENSG00000108231_71 (sequence is synthesized)
tctcagctcaattattggaaaatgttaagtacgcttggaataatttgggtatatacacctatttttttcaattatgaattttatgacatctaaatatagatcacctatttctggtaaaat

SEQ ID NO: 165769 - DNA, 120 bp, Artificial Sequence
  ENSG00000108231_72 (sequence is synthesized)
ttagcatctgaattgagatatattgtaggtataaaatacacactggacttcaaagacttagtataaaaaaggaatgtaaaatatctcaataatgtttatattgatgatgtgtcaaaatga

SEQ ID NO: 165770 - DNA, 120 bp, Artificial Sequence
  ENSG00000108231_73 (sequence is synthesized)
atgataatcttttgtatgtattgggttaaataaaacatattattaaaatgaattatacctgcttctttttacttttttaatgtggctatagaaaattttaaattacaattacggttcata

SEQ ID NO: 165771 - DNA, 120 bp, Artificial Sequence
  ENSG00000108231_74 (sequence is synthesized)
gtttctattgacagcacagccctagactaagccgctttggaattcaagagggagtaagtgatgaggttccattgactgggtagtcttcaagtgtgcatggtgctaactctctgagcccaa

SEQ ID NO: 165772 - DNA, 120 bp, Artificial Sequence
  ENSG00000108231_75 (sequence is synthesized)
agtgaatgagtggtcagtcaggttccaggcaggttatagggcaggatgcaacgccgggtaaggtcattctgcacatgttaattgttgatgtagaactctttcctgcgtgggtagggccct

SEQ ID NO: 165773 - DNA, 73 bp, Artificial Sequence
  ENSG00000108231_76 (sequence is synthesized)
gtggatctgagaagtcctgcagtgaggaaatttttccaatatttttcacccttaatttggccatggaatttaa

SEQ ID NO: 165774 - DNA, 120 bp, Artificial Sequence
  ENSG00000108231_77 (sequence is synthesized)
ctcccaagcagctgggactacaggcacatccactgtagtatgcaagcctatagtcattgaaactcagctctatgttattgtggcccagctgtttggtggctctcacatctataagcgaga

SEQ ID NO: 165775 - DNA, 120 bp, Artificial Sequence
  ENSG00000108231_78 (sequence is synthesized)
ggccccccagaatacaagaagcgcaaaatcaatagtctctcctcgaaggattttgattgcatcattacaggtaatgtactcatcatcattccacctcaaaaaattaaaataagggctacc

SEQ ID NO: 165776 - DNA, 120 bp, Artificial Sequence
  ENSG00000108231_79 (sequence is synthesized)
tttttttttcatgtgcaggaactgatattttttatatcttaaaaactagctgagcaacttaattttaaaaaaattatgaaccattgacaatgcttcatgtgtttaaaagtaaaatggcca

SEQ ID NO: 165777 - DNA, 120 bp, Artificial Sequence
  ENSG00000108231_80 (sequence is synthesized)
acaacaacatcaagtcaatttcaagacatactttccggggactaaagtcattaattcacttctctgctctaggccctaggatgcagcagggaacaaaggagacaaaaatgcctgtccttg

SEQ ID NO: 165778 - DNA, 120 bp, Artificial Sequence
  ENSG00000108231_81 (sequence is synthesized)
cacgcggttgtcactctgcctccaccaggcccctttctctcctgttgcttgttttgtagcaaagagaagctaatagccagatatattttacaaaatcatgcctttcaaggcttctgtata

SEQ ID NO: 165779 - DNA, 70 bp, Artificial Sequence
  ENSG00000108231_82 (sequence is synthesized)
agtaaaccaccttgcctgggcttacttagctgatctcttaagtttctttcccattttaataatttttaaa

SEQ ID NO: 165780 - DNA, 120 bp, Artificial Sequence
  ENSG00000108231_83 (sequence is synthesized)
tgatctcttaagtttctttcccattttaataatttttaaaattataagtcataagttagaacatagggctccctctacaatttttaatatcagttttagcttctaatacctttaaatctg

SEQ ID NO: 165781 - DNA, 120 bp, Artificial Sequence
  ENSG00000108239_0 (sequence is synthesized)
agagctgttctctggccaagcctgcgcctgtagtccttctttgcctcctggggcggccgccacccacccccagatggtgggtccggaggatgccggagcctgctcgggaagaaaccccaa

SEQ ID NO: 165782 - DNA, 120 bp, Artificial Sequence
  ENSG00000108239_1 (sequence is synthesized)
gttgctcccggtgcctgcgccggaccccgtgggccaggacaggaaggtaatccgggccacgggcggctttggcggaggcgtcggcgctgtggagccgccggaggaggctgacgaggagga

SEQ ID NO: 165783 - DNA, 120 bp, Artificial Sequence
  ENSG00000108239_2 (sequence is synthesized)
ggaggctgacgaggaggaggagacgccgcctcggcagctccttcagcgttacctcgcggcggccggggagcagctggagccggggctctgctactgtccgctccccgctggccaggccgg

SEQ ID NO: 165784 - DNA, 120 bp, Artificial Sequence
  ENSG00000108239_3 (sequence is synthesized)
cgccccgccgccctcggcagccccacgatcggacgcctgcctgctgggctcgggctccaaacaccgcggcgcggaggtggctgatggccgcgcgccgcggcacgaaggcatgaccaacgg

SEQ ID NO: 165785 - DNA, 120 bp, Artificial Sequence
  ENSG00000108239_4 (sequence is synthesized)
cgactcgggttttctgccgggccgggactgtcgcgatctggaagaggctcgcgggctggcgcgcgccggcggccgggagtcgcgccgccgccgcccctacggccgccttcgcctggaggg

SEQ ID NO: 165786 - DNA, 120 bp, Artificial Sequence
  ENSG00000108239_5 (sequence is synthesized)
gcctggcgacgaggacgcggacggcgcgggaagcccgtccgattgggcctctccgcttgaggacccgctgcggagctgctgcctggtggccgcggacgcccaggagcccgagggcgcggg

SEQ ID NO: 165787 - DNA, 120 bp, Artificial Sequence
  ENSG00000108239_6 (sequence is synthesized)
cagcgactcgggggacagccccgccagcagctgcagcagtagcgaggactcagagcagcggggagtcggcgccgggggtcccgaggagggcgcgccccctgccacctcggccgagaggac

SEQ ID NO: 165788 - DNA, 120 bp, Artificial Sequence
  ENSG00000108239_7 (sequence is synthesized)
taatgggggtgcggagccgcgcctgggcttttctgacattcacttcaactctcgcaacacgttccaggtgagccgcggtcagagcgcccgcgatcacctgcccccggcggggccgccggt

SEQ ID NO: 165789 - DNA, 120 bp, Artificial Sequence
  ENSG00000108239_8 (sequence is synthesized)
gcccttgcccgccgcggagcagggtcctgcgggggcttcggcccgggctcgacggagtggcggcttcgcggacttcttcaccagaaacctttttccaaaaaggacaaaggaactcaaatc

SEQ ID NO: 165790 - DNA, 120 bp, Artificial Sequence
  ENSG00000108239_9 (sequence is synthesized)
agttgtccatagtgctcctggttggaaattatttggtaaagtccctcctagagagaatcttcagaaaacatccaaaatcattcagcaggaatatgaagcacgaacggggaggacctgtaa

SEQ ID NO: 165791 - DNA, 120 bp, Artificial Sequence
  ENSG00000108239_10 (sequence is synthesized)
accaccacctcagtcttcaagacgcaagaattttgaatttgagccgctttctaccactgccttgattcttgaggatcgaccatcaaatcttcctgccaaatctgtggaagaagctttacg

SEQ ID NO: 165792 - DNA, 120 bp, Artificial Sequence
  ENSG00000108239_11 (sequence is synthesized)
tcaccgacaagaatacgatgagatggtggctgaggctaaaaaacgagaaattaaggaagcacataaaagaaaaagaatcatgaaagaacgatttaagcaggaagaaaatattgcaagtgc

SEQ ID NO: 165793 - DNA, 120 bp, Artificial Sequence
  ENSG00000108239_12 (sequence is synthesized)
aatggtaatttggatcaatgaaatactgcccaattgggaagtaatgcgtagtacaagaagagttcgagaattgtggtggcagggattgccccctagtgtccgtgggaaagtttggagtct

SEQ ID NO: 165794 - DNA, 120 bp, Artificial Sequence
  ENSG00000108239_13 (sequence is synthesized)
agctgtaggaaatgaactaaatatcactcctgaactttatgaaatcttcctctcaagagcaaaagaacggtggaaaagtttcagtgaaacaagttcagagaatgatacagaaggtgtatc

SEQ ID NO: 165795 - DNA, 120 bp, Artificial Sequence
  ENSG00000108239_14 (sequence is synthesized)
tgttgctgatcgagaggccagtctggaattaattaagttggacatatcccgtacatttccatctctctacatctttcagaagggtggtccatatcatgatgtcttgcatagtattttagg

SEQ ID NO: 165796 - DNA, 120 bp, Artificial Sequence
  ENSG00000108239_15 (sequence is synthesized)
ggcatacacatgctacaggcctgatgttggttatgtccaagggatgtccttcattgcagcagtactcattctcaatttggaagaggcagatgcctttatcgcatttgccaatctcctgaa

SEQ ID NO: 165797 - DNA, 120 bp, Artificial Sequence
  ENSG00000108239_16 (sequence is synthesized)
taagccatgccagttggccttttttcgtgtggatcacagcatgatgttgaaatattttgcaacatttgaagtattctttgaagaaaatctttccaaattatttcttcacttcaaatctta

SEQ ID NO: 165798 - DNA, 120 bp, Artificial Sequence
  ENSG00000108239_17 (sequence is synthesized)
cagtcttacaccagatatatacttgatagactggatcttcacactatatagcaaatcactaccacttgatctggcctgtcgagtctgggatgtattttgcagagatggggaagaattttt

SEQ ID NO: 165799 - DNA, 120 bp, Artificial Sequence
  ENSG00000108239_18 (sequence is synthesized)
atttaggactggattaggaatcctccgattatatgaagatattctcctgcagatggactttattcatatagcacagtttctaactaaattgccagaagatatcacatcggaaaagctgtt

SEQ ID NO: 165800 - DNA, 120 bp, Artificial Sequence
  ENSG00000108239_19 (sequence is synthesized)
cagttgtattgcagccattcagatgcagaatagcaccaaaaaatggactcaggtctttgcatctgtaatgaaggatattaaagaaggagacaagaacagtagtcctgctttgaaaagcta

SEQ ID NO: 165801 - DNA, 120 bp, Artificial Sequence
  ENSG00000108239_20 (sequence is synthesized)
gtcttcaaaattgacagactaactgacatagaaaaagtggtttttggataaaggttttttgtttcctatgtaaaaggcgtggaagaaaatgttggagatacctaaaagaatcaagaggtg

SEQ ID NO: 165802 - DNA, 120 bp, Artificial Sequence
  ENSG00000108239_21 (sequence is synthesized)
gaaaactgctgattttacattttatggctgaagtaaatgaaataagtaacttattgacagtattaataaactattattttgtaggtagagtcatttttcaaaggaaaaagtttaagtggt

SEQ ID NO: 165803 - DNA, 120 bp, Artificial Sequence
  ENSG00000108239_22 (sequence is synthesized)
gagtttatattccacaatttggagtaaacaaaatgcaataaatttttaaaatagctttgaagatacttcaaatttttacatcttttcttttgtaacagttaccacaaagatattctggag

SEQ ID NO: 165804 - DNA, 120 bp, Artificial Sequence
  ENSG00000108239_23 (sequence is synthesized)
aaattatttaagtcactgaagatgtcatttatcttcattcacaagttggggcaaattcgagttacctaggaactggaaatgttggtgggagattgtttattgtttgtttagatgtttttc

SEQ ID NO: 165805 - DNA, 120 bp, Artificial Sequence
  ENSG00000108239_24 (sequence is synthesized)
catagtatggtgtccatttgttttttaagggaaattttttgtcttccttaaggaattcctatcactcagagaattttagccattctggttctagtctaacaaattattcatctaataatt

SEQ ID NO: 165806 - DNA, 120 bp, Artificial Sequence
  ENSG00000108239_25 (sequence is synthesized)
tgacattaagaaaactataaataactggtagaaggaaagtgctttgcacttcagtggattgaagacttgactttgagagtaagtccaaaaacatatatgatgtttctcagtgataagagt

SEQ ID NO: 165807 - DNA, 120 bp, Artificial Sequence
  ENSG00000108239_26 (sequence is synthesized)
aaaaagtaatgaatcctgagagttcttaaacagcatgctacttggcaagacttcatattttttagttacaattcttccactgtttaactccagtttgaaatttgaaatctaatatgtagc

SEQ ID NO: 165808 - DNA, 120 bp, Artificial Sequence
  ENSG00000108239_27 (sequence is synthesized)
taaatctgtgacttgtaaaactctatgcataatttttcctaatcagtggaaataagaataaaagaaaaaggtaaagttaattttttttctaagtctacatcctatctcttgattcagttg

SEQ ID NO: 165809 - DNA, 120 bp, Artificial Sequence
  ENSG00000108239_28 (sequence is synthesized)
cctgaagaagctgggtaaggagattagtcttgttattgattcttttatgtgtcagtgccatcttaatctcttcacatggtacactaaatgctgcctataacccatcctcatcttctttac

SEQ ID NO: 165810 - DNA, 120 bp, Artificial Sequence
  ENSG00000108239_29 (sequence is synthesized)
tcatcattgctttcttcaaggaaggtcttgatactgccctcgtctacctcactatccgctagtctagatagtgactctttggaaaattggtagcctctgaatgagttatccaacttctgc

SEQ ID NO: 165811 - DNA, 120 bp, Artificial Sequence
  ENSG00000108239_30 (sequence is synthesized)
ttcctcacattggccactttgcataggttcgggaacttagcaggttttaaatcatcatgcccatggaggtgaaatactttgaggaatgggaacatctcttcactgtgtttttggatcagc

SEQ ID NO: 165812 - DNA, 120 bp, Artificial Sequence
  ENSG00000108239_31 (sequence is synthesized)
cttctctcaaccgccaagaaatgcatgatttccctgccaactctaggaagtagtgctgcatgattgaatcattatttgatgaattctttcattgtaacatagggagtcattttcaaaaag

SEQ ID NO: 165813 - DNA, 120 bp, Artificial Sequence
  ENSG00000108239_32 (sequence is synthesized)
gtagatatgaacttaaattaaattgacttatgaatgctttgcctgtgggcccaacagtgtcatgaccctccaattgaaacatagcatgaattatttttatgtcgagttcttgaactgcta

SEQ ID NO: 165814 - DNA, 120 bp, Artificial Sequence
  ENSG00000108239_33 (sequence is synthesized)
atcaggtgtgtgtttccttgaagtccagagcaggatccaggtcagatgaaggaggtggtatgcctggcttaactgctgaaaatagagcattgaaactcttcacaatgtgctgcattgggt

SEQ ID NO: 165815 - DNA, 120 bp, Artificial Sequence
  ENSG00000108239_34 (sequence is synthesized)
ttctgcttggctttctcactgaaaagtaaattggggaaaatgctgcttttactattttgcattttatagcaacattaacagtcttttcccagtcaggtgctgtccagggaacatgtttcc

SEQ ID NO: 165816 - DNA, 120 bp, Artificial Sequence
  ENSG00000108239_35 (sequence is synthesized)
cttgggaggtctgaacagagtgacctggcttgatgtatttcctgagctctagtaccatatcatagaattagttaaatgtagtcaacagcaatgtcagaacaattgacattgtctttccaa

SEQ ID NO: 165817 - DNA, 120 bp, Artificial Sequence
  ENSG00000108239_36 (sequence is synthesized)
gagtgaatgcattggctttcggaactgctactagagacatacatgaggcagcgaacacatctttaggtgggggcaaggctatatctgattgacagagatctctgatctctaatgacatat

SEQ ID NO: 165818 - DNA, 120 bp, Artificial Sequence
  ENSG00000108239_37 (sequence is synthesized)
tgctattgtcctattatgtttaaatttgaacctaaatcacttgagtgttatgagtgatggctatataacatgctgtttggttagatttacagtgtgtttttatgttgcagtttagtttga

SEQ ID NO: 165819 - DNA, 120 bp, Artificial Sequence
  ENSG00000108239_38 (sequence is synthesized)
aacaacacttaagcacactatttctgttagtgtatatagttttcaaactaacaagcctgcgatccttgttagtgtagtgactgcctctttaggagtatggggccctagggtgtccatata

SEQ ID NO: 165820 - DNA, 120 bp, Artificial Sequence
  ENSG00000108239_39 (sequence is synthesized)
tttttaccccatgggtcattctagtctaaggactactagtagaaccctcaaaaggtaattgctattatagggacttacttattggagactggtaatataataaaatattgaaggagtggc

SEQ ID NO: 165821 - DNA, 120 bp, Artificial Sequence
  ENSG00000108239_40 (sequence is synthesized)
catggtcttagcaggttttagaatgaccttttaactccagtaactacttccttggtattggtatccttgatagagggaatataacatctggcagtaatctcattcaggttatactacctg

SEQ ID NO: 165822 - DNA, 120 bp, Artificial Sequence
  ENSG00000108239_41 (sequence is synthesized)
actaaatttaatcatactttcatgtatttgtttcctcagttggacctaagttactgtatttgtttttcttatttttttattattgtacagtttctttacctttcaagtataaatgtgtat

SEQ ID NO: 165823 - DNA, 120 bp, Artificial Sequence
  ENSG00000108239_42 (sequence is synthesized)
ataaaatgtaaatacaaagaattcactaaaaaccactcataacaattactgtgtaaataaaactggtaagcagagtaattacttgaaatgagtcttcattactttggggatatctgtttt

SEQ ID NO: 165824 - DNA, 120 bp, Artificial Sequence
  ENSG00000108239_43 (sequence is synthesized)
atttaactgcatctcaaggaaacaaaggaaataatctttgtttttgtttgccaaatttgtcttccaaggaatgcactaagccttcagtctttttagactgacagtactggcagctaaaat

SEQ ID NO: 165825 - DNA, 120 bp, Artificial Sequence
  ENSG00000108239_44 (sequence is synthesized)
attgtactgtatcttctcttgagcccagtatgtaggaaatatgtgataattcacatggtcagtatatggcagtttttgttgttgttgttacagtatattttcaattaaaaaaaaactttt

SEQ ID NO: 165826 - DNA, 120 bp, Artificial Sequence
  ENSG00000108239_45 (sequence is synthesized)
cctaaaatactcaaaataatgtgaaatttaatatggtgtttcatttgtttgtctactcaatatatatatttcttacttaatgttcctttagtccaggtctacaatgccttatttaaatgc

SEQ ID NO: 165827 - DNA, 120 bp, Artificial Sequence
  ENSG00000108239_46 (sequence is synthesized)
tctctctctctctctctctttctctgcttcagtttcattgatttttattgatccgtcatcaaattcactaatcctttcttctggtttatctagtctgctattaaatctaaatctgtgtaa

SEQ ID NO: 165828 - DNA, 120 bp, Artificial Sequence
  ENSG00000108239_47 (sequence is synthesized)
tgggcttttaatttcagatgtgctttgtaattgtagaatgttcacttggttctttttatacattctgtttctctgttgaaattcatcttcccatcccatgttccttccgccatcttttcc

SEQ ID NO: 165829 - DNA, 120 bp, Artificial Sequence
  ENSG00000108239_48 (sequence is synthesized)
tcttattttctttttaaaatttattattatttttttctctagcgcatatcagccagatattttctttaacatatttataacagatagtgtcattgcctgttaattccaatactgcatcat

SEQ ID NO: 165830 - DNA, 120 bp, Artificial Sequence
  ENSG00000108239_49 (sequence is synthesized)
ctgcaggtctgcctctgtcggctgtttttccccttgtttcccctttaaagtggttgtaagtcacattttctgcttctttgtatatcttaaatgtttaaattgtatgccagacattgtata

SEQ ID NO: 165831 - DNA, 120 bp, Artificial Sequence
  ENSG00000108239_50 (sequence is synthesized)
taaaaagaatgtagaaaccaaagctgaggtttcccctgcagagtaagctgctctttcctgttaggcagttcgattaagggcttatcacctcaattcaaccattaattgatctaggttggg

SEQ ID NO: 165832 - DNA, 120 bp, Artificial Sequence
  ENSG00000108239_51 (sequence is synthesized)
gcaaggttgtaggtttagatagacttagtttatcttgagtttcaaatttcttgatgggaaaaagtgtttttttttttttttttttgagatgctcaccctgtcgcccaggctggagtgcag

SEQ ID NO: 165833 - DNA, 66 bp, Artificial Sequence
  ENSG00000108239_52 (sequence is synthesized)
cctgacctcaggtgaaccaaagtgttctattttgactacaggtaatctccctccaatgatatgccc

SEQ ID NO: 165834 - DNA, 120 bp, Artificial Sequence
  ENSG00000108239_53 (sequence is synthesized)
ctattttgactacaggtaatctccctccaatgatatgccctctcaagaccttgtgactttggatgattttattctgcatttctagcccagccttctgcattcagaaaagtcccataggga

SEQ ID NO: 165835 - DNA, 120 bp, Artificial Sequence
  ENSG00000108239_54 (sequence is synthesized)
gccatgtgtagctcttctggtttctcttcctccaactagggtgactttgtcttcggcgagctcgatcctaagcccatacctagacctggcagatacccctaggaagaaaaatggacactg

SEQ ID NO: 165836 - DNA, 120 bp, Artificial Sequence
  ENSG00000108239_55 (sequence is synthesized)
gtgtctactcaccaaggaaagactcttacttttctggaatttaaatcctattgatctctctgtgtccatagctctctgatgattttttaaatgtgatatttgtaaatttttttcctagtt

SEQ ID NO: 165837 - DNA, 120 bp, Artificial Sequence
  ENSG00000108239_56 (sequence is synthesized)
gttaccatggaaatgatggtctgcccatatcttctgtaaaaactggaattagaaatcctttaccatataactttctgataaatgtatagctattttctttgtacaagagaataacaagtt

SEQ ID NO: 165838 - DNA, 120 bp, Artificial Sequence
  ENSG00000108239_57 (sequence is synthesized)
ctaacaaaagctatgtgacatttcttataatttcttgattattcagcttttaacttaaataacacatgctgtgtgatcattctgtatttataaaattggacttgttagagccaagtgatc

SEQ ID NO: 165839 - DNA, 120 bp, Artificial Sequence
  ENSG00000108242_0 (sequence is synthesized)
agagtcagaatcacaggtggattagtagggagtgttataaaagccttgaagtgaaagcccgcagttgtcttactaagaagagaagccttcaatggatccagctgtggctctggtgctctg

SEQ ID NO: 165840 - DNA, 120 bp, Artificial Sequence
  ENSG00000108242_1 (sequence is synthesized)
tctctcctgtttgtttctcctttcactctggaggcagagctctggaagagggaggctcccgtctggccccactcctctcccgattattggaaatatcctgcagttagatgttaaggacat

SEQ ID NO: 165841 - DNA, 120 bp, Artificial Sequence
  ENSG00000108242_2 (sequence is synthesized)
gagcaaatccttaaccaatttctcaaaagtctatggccctgtgttcactgtgtattttggcctgaagcccattgtggtgttgcatggatatgaagcagtgaaggaggccctgattgatca

SEQ ID NO: 165842 - DNA, 120 bp, Artificial Sequence
  ENSG00000108242_3 (sequence is synthesized)
tggagaggagttttctggaagaggaagttttccagtggctgaaaaagttaacaaaggacttggaatccttttcagcaatggaaagagatggaaggagatccggcgtttctgcctcatgac

SEQ ID NO: 165843 - DNA, 120 bp, Artificial Sequence
  ENSG00000108242_4 (sequence is synthesized)
tctgcggaattttgggatggggaagaggagcatcgaggaccgtgttcaagaggaagcccgctgccttgtggaggagttgagaaaaaccaatgcctcaccctgtgatcccactttcatcct

SEQ ID NO: 165844 - DNA, 120 bp, Artificial Sequence
  ENSG00000108242_5 (sequence is synthesized)
gggctgtgctccctgcaatgtgatctgctctgttattttccatgatcgatttgattataaagatcagaggtttcttaacttgatggaaaaattcaatgaaaacctcaggattctgagctc

SEQ ID NO: 165845 - DNA, 120 bp, Artificial Sequence
  ENSG00000108242_6 (sequence is synthesized)
tccatggatccaggtctgcaataatttccctgctctcatcgattatctcccaggaagtcataataaaatagctgaaaattttgcttacattaaaagttatgtattggagagaataaaaga

SEQ ID NO: 165846 - DNA, 120 bp, Artificial Sequence
  ENSG00000108242_7 (sequence is synthesized)
acatcaagaatccctggacatgaacagtgctcgggactttattgattgtttcctgatcaaaatggaacaggaaaagcacaatcaacagtctgaatttactgttgaaagcttgatagccac

SEQ ID NO: 165847 - DNA, 120 bp, Artificial Sequence
  ENSG00000108242_8 (sequence is synthesized)
tgtaactgatatgtttggggctggaacagagacaacgagcaccactctgagatatggactcctgctcctgctgaagtacccagaggtcacagctaaagtccaggaagagattgaatgtgt

SEQ ID NO: 165848 - DNA, 120 bp, Artificial Sequence
  ENSG00000108242_9 (sequence is synthesized)
ggacaggagtcacatgccctacacagatgctgtggtgcacgagatccagagatacattgacctcctccccaccaacctgccccatgcagtgacctgtgatgttaaattcaaaaactacct

SEQ ID NO: 165849 - DNA, 120 bp, Artificial Sequence
  ENSG00000108242_10 (sequence is synthesized)
catccccaagggcacgaccataataacatccctgacttctgtgctgcacaatgacaaagaattccccaacccagagatgtttgaccctggccactttctggataagagtggcaactttaa

SEQ ID NO: 165850 - DNA, 120 bp, Artificial Sequence
  ENSG00000108242_11 (sequence is synthesized)
gaaaagtgactacttcatgcctttctcagcaggaaaacggatgtgtatgggagagggcctggcccgcatggagctgtttttattcctgaccaccattttgcagaactttaacctgaaatc

SEQ ID NO: 165851 - DNA, 120 bp, Artificial Sequence
  ENSG00000108242_12 (sequence is synthesized)
tcaggttgacccaaaggatattgacatcacccccattgccaatgcatttggtcgtgtgccacccttgtaccagctctgcttcattcctgtctgaagaagggcagatagtttggctgctcc

SEQ ID NO: 165852 - DNA, 120 bp, Artificial Sequence
  ENSG00000108242_13 (sequence is synthesized)
tgtgctgtcacctgcaattctcccttatcagggccattggcctctcccttctctctgtgagggatattttctctgacttgtcaatccacatcttcccattccctcaagatccaatgaaca

SEQ ID NO: 165853 - DNA, 120 bp, Artificial Sequence
  ENSG00000108242_14 (sequence is synthesized)
tccaacctccattaaagagagtttcttgggtcacttcctaaatatatctgctattctccatactctgtatcacttgtattgaccaccacatatgctaatacctatctactgctgagttgt

SEQ ID NO: 165854 - DNA, 120 bp, Artificial Sequence
  ENSG00000108242_15 (sequence is synthesized)
cagtatgttatcactagaaaacaaagaaaaatgattaataaatgacaattcagagccatttattctctgcatgctctagataaaaatgattattatttactgggtcagttcttagatttc

SEQ ID NO: 165855 - DNA, 120 bp, Artificial Sequence
  ENSG00000108242_16 (sequence is synthesized)
tttcttttgagtaaaatgaaagtaagaaatgaaagaaaatagaatgtgaagaggctgtgctggccctcatagtgttaagcacaaaaagggagaaaggtaagagggtaggaaagctgtttt

SEQ ID NO: 165856 - DNA, 120 bp, Artificial Sequence
  ENSG00000108242_17 (sequence is synthesized)
agctaaatgccacctagagttattggaggtctgaatttggaaaaaaaaactatgtccaggagcagctgtaacctgtagggaaatactggaacaatcatccataagagggatgaacattaa

SEQ ID NO: 165857 - DNA, 120 bp, Artificial Sequence
  ENSG00000108242_18 (sequence is synthesized)
gtgtttgaattcatgctctgcttttgtgttactgtaaacacaagatcaagatttggataatctttttcctttgtgtttccaacttagatcatgtctaaatatatgctttcatatggctaa

SEQ ID NO: 165858 - DNA, 120 bp, Artificial Sequence
  ENSG00000108244_0 (sequence is synthesized)
gggaaatcctgagcgcaggccagggttgtttggttttgaggtgtgctgggatgaaaggcaccctggaagtggaaggtaaatgaacaatggaaaaacttcacggcaagattagaaagatac

SEQ ID NO: 165859 - DNA, 120 bp, Artificial Sequence
  ENSG00000108244_1 (sequence is synthesized)
ctgagcccaatacccgcctgatgtcgtgggccacacctccgggttaccaggggaagggaggaagcaaactgtcatattgatgtggctctaaacaacaacagtgtgcgaaggcccaggggc

SEQ ID NO: 165860 - DNA, 120 bp, Artificial Sequence
  ENSG00000108244_2 (sequence is synthesized)
actttgggattgaccaagaggaaacacaagttgcacaatgatacaatcttgttggtacaattgtcagagaagggaactcccacagcaaaggccataaaaccatccagggcagtctggggc

SEQ ID NO: 165861 - DNA, 120 bp, Artificial Sequence
  ENSG00000108244_3 (sequence is synthesized)
ggctcagttctgcggtgccagggagtggagcagagctcagccccgtcccaaacacagatgggaccatgaactccggacacagcttcagccagaccccctcggcctccttccatggcgccg

SEQ ID NO: 165862 - DNA, 120 bp, Artificial Sequence
  ENSG00000108244_4 (sequence is synthesized)
gaggtggctggggccggcccaggagcttccccagggctcccaccgtccatggcggtgcggggggagcccgcatctccctgtccttcaccacgcggagctgcccaccccctggagggtctt

SEQ ID NO: 165863 - DNA, 120 bp, Artificial Sequence
  ENSG00000108244_5 (sequence is synthesized)
ggggttctggaagaagcagccccctactaggcggaaatgggaaggccaccatgcagaatctcaacgaccgcctggcctcctacctggagaaggttcgcgccctggaggaggccaacatga

SEQ ID NO: 165864 - DNA, 120 bp, Artificial Sequence
  ENSG00000108244_6 (sequence is synthesized)
agctggaaagccgcatcctgaaatggcaccagcagagagatcctggcagtaagaaagattattcccagtatgaggaaaacatcacacacctgcaggagcagatagtggatggtaagatga

SEQ ID NO: 165865 - DNA, 120 bp, Artificial Sequence
  ENSG00000108244_7 (sequence is synthesized)
ccaatgctcagattattcttctcattgacaatgccaggatggcagtggatgacttcaacctcaagtatgaaaatgaacactcctttaagaaagacttggaaattgaagtcgagggcctcc

SEQ ID NO: 165866 - DNA, 120 bp, Artificial Sequence
  ENSG00000108244_8 (sequence is synthesized)
agagctcattctcatgaagaagcaccatgagcaggaaatggagaagcatcatgtgccaagtgacttcaatgtcaatgtgaaggtggatacaggtcccagggaagatctgattaaggtcct

SEQ ID NO: 165867 - DNA, 120 bp, Artificial Sequence
  ENSG00000108244_9 (sequence is synthesized)
ggaggatatgagacaagaatatgagcttataataaagaagaagcatcgagacttggacacttggtataaagaacagtctgcagccatgtcccaggaggcagccagtccagccactgtgca

SEQ ID NO: 165868 - DNA, 120 bp, Artificial Sequence
  ENSG00000108244_10 (sequence is synthesized)
gagcagacaaggtgacatccacgaactgaagcgcacattccaggccctggagattgacctgcagacacagtacagcacgaaatctgctttggaaaacatgttatccgagacccagtctcg

SEQ ID NO: 165869 - DNA, 120 bp, Artificial Sequence
  ENSG00000108244_11 (sequence is synthesized)
gtactcctgcaagctccaggacatgcaagagatcatctcccactatgaggaggaactgacgcagctacgccatgaactggagcggcagaacaatgaataccaagtgctgctgggcatcaa

SEQ ID NO: 165870 - DNA, 120 bp, Artificial Sequence
  ENSG00000108244_12 (sequence is synthesized)
aacccacctggagaaggaaatcaccacgtaccgacggctcctggagggagagagtgaagggacacgggaagaatcaaagtcgagcatgaaagtgtctgcaactccaaagatcaaggccat

SEQ ID NO: 165871 - DNA, 120 bp, Artificial Sequence
  ENSG00000108244_13 (sequence is synthesized)
aacccaggagaccatcaacggaagattagttctttgtcaagtgaatgaaatccaaaagcacgcatgagaccaatgaaagtttccgcctgttgtaaaatctattttcccccaaggaaagtc

SEQ ID NO: 165872 - DNA, 120 bp, Artificial Sequence
  ENSG00000108244_14 (sequence is synthesized)
cttgcacagacaccagtgagtgagttctaaaagatacccttggaattatcagactcagaaacttttattttttttttctgtaacagtctcaccagacttctcataatgctcttaatatat

SEQ ID NO: 165873 - DNA, 120 bp, Artificial Sequence
  ENSG00000108244_15 (sequence is synthesized)
tgcacttttctaatcaaagtgcgagtttatgagggtaaagctctactttcctactgcagccttcagattctcatcattttgcatctattttgtagccaataaaactccgcactagctgca

SEQ ID NO: 165874 - DNA, 120 bp, Artificial Sequence
  ENSG00000108244_16 (sequence is synthesized)
agccgtggcaggctcagccggggtccggggctgctaacaacggctacattcctcccccagggccaagggaaatcctgagcgcaggccagggttgtttggttttgaggtgtgctgggatga

SEQ ID NO: 165875 - DNA, 120 bp, Artificial Sequence
  ENSG00000108244_17 (sequence is synthesized)
aaggcaccctggaagtggaaggttcggtcattcattaattaattacatctataattgagggtttgttcttaagagcgagtcctttgaaagtactttccttcaaacagtgactgccacaaa

SEQ ID NO: 165876 - DNA, 120 bp, Artificial Sequence
  ENSG00000108244_18 (sequence is synthesized)
ggcatcagatattcaccaccttctcggctgcctcagcacagcaagctttattctgggacctgagatcctgttctgagctggctttcccttctccaggctcgctcaccctccctttagagg

SEQ ID NO: 165877 - DNA, 120 bp, Artificial Sequence
  ENSG00000108244_19 (sequence is synthesized)
taataagcacagctcttagcctgcacatctcaggctgattcgacagctacagaagaaaccaccacctggatgccaatccccttgtccttcaccctaaatagtctttagaaaaacatacaa

SEQ ID NO: 165878 - DNA, 120 bp, Artificial Sequence
  ENSG00000108244_20 (sequence is synthesized)
atatctaatgtttctaatttcaaggttagctagtcacatgtcaaatacaacaaccaaaatgcaatcataattaatgatgaattggtcaacagttttgttaatacacaatgtttacctaga

SEQ ID NO: 165879 - DNA, 120 bp, Artificial Sequence
  ENSG00000108244_21 (sequence is synthesized)
aaggaaatcaccacgtaccgacggctcctggagggagagagtgaagggtaaggcaaaggctggcacgagaggagcatgcgagggacctccagctcctgtgggtatatgtgtgcatctttg

SEQ ID NO: 165880 - DNA, 120 bp, Artificial Sequence
  ENSG00000108244_22 (sequence is synthesized)
ggttctgttagcaagagtcactctagcaagagaaaagttgtgttgagctactccagaagatacctatagctggctgtatttcactaagcagcaagtataattaatcaactaatactcaca

SEQ ID NO: 165881 - DNA, 120 bp, Artificial Sequence
  ENSG00000108244_23 (sequence is synthesized)
gtggctcccgcccccagactgcttctttattcattcctaacctttaccttggcagatgaaatataagattcatcaaccacatttgacagcccatggcaggtttcctgttttccatcgtcc

SEQ ID NO: 165882 - DNA, 120 bp, Artificial Sequence
  ENSG00000108255_0 (sequence is synthesized)
gatggagacccaggctgagcagcaggagctggaaacccttccaaccaccaagatggctcagaccaaccctacgccggggtccctggggccatggaagataaccatctatgatcaggagaa

SEQ ID NO: 165883 - DNA, 120 bp, Artificial Sequence
  ENSG00000108255_1 (sequence is synthesized)
ctttcagggcaagaggatggagttcaccagctcctgtccaaatgtctctgagcgcagttttgataatgtccggtccctgaaggtggaaagtggcgcctggattggttatgagcataccag

SEQ ID NO: 165884 - DNA, 120 bp, Artificial Sequence
  ENSG00000108255_2 (sequence is synthesized)
cttctgtgggcaacagtttatcctggagagaggagaataccctcgctgggatgcctggagtgggagtaatgcctaccacattgagcgtctcatgtccttccgccccatctgttcagctaa

SEQ ID NO: 165885 - DNA, 120 bp, Artificial Sequence
  ENSG00000108255_3 (sequence is synthesized)
ctctgacgactacccctccttgcaagccatgggctggttcaacaacgaagtcggctccatgaagatacaaagtggggcctgggtttgctaccaatatcctggatatcgtgggtatcagta

SEQ ID NO: 165886 - DNA, 120 bp, Artificial Sequence
  ENSG00000108255_4 (sequence is synthesized)
tatcttggaatgtgaccatcatggaggagactataaacattggagagagtggggctctcatgcccagacttcgcagatccaatcgattcgccgaatccaacagtagctgattaaaagctc

SEQ ID NO: 165887 - DNA, 120 bp, Artificial Sequence
  ENSG00000108255_5 (sequence is synthesized)
caagtacgataattcctcaagcatgagaccttgctaagcactctagaataagttttatgttctgctcacagacattgctttcaaatgttagctgctgaaatccacaataaacgtcattta

SEQ ID NO: 165888 - DNA, 120 bp, Artificial Sequence
  ENSG00000108256_0 (sequence is synthesized)
agatatactgagtgagccctgagaagcagtctcagatcctgacggtgcagcagcccgcagcctcagccagggagtcccagccgctttcaatggaggagaagcccggccagccacagcctc

SEQ ID NO: 165889 - DNA, 120 bp, Artificial Sequence
  ENSG00000108256_1 (sequence is synthesized)
agcaccatcacagccaccaccatccgcaccatcaccctcagcagcagcagcagcagccgcaccaccaccaccattattatttctacaaccacagccacaaccaccaccaccaccatcatc

SEQ ID NO: 165890 - DNA, 120 bp, Artificial Sequence
  ENSG00000108256_2 (sequence is synthesized)
accagcagcctcaccaatacctgcagcatggagccgagggcagccccaaggcccagccaaagccgctgaaacatgagcagaaacacaccctccagcagcaccaggaaacgccgaagaaga

SEQ ID NO: 165891 - DNA, 120 bp, Artificial Sequence
  ENSG00000108256_3 (sequence is synthesized)
aaacaggctatggtgaactaaacggtaatgctggagaaagagaaatatctttaaagaacctgagttctgatgaagccaccaaccctatttccagggtcctcaatggcaaccagcaagttg

SEQ ID NO: 165892 - DNA, 120 bp, Artificial Sequence
  ENSG00000108256_4 (sequence is synthesized)
tagacactagcctgaagcagactgtaaaggccaacacctttgggaaagcaggaattaaaaccaagaatttcattcagaaaaacagtatggacaaaaagaatgggaagtcttatgaaaata

SEQ ID NO: 165893 - DNA, 120 bp, Artificial Sequence
  ENSG00000108256_5 (sequence is synthesized)
aatctggagagaatcagtctgtagataagtctgatactataccaattccaaatggtgtggtaacaaataattctggttatattactaatggttatatgggtaaaggagcagataatgatg

SEQ ID NO: 165894 - DNA, 120 bp, Artificial Sequence
  ENSG00000108256_6 (sequence is synthesized)
gtagtggatctgagagcggatatacaactcctaaaaaaaggaaagctaggcgcaatagtgccaagggttgtgaaaaccttaatatagtgcaggacaaaataatgcaacaagagaccagtg

SEQ ID NO: 165895 - DNA, 120 bp, Artificial Sequence
  ENSG00000108256_7 (sequence is synthesized)
tcccaaccttaaaacagggacttgaaactttcaagcctgactatagtgaacaaaagggaaatcgagtagatggttcgaagcccatttggaagtatgaaactgggcctggaggaacaagtc

SEQ ID NO: 165896 - DNA, 120 bp, Artificial Sequence
  ENSG00000108256_8 (sequence is synthesized)
gaggaaaacctgctgtgggtgatatgcttcggaaaagctcagatagtaaacctggtgtgagcagcaaaaagtttgatgatcggcccaaaggaaagcatgcttcagctgttgcctccaaag

SEQ ID NO: 165897 - DNA, 120 bp, Artificial Sequence
  ENSG00000108256_9 (sequence is synthesized)
aggactcgtggaccctatttaaaccacccccagtttttccagtggacaatagcagtgctaaaatagttcctaaaataagttatgcaagcaaagttaaggaaaacctcaacaaaactatac

SEQ ID NO: 165898 - DNA, 120 bp, Artificial Sequence
  ENSG00000108256_10 (sequence is synthesized)
agaactcttctgtgtcaccaacttcatcttcatcatcttcatcatctaccggggaaactcagacccaatcatcaagtcgcttatcccaggtccctatgtcagcgctgaaatctgttactt

SEQ ID NO: 165899 - DNA, 120 bp, Artificial Sequence
  ENSG00000108256_11 (sequence is synthesized)
ctgccaacttttctaatgggcctgttttagcagggactgatggaaatgtttatcctccagggggtcagccactgctaactactgctgctaatactctaacacccatctcttctgggacag

SEQ ID NO: 165900 - DNA, 120 bp, Artificial Sequence
  ENSG00000108256_12 (sequence is synthesized)
attcagttctccaggacatgagtctaacttcagcagctgttgaacaaattaagactagcctttttatctatccttcaaatatgcaaactatgctgttgagcacagcacaagtggatctgc

SEQ ID NO: 165901 - DNA, 120 bp, Artificial Sequence
  ENSG00000108256_13 (sequence is synthesized)
cctctcagacagatcagcaaaacctgggggatatcttccagaatcagtggggtttatcatttataaatgagcccagtgctggccctgagactgttactgggaagtcatcagagcataaag

SEQ ID NO: 165902 - DNA, 120 bp, Artificial Sequence
  ENSG00000108256_14 (sequence is synthesized)
tgatggaggtgacatttcaaggagaatatcctgctactttggtttcacagggtgctgaaataattccctcaggaactgagcatcctgtgtttcccaaggcttacgagctggagaaacgga

SEQ ID NO: 165903 - DNA, 120 bp, Artificial Sequence
  ENSG00000108256_15 (sequence is synthesized)
ctagtcctcaagttctgggtagcattctaaaatctgggactactagtgagagtggagccttatccttggaacccagtcatataggtgacctgcagaaagcagacaccagtagtcaaggtg

SEQ ID NO: 165904 - DNA, 120 bp, Artificial Sequence
  ENSG00000108256_16 (sequence is synthesized)
ctttagtgtttctctcaaaggactacgagatagaaagtcaaaatcctctggcctctcctacgaacactttgttaggctctgccaaagaacagagataccagagaggcctagaaaggaatg

SEQ ID NO: 165905 - DNA, 120 bp, Artificial Sequence
  ENSG00000108256_17 (sequence is synthesized)
atagctggggttcttttgacctgagggctgctattgtatatcacactaaagaaatggaatctatttggaatttgcagaagcaagatcccaaaaggataatcacttacaatgaagccatgg

SEQ ID NO: 165906 - DNA, 120 bp, Artificial Sequence
  ENSG00000108256_18 (sequence is synthesized)
atagtccagatcaatgaaggaccagactgcctattcgtaacctttctgcagcattagagccatcgttcatgggggacacaaggcttttatgctcctagatcttcaacgcagcagaggaac

SEQ ID NO: 165907 - DNA, 120 bp, Artificial Sequence
  ENSG00000108256_19 (sequence is synthesized)
aacgcagcagaggaaccataagtagaatcacaggataatatatacaaatatatatatatacatatatatatatatagttatttaaaaaaggcaactgaaagtaattagacttcttaagga

SEQ ID NO: 165908 - DNA, 120 bp, Artificial Sequence
  ENSG00000108256_20 (sequence is synthesized)
gagactacacatggttatttaatctccggtactgaataggttttttttcttctgttagtttttgtttttaagtgtgaatgcaagtgattaatgaatacagacttaacaagtgtggttcta

SEQ ID NO: 165909 - DNA, 120 bp, Artificial Sequence
  ENSG00000108256_21 (sequence is synthesized)
aagttcctgctgtcatcaacttgggcaacaaatgacccactggaaaggcaaatccacttaaaagatctctgtatcttgttctgtgactgaagtgatacactaatcacggggaacccagaa

SEQ ID NO: 165910 - DNA, 120 bp, Artificial Sequence
  ENSG00000108256_22 (sequence is synthesized)
tgattcaacattttccccccactcctcccttgatctttttggttttactttaattaagccctgcgagaatgctggataaatgccttgaagttagcagggtgtatttttttagcgaatatg

SEQ ID NO: 165911 - DNA, 120 bp, Artificial Sequence
  ENSG00000108256_23 (sequence is synthesized)
atttgcatgtcttgccaggagttaagcggcctctggggtgttggggaaatactttatttctttccatttattttttgtggggcggggataggggagggcattgaagttctacaattctgg

SEQ ID NO: 165912 - DNA, 120 bp, Artificial Sequence
  ENSG00000108256_24 (sequence is synthesized)
aatagttagttgatggtacatagttaacttggcttcggttacatattggactttaacaactgaagaatctatgcgtgtcatttaaagaaaagttgcagaacaagcaattggcttagatat

SEQ ID NO: 165913 - DNA, 120 bp, Artificial Sequence
  ENSG00000108256_25 (sequence is synthesized)
acaatctggaaaaatattcctgtgcccatattttaatgtaattgtataactgggagcaaaaatatattctgcttttcaactgtaggtgctccagacttgctctccgtcactaacactaaa

SEQ ID NO: 165914 - DNA, 120 bp, Artificial Sequence
  ENSG00000108256_26 (sequence is synthesized)
tgtgctgttttccttgtttttcatcaaacatttaagacaaacttagacctttctgtaaattatcttttaatttctcagcaaaatctaaaaggggaagaaaaaagtccatgaaaactaaaa

SEQ ID NO: 165915 - DNA, 120 bp, Artificial Sequence
  ENSG00000108256_27 (sequence is synthesized)
cttttcatgtttttagccagtgagaagataataaaccctgactgtagaaggtgtgttttcatgcaaactatacttctgagcttgttagcttctaattatatcttaataaatatattttat

SEQ ID NO: 165916 - DNA, 120 bp, Artificial Sequence
  ENSG00000108256_28 (sequence is synthesized)
tactagagcaagatgggtttttaaggaaaataatgtgaaattctggaaattttctttggggcagagaagagcattagccctgtcttatcattacattgccatcctgttgcactgcagctt

SEQ ID NO: 165917 - DNA, 120 bp, Artificial Sequence
  ENSG00000108256_29 (sequence is synthesized)
gtgtatagcatgctaaaataaatttttgtgtgtgtgtgcagaaattaagggtccaattgagattgggtgatgttagtaacataataacaagttgtctggcctgacacagcatcacatcac

SEQ ID NO: 165918 - DNA, 120 bp, Artificial Sequence
  ENSG00000108256_30 (sequence is synthesized)
acacacagaaattagtatatccatgtatgtcaaatacaggttaaaatatcagggcatttatataaagagttgtagtcttctgataaaagtagactggatcccctggggtatttggggaga

SEQ ID NO: 165919 - DNA, 120 bp, Artificial Sequence
  ENSG00000108256_31 (sequence is synthesized)
aagtaactactttggctctacccctagaaatgtccagttttgagtgactgtagtatggatgggttttcttgttttgttgattatttgaggcttttaaaacaagtagttcatgaaagaagc

SEQ ID NO: 165920 - DNA, 120 bp, Artificial Sequence
  ENSG00000108256_32 (sequence is synthesized)
tgttggactcaacatagagtagagtaactatctttttagtctggatttctgccctgcttagattttaaaagtataagcatggattgccaattccacttgatgtaaacaaaactttttttt

SEQ ID NO: 165921 - DNA, 120 bp, Artificial Sequence
  ENSG00000108256_33 (sequence is synthesized)
atacataatatatatatatatatataaaataacttattgtatcagtccaggttcagaaacttgtggtaggccagttccagatagtttcatttcacctgtaaactgtatcactttgactga

SEQ ID NO: 165922 - DNA, 120 bp, Artificial Sequence
  ENSG00000108256_34 (sequence is synthesized)
tattgtaattttcaaatgtataatatgtttacagatgtgccctgcatttagtctgccttgttcctattttgatttttgttgagtctcctgcctgcttgccaaaagctaggatgcttcagg

SEQ ID NO: 165923 - DNA, 120 bp, Artificial Sequence
  ENSG00000108256_35 (sequence is synthesized)
cccatgtacaattgaaagcagaggcatccttgagctttaaagcattgaacaaactggaaaatgcaacataccacataactgaagtgaaaaaagtctgtgtttttgtgtttttttaaataa

SEQ ID NO: 165924 - DNA, 120 bp, Artificial Sequence
  ENSG00000108256_36 (sequence is synthesized)
aaattttcaaaaagttaaaaaaaaagacatataaggttgattaaagggaaaaaaggctccagtttgttttacaggttttaaagttctgctgtgtgttcaattgccttgtgtaaccacttg

SEQ ID NO: 165925 - DNA, 120 bp, Artificial Sequence
  ENSG00000108256_37 (sequence is synthesized)
tcgccttagggccagattcccctctctagtccccttttttaaatgtccattttgcttgcctggaattttaaagttcttccgtctcacaactcacaagaaactttctgggtttgtgacata

SEQ ID NO: 165926 - DNA, 120 bp, Artificial Sequence
  ENSG00000108256_38 (sequence is synthesized)
cagaggttgaattgagtatatatttgaaaaggaaaaaacaaaaaacaaacccagaccccacctgaattgggctttttaacttagaagcaacacttgattaaacatctttagaaagctatt

SEQ ID NO: 165927 - DNA, 120 bp, Artificial Sequence
  ENSG00000108256_39 (sequence is synthesized)
gcttttctaatttccttccatatccctcaggcctcagtgttcagagaagccaaaaagaatgtatcacttctctgtctgtccaaaggtttttgagagtctcacttctaaatgaaacaatgc

SEQ ID NO: 165928 - DNA, 120 bp, Artificial Sequence
  ENSG00000108256_40 (sequence is synthesized)
aacatttcactttgatttctccactgaaatttccttgattatatggttagaggtatgtagttaggaatgtctgttaactttctgagaaccctagtgccccatcatattaactgtcagtat

SEQ ID NO: 165929 - DNA, 120 bp, Artificial Sequence
  ENSG00000108256_41 (sequence is synthesized)
tttgggggcattaggttaatagacttaattgcctaggtacaagcaggactttgggacaaatctctttgtgctgtttggtaacacttaactctatttgttgcaatctttctccttaggtcc

SEQ ID NO: 165930 - DNA, 120 bp, Artificial Sequence
  ENSG00000108256_42 (sequence is synthesized)
tcacacaattccttacagagcacttattaaaaaaaaatcttaagagttgatctgttttctgattattttgtgtaagcttctaaacaaacttcagctgtgattaatttagcacatttaaat

SEQ ID NO: 165931 - DNA, 120 bp, Artificial Sequence
  ENSG00000108256_43 (sequence is synthesized)
aacgtgttattgtttggtataaagaattttccttcaactcagagtattagtactgtagcataaaccaaatacagtctagaggggatttttaacatccctccattataaagactgaaaaag

SEQ ID NO: 165932 - DNA, 120 bp, Artificial Sequence
  ENSG00000108256_44 (sequence is synthesized)
gggtgtgtgtgtgtgtgtgtgtttatgtatgtatgtatgtgtgtgtgaggaaaagatggagatattaaaaattagtaaatgaatgtgtataagacattagtattcagagaatgaacttgt

SEQ ID NO: 165933 - DNA, 120 bp, Artificial Sequence
  ENSG00000108256_45 (sequence is synthesized)
aatggcactaagaatgaaattatgacctatttttttaatagctatgaagatactaattatgggtgaagatttctttttaaatctgttttgattattgtaggcttctgtgtcacataccac

SEQ ID NO: 165934 - DNA, 120 bp, Artificial Sequence
  ENSG00000108256_46 (sequence is synthesized)
tcttgtaggtgtcctcaataatccccttttcccacaaaatacacagggtgtattatctttctctttattcacccccactttgctgaactgaagttaattacatagcctttcttctaacct

SEQ ID NO: 165935 - DNA, 120 bp, Artificial Sequence
  ENSG00000108256_47 (sequence is synthesized)
ccttagtaatgaaccttcacataaagtgtatttacagcgtctgtggtagccagcccttcctcctctactttctaggaggggatagccaataactaggaatttaatgacagattttttttt

SEQ ID NO: 165936 - DNA, 120 bp, Artificial Sequence
  ENSG00000108256_48 (sequence is synthesized)
ctttgaaataaatggccagagtttctccattttagaattttgttgtcctccttaatcatctgcttacctagtcattactcaatctgcagaaacttcataaaggaaaagtgctgcattgtt

SEQ ID NO: 165937 - DNA, 120 bp, Artificial Sequence
  ENSG00000108256_49 (sequence is synthesized)
tttacaaataacagtttgtagggaaaatatgacaaacctcaactatgggagttgtccacaatacaaaattttgaaaaaacattacatagtgataatatcatacttggttgttaggcttgt

SEQ ID NO: 165938 - DNA, 120 bp, Artificial Sequence
  ENSG00000108256_50 (sequence is synthesized)
tgcttccccacatcagaggcatctaatgatttatcttttgtaattgctgtgaacttttttaaataagccatttagtgtgaaattgtcatgtatcaaatggctattggaaatggactttac

SEQ ID NO: 165939 - DNA, 120 bp, Artificial Sequence
  ENSG00000108256_51 (sequence is synthesized)
tcaattttaattccactgtaaataaggacggagtcattcctacaaggctctcttcagagaaatagattaaaagtccaatttccaggtattattagtatagttatgccgctgggccacatc

SEQ ID NO: 165940 - DNA, 120 bp, Artificial Sequence
  ENSG00000108256_52 (sequence is synthesized)
ctcaacaacagctgatccctcttgtataaatatgttaactgtgcagaacagttatgttatgggacaaatataatggtcattatggtcagattggttgatgccacaccagtcaaggtagag

SEQ ID NO: 165941 - DNA, 120 bp, Artificial Sequence
  ENSG00000108256_53 (sequence is synthesized)
tctgatagggcagtatcttaataaccctacccatgacttaactgttggatttgaaaggaaaacgtaggatttgctcttgtccccttacccgccacaaaattttgataatttgtttaaaag

SEQ ID NO: 165942 - DNA, 120 bp, Artificial Sequence
  ENSG00000108256_54 (sequence is synthesized)
ggagaggcagaggaaaagactagaagcataaatagctgctttaggtttgccagaggcacatagcttaacattagttcttaatatcgatgttatttttactaatgtaattaatcaacagag

SEQ ID NO: 165943 - DNA, 120 bp, Artificial Sequence
  ENSG00000108256_55 (sequence is synthesized)
caccaagattctttcatggtgaaaagggtgggcttctgttttggtatcttaaaatgtttcttttaaaatatacatcacctgtgtgagaaccaggaccacctgggagagtgatgaatcatt

SEQ ID NO: 165944 - DNA, 120 bp, Artificial Sequence
  ENSG00000108256_56 (sequence is synthesized)
ggctccactcaaaagcattgctttactgagttttaaatttcacactgttttgccgctcaagaaaggtcttaaagtagttaaaggatgccagcaatagtgcgaatagaattttcggttgtc

SEQ ID NO: 165945 - DNA, 120 bp, Artificial Sequence
  ENSG00000108256_57 (sequence is synthesized)
tgcataataaaaacacccattgcagcatgattggtatgttgctcttgcattattgggaatggtaaatcagttatgggctagaaactatggaatggccgtcctcatatgtgatgggattgc

SEQ ID NO: 165946 - DNA, 120 bp, Artificial Sequence
  ENSG00000108256_58 (sequence is synthesized)
tgattcagacttccctattttccatacaattttgttatgtgcagagttctaaagccattttataatactgcagtatcccccccccccccacctttttttttttgagacggactgtctgtt

SEQ ID NO: 165947 - DNA, 120 bp, Artificial Sequence
  ENSG00000108256_59 (sequence is synthesized)
tgagccaccgtgcccggccaagtatctcttttctacagccttattaaactaactacaaacatttattttccaatttagttttactttcagtgcatatcaaagttgttgtactcttcagac

SEQ ID NO: 165948 - DNA, 120 bp, Artificial Sequence
  ENSG00000108256_60 (sequence is synthesized)
caacaaattaacttgagggcaaattacatagctttccatgtacccttttttcctcaggtgctaatcaaaggctctgaaaatggatactgctttagtgatgtctgctttattcttaaaatg

SEQ ID NO: 165949 - DNA, 120 bp, Artificial Sequence
  ENSG00000108256_61 (sequence is synthesized)
cttatttcttttgctagatgtaaagatttggtgttaacaaaagtggttttaatatgtaaatatgaatgaatgcctttagtttaccctgtttgtctattattaatctgttttcatttatcc

SEQ ID NO: 165950 - DNA, 120 bp, Artificial Sequence
  ENSG00000108256_62 (sequence is synthesized)
ttcatagaggaggatcctttcatgatcttgaatacatttcattagatattgttgcattttaagaatgaaaatacaactgttttctgtcttagattaatcctgctgctatgagaaactgaa

SEQ ID NO: 165951 - DNA, 120 bp, Artificial Sequence
  ENSG00000108256_63 (sequence is synthesized)
aatcaagaatgtgatgcactttttacattactatataccatacatataccataggttgctttgatacctttcctgtagcacagccactaacaagagtgaatgaattataaaattcttttt

SEQ ID NO: 165952 - DNA, 120 bp, Artificial Sequence
  ENSG00000108256_64 (sequence is synthesized)
gggagggaatcaatacaagtaactaattcttagctgatattgtcctatgaaggacaataacttaggaatataagaattctgttaatagtacactttttggccttaaatgtcttctactac

SEQ ID NO: 165953 - DNA, 120 bp, Artificial Sequence
  ENSG00000108256_65 (sequence is synthesized)
tgaaaatagtttaaatcttagctttgtttctattattccctctctctgcctcagaaagaggaattgggaagaatggcttaaaggacgtggtgtcattgatttgttgctgatcttttagaa

SEQ ID NO: 165954 - DNA, 120 bp, Artificial Sequence
  ENSG00000108256_66 (sequence is synthesized)
aacatttgtctatgtaagctggggacttattttttgtttgtatatagaggggaaatagtgctgccctgaaccaatcagatttagtttaaatcaaatcaatcaaaactccagctgtttctc

SEQ ID NO: 165955 - DNA, 120 bp, Artificial Sequence
  ENSG00000108256_67 (sequence is synthesized)
ttgtctttttacttagcaaaggaaaactttagtgaatgctacttgacaagaagaaaagtcatttctcaagcacatacccaaacttgaaggtgattgaacccaaaataatgggtgggaaac

SEQ ID NO: 165956 - DNA, 120 bp, Artificial Sequence
  ENSG00000108256_68 (sequence is synthesized)
accaaatgaggtggaggaatgagaaagatgtgtgggccaaagctatctggttatattttgatgttgccaatatcgcaaagccaaaattttaatttgcttatttaatatatttgttggcca

SEQ ID NO: 165957 - DNA, 120 bp, Artificial Sequence
  ENSG00000108256_69 (sequence is synthesized)
gagatctatttttatatcaatgtgccttgcatgtatattaaaaaaaaaaaattggaaacgccatgtagtaatgcctgagatagtcgatggttcttaccacctcactaatttttatgcagt

SEQ ID NO: 165958 - DNA, 120 bp, Artificial Sequence
  ENSG00000108256_70 (sequence is synthesized)
atgaaatgctcattctattgcccaactggtgctctctgtttaaagttacagatcttgcgaaactggaactattttataagctggggaagtgatttactttttttgttgtatcttttttgt

SEQ ID NO: 165959 - DNA, 120 bp, Artificial Sequence
  ENSG00000108256_71 (sequence is synthesized)
tcttagtctgttagtggctgtcctgtagtgggaaatagtaaaaggattcttcactcccttctcccctcagcaccttcttcaagtaaacatttcttgtgtgctttgaaaaaagtttcagct

SEQ ID NO: 165960 - DNA, 120 bp, Artificial Sequence
  ENSG00000108256_72 (sequence is synthesized)
tgctgtctcttttagtgttttaaagaagtgttatacaaagcattgtttgcaaaatatagggagataatggagtccactttaatttggaattctgtgtgagctatgatccaagttatcagc

SEQ ID NO: 165961 - DNA, 120 bp, Artificial Sequence
  ENSG00000108256_73 (sequence is synthesized)
tctttccaactttaaaaattttgttaaaagcaccttgcttagaaaattttaaatatttatgtctgcaacaattgtctcaaaataataaactgtgcaattcttgtcattaaaaaaaaaaaa

SEQ ID NO: 165962 - DNA, 120 bp, Artificial Sequence
  ENSG00000108256_74 (sequence is synthesized)
gatctgaattttccctaatgtgacttgttagtttctctctgtatttcctgccagtgtaaatgtgaaagctttgcttgcattacgttttagaaatgcattttgcacactcgaattttgccg

SEQ ID NO: 165963 - DNA, 120 bp, Artificial Sequence
  ENSG00000108256_75 (sequence is synthesized)
aagctccgtgaaaaggttagatctaagtagatgaataaagctatgcacatgttttgaaagtttaatttgtgtgtcattaccaaaagtgaccgatttgtccttactactttgctgttgtta

SEQ ID NO: 165964 - DNA, 120 bp, Artificial Sequence
  ENSG00000108256_76 (sequence is synthesized)
gctttaccatctttggaaacttggctcaaagttacatagttctgggctagctcatcagtggaactaggagagaggaaaactggcacctattttaataaagttcaatttaaacgagagctt

SEQ ID NO: 165965 - DNA, 120 bp, Artificial Sequence
  ENSG00000108256_77 (sequence is synthesized)
gacttgtatctattaaagagcttttcttgaaacagggcagttttatcagctttacaaatcattggatgctcttccttagtaatattttggtttatttgatcaaatagaaatggaaagtaa

SEQ ID NO: 165966 - DNA, 120 bp, Artificial Sequence
  ENSG00000108256_78 (sequence is synthesized)
ttcaaactgaaagacccttttttgtcatatggaacttggtgacgattttttgtcttaaagctggtttaaaggtaggataggcttttacctttattgctttagcataaatttggtttactg

SEQ ID NO: 165967 - DNA, 120 bp, Artificial Sequence
  ENSG00000108256_79 (sequence is synthesized)
aattgactggcttgagattagaattattcagttgtttgtaagatcaaagcactggttgttttaaagataacgtgtatcttttaaaaaattgcccaagctgattagaacaagtttaggagt

SEQ ID NO: 165968 - DNA, 120 bp, Artificial Sequence
  ENSG00000108256_80 (sequence is synthesized)
tgggtacatttggttcaagtgctgcaatctgtatgtactaaatagctttactttgtgtatgtgtacttataatgtgtagatgtactactacccaggttttgtcaaatcatcttttttaaa

SEQ ID NO: 165969 - DNA, 120 bp, Artificial Sequence
  ENSG00000108256_81 (sequence is synthesized)
gtttttttttttttaattggttcaggacctttgtaggagaggctaatatgtttaagtagaagatattactgatagcattttccccatgctcctacataaaaaataaatatttccatttta

SEQ ID NO: 165970 - DNA, 120 bp, Artificial Sequence
  ENSG00000108256_82 (sequence is synthesized)
tagctttttcaatatacagaagagggttacttcttcatcaagtatattgttgcctttgaggacacagcaaaacccttctatatgtatcttcattgatagtggcagttaaaaactaagtta

SEQ ID NO: 165971 - DNA, 120 bp, Artificial Sequence
  ENSG00000108256_83 (sequence is synthesized)
tccagttaagacttaaaaggtgacccatattaattgcatggccttaaaaggcagaaatgcaggagtgtagcaagcatcattttagatggctatggttcctcttccgcatctgtcagtagt

SEQ ID NO: 165972 - DNA, 120 bp, Artificial Sequence
  ENSG00000108256_84 (sequence is synthesized)
tcacttatgttcagtcttagaacctactggaggagtgaagtaatttctctgtctcgtgcagaggcactaaggagctgagttacctcttaatctgggggaatggataataagtggagtaca

SEQ ID NO: 165973 - DNA, 120 bp, Artificial Sequence
  ENSG00000108256_85 (sequence is synthesized)
gttatgttaaaggatgttccccccgctcaaaaaaaagtttcaatgtttgttttgcccagtcaaaaatataggtcttttctacatataagaacagtcaccagaaattttcccttttgctaa

SEQ ID NO: 165974 - DNA, 120 bp, Artificial Sequence
  ENSG00000108256_86 (sequence is synthesized)
atgcttaggtatttgctatagctgtttctgatgtcatggattctgaggaagtgtcatttacgtgatgatcttcctttattgatgtcttcatcatgttcagtgttttaaaaatataaatta

SEQ ID NO: 165975 - DNA, 120 bp, Artificial Sequence
  ENSG00000108256_87 (sequence is synthesized)
caaacactctacaaccatacccagatttacttattttatcagaaaaaaaacttgagaaatttgtagatcaaattgagagacaataagtgtacattgttgaataaaaaattttaaagtttc

SEQ ID NO: 165976 - DNA, 80 bp, Artificial Sequence
  ENSG00000108262_0 (sequence is synthesized)
ccgccgcccgcgccccccacgctggcccagagggctgcggccgcgtcgccgctgaggatgtcccgaaaggggccgcgagc

SEQ ID NO: 165977 - DNA, 120 bp, Artificial Sequence
  ENSG00000108262_1 (sequence is synthesized)
ccgctgaggatgtcccgaaaggggccgcgagcggaggtgtgtgcggactgcagcgccccggaccctggctgggcatccatcagcaggggtgtgctggtgtgtgacgagtgctgcagcgtg

SEQ ID NO: 165978 - DNA, 120 bp, Artificial Sequence
  ENSG00000108262_2 (sequence is synthesized)
caccggagcctgggacgccacatctccattgtcaagcaccttcgccacagcgcctggcctcccacgctgctgcagatggtgcacacgcttgccagcaacggggccaactccatctgggag

SEQ ID NO: 165979 - DNA, 120 bp, Artificial Sequence
  ENSG00000108262_3 (sequence is synthesized)
cactccctgctggaccccgcacaagtgcagagcggccggcgtaaagccaacccccaagacaaagtccaccccatcaagtcagagttcatcagggccaagtaccagatgctggcatttgtg

SEQ ID NO: 165980 - DNA, 120 bp, Artificial Sequence
  ENSG00000108262_4 (sequence is synthesized)
cacaagcttccctgccgggacgatgatggagtcaccgccaaagacctcagcaagcaactacactcgagcgtgcggacaggcaacctggagacatgtctgcgcctgctctccctgggtgcc

SEQ ID NO: 165981 - DNA, 120 bp, Artificial Sequence
  ENSG00000108262_5 (sequence is synthesized)
caggccaacttcttccacccagagaagggcaccacacctctgcacgtggctgccaaggcaggacagacactgcaggccgagctgcttgtagtgtatggggctgaccctggctcccctgat

SEQ ID NO: 165982 - DNA, 120 bp, Artificial Sequence
  ENSG00000108262_6 (sequence is synthesized)
gttaatggccgcacacccattgactatgccaggcaggcggggcaccatgagctggcggaaaggctggttgagtgccaatatgagctcactgaccggctggccttctacctctgtggacgc

SEQ ID NO: 165983 - DNA, 120 bp, Artificial Sequence
  ENSG00000108262_7 (sequence is synthesized)
aagccggatcacaagaatgggcattacatcatcccacagatggctgacagccttgacttatccgaattggccaaagctgctaagaagaagctgcaggcgctcagcaaccggctttttgag

SEQ ID NO: 165984 - DNA, 120 bp, Artificial Sequence
  ENSG00000108262_8 (sequence is synthesized)
gaactcgccatggacgtgtatgacgaggtggatcgaagagaaaatgatgcagtgtggctggctacccaaaaccacagcactctggtgacagagcgcagtgccgtgcccttcctgcctgtt

SEQ ID NO: 165985 - DNA, 120 bp, Artificial Sequence
  ENSG00000108262_9 (sequence is synthesized)
aacccggaatactcagccacgcggaatcaggggcgacaaaagctggcccgctttaatgcccgagagtttgccaccttgatcatcgacattctcagtgaggccaagcggagacagcagggc

SEQ ID NO: 165986 - DNA, 120 bp, Artificial Sequence
  ENSG00000108262_10 (sequence is synthesized)
aagagcctgagcagccccacagacaacctcgagctgtctctgcggagccagagtgacctcgacgaccaacacgactacgacagcgtggcctctgacgaggacacagaccaggagcccctg

SEQ ID NO: 165987 - DNA, 120 bp, Artificial Sequence
  ENSG00000108262_11 (sequence is synthesized)
cgcagcaccggcgccactcggagcaaccgggcccggagcatggactcctcggacttgtctgacggggctgtgacgctgcaggagtacctggagctgaagaaggccctggctacatcggag

SEQ ID NO: 165988 - DNA, 120 bp, Artificial Sequence
  ENSG00000108262_12 (sequence is synthesized)
gcaaaggtgcagcagctcatgaaggtcaacagtagcctgagcgacgagctccggaggctgcagcgagagatccacaagctgcaggcggagaacctgcagctccggcagcctccagggccg

SEQ ID NO: 165989 - DNA, 120 bp, Artificial Sequence
  ENSG00000108262_13 (sequence is synthesized)
gtgcccacacctccactccccagtgaacgggcggaacacacacccatggcgccaggcgggagcacacaccgcagggatcgccaggccttttccatgtatgaacctggctctgccctgaag

SEQ ID NO: 165990 - DNA, 120 bp, Artificial Sequence
  ENSG00000108262_14 (sequence is synthesized)
ttccacagcactgagctagaggacgacgccatctattcagtgcacgtccctgctggcctttaccggatccggaaaggggtgtctgcctcagctgtgcccttcactccctcctccccgctg

SEQ ID NO: 165991 - DNA, 120 bp, Artificial Sequence
  ENSG00000108262_15 (sequence is synthesized)
ctgtcctgctcccaggagggaagccgccacacgagcaagctttcccgccacggcagtggagccgacagtgactatgagaacacgcaaagtggggacccactgctggggctggaagggaag

SEQ ID NO: 165992 - DNA, 120 bp, Artificial Sequence
  ENSG00000108262_16 (sequence is synthesized)
aggtttctagagctgggcaaagaggaagacttccacccagagctggaaagcctggatggagacctagatcctgggcttcccagcacagaggatgtcatcttgaagacagagcaggtcacc

SEQ ID NO: 165993 - DNA, 120 bp, Artificial Sequence
  ENSG00000108262_17 (sequence is synthesized)
aagaacattcaggaactgttgcgggcagcccaggagttcaagcatgacagcttcgtgccctgctcagagaagatccatttggctgtgaccgagatggcctccctcttcccaaagaggcca

SEQ ID NO: 165994 - DNA, 120 bp, Artificial Sequence
  ENSG00000108262_18 (sequence is synthesized)
gccctggagccagtgcggagctcactgcggctgctcaacgccagcgcctaccggctgcagagtgagtgccggaagacagtgcccccagagcccggcgccccagtggacttccagctgctg

SEQ ID NO: 165995 - DNA, 120 bp, Artificial Sequence
  ENSG00000108262_19 (sequence is synthesized)
actcagcaggtgatccagtgcgcctatgacatcgccaaggctgccaagcagctggtcaccatcaccacccgagagaagaagcagtgacctctctccccacaccctcacctgcaccctagg

SEQ ID NO: 165996 - DNA, 120 bp, Artificial Sequence
  ENSG00000108262_20 (sequence is synthesized)
acctcactggccataggagctgggccactccagacattaatccccaccccaacagagccactggcacaagtgcccttagtgctgccacactccctggcagccaggtgccctggtgcccac

SEQ ID NO: 165997 - DNA, 120 bp, Artificial Sequence
  ENSG00000108262_21 (sequence is synthesized)
ccctgtcgagcccctaaggatggggaggtgggggggcaggagcttctgtcccccacattccatgcacctcccctctgtatatagcatctcccccctcctagtgagcaggggcctgcaagg

SEQ ID NO: 165998 - DNA, 120 bp, Artificial Sequence
  ENSG00000108262_22 (sequence is synthesized)
catcactcccagcccctcgccttctagggcaccctcagcaaaggggcaggtggggacactccaagtggggcagctctccgtacatgcgccccacccccatgagccagttcagccctactg

SEQ ID NO: 165999 - DNA, 120 bp, Artificial Sequence
  ENSG00000108262_23 (sequence is synthesized)
ggggctgagcgggggcatcccctcctttgtacatagtctccatggatgtccctgccctgtagccaccagccccttgctgctctccctttaatgccatatggcccctgcctagggcacagg

SEQ ID NO: 166000 - DNA, 120 bp, Artificial Sequence
  ENSG00000108262_24 (sequence is synthesized)
ccccaacctgtgtgctggggtccccagcagcaaacactggaaagtctgttttttttttttctttcttcttccccaccccttaattttaactttgtggtaactgagtgcccccgcgtgcct

SEQ ID NO: 166001 - DNA, 120 bp, Artificial Sequence
  ENSG00000108262_25 (sequence is synthesized)
gcgtgttgagtgtgtgggcggcagtgccgttccggaggcctggtccatctggagttttgaggggtgaggggaccagagcagtgggaccagcatggggatcagcttcccttccccacctgg

SEQ ID NO: 166002 - DNA, 120 bp, Artificial Sequence
  ENSG00000108262_26 (sequence is synthesized)
agccagggactgtccgggtagccagttttggtcctgccagctgcctccctgatccctccccactctcgccccttctctatgaacttaaatcaaaaaccacttccctccatctcctcctgc

SEQ ID NO: 166003 - DNA, 120 bp, Artificial Sequence
  ENSG00000108262_27 (sequence is synthesized)
tcctgcgtggagggggaatgtgtgctggctagggtggaggactgagcacctgagcctggggctggctccccggggtccccgactcagctggtggctgtggagctgagtcccctccccgta

SEQ ID NO: 166004 - DNA, 120 bp, Artificial Sequence
  ENSG00000108262_28 (sequence is synthesized)
acctctgcaaggccagcacccaccatcactacctgcacctgctgtggtcccaccctctggaggcctgggaacctggctgcagcctgggaaggctggagaggcagacggtgggacccacca

SEQ ID NO: 166005 - DNA, 120 bp, Artificial Sequence
  ENSG00000108262_29 (sequence is synthesized)
gctctctccccatcccgcttcttccctgggggccaggccctacctgtgtggtggtgggtgggctgtcaagacgtgtcatgtacatttgtatcaaaaataaagaagtgaccatgagctgtt

SEQ ID NO: 166006 - DNA, 120 bp, Artificial Sequence
  ENSG00000108262_30 (sequence is synthesized)
atgggccctggggactgcatatcccagaggggtaaggatgtaggaaagggcatggctctgtcagcccccagctgtgagctcttggggagatccctcactggtaacctggccgtagtgatg

SEQ ID NO: 166007 - DNA, 120 bp, Artificial Sequence
  ENSG00000108262_31 (sequence is synthesized)
gtcccagctcctaggctgttggagactgagtgagtgaatgtgtggagagtactaggcttggcacgggccagagcaggtgctcaggaggtctggcccatcatctggctccggctgaccctt

SEQ ID NO: 166008 - DNA, 120 bp, Artificial Sequence
  ENSG00000108262_32 (sequence is synthesized)
tggctggggcggactctcccaccacatggaacaccgacacagcccgcagcccctccctgcagccctcactgccccggcggaggaggggcacagaggcctctactctcatctagaccctgg

SEQ ID NO: 166009 - DNA, 120 bp, Artificial Sequence
  ENSG00000108262_33 (sequence is synthesized)
tgggcagagactgcgcagtccgggacagggccctgggaggtggcaaggtgaccaccctctcccaccatgctccccattcctcctgtgtgccccatgcagccccatcaagtcagagttcat

SEQ ID NO: 166010 - DNA, 120 bp, Artificial Sequence
  ENSG00000108262_34 (sequence is synthesized)
tggctgacccccagagctcccagcccaggtttcagaggcctaggaccctgctccctccccccagagactagaggcacagcttagtcctcagtccctaatgctgggccccaaggcaggtaa

SEQ ID NO: 166011 - DNA, 120 bp, Artificial Sequence
  ENSG00000108262_35 (sequence is synthesized)
gcaggtaaaaaatgtcagctccatatgtggcccgcatagcctgagccccgtgactgtcaagtacatggagggcttgggtgtgagaagctacctgtgggccgggcgcggtggctcacgcct

SEQ ID NO: 166012 - DNA, 120 bp, Artificial Sequence
  ENSG00000108262_36 (sequence is synthesized)
gctccggaggctgcagcgagaggtgagggtgcagcctcggtgggagggggagccccaggactccagggggttgacagcactttgcacccatagatccacaagctgcaggcggagaacctg

SEQ ID NO: 166013 - DNA, 120 bp, Artificial Sequence
  ENSG00000108262_37 (sequence is synthesized)
agggacaaaactagaaggagggagattaagaaacttacaaagcccaggcaacaggtgattgaggaacctggggagcttcactaggactggagggtgagggaggcttcaggtgactgccag

SEQ ID NO: 166014 - DNA, 120 bp, Artificial Sequence
  ENSG00000108262_38 (sequence is synthesized)
gtggctgacactggtggtggacaaacaggtcactgagaggaagagcaagccagaggaggaggggtgggggacgcggtgagatgaattcagctttgtcccttctgggccgggtgtgcgtgg

SEQ ID NO: 166015 - DNA, 120 bp, Artificial Sequence
  ENSG00000108262_39 (sequence is synthesized)
agatgggtctgggcctgatgtgaaaaggcgtgtgctgccctgctcctgggtaactgccgcctctgtcctgttcttccctctgctgccttcctctggacttagatctcggcaaaagtgcat

SEQ ID NO: 166016 - DNA, 120 bp, Artificial Sequence
  ENSG00000108262_40 (sequence is synthesized)
gtctcagaggtatatggtgcctgccggggcagcaggcctgaaggtggggtagggcggggaggcatttggtgtgcagcatctggggtgccatctccccgggatccctgcatgttggggagg

SEQ ID NO: 166017 - DNA, 120 bp, Artificial Sequence
  ENSG00000108298_0 (sequence is synthesized)
gcagataatgggaggagccgggcccgagcgagctctttcctttcgctgctgcggccgcagccatgagtatgctcaggcttcagaagaggctcgcctctagtgtcctccgctgtggcaaga

SEQ ID NO: 166018 - DNA, 120 bp, Artificial Sequence
  ENSG00000108298_1 (sequence is synthesized)
agaaggtctggttagaccccaatgagaccaatgaaatcgccaatgccaactcccgtcagcagatccggaagctcatcaaagatgggctgatcatccgcaagcctgtgacggtccattccc

SEQ ID NO: 166019 - DNA, 120 bp, Artificial Sequence
  ENSG00000108298_2 (sequence is synthesized)
gggctcgatgccggaaaaacaccttggcccgccggaagggcaggcacatgggcataggtaagcggaagggtacagccaatgcccgaatgccagagaaggtcacatggatgaggagaatga

SEQ ID NO: 166020 - DNA, 120 bp, Artificial Sequence
  ENSG00000108298_3 (sequence is synthesized)
ctcagaagataccgtgaatctaagaagatcgatcgccacatgtatcacagcctgtacctgaaggtgaaggggaatgtgttcaaaaacaagcggattctcatggaacacatccacaagctg

SEQ ID NO: 166021 - DNA, 120 bp, Artificial Sequence
  ENSG00000108298_4 (sequence is synthesized)
aaggcagacaaggcccgcaagaagctcctggctgaccaggctgaggcccgcaggtctaagaccaaggaagcacgcaagcgccgtgaagagcgcctccaggccaagaaggaggagatcatc

SEQ ID NO: 166022 - DNA, 120 bp, Artificial Sequence
  ENSG00000108298_5 (sequence is synthesized)
aagactttatccaaggaggaagagaccaagaaataaaacctcccactttgtctgtacatactggcctctgtgattacatagatcagccattaaaataaaacaagccttaatctgccttcc

SEQ ID NO: 166023 - DNA, 120 bp, Artificial Sequence
  ENSG00000108298_6 (sequence is synthesized)
gccatgaggtgagggcgagctggtctccatcaggcgctgacgcgtgtcgacaagggactgtcggtcttgggaccgcagctggggttgggggagatgaaatggaggccgccctaaagcggc

SEQ ID NO: 166024 - DNA, 120 bp, Artificial Sequence
  ENSG00000108298_7 (sequence is synthesized)
cggtcccggggtttggggtaggccggagcactttcgtcccgggcctccggagtgagggggggcggggagcgtcgcagcaactgagaccaggaaaagtctgccccggctggtgccgcaccg

SEQ ID NO: 166025 - DNA, 120 bp, Artificial Sequence
  ENSG00000108298_8 (sequence is synthesized)
cacacgtgtccggtcgacccacgcgagcagagcaaacggagcgaacaagaccaagccgtgggccctttcttgcttggcacacccggagcggagccgatctctgctttcacgtgatgtagg

SEQ ID NO: 166026 - DNA, 120 bp, Artificial Sequence
  ENSG00000108298_9 (sequence is synthesized)
gaagggcaggcacatgggcataggtaagtgtggtcatcttctccttaagaaatgataggtgctggcatctatgctgaaatatattcaggatctaagcactctgtctcatcttgagcctgt

SEQ ID NO: 166027 - DNA, 120 bp, Artificial Sequence
  ENSG00000108298_10 (sequence is synthesized)
ttcttactccttgatatttgatgtgttttctgcctgtgtgcaaatcagaaagttggtgctggtattggaattgagagtatccctggtaggaggtcacatttactaagtccctacctacac

SEQ ID NO: 166028 - DNA, 120 bp, Artificial Sequence
  ENSG00000108298_11 (sequence is synthesized)
tatgccaaggattctgtactttctagtttcagaatgatcgaaggaagctccttacaacgtgctgtgttgccttggtgcactgcctgttacacccacattctgcatgaagtgaatggggaa

SEQ ID NO: 166029 - DNA, 120 bp, Artificial Sequence
  ENSG00000108298_12 (sequence is synthesized)
ttacgtagttgggatcatcatctggaaaatggaagtaatgctacttaaaatgaggttgtgaggattaaatgagttaaggaccctgacttgaaactatattcacttggtgtacttatacac

SEQ ID NO: 166030 - DNA, 120 bp, Artificial Sequence
  ENSG00000108298_13 (sequence is synthesized)
caaagggcaggtcttgatggggacgttcattcttgcccaggattggctttcagagtctaatcatgttttctgtgtgtctagtatgctcaggcttcagaagaggctcgcctctagtgtcct

SEQ ID NO: 166031 - DNA, 120 bp, Artificial Sequence
  ENSG00000108306_0 (sequence is synthesized)
ggagagagccgagctagcgacgagcagtcgttgcggccgccggcgccgcgggaggtggtggaggcctagccggagccgagaggtctcttgttcccgtcccacggtcccggcgtcacccct

SEQ ID NO: 166032 - DNA, 120 bp, Artificial Sequence
  ENSG00000108306_1 (sequence is synthesized)
cagtccccgtcccggaactcccgggcctgtcctgggcccccggtctgtgcactccgctcgccgcagcgcccggcccgggccgcacccgccggccccatgaggagggacgtgaacggagtg

SEQ ID NO: 166033 - DNA, 120 bp, Artificial Sequence
  ENSG00000108306_2 (sequence is synthesized)
acggagtgaccaagagcaggtttgagatgttctcaaatagtgatgaagctgtaatcaataaaaaacttcccaaagaactcctgttacggatattttcttttctagatgttgttaccctgt

SEQ ID NO: 166034 - DNA, 120 bp, Artificial Sequence
  ENSG00000108306_3 (sequence is synthesized)
gccgctgtgctcaggtctccagggcctggaatgttctggctctggatggcagtaactggcagcgaattgacctatttgatttccagagggatattgagggccgagtagtggagaatattt

SEQ ID NO: 166035 - DNA, 120 bp, Artificial Sequence
  ENSG00000108306_4 (sequence is synthesized)
caaaacgatgtgggggctttttacgaaagttaagtcttcgtggatgtcttggagtgggagacaatgcattaagaacctttgcacaaaactgcaggaacattgaagtactgaatctaaatg

SEQ ID NO: 166036 - DNA, 120 bp, Artificial Sequence
  ENSG00000108306_5 (sequence is synthesized)
ggtgtacaaagacaacagacgctacatgtactagccttagcaagttctgttccaaactcaggcaccttgacttggcttcctgtacatcaataacaaacatgtctctaaaagctctgagtg

SEQ ID NO: 166037 - DNA, 120 bp, Artificial Sequence
  ENSG00000108306_6 (sequence is synthesized)
agggatgtccactgttggagcagttgaacatttcctggtgtgaccaagtaaccaaggatggcattcaagcactagtgaggggctgtgggggtctcaaggccttattcttaaaaggctgca

SEQ ID NO: 166038 - DNA, 120 bp, Artificial Sequence
  ENSG00000108306_7 (sequence is synthesized)
cgcagctagaagatgaagctctcaagtacataggtgcacactgccctgaactggtgactttgaacttgcagacttgcttgcaaatcacagatgaaggtctcattactatatgcagagggt

SEQ ID NO: 166039 - DNA, 120 bp, Artificial Sequence
  ENSG00000108306_8 (sequence is synthesized)
gccataagttacaatccctttgtgcctctggctgctccaacatcacagatgccatcctgaatgctctaggtcagaactgcccacggcttagaatattggaagtggcaagatgttctcaat

SEQ ID NO: 166040 - DNA, 120 bp, Artificial Sequence
  ENSG00000108306_9 (sequence is synthesized)
taacagatgtgggctttaccactctagccaggaattgccatgaacttgaaaagatggacctggaagagtgtgttcagataacagatagcacattaatccaactttctatacactgtcctc

SEQ ID NO: 166041 - DNA, 120 bp, Artificial Sequence
  ENSG00000108306_10 (sequence is synthesized)
gacttcaagtattgagtctgtctcactgtgagctgatcacagatgatggaattcgtcacctggggaatggggcctgcgcccatgaccagctggaggtgattgagctggacaactgcccac

SEQ ID NO: 166042 - DNA, 120 bp, Artificial Sequence
  ENSG00000108306_11 (sequence is synthesized)
taatcacagatgcatccctggagcacttgaagagctgtcatagccttgagcggatagaactctatgactgccagcaaatcacacgggctggaatcaagagactcaggacccatttaccca

SEQ ID NO: 166043 - DNA, 120 bp, Artificial Sequence
  ENSG00000108306_12 (sequence is synthesized)
atattaaagtccacgcctacttcgcacctgtcactccacccccatcagtagggggcagcagacagcgcttctgcagatgctgcatcatcctatgacaatggaggtggtcaaccttggcga

SEQ ID NO: 166044 - DNA, 120 bp, Artificial Sequence
  ENSG00000108306_13 (sequence is synthesized)
actgagtatttaatgacacttctagagctaccgtggagtctctccagtggaagcaaccccagtgttctgagcaagggttacaaagtgagggagggcagtgtccagatccccagagccaca

SEQ ID NO: 166045 - DNA, 120 bp, Artificial Sequence
  ENSG00000108306_14 (sequence is synthesized)
catacatacacatacacacccttacccccatccactctagctttgtgaccatgggactgaagtttgtgatggcttttttatcaagtagattggtaaaatttaaccattcctgttgaggtg

SEQ ID NO: 166046 - DNA, 120 bp, Artificial Sequence
  ENSG00000108306_15 (sequence is synthesized)
cccataagaaaatcataggccaagatagggaggggcattccagcaaaccccgtgttaatgctactgtggtttttaaatttttgtctaggggtttctttggggattttagaacagcatctg

SEQ ID NO: 166047 - DNA, 120 bp, Artificial Sequence
  ENSG00000108306_16 (sequence is synthesized)
ctgtcctccggggtcaagaaaagcatggaaagacaatatatgatgtacccagggaccagaaagaaaatttctttgcatcttagaaatggtagacattcattgtgactaaagagcttctat

SEQ ID NO: 166048 - DNA, 120 bp, Artificial Sequence
  ENSG00000108306_17 (sequence is synthesized)
gcttccttgtttccatgccaacatgctgagcatgctcacaaagaaggctcgtccattcctcctgtgttttagtatttggcccagaggtttcctaaatggttgccttgaaatcactgtggt

SEQ ID NO: 166049 - DNA, 120 bp, Artificial Sequence
  ENSG00000108306_18 (sequence is synthesized)
ccaaatgtaattcttacacactcaaattatcactgtctgtagcacacttgtgcacctgtcttacattctctgttgctcccccccacactcttgctcagtctgtcacctgttcagtctgct

SEQ ID NO: 166050 - DNA, 120 bp, Artificial Sequence
  ENSG00000108306_19 (sequence is synthesized)
tactcactcaattgttacccttttgctgttgtcgtgtttacagtttgcattttgaatgattagttgggattaccaaacattttttaaaaagatattatcaataaatatttttttaattct

SEQ ID NO: 166051 - DNA, 120 bp, Artificial Sequence
  ENSG00000108306_20 (sequence is synthesized)
aaattttaccattaggggaccctgcctgaatctttgccaacctgcaaggaaactctaatgaaagcaagaaaagttatgagaagaaactgttttgatgaaaacagatgctaccttttggtt

SEQ ID NO: 166052 - DNA, 120 bp, Artificial Sequence
  ENSG00000108306_21 (sequence is synthesized)
tctattttatcttctgatatgtgataattcgcatggtatccccaatattccccctacatattcttccttctgtcagactccaccaactgtatcataaggaaagagagagatgtattatta

SEQ ID NO: 166053 - DNA, 120 bp, Artificial Sequence
  ENSG00000108306_22 (sequence is synthesized)
ggaaagagtgaaaatgataaatcacaaaacagagcctgaaagtccccaacacccaagttcagacattaatgattaatgttattatatatttactgaaatctaggagtgatcagtggcatc

SEQ ID NO: 166054 - DNA, 120 bp, Artificial Sequence
  ENSG00000108306_23 (sequence is synthesized)
tctgacctatgaggttgttttaacaggaatgccactagaggagctgtgtattctagccagtctgtttctctcttttcccccatttcagcctttcagggatacaagaatggctctataaca

SEQ ID NO: 166055 - DNA, 120 bp, Artificial Sequence
  ENSG00000108306_24 (sequence is synthesized)
gctggtcaattgtatgtcagtgttaatggattcatatctagtgttggcaccccaaagggccagaaccttcccataacctgtcagtcatctctcttttctgccccagtctttttttttttt

SEQ ID NO: 166056 - DNA, 68 bp, Artificial Sequence
  ENSG00000108306_25 (sequence is synthesized)
taagacgggttctcactttcccaggctcaagcgattctcttgcctcagcctaccgagtagctgggatt

SEQ ID NO: 166057 - DNA, 120 bp, Artificial Sequence
  ENSG00000108306_26 (sequence is synthesized)
caggcatgagccaccatgcccggccctgttcagacttctgaatgaagtatgaatgtagccaggtgaagcattgaggcagctgaaagagaacactgagaggaagtaaggggtttagtgtct

SEQ ID NO: 166058 - DNA, 120 bp, Artificial Sequence
  ENSG00000108306_27 (sequence is synthesized)
ctgagaggaagtaaggggtttagtgtctctgcttagcctgggcactagaactgagggaggaatttagtgtccaggactcaagagtccaagaagaagcaccctctgtcttcccaaaaaatc

SEQ ID NO: 166059 - DNA, 120 bp, Artificial Sequence
  ENSG00000108306_28 (sequence is synthesized)
agaggataaaggaagtaaaatgagtttttaaagcataagaagaaaatttctaaaccccaagattagaaacccagtgtgatttttagtagggtgattttggcggggggtgtcctttgagac

SEQ ID NO: 166060 - DNA, 120 bp, Artificial Sequence
  ENSG00000108306_29 (sequence is synthesized)
gattttggcggggggtgtcctttgagacattaatgtgcaatccatcataatattaatcttctatatgatccagactattaaaaggcttgttttatttatttattttattttattttattt

SEQ ID NO: 166061 - DNA, 77 bp, Artificial Sequence
  ENSG00000108306_30 (sequence is synthesized)
gtacccagcttaagaggtttgttttaatgctgcagttgctgattataccagcatatataagaataaagtctgattta

SEQ ID NO: 166062 - DNA, 120 bp, Artificial Sequence
  ENSG00000108306_31 (sequence is synthesized)
gctgattataccagcatatataagaataaagtctgatttatttatccattgatttagaaggcaattggatgaaagggtcttagaagtctatactatccattaatatttatcatattaaat

SEQ ID NO: 166063 - DNA, 120 bp, Artificial Sequence
  ENSG00000108306_32 (sequence is synthesized)
ttattttaaatcctgttttattgtgccgctttaaaaacgcagattacttgtttattcattcccctttccccttattctctttcagattaccttataaggaatatagtttttaacatgaaa

SEQ ID NO: 166064 - DNA, 120 bp, Artificial Sequence
  ENSG00000108306_33 (sequence is synthesized)
ctcagtttcttgtctgtacccctacacataaaaatacatacgtgcatacacacatacttccagatgtggttaataatattcagatccctaggttactcaaacaaaactaaaggagagaac

SEQ ID NO: 166065 - DNA, 120 bp, Artificial Sequence
  ENSG00000108306_34 (sequence is synthesized)
tatttaggggccatctgctttaaagtttaaggtgttttgttgttgttttagtgcctgtacaaattgaccataaaacccagattgattagtgagtgtggatttgagttgcctaagttgagg

SEQ ID NO: 166066 - DNA, 120 bp, Artificial Sequence
  ENSG00000108306_35 (sequence is synthesized)
ctattaaggtacttctttacttaaaagataagtttaaaagactctattcatcagttcatgatgatcttggaaatgctgtttctctgctcaaaggatatacccacaggcaggtccatgggg

SEQ ID NO: 166067 - DNA, 120 bp, Artificial Sequence
  ENSG00000108306_36 (sequence is synthesized)
acttgctctggtgatctctgctattaaggcaaattccagcctgtttgtgccaagaacagagtcaagtgagagagaatgaagactcagagatgtgcagcactggcttgtatgttgtcaggc

SEQ ID NO: 166068 - DNA, 120 bp, Artificial Sequence
  ENSG00000108306_37 (sequence is synthesized)
agaagccttgttcctttctcaagaaaacttcaggcctatcaagcttggaaggaaatacatttttttatgctgatttgcagcctacaccagctgatgaatatgctaggactttgagagaac

SEQ ID NO: 166069 - DNA, 120 bp, Artificial Sequence
  ENSG00000108306_38 (sequence is synthesized)
acaaagcatggtaagttttggtcaggtggaaaggagcctgacatctgaacataatgcttcctctctcaacatctgggatacttttgaaaattcagtaaggcttaatgtaggaaaaattct

SEQ ID NO: 166070 - DNA, 120 bp, Artificial Sequence
  ENSG00000108306_39 (sequence is synthesized)
ttacaggaaaagctaattgatctgtttgtctaacctcatagccactccaaaatatgccttttataatggaaaaaaacagtgaacagagagaagagatttggggataagttagaaggtacc

SEQ ID NO: 166071 - DNA, 120 bp, Artificial Sequence
  ENSG00000108306_40 (sequence is synthesized)
ctcaaaactactgccgtaaacctacaggtgggcaaggaggaattactgtagtgtctctggagaaagttcttgaacatccaaatcatctcttttctaagcagtttttcccctaatctcata

SEQ ID NO: 166072 - DNA, 120 bp, Artificial Sequence
  ENSG00000108306_41 (sequence is synthesized)
ccttacatcttccagcatcatttgctacatcaatgtcttttcatcctcttcatcagccccattgagctgactccagcttatttttgcactgatttccaccatttccttcccacacccatc

SEQ ID NO: 166073 - DNA, 120 bp, Artificial Sequence
  ENSG00000108306_42 (sequence is synthesized)
ttaaagcctccatctcaccctcagtaatgctgctgatttactctcagatgtctcaagtctagcttcctttttgaatccttctcctactccaggggctgtcaaaggcagccttaaagttca

SEQ ID NO: 166074 - DNA, 120 bp, Artificial Sequence
  ENSG00000108306_43 (sequence is synthesized)
gtgactgttaggtggctcaggccatttttcattgggtggtctttggtgtttgcatactgaatttgaattcagtttaaaagcaaactgttggatatgaggaagaaagggatatggccttag

SEQ ID NO: 166075 - DNA, 120 bp, Artificial Sequence
  ENSG00000108306_44 (sequence is synthesized)
ccctttttccaatatttggaatatgaaagcatattgtgctttgtgtaaaaaatgttttcttctcctattctgctcttgtctttactgaaggtaaaagtattccttaagtagcttttgcaa

SEQ ID NO: 166076 - DNA, 120 bp, Artificial Sequence
  ENSG00000108306_45 (sequence is synthesized)
atttctagtctgatttccacattcattaagttgatttagcagacatgtaagtcagaagtttcacatatcccttgtatcaaacattttatagggaaacctagtaaatttatgatgcttcat

SEQ ID NO: 166077 - DNA, 120 bp, Artificial Sequence
  ENSG00000108306_46 (sequence is synthesized)
tttgggctttccagactatttgagttattcaagatagccataatgttttagtagcgacattcttttattacttctaattgccttgtaaaatgcattgttatggcccggcacggtgggtgg

SEQ ID NO: 166078 - DNA, 120 bp, Artificial Sequence
  ENSG00000108306_47 (sequence is synthesized)
aaaaaaatgcatcgttactagtttgatagcccactaatgccatgggggactaaacaaaatatgtgatgaaacctgtcttggtttgaagttgttagaaagtgtgagagtgtcactggaaag

SEQ ID NO: 166079 - DNA, 120 bp, Artificial Sequence
  ENSG00000108306_48 (sequence is synthesized)
aagagagtggcttcctgcctgcttgtttagtcagcatgtccttaggtgactgtgttgttgggagaagagcactcatgggtcatgggtgacccttggccattttatgtttattgtgctgaa

SEQ ID NO: 166080 - DNA, 120 bp, Artificial Sequence
  ENSG00000108306_49 (sequence is synthesized)
agtcacaggcggctcatgccagttgctaccagtgagaggaggggtttaaaggaaattgctctattttgccttattcctccttatgtgtatgatttaagggtaggcttttatcctggttgt

SEQ ID NO: 166081 - DNA, 120 bp, Artificial Sequence
  ENSG00000108306_50 (sequence is synthesized)
atctcctggctgacagactttctcaatcatatgtttgagctctgaagcattttacaaaaagattgcctctctatctgcctgccaatcctagaatctttagccacctcaaacccaggcact

SEQ ID NO: 166082 - DNA, 120 bp, Artificial Sequence
  ENSG00000108306_51 (sequence is synthesized)
gtgaattagccaagtcctgtttgagaagaaatgtaggatgtttggttggaattcttgagacagaacctctctccccattaatgatgttgtaccaaagaattctaaagcagtaaaaggata

SEQ ID NO: 166083 - DNA, 72 bp, Artificial Sequence
  ENSG00000108306_52 (sequence is synthesized)
atgatgttgtaccaaagaattctaaagcagtaaaaggataatggggaaaaatggagtcacagcctttcctcg

SEQ ID NO: 166084 - DNA, 63 bp, Artificial Sequence
  ENSG00000108306_53 (sequence is synthesized)
cccaggttggagtgccattcagcctcccaagaggccaggattacaggtgcccaccaccacgcc

SEQ ID NO: 166085 - DNA, 120 bp, Artificial Sequence
  ENSG00000108306_54 (sequence is synthesized)
tttaaatgtaagattggaagatacagagagctgtataaaatcataccagtagggtataattagcccaggtagtttaggaataaaattgggttgtatccgagtgccctaacttgacatttt

SEQ ID NO: 166086 - DNA, 120 bp, Artificial Sequence
  ENSG00000108306_55 (sequence is synthesized)
cctaacttgacattttgattctccagcaaagaacataggttactaggttactaaccttgccttctcacttgggataaactttttttttttttcttgttgcccaggctggagtgcaatagt

SEQ ID NO: 166087 - DNA, 85 bp, Artificial Sequence
  ENSG00000108306_56 (sequence is synthesized)
cacccccttagcctcccgagtagctggaattacagcctgtgccaccacgcccggcaaaatttgtatttttagtagagacggggtt

SEQ ID NO: 166088 - DNA, 82 bp, Artificial Sequence
  ENSG00000108306_57 (sequence is synthesized)
atctgcccacctcagcctcccaacaggataaacattctacctgcctgaaagtaccataagaggcaagtgagtttcttgcatg

SEQ ID NO: 166089 - DNA, 120 bp, Artificial Sequence
  ENSG00000108306_58 (sequence is synthesized)
aacattctacctgcctgaaagtaccataagaggcaagtgagtttcttgcatgatgggcttctgcagcttccccctcaagtcacatctacctgttgtatttatttatttatttatttttga

SEQ ID NO: 166090 - DNA, 120 bp, Artificial Sequence
  ENSG00000108306_59 (sequence is synthesized)
ggcgtgagccaccgcgcccggcccgttgtatctattttttttagacgcatcaattcagtgtctctgaagcctttgatcgttaggaaggtcagtacataacctcttaggtgaagctgagtt

SEQ ID NO: 166091 - DNA, 120 bp, Artificial Sequence
  ENSG00000108306_60 (sequence is synthesized)
agttgatctttggagcccaagagagttaattttcaggagaaaaagaattagggcaagctcccctgtgggatgttaagagaaagtccatatgcgcttcttccatctctgcctcttgttttt

SEQ ID NO: 166092 - DNA, 120 bp, Artificial Sequence
  ENSG00000108306_61 (sequence is synthesized)
aaataagtgcttgtgaagttcagtttatagaggttgagtctcagtgcttcctcagccagggtggtttattgctgttttacaaagaaccatgaacaagcaaaatcctatcaatagtccttt

SEQ ID NO: 166093 - DNA, 120 bp, Artificial Sequence
  ENSG00000108306_62 (sequence is synthesized)
ctgttttatgttttatagtcttattttgaagaatcggcatggtaaaatgatagacaagtttcaaataaagcagataattagctctagaattggggtactttgcctcaggtacagcatctg

SEQ ID NO: 166094 - DNA, 120 bp, Artificial Sequence
  ENSG00000108306_63 (sequence is synthesized)
tcttgaatacatagtgatggctgtgtcacacatgggtacatttactttcctctctgatcaactgcacccctttttactggcaaagagggctcctactttctacacacttaaccagtcaaa

SEQ ID NO: 166095 - DNA, 120 bp, Artificial Sequence
  ENSG00000108306_64 (sequence is synthesized)
cagataggttttggcaccaccgaaagaaccacaagtgcaccccagctgcatctgggcatggttttggtactaggactagagaagtgagcagtaaatgacagtccttaccctaggaagaga

SEQ ID NO: 166096 - DNA, 120 bp, Artificial Sequence
  ENSG00000108306_65 (sequence is synthesized)
tgggagaagagaggtgtccagacatatttaccttttctcttctgtcatgccccaagaaccaaggatcatctttgaagtgacgtcttttttgttaaattggaagaagaaaactttgcagcc

SEQ ID NO: 166097 - DNA, 120 bp, Artificial Sequence
  ENSG00000108306_66 (sequence is synthesized)
ccatctcacaaaaaagagaaaagaaaagaaaactttgcttcactaagtttctcttgccattatctcattaattcagatctgtacctcattgctgctcacacatatatgtttcttacctta

SEQ ID NO: 166098 - DNA, 120 bp, Artificial Sequence
  ENSG00000108306_67 (sequence is synthesized)
gcctgaaccttctcaggccttgaagtcattattctactctttttttttcttttccttttttatggcactagagaatgaaaacctaaggtcttagaaaatcttaacttgaaaaagtctcta

SEQ ID NO: 166099 - DNA, 120 bp, Artificial Sequence
  ENSG00000108306_68 (sequence is synthesized)
actggcatgatttgattacttttttcccctgtggacaaataattttctttcctatataatagatttttagtaagtgaaacctttgctgctgctttcctgggtttacattagttttttcct

SEQ ID NO: 166100 - DNA, 120 bp, Artificial Sequence
  ENSG00000108306_69 (sequence is synthesized)
gcccttaagaataatttatctgtgcttctctgatgactgttaatttctaatagtgcaggaagggatgagcttttgatttcttctcactcccctcctcaccctacttccaaattacacact

SEQ ID NO: 166101 - DNA, 120 bp, Artificial Sequence
  ENSG00000108306_70 (sequence is synthesized)
aacttctaacccttacagcctgttggcacatacacaagatccacgagaccatgctcctcagaagctacccatgtcctttctcaccatggtgtggctcttggagccctgagtatctgtgac

SEQ ID NO: 166102 - DNA, 120 bp, Artificial Sequence
  ENSG00000108306_71 (sequence is synthesized)
tacccactccaaaggttgactgtaagaggagagcggccttcttaattttgcatttcttaattttgtttttctccattcctgttttatgacttggccttcagatgcttcctactctggcct

SEQ ID NO: 166103 - DNA, 120 bp, Artificial Sequence
  ENSG00000108306_72 (sequence is synthesized)
cctccttttttctcctaggaattgtttccaggtaacctaccatgtgcacttctcagctgctctgctcacctttgcccaccttcccgtgaccctgagagtacagatccgaataatgtggcc

SEQ ID NO: 166104 - DNA, 120 bp, Artificial Sequence
  ENSG00000108306_73 (sequence is synthesized)
tgtgcagagctcagagaactgtgaggactacccatgcctgtcagactctgctcagggacagagatggatgggtaaatggtgctgttggagacatttttatcttcataccaggctctgttt

SEQ ID NO: 166105 - DNA, 120 bp, Artificial Sequence
  ENSG00000108306_74 (sequence is synthesized)
catccctgcaccccgcacccccactcactcccctgagggggtaaaatgcagaggtggttgacctgaagggtctgattccctccttcccaagccttagggcctaccctggagtgctgcagt

SEQ ID NO: 166106 - DNA, 120 bp, Artificial Sequence
  ENSG00000108306_75 (sequence is synthesized)
gtgtgagagctgctgcttgcttgtttctccactaggcctgctccaaatgcttagccaatctctggagccgacacagttgcctacggggtgacttagcaccaggttccattagctctccaa

SEQ ID NO: 166107 - DNA, 120 bp, Artificial Sequence
  ENSG00000108306_76 (sequence is synthesized)
gtgactgtttccacccagtacttttggcgcttgaggatggggggagggggattatttaaaataaataaaatccgaggtggcagtagaggattccttttgctttaaaaatctttggactaa

SEQ ID NO: 166108 - DNA, 120 bp, Artificial Sequence
  ENSG00000108306_77 (sequence is synthesized)
gccaaaggaagggttgcccggctccagccctgcacccccgacccccggcctcaggtgcagctccgcagccatccccggaccagggcgggcacttggcctgttgctcagcgcaaccaccct

SEQ ID NO: 166109 - DNA, 120 bp, Artificial Sequence
  ENSG00000108306_78 (sequence is synthesized)
cgccctcccgagccatgcacagggagacaagcgtccggccccggccccccaggcctccctgcagcaccccgtaatgtaatgcactggggcgggggaggcgggggaggcggcggcggcggc

SEQ ID NO: 166110 - DNA, 120 bp, Artificial Sequence
  ENSG00000108306_79 (sequence is synthesized)
aaccgcggaggcgcggcggcagccgcactgccccaatctagacacatccagaagaggaggaaaatggctccgagcagggaccgcctgctgcactttgggttcaaggcgacaatgttctca

SEQ ID NO: 166111 - DNA, 120 bp, Artificial Sequence
  ENSG00000108306_80 (sequence is synthesized)
tttttccttttttcaaatttaggttcctatgatttttatatttacttgaacatttaacaagggaaagagaaaaaagtgcaaacctaaggacagatagtttttccctctggctccagagat

SEQ ID NO: 166112 - DNA, 120 bp, Artificial Sequence
  ENSG00000108306_81 (sequence is synthesized)
ggaaatttagtaggaaaagacccactgaagggaagaaaagtaggtctcctcccagcagagtctgtctaataatgtctagggcttaataacattcccagattgaagaaaaaaaaaaaaaaa

SEQ ID NO: 166113 - DNA, 120 bp, Artificial Sequence
  ENSG00000108309_0 (sequence is synthesized)
gccccggctcagcacctcggagagctccctccccggccttgttttgctctggcatcgccgccgggggagggagcgagggggccgggcaccgggcgcaaaggcagggggatggccatggaa

SEQ ID NO: 166114 - DNA, 120 bp, Artificial Sequence
  ENSG00000108309_1 (sequence is synthesized)
gggttgaggggccccgtcggacagagggcccagccgtgatccagcgacgggtttggggctccgggaggggtgggggggcagcgggcggcggcagcagtggccgcacatctggatggaagc

SEQ ID NO: 166115 - DNA, 120 bp, Artificial Sequence
  ENSG00000108309_2 (sequence is synthesized)
gagctttgtccagaccaccatggctctggggctgtcctccaagaaagcgtcctctcgcaacgtggctgtggagcgtaagaacctgatcaccgtgtgcaggttctctgtgaaaacgctgct

SEQ ID NO: 166116 - DNA, 120 bp, Artificial Sequence
  ENSG00000108309_3 (sequence is synthesized)
ggagaagtacacagcggagcccatcgatgactcatcggaggagtttgtcaattttgcagccattttagagcagatcctcagccaccgcttcaaagcctgtgccccagcaggtccagtgag

SEQ ID NO: 166117 - DNA, 120 bp, Artificial Sequence
  ENSG00000108309_4 (sequence is synthesized)
ctggttcagctcagacgggcagcggggcttttgggactatatccggctggcctgcagcaaagtgcccaacaactgtgtgagcagcatcgagaacatggagaacatcagcacagcccgggc

SEQ ID NO: 166118 - DNA, 120 bp, Artificial Sequence
  ENSG00000108309_5 (sequence is synthesized)
caagggccgggcatggatccgggtggcactgatggagaagcgcatgtcagaatacatcaccacggctctgcgtgacacccggaccaccagacggttctatgactctggagccatcatgct

SEQ ID NO: 166119 - DNA, 120 bp, Artificial Sequence
  ENSG00000108309_6 (sequence is synthesized)
gcgggatgaagccaccatcctcaccggaatgctgatcggactgagcgccatcgacttcagcttctgtctaaagggggaagtcctggacgggaagacccccgtggtcatcgattacacgcc

SEQ ID NO: 166120 - DNA, 120 bp, Artificial Sequence
  ENSG00000108309_7 (sequence is synthesized)
ctacctaaagttcacgcagagctacgactacctgacggacgaggaggagcggcacagcgccgagagcagcacgagcgaggacaactcgcccgagcacccgtacctcccgctcgtcaccga

SEQ ID NO: 166121 - DNA, 120 bp, Artificial Sequence
  ENSG00000108309_8 (sequence is synthesized)
gtgcgtctgcgcgagtcgcagctgaaggacctggaggcggagaaccggcggcttcagctgcagctggaggaggcggcggcgcagaaccagcgcgagaaacgggagctggaaggcgtgatc

SEQ ID NO: 166122 - DNA, 120 bp, Artificial Sequence
  ENSG00000108309_9 (sequence is synthesized)
ctggagctgcaggagcagctgacaggtctgatccccagtgaccacgcccctctggcccagggttccaaggagctcactacacccctggtcaatcaatggccctcactgggaacgcttaat

SEQ ID NO: 166123 - DNA, 120 bp, Artificial Sequence
  ENSG00000108309_10 (sequence is synthesized)
ggggccgagggcgccagcaactccaagctctaccggagacacagcttcatgagcacggagccgctgtcagctgaagccagtctgagctcggactcccagcgcctgggagagggcacgcgg

SEQ ID NO: 166124 - DNA, 120 bp, Artificial Sequence
  ENSG00000108309_11 (sequence is synthesized)
gacgaggagccctggggtcccatcgggaaggaccccacgccctccatgctgggcctctgcggctccctggcctccattcccagctgcaagtccctggcgagcttcaaatccaacgagtgc

SEQ ID NO: 166125 - DNA, 120 bp, Artificial Sequence
  ENSG00000108309_12 (sequence is synthesized)
ctggtgagcgacagtcccgagggcagcccagcactgagccccagctgaggaacagcatgggcagtgccagccccacctgccaggggccatggacacctgccacctttcttcaacaagagt

SEQ ID NO: 166126 - DNA, 120 bp, Artificial Sequence
  ENSG00000108309_13 (sequence is synthesized)
cccccaatccaggctacccttccagagaacgctacccacccagccagggttctctcggggaagatctcgtctgctcaccttagctttctgccttggcagcacgggctgcggaagaaagca

SEQ ID NO: 166127 - DNA, 120 bp, Artificial Sequence
  ENSG00000108309_14 (sequence is synthesized)
cgctgggccaggaggcaggggtgcccaagccacagggagcccctggggaagcctgctccattcttctggtgaccttggcgctccttcactcatctcccctgccccctcaggaactggtgg

SEQ ID NO: 166128 - DNA, 120 bp, Artificial Sequence
  ENSG00000108309_15 (sequence is synthesized)
cccagcttccacacccccacctcccagtctctagcctctccatctgtctgtgtatggcctggagtcactccttcctcagcccccagggcaagagagctcaaataaaaaccagaggactga

SEQ ID NO: 166129 - DNA, 120 bp, Artificial Sequence
  ENSG00000108309_16 (sequence is synthesized)
ccttcgagcgaatgcccaggacttcaacgcatgcactttgtgttgacctcatccctggcttcaccttggtttttcccatcctagttctccctatgcctgaatatcctgtcttttcttttt

SEQ ID NO: 166130 - DNA, 120 bp, Artificial Sequence
  ENSG00000108309_17 (sequence is synthesized)
tataagcaaccacactgtattggatgaccctagatcttctttgagacaaggcaggctgtggccatgtagccccatcacactgtgtttgtgattgtctgtgtgtctgtctcccccaccaga

SEQ ID NO: 166131 - DNA, 120 bp, Artificial Sequence
  ENSG00000108309_18 (sequence is synthesized)
ctgtgagctccatgagggcagggaccgtgtcttgtccgttctctgtatccccagtgcttggaacagagcgagtgctcactgtgtatttaataaatggacaaagagagaggatgaccctca

SEQ ID NO: 166132 - DNA, 120 bp, Artificial Sequence
  ENSG00000108309_19 (sequence is synthesized)
atcagggagcacaccacagggctcccgggggcaatgaccacctctgcggcacccctgaggacagataccatatggctgccatgctgaacccagtccaggccccatcatggtctgacccag

SEQ ID NO: 166133 - DNA, 120 bp, Artificial Sequence
  ENSG00000108309_20 (sequence is synthesized)
atgaccaggggaaatcaagctggcaggagggtgcgcatagtgaagctggaataatgccccaaacacaggctggctctcagcagggccagccttcccagccacgaccccgctcctcaccat

SEQ ID NO: 166134 - DNA, 120 bp, Artificial Sequence
  ENSG00000108309_21 (sequence is synthesized)
ccctgcccagcggccctaggcacctaccttctcccaaccctgcctgggctctcaaccaaaatgtaatgaggcaggtacgattgttcccatttgcatttgacaagaagggactcacagagg

SEQ ID NO: 166135 - DNA, 120 bp, Artificial Sequence
  ENSG00000108309_22 (sequence is synthesized)
ggcccaaggccacgtgagtgccacagggaaacaggatttgaatccagcaggctgcctccctctagtgcaaccccaagactgacctggctctgatctcaaggcagttcaactccaagttca

SEQ ID NO: 166136 - DNA, 120 bp, Artificial Sequence
  ENSG00000108309_23 (sequence is synthesized)
aaaggaagggggacgagggctcagctgtgcaattggcctgagagcctcagaggtcagtggtccaaggctggagacttgcagagtagaggacaaagggcggtggagcaggggctgctccag

SEQ ID NO: 166137 - DNA, 120 bp, Artificial Sequence
  ENSG00000108309_24 (sequence is synthesized)
gccttggtcatcacaacagctgccaggaggccacagatgtagcagaaagagcagaagcttcagaatcagaatcagacatacctgcttgactactcataagccatgtgactccgaacagat

SEQ ID NO: 166138 - DNA, 120 bp, Artificial Sequence
  ENSG00000108309_25 (sequence is synthesized)
caaacacagctgatccttaagttcctgcagcatccttcagttcctggactacaagtcccagcaccagcacacatggctgatttccctcttccagcctggcctgcagtcccaggacgaact

SEQ ID NO: 166139 - DNA, 120 bp, Artificial Sequence
  ENSG00000108309_26 (sequence is synthesized)
ttacaggcatgagccaccgctcctggccccaggacaaacttttaccaccaccaccaccaccacttgcaagtcaaatctaatgcccattatttgccatcaatgcccagcacgctccaccct

SEQ ID NO: 166140 - DNA, 120 bp, Artificial Sequence
  ENSG00000108309_27 (sequence is synthesized)
tcaatgcccagcacgctccacccttgcacacctctggatgagcctcagccatgcaccatctcaagtgttggcttgctccatgatctacaacacagcccttctgtctctccaaacaacgaa

SEQ ID NO: 166141 - DNA, 120 bp, Artificial Sequence
  ENSG00000108309_28 (sequence is synthesized)
tgcctgaggcaaggggttacaaggaggagtgtgcctgtgtgggcaggtgcatctgaagctgtctgggtgtggcggggggcatatacctccccatcccaattggccatacccagcctgatg

SEQ ID NO: 166142 - DNA, 120 bp, Artificial Sequence
  ENSG00000108309_29 (sequence is synthesized)
tttttactgaattccattcctcagtctacacgtttcaagttaacacgttttttgcgcacctactgtataccaagcactaatgattaagacttgcttcctgatatgaaggatctgggtaac

SEQ ID NO: 166143 - DNA, 120 bp, Artificial Sequence
  ENSG00000108309_30 (sequence is synthesized)
ccagtacttgatgaggaaggggtagctcagagggaggagtcggctcagggaacacccattctaggtgatggggccacaggtgcgagccccaggctgaagggggagagaggctccaggcct

SEQ ID NO: 166144 - DNA, 120 bp, Artificial Sequence
  ENSG00000108309_31 (sequence is synthesized)
gcgtgcagatcaggaaggagaattggccttccttcaggatggggtggcagtaagccaacaatagcagctctggggggggggggggcgctccaggggcctgctgcatcctctggccctctg

SEQ ID NO: 166145 - DNA, 120 bp, Artificial Sequence
  ENSG00000108309_32 (sequence is synthesized)
cctgctcctccttccaatctctgcttctcccgggtaccccctccgccctccgtggggcccgggctctgcccctcccctcagaccctgcaccctctgcggattggtcctcggcctgctggg

SEQ ID NO: 166146 - DNA, 120 bp, Artificial Sequence
  ENSG00000108309_33 (sequence is synthesized)
agctgcaggagcagctgtgagcgcacggcctgccctaacccctgacccccgccgccccgaccacatcaccgggtgaaccccatcttcacttccatcgactctaacatcacccgacacgag

SEQ ID NO: 166147 - DNA, 120 bp, Artificial Sequence
  ENSG00000108312_0 (sequence is synthesized)
agacacacaccagtggcgacaggggagagttggaaagacgcaggagagaagcaggaggcaggaggcagcggggatggagcaatgggagcgggaagcaggcaggtttccttgcaaatcccc

SEQ ID NO: 166148 - DNA, 120 bp, Artificial Sequence
  ENSG00000108312_1 (sequence is synthesized)
ctccggcctcacgccgtctcgccggccccggcaggggagcgaggaccccggcgaacagatggaggagtggagctcgctctaggcagctgggcttggccggagaatggaggagccaccaag

SEQ ID NO: 166149 - DNA, 120 bp, Artificial Sequence
  ENSG00000108312_2 (sequence is synthesized)
cgaccggctgattggaagagaaacgcagagcgatggaggcggggtaggaggacgatttctctgcggggactggcggcggcgtacacgcccgggtcgggcgctgcagagcttggctggctt

SEQ ID NO: 166150 - DNA, 120 bp, Artificial Sequence
  ENSG00000108312_3 (sequence is synthesized)
gctttcaacccgcgctcgccggctccagccccgcgcgcccccacccctagccctcccggcggctccgcagggtgaggtggctttgaccccgggttgcccggccagcacgaccgaggaggt

SEQ ID NO: 166151 - DNA, 120 bp, Artificial Sequence
  ENSG00000108312_4 (sequence is synthesized)
ggacagctggaggatgaacggagaagccgactgccccacagacctggaaatggccgcccccaaaggccaagaccgttggtcccaggaagacatgctgactttgctggaatgcatgaagaa

SEQ ID NO: 166152 - DNA, 120 bp, Artificial Sequence
  ENSG00000108312_5 (sequence is synthesized)
caaccttccatccaatgacagctccaagttcaaaaccaccgaatcacacatggactgggaaaaagtagcatttaaagacttttctggagacatgtgcaagctcaaatgggtggagatttc

SEQ ID NO: 166153 - DNA, 120 bp, Artificial Sequence
  ENSG00000108312_6 (sequence is synthesized)
taatgaggtgaggaagttccgtacattgacagaattgatcctcgatgctcaggaacatgttaaaaatccttacaaaggcaaaaaactcaagaaacacccagacttcccaaagaagcccct

SEQ ID NO: 166154 - DNA, 120 bp, Artificial Sequence
  ENSG00000108312_7 (sequence is synthesized)
gaccccttatttccgcttcttcatggagaagcgggccaagtatgcgaaactccaccctgagatgagcaacctggacctaaccaagattctgtccaagaaatacaaggagcttccggagaa

SEQ ID NO: 166155 - DNA, 120 bp, Artificial Sequence
  ENSG00000108312_8 (sequence is synthesized)
gaagaagatgaaatatattcaggacttccagagagagaaacaggagttcgagcgaaacctggcccgattcagggaggatcaccccgacctaatccagaatgccaagaaatcggacatccc

SEQ ID NO: 166156 - DNA, 120 bp, Artificial Sequence
  ENSG00000108312_9 (sequence is synthesized)
agagaagcccaaaaccccccagcagctgtggtacacccacgagaagaaggtgtatctcaaagtgcggccagatgccactacgaaggaggtgaaggactccctggggaagcagtggtctca

SEQ ID NO: 166157 - DNA, 120 bp, Artificial Sequence
  ENSG00000108312_10 (sequence is synthesized)
gctctcggacaaaaagaggctgaaatggattcataaggccctggagcagcggaaggagtacgaggagatcatgagagactatatccagaagcacccagagctgaacatcagtgaggaggg

SEQ ID NO: 166158 - DNA, 120 bp, Artificial Sequence
  ENSG00000108312_11 (sequence is synthesized)
tatcaccaagtccaccctcaccaaggccgaacgccagctcaaggacaagtttgacgggcgacccaccaagccacctccgaacagctactcgctgtactgcgcagagctcatggccaacat

SEQ ID NO: 166159 - DNA, 120 bp, Artificial Sequence
  ENSG00000108312_12 (sequence is synthesized)
gaaggacgtgcccagcacagagcgcatggtgctgtgcagccagcagtggaagctgctgtcccagaaggagaaggacgcctatcacaagaagtgtgatcagaaaaagaaagattacgaggt

SEQ ID NO: 166160 - DNA, 120 bp, Artificial Sequence
  ENSG00000108312_13 (sequence is synthesized)
ggagctgctccgtttcctcgagagcctgcctgaggaggagcagcagcgggtcttgggggaagagaagatgctgaacatcaacaagaagcaggccaccagccccgcctccaagaagccagc

SEQ ID NO: 166161 - DNA, 120 bp, Artificial Sequence
  ENSG00000108312_14 (sequence is synthesized)
ccaggaagggggcaagggcggctccgagaagcccaagcggcccgtgtcggccatgttcatcttctcggaggagaaacggcggcagctgcaggaggagcggcctgagctctccgagagcga

SEQ ID NO: 166162 - DNA, 120 bp, Artificial Sequence
  ENSG00000108312_15 (sequence is synthesized)
gctgacccgcctgctggcccgaatgtggaacgacctgtctgagaagaagaaggccaagtacaaggcccgagaggcggcgctcaaggctcagtcggagaggaagcccggcggggagcgcga

SEQ ID NO: 166163 - DNA, 120 bp, Artificial Sequence
  ENSG00000108312_16 (sequence is synthesized)
ggaacggggcaagctgcccgagtcccccaaaagagctgaggagatctggcaacagagcgttatcggcgactacctggcccgcttcaagaatgaccgggtgaaggccttgaaagccatgga

SEQ ID NO: 166164 - DNA, 120 bp, Artificial Sequence
  ENSG00000108312_17 (sequence is synthesized)
aatgacctggaataacatggaaaagaaggagaaactgatgtggattaagaaggcagccgaagaccaaaagcgatatgagagagagctgagtgagatgcgggcacctccagctgctacaaa

SEQ ID NO: 166165 - DNA, 120 bp, Artificial Sequence
  ENSG00000108312_18 (sequence is synthesized)
ttcttccaagaagatgaaattccagggagaacccaagaagcctcccatgaacggttaccagaagttctcccaggagctgctgtccaatggggagctgaaccacctgccgctgaaggagcg

SEQ ID NO: 166166 - DNA, 120 bp, Artificial Sequence
  ENSG00000108312_19 (sequence is synthesized)
catggtggagatcggcagtcgctggcagcgcatctcccagagccagaaggagcactacaaaaagctggccgaggagcagcaaaagcagtacaaggtgcacctggacctctgggttaagag

SEQ ID NO: 166167 - DNA, 120 bp, Artificial Sequence
  ENSG00000108312_20 (sequence is synthesized)
caaaccccaaatccagccggactactctgcagtccaagtcggagtccgaggaggatgatgaagaggatgaggatgacgaggacgaggatgaagaagaggaagatgatgagaatggggact

SEQ ID NO: 166168 - DNA, 120 bp, Artificial Sequence
  ENSG00000108312_21 (sequence is synthesized)
cctctgaagatggcggcgactcctctgagtccagcagcgaggacgagagcgaggatggggatgagaatgaagaggatgacgaggacgaagacgacgacgaggatgacgatgaggatgaag

SEQ ID NO: 166169 - DNA, 120 bp, Artificial Sequence
  ENSG00000108312_22 (sequence is synthesized)
ataatgagtccgagggcagcagctccagctcctcctcctcaggggactcctcagactctgactccaactgaggctcagccccaccccagggcagccagggagagcccaggagctcccctc

SEQ ID NO: 166170 - DNA, 120 bp, Artificial Sequence
  ENSG00000108312_23 (sequence is synthesized)
cccaactgaccacctttgtttctcccccatgttctgtcccttgcccccctggcctcccccactttctttctttctttaaaaaaaaaaaaaaatacggtgggggtagggggctggaggagc

SEQ ID NO: 166171 - DNA, 120 bp, Artificial Sequence
  ENSG00000108312_24 (sequence is synthesized)
ccaggccaggactctgcagcctcagagacatcagcccttgggggtcctcctccagggacagcaactatcagactaagccagcaccggaccagcctggcccaccccacccacttctgcact

SEQ ID NO: 166172 - DNA, 120 bp, Artificial Sequence
  ENSG00000108312_25 (sequence is synthesized)
tgcggttccggcatggacaatggaccggagagtgggggtggggggtcccaaagagtttgatgaggccctccacacctgcggcccaatccaaggtggggtggaagcttggggaagacccat

SEQ ID NO: 166173 - DNA, 120 bp, Artificial Sequence
  ENSG00000108312_26 (sequence is synthesized)
tccttcccagaggggcctgccacctggacccctgcattggaactggaggcagggaacatggggaggaggagggtcggtgccttcaagaaaacaggcactgccctggtggccctctcccct

SEQ ID NO: 166174 - DNA, 120 bp, Artificial Sequence
  ENSG00000108312_27 (sequence is synthesized)
gccccctgcaggaaggagctgcctggacccgttcatgggggagggggcagaagtgttttttatatatgtgtatatatttttttttaagctctgagctgtcaacgagacgtttcctaccga

SEQ ID NO: 166175 - DNA, 120 bp, Artificial Sequence
  ENSG00000108312_28 (sequence is synthesized)
tctcggctgccgtctctgttgtcatttctgggagagggagggtttaggggtagatttggaaccttttaaaaatggtcttgatgtatgtggaagagagtatgtgtatgtgtgttcctgtac

SEQ ID NO: 166176 - DNA, 120 bp, Artificial Sequence
  ENSG00000108312_29 (sequence is synthesized)
atagcatgggtgcagctgtggatgtgtgcaaaagagtgtgagtgtgtgtgtgtgtgtgtaaaggggtctgtcctagagcccacatcagtttgttgtgaatctggaaaaagggtcggtgag

SEQ ID NO: 166177 - DNA, 120 bp, Artificial Sequence
  ENSG00000108312_30 (sequence is synthesized)
ggccgggagatgttgaccctggtgggagcaggctgaggctgccccgttctccacatcctctgttttgcccagtctctgattccattagggggagtgtgctgaagccattctcggatgctt

SEQ ID NO: 166178 - DNA, 120 bp, Artificial Sequence
  ENSG00000108312_31 (sequence is synthesized)
cccagaccaggctccctctgccagagtcacatgcatccgagctgctggtctccattgtccagcaggaaggcggaaaggcaggcaagatggtgtgaagcttaaagcttgtatttgatggaa

SEQ ID NO: 166179 - DNA, 120 bp, Artificial Sequence
  ENSG00000108312_32 (sequence is synthesized)
aaggtctcccctgttcatctgagaggccaagcctggccaccccaggctcagaacctgggcttcaagaaatgtgctgggagctcctaacttacacatccctccagccttccttgaatcctc

SEQ ID NO: 166180 - DNA, 120 bp, Artificial Sequence
  ENSG00000108312_33 (sequence is synthesized)
ccaccaccccctatttcctttaatttctcaggtctgctccctcctcccccaaccccacagctgggcaagaagtctgcaaaagctgcatctgcagctgtctctaactcttcccagccatct

SEQ ID NO: 166181 - DNA, 120 bp, Artificial Sequence
  ENSG00000108312_34 (sequence is synthesized)
cccgtattttttggtaccttgattccttgactcttaataagccaagccaccttatctctgtagttcttatttttttgttgactaaatttggggggttcttttttatggtcatgtcactga

SEQ ID NO: 166182 - DNA, 120 bp, Artificial Sequence
  ENSG00000108312_35 (sequence is synthesized)
cctattaaattggggcttggtgcttttccaccttccccctctgaatgaaagccaaggaatgggggaagagcgggaactctgccgcggaggtggagcaagaacggtgaagggccctggtcc

SEQ ID NO: 166183 - DNA, 120 bp, Artificial Sequence
  ENSG00000108312_36 (sequence is synthesized)
cagagaggctggtgggtccctctcccaaaggaaggcagacagtctctgctttgccttggaccttggtgctgggggtggggaggcctgggggggacactccccactcccattccccttcct

SEQ ID NO: 166184 - DNA, 120 bp, Artificial Sequence
  ENSG00000108312_37 (sequence is synthesized)
ttgtcctaatcctggaattaagtacaggggtttataggttctatttcttcccaagagccctgcaaagaaccccagtttcctatttggatgcccctacactgttgtgtttcagtggaatgt

SEQ ID NO: 166185 - DNA, 120 bp, Artificial Sequence
  ENSG00000108312_38 (sequence is synthesized)
attttcatttaaaaacaactttgaatggggcactttttctttcctgttttaaaaattgaaaaattcttacagtacaaacaggactgtcagggtgggggtgttggtgctgtaagaggtcac

SEQ ID NO: 166186 - DNA, 120 bp, Artificial Sequence
  ENSG00000108312_39 (sequence is synthesized)
tcttgagtgcattttggcactgggatgggatggctggggtgggaagacccccatccccacccccaacttcttttctaatatttaaggagtgttttgtaggattcaacaaccaccacaact

SEQ ID NO: 166187 - DNA, 120 bp, Artificial Sequence
  ENSG00000108312_40 (sequence is synthesized)
tgaatttgtatcatgggaggtgggagggagtggcttagaggtgtctgcctatgcttaaagccaactgtggaagttttgttttcccttttttgtataataaagtgaaaaacaaaggtttga

SEQ ID NO: 166188 - DNA, 80 bp, Artificial Sequence
  ENSG00000108312_41 (sequence is synthesized)
gtgcttttcgccgcgaggagcagcaggcagcagccacagccgccgccgccgccgccgccgccacagcagcagcagccgcc

SEQ ID NO: 166189 - DNA, 120 bp, Artificial Sequence
  ENSG00000108312_42 (sequence is synthesized)
gagggagctgcggctgtgcccggccgagcgggggagggcgccgccactcagagccagggagggagccgctggagcgggaagcccggaggccgcgctgcgccggggtgaggtggctttgac

SEQ ID NO: 166190 - DNA, 120 bp, Artificial Sequence
  ENSG00000108312_43 (sequence is synthesized)
gcggagccgggctgcaggggctgggggagggggtcacgaggaagaggaggggcgcactcccattcccatagaccccttaagtctaataaggtcatggctgagtctctcagagtgtggacc

SEQ ID NO: 166191 - DNA, 120 bp, Artificial Sequence
  ENSG00000108312_44 (sequence is synthesized)
tgcccccttctactctgggcggttagaaagtcgttagtcgttcacctctcagccttcctgagtgggaactggtatgtcttccaaagggtgaggtggctttgaccccgggttgcccggcca

SEQ ID NO: 166192 - DNA, 120 bp, Artificial Sequence
  ENSG00000108312_45 (sequence is synthesized)
ggcgggcgggcggagcggggcgggcggagcgcggcgcgtggggctcgccattagccgtcgctccgcttcgccatctcgggctttgtctggcgactcgctgccccggcgtcggctgcagcg

SEQ ID NO: 166193 - DNA, 120 bp, Artificial Sequence
  ENSG00000108312_46 (sequence is synthesized)
ggcgactcgctgccccggcgtcggctgcagcggagctgcggctcgactgttcggcccgccgtgctcccaggtgcccccggcctgcgctcccatccacacgctcgggtgaggtggctttga

SEQ ID NO: 166194 - DNA, 80 bp, Artificial Sequence
  ENSG00000108312_47 (sequence is synthesized)
ggggctgggccgcaggctcgggggaggaggcggcggttcccgccgcggtcgcgcctctgtgccgggctcctccggtgagg

SEQ ID NO: 166195 - DNA, 120 bp, Artificial Sequence
  ENSG00000108312_48 (sequence is synthesized)
gggtcagttggaggtaggccttggagaaacctggcatcagggatgagggtgagtcagcacagcagaataggtcctgggcagccacacctgattgccccttcctcggcccacacatggtca

SEQ ID NO: 166196 - DNA, 120 bp, Artificial Sequence
  ENSG00000108312_49 (sequence is synthesized)
ggcacaggcaccatcacagatgtaaaccagacagcaggtgctcagaccaacctttccccctacagaaaacccacagcattctgtttcaagctctctctcccccatacacccatcctcact

SEQ ID NO: 166197 - DNA, 120 bp, Artificial Sequence
  ENSG00000108312_50 (sequence is synthesized)
ctctgccctccgactccgtggccaccgcactctgcgggaggtgtcactccccatccctctgttgagggaggggccttctgggcccctcacctctgcccctaccttccccaccccccaccc

SEQ ID NO: 166198 - DNA, 74 bp, Artificial Sequence
  ENSG00000108312_51 (sequence is synthesized)
aggagcactacaaaaagctggccgaggagcagcaaaagcagtacaaggtgcacctggacctctgggttaagaga

SEQ ID NO: 166199 - DNA, 120 bp, Artificial Sequence
  ENSG00000108312_52 (sequence is synthesized)
tcggcctcccaaagcactgggactacaggcttgagccaccgtccgcagccactatcacccttttaaaaataaggaaaccaaggctcagagaggttaagtaacttgcccaaggtcacacag

SEQ ID NO: 166200 - DNA, 120 bp, Artificial Sequence
  ENSG00000108312_53 (sequence is synthesized)
cccctctgtgctttggttgagtagtcagatctgtaaagtggagagaatcacctgtgtccttcccactcaccaaggcaggttggccaaggacccaggaagactgtggggatttgctgtttc

SEQ ID NO: 166201 - DNA, 120 bp, Artificial Sequence
  ENSG00000108312_54 (sequence is synthesized)
ggacccttggaaggaacagagaggcatcagactaagccagcaccatcctagcctggcccatccacccacttgtgctggctggtctcattcatgatttcattccatgccctcgcaatcctt

SEQ ID NO: 166202 - DNA, 120 bp, Artificial Sequence
  ENSG00000108342_0 (sequence is synthesized)
cggagcctgcagcccagccccacccagacccatggctggacctgccacccagagccccatgaagctgatggccctgcagctgctgctgtggcacagtgcactctggacagtgcaggaagc

SEQ ID NO: 166203 - DNA, 120 bp, Artificial Sequence
  ENSG00000108342_1 (sequence is synthesized)
cacccccctgggccctgccagctccctgccccagagcttcctgctcaagtgcttagagcaagtgaggaagatccagggcgatggcgcagcgctccaggagaagctggtgagtgagtgtgc

SEQ ID NO: 166204 - DNA, 120 bp, Artificial Sequence
  ENSG00000108342_2 (sequence is synthesized)
cacctacaagctgtgccaccccgaggagctggtgctgctcggacactctctgggcatcccctgggctcccctgagcagctgccccagccaggccctgcagctggcaggctgcttgagcca

SEQ ID NO: 166205 - DNA, 120 bp, Artificial Sequence
  ENSG00000108342_3 (sequence is synthesized)
actccatagcggccttttcctctaccaggggctcctgcaggccctggaagggatctcccccgagttgggtcccaccttggacacactgcagctggacgtcgccgactttgccaccaccat

SEQ ID NO: 166206 - DNA, 120 bp, Artificial Sequence
  ENSG00000108342_4 (sequence is synthesized)
ctggcagcagatggaagaactgggaatggcccctgccctgcagcccacccagggtgccatgccggccttcgcctctgctttccagcgccgggcaggaggggtcctggttgcctcccatct

SEQ ID NO: 166207 - DNA, 120 bp, Artificial Sequence
  ENSG00000108342_5 (sequence is synthesized)
gcagagcttcctggaggtgtcgtaccgcgttctacgccaccttgcccagccctgagccaagccctccccatcccatgtatttatctctatttaatatttatgtctatttaagcctcatat

SEQ ID NO: 166208 - DNA, 120 bp, Artificial Sequence
  ENSG00000108342_6 (sequence is synthesized)
ctcctgcctgtagcagtgagaaaaagctcctgtcctcccatcccctggactgggaggtagataggtaaataccaagtatttattactatgactgctccccagccctggctctgcaatggg

SEQ ID NO: 166209 - DNA, 120 bp, Artificial Sequence
  ENSG00000108342_7 (sequence is synthesized)
cactgggatgagccgctgtgagcccctggtcctgagggtccccacctgggacccttgagagtatcaggtctcccacgtgggagacaagaaatccctgtttaatatttaaacagcagtgtt

SEQ ID NO: 166210 - DNA, 120 bp, Artificial Sequence
  ENSG00000108342_8 (sequence is synthesized)
ccccatctgggtccttgcacccctcactctggcctcagccgactgcacagcggcccctgcatccccttggctgtgaggcccctggacaagcagaggtggccagagctgggaggcatggcc

SEQ ID NO: 166211 - DNA, 120 bp, Artificial Sequence
  ENSG00000108342_9 (sequence is synthesized)
ctggggtcccacgaatttgctggggaatctcgtttttcttcttaagacttttgggacatggtttgactcccgaacatcaccgacgcgtctcctgtttttctgggtggcctcgggacacct

SEQ ID NO: 166212 - DNA, 120 bp, Artificial Sequence
  ENSG00000108342_10 (sequence is synthesized)
gccctgcccccacgagggtcaggactgtgactctttttagggccaggcaggtgcctggacatttgccttgctggacggggactggggatgtgggagggagcagacaggaggaatcatgtc

SEQ ID NO: 166213 - DNA, 120 bp, Artificial Sequence
  ENSG00000108342_11 (sequence is synthesized)
aggcctgtgtgtgaaaggaagctccactgtcaccctccacctcttcaccccccactcaccagtgtcccctccactgtcacattgtaactgaacttcaggataataaagtgtttgcctcca

SEQ ID NO: 166214 - DNA, 120 bp, Artificial Sequence
  ENSG00000108342_12 (sequence is synthesized)
agcctgcagcccagccccacccagacccatggctggacctgccacccagagccccatgaagctgatgggtgagtgtcttggcccaggatgggagagccgcctgccctggcatgggaggga

SEQ ID NO: 166215 - DNA, 120 bp, Artificial Sequence
  ENSG00000108342_13 (sequence is synthesized)
ggctggtgtgacagaggggctggggatccccgttctgggaatggggattaaaggcacccagtgtccccgagagggcctcaggtggtagggaacagcatgtctcctgagcccgctctgtcc

SEQ ID NO: 166216 - DNA, 120 bp, Artificial Sequence
  ENSG00000108342_14 (sequence is synthesized)
atcctctggaagggacgtgggagaatattaggagcagtggagctggggaaggctgggaagggacttggggaggaggaccttggtggggacagtgctcgggagggctggctgggatgggag

SEQ ID NO: 166217 - DNA, 120 bp, Artificial Sequence
  ENSG00000108342_15 (sequence is synthesized)
tggaggcattacattcaggagaaagggcaagggcccctgtgagatcagagagtgggggtgcagggcagagaggaactgaacagcctggcaggacatggagggaggggaaagaccagagag

SEQ ID NO: 166218 - DNA, 120 bp, Artificial Sequence
  ENSG00000108344_0 (sequence is synthesized)
agaaggcccagcgccgggaaggggtttgcagctgctccgtcatcgtgcggcccgacgctatctcgcgctcgtgtgcaggcccggctcggctcctggtccccggtgcgagggttaacgcga

SEQ ID NO: 166219 - DNA, 120 bp, Artificial Sequence
  ENSG00000108344_1 (sequence is synthesized)
ggccccggcctcggtccccggactaggccgtgaccccgggtgccatgaagcaggagggctcggcgcggcgccgcggcgcggacaaggcgaaaccgccgcccggcggaggagaacaagaac

SEQ ID NO: 166220 - DNA, 120 bp, Artificial Sequence
  ENSG00000108344_2 (sequence is synthesized)
ccccaccgccgccggccccccaggatgtggagatgaaagaggaggcagcgacgggtggcgggtcgacgggggaggcagacggcaagacggcggcggcagcggctgagcactcccagcgag

SEQ ID NO: 166221 - DNA, 120 bp, Artificial Sequence
  ENSG00000108344_3 (sequence is synthesized)
agctggacacagtcaccttggaggacatcaaggagcacgtgaaacagctagagaaagcggtttcaggcaaggagccgagattcgtgctgcgggccctgcggatgctgccttccacatcac

SEQ ID NO: 166222 - DNA, 120 bp, Artificial Sequence
  ENSG00000108344_4 (sequence is synthesized)
gccgcctcaaccactatgttctgtataaggctgtgcagggcttcttcacttcaaataatgccactcgagactttttgctccccttcctggaagagcccatggacacagaggctgatttac

SEQ ID NO: 166223 - DNA, 120 bp, Artificial Sequence
  ENSG00000108344_5 (sequence is synthesized)
agttccgtccccgcacgggaaaagctgcgtcgacacccctcctgcctgaagtggaagcctatctccaactcctcgtggtcatcttcatgatgaacagcaagcgctacaaagaggcacaga

SEQ ID NO: 166224 - DNA, 120 bp, Artificial Sequence
  ENSG00000108344_6 (sequence is synthesized)
agatctctgatgatctgatgcagaagatcagtactcagaaccgccgggccctagaccttgtagccgcaaagtgttactattatcacgcccgggtctatgagttcctggacaagctggatg

SEQ ID NO: 166225 - DNA, 120 bp, Artificial Sequence
  ENSG00000108344_7 (sequence is synthesized)
tggtgcgcagcttcttgcatgctcggctccggacagctacgcttcggcatgacgcagacgggcaggccaccctgttgaacctcctgctgcggaattacctacactacagcttgtacgacc

SEQ ID NO: 166226 - DNA, 120 bp, Artificial Sequence
  ENSG00000108344_8 (sequence is synthesized)
tactcagaggcccggagaacgatgaccaacgcccttcgcaaggcccctcagcacacagctgtcggcttcaaacagacggtgcacaagcttctcatcgtggtggagctgttgctgggggag

SEQ ID NO: 166227 - DNA, 120 bp, Artificial Sequence
  ENSG00000108344_9 (sequence is synthesized)
atccctgaccggctgcagttccgccagccctccctcaagcgctcactcatgccctatttccttctgactcaagctgtcaggacaggaaacctagccaagttcaaccaggtcctggatcag

SEQ ID NO: 166228 - DNA, 120 bp, Artificial Sequence
  ENSG00000108344_10 (sequence is synthesized)
tttggggagaagtttcaagcagatgggacctacaccctaattatccggctgcggcacaacgtgattaagacaggtgtacgcatgatcagcctctcctattcccgaatctccttggctgac

SEQ ID NO: 166229 - DNA, 120 bp, Artificial Sequence
  ENSG00000108344_11 (sequence is synthesized)
atcgcccagaagctgcagttggatagccccgaagatgcagagttcattgttgccaaggccatccgggatggtgtcattgaggccagcatcaaccacgagaagggctatgtccaatccaag

SEQ ID NO: 166230 - DNA, 120 bp, Artificial Sequence
  ENSG00000108344_12 (sequence is synthesized)
gagatgattgacatctattccacccgagagccccagctagccttccaccagcgcatctccttctgcctagatatccacaacatgtctgtcaaggccatgaggtttcctcccaaatcgtac

SEQ ID NO: 166231 - DNA, 120 bp, Artificial Sequence
  ENSG00000108344_13 (sequence is synthesized)
aacaaggacttggagtctgcagaggaacggcgtgagcgagaacagcaggacttggagtttgccaaggagatggcagaagatgatgatgacagcttcccttgagctggggggctggggagg

SEQ ID NO: 166232 - DNA, 120 bp, Artificial Sequence
  ENSG00000108344_14 (sequence is synthesized)
ggtagggggaatggggacaggctctttcccccttgggggtcccctgcccagggcactgtccccattttcccacacacagctcatatgctgcattcgtgcagggggtgggggtgctgggag

SEQ ID NO: 166233 - DNA, 120 bp, Artificial Sequence
  ENSG00000108344_15 (sequence is synthesized)
ccagccaccctgacctcccccagggctcctccccagccggtgacttactgtacagcaggcaggagggtgggcaggcaacctccccgggcagggtcctggccagcagtgtgggagcaggag

SEQ ID NO: 166234 - DNA, 120 bp, Artificial Sequence
  ENSG00000108344_16 (sequence is synthesized)
gggaaggatagttctgtgtactcctttagggagtgggggactagaactgggatgtcttggcttgtatgttttttgaagcttcgattatgatttttaaacaataaaaagttctccacagtg

SEQ ID NO: 166235 - DNA, 120 bp, Artificial Sequence
  ENSG00000108344_17 (sequence is synthesized)
ccgttactctgctggcactgccaccgcaaggtcccacagacttggcggcttaaacaaccgaaattgatttcatcacaattctggaggctctaagtccaacagcaaagtgtgacacgattg

SEQ ID NO: 166236 - DNA, 120 bp, Artificial Sequence
  ENSG00000108344_18 (sequence is synthesized)
gtttcttctgagggcctctctcgtctgcttgtcgatggccgtctcctggtgttttcacatggtcttccctctgtgcgtgtctgtgtcctgcttttgtcttagaaggacaatagtcatgta

SEQ ID NO: 166237 - DNA, 120 bp, Artificial Sequence
  ENSG00000108344_19 (sequence is synthesized)
ggattagggtccacccatatgacctcactttaccataattacctctttaaaggccctgtgtccaaatagagtcccattctgaggtactggggtttaggtctctaacatgaacttgagggg

SEQ ID NO: 166238 - DNA, 120 bp, Artificial Sequence
  ENSG00000108344_20 (sequence is synthesized)
gatgcagtttagcccataacactaactctgacccctctcacgagcatcaggcctgcagatccagctccccctcccactccccatgtctctctctacagcgtgtcccaaagagatccctcc

SEQ ID NO: 166239 - DNA, 120 bp, Artificial Sequence
  ENSG00000108344_21 (sequence is synthesized)
tggcccccttaccattccttcctcctgctttcccgatccagatcagggccttgggatcatctctgactctcccccatcctccttcccatcacttggtcgtctgttgaattgtctgcacat

SEQ ID NO: 166240 - DNA, 120 bp, Artificial Sequence
  ENSG00000108344_22 (sequence is synthesized)
cttctgtgtttgcctgttccttcatattgccagtgccatggtttgagccactaacattcccagacacttctgcctggtcatcttcctctccagcagcccagcttacattcacttgcctta

SEQ ID NO: 166241 - DNA, 120 bp, Artificial Sequence
  ENSG00000108344_23 (sequence is synthesized)
ctaagcagagctccagctctgtccttcccttgcctgggaagcttccattgctccccactgctgtagggtatcataacggtcttgtgaggtagacaggctaggtattgttattgttatttg

SEQ ID NO: 166242 - DNA, 120 bp, Artificial Sequence
  ENSG00000108344_24 (sequence is synthesized)
gtagttttagagatgaggaactaaggacccagttgctcagtgtttcctagctagtgaatagagactagacaccaagtgttctacgtgcagactttatactgctcagcctggcacacaaaa

SEQ ID NO: 166243 - DNA, 120 bp, Artificial Sequence
  ENSG00000108344_25 (sequence is synthesized)
tggcaatggcatagtccccagactgcggtcccaactgtctctttcctaacagctccccaggcacccacacttttctgcctctttttcaatctgtacccttgaccctcctcctttttctgc

SEQ ID NO: 166244 - DNA, 120 bp, Artificial Sequence
  ENSG00000108344_26 (sequence is synthesized)
tttgtcagactccttaaggcacttcataaattaaccatttccagggatttcccctcacacatgagttattccagtggacagggcagcctcatgggtgcctgtggagggtgaagggtctgc

SEQ ID NO: 166245 - DNA, 120 bp, Artificial Sequence
  ENSG00000108344_27 (sequence is synthesized)
ctggccgtaggtgtgatcacacactcccgttgtaacccctgtctcctgtgacacttgctgccccacgatttagctgctttgtgttccgtgcctcctgtttgctggtgaactcctgagttg

SEQ ID NO: 166246 - DNA, 120 bp, Artificial Sequence
  ENSG00000108344_28 (sequence is synthesized)
gggggcgtcattccctccactgtagttcttccgcgatgctgactccacccacggtcagcaccactcggaaatacttcacagtcctgtagaggaagacaggtccaggtttccagttaccct

SEQ ID NO: 166247 - DNA, 120 bp, Artificial Sequence
  ENSG00000108344_29 (sequence is synthesized)
tggatactctgctcattcactgaagccaggccccttcctgcacttatgcctctacccagataatgagttctacccactgatgacctcctctcctctagtaacagtccgcctccctaatga

SEQ ID NO: 166248 - DNA, 120 bp, Artificial Sequence
  ENSG00000108344_30 (sequence is synthesized)
gcatctctggctgacacacgttccgttctccaggcctgtgagccctggtccctcgctgttgctgagccacagcacccgcccttctggcctcactttagagcactgtcatttcagagcaga

SEQ ID NO: 166249 - DNA, 120 bp, Artificial Sequence
  ENSG00000108344_31 (sequence is synthesized)
ctacgcgcggggtggccaggtgaaatgcagctgacggctctgcgaccaaatgtgaccaaagggccacattcccagcacccggctccaaaggcagagcttggattctatgcccagcacagg

SEQ ID NO: 166250 - DNA, 120 bp, Artificial Sequence
  ENSG00000108344_32 (sequence is synthesized)
ttttcagggcttcctcctctctctgggcctaaacagtgatccctttccctgtttcccactacatctggcagaatttaggccacatttcattttcttcttccgcccatggggctccctgcc

SEQ ID NO: 166251 - DNA, 120 bp, Artificial Sequence
  ENSG00000108344_33 (sequence is synthesized)
tgccaaggtggggctggttcaggaaccacagtgaccaggttgtcactttcctgccaatctcaggaggcaggagtgggaggagtttggccaaggaggggaataggtaaagcaatggcatag

SEQ ID NO: 166252 - DNA, 120 bp, Artificial Sequence
  ENSG00000108344_34 (sequence is synthesized)
tcatttcagggcgtgcccgtcatttgcagtgaagccaagaagttgccagagagagcatggatgtgcatgtgagtgtgtgagtgtaggtgtgtgcacatgttgagtttatgatagtgcctg

SEQ ID NO: 166253 - DNA, 120 bp, Artificial Sequence
  ENSG00000108344_35 (sequence is synthesized)
tgagtttatgatagtgcctgtgagtgtgagaatataaggagggcagaggaatgggatggaacaagatgttctctgacttagaagatgggcgtgctgggccaggcgcagtggctcatgcct

SEQ ID NO: 166254 - DNA, 120 bp, Artificial Sequence
  ENSG00000108344_36 (sequence is synthesized)
gtacctctactacacaggtgagcagaggggcccaacccataaatcagaaggtgtctcaggcctgcctggtgcaaattttccaaggggtggtgcataagaggcccatttggcaccctggct

SEQ ID NO: 166255 - DNA, 120 bp, Artificial Sequence
  ENSG00000108344_37 (sequence is synthesized)
tgtcggtggggagttggatgaccctactctgttgaccaactctcctctcctccactcccagggcgaatcaaagccatccagctggagtactcagaggcccggagaacgatgaccaacgcc

SEQ ID NO: 166256 - DNA, 120 bp, Artificial Sequence
  ENSG00000108349_0 (sequence is synthesized)
gttctccgtaagatggcggaccggcggcggcagcgcgcttcgcaagacaccgaggacgaggaatctggtgcttcgggctccgacagcggcggctccccgttgcggggaggcgggagctgc

SEQ ID NO: 166257 - DNA, 120 bp, Artificial Sequence
  ENSG00000108349_1 (sequence is synthesized)
agcggtagcgccggaggcggcggcagcggctctctgccttcacagcgcggaggccgaaccggggcccttcatctgcggcgggtggagagcgggggcgccaagagtgctgaggagtcggag

SEQ ID NO: 166258 - DNA, 120 bp, Artificial Sequence
  ENSG00000108349_2 (sequence is synthesized)
tgtgagagtgaagatggcattgaaggtgatgctgttctctcggattatgaaagtgcagaagactcggaaggtgaagaaggtgaatacagtgaagaggaaaactccaaagtggagctgaaa

SEQ ID NO: 166259 - DNA, 120 bp, Artificial Sequence
  ENSG00000108349_3 (sequence is synthesized)
tcagaagctaatgatgctgttaattcttcaacaaaagaagagaagggagaagaaaagcctgacaccaaaagcactgtgactggagagaggcaaagtggggacggacaggagagcacagag

SEQ ID NO: 166260 - DNA, 120 bp, Artificial Sequence
  ENSG00000108349_4 (sequence is synthesized)
cctgtggagaacaaagtgggtaaaaagggccctaagcatttggatgatgatgaagatcggaagaatccagcatacatacctcggaaagggctcttctttgagcatgatcttcgagggcaa

SEQ ID NO: 166261 - DNA, 120 bp, Artificial Sequence
  ENSG00000108349_5 (sequence is synthesized)
actcaggaggaggaagtcagacccaaggggcgtcagcgaaagctatggaaggatgagggtcgctgggagcatgacaagttccgggaagatgagcaggccccaaagtcccgacaggagctc

SEQ ID NO: 166262 - DNA, 120 bp, Artificial Sequence
  ENSG00000108349_6 (sequence is synthesized)
attgctctttatggttatgacattcgctcagctcataatcctgatgacatcaaacctcgaagaatccggaaaccccgatatgggagtcctccacaaagagatccaaactggaacggtgag

SEQ ID NO: 166263 - DNA, 120 bp, Artificial Sequence
  ENSG00000108349_7 (sequence is synthesized)
cggctaaacaagtctcatcgccaccagggtcttgggggcaccctaccaccaaggacatttattaacaggaatgctgcaggtaccggccgtatgtctgcacccaggaattattctcgatct

SEQ ID NO: 166264 - DNA, 120 bp, Artificial Sequence
  ENSG00000108349_8 (sequence is synthesized)
gggggcttcaaggaaggtcgtgctggttttaggcctgtggaagctggtgggcagcatggtggccggtctggtgagactgttaagcatgagattagttaccggtcacggcgcctagagcag

SEQ ID NO: 166265 - DNA, 120 bp, Artificial Sequence
  ENSG00000108349_9 (sequence is synthesized)
acttctgtgagggatccatctccagaagcagatgctccagtgcttggcagtcctgagaaggaagaggcagcctcagagccaccagctgctgctcctgatgctgcaccaccaccccctgat

SEQ ID NO: 166266 - DNA, 120 bp, Artificial Sequence
  ENSG00000108349_10 (sequence is synthesized)
aggcccattgagaagaaatcctattcccgggcaagaagaactcgaaccaaagttggagatgcagtcaagcttgcagaggaggtgccccctcctcctgaaggactgattccagcacctcca

SEQ ID NO: 166267 - DNA, 120 bp, Artificial Sequence
  ENSG00000108349_11 (sequence is synthesized)
gtcccagaaaccaccccaactccacctactaagactgggacctgggaagctccggtggattctagtacaagtggacttgagcaagatgtggcacaactaaatatagcagaacagaattgg

SEQ ID NO: 166268 - DNA, 120 bp, Artificial Sequence
  ENSG00000108349_12 (sequence is synthesized)
agtccggggcagccttctttcctgcaaccacgggaacttcgaggtatgcccaaccatatacacatgggagcaggacctccacctcagtttaaccggatggaagaaatgggtgtccagggt

SEQ ID NO: 166269 - DNA, 120 bp, Artificial Sequence
  ENSG00000108349_13 (sequence is synthesized)
ggtcgagccaaacgctattcatcccagcggcaaagacctgtgccagagccccccgcccctccagtgcatatcagtatcatggagggacattactatgatccactgcagttccagggacca

SEQ ID NO: 166270 - DNA, 120 bp, Artificial Sequence
  ENSG00000108349_14 (sequence is synthesized)
atctatacccatggtgacagccctgccccgctgcctccacagggcatgcttgtgcagccaggaatgaaccttccccacccaggtttacatccccaccagacaccagctcctctgcccaat

SEQ ID NO: 166271 - DNA, 120 bp, Artificial Sequence
  ENSG00000108349_15 (sequence is synthesized)
ccaggcctctatcccccaccagtgtccatgtctccaggacagccaccacctcagcagttgcttgctcctacttacttttctgctccaggcgtcatgaactttggtaatcccagttaccct

SEQ ID NO: 166272 - DNA, 120 bp, Artificial Sequence
  ENSG00000108349_16 (sequence is synthesized)
tacacaggccccatcacaggtatatggaggagtgacctactataaccccgcccagcagcaggtgcagccaaagccctccccaccccggaggactccccagccagtcaccatcaagccccc

SEQ ID NO: 166273 - DNA, 120 bp, Artificial Sequence
  ENSG00000108349_17 (sequence is synthesized)
tccacctgaggttgtaagcaggggttccagttaatacaagtttctgaatattttaaatcttaacatcatataaaaagcagcagaggtgagaactcagaagagaaatacagctggctatct

SEQ ID NO: 166274 - DNA, 120 bp, Artificial Sequence
  ENSG00000108349_18 (sequence is synthesized)
actaccagaagggcttcaaagatatagggtgtggctcctaccagcaaacagctgaaagaggaggacccctgccttcctctgaggacaggctctagagagagggagaaacaagtggacctc

SEQ ID NO: 166275 - DNA, 120 bp, Artificial Sequence
  ENSG00000108349_19 (sequence is synthesized)
gtcccatcttcactcttcacttgagttggctgtgttcgggggagcagagagagccagacagccccaagcttctgagtctagatacagaagcccatgtcttctgctgttcttcacttctgg

SEQ ID NO: 166276 - DNA, 120 bp, Artificial Sequence
  ENSG00000108349_20 (sequence is synthesized)
gaaattgaagtgtcttctgttcccaaggaagctccttcctgtttgttttgttttctaagatgttcatttttaaagcctggcttcttatccttaatattattttaattttttctctttgtt

SEQ ID NO: 166277 - DNA, 120 bp, Artificial Sequence
  ENSG00000108349_21 (sequence is synthesized)
tctgtttcttgctctctctccctgcctttaaatgaaacaagtctagtcttctggttttctagcccctctggattcccttttgactcttccgtgcatcccagataatggagaatgtatcag

SEQ ID NO: 166278 - DNA, 120 bp, Artificial Sequence
  ENSG00000108349_22 (sequence is synthesized)
ccagccttccccaccaagtctaaaaagacctggcctttcacttttagttggcatttgttatcctcttgtatacttgtattcccttaactctaaccctgtggaagcatggctgtctgcaca

SEQ ID NO: 166279 - DNA, 120 bp, Artificial Sequence
  ENSG00000108349_23 (sequence is synthesized)
gagggtcccattgtgcagaaaagctcagagtaggtgggtaggagcccttctctttgacttaggtttttaggagtctgagcatccatcaatacctgtactatgatgggcttctgttctctg

SEQ ID NO: 166280 - DNA, 120 bp, Artificial Sequence
  ENSG00000108349_24 (sequence is synthesized)
ctgagggccaataccctactgtggggagagatggcacaccagatgcttttgtgagaaagggatggtggagtgagagcctttgcctttaggggtgtgtattcacatagtcctcagggctca

SEQ ID NO: 166281 - DNA, 120 bp, Artificial Sequence
  ENSG00000108349_25 (sequence is synthesized)
gtcttttgaggtaagtggaattagagggccttgcttctcttctttccattcttcttgctacaccccttttccagttgctgtggaccaatgcatctctttaaaggcaaatattatccagca

SEQ ID NO: 166282 - DNA, 120 bp, Artificial Sequence
  ENSG00000108349_26 (sequence is synthesized)
agcagtctaccctgtcctttgcaattgctcttctccacgtctttcctgctacaagtgttttagatgttactaccttattttccccgaattctatttttgtccttgcagacagaatataaa

SEQ ID NO: 166283 - DNA, 120 bp, Artificial Sequence
  ENSG00000108349_27 (sequence is synthesized)
aactcctgggcttaaggcctaaggaagccagtcaccttctgggcaagggctcctatctttcctccctatccatggcactaaaccacttctctgctgcctctgtggaagagattcctatta

SEQ ID NO: 166284 - DNA, 120 bp, Artificial Sequence
  ENSG00000108349_28 (sequence is synthesized)
ctgcagtacatacgtctgccaggggtaacctggccactgtccctgtccttctacagaacctgagggcaaagatggtggctgtgtctctccccggtaatgtcactgtttttattccttcca

SEQ ID NO: 166285 - DNA, 120 bp, Artificial Sequence
  ENSG00000108349_29 (sequence is synthesized)
tctagcagctggcctaatcactctgagtcacaggtgtgggatggagagtggggagaggcacttaatctgtaacccccaaggaggaaataactaagagattcttctaggggtagctggtgg

SEQ ID NO: 166286 - DNA, 120 bp, Artificial Sequence
  ENSG00000108349_30 (sequence is synthesized)
ttgtgccttttgtaggctgttccctttgccttaaacctgaagatgtctcctcaagcctgtgggcagcatgcccagattcccagaccttaagacactgtgagagttgtctctgttggtcca

SEQ ID NO: 166287 - DNA, 120 bp, Artificial Sequence
  ENSG00000108349_31 (sequence is synthesized)
ctgtgtttagttgcaaggatttttccatgtgtggtggtgttttttgttactgttttaaagggtgcccatttgtgatcagcattgtgacttggagataataaaatttagactataaacttg

SEQ ID NO: 166288 - DNA, 120 bp, Artificial Sequence
  ENSG00000108349_32 (sequence is synthesized)
aggtgatgctaggtagtctgtgagttgatagtagatactgggacttttttttgtttttgagagaaaaggggagttatcccaatgcgagtttgcatccggagttccaagggaagaagaagg

SEQ ID NO: 166289 - DNA, 120 bp, Artificial Sequence
  ENSG00000108349_33 (sequence is synthesized)
attgggggtttctgggaggatggtagagccgctggagatggaaagcggatgttttattcagaagtcggggctggagggaaggagaccagacctgccttggctactacttgataaagattt

SEQ ID NO: 166290 - DNA, 120 bp, Artificial Sequence
  ENSG00000108349_34 (sequence is synthesized)
acggacaggttagtacattccacagtcctccattttagaggctggaatagagattcttgaggcttggaagagtaaggatccctttatctgtcctctaggagagcacagagcctgtggaga

SEQ ID NO: 166291 - DNA, 120 bp, Artificial Sequence
  ENSG00000108349_35 (sequence is synthesized)
gtttttctagatacacattctttaattcagacaggaatgtggtatggggagaatgctaaaggaatttgagagaacattttcagtgccactgatttgtatgtgacaccaagacgcctctta

SEQ ID NO: 166292 - DNA, 120 bp, Artificial Sequence
  ENSG00000108349_36 (sequence is synthesized)
agacgcctcttagtggtcaggagctggaaatgcagcttatgtaatgcccatcatctttattcttttcagtttttttctccgttgcccaggcttggagtgcagtggcgtgatctcggttca

SEQ ID NO: 166293 - DNA, 62 bp, Artificial Sequence
  ENSG00000108349_37 (sequence is synthesized)
cctgccaccatgcccggctagtttttgtatttctagtagagatggcgtttcaccatgttggc

SEQ ID NO: 166294 - DNA, 69 bp, Artificial Sequence
  ENSG00000108349_38 (sequence is synthesized)
gttcagtttctttaatggtgtttctttcctgtgttgtggtacatcataggtggcaatacctggttttta

SEQ ID NO: 166295 - DNA, 120 bp, Artificial Sequence
  ENSG00000108349_39 (sequence is synthesized)
tgtgttgtggtacatcataggtggcaatacctggtttttactctattgcataaagaagctgtattctactccttatcacccctacctctgtcctgcttaacttccaccacgttgacataa

SEQ ID NO: 166296 - DNA, 120 bp, Artificial Sequence
  ENSG00000108349_40 (sequence is synthesized)
tcaagtatctgtagtgtcgctactgaactcagccttttccatttgtcagctgatggtaggaattagagaaagctgggcagtactttgaagaaataaaaaccagagcataataatgaagaa

SEQ ID NO: 166297 - DNA, 120 bp, Artificial Sequence
  ENSG00000108349_41 (sequence is synthesized)
ttaaggcaaaaatgaatagtcactttattttgaagggtgggcagattagatatttttaaaattataaattccccaattctcttatggctgaataatatttcctgttcatcataggttgga

SEQ ID NO: 166298 - DNA, 65 bp, Artificial Sequence
  ENSG00000108349_42 (sequence is synthesized)
ttacgggatcacggctcactgcaagctctgcctcctgggtcccagttcaagcaattctgcctcag

SEQ ID NO: 166299 - DNA, 120 bp, Artificial Sequence
  ENSG00000108349_43 (sequence is synthesized)
cgacattctcacacactgtcacggatttagggccacagagtgcctttttgtaacatagtggttaagagcataggctttagcagtatagtcttcagcaagttaccctctgagcctgtttct

SEQ ID NO: 166300 - DNA, 120 bp, Artificial Sequence
  ENSG00000108349_44 (sequence is synthesized)
ccttttgtaagtggggactataattttatccacgttgtaggttgatgtcagaattaaatgagactcttagtctgacctgtaataagcagccaaaaaatgtttctgggtttctttttttcc

SEQ ID NO: 166301 - DNA, 120 bp, Artificial Sequence
  ENSG00000108349_45 (sequence is synthesized)
ttcagctcactttgcaaatatccattaaatacctgccatgtaccaagtgtttttcaacacctaaaggaaggtaggacttgatatgagagccctctagaattcttattgtttaggcctctt

SEQ ID NO: 166302 - DNA, 120 bp, Artificial Sequence
  ENSG00000108349_46 (sequence is synthesized)
gggagtgccacaaaacccatcctcctgagctttgtgctgctagcctgggagtctggccatcctggctgcttgggcaacaagttcctcttgtgtccatcctgaggacttccattctgagcc

SEQ ID NO: 166303 - DNA, 80 bp, Artificial Sequence
  ENSG00000108352_0 (sequence is synthesized)
ctccgcccgctgcctctgccgccgcagcgcagagccgggcgcaccggccccgcagcctgcccactcttcgggccgcgtgc

SEQ ID NO: 166304 - DNA, 120 bp, Artificial Sequence
  ENSG00000108352_1 (sequence is synthesized)
gtgccggctgcagccggcatggggggttgctgagagcgagcactcctttcctctggcacctcccccggctactggccactggactctggccagcgaggctcggcccctctggcccccagt

SEQ ID NO: 166305 - DNA, 120 bp, Artificial Sequence
  ENSG00000108352_2 (sequence is synthesized)
ctggcgcctggcacggccctctactctgctcctccagctctgagcatcgtgtcttcgccgccccccccgcccgcgcctgggatacctgggtcccccggcgacccctaggagaggggcggg

SEQ ID NO: 166306 - DNA, 120 bp, Artificial Sequence
  ENSG00000108352_3 (sequence is synthesized)
ggggggcatgaagccgctggagaaatttctgaagaagcagacgtcgcagctggcgggccgaacggtggcgggaggtcccggcgggggtctggggagctgcggtgggcctggagggggtgg

SEQ ID NO: 166307 - DNA, 120 bp, Artificial Sequence
  ENSG00000108352_4 (sequence is synthesized)
gggcggcggtccagccgggggacagcggtcgttgcagcggcgtcagagcgtgtctcgcctgctgctccccgctttcctccgggagccccccgccgagccggggctggagccgccccctga

SEQ ID NO: 166308 - DNA, 120 bp, Artificial Sequence
  ENSG00000108352_5 (sequence is synthesized)
ggtcgcggaggagccgggcagcggggggccctgctggctgcagctggaggaggtgccggggcccgggcctctcgggggaggggggcccctgcgctccccttcctcctactcatctgacga

SEQ ID NO: 166309 - DNA, 120 bp, Artificial Sequence
  ENSG00000108352_6 (sequence is synthesized)
gcccctgcgctccccttcctcctactcatctgacgagctgtccccaggcgagcccttgacttcgccgccctgggcccctctgggcgcccccgagcggcccgagcatcttctgaaccgggt

SEQ ID NO: 166310 - DNA, 120 bp, Artificial Sequence
  ENSG00000108352_7 (sequence is synthesized)
tctggagcggcttgctggaggggctaccagggacagcgccgcctcagatatcctgctggatgacattgtccttacccattctctcttcctcccgacggagaaatttctgcaggagctaca

SEQ ID NO: 166311 - DNA, 120 bp, Artificial Sequence
  ENSG00000108352_8 (sequence is synthesized)
ccagtactttgttcgggcaggaggcatggagggccctgaagggctgggccggaagcaagcctgtctagccatgcttctccatttcttggacacctaccaggggctgcttcaagaggaaga

SEQ ID NO: 166312 - DNA, 120 bp, Artificial Sequence
  ENSG00000108352_9 (sequence is synthesized)
gggggccggccacatcatcaaggatctatacctgctaattatgaaggacgagtccctttaccagggcctccgagaggacactctgaggctgcaccagctggtggagacggtggaactaaa

SEQ ID NO: 166313 - DNA, 120 bp, Artificial Sequence
  ENSG00000108352_10 (sequence is synthesized)
gattccagaggagaaccagccacccagcaagcaggtgaagccactcttccgccacttccgccggatagactcctgtctgcagacccgggtggccttccggggctctgatgagatcttctg

SEQ ID NO: 166314 - DNA, 120 bp, Artificial Sequence
  ENSG00000108352_11 (sequence is synthesized)
ccgtgtatacatgcctgaccactcttatgtgaccatacgcagccgcctttcagcatctgtgcaggacattctgggctctgtgacggagaaacttcaatattcagaggagcccgcggggcg

SEQ ID NO: 166315 - DNA, 120 bp, Artificial Sequence
  ENSG00000108352_12 (sequence is synthesized)
tgaggattccctcatcctggtagctgtgtcctcctctggagagaaggtccttctccagcccactgaggactgtgttttcaccgcactgggcatcaacagccacctgtttgcctgtactcg

SEQ ID NO: 166316 - DNA, 120 bp, Artificial Sequence
  ENSG00000108352_13 (sequence is synthesized)
ggacagctatgaggctctggtgcccctccccgaggagatccaggtctcccctggagacacagagatccaccgagtggagcctgaggacgttgccaaccacctaactgccttccactggga

SEQ ID NO: 166317 - DNA, 120 bp, Artificial Sequence
  ENSG00000108352_14 (sequence is synthesized)
gctgttccgatgtgtgcatgagctggagttcgtggactacgtgttccacggggagcgcggccgccgggagacggccaacttggagctgctgctgcagcgctgcagcgaggtcacgcactg

SEQ ID NO: 166318 - DNA, 120 bp, Artificial Sequence
  ENSG00000108352_15 (sequence is synthesized)
ggtggccaccgaagtgctgctctgcgaggccccgggcaagcgcgcgcagctgctcaagaagttcatcaagatcgcggccctctgcaagcagaaccaggacctgctgtctttctacgccgt

SEQ ID NO: 166319 - DNA, 120 bp, Artificial Sequence
  ENSG00000108352_16 (sequence is synthesized)
ggtcatggggctggacaacgccgctgtcagccgccttcgactcacctgggagaagctgccagggaaattcaagaacttgtttcgcaaatttgagaacctgacggacccctgcaggaacca

SEQ ID NO: 166320 - DNA, 120 bp, Artificial Sequence
  ENSG00000108352_17 (sequence is synthesized)
ttgtagatggtttggtgaacatcgagaagctgcattcagtggccgaaaaagtgaggacaatccgcaaataccggagccggcccctttgcctggacatggaggcatcccccaatcacctgc

SEQ ID NO: 166321 - DNA, 120 bp, Artificial Sequence
  ENSG00000108352_18 (sequence is synthesized)
agaccaaggcctatgtgcgccagtttcaggtcatcgacaaccagaacctcctcttcgagctctcctacaagctggaggcaaacagtcagtgagagtggaggctccagtcagacccgccag

SEQ ID NO: 166322 - DNA, 120 bp, Artificial Sequence
  ENSG00000108352_19 (sequence is synthesized)
atccttgggcacctggcactcaagcactttgcacgatgtctcaaccaacatctgacatctttcccgtggagcaacttcctgctccacgggaaagaggtcgatggatttacccctggaccc

SEQ ID NO: 166323 - DNA, 120 bp, Artificial Sequence
  ENSG00000108352_20 (sequence is synthesized)
ataagtctgttcatcctgctgaagtcccctccccattgctccttcaagccaaaactacactttgctggttcctgtcccctctgagaaaggggatagaaagctccttcctctatgtcctcc

SEQ ID NO: 166324 - DNA, 120 bp, Artificial Sequence
  ENSG00000108352_21 (sequence is synthesized)
catcgagatctgttctggggatggagcttccaacttcctcttgcagcaggaaagaatgctgctcacccttctgtcttgcagagtgggattgtgggagggattggcagccttcttctccac

SEQ ID NO: 166325 - DNA, 90 bp, Artificial Sequence
  ENSG00000108352_22 (sequence is synthesized)
gagtgggattgtgggagggattggcagccttcttctccaccacctgtccagcttcttcctggtcagggctgggacccccaggaatattat

SEQ ID NO: 166326 - DNA, 120 bp, Artificial Sequence
  ENSG00000108352_23 (sequence is synthesized)
ttagggagcaggagtgcatctggtaattgagggtggatgttgtgtgtgctggggaggggtccttctgtttggtgctacccttgtctactctgcccctggatggtgcggggtgctttctcc

SEQ ID NO: 166327 - DNA, 120 bp, Artificial Sequence
  ENSG00000108352_24 (sequence is synthesized)
acccccacactccctgctcagctcctcgtgctgccctgcatgcccaggcttgtgagccaagctgctttttggggcagggagtagcagcaggtgggaggggttacccatcagcccttgcaa

SEQ ID NO: 166328 - DNA, 120 bp, Artificial Sequence
  ENSG00000108352_25 (sequence is synthesized)
gtcccccactcaggcctctggaaggtccagggatgggctctgatgagagggtaaaagatgctcagggaaacacaggcctcagctgcctagaggaccctccccctgccttgcagtgggctc

SEQ ID NO: 166329 - DNA, 120 bp, Artificial Sequence
  ENSG00000108352_26 (sequence is synthesized)
gggtagagcagtatcaggagctagggttgtctgctgcccacactcctgctttttgggatatctaactgctaaggagggagttgacatcccccttctggctcatgtgtctgacaccaacaa

SEQ ID NO: 166330 - DNA, 120 bp, Artificial Sequence
  ENSG00000108352_27 (sequence is synthesized)
catggtctctgtccctctctctttgactctccctttgtcctccccatagagctggggtggggtggatccctatacctggggcaggcagccccaaagtgggggagggggatggcagagact

SEQ ID NO: 166331 - DNA, 120 bp, Artificial Sequence
  ENSG00000108352_28 (sequence is synthesized)
gtaaaggcgccactggactctggcaaggcctttattacctttactcccctccctctcccatcaccagcctcaaggcctgaggggtgcaggggctcctggcagctactgggtgaggtttcc

SEQ ID NO: 166332 - DNA, 120 bp, Artificial Sequence
  ENSG00000108352_29 (sequence is synthesized)
tggcacagactcacccttctttctggcaccacctctttcccttttgaagagacagcaacagccgtagcaaaagcagctgctgctcctgctatgagggtgtatatattttttacccaaagc

SEQ ID NO: 166333 - DNA, 120 bp, Artificial Sequence
  ENSG00000108352_30 (sequence is synthesized)
tctggaattgtacatttattttttaaaactcaaagagggaaagagccttgtatcatatgtgaacattgtatcataggtaatgttgtacagacccttttatacagtgatctgtcttgttcc

SEQ ID NO: 166334 - DNA, 120 bp, Artificial Sequence
  ENSG00000108352_31 (sequence is synthesized)
tgcagcaaaaatcctctatggacataggaggtgctgtgtcccatgccctcttgccctgacagtgtcccatgggcccccttctgctccctgccccctccctgctactgctgatgcactctc

SEQ ID NO: 166335 - DNA, 120 bp, Artificial Sequence
  ENSG00000108352_32 (sequence is synthesized)
ctctccctgcagcccctggcttcccagccttcctcctgaccccttccaacagccttggaactccagctgccaccaccctctgggtcggacactgggacccactggcccagtcttggctgc

SEQ ID NO: 166336 - DNA, 120 bp, Artificial Sequence
  ENSG00000108352_33 (sequence is synthesized)
tgcttacccctagccttgatgcctgcccagggacccccagccccctcccgttgccctgcagctttaacagagtgaaccatgtgtattgtacaggcgcggttgtcattgcagaaaccgctg

SEQ ID NO: 166337 - DNA, 120 bp, Artificial Sequence
  ENSG00000108352_34 (sequence is synthesized)
attgtgccctaccagagaggacagatgggcaccgcctccagtggcaatgctaattcacccaagaggccttcccagctcttctcacagaaggaagataaactccacatatttctatatcct

SEQ ID NO: 166338 - DNA, 120 bp, Artificial Sequence
  ENSG00000108352_35 (sequence is synthesized)
acccatgcttcccttctcctatgccctgcttctgacttccagctccctctcgactcagccctgagtacccacctggagaggagccccccaccacagacggagtgggttctggggaagagc

SEQ ID NO: 166339 - DNA, 120 bp, Artificial Sequence
  ENSG00000108352_36 (sequence is synthesized)
ggggtcctcgggtgcagtggcccctttcgaactcctctcttatcctttcctcacattggattctctccacatcccctagacctgactttcctgcacgaagggagtaagacccttgtagat

SEQ ID NO: 166340 - DNA, 120 bp, Artificial Sequence
  ENSG00000108352_37 (sequence is synthesized)
agaaggaagataaactccacatatttctgtgagtatgagaaaggtgcacactcttgggttcagcaatctgtaggcctgacttgggtacacagatatcctgctggatgacattgtccttac

SEQ ID NO: 166341 - DNA, 120 bp, Artificial Sequence
  ENSG00000108352_38 (sequence is synthesized)
gcagctgccgaacccaccctcgcagtggctgcccagaacctttacacatgtatgtgtgcgcgtgtgcagagcatgacaagatatcctgctggatgacattgtccttacccattctctctt

SEQ ID NO: 166342 - DNA, 120 bp, Artificial Sequence
  ENSG00000108352_39 (sequence is synthesized)
cttcccagctcttctcacagaaggaagataaactccacatatttctgtgagtatgagaaaggtgcacactcttgggttcagcaatctgtaggcctgacttgggtacacaggtaggtgagt

SEQ ID NO: 166343 - DNA, 120 bp, Artificial Sequence
  ENSG00000108352_40 (sequence is synthesized)
gaaggtgtccaggccacagacctgtcctgactctttgaaatgatgctgagacccggttatcccttgagccaggaatccttccccattgatatcctgctggatgacattgtccttacccat

SEQ ID NO: 166344 - DNA, 120 bp, Artificial Sequence
  ENSG00000108352_41 (sequence is synthesized)
ctctgtgtttggaaatactctttgtctggagacacttctgtgggctacttcttttttcaggcagaactcaaccttggtgtgttatctgaccaacttcccacatacgctgaagagaagtgc

SEQ ID NO: 166345 - DNA, 120 bp, Artificial Sequence
  ENSG00000108352_42 (sequence is synthesized)
atgacaaggcaggtggctggggctccagcctggctaaagagaacttgcccttaggggcaagagagggaggcactgcatttccagtttcgttctggaagtgcccacctgacatctgtggtg

SEQ ID NO: 166346 - DNA, 120 bp, Artificial Sequence
  ENSG00000108352_43 (sequence is synthesized)
gagggagaaatgtgccattgggagacggtgttcgcagcacaacgtcctggttccaaggctcacttgcagcaagcccttgggcaacgcatggccgtaacctttgttcccccatctgaaaaa

SEQ ID NO: 166347 - DNA, 120 bp, Artificial Sequence
  ENSG00000108352_44 (sequence is synthesized)
aatcgcaaagagagagaccccagagcacagtggctcagggcccaagtgctgtttacacagaacctgacccaggatttctatttttaaaatattcactattaaagaaataaaataaggcag

SEQ ID NO: 166348 - DNA, 120 bp, Artificial Sequence
  ENSG00000108352_45 (sequence is synthesized)
tcaagagctctcaatctcatagaagagataagaggtgaacataaacattatcccaatgttctatagtagttgagagaagaaagtgaccttcctggtgggtggggtggatcagagaagaat

SEQ ID NO: 166349 - DNA, 120 bp, Artificial Sequence
  ENSG00000108352_46 (sequence is synthesized)
tcatggaagaggtggcatttgattagggttacttggataattatcccatactgctcattgtcctctcttctgacccccttaaccacctgaaattgctgctggtgcatccttgacccaatt

SEQ ID NO: 166350 - DNA, 120 bp, Artificial Sequence
  ENSG00000108370_0 (sequence is synthesized)
agtcagcggcgcctagtgagagtcaggggggcccggcccgcgccctccccgcccagccgcctccccgtcgacgcccagggctggggcgagccaggctgcctttcgaacttggggggcttc

SEQ ID NO: 166351 - DNA, 120 bp, Artificial Sequence
  ENSG00000108370_1 (sequence is synthesized)
tcctcttgtctcccactggtgctctggctgtgaatccatccaggggccaggatgacaatccgacaccaaggccagcagtacaggccgaggatggcatttctccaaaagattgaagcgctc

SEQ ID NO: 166352 - DNA, 120 bp, Artificial Sequence
  ENSG00000108370_2 (sequence is synthesized)
gtgaaggacatgcagaacccagagacaggggtccgaatgcagaaccagagggtcctggtcaccagcgttcctcatgccatgacaggaagtgatgttctgcaatggatcgtccagcggctt

SEQ ID NO: 166353 - DNA, 120 bp, Artificial Sequence
  ENSG00000108370_3 (sequence is synthesized)
tggatctccagtctggaggcacagaacttgggcaactttattgtcaggtatggctacatttaccccctgcaagaccccaagaatctcattctcaagcctgatggcagcctctacagattt

SEQ ID NO: 166354 - DNA, 120 bp, Artificial Sequence
  ENSG00000108370_4 (sequence is synthesized)
cagacaccgtatttctggcccacccagcagtggccagctgaagataccgattacgccatctatctggccaagcgaaatatcaaaaagaaagggattttggaagaatatgaaaaggaaaat

SEQ ID NO: 166355 - DNA, 120 bp, Artificial Sequence
  ENSG00000108370_5 (sequence is synthesized)
tacaatttcttgaaccaaaaaatgaactataagtgggactttgtcattatgcaggccaaagagcagtacagggctggaaaggagaggaacaaagcagacagatatgccctggactgccag

SEQ ID NO: 166356 - DNA, 120 bp, Artificial Sequence
  ENSG00000108370_6 (sequence is synthesized)
gagaaggcatactggctggtgcaccgatgccctcctggaatggacaatgtgctggactacggcctggaccgagtgaccaatccgaatgaagtcaaggtaaaccagaaacaaacagtcgtt

SEQ ID NO: 166357 - DNA, 120 bp, Artificial Sequence
  ENSG00000108370_7 (sequence is synthesized)
gctgtcaaaaaagagatcatgtattaccaacaggccttgatgaggtccacagtgaagtcttctgtgtccctgggagggattgtgaaatacagtgagcagttctcatccaacgatgccatc

SEQ ID NO: 166358 - DNA, 120 bp, Artificial Sequence
  ENSG00000108370_8 (sequence is synthesized)
atgtcaggctgcctccccagcaacccctggatcaccgatgacacccagttctgggacttaaatgccaaattggtggaaatcccaaccaagatgcgagtggaacgatgggccttcaacttc

SEQ ID NO: 166359 - DNA, 120 bp, Artificial Sequence
  ENSG00000108370_9 (sequence is synthesized)
agcgaattgatccgagaccccaaaggtcgacagagcttccagtacttcctcaagaaagaattcagtggagagaatctgggattctgggaagcctgcgaggatctgaagtatggagatcag

SEQ ID NO: 166360 - DNA, 120 bp, Artificial Sequence
  ENSG00000108370_10 (sequence is synthesized)
catcacagtgaaggggctgaagcacccccaccgctatgtgctggacgccgcacaaacccacatttacatgctcatgaagaaggattcttatgctcgctatttaaaatctccgatctataa

SEQ ID NO: 166361 - DNA, 120 bp, Artificial Sequence
  ENSG00000108370_11 (sequence is synthesized)
ggacatgctggccaaagctattgaacctcaggaaaccaccaagaaaagctccaccctcccttttatgcggcgtcacctgcgctccagcccaagccctgtcatcctgagacagctggaaga

SEQ ID NO: 166362 - DNA, 120 bp, Artificial Sequence
  ENSG00000108370_12 (sequence is synthesized)
ggaagccaaggcccgagaagcagccaacactgtggacatcacccagccgggccagcacatggctcccagcccccatctgaccgtgtacaccgggacctgcatgcccccgtctccttctag

SEQ ID NO: 166363 - DNA, 120 bp, Artificial Sequence
  ENSG00000108370_13 (sequence is synthesized)
ccccttctcctcctcctgccgctcccccaggaagcctttcgcctcacccagccgcttcatccggcgacccagcaccaccatctgcccctcacccatcagagtggccttggagagctcatc

SEQ ID NO: 166364 - DNA, 120 bp, Artificial Sequence
  ENSG00000108370_14 (sequence is synthesized)
gggcttggagcagaaaggggagtgcagcgggtccatggccccccgtgggccctctgtcaccgagagcagcgaggcctccctcgacacctcctggcctcgcagccggcccagggcccctcc

SEQ ID NO: 166365 - DNA, 120 bp, Artificial Sequence
  ENSG00000108370_15 (sequence is synthesized)
taaggcccgcatggctctgtccttcagcaggtttctgagacgaggctgtctggcctcacctgtctttgccaggctctcacccaagtgccctgctgtgtcccacgggagggtgcagcccct

SEQ ID NO: 166366 - DNA, 120 bp, Artificial Sequence
  ENSG00000108370_16 (sequence is synthesized)
gggggacgtgggccagcagctgccacgattgaaatccaagagagtagcaaactttttccagatcaaaatggatgtgcccacggggagcgggacctgcttgatggactcggaggatgctgg

SEQ ID NO: 166367 - DNA, 120 bp, Artificial Sequence
  ENSG00000108370_17 (sequence is synthesized)
aacaggagagtcgggtgaccgggccacagaaaaggaggtcatctgcccctgggagagcctgtaaggaaagaggcaggctgagctgggggctctggaccaggaagatgctctgacagatgc

SEQ ID NO: 166368 - DNA, 120 bp, Artificial Sequence
  ENSG00000108370_18 (sequence is synthesized)
catggtatgggccacaggacacacttgctcgagaaccaaagtgcatttgggtgacatttgaagattggggagacaagatggggtagattgtggcaaagaatgctctggctggttaccagg

SEQ ID NO: 166369 - DNA, 120 bp, Artificial Sequence
  ENSG00000108370_19 (sequence is synthesized)
ggccaactccttctcctcttcctgaccctccctcccctgggcagaagaaacgcatgtggaccagaagactttccctgctgccttaaaaccaataaaaggttaactttaagtttcttggaa

SEQ ID NO: 166370 - DNA, 120 bp, Artificial Sequence
  ENSG00000108370_20 (sequence is synthesized)
atccaagagagtagcaaagtaagaacccgaaggggacgtgccgtatgcatgggtggctgtgggtgtgcaggcctctgcatgtgaatatgcatgctttgggctggggactgggatgggtga

SEQ ID NO: 166371 - DNA, 120 bp, Artificial Sequence
  ENSG00000108370_21 (sequence is synthesized)
aagttggaggcgcctagtgagggtcagggaggcccggcccgcgccctccccgcccagccgcctccccgtcgaccacccagggctggggcgagccaggctgcctttcgaacttgggggctt

SEQ ID NO: 166372 - DNA, 120 bp, Artificial Sequence
  ENSG00000108370_22 (sequence is synthesized)
ctcctcttgtctcccactggtgctctggccgtgaatccatccaggcgccaggagatgacaatccggtaccaaggccggcagtacaggctgaggatggcatttctccaaaaggtttccaag

SEQ ID NO: 166373 - DNA, 120 bp, Artificial Sequence
  ENSG00000108370_23 (sequence is synthesized)
ctgcgtcctgggcctggagactgagacagagatccacggactgcagtgcaggcagcccaccccagatccgagtcatataaggttgaaatatcagtaaaaaacatgcagacccaaagatgg

SEQ ID NO: 166374 - DNA, 120 bp, Artificial Sequence
  ENSG00000108370_24 (sequence is synthesized)
ggaccaaaatccaaagccagagggtcctggaaatcagagggtcttacaacataacaggcagtacaggccatggctcaggctaggcgtggaacagactgcagttctcttctacaaatcaat

SEQ ID NO: 166375 - DNA, 120 bp, Artificial Sequence
  ENSG00000108370_25 (sequence is synthesized)
ctagactggacagacagaactccaagggaggaaagaaaaatgaatctgatgttacttcttgaaaccacattttctgaagtcaccatttttatgtatctatcaactcatcatttttatgta

SEQ ID NO: 166376 - DNA, 120 bp, Artificial Sequence
  ENSG00000108370_26 (sequence is synthesized)
tatatcaatatgattttatgatcttattttttcctactaatgtgatgaattaccttgattgattttagaatattaaatcacttttgtattcctggaataaaccctagatggatgcttgat

SEQ ID NO: 166377 - DNA, 120 bp, Artificial Sequence
  ENSG00000108370_27 (sequence is synthesized)
tttttctaattccttagcaaaaatgctaatattttatttaggattttgcatctatattcacaagtgaggatttttttcctctcctgacaccaaccaattctccaacacaaactgagtgtc

SEQ ID NO: 166378 - DNA, 120 bp, Artificial Sequence
  ENSG00000108370_28 (sequence is synthesized)
ctacaattcaatttaattctgacactacccagagttagcattagcctccacagatttaaggcctcagccctacaagactgtcccaatcagactccagttgcaagtcctgggccacccata

SEQ ID NO: 166379 - DNA, 120 bp, Artificial Sequence
  ENSG00000108370_29 (sequence is synthesized)
cttctgggcaactggttacaaattgggggttcttatgaccacctcccacaggcttgacaatttgctagaatgattagtggaaagcaagaaagtgcttaacttaatattactggtttatta

SEQ ID NO: 166380 - DNA, 120 bp, Artificial Sequence
  ENSG00000108370_30 (sequence is synthesized)
caaaggatacaattcaggaaaagccaaatggaagtgatgcatggagcaaggcaagggagaatgagcacagagctttcctaccctctccaggcacaccactctcccagcaccttgatgtgt

SEQ ID NO: 166381 - DNA, 120 bp, Artificial Sequence
  ENSG00000108370_31 (sequence is synthesized)
acaccactctcccagcaccttgatgtgttcaccaacctggaagctctctgaaccccatcatttagaggttttaatggaagtttcattacataggcatgactttttttttttttttttttt

SEQ ID NO: 166382 - DNA, 120 bp, Artificial Sequence
  ENSG00000108370_32 (sequence is synthesized)
aaagtgctgggattataggcatgagccctacatagcaatgactgattgaatctttgaacactggtgattacttcaatctccagccccttgtccctctcccctccccagaagtcagtgggt

SEQ ID NO: 166383 - DNA, 90 bp, Artificial Sequence
  ENSG00000108370_33 (sequence is synthesized)
tcaatctccagccccttgtccctctcccctccccagaagtcagtgggtggggctaaaagttccaaccctctaatcatgcctagttctccg

SEQ ID NO: 166384 - DNA, 120 bp, Artificial Sequence
  ENSG00000108370_34 (sequence is synthesized)
cctcttcatcctgaactacctagaagcctccagccactagtcatttcattagtatacaaaagacactcttgccattgtggagatttcaggagtttcgggagccatgtgccaggaaccagg

SEQ ID NO: 166385 - DNA, 120 bp, Artificial Sequence
  ENSG00000108370_35 (sequence is synthesized)
gacaaaacccaaatatttattttttctcataccacaatgattgacattggtctgtaattttttctgcttataatatcctagtccagtttttctattaaggttatggccacataaaaagag

SEQ ID NO: 166386 - DNA, 120 bp, Artificial Sequence
  ENSG00000108370_36 (sequence is synthesized)
ttgggaactatactctgttttgctattctttggtagagtttgtccaagtttatgcaagattggtattattcttttttttttagagacaggttctcactctgtcacccagactggagtagc

SEQ ID NO: 166387 - DNA, 120 bp, Artificial Sequence
  ENSG00000108370_37 (sequence is synthesized)
actcctgggctcaagcaatcctcccacctaagcctcctaagtacctgggactacaggtgcacgctgccatgccctgctaatttttaaatttttggtagaggcggtgccttactgtattgt

SEQ ID NO: 166388 - DNA, 86 bp, Artificial Sequence
  ENSG00000108370_38 (sequence is synthesized)
ctgggactacaggtgcacgctgccatgccctgctaatttttaaatttttggtagaggcggtgccttactgtattgttctcctacct

SEQ ID NO: 166389 - DNA, 120 bp, Artificial Sequence
  ENSG00000108370_39 (sequence is synthesized)
cacacagcccatggtattattctttaaatatttggaagaattaactgatgaagcaagccatctggggcttggaattctttgtgagaagttcttgaatagattccatttatttatgagata

SEQ ID NO: 166390 - DNA, 120 bp, Artificial Sequence
  ENSG00000108370_40 (sequence is synthesized)
ttggctattcagattttacttttttatgtgggctttggaaagttgtatttttcagggggtttgtctattttatccaagttgtcaatattttggtgtaaagacaataatattctcttatct

SEQ ID NO: 166391 - DNA, 120 bp, Artificial Sequence
  ENSG00000108370_41 (sequence is synthesized)
ttgttatatttgtgggatctgtattgatattcctttctaatattgaaaatttgtcttttttgtttctgttgatcagtattgtttggagtctatcaatataaataatattttcaaataacc

SEQ ID NO: 166392 - DNA, 120 bp, Artificial Sequence
  ENSG00000108370_42 (sequence is synthesized)
ccatttttatgtccagtcacatcttctatgcctatctcagctgctgacacgtgactcagctgctcccattttccttggaaaagtaggagctggaaaggacctcagtcagaggtcatccac

SEQ ID NO: 166393 - DNA, 120 bp, Artificial Sequence
  ENSG00000108370_43 (sequence is synthesized)
atcaaccatctcatttcactgatgaggaaactgagacttggaccaggggaagtcagctgccatgttgtgaggacactcaagcaatcctatggagaggcccatgtgatgaggaactgaagc

SEQ ID NO: 166394 - DNA, 120 bp, Artificial Sequence
  ENSG00000108370_44 (sequence is synthesized)
ctcctgccaacagccatgtgagggcaccatcttggaagcagatccgccaacttcacccaagccttcagatgaatatagccctgaccgacatcttcactacaatctcatgagagaacctgc

SEQ ID NO: 166395 - DNA, 120 bp, Artificial Sequence
  ENSG00000108370_45 (sequence is synthesized)
gccagcactacctagctatgatgctgcaaaattcctgacccatagaaactgtgagataataaatgcctgttgtgttaagccacaagttttgtggaaatttgttactcagcaataactaac

SEQ ID NO: 166396 - DNA, 120 bp, Artificial Sequence
  ENSG00000108370_46 (sequence is synthesized)
atgagagttagctgaaggtcacattcttgttgagtagtggaaagggttttgttaacccttcacccactgtggttcacttgataaatgatagatgaataaagagtgaaaatgagcacaaaa

SEQ ID NO: 166397 - DNA, 86 bp, Artificial Sequence
  ENSG00000108370_47 (sequence is synthesized)
ccaagtagctgggactacaggtgcacgctaagacggggttttgtcatgttgctcgggctagcctcaaactcctgggctcaagcgat

SEQ ID NO: 166398 - DNA, 68 bp, Artificial Sequence
  ENSG00000108370_48 (sequence is synthesized)
tccccatttttctcttaatccatatctcagacaggaatctgtatctctcactctacagatcattctgt

SEQ ID NO: 166399 - DNA, 120 bp, Artificial Sequence
  ENSG00000108370_49 (sequence is synthesized)
agacaggaatctgtatctctcactctacagatcattctgtaggcactatgctaaactgacaccagtttcaaatttagtccttaattgatcttggcctttaggtgagcaaagttacagtgg

SEQ ID NO: 166400 - DNA, 120 bp, Artificial Sequence
  ENSG00000108370_50 (sequence is synthesized)
taaattacgctccttcgcttacaaaatctcttgcttggtatttattccccaggggttacatagaatagagtggaggcagtagacatggagaaatcctatcttttaagaaagaaaaaaatg

SEQ ID NO: 166401 - DNA, 120 bp, Artificial Sequence
  ENSG00000108370_51 (sequence is synthesized)
tctgagaaatttacattttaattggacagacatgaccttcgtgtgtaaaagtaccagaatcaaaagcaaaggcaggataatttggggacgaaagagttattttgtacaaaatatttagag

SEQ ID NO: 166402 - DNA, 120 bp, Artificial Sequence
  ENSG00000108370_52 (sequence is synthesized)
cataaataacagggataagtggggaggactcagtcaagaaagtcctggagggggtgctgtgtatagctggtcttgaaagaagtgatgcttgtgaattggtgaagaggagctctgagggtc

SEQ ID NO: 166403 - DNA, 120 bp, Artificial Sequence
  ENSG00000108370_53 (sequence is synthesized)
ttcctataaggggacactagcaagagcaatggtttagaaatggaatgagtggaaagtggaggagtgacaagggagattgagagtcatggctccagatggctatggagggtggcagagggg

SEQ ID NO: 166404 - DNA, 120 bp, Artificial Sequence
  ENSG00000108375_0 (sequence is synthesized)
atatgctgtttggagaaaaaaagaacttttgttagcaaggaggtttcagaaatgattttggattttctgtaagtgtttaatttagttctaggggacagcatctctcatcccggagtaaat

SEQ ID NO: 166405 - DNA, 120 bp, Artificial Sequence
  ENSG00000108375_1 (sequence is synthesized)
ttctgcctttgacctgcatggattattttttcaggctgcggaatttctcggcacctacctgtagtatggggcacttggtttggttgcagagtaagaaggtggaagaatgagctgtacttg

SEQ ID NO: 166406 - DNA, 120 bp, Artificial Sequence
  ENSG00000108375_2 (sequence is synthesized)
gttaagcagttgaaaccttttttgagcaggatctgtaaaagcataattgaatttgtttcacccccgtggattccagtgggcccgacagcgcaacagtgcctggcaacttgatgcatatgg

SEQ ID NO: 166407 - DNA, 120 bp, Artificial Sequence
  ENSG00000108375_3 (sequence is synthesized)
aagagcaatgccaagtgatctgacataatacaaattcacgaagtgacattcaatcacaagcaaagttggaaattccaaagagaagtggtgagatctttactagtcacagtgaagatggga

SEQ ID NO: 166408 - DNA, 120 bp, Artificial Sequence
  ENSG00000108375_4 (sequence is synthesized)
gaaaatgacatacctgcagcagatgtgggctgaaaatatcctcttctctgcccaatcaggaatgctacctgtttttgggaataaactttagagaaaggaagggccaaaactacgacttgg

SEQ ID NO: 166409 - DNA, 120 bp, Artificial Sequence
  ENSG00000108375_5 (sequence is synthesized)
ctttctgaaacggaagcataaatgttcttttcctccatttgtctggatctgagaacctgcatttggtattagctagtggaagcagtatgtatggttgaagtgcattgctgcagctggtag

SEQ ID NO: 166410 - DNA, 120 bp, Artificial Sequence
  ENSG00000108375_6 (sequence is synthesized)
catgagtggtggccaccagctgcagctggctgccctctggccctggctgctgatggctaccctgcaggcaggctttggacgcacaggactggtactggcagcagcggtggagtctgaaag

SEQ ID NO: 166411 - DNA, 120 bp, Artificial Sequence
  ENSG00000108375_7 (sequence is synthesized)
atcagcagaacagaaagctattatcagagtgatccccttgaaaatggaccccacaggaaaactgaatctcactttggaaggtgtgtttgctggtgttgctgaaataactccagcagaagg

SEQ ID NO: 166412 - DNA, 120 bp, Artificial Sequence
  ENSG00000108375_8 (sequence is synthesized)
aaaattaatgcagtcccacccgctgtacctgtgcaatgccagtgatgacgacaatctggagcctggattcatcagcatcgtcaagctggagagtcctcgacgggccccccgcccctgcct

SEQ ID NO: 166413 - DNA, 120 bp, Artificial Sequence
  ENSG00000108375_9 (sequence is synthesized)
gtcactggctagcaaggctcggatggcgggtgagcgaggagccagtgctgtcctctttgacatcactgaggatcgagctgctgctgagcagctgcagcagccgctggggctgacctggcc

SEQ ID NO: 166414 - DNA, 120 bp, Artificial Sequence
  ENSG00000108375_10 (sequence is synthesized)
agtggtgttgatctggggtaatgacgctgagaagctgatggagtttgtgtacaagaaccaaaaggcccatgtgaggattgagctgaaggagcccccggcctggccagattatgatgtgtg

SEQ ID NO: 166415 - DNA, 120 bp, Artificial Sequence
  ENSG00000108375_11 (sequence is synthesized)
gatcctaatgacagtggtgggcaccatctttgtgatcatcctggcttcggtgctgcgcatccggtgccgcccccgccacagcaggccggatccgcttcagcagagaacagcctgggccat

SEQ ID NO: 166416 - DNA, 120 bp, Artificial Sequence
  ENSG00000108375_12 (sequence is synthesized)
cagccagctggccaccaggaggtaccaggccagctgcaggcaggcccggggtgagtggccagactcagggagcagctgcagctcagcccctgtgtgtgccatctgtctggaggagttctc

SEQ ID NO: 166417 - DNA, 120 bp, Artificial Sequence
  ENSG00000108375_13 (sequence is synthesized)
tgaggggcaggagctacgggtcatttcctgcctccatgagttccatcgtaactgtgtggacccctggttacatcagcatcggacttgccccctctgcatgttcaacatcacagagggaga

SEQ ID NO: 166418 - DNA, 120 bp, Artificial Sequence
  ENSG00000108375_14 (sequence is synthesized)
ttcattttcccagtccctgggaccctctcgatcttaccaagaaccaggtcgaagactccacctcattcgccagcatcccggccatgcccactaccacctccctgctgcctacctgttggg

SEQ ID NO: 166419 - DNA, 120 bp, Artificial Sequence
  ENSG00000108375_15 (sequence is synthesized)
cccttcccggagtgcagtggctcggcccccacgacctggtcccttcctgccatcccaggagccaggcatgggccctcggcatcaccgcttccccagagctgcacatccccgggctccagg

SEQ ID NO: 166420 - DNA, 120 bp, Artificial Sequence
  ENSG00000108375_16 (sequence is synthesized)
agagcagcagcgcctggcaggagcccagcacccctatgcacaaggctggggactgagccacctccaatccacctcacagcaccctgctgcttgcccagtgcccctacgccgggccaggcc

SEQ ID NO: 166421 - DNA, 120 bp, Artificial Sequence
  ENSG00000108375_17 (sequence is synthesized)
ccctgacagcagtggatctggagaaagctattgcacagaacgcagtgggtacctggcagatgggccagccagtgactccagctcagggccctgtcatggctcttccagtgactctgtggt

SEQ ID NO: 166422 - DNA, 120 bp, Artificial Sequence
  ENSG00000108375_18 (sequence is synthesized)
caactgcacggacatcagcctacagggggtccatggcagcagttctactttctgcagctccctaagcagtgactttgaccccctagtgtactgcagccctaaaggggatccccagcgagt

SEQ ID NO: 166423 - DNA, 120 bp, Artificial Sequence
  ENSG00000108375_19 (sequence is synthesized)
ggacatgcagcctagtgtgacctctcggcctcgttccttggactcggtggtgcccacaggggaaacccaggtttccagccatgtccactaccaccgccaccggcaccaccactacaaaaa

SEQ ID NO: 166424 - DNA, 120 bp, Artificial Sequence
  ENSG00000108375_20 (sequence is synthesized)
gcggttccagtggcatggcaggaagcctggcccagaaaccggagtcccccagtccaggcctcctattcctcggacacagccccagccagagccaccttctcctgatcagcaagtcaccag

SEQ ID NO: 166425 - DNA, 120 bp, Artificial Sequence
  ENSG00000108375_21 (sequence is synthesized)
atccaactcagcagccccttcggggcggctctctaacccacagtgccccagggccctccctgagccagcccctggcccagttgacgcctccagcatctgccccagtaccagcagtctgtt

SEQ ID NO: 166426 - DNA, 120 bp, Artificial Sequence
  ENSG00000108375_22 (sequence is synthesized)
agatttttccccattacacccccagtgtggcatatccttggtccccagaggcacaccccttgatctgtggacctccaggcctggacaagaggctgctaccagaaaccccaggcccctgtt

SEQ ID NO: 166427 - DNA, 120 bp, Artificial Sequence
  ENSG00000108375_23 (sequence is synthesized)
actcaaattcacagccagtgtggttgtgcctgactcctcgccagcccctggaaccacatccacctggggaggggccttctgaatggagttctgacaccgcagagggcaggccatgccctt

SEQ ID NO: 166428 - DNA, 120 bp, Artificial Sequence
  ENSG00000108375_24 (sequence is synthesized)
atccgcactgccaggtgctgtcggcccagcctggctcagaggaggaactcgaggagctgtgtgaacaggctgtgtgagatgttcaggcctagctccaaccaagagtgtgctccagatgtg

SEQ ID NO: 166429 - DNA, 120 bp, Artificial Sequence
  ENSG00000108375_25 (sequence is synthesized)
tttgggccctacctggcacagagtcctgctcctgggaaaggaaaggaccacagcaaacaccattctttttgccgtacttcctagaagcactggaagaggactggtgatggtggagggtga

SEQ ID NO: 166430 - DNA, 120 bp, Artificial Sequence
  ENSG00000108375_26 (sequence is synthesized)
gagggtgccgtttcctgctccagctccagaccttgtctgcagaaaacatctgcagtgcagcaaatccatgtccagccaggcaaccagctgctgcctgtggcgtgtgtgggctggatccct

SEQ ID NO: 166431 - DNA, 120 bp, Artificial Sequence
  ENSG00000108375_27 (sequence is synthesized)
tgaaggctgagtttttgagggcagaaagctagctatgggtagccaggtgttacaaaggtgctgctccttctccaacccctacttggtttccctcaccccaagcctcatgttcataccagc

SEQ ID NO: 166432 - DNA, 120 bp, Artificial Sequence
  ENSG00000108375_28 (sequence is synthesized)
cagtgggttcagcagaacgcatgacaccttatcacctccctccttgggtgagctctgaacaccagctttggcccctccacagtaaggctgctacatcaggggcaaccctggctctatcat

SEQ ID NO: 166433 - DNA, 120 bp, Artificial Sequence
  ENSG00000108375_29 (sequence is synthesized)
tttccttttttgccaaaaggaccagtagcataggtgagccctgagcactaaaaggaggggtccctgaagctttcccactatagtgtggagttctgtccctgaggtgggtacagcagcctt

SEQ ID NO: 166434 - DNA, 120 bp, Artificial Sequence
  ENSG00000108375_30 (sequence is synthesized)
ggttcctctgggggttgagaataagaatagtggggagggaaaaactcctccttgaagatttcctgtctcagagtcccagagaggtagaaaggaggaatttctgctggactttatctgggc

SEQ ID NO: 166435 - DNA, 120 bp, Artificial Sequence
  ENSG00000108375_31 (sequence is synthesized)
agaggaaggatggaatgaaggtagaaaaggcagaattacagctgagcggggacaacaaagagttcttctctgggaaaagttttgtcttagagcaaggatggaaaatggggacaacaaagg

SEQ ID NO: 166436 - DNA, 120 bp, Artificial Sequence
  ENSG00000108375_32 (sequence is synthesized)
aaaagcaaagtgtgacccttgggtttggacagcccagaggcccagctccccagtataagccatacaggccagggacccacaggagagtggattagagcacaagtctggcctcactgagtg

SEQ ID NO: 166437 - DNA, 120 bp, Artificial Sequence
  ENSG00000108375_33 (sequence is synthesized)
gacaagagctgatgggcctcatcagggtgacattcaccccagggcagcctgaccactcttggcccctcaggcattatcccatttggaatgtgaatgtggtggcaaagtgggcagaggacc

SEQ ID NO: 166438 - DNA, 120 bp, Artificial Sequence
  ENSG00000108375_34 (sequence is synthesized)
ccacctgggaacctttttccctcagttagtggggagactagcacctaggtacccacatgggtatttatatctgaaccagacagacgcttgaatcaggcactatgttaagaaatatattta

SEQ ID NO: 166439 - DNA, 120 bp, Artificial Sequence
  ENSG00000108375_35 (sequence is synthesized)
tttgctaatatatttatccacaaatgtggtctggtcttgtggttttgttctgtcgtgactgtcactcagggtaacaacgtcatctctttctacatcaagagaagtaaattatttatgtta

SEQ ID NO: 166440 - DNA, 120 bp, Artificial Sequence
  ENSG00000108375_36 (sequence is synthesized)
tcagaggctaggctccgattcatgaaaggatagggtagagtagagggcttggcaataagaactggtttgtaagcccctaaaagtgtggcttagtgagatcagggaaggagaaagcatgac

SEQ ID NO: 166441 - DNA, 120 bp, Artificial Sequence
  ENSG00000108375_37 (sequence is synthesized)
tggattcttactgtgcttcagtcattattattatactgttcacttcacacattatcatacttcagtgactcagaccttgggcaaatactctgtgcctcgctttttcagtccataaaatgg

SEQ ID NO: 166442 - DNA, 120 bp, Artificial Sequence
  ENSG00000108375_38 (sequence is synthesized)
gcctacttaatagttgttgcaggacttacatgagataatagagtgtagaaaatatgttccaaagtggaaagttttattcagtgatagaaaacatccaaacctgtcacagagcccatctga

SEQ ID NO: 166443 - DNA, 120 bp, Artificial Sequence
  ENSG00000108375_39 (sequence is synthesized)
acacagcatgggaccgccaacaagaagaaagcccgcccggaagcagctcaatcaggaggctgggctggaatgacagcgcagcggggcctgaaactatttatatcccaaagctcctctcag

SEQ ID NO: 166444 - DNA, 120 bp, Artificial Sequence
  ENSG00000108375_40 (sequence is synthesized)
ataaacacaaatgactgcgttctgcctgcactcgggctattgcgaggacagagagctggtgctccattggcgtgaagtctccagggccagaaggggcctttgtcgcttcctcacaaggca

SEQ ID NO: 166445 - DNA, 120 bp, Artificial Sequence
  ENSG00000108375_41 (sequence is synthesized)
caagttccccttctgcttccccgagaaaggtttggtaggggtggtggtttagtgcctatagaacaaggcatttcgcttcctagacggtgaaatgaaagggaaaaaaaggacacctaatct

SEQ ID NO: 166446 - DNA, 120 bp, Artificial Sequence
  ENSG00000108375_42 (sequence is synthesized)
cctacaaatggtctttagtaaaggaaccgtgtctaagcgctaagaactgcgcaaagtataaattatcagccggaacgagcaaacagacggagttttaaaagataaatacgcatttttttc

SEQ ID NO: 166447 - DNA, 120 bp, Artificial Sequence
  ENSG00000108375_43 (sequence is synthesized)
cgccgtagctcccaggccagcattcctgtgggaagcaagtggaaaccctatagcgctctcgcagttaggaaggaggggtggggctgtccctggatttcttctcggtctctgcagagacaa

SEQ ID NO: 166448 - DNA, 120 bp, Artificial Sequence
  ENSG00000108375_44 (sequence is synthesized)
tccagagggagacagtggattcactgcccccaatgcttctaaaacggggagacaaaacaaaaaaaaacaaacttcgggttaccatcggggaacaggaccgacgcccagggccaccagccc

SEQ ID NO: 166449 - DNA, 120 bp, Artificial Sequence
  ENSG00000108375_45 (sequence is synthesized)
ggagtcagagctagaacaccaattacaaaccacaggcttcctgctctagggagttgatccagaattgtctttctgaaaggaagcactcggaatccttccgaactttccaagtccatccat

SEQ ID NO: 166450 - DNA, 120 bp, Artificial Sequence
  ENSG00000108375_46 (sequence is synthesized)
tcaattgcttggcttttcagcacttattctgaagactttataatatttttaaacttgaccttggaacacagagggctttgtgggtgaggtgtatttatatttacttaagggtgcacattt

SEQ ID NO: 166451 - DNA, 120 bp, Artificial Sequence
  ENSG00000108375_47 (sequence is synthesized)
taaaaatcttattctgtgtttgtacaaagacgcaaattttcatagtgcctagaaatagcacagatctattctactcaagattatttgtattttttcagggtattctacctagagcctgtg

SEQ ID NO: 166452 - DNA, 120 bp, Artificial Sequence
  ENSG00000108375_48 (sequence is synthesized)
gttaatcgcctccctgctccccctaccttttattccctaccccctcagggaatttggatacatgtgaggaatagtcctttgtttttcttatgaacctagaaaattacagatcataaaatc

SEQ ID NO: 166453 - DNA, 120 bp, Artificial Sequence
  ENSG00000108375_49 (sequence is synthesized)
tggatattaaagtagtttccaaaagcatctcatgggaaatcaaagtgctcggcatttccgagctggagaataaaatcaagaatccttaagagagaaaagaaaatggagatggaaatatga

SEQ ID NO: 166454 - DNA, 120 bp, Artificial Sequence
  ENSG00000108375_50 (sequence is synthesized)
attttaactgggaaaaataattggaaagctaaccttttcaaatactctaattatgaaagttggaaaaggttgtgatgctcaggattatcctgtaatgtgtgaagatacataaattagcac

SEQ ID NO: 166455 - DNA, 120 bp, Artificial Sequence
  ENSG00000108375_51 (sequence is synthesized)
ctaatttataggcaaattttggtaaaacacaaaaaattatggtatgtctaagttcatgaaaagtatgtaaatgcagtgggcctagaaacctggccacactgaaatacagtttaatgtgga

SEQ ID NO: 166456 - DNA, 120 bp, Artificial Sequence
  ENSG00000108375_52 (sequence is synthesized)
aacttttctaaatacatattgtagcatctttggacatcaacgtgtggcctgaaatttttattattgttccctcttctcctccattaaaaaaaaaatctccttgtggtatttagtcattta

SEQ ID NO: 166457 - DNA, 120 bp, Artificial Sequence
  ENSG00000108375_53 (sequence is synthesized)
ccattaacacatattatggcttaaaaagggccatcccttccttttctgagctggagttcttcacgctcacctttgatgcatggccttagctgtttactttgccttgttttgttcatgaac

SEQ ID NO: 166458 - DNA, 120 bp, Artificial Sequence
  ENSG00000108375_54 (sequence is synthesized)
cacactagacctccagaccttgccctgcacttagccctactttgtcctgtggcaactcccaccaaaagcccttagactcctggagctgcgagagatcctggaaaccctctagtccaactt

SEQ ID NO: 166459 - DNA, 120 bp, Artificial Sequence
  ENSG00000108375_55 (sequence is synthesized)
ttttcagagggaagtgggtgtggtagggagaggagactacagctgaatatttcaggacaggtgaagtcagccaacaaagggttgatggaagctgagaaggatacagcagagatgacaacc

SEQ ID NO: 166460 - DNA, 120 bp, Artificial Sequence
  ENSG00000108375_56 (sequence is synthesized)
aaaatacttaaccatcgggacagcgtatcatgctggctagagtgcaggaacaccccacctctgccaggtgctacccctttagttggcagatcacagggaggtcccagggaggtgctggtg

SEQ ID NO: 166461 - DNA, 73 bp, Artificial Sequence
  ENSG00000108375_57 (sequence is synthesized)
agttggcagatcacagggaggtcccagggaggtgctggtgtggctgaggcatcagaaaggcacttggaaggcc

SEQ ID NO: 166462 - DNA, 120 bp, Artificial Sequence
  ENSG00000108379_0 (sequence is synthesized)
atttccaatctcaagtggactttgttccaactattgggggcgtcgctccccctcttcatggtcgcgggcaaacttcctcctcggcgcctcttctaatggagccccacctgctcgggctgc

SEQ ID NO: 166463 - DNA, 120 bp, Artificial Sequence
  ENSG00000108379_1 (sequence is synthesized)
tcctcggcctcctgctcggtggcaccagggtcctcgctggctacccaatttggtggtccctggccctgggccagcagtacacatctctgggctcacagcccctgctctgcggctccatcc

SEQ ID NO: 166464 - DNA, 120 bp, Artificial Sequence
  ENSG00000108379_2 (sequence is synthesized)
caggcctggtccccaagcaactgcgcttctgccgcaattacatcgagatcatgcccagcgtggccgagggcgtgaagctgggcatccaggagtgccagcaccagttccggggccgccgct

SEQ ID NO: 166465 - DNA, 120 bp, Artificial Sequence
  ENSG00000108379_3 (sequence is synthesized)
ggaactgcaccaccatagatgacagcctggccatctttgggcccgtcctcgacaaagccacccgcgagtcggccttcgttcacgccatcgcctcggccggcgtggccttcgccgtcaccc

SEQ ID NO: 166466 - DNA, 120 bp, Artificial Sequence
  ENSG00000108379_4 (sequence is synthesized)
gctcctgcgccgagggcacctccaccatttgcggctgtgactcgcatcataaggggccgcctggcgaaggctggaagtggggcggctgcagcgaggacgctgacttcggcgtgttagtgt

SEQ ID NO: 166467 - DNA, 120 bp, Artificial Sequence
  ENSG00000108379_5 (sequence is synthesized)
ccagggagttcgcggatgcgcgcgagaacaggccggacgcgcgctcggccatgaacaagcacaacaacgaggcgggccgcacgactatcctggaccacatgcacctcaaatgcaagtgcc

SEQ ID NO: 166468 - DNA, 120 bp, Artificial Sequence
  ENSG00000108379_6 (sequence is synthesized)
acgggctgtcgggcagctgtgaggtgaagacctgctggtgggcgcagcctgacttccgtgccatcggtgacttcctcaaggacaagtatgacagcgcctcggagatggtagtagagaagc

SEQ ID NO: 166469 - DNA, 120 bp, Artificial Sequence
  ENSG00000108379_7 (sequence is synthesized)
accgtgagtcccgaggctgggtggagaccctccgggccaagtactcgctcttcaagccacccacggagagggacctggtctactacgagaactcccccaacttttgtgagcccaacccag

SEQ ID NO: 166470 - DNA, 120 bp, Artificial Sequence
  ENSG00000108379_8 (sequence is synthesized)
agacgggttcctttggcacaagggaccggacttgcaatgtcacctcccacggcatcgatggctgcgatctgctctgctgtggccggggccacaacacgaggacggagaagcggaaggaaa

SEQ ID NO: 166471 - DNA, 120 bp, Artificial Sequence
  ENSG00000108379_9 (sequence is synthesized)
aatgccactgcatcttccactggtgctgctacgtcagctgccaggagtgtattcgcatctacgacgtgcacacctgcaagtagggcaccagggcgctgggaaggggtgaagtgtgtggct

SEQ ID NO: 166472 - DNA, 120 bp, Artificial Sequence
  ENSG00000108379_10 (sequence is synthesized)
gggcggattcagcgaagtctcatgggaagcaggacctagagccgggcacagccctcagcgtcagacagcaaggaactgtcaccagccgcacgcgtggtaaatgacccagacccaactcgc

SEQ ID NO: 166473 - DNA, 120 bp, Artificial Sequence
  ENSG00000108379_11 (sequence is synthesized)
ctgtggacggggaggctctccctctctctcatcttacatttctcaccctactctggatggtgtgtggtttttaaagaagggggctttctttttagttctctagggtctgataggaacaga

SEQ ID NO: 166474 - DNA, 120 bp, Artificial Sequence
  ENSG00000108379_12 (sequence is synthesized)
cctgaggcttatctttgcacatgttaaagaaaataaaaatgaaaaaaaatttgactccaacagaacaggctgggctaatgtgagctctcagcctggcagtcaagacatcagcatgggcaa

SEQ ID NO: 166475 - DNA, 120 bp, Artificial Sequence
  ENSG00000108379_13 (sequence is synthesized)
gagggtgggagtcaggaagtaggacacacccctgcagtctccttttcttggtccactcccattcaaatttgagctaatttctcattctgataaaagccataggtttagctaggatgaagt

SEQ ID NO: 166476 - DNA, 120 bp, Artificial Sequence
  ENSG00000108379_14 (sequence is synthesized)
ggtaggaaggtccgtggcagttgttagagtaggatttggagtttggaagaactggcagctcagggtggcctggtcagccgtttgaagagcagccatgtgttcttctcagtctcattttct

SEQ ID NO: 166477 - DNA, 120 bp, Artificial Sequence
  ENSG00000108379_15 (sequence is synthesized)
ctcagtctcattttctctataaccctgttctgcacgaggggcagtcagatctcaaaatctttttctaccattctgcagtttccaccgtcaatgcagttttttttttgtttttttgttttt

SEQ ID NO: 166478 - DNA, 120 bp, Artificial Sequence
  ENSG00000108379_16 (sequence is synthesized)
agtggaccttgtaaataggctatgtaagggggcaagtcttctctagctcaaatggcttcctaaataaataagcggtatcttcagaaggggccattcagtccttcccagccctgctcacct

SEQ ID NO: 166479 - DNA, 120 bp, Artificial Sequence
  ENSG00000108379_17 (sequence is synthesized)
gcagattctctgtacaaataactccaggtagagcagttggactccaggtcaccttagtataagttagacaaagggtccgtgagggagtagccatcaattcctgaaattccaactttgtga

SEQ ID NO: 166480 - DNA, 120 bp, Artificial Sequence
  ENSG00000108379_18 (sequence is synthesized)
ctagcagatggggaggatgaaaaccatccctttgcttcctctccaatacggacccatcttactgtgtcctttcctctctggggccaatgtgagtaaacacagacacagagttctttcccc

SEQ ID NO: 166481 - DNA, 120 bp, Artificial Sequence
  ENSG00000108379_19 (sequence is synthesized)
cagctcttcctccctcacctgcatgctgagatagcttccatccatgcagttcccaaggatctggattagaagttcaaaggggaaccagcagtcacctactcccttaggtgaagcatctca

SEQ ID NO: 166482 - DNA, 120 bp, Artificial Sequence
  ENSG00000108379_20 (sequence is synthesized)
cggctgagttctccctgaggcatactggtccagctgagcgtcctagagaaagctagcaaaagggaggcacatggatttcacagtatgaattggttcaacaactgtcttagggagaatcag

SEQ ID NO: 166483 - DNA, 120 bp, Artificial Sequence
  ENSG00000108379_21 (sequence is synthesized)
aaagaagagatgcagcaggggaatgagcagaacaaagatttttctttctcccccttctctctggggtctacctaaccctgacctaaaataccagggcagcgatctcccagctggtgcagg

SEQ ID NO: 166484 - DNA, 120 bp, Artificial Sequence
  ENSG00000108379_22 (sequence is synthesized)
tgggcttgccaagatggtcgtccaggagcccgccttcacttctaaatctgctggccacaagccctgctaaagatacacatctcaccccctccgccaagtctgaaatgcccctccccatct

SEQ ID NO: 166485 - DNA, 120 bp, Artificial Sequence
  ENSG00000108379_23 (sequence is synthesized)
caccttagactgaaaagttttaaatcatgtcaactggataatacttgctttatgtgagaatacttcagcagaatggatacgaattttcaaaacaatcttttcatatctatgtattctata

SEQ ID NO: 166486 - DNA, 120 bp, Artificial Sequence
  ENSG00000108379_24 (sequence is synthesized)
ttaaaagtgataaagtcatgtttctggggcgtattcaagtagctgacaagtaattatttaataatagtacatgagtgcattgtaatgattctcgccgtagtcaggtaatagtatccaacc

SEQ ID NO: 166487 - DNA, 120 bp, Artificial Sequence
  ENSG00000108379_25 (sequence is synthesized)
gaaatttcctaccaacctgctgtatccaaagttttgtaaaaagttgtagaagttgttgatctttttgattttatattcaaaaagtctctttttataaatattatttattatacaatgtat

SEQ ID NO: 166488 - DNA, 120 bp, Artificial Sequence
  ENSG00000108379_26 (sequence is synthesized)
acagcagtcactgcgctgcagggacagtccccaagtgccaaggcacagcctaaaggggcctgttcccaccatggcatccgtgacaagaaccaggagccagaatgcaggtttctgggactt

SEQ ID NO: 166489 - DNA, 120 bp, Artificial Sequence
  ENSG00000108379_27 (sequence is synthesized)
gtcagctcccttctgagtgccctgttgaggattcctagaagtccagacacctcacccccctaacctggatggaccacgcagagccaataggaatacttttctgtggacgtgccatgttgg

SEQ ID NO: 166490 - DNA, 120 bp, Artificial Sequence
  ENSG00000108379_28 (sequence is synthesized)
aatcccagatctccctgccctgccagcccctgccagcttcctggggacccaactgaccctgaagaaagcctctgatgggcctagaacagagaaggtgacccaggaccttgcccagccttt

SEQ ID NO: 166491 - DNA, 120 bp, Artificial Sequence
  ENSG00000108379_29 (sequence is synthesized)
gacagttacgcttcgtcctccacctctccctccaacaaaaggatcttagcaagtgttggagaggtgctgaagtcgtattaggaccaaccagactttttctttgaggatactcagaaggag

SEQ ID NO: 166492 - DNA, 120 bp, Artificial Sequence
  ENSG00000108379_30 (sequence is synthesized)
tgaaggagaatggaacagggggtgtgaataaatgagctttctccatgtgtgattcaaagtggtttaacccatgcctcaccttctagaacacccgtggccctctctagccatgagaagtgt

SEQ ID NO: 166493 - DNA, 120 bp, Artificial Sequence
  ENSG00000108379_31 (sequence is synthesized)
caccactagccatcaaaatgctcccaaaagtccaacctttgaccaaactacatttcagattttcatttcagattttcttaaattctggagaaaaaagaaaataaagtaaaagaataaata

SEQ ID NO: 166494 - DNA, 120 bp, Artificial Sequence
  ENSG00000108379_32 (sequence is synthesized)
atgcacatgacctgcgtctgagttctccaggctgcctggaggaggcattcaggtccctggccctgggccagcagtacacatctctgggctcacagcccctgctctgcggctccatcccag

SEQ ID NO: 166495 - DNA, 120 bp, Artificial Sequence
  ENSG00000108381_0 (sequence is synthesized)
agaacttgtaacagaaaattaaaatatactccactcaagggaattctgtactttgccctttgggtaaagtctcatttacatttctaaacctttcttaagaaaatcgaatttcctttgatc

SEQ ID NO: 166496 - DNA, 120 bp, Artificial Sequence
  ENSG00000108381_1 (sequence is synthesized)
tctcttctgaattgcagaaatcagataaaaactacttggtgaaatgacttcttgtcacattgctgaagaacatatacaaaaggttgctatctttggaggaacccatgggaatgagctaac

SEQ ID NO: 166497 - DNA, 120 bp, Artificial Sequence
  ENSG00000108381_2 (sequence is synthesized)
cggagtatttctggttaagcattggctagagaatggcgctgagattcagagaacagggctggaggtaaaaccatttattactaaccccagagcagtgaagaagtgtaccagatatattga

SEQ ID NO: 166498 - DNA, 120 bp, Artificial Sequence
  ENSG00000108381_3 (sequence is synthesized)
ctgtgacctgaatcgcatttttgaccttgaaaatcttggcaaaaaaatgtcagaagatttgccatatgaagtgagaagggctcaagaaataaatcatttatttggtccaaaagacagtga

SEQ ID NO: 166499 - DNA, 120 bp, Artificial Sequence
  ENSG00000108381_4 (sequence is synthesized)
agattcctatgacattatttttgaccttcacaacaccacctctaacatggggtgcactcttattcttgaggattccaggaataactttttaattcagatgtttcattacattaagacttc

SEQ ID NO: 166500 - DNA, 120 bp, Artificial Sequence
  ENSG00000108381_5 (sequence is synthesized)
tctggctccactaccctgctacgtttatctgattgagcatccttccctcaaatatgcgaccactcgttccatagccaagtatcctgtgggtatagaagttggtcctcagcctcaaggggt

SEQ ID NO: 166501 - DNA, 120 bp, Artificial Sequence
  ENSG00000108381_6 (sequence is synthesized)
tctgagagctgatatcttggatcaaatgagaaaaatgattaaacatgctcttgattttatacatcatttcaatgaaggaaaagaatttcctccctgcgccattgaggtctataaaattat

SEQ ID NO: 166502 - DNA, 120 bp, Artificial Sequence
  ENSG00000108381_7 (sequence is synthesized)
agagaaagttgattacccccgggatgaaaatggagaaattgctgctatcatccatcctaatctgcaggatcaagactggaaaccactgcatcctggggatcccatgtttttaactcttga

SEQ ID NO: 166503 - DNA, 120 bp, Artificial Sequence
  ENSG00000108381_8 (sequence is synthesized)
tgggaagacgatcccactgggcggagactgtaccgtgtaccccgtgtttgtgaatgaggccgcatattacgaaaagaaagaagcttttgcaaagacaactaaactaacgctcaatgcaaa

SEQ ID NO: 166504 - DNA, 120 bp, Artificial Sequence
  ENSG00000108381_9 (sequence is synthesized)
aagtattcgctgctgtttacattagaaatcacttccagcttacatcttacacggtgtcttacaaattctgctagtctgtaagctccttaagagtagggttgtgccttattcaactgcata

SEQ ID NO: 166505 - DNA, 120 bp, Artificial Sequence
  ENSG00000108381_10 (sequence is synthesized)
catagctcctagcacagtgccttattcggtaggcatctaagcacatttcttaaattaattaatatatctttaaagatatcatattttatgtatgtagcttattcaaagaagtgtttccta

SEQ ID NO: 166506 - DNA, 120 bp, Artificial Sequence
  ENSG00000108381_11 (sequence is synthesized)
tttctatatagtttattatacatgatacttgggtagctcaacattcttaataaacagcctttgtattcagaatataaaattgaaatagatatatataaagttatttgttttattgtgctt

SEQ ID NO: 166507 - DNA, 120 bp, Artificial Sequence
  ENSG00000108381_12 (sequence is synthesized)
tgccttactacacttcacggatactgtacttgtactttttttccaaattgaaggtttttggcaaccctgtgtctagaaagtctaacagtgccatgtttccaacagcatgtgctcactcct

SEQ ID NO: 166508 - DNA, 120 bp, Artificial Sequence
  ENSG00000108381_13 (sequence is synthesized)
tgtctctgtgtcaccctttgataatatttcaagcttttttatgatttatttattatatctgctatggtgatctgtgatcagtggcctttgatgttactgttgttaagtgttttggggcac

SEQ ID NO: 166509 - DNA, 120 bp, Artificial Sequence
  ENSG00000108381_14 (sequence is synthesized)
catgaatcgtgcccatgtgagactgcgaacttagtgaatgttgtgtgagttctaactgctctactgaccggccatttccttgtctctctccctgtcctctggcctccctgttccttgaga

SEQ ID NO: 166510 - DNA, 120 bp, Artificial Sequence
  ENSG00000108381_15 (sequence is synthesized)
cacaataattaataagtctacagcagactctgtgtgttcaagtgaaagaaagggtcatacttctagaaattaagcttagtaaggaaggcatgtcaaaagctgagacaggctgaaagctag

SEQ ID NO: 166511 - DNA, 120 bp, Artificial Sequence
  ENSG00000108381_16 (sequence is synthesized)
gcctcttgcactggttagccaagttgtgaattcaaagaaaaggatcttgaagaaaattaaaaattctactccagtgcacacacacaaatgataagaaagcaaaacaaccttattgctgat

SEQ ID NO: 166512 - DNA, 120 bp, Artificial Sequence
  ENSG00000108381_17 (sequence is synthesized)
aagcaaaacaaccttattgctgatatggagacagttttagtggtctggatagaagatcaaaccagccacacattaagccaaagcatgacccacagcaaggccctaactctcttcaattct

SEQ ID NO: 166513 - DNA, 120 bp, Artificial Sequence
  ENSG00000108381_18 (sequence is synthesized)
gctgcaggaagctgggagaggttggttcacaaggtttaaggaaagaagacagctctaaaacctacaagtggaaagcgaaccagcaagttgctgatgtggaagctgtagcaagttatccag

SEQ ID NO: 166514 - DNA, 120 bp, Artificial Sequence
  ENSG00000108381_19 (sequence is synthesized)
aagatgtagctaaaatcattgacaaagatggctacactaaacaacggatcttcagtgtagttgaaacagccttctattggaagaagatgctatctaggactttcctagctagaggggaga

SEQ ID NO: 166515 - DNA, 120 bp, Artificial Sequence
  ENSG00000108381_20 (sequence is synthesized)
aatgaatgcctagcttcaaagcttcaaaggacagcctgactctcttaagagctaacacagctggtgactttgggttaaagccaaagctcattaactgtttcaaaaatcctaaaactcttg

SEQ ID NO: 166516 - DNA, 120 bp, Artificial Sequence
  ENSG00000108381_21 (sequence is synthesized)
acaggcatgagccaccacgcccggcccaaaaatcgtaggactctgaagactgatgctaaacctgctgtgtctgagctctataaatggaacaacaaagcctcgctggcagcacatctgttt

SEQ ID NO: 166517 - DNA, 120 bp, Artificial Sequence
  ENSG00000108381_22 (sequence is synthesized)
gcacatctgtttgcggcatggtttactgtatattttaagcccactgttgagacctactgcttgggaaaaaaaaaaattcctttcaaaatactactgctgattgacaatacaccatgttac

SEQ ID NO: 166518 - DNA, 120 bp, Artificial Sequence
  ENSG00000108381_23 (sequence is synthesized)
ccaagagctctgctggagatgtgcgaagagattagcattgttttcgcgcctgctaccacgacatccagccgaagcccatggatcaaggcgtcattgtgactttcaaatctaactatttaa

SEQ ID NO: 166519 - DNA, 89 bp, Artificial Sequence
  ENSG00000108381_24 (sequence is synthesized)
gatcaaggcgtcattgtgactttcaaatctaactatttaagaaatacatttcaggctgggggaggggagtcatttcataaggctatagc

SEQ ID NO: 166520 - DNA, 120 bp, Artificial Sequence
  ENSG00000108381_25 (sequence is synthesized)
aaacagaaaacctctggaaaggattcagcattccagatgccattaagaacattcaggatccgtgggaggagatcaaaatatcaacattaacaggagtttggaaaaagtgaattccaaccc

SEQ ID NO: 166521 - DNA, 120 bp, Artificial Sequence
  ENSG00000108381_26 (sequence is synthesized)
tcttggatgactctgaggaattcgagacttgagtaaaggaagtcatgcagatgtacagcaagagaatgagaagtggagcctgaagatgtaactgaactgctgcaatctcatgatcacact

SEQ ID NO: 166522 - DNA, 120 bp, Artificial Sequence
  ENSG00000108381_27 (sequence is synthesized)
tgaatggatgaggagtcgcttcttataaatgagcaaaaaagtggtttcttggctgcaatcaactcttgttgcagatgctgtgaacactgttgaaatgacaaaggatttagaatattacgt

SEQ ID NO: 166523 - DNA, 120 bp, Artificial Sequence
  ENSG00000108381_28 (sequence is synthesized)
aaacatagttgataaagcagcagcagggtttaagaggattgactcctattttgaaatgagttcggctgggagaagtggctcatgcctgtcgtcctagcactttgggaggccaaggcagac

SEQ ID NO: 166524 - DNA, 120 bp, Artificial Sequence
  ENSG00000108381_29 (sequence is synthesized)
aaaaaaaaatgagttctactgtgaataaaatgttattaaacagcatttcatgctacagagaaatctttcacgaaaggaagagtcaatcaatgcagcgaacttgttgttttattttaagaa

SEQ ID NO: 166525 - DNA, 120 bp, Artificial Sequence
  ENSG00000108381_30 (sequence is synthesized)
attgtcacggccatcccaaccctcagtgcccaaccaccctgatcaggcagccatcatcaaggcaaggccctccaccagcaaaaagatcatgaattgctgaaagctcaaatgatggttagc

SEQ ID NO: 166526 - DNA, 120 bp, Artificial Sequence
  ENSG00000108381_31 (sequence is synthesized)
ttttttagcaataaagcatttttaatgaaggaatgtacatgttttagatataatgctattacacatttaacatactacatatagtgtgagcataacttttacacgtactggaaaatcaaa

SEQ ID NO: 166527 - DNA, 120 bp, Artificial Sequence
  ENSG00000108381_32 (sequence is synthesized)
aaatatgtgtggctcatctgttataatgtttgttttattgtggtgatctggagccaaggctgaaatatctctgaggtatgcctgtaatgtataagtgctagtagaaatgagttgtgcaga

SEQ ID NO: 166528 - DNA, 120 bp, Artificial Sequence
  ENSG00000108381_33 (sequence is synthesized)
attgctatttttttcaatttttatatttgggttaatggtaatatactaagcgtccagtctataaacttcagcattcgttgcgaaatccagaggagacttttaagtgctgttttgtagatg

SEQ ID NO: 166529 - DNA, 120 bp, Artificial Sequence
  ENSG00000108381_34 (sequence is synthesized)
aaatatgaaagagaaacaagggcttaatggtaaagatgacatatgactatattaagaaactgaatggccctttgtccacaaacagtaacccacacagcattgctactgtggcatgcccac

SEQ ID NO: 166530 - DNA, 120 bp, Artificial Sequence
  ENSG00000108381_35 (sequence is synthesized)
tgctctgcactgacctcatggagcagagaacctccttcagacacctcacgcaccccctgaggagctaatgtttcttcccaacatggaaaatttggaagaggcctattcttcacagctgtc

SEQ ID NO: 166531 - DNA, 120 bp, Artificial Sequence
  ENSG00000108381_36 (sequence is synthesized)
acttctcattttgaaagaatatgcccacccttattcgcaggcaaggtgtgaggaggtctttgggctccagctgttgccagcagaggtggtgaaagtcaacaacagggcactggacacaca

SEQ ID NO: 166532 - DNA, 120 bp, Artificial Sequence
  ENSG00000108381_37 (sequence is synthesized)
tagaaatgtgacccacagctatggtttgcaaatacagtctttcaagaagtcctgccatgtcctaaatgcccaaaccccttgcctcccatgattcttctcctcaaaggaccttctgctgga

SEQ ID NO: 166533 - DNA, 120 bp, Artificial Sequence
  ENSG00000108381_38 (sequence is synthesized)
cgccgccccctccctctccagccccaccagggccctccccgccatcctcttaggccacagcagccaataaagagtgtttttattccatgatctgtacccccaatgaatccataatcatag

SEQ ID NO: 166534 - DNA, 120 bp, Artificial Sequence
  ENSG00000108381_39 (sequence is synthesized)
tttcaaatgtatttaccaaaaatactaacattatctggaatgaatgaatgaatgaatgaatgaataaatattatatatttatacattttcattcttccaaagtgaaccccactatgccag

SEQ ID NO: 166535 - DNA, 120 bp, Artificial Sequence
  ENSG00000108381_40 (sequence is synthesized)
ttttactccatactcagtgttctggaaagcccatattctttctaaatttttcagcatttttttctatttttgtactttaccaaaattatttacattggaataaactctcttccttctgaa

SEQ ID NO: 166536 - DNA, 120 bp, Artificial Sequence
  ENSG00000108381_41 (sequence is synthesized)
tttcggaagttaacttggtataagagtatgaaaagcctctgttgctctacttctgaggaaatgctctcctttttcctaataaagctttccacagaagacaaactctgtacacaaaaaaca

SEQ ID NO: 166537 - DNA, 120 bp, Artificial Sequence
  ENSG00000108381_42 (sequence is synthesized)
aggggaagccgcgtggtgtgcgaccctgggcgttgagctccaggcttcctggcaaagaggactgtggattcctggccctgtgaccttgggcaaaaaatgaggaagattcataagtaagtt

SEQ ID NO: 166538 - DNA, 120 bp, Artificial Sequence
  ENSG00000108381_43 (sequence is synthesized)
aacacagaattaccaaaaacctcatgagaaagaaatgaagggatgtttcagggtagcttttcgagtcccaagtgatcattgatttggcccttctgtttctgattgtgaaaaagcattctg

SEQ ID NO: 166539 - DNA, 120 bp, Artificial Sequence
  ENSG00000108384_0 (sequence is synthesized)
gtgcggagtttggctgctccggggttagcaggtgagcctgcgatgcgcgggaagacgttccgctttgaaatgcagcgggatttggtgagtttcccgctgtctccagcggtgcgggtgaag

SEQ ID NO: 166540 - DNA, 120 bp, Artificial Sequence
  ENSG00000108384_1 (sequence is synthesized)
ctggtgtctgcggggttccagactgctgaggaactcctagaggtgaaaccctccgagcttagcaaagaagttgggatatctaaagcagaagccttagaaactctgcaaattatcagaaga

SEQ ID NO: 166541 - DNA, 120 bp, Artificial Sequence
  ENSG00000108384_2 (sequence is synthesized)
gaatgtctcacaaataaaccaagatatgctggtacatctgagtcacacaagaagtgtacagcactggaacttcttgagcaggagcatacccagggcttcataatcaccttctgttcagca

SEQ ID NO: 166542 - DNA, 120 bp, Artificial Sequence
  ENSG00000108384_3 (sequence is synthesized)
ctagatgatattcttgggggtggagtgcccttaatgaaaacaacagaaatttgtggtgcaccaggtgttggaaaaacacaattatgtatgcagttggcagtagatgtgcagataccagaa

SEQ ID NO: 166543 - DNA, 120 bp, Artificial Sequence
  ENSG00000108384_4 (sequence is synthesized)
tgttttggaggagtggcaggtgaagcagtttttattgatacagagggaagttttatggttgatagagtggtagaccttgctactgcctgcattcagcaccttcagcttatagcagaaaaa

SEQ ID NO: 166544 - DNA, 120 bp, Artificial Sequence
  ENSG00000108384_5 (sequence is synthesized)
cacaagggagaggaacaccgaaaagctttggaggatttcactcttgataatattctttctcatatttattattttcgctgtcgtgactacacagagttactggcacaagtttatcttctt

SEQ ID NO: 166545 - DNA, 120 bp, Artificial Sequence
  ENSG00000108384_6 (sequence is synthesized)
ccagatttcctttcagaacactcaaaggttcgactagtgatagtggatggtattgcttttccatttcgtcatgacctagatgacctgtctcttcgtactcggttattaaatggcctagcc

SEQ ID NO: 166546 - DNA, 120 bp, Artificial Sequence
  ENSG00000108384_7 (sequence is synthesized)
cagcaaatgatcagccttgcaaataatcacagattagctgtaattttaaccaatcagatgacaacaaagattgatagaaatcaggccttgcttgttcctgcattaggggaaagttgggga

SEQ ID NO: 166547 - DNA, 120 bp, Artificial Sequence
  ENSG00000108384_8 (sequence is synthesized)
catgctgctacaatacggctaatctttcattgggaccgaaagcaaaggttggcaacattgtacaagtcacccagccagaaggaatgcacagtactgtttcaaatcaaacctcagggattt

SEQ ID NO: 166548 - DNA, 120 bp, Artificial Sequence
  ENSG00000108384_9 (sequence is synthesized)
agagatactgttgttacttctgcatgttcattgcaaacagaaggttccttgagcacccggaaacggtcacgagacccagaggaagaattataacccagaaacaaatctcaaagtgtacaa

SEQ ID NO: 166549 - DNA, 120 bp, Artificial Sequence
  ENSG00000108384_10 (sequence is synthesized)
taccttaaagtataaataaacacactatggcatgaatgaatccagatcatatgaagtgaatgggaaaaatacctaaatatgattctgtgaaagtttttctaaagcagtattctgcaatta

SEQ ID NO: 166550 - DNA, 120 bp, Artificial Sequence
  ENSG00000108384_11 (sequence is synthesized)
tattttaccctgttttcattttcagtaacattcagtagagatgattattatatttcacaaatgtggaaagctgatctcatgtggccagtctgaatttaccattcatactgttttcacccc

SEQ ID NO: 166551 - DNA, 84 bp, Artificial Sequence
  ENSG00000108384_12 (sequence is synthesized)
gtggccagtctgaatttaccattcatactgttttcacccctttctttcccagttgcctataaaatcttaggaagaaacatatca

SEQ ID NO: 166552 - DNA, 76 bp, Artificial Sequence
  ENSG00000108384_13 (sequence is synthesized)
tcaagcgattcatcgtgcctggctaattttttgtatttttgtagagacagagttttaccatgttggccaagctggt

SEQ ID NO: 166553 - DNA, 120 bp, Artificial Sequence
  ENSG00000108384_14 (sequence is synthesized)
gccatgttctttttaaatgtaaatttgataattctttaaaattacccgcttttataattataaaagagaagccagcaccatgagtcagcatattattctgttcagttttataggtaagat

SEQ ID NO: 166554 - DNA, 120 bp, Artificial Sequence
  ENSG00000108384_15 (sequence is synthesized)
acaaattttaggtgaccaaactgattttagtgacctcaatcctaaaatctaagccatttgtttagcttttaatgacattttataatgttaaagggaggactttggagctgttatctcatc

SEQ ID NO: 166555 - DNA, 120 bp, Artificial Sequence
  ENSG00000108384_16 (sequence is synthesized)
catctagagattgtttggaacatatgtcttccagaataggttgataagctcacaatcatttattgctacgtttttgtttttgttttgagacaaggtctcactccgtcacccaggctggag

SEQ ID NO: 166556 - DNA, 120 bp, Artificial Sequence
  ENSG00000108384_17 (sequence is synthesized)
tggcctcatttctatattttgaaacacggtatgatccattctagaattctagttgttatgttgacatttttctttgaataatcttaactttgcttaaataaattaaagatttcaattctc

SEQ ID NO: 166557 - DNA, 120 bp, Artificial Sequence
  ENSG00000108384_18 (sequence is synthesized)
catatttgaggacagcttttgatgcttagaacattgtccccaaaatagtagtatatacagaatattgtagtcacaaatggactgaaatttattcttaagagcagaggaaatacttatttt

SEQ ID NO: 166558 - DNA, 120 bp, Artificial Sequence
  ENSG00000108384_19 (sequence is synthesized)
atcaccctactgctctgtggggtggccctgccccttcctctctctgcaagggccccaccctctgaaaccaaggacgacatagcattgccccctgggcttatggttcgactagtgatagtg

SEQ ID NO: 166559 - DNA, 120 bp, Artificial Sequence
  ENSG00000108384_20 (sequence is synthesized)
ggtggtcacttgttgtgcacatctctctatgacatgtctggacctgtgctattcactgaagaagatggaacagaattttaagttactgcccttactgatggaaaatacagaggtttcaat

SEQ ID NO: 166560 - DNA, 120 bp, Artificial Sequence
  ENSG00000108384_21 (sequence is synthesized)
tcgcctctaaagaataagtctcgtggacccagccttaactgtttaagtcataccgcgcgcagactgtgtcccccaagatttgatgggctcttttttcttcaacaagttggcttttcaaag

SEQ ID NO: 166561 - DNA, 120 bp, Artificial Sequence
  ENSG00000108384_22 (sequence is synthesized)
aagaaatgtgagaccctgaataataatgatcactaacaactattgactactttagatggtcttgatattctaccaagctttttacatgtatcgtctcattcccattttatagacgaaaaa

SEQ ID NO: 166562 - DNA, 120 bp, Artificial Sequence
  ENSG00000108384_23 (sequence is synthesized)
aatctgagcaaaaaagaaaaagtgaagtaacttgcccaaagtcatgcagtaagtggtgccaggatttacaaacccaggcaatctaattccagcattcaggctcttgataggattttcatt

SEQ ID NO: 166563 - DNA, 120 bp, Artificial Sequence
  ENSG00000108384_24 (sequence is synthesized)
tcctaaatgctgtcatcaccattgtcttttattagccccatatttatggctcatattcttatcagatcaagcactgatatatcaaactgataagtgatgtcatcctcaccattatttctt

SEQ ID NO: 166564 - DNA, 120 bp, Artificial Sequence
  ENSG00000108384_25 (sequence is synthesized)
ggccacactgtcagatgggtgaaattgtgtagtcgaggaagcataaatgtattctttaaaatgcttgtgccttgaataattgttctcattagtttggagtgatacatgaattttttacat

SEQ ID NO: 166565 - DNA, 120 bp, Artificial Sequence
  ENSG00000108384_26 (sequence is synthesized)
cagttatttccatgaaaagtttttattataaataatacatgcatatgtgcttcttaaagttgtaccttgttttaggcagttaaaacatctattttcattctcatctgaaaaataatttgt

SEQ ID NO: 166566 - DNA, 120 bp, Artificial Sequence
  ENSG00000108384_27 (sequence is synthesized)
ataccttatgagagcgagataattatggcttcataagaccaaaagggatagtaaaaatatggtaatagtgagtacatttttatttctgcttcctgagacacttgtaggtactcagaaatg

SEQ ID NO: 166567 - DNA, 120 bp, Artificial Sequence
  ENSG00000108384_28 (sequence is synthesized)
taggtactcagaaatgctttagttgaattgtttctgaggtaataggtaattctttatgtgatgactaagaaaacgaatacctttattaagctgaatttttttttttttttttttgagacg

SEQ ID NO: 166568 - DNA, 74 bp, Artificial Sequence
  ENSG00000108384_29 (sequence is synthesized)
ttttttgagacggagtctcgcactgtcatccaggctggaatgcagtggtgcgatccaggctggagtgcagtggt

SEQ ID NO: 166569 - DNA, 120 bp, Artificial Sequence
  ENSG00000108384_30 (sequence is synthesized)
cactgtgtccggccaaactgaaaaattaaatggttgatagaatgttgcatttttatgtttctccactcctagcatcactgttgtctacaaattaataaagacaatcgattatcatgttac

SEQ ID NO: 166570 - DNA, 120 bp, Artificial Sequence
  ENSG00000108384_31 (sequence is synthesized)
gtgggtttaataacatattatgaaagtagtattttgtactatcgtcaggaaaccaaataagatatatatgtgctcttaattttaagtgtgtatgtgcattaaacaaaaattagcttacta

SEQ ID NO: 166571 - DNA, 63 bp, Artificial Sequence
  ENSG00000108384_32 (sequence is synthesized)
tgcagtggcgcaatcttggcttactgcggctgcgaatacaggcacgtgccaccatacctggct

SEQ ID NO: 166572 - DNA, 77 bp, Artificial Sequence
  ENSG00000108384_33 (sequence is synthesized)
atctcctacgtcggcttccctaagtgctgggattatgagtgtgaacacctgtgcccagctccaaatctaaccaaact

SEQ ID NO: 166573 - DNA, 120 bp, Artificial Sequence
  ENSG00000108384_34 (sequence is synthesized)
agtgtgaacacctgtgcccagctccaaatctaaccaaacttttgagttactaatctctggactcccctgtgttgttacatgcactatgcacaattaataaactctttctcttgttaatcc

SEQ ID NO: 166574 - DNA, 120 bp, Artificial Sequence
  ENSG00000108384_35 (sequence is synthesized)
cagtcttcgttctctcgcctcggccttcagcccagtctccgttagattctgcttcctcccacgtccatgtttacagcgtgaaagagctcctcgactccacttacaagttgtctgaatggt

SEQ ID NO: 166575 - DNA, 120 bp, Artificial Sequence
  ENSG00000108384_36 (sequence is synthesized)
taggagaactgtggtcgtgaaaacatttactaattgcttttcctctggcaatgcctgctgaatgctttgaggattgtctcatttaaccctcaacccgcttacgtagattattatattcag

SEQ ID NO: 166576 - DNA, 120 bp, Artificial Sequence
  ENSG00000108384_37 (sequence is synthesized)
tatatggatgagagaactgatatcttggggagcttaggtaacttttcatgctaactgggttaggaaatactggagtcagaattggttgtctaatttttgctgttccaagatccaaggggt

SEQ ID NO: 166577 - DNA, 120 bp, Artificial Sequence
  ENSG00000108384_38 (sequence is synthesized)
aagggttaaatttcagaaatgcaggattttgtgtaggactagagacactaagaatgagaaagagagtagaatccccggaatcttgaggaagcatagaaagaatattctcttacgtaatta

SEQ ID NO: 166578 - DNA, 120 bp, Artificial Sequence
  ENSG00000108384_39 (sequence is synthesized)
ttatttagagtatttgtttcttcatttagcaagtattaattgacacctcctttcctatatgctatttactgttccaggcattggggatgatatagtaaataagacagaagaatatagtaa

SEQ ID NO: 166579 - DNA, 120 bp, Artificial Sequence
  ENSG00000108384_40 (sequence is synthesized)
ataagagagaaggtccctgctctcttggagagagagagcatttttattattattattttatttttcgtaacaaatctaatattatctcttctgtatttaggttcgactagtgatagtgga

SEQ ID NO: 166580 - DNA, 120 bp, Artificial Sequence
  ENSG00000108384_41 (sequence is synthesized)
tttctctcctttttgtgttcttagagaaaaaatagaattattaatataataaacctatacatttaaataatgagtttggtcatctgaacttttaattaattaagttcatgtgtttgtatg

SEQ ID NO: 166581 - DNA, 120 bp, Artificial Sequence
  ENSG00000108384_42 (sequence is synthesized)
gacgtcacgccgcacgccccagcgagggcgtgcggagtttggctgctccggggttagcaggtgagcctgcgatgcgcgggaagacgttccgctttgaaatgcagcgggatttgaagttgg

SEQ ID NO: 166582 - DNA, 120 bp, Artificial Sequence
  ENSG00000108387_0 (sequence is synthesized)
caggcttttttggcccctgccagagacagaagggggtcaaagagaaagggaaaggagcaagccaggaagccagacaacaacagcatcaaaacaaggctgtttctgtgtgtgaggaacttt

SEQ ID NO: 166583 - DNA, 120 bp, Artificial Sequence
  ENSG00000108387_1 (sequence is synthesized)
gcctgggagataaaattagacctagagctttctgacagggagtctgaagcgtgggacatggaccgttcactgggatggcaagggaattctgtccctgaggacaggactgaagctgggatc

SEQ ID NO: 166584 - DNA, 120 bp, Artificial Sequence
  ENSG00000108387_2 (sequence is synthesized)
aagcgtttcctggaggacaccacggatgatggagaactgagcaagttcgtgaaggatttctcaggaaatgcgagctgccacccaccagaggctaagacctgggcatccaggccccaagtc

SEQ ID NO: 166585 - DNA, 120 bp, Artificial Sequence
  ENSG00000108387_3 (sequence is synthesized)
ccggagccaaggccccaggccccggacctctatgatgatgacctggagttcagacccccctcgcggccccagtcctctgacaaccagcagtacttctgtgccccagcccctctcagccca

SEQ ID NO: 166586 - DNA, 120 bp, Artificial Sequence
  ENSG00000108387_4 (sequence is synthesized)
tctgccaggccccgcagcccatggggcaagcttgatccctatgattcctctgaggatgacaaggagtatgtgggctttgcaaccctccccaaccaagtccaccgaaagtccgtgaagaaa

SEQ ID NO: 166587 - DNA, 120 bp, Artificial Sequence
  ENSG00000108387_5 (sequence is synthesized)
ggctttgactttaccctcatggtggcaggagagtctggcctgggcaaatccacacttgtcaatagcctcttcctcactgatctgtaccgggaccggaaacttcttggtgctgaagagagg

SEQ ID NO: 166588 - DNA, 120 bp, Artificial Sequence
  ENSG00000108387_6 (sequence is synthesized)
atcatgcaaactgtggagatcactaagcatgcagtggacatagaagagaagggtgtgaggctgcggctcaccattgtggacacaccaggttttggggatgcagtcaacaacacagagtgc

SEQ ID NO: 166589 - DNA, 120 bp, Artificial Sequence
  ENSG00000108387_7 (sequence is synthesized)
cctgtacttcatctcacccttcggccatgggctccggccattggatgttgaattcatgaaggccctgcatcagcgggtcaacatcgtgcctatcctggctaaggcagacacactgacacc

SEQ ID NO: 166590 - DNA, 120 bp, Artificial Sequence
  ENSG00000108387_8 (sequence is synthesized)
tcccgaagtggaccacaagaaacgcaaaatccgggaggagattgagcattttggaatcaagatctatcaattcccagactgtgactctgatgaggatgaggacttcaaattgcaggacca

SEQ ID NO: 166591 - DNA, 120 bp, Artificial Sequence
  ENSG00000108387_9 (sequence is synthesized)
agccctaaaggaaagcatcccatttgcagtaattggcagcaacactgtagtagaggccagagggcggcgagttcggggtcgactctacccctggggcatcgtggaagtggaaaacccagg

SEQ ID NO: 166592 - DNA, 120 bp, Artificial Sequence
  ENSG00000108387_10 (sequence is synthesized)
gcactgcgactttgtgaagctgaggacaatgctggtacgtacccacatgcaggacctgaaggatgtgacacgggagacacattatgagaactaccgggcacagtgcatccagagcatgac

SEQ ID NO: 166593 - DNA, 120 bp, Artificial Sequence
  ENSG00000108387_11 (sequence is synthesized)
ccgcctggtggtgaaggaacggaatcgcaacaaactgactcgggaaagtggtaccgacttccccatccctgctgtcccaccagggacagatccagaaactgagaagcttatccgagagaa

SEQ ID NO: 166594 - DNA, 120 bp, Artificial Sequence
  ENSG00000108387_12 (sequence is synthesized)
agatgaggagctgcggcggatgcaggagatgctacacaaaatacaaaaacagatgaaggagaactattaactggctttcagccctggatatttaaatctcctcctcttcttcctgtccat

SEQ ID NO: 166595 - DNA, 120 bp, Artificial Sequence
  ENSG00000108387_13 (sequence is synthesized)
gccggcccctcccagcaccagctctgctcaggccccttcagctactgccacttcgccttacatccctgctgactgcccagagactcagaggaaataaagtttaataaatctgtaggtggc

SEQ ID NO: 166596 - DNA, 120 bp, Artificial Sequence
  ENSG00000108387_14 (sequence is synthesized)
aaaggagaggagaatctttagggtctagagctgacaatgagagttgggggaaacagttcctcttctgagctgaggatggggtagaacaggcttctacagaggagtcagtccattctctgc

SEQ ID NO: 166597 - DNA, 120 bp, Artificial Sequence
  ENSG00000108387_15 (sequence is synthesized)
gcaagcttgatccctatgattcctctgaggtagagcctccagccctgcctttgcctttcagtgggctgctgcaggaagaccgggggcagggagcagagtgtgtgtgtgtgtgtgtgtgtg

SEQ ID NO: 166598 - DNA, 120 bp, Artificial Sequence
  ENSG00000108387_16 (sequence is synthesized)
actcttagaacaacagccacttttgtgggagcccaagaaacagcagctttaaaacagggtaaatattcaggcatcattaggatcctgaatacaagccagccagtaaaatacgggatctac

SEQ ID NO: 166599 - DNA, 120 bp, Artificial Sequence
  ENSG00000108387_17 (sequence is synthesized)
tcagaagggcacaatctatcagatggtcaagacaaataaacctggggccaaggtagcggtttcagcacagagagggtctgaggttactactaacacatcccctcagcagggacatgggta

SEQ ID NO: 166600 - DNA, 120 bp, Artificial Sequence
  ENSG00000108387_18 (sequence is synthesized)
cgttcttgcctcaagccatcgaagtgctgcagtctccctgaacccttcccaccgaagatcagaagctgcacatcccaccactccccattcagcatcagactaccctcgatctgtctccct

SEQ ID NO: 166601 - DNA, 120 bp, Artificial Sequence
  ENSG00000108387_19 (sequence is synthesized)
ccagtcaggacctggacactatgcagtacccactcctcggggacccgagactggaccaagaacagaatcatcccgccattcctctccccatctaaagagccagaagactcagacactggc

SEQ ID NO: 166602 - DNA, 120 bp, Artificial Sequence
  ENSG00000108387_20 (sequence is synthesized)
ttcccatgcttcaagcagacaatggaaagttagtccacccagagaggaagcagcacgaagaggcagtgagagcaagtcagggcgcgaggtcggccatcatgcttcatcaatcccagatgc

SEQ ID NO: 166603 - DNA, 120 bp, Artificial Sequence
  ENSG00000108387_21 (sequence is synthesized)
caaatctactcatcagttgagttttcaagaccagaagaataacttacaatcacaaatcttagaagatgacccaccatccaaggtccagaacccccaaggagtcagagttccccgtaggat

SEQ ID NO: 166604 - DNA, 120 bp, Artificial Sequence
  ENSG00000108387_22 (sequence is synthesized)
tttgtcttacccaaaggatgaagcagtacaaactgagcccatccaaagaattacgactactagtgagatcagatctccaaggagtccctctctcctagagcacggaagcagctgtgtctc

SEQ ID NO: 166605 - DNA, 120 bp, Artificial Sequence
  ENSG00000108387_23 (sequence is synthesized)
tgcagactatcagacagcccagagaagggtccctgtagaagaatcagaaacaggtccttacggtccaattccttcaaaacccaaggccttgtataggaatatgaacttggactcattgct

SEQ ID NO: 166606 - DNA, 120 bp, Artificial Sequence
  ENSG00000108387_24 (sequence is synthesized)
caaactctctgtccttaaagattctgatggtgtacaccgagtttctgcacgggtagaccctgagtctcttcataagtattctgcctatcctgaaaccaagccctccgcaaaggtcttagt

SEQ ID NO: 166607 - DNA, 120 bp, Artificial Sequence
  ENSG00000108387_25 (sequence is synthesized)
atcatcacaggtggagtccaacgtgaggaccccaatccgaggaaacagcgaggttggccgcagggtcaccatctccccaggggtacagtcagtagagccaactcaccatgtgacagttcc

SEQ ID NO: 166608 - DNA, 120 bp, Artificial Sequence
  ENSG00000108387_26 (sequence is synthesized)
atcagtgtctgagggctcccacaagtcatccatgtttgttactccagagcccatctataaacagcaaacccaaaaacccccagaaattacttacatgtcccaaggacctacacccaggta

SEQ ID NO: 166609 - DNA, 120 bp, Artificial Sequence
  ENSG00000108387_27 (sequence is synthesized)
tccagaactctcgcaaaagccctccatccatgcagaactggaactgacccctaggcccttgcctcctcggtccttacctaggtacggacctgactcctcatggtggcccttgctgaatcc

SEQ ID NO: 166610 - DNA, 120 bp, Artificial Sequence
  ENSG00000108387_28 (sequence is synthesized)
tgaagttgaaacaccccaaagccagctgacaacaccggattttgagcctaagtgctctccttccctagatcttttattgtccggttttaaaatagactctagccctttctgtgaggatct

SEQ ID NO: 166611 - DNA, 120 bp, Artificial Sequence
  ENSG00000108387_29 (sequence is synthesized)
actgagtgaagtgccacagacccccaagcacacctgcaaacaacccattcaaaggtttactgctttcttcctggatgtctctgaggaaatgtacaatcgtgtcatctggtggctaaaaga

SEQ ID NO: 166612 - DNA, 120 bp, Artificial Sequence
  ENSG00000108387_30 (sequence is synthesized)
tttaggagataaatgctgggattttgacctgaagaagcagaggaacttctcatcttgctgaaaatttcaccattagagtcatttctttggggcttggaaccttttccattttcaagagtc

SEQ ID NO: 166613 - DNA, 120 bp, Artificial Sequence
  ENSG00000108387_31 (sequence is synthesized)
tccttttaacaggaagttacttctggaatggagaataatttaagcctcatggccttttcagcttagttggtcatctatcacatgattttaaaaaatacaccaaagcaaaccgcctgcttc

SEQ ID NO: 166614 - DNA, 120 bp, Artificial Sequence
  ENSG00000108387_32 (sequence is synthesized)
aaatttgcagtttcagcaagggcaggaggcccagctggtggcctcagatgggaactcacagaagtctggcactgcttttttaaggctggggcaaaggcctgaaagggagagaagattggc

SEQ ID NO: 166615 - DNA, 120 bp, Artificial Sequence
  ENSG00000108387_33 (sequence is synthesized)
aatcatgatgccaggacagcaggcatagactgggatgtatggtcaccactggacctcacaaatgtcataggtgagaaaagccttgggttaggcttgcctcaggatagcctcttctggtca

SEQ ID NO: 166616 - DNA, 120 bp, Artificial Sequence
  ENSG00000108387_34 (sequence is synthesized)
cccagcctccatctgctggttctagttttgggctaaggggcctcttttcctcccctctgtccaggcgagcactggagactatggctataagcaggtgtgaagacttcagaggcaacagcc

SEQ ID NO: 166617 - DNA, 120 bp, Artificial Sequence
  ENSG00000108387_35 (sequence is synthesized)
tggcagtagctcctagcagacttttccctctaacctccctatctcaacctcttccctctggcatacacctggcagtatgcatatctgcctccctcaattcttccctttgcaggaagactg

SEQ ID NO: 166618 - DNA, 120 bp, Artificial Sequence
  ENSG00000108387_36 (sequence is synthesized)
tggctatcttatcttcctcactctagctgggactccacagtggtctggggtagtccccactggcttggctaaccctcagagagtgagtcagcctctgcagccggcccttgtccattgtct

SEQ ID NO: 166619 - DNA, 120 bp, Artificial Sequence
  ENSG00000108387_37 (sequence is synthesized)
cactgccggctctgggcagagggggtaaggagacaactcagggtgcttccccttatatgtccctcacagttgggggctgtcagaagctctggaggcccagcctttcccaggctcttccat

SEQ ID NO: 166620 - DNA, 120 bp, Artificial Sequence
  ENSG00000108387_38 (sequence is synthesized)
cctccctcacctggtctctcccagctgcctcccacccacagtcagcatccactggcgggtttactcttctctcccagggcccagggtcagatttgggtgtggctcagtgtctggagtaag

SEQ ID NO: 166621 - DNA, 120 bp, Artificial Sequence
  ENSG00000108387_39 (sequence is synthesized)
gggtaggatcaactatactgagcgctgggcagtgaaccctgggaattgagcaccagcagtagaatctgtaccccagtcccccagctcaccagtagtgacaggaggtacagaaccccctgc

SEQ ID NO: 166622 - DNA, 120 bp, Artificial Sequence
  ENSG00000108387_40 (sequence is synthesized)
tggttgacctgcctgatgcagtcagctttcttctcccctgcctacttccctcatgtccctgccccattctgatgcactgtactctccttttgggtttaatgcctctgtctgctctatctt

SEQ ID NO: 166623 - DNA, 120 bp, Artificial Sequence
  ENSG00000108387_41 (sequence is synthesized)
aatcagtctggccttacttcctggcctgagacagtccctggctaggccagaaccccaggaaaggcagcctcaaaaaacatgctgctgagaaggagaccagaactggagttccttagttcc

SEQ ID NO: 166624 - DNA, 120 bp, Artificial Sequence
  ENSG00000108387_42 (sequence is synthesized)
caagagcagttgccagggctctgggggtgcccagggctcttcctggaccctgggacccttcctggcatattggattggggaggcttgtgagcaggtgagggagggatggtgagcacttcc

SEQ ID NO: 166625 - DNA, 120 bp, Artificial Sequence
  ENSG00000108387_43 (sequence is synthesized)
tctgtcttggctgcagtttctttttcttctaaccacaagtgctttccctttccctcttgccttctcctgtcttctgtctccttcctcattcttcccttccggctcccttcccggcaccac

SEQ ID NO: 166626 - DNA, 120 bp, Artificial Sequence
  ENSG00000108387_44 (sequence is synthesized)
gacttgccttgggaaattaaactcactccagagtctgggggatggggctctcccccacatgcaggaaaccatggcctcctagagagactgacagcagctctccataggcctaactgcctg

SEQ ID NO: 166627 - DNA, 120 bp, Artificial Sequence
  ENSG00000108387_45 (sequence is synthesized)
gcagcccaccagccagctccctaaagatttgggtgctgaagcagggcagagaccagagtcttgctctctgaatgagtctctgacccccaaggattccaggaatccaagaaaaaaaccggg

SEQ ID NO: 166628 - DNA, 120 bp, Artificial Sequence
  ENSG00000108387_46 (sequence is synthesized)
agcagagaagaggctggggccagagccaacagccaccggcatttcctgtgttgggaaatgtactccttgctggttcccagagaacagtcccccagacagcttgggagtggagaagggggc

SEQ ID NO: 166629 - DNA, 120 bp, Artificial Sequence
  ENSG00000108387_47 (sequence is synthesized)
gtaagcacaatcccagctgcccctgagccacccttctccatacacaggtacacacgtaggcccagatatatccatacttatcaggaggaagcggtctatgaccttgagcatgtgacttcc

SEQ ID NO: 166630 - DNA, 120 bp, Artificial Sequence
  ENSG00000108387_48 (sequence is synthesized)
cttactggacagccatctcctcctttataaagtaagagggaaaggattggaatagatgatttttaatgttccttccaattctgccctatgattctataatggggtagggacataagaaag

SEQ ID NO: 166631 - DNA, 120 bp, Artificial Sequence
  ENSG00000108387_49 (sequence is synthesized)
gttcaaggccagcctgggcaacatagtaagatcccatctctacaaaaagttttaaaaattagctgggcatggtggcataggcctgtagtctcagctactggggagggtgaggcaggagaa

SEQ ID NO: 166632 - DNA, 74 bp, Artificial Sequence
  ENSG00000108387_50 (sequence is synthesized)
aaaagttttaaaaattagctgggcatggtggcataggcctgtagtctcagctactggggagggtgaggcaggag

SEQ ID NO: 166633 - DNA, 120 bp, Artificial Sequence
  ENSG00000108387_51 (sequence is synthesized)
ccagaagccaggacaaagctggcagggggagatcccaagcctagccttgggtgagaccaagccctacttttgttcttctataggccctgggctcaatctaagcgggtgctggggtcctcc

SEQ ID NO: 166634 - DNA, 120 bp, Artificial Sequence
  ENSG00000108387_52 (sequence is synthesized)
gagggtgacggcggtgctgcgaggtcggcgcgcagctccgccgcgggtcgctcgggcgctgtccaggcggagccggccccgcccgggctgcagccatggggccagtaccaacttcatttg

SEQ ID NO: 166635 - DNA, 120 bp, Artificial Sequence
  ENSG00000108387_53 (sequence is synthesized)
acttgcactaggaagggattgggccaggtttgcccaagtccactgggcatctttagtaaatttctctttttctcctcctattggcactctctgaattccatttgctgccccctgggaatg

SEQ ID NO: 166636 - DNA, 120 bp, Artificial Sequence
  ENSG00000108387_54 (sequence is synthesized)
cctggcttctactctgttatgacagatgaggagctctccagccctgttcagcagcagagctgctccccagaagccaagaaaagaaggctcccaagcagctgggctgctggtcttctctga

SEQ ID NO: 166637 - DNA, 80 bp, Artificial Sequence
  ENSG00000108387_55 (sequence is synthesized)
gcagggccggtcgctcccgggcggctgcaaggggacccgcggcaccgcagccgcggctgtgcagggtgggaggcgccgtc

SEQ ID NO: 166638 - DNA, 120 bp, Artificial Sequence
  ENSG00000108387_56 (sequence is synthesized)
cacaggctggcactgctgccgggcggcggtgcgtcgctgctcccaagtttttccctctgagcagccacggagtgggcgccaacccctgggtgatgcctgcgctctaggacgaaggggtgg

SEQ ID NO: 166639 - DNA, 120 bp, Artificial Sequence
  ENSG00000108387_57 (sequence is synthesized)
gtgagggtccccatcctcgcctgggtcagcttttacctgagtaacccctcctcacccacctaccctgggcacaggggccagtaccaacttcatttggaaaacgcagaggaggcccacaaa

SEQ ID NO: 166640 - DNA, 120 bp, Artificial Sequence
  ENSG00000108387_58 (sequence is synthesized)
catctcacccttcggccatgggtatggtccaagcctgaggctcctggcaccaccgggtgctgtcaagggaacaggccaagagcaccaggggcagggctgccactagcaggtggtcacagg

SEQ ID NO: 166641 - DNA, 120 bp, Artificial Sequence
  ENSG00000108387_59 (sequence is synthesized)
aagaaacgcaaagtgagggaagctggtggtgggaggggatcaggtgggcttctagaaaggatgtggtccccagaactgtgggcccctcatctgtttgtcagatccgggaggagattgagc

SEQ ID NO: 166642 - DNA, 120 bp, Artificial Sequence
  ENSG00000108387_60 (sequence is synthesized)
gactctgatgaggatgaggacttcaaattgcaggaccaagccctaaaggtggggccactctagggcatcccattcctatcttatttcttccgggtagaaaaagggagtagaattctatat

SEQ ID NO: 166643 - DNA, 120 bp, Artificial Sequence
  ENSG00000108387_61 (sequence is synthesized)
tcaggctatcagggtgggaaaggaccctggcttcctagaatgaagcagagaagatgacgatacaggtggaaagaaagaggtgagaacagagggtgctgacaggcacccctaacctcttcc

SEQ ID NO: 166644 - DNA, 120 bp, Artificial Sequence
  ENSG00000108387_62 (sequence is synthesized)
aggaaagcatcccatttgcagtaattggcagcaacactgtagtagaggccagagggcggcgagttcggggtcgactctacccctggggcatcgtggaaggtaaagcactgagcctgtgac

SEQ ID NO: 166645 - DNA, 120 bp, Artificial Sequence
  ENSG00000108387_63 (sequence is synthesized)
agtgcagcccggggacgaggagctgaggctccccgctctgtcctgggtgactctgcatactctgcgcatccgggggtcgcgggctgcgaggccggcccccagctgggcaccccgacccac

SEQ ID NO: 166646 - DNA, 120 bp, Artificial Sequence
  ENSG00000108387_64 (sequence is synthesized)
cgcagaggaggcccacaaacactgcctgcctcaccaggagggatggtaagacgcttggcccctccttccctcagcctgacaaggggcagtccctggccctttcccaaagggaccccagag

SEQ ID NO: 166647 - DNA, 120 bp, Artificial Sequence
  ENSG00000108387_65 (sequence is synthesized)
agggggaggcccagcccaccatcctgcccggtgggattagctatatccttctgcccctgggacaggaaccatgggaaagcttcctcctgctgcatctacccgctccctccccaccagcca

SEQ ID NO: 166648 - DNA, 120 bp, Artificial Sequence
  ENSG00000108387_66 (sequence is synthesized)
ggtccctctgcagtgtgtgggggtgggggcacccatccctgccacctgcctgtagtgggaagagaaacagtaaccccagccagcctccctggaggtgcccaggtaggaagtttttgatgc

SEQ ID NO: 166649 - DNA, 120 bp, Artificial Sequence
  ENSG00000108387_67 (sequence is synthesized)
ttggctctgaagatgtaatctcttctcctgacattgttgccagagcctgccacaaataacgtaagggtgtcaggacctctaggccacacaccgtcctctcctctcagtctggaagcccca

SEQ ID NO: 166650 - DNA, 120 bp, Artificial Sequence
  ENSG00000108387_68 (sequence is synthesized)
cagcctttgccctctgcattgggggacacaaactgtttacagcagggggggatcactgaccagcctgtggggcgggatgttggctgtgggcagcctccagaagggagctccctgggcccc

SEQ ID NO: 166651 - DNA, 120 bp, Artificial Sequence
  ENSG00000108387_69 (sequence is synthesized)
ctgggatcagaagctttcaggtttggtagggccaaccttttgggctcttgtctctcaagctgtgtccaggcagaggcccaagccttggccaggaagtcttggtgaccctgtgaccttccc

SEQ ID NO: 166652 - DNA, 120 bp, Artificial Sequence
  ENSG00000108387_70 (sequence is synthesized)
ccaacgggggttcctgagagaggcctgtccttattcctttcccccacttctccccacatggtggatggatggactgattgttctagggatggaagcctagggaagcactgattgtcccca

SEQ ID NO: 166653 - DNA, 120 bp, Artificial Sequence
  ENSG00000108387_71 (sequence is synthesized)
gctttttctgccacacactaacttcagttcagctgaggtcttggtgctttcggcttgtccgaggccacactgttcttctctaattaaagacacacccccctccaccccaaccaccatcac

SEQ ID NO: 166654 - DNA, 120 bp, Artificial Sequence
  ENSG00000108387_72 (sequence is synthesized)
caaagtccccatcctcaggcccctgccctcaagccagccaagttcttaggctgactggttcagatcagactcctctatgagggtctctttgtcaaaggaggtcagtgtcctagctgcttt

SEQ ID NO: 166655 - DNA, 120 bp, Artificial Sequence
  ENSG00000108387_73 (sequence is synthesized)
gggaatcagtgggggagacccccccaacccagctatgccagggggtttaaatttacatgtgaaaagaatgacaggccaacattaatgaccatcctgtgacttgggatgcaccttctcttc

SEQ ID NO: 166656 - DNA, 120 bp, Artificial Sequence
  ENSG00000108387_74 (sequence is synthesized)
tcaggttcaaagcagcttaaggtatctatcatctgggagtgctttctctccccagcctcgctgggaggcaaggaagggccattcacaactgaacattaaggtcctcaaattaagacacta

SEQ ID NO: 166657 - DNA, 120 bp, Artificial Sequence
  ENSG00000108387_75 (sequence is synthesized)
tccagactcacaaaagatgtttccacccaaccagaaacagtggacccctgacccctagttgagtgcacacttccaaccaggccccttaatttatctcccacctaaatggcagctctgaag

SEQ ID NO: 166658 - DNA, 120 bp, Artificial Sequence
  ENSG00000108387_76 (sequence is synthesized)
cttctgggctgccagcctcccattgccttgaacccgtgctcctcagagaccaagtgctaacagctcccctgttgacactatggaagccatggagtgatctaattgatacaggttgctata

SEQ ID NO: 166659 - DNA, 120 bp, Artificial Sequence
  ENSG00000108387_77 (sequence is synthesized)
agtcagaggtcaggtgtcctagggtaaggggagtccctggagcaaagtcttctctgtggctgatgctccctgcagggaaatttaggagcagatttctgaaacagtgacgttcctcacagg

SEQ ID NO: 166660 - DNA, 120 bp, Artificial Sequence
  ENSG00000108387_78 (sequence is synthesized)
gtgacggcggtgctgcgaggtcggcgcgcagctccgccgcgggtcgctcgggcgctgtccaggcggagccggccccgcccgggctgcagccatggatgacaaggagtatgtgggctttgc

SEQ ID NO: 166661 - DNA, 120 bp, Artificial Sequence
  ENSG00000108389_0 (sequence is synthesized)
ggtggggtcgggactgcgcggcctcagcagctgcgggagacggaagtggcaagagcgcggcctcagagggtcgggcggacgccgcctggtgagaagcaggcagccagtacccttgccacg

SEQ ID NO: 166662 - DNA, 120 bp, Artificial Sequence
  ENSG00000108389_1 (sequence is synthesized)
gtagaatgggtgaggaggggccccccagcctggagtacatccaagccaaggatctgttcccccccaaggaactagtgaaggaggaagagaatcttcaggtccccttcacagtgctgcagg

SEQ ID NO: 166663 - DNA, 120 bp, Artificial Sequence
  ENSG00000108389_2 (sequence is synthesized)
gtgagggagtagagttcctgggccgggcagccgatgccctcattgccatctctaactaccggctgcatatcaaattcaaggactctgtcatcaacgtccccctccggatgattgacagtg

SEQ ID NO: 166664 - DNA, 120 bp, Artificial Sequence
  ENSG00000108389_3 (sequence is synthesized)
tggagagccgtgatatgttccagttgcacatttcctgcaaggactccaaagtggtgaggtgccacttctccacttttaagcagtgccaagagtggctctcacggctaagccgagccacag

SEQ ID NO: 166665 - DNA, 120 bp, Artificial Sequence
  ENSG00000108389_4 (sequence is synthesized)
caagacctgccaagcctgaagacctctttgcctttgcctaccatgcctggtgcctggggctgaccgaggaggaccagcacactcacctatgtcagccaggtgagcacatacgttgtcgac

SEQ ID NO: 166666 - DNA, 120 bp, Artificial Sequence
  ENSG00000108389_5 (sequence is synthesized)
aggaggcggagcttgcaaggatgggctttgacctgcagaacgtctggagagtctcacacatcaacagcaactacaaattgtgccccagttacccccagaagctgctggttcctgtgtgga

SEQ ID NO: 166667 - DNA, 120 bp, Artificial Sequence
  ENSG00000108389_6 (sequence is synthesized)
tcactgacaaagagctggagaacgtggcttccttccgctcctggaagcggattcccgtggttgtgtatagacacttgcgcaatggggctgccatcgcccgctgcagccagccagagatca

SEQ ID NO: 166668 - DNA, 120 bp, Artificial Sequence
  ENSG00000108389_7 (sequence is synthesized)
gctggtggggctggcgcaatgctgatgatgagtacctggtcacgtccattgctaaagcctgtgccctggacccggggacaagggccactgggggctccctcagcaccgggaataatgata

SEQ ID NO: 166669 - DNA, 120 bp, Artificial Sequence
  ENSG00000108389_8 (sequence is synthesized)
ccagcgaggcgtgtgatgctgactttgattcttctctgactgcgtgctctggagtggagagcacagcagctcctcaaaagctgctgatcctggatgcgcgatcctacacggcagcagtgg

SEQ ID NO: 166670 - DNA, 120 bp, Artificial Sequence
  ENSG00000108389_9 (sequence is synthesized)
ccaaccgggccaagggtggaggctgtgaatgtgaagagtactatcccaactgtgaggtcgtgttcatgggaatggccaacatccatgccatccggaacagctttcagtacctccgggctg

SEQ ID NO: 166671 - DNA, 120 bp, Artificial Sequence
  ENSG00000108389_10 (sequence is synthesized)
tgtgtagccagatgccggatcctagcaactggttgtcggcactggagagtaccaaatggctgcagcacttgtcggtgatgctaaaagcagctgtgctggtggctaatacagtagaccggg

SEQ ID NO: 166672 - DNA, 120 bp, Artificial Sequence
  ENSG00000108389_11 (sequence is synthesized)
aaggccggcctgtgctggtacactgctcagatggctgggaccgcacaccgcagatcgtagccctggccaaaatattactggacccatattacaggacgttggagggcttccaagtgttag

SEQ ID NO: 166673 - DNA, 120 bp, Artificial Sequence
  ENSG00000108389_12 (sequence is synthesized)
tggagtctgactggctggattttgggcacaagtttggagatcgctgtggccaccaagagaatgtggaggaccaaaacgaacaatgccctgtgttcctccagtggcttgattctgttcatc

SEQ ID NO: 166674 - DNA, 120 bp, Artificial Sequence
  ENSG00000108389_13 (sequence is synthesized)
agttgcttaagcagttcccctgcctgtttgaatttaatgaagcattcctggtaaaactggtgcaacacacatactcctgcctctacggcaccttcctggccaacaacccctgtgagcgag

SEQ ID NO: 166675 - DNA, 120 bp, Artificial Sequence
  ENSG00000108389_14 (sequence is synthesized)
agaagcgcaacatctacaagcggacctgctctgtgtgggcgctccttcgagctggcaataaaaactttcataacttcctctacacacccagctcagacatggtcctgcatcctgtttgtc

SEQ ID NO: 166676 - DNA, 120 bp, Artificial Sequence
  ENSG00000108389_15 (sequence is synthesized)
atgtccgggccctgcacctctggacagctgtttatctgccagcatcatctccatgcacacttggggaagaaaacatggatctttacctttccccagtggcccagagccaggagttctctg

SEQ ID NO: 166677 - DNA, 120 bp, Artificial Sequence
  ENSG00000108389_16 (sequence is synthesized)
gccgctctctggacagattacctaaaaccagatccatggatgatcttctttctgcctgtgacacaagcagccccctgactcgtacatccagtgaccctaacctgaataaccactgtcagg

SEQ ID NO: 166678 - DNA, 120 bp, Artificial Sequence
  ENSG00000108389_17 (sequence is synthesized)
aggtcagggtaggcctggagccctggcacagcaatcctgagggatcagagacaagctttgtggactctggggtaggagggcctcagcaaactgtaggagaagtgggtcttcctcctcctc

SEQ ID NO: 166679 - DNA, 120 bp, Artificial Sequence
  ENSG00000108389_18 (sequence is synthesized)
tgcccagcagccagaaagactacttgagcaataaacctttcaagagtcacaaaagctgttctccaagttacaaactgcttaataccgcagtgcctcgggaaatgaagagcaacacctctg

SEQ ID NO: 166680 - DNA, 120 bp, Artificial Sequence
  ENSG00000108389_19 (sequence is synthesized)
atcctgagatcaaagtcctagaagagactaagggaccagctccagacccttctgcccaggatgagctgggtaggactttagatggcataggggagccacctgaacattgtcctgaaacag

SEQ ID NO: 166681 - DNA, 120 bp, Artificial Sequence
  ENSG00000108389_20 (sequence is synthesized)
aagctgtcagtgcactctccaaggtcatttctaacaagtgtgatggagtttgtaattttcctgagtcttcccagaactctcctacaggtacgccccaacaggcccagccagactccatgc

SEQ ID NO: 166682 - DNA, 120 bp, Artificial Sequence
  ENSG00000108389_21 (sequence is synthesized)
taggtgtgccctccaagtgtgttcttgatcacagcctcagcaccgtttgcaacccaccgagtgctgcctgccaaactcctctagacccaagcactgacttcctcaaccaagatccctcag

SEQ ID NO: 166683 - DNA, 120 bp, Artificial Sequence
  ENSG00000108389_22 (sequence is synthesized)
ggtctgtggcaagtatctcccaccaggaacaactgagttctgtgccggatctgacccatggggaggaagacattggtaaaagaggaaataataggaatgggcagttattggaaaatcctc

SEQ ID NO: 166684 - DNA, 120 bp, Artificial Sequence
  ENSG00000108389_23 (sequence is synthesized)
gctttgggaaaatgccattggaattggtccggaagccaatttctcagagccagatcagtgagttctcttttctagggtccaactgggacagcttccaagggatggtgacttcattcccaa

SEQ ID NO: 166685 - DNA, 120 bp, Artificial Sequence
  ENSG00000108389_24 (sequence is synthesized)
agggccctgctttgggggccagtgggctcagagagaaggtgtgaagtcacctgtctgttctagtcattccaatggacattgtactggcccaggaggaaagaaccagatgtggttgtccag

SEQ ID NO: 166686 - DNA, 120 bp, Artificial Sequence
  ENSG00000108389_25 (sequence is synthesized)
tcatccaaagcaagtctctagcacaaagcccgttccactgaactgcccttctccagtgcctcctctgtatttggatgatgatggactcccctttcccacggatgtgatccagcataggtt

SEQ ID NO: 166687 - DNA, 120 bp, Artificial Sequence
  ENSG00000108389_26 (sequence is synthesized)
acggcaaatcgaagcagggtacaaacaagaggtggagcagctacgtcgacaggtgcgtgagcttcagatgaggctggacatccgtcactgctgtgcccctccagcagagccccccatgga

SEQ ID NO: 166688 - DNA, 120 bp, Artificial Sequence
  ENSG00000108389_27 (sequence is synthesized)
ctatgaggatgattttacatgtttgaaggagtcagatggcagtgatactgaggattttggctctgatcacagtgaagactgcctttcagaagcaagctgggaacctgttgataagaaaga

SEQ ID NO: 166689 - DNA, 120 bp, Artificial Sequence
  ENSG00000108389_28 (sequence is synthesized)
gactgaggtgactcgctgggttccagaccatatggcatcacactgctataactgtgactgtgaattctggttggccaaacgaagacaccattgcagaaattgtgggaatgtattttgtgc

SEQ ID NO: 166690 - DNA, 120 bp, Artificial Sequence
  ENSG00000108389_29 (sequence is synthesized)
tggatgctgccacctgaagctgcccattcctgatcagcaactctatgacccagttctcgtctgtaactcatgttacgaacacattcaagtctctcgtgccagggaactcatgagccaaca

SEQ ID NO: 166691 - DNA, 120 bp, Artificial Sequence
  ENSG00000108389_30 (sequence is synthesized)
gctgaagaaacccattgctacagcttccagttgaatgccggggagaaacctgtccaattttagcaggtttgaagggaggatcttcttcagttgtagtttggaaggttccttggtgtggct

SEQ ID NO: 166692 - DNA, 120 bp, Artificial Sequence
  ENSG00000108389_31 (sequence is synthesized)
catgaaatcacagagctcagagataccatcttgagaaatcctccttggtatcatgaaactggagcagaggaattgcaatttagcaggaggtcctctactggtgataccctcaccttgggg

SEQ ID NO: 166693 - DNA, 120 bp, Artificial Sequence
  ENSG00000108389_32 (sequence is synthesized)
taatggtcctaacccagacccagggtctggaagcttaatgttgagttggtgactccagcctctttctcctggaggtcacaagatgatgattgcgtagatgttgcctggtgcaaagtgccc

SEQ ID NO: 166694 - DNA, 120 bp, Artificial Sequence
  ENSG00000108389_33 (sequence is synthesized)
caaacagcaatagaaaggcatatgtataaccaaactccaagtgataaccagacccatctctcctccaccttgacaaaagcagattatagtatacaaggtaggaattcctgtcctatttga

SEQ ID NO: 166695 - DNA, 120 bp, Artificial Sequence
  ENSG00000108389_34 (sequence is synthesized)
gatgaactatatcctgtacctctgtgctctgtgtctgcatgaaggctcagcctttagaggcactccttctagttgcattagtactgtctttctgtggagtttggtttgaagactggctca

SEQ ID NO: 166696 - DNA, 120 bp, Artificial Sequence
  ENSG00000108389_35 (sequence is synthesized)
gcaagtggaggtttcaatgtatttttcagttggctcatcagccagcattggtgaatattcagtttaggggaacagttctagggagtgagacatttttgggagcagaggaaaactctgctg

SEQ ID NO: 166697 - DNA, 120 bp, Artificial Sequence
  ENSG00000108389_36 (sequence is synthesized)
atgttcggtcctggcaaacattgagttattttgagctgtgaaggcagtcgtctctgttacacagtggcagctcttgagttatgcactgtgaagaatgagaagggaaaagcaaaaattatc

SEQ ID NO: 166698 - DNA, 120 bp, Artificial Sequence
  ENSG00000108389_37 (sequence is synthesized)
cttgtgaaatatctgctgattgtgccctactctttgcacctgacttttcctagttgtcctggtgctaacacaggagctacaccttgatcctctcctggcatgaaaataaaacaaaggttt

SEQ ID NO: 166699 - DNA, 120 bp, Artificial Sequence
  ENSG00000108389_38 (sequence is synthesized)
tcgttgttgttgttccattgcccatttcccccatgttgtctttcccttggctgatgcctcctctgggtcacattgcttcttatcctgaacacttgacaccttgagggtagaatttagcgt

SEQ ID NO: 166700 - DNA, 120 bp, Artificial Sequence
  ENSG00000108389_39 (sequence is synthesized)
ttggtttttacctcctagcatatgctgtttggtatgtgagggtttcagtacaaatgctgctgtctatttctgtgcacttaacaatggaacccaaacagaagagaataaagccttgatacc

SEQ ID NO: 166701 - DNA, 120 bp, Artificial Sequence
  ENSG00000108389_40 (sequence is synthesized)
tggaacccaaacagaagagaataaagccttgataccaaaattgggaaagaacatgtgtccatttggaccaaacgttgttggtttttaaaaaattttattttgtttttttgtttttgtttt

SEQ ID NO: 166702 - DNA, 120 bp, Artificial Sequence
  ENSG00000108389_41 (sequence is synthesized)
aaccaaaagatacagtgatatagccatgtactgtgggtgggacagatacagtctccttggcctataatgaaaccactaggactttatacagttttccttaatttgttgacatataaatgg

SEQ ID NO: 166703 - DNA, 120 bp, Artificial Sequence
  ENSG00000108389_42 (sequence is synthesized)
taaattatatttaggcttatcctgttttgaaatgatggtagtcatctttcttactgctactttcatgttgctttctagaaaacagcatttcattccaaaataactaggatctgcatttag

SEQ ID NO: 166704 - DNA, 120 bp, Artificial Sequence
  ENSG00000108389_43 (sequence is synthesized)
aacaagaatcattatttgtcctgaccttttcagtcctacagagacgcatctgtggttcttttgtacttgccatagatgtaacctaaaaagttttggcatatttaggtcagcctagcggaa

SEQ ID NO: 166705 - DNA, 120 bp, Artificial Sequence
  ENSG00000108389_44 (sequence is synthesized)
ctttttttttcatttaaatggagctgaataatggagattttgtgtctgcaaaattcctgagatcattgaaaaagtaacaagctgttccttgtttctgatacataaaattattttaagcat

SEQ ID NO: 166706 - DNA, 120 bp, Artificial Sequence
  ENSG00000108389_45 (sequence is synthesized)
tttatcaatcattaaaatttactgccagttgtgagtggctttttaattaacttgtctttcattgcacttcactctgcctgttttcaaggggagtaagattggtaacatttggggagactg

SEQ ID NO: 166707 - DNA, 120 bp, Artificial Sequence
  ENSG00000108389_46 (sequence is synthesized)
tatctgtctacttagcgtggctgttttgagggactgtcccatcagtgaacaaactgcatggccttggagagagactctgggctcttggctcagatgtgttcatcaaatactcctttcaga

SEQ ID NO: 166708 - DNA, 120 bp, Artificial Sequence
  ENSG00000108389_47 (sequence is synthesized)
gctgttgtgggtgtaagtgacatgatgtggccaaaaatccaaactgtgcagttgcgttgtgacaaacatgcaatgtgctgtaaaaattcaatacagtttaaataaaatctctatattagt

SEQ ID NO: 166709 - DNA, 120 bp, Artificial Sequence
  ENSG00000108389_48 (sequence is synthesized)
agggtcgggcggacgccgcctggtgagaagcaggcagccagtacccttgccacggtagaatggagcgtggaatgactaacctggcaccattctaaggggaaagaaaggtttaacgaagtc

SEQ ID NO: 166710 - DNA, 80 bp, Artificial Sequence
  ENSG00000108389_49 (sequence is synthesized)
actcgtgcgggagggcggagctgggcccgctccattgtggagaggaggggagaggcgcgcgggagccgcgcggaggcccg

SEQ ID NO: 166711 - DNA, 120 bp, Artificial Sequence
  ENSG00000108389_50 (sequence is synthesized)
cgggatgcggcgggcgcccggggctggcgggcagcgcagcggctccggggacatgtgcgctggcccagaccgcccgcgaccatgagcctgaccgcccgcgtctcctgctccatgcttagc

SEQ ID NO: 166712 - DNA, 120 bp, Artificial Sequence
  ENSG00000108389_51 (sequence is synthesized)
ttccacaccaaactacttccgtgtttggataaagtgtggtgggcacagcttctgagtctgagagggaggaaggctcatggtttctcttcccacaaagccatccccagggatcctgtcatc

SEQ ID NO: 166713 - DNA, 120 bp, Artificial Sequence
  ENSG00000108389_52 (sequence is synthesized)
gaccatgttctgggttgggaggtcagtttactgacccataggatcttgacctgaaaaaatgggggtaatgcctagttcatggagtcatcgtaaggattaagtgagataatgtgtatgtgt

SEQ ID NO: 166714 - DNA, 120 bp, Artificial Sequence
  ENSG00000108389_53 (sequence is synthesized)
atgaaagcaccgaggacaatatctggcacagagcactcatattattgttggtttatttatttattcatttgatatacatgtattgagtaccctactcaatgccagcctgttttaagccct

SEQ ID NO: 166715 - DNA, 120 bp, Artificial Sequence
  ENSG00000108389_54 (sequence is synthesized)
ggggatacagcagggaacaaatagacaaaattttgccgcctcagagagcttacattccaatgaggagataccaaccgtaagtaataagtaaaatttgtgaaatgatagtaagtgtaaagg

SEQ ID NO: 166716 - DNA, 120 bp, Artificial Sequence
  ENSG00000108389_55 (sequence is synthesized)
aaaaaaataaagcagggaaagggaataaggagtgctatgagggtgaagattgtaaaacaatcaggctgggcacggtggttcacgcctgtaataccagcacttcgggtggccaaggtggga

SEQ ID NO: 166717 - DNA, 120 bp, Artificial Sequence
  ENSG00000108389_56 (sequence is synthesized)
gtgtcagcctggtaggcaaatggtagccagttatgaagataagccttgtctctttctgctggggtgctttcctcattgcaatgttgctcttccagtctgtcaacaaggaccaggaatttt

SEQ ID NO: 166718 - DNA, 120 bp, Artificial Sequence
  ENSG00000108389_57 (sequence is synthesized)
tcaaaattggagattttgggtaacctggttgactgagaattgacactctatggggaagtatgaaataactttaaaacaaaaactatcttagttttttctcctaagaataaggctattagg

SEQ ID NO: 166719 - DNA, 120 bp, Artificial Sequence
  ENSG00000108395_0 (sequence is synthesized)
gcagcttctctcgccgccgcgcccccagctgctctggttacggttggtgtttgcgaattctctgcggcaccttcttcgctgaactccaccgtcagttccataggcgcgcgcccgcgtcac

SEQ ID NO: 166720 - DNA, 120 bp, Artificial Sequence
  ENSG00000108395_1 (sequence is synthesized)
gtgggccgaggttccggcgcggctgctggccggcggctgagccgggagaaaggagctgcggccaccgttcgccctacttctgcgcctcggggcgggcgcgccggtaaaaatggcgaaatg

SEQ ID NO: 166721 - DNA, 120 bp, Artificial Sequence
  ENSG00000108395_2 (sequence is synthesized)
ggggtaggcggcgctggacctgaagagatggggcgcgcaggtggggcggttgtcagagccccctgacgtgggcgccgggcttttatcggcgatttgatctggcgacctcgggccggcgcc

SEQ ID NO: 166722 - DNA, 120 bp, Artificial Sequence
  ENSG00000108395_3 (sequence is synthesized)
taagaggtcagactgcggagcctgcgggtcgccagcggccccgccgagagccggaggcaatggatgaacagagcgtggagagcattgctgaggttttccgatgtttcatttgtatggaga

SEQ ID NO: 166723 - DNA, 120 bp, Artificial Sequence
  ENSG00000108395_4 (sequence is synthesized)
aattgcgggatgcacgcctgtgtcctcattgctccaaactgtgttgtttcagctgtattaggcgctggctgacagagcagagagctcaatgtcctcattgccgtgctccactccagctac

SEQ ID NO: 166724 - DNA, 120 bp, Artificial Sequence
  ENSG00000108395_5 (sequence is synthesized)
gagaactagtaaattgtcgttgggcagaagaagtaacacaacagcttgatactcttcaactctgcagtctcaccaaacatgaagaaaatgaaaaggacaaatgtgaaaatcaccatgaaa

SEQ ID NO: 166725 - DNA, 120 bp, Artificial Sequence
  ENSG00000108395_6 (sequence is synthesized)
aacttagtgtattttgctggacttgtaagaagtgtatctgccatcagtgtgcactttggggaggaatgcatggcggacatacctttaaacctttggcagaaatttatgagcaacacgtca

SEQ ID NO: 166726 - DNA, 120 bp, Artificial Sequence
  ENSG00000108395_7 (sequence is synthesized)
ctaaagtgaatgaagaggtagccaaacttcgtcggcgtctcatggaactgatcagcttagttcaagaagtggaaaggaatgtagaagctgtaagaaatgcaaaagatgagcgtgttcggg

SEQ ID NO: 166727 - DNA, 120 bp, Artificial Sequence
  ENSG00000108395_8 (sequence is synthesized)
aaattaggaatgcagtggagatgatgattgcacggttagacacacagctgaagaataagcttataacactgatgggtcagaagacatctctaacccaagaaacagagcttttggaatcct

SEQ ID NO: 166728 - DNA, 120 bp, Artificial Sequence
  ENSG00000108395_9 (sequence is synthesized)
tacttcaggaggtggagcaccagttgcggtcttgtagtaagagtgagttgatatctaagagctcagagatccttatgatgtttcagcaagttcatcggaagcccatggcatcttttgtta

SEQ ID NO: 166729 - DNA, 120 bp, Artificial Sequence
  ENSG00000108395_10 (sequence is synthesized)
ccactcctgttccaccagactttaccagtgaattagtgccatcttacgattcagctacttttgttttagagaatttcagcactttgcgtcagagagcagatcctgtttacagtccacctc

SEQ ID NO: 166730 - DNA, 120 bp, Artificial Sequence
  ENSG00000108395_11 (sequence is synthesized)
ttcaagtttcaggactttgctggaggttaaaagtttacccagatggaaatggagttgtgcgaggttactacttatctgtgtttctggagctctcagctggcttgcctgaaacttctaaat

SEQ ID NO: 166731 - DNA, 120 bp, Artificial Sequence
  ENSG00000108395_12 (sequence is synthesized)
atgaatatcgtgtagagatggttcaccagtcctgtaatgatcctacaaaaaatatcattcgagaatttgcatctgactttgaagttggagaatgctggggctataatagatttttccgtt

SEQ ID NO: 166732 - DNA, 120 bp, Artificial Sequence
  ENSG00000108395_13 (sequence is synthesized)
tggacttactcgcaaatgaaggatacttgaatccacaaaatgatacagtgattttaaggtttcaggtacgttcaccaactttctttcaaaaatcccgggaccagcattggtacattactc

SEQ ID NO: 166733 - DNA, 120 bp, Artificial Sequence
  ENSG00000108395_14 (sequence is synthesized)
agttggaagctgcacagactagttatatccaacaaataaacaaccttaaagagagacttactattgagctgtctcgaactcagaagtcaagagatttgtcaccaccagataaccatctta

SEQ ID NO: 166734 - DNA, 120 bp, Artificial Sequence
  ENSG00000108395_15 (sequence is synthesized)
gcccccaaaatgatgatgctctggagacacgagctaagaagtctgcatgctctgacatgcttctcgaaggtggtcctactacagcttctgtaagagaggccaaagaggatgaagaagatg

SEQ ID NO: 166735 - DNA, 120 bp, Artificial Sequence
  ENSG00000108395_16 (sequence is synthesized)
aggagaagattcagaatgaagattatcatcacgagctttcagatggagatctggatctggatcttgtttatgaggatgaagtaaatcagctcgatggcagcagttcctctgctagttcca

SEQ ID NO: 166736 - DNA, 120 bp, Artificial Sequence
  ENSG00000108395_17 (sequence is synthesized)
cagcaacaagtaatacagaagaaaatgatattgatgaagaaactatgtctggagaaaatgatgtggaatataacaacatggaattagaagagggagaactcatggaagatgcagctgctg

SEQ ID NO: 166737 - DNA, 120 bp, Artificial Sequence
  ENSG00000108395_18 (sequence is synthesized)
atcaagaagaacacatttatgctccgctgctaccagtagtttactagacattgatccattaattttaatacatttgttggaccttaaggaccggagcagtatagaaaatttgtggggctt

SEQ ID NO: 166738 - DNA, 120 bp, Artificial Sequence
  ENSG00000108395_19 (sequence is synthesized)
acagcctcgcccacctgcttcacttctgcagcccacagcatcatattctcgaaaagataaagaccaaaggaagcaacaggcaatgtggcgagtgccctctgatttaaagatgctaaaaag

SEQ ID NO: 166739 - DNA, 120 bp, Artificial Sequence
  ENSG00000108395_20 (sequence is synthesized)
actcaaaactcaaatggccgaagttcgatgtatgaaaactgatgtaaagaatacactttcagaaataaaaagcagcagtgctgcttctggagacatgcagacaagccttttttctgctga

SEQ ID NO: 166740 - DNA, 120 bp, Artificial Sequence
  ENSG00000108395_21 (sequence is synthesized)
ccaggcagctctggctgcatgtggaactgaaaactctggcagattgcaggatttgggaatggaactcctggcaaagtcatcagttgccaattgttacatacgaaactccacaaataagaa

SEQ ID NO: 166741 - DNA, 120 bp, Artificial Sequence
  ENSG00000108395_22 (sequence is synthesized)
gagtaattcgcccaagccagctcgatccagtgtagcaggtagtctatcacttcgaagagcagtggaccctggagaaaatagtcgttcaaagggagactgtcagactctgtctgaaggctc

SEQ ID NO: 166742 - DNA, 120 bp, Artificial Sequence
  ENSG00000108395_23 (sequence is synthesized)
cccaggaagctctcagtctgggagcaggcacagttctccccgagccttgatacatggcagtatcggtgatattctgccaaaaactgaagaccggcagtgtaaagctttggattcagatgc

SEQ ID NO: 166743 - DNA, 120 bp, Artificial Sequence
  ENSG00000108395_24 (sequence is synthesized)
tgttgtggttgcagttttcagtggcttgcctgcggttgagaaaaggaggaaaatggtcaccttgggggctaatgctaaaggaggtcatctggaaggactgcagatgactgatttggaaaa

SEQ ID NO: 166744 - DNA, 120 bp, Artificial Sequence
  ENSG00000108395_25 (sequence is synthesized)
taattctgaaactggagagttacagcctgtactacctgaaggagcttcagctgcccctgaagaaggaatgagtagcgacagtgacattgaatgtgacactgagaatgaggagcaggaaga

SEQ ID NO: 166745 - DNA, 120 bp, Artificial Sequence
  ENSG00000108395_26 (sequence is synthesized)
gcataccagtgtgggcgggtttcacgactccttcatggtcatgacacagcccccggatgaagatacacattccagttttcctgatggtgaacaaataggccctgaagatctcagcttcaa

SEQ ID NO: 166746 - DNA, 120 bp, Artificial Sequence
  ENSG00000108395_27 (sequence is synthesized)
tacagatgaaaatagtggaaggtaattgccaaatcaagagaactgacttgcaagctaccttgaccctgaattttgctgtagttggtgctcaaatttgtcatcagtcagataatcagattt

SEQ ID NO: 166747 - DNA, 120 bp, Artificial Sequence
  ENSG00000108395_28 (sequence is synthesized)
ggtcttatttcttcattatctcgacctgaaatagtaatttggaaactgttggaaggtggcacagtttagtctaagacagcagtagtacatgggaaaaacagtatgggaagagttctttgt

SEQ ID NO: 166748 - DNA, 120 bp, Artificial Sequence
  ENSG00000108395_29 (sequence is synthesized)
aatgtaaggaaataacaatgtagttctctattaatttagcaaatttgtacattcacaaaaggcagtttgtctactacagcagaaggctggttaactgccagaaaatgtacctccaggccc

SEQ ID NO: 166749 - DNA, 120 bp, Artificial Sequence
  ENSG00000108395_30 (sequence is synthesized)
tgcatgccgtcagtaacccgcccggcattggtgctctactgtctttggctagagcttagttgtgtttaaataatcatctttatatttggggttttaattacagttccattagtgcctgta

SEQ ID NO: 166750 - DNA, 120 bp, Artificial Sequence
  ENSG00000108395_31 (sequence is synthesized)
gattagtgaacagaaaattgctttggaagagattctgccctgtagacactatgtgaataactgaagtaacactagactgaatctcctttttggagtatgtatcttctctcacttgttcaa

SEQ ID NO: 166751 - DNA, 120 bp, Artificial Sequence
  ENSG00000108395_32 (sequence is synthesized)
gtacaggcacactgttcaaccgcatggtatctttctgttgtgtgacttctacaaatgtaattttaaatgaaattaagttaacatggattcattacgttcctggccctgtagacacgtgta

SEQ ID NO: 166752 - DNA, 120 bp, Artificial Sequence
  ENSG00000108395_33 (sequence is synthesized)
agattatttaaaattctttcatttttttctgcctcttactatacgactgtagtgcaacaaatattttaaagcccccttttcttctttattttcattagttgtacattgatttcagtgtca

SEQ ID NO: 166753 - DNA, 120 bp, Artificial Sequence
  ENSG00000108395_34 (sequence is synthesized)
acacatttaaagattcattcatgttgcacagtggcttacatgaacgtgaaactgtgatataaggttttctttcatactcataattagcccaaaacagttgccaaactttgccattgtgct

SEQ ID NO: 166754 - DNA, 120 bp, Artificial Sequence
  ENSG00000108395_35 (sequence is synthesized)
cctgcatttgtgtttgagctgctatatatttgtggaaattacactgaaagttgactaagagactattgaaaaagcatgaataattaaatatacatgtgagagacatctcatctgctgtat

SEQ ID NO: 166755 - DNA, 120 bp, Artificial Sequence
  ENSG00000108395_36 (sequence is synthesized)
tttacttagtgaatattgttcactcttccgtgtctgatgtcttgctgaatgctgtgactcatagtttacttttgttcaaaatagtttgcactttttgttaataaaatcaacttgagaaaa

SEQ ID NO: 166756 - DNA, 120 bp, Artificial Sequence
  ENSG00000108395_37 (sequence is synthesized)
ccggatgaagatacacattccagttttcctgatggtgaacaaataggccctgaagatctcagcttcaatacagatgaaaatagtggaagataatttgatttgaaactgacactgcacctg

SEQ ID NO: 166757 - DNA, 120 bp, Artificial Sequence
  ENSG00000108395_38 (sequence is synthesized)
atgggttaacaagatctaggcttcagaaggtgacagatatgagtgaggaccatgtgtggggcaaagcctcagaatgatgaaaaggttccggcactatagttggggccatgttgactcctt

SEQ ID NO: 166758 - DNA, 120 bp, Artificial Sequence
  ENSG00000108395_39 (sequence is synthesized)
ttcaaccatttgtcacagacgtgagaagaagaaatgacttcaaaatcaagagaaaacaaatactgaaagtctctacttacatccaaattttaaaaaataaaatctgtagattaacaatct

SEQ ID NO: 166759 - DNA, 120 bp, Artificial Sequence
  ENSG00000108395_40 (sequence is synthesized)
agttgccttttagttatttatgaataagtagtgttatatttcttgtttttaattctttcagtcatgcgctgttactgttaagtaacatattcttattgtgtttatttaacaacagttatt

SEQ ID NO: 166760 - DNA, 120 bp, Artificial Sequence
  ENSG00000108395_41 (sequence is synthesized)
tcatgccatgtatacacagatacctctcgccctcccctccccccacacagaaagtactttgctagatgataggcatacaaaggtaaatgagacatgatttctgttaactgtttaatgggg

SEQ ID NO: 166761 - DNA, 120 bp, Artificial Sequence
  ENSG00000108395_42 (sequence is synthesized)
cttacgattcagctacttttgttttagagaatttcaggtaagagtttttgacaattctggtttttttgtatgtgtatataaggaagagccagaaaggtattctttggtaagacagtaatc

SEQ ID NO: 166762 - DNA, 120 bp, Artificial Sequence
  ENSG00000108395_43 (sequence is synthesized)
tagtgaactgtgtcactcactttagaagtcttagaagaataagtttcctattagaaatgtagagataatttgtgctggattatattgtatctttagactgactgcttctctagtctggga

SEQ ID NO: 166763 - DNA, 120 bp, Artificial Sequence
  ENSG00000108405_0 (sequence is synthesized)
agtctgttgccttccaggggccaagagctgctctgatcacccagggattctctctccaacccaagtgcctccagctgacctctggctcctgtcctctggctccacctgcaccgccctgct

SEQ ID NO: 166764 - DNA, 120 bp, Artificial Sequence
  ENSG00000108405_1 (sequence is synthesized)
cttcctaaggggccaggaagcccccagaagctctaccatcgacgtgggtggtggcacccggctcaccctgagagcagaggccgtgcagggggctcagttctgagccccagccggcccacc

SEQ ID NO: 166765 - DNA, 120 bp, Artificial Sequence
  ENSG00000108405_2 (sequence is synthesized)
atggcacggcggttccaggaggagctggccgccttcctcttcgagtatgacaccccccgcatggtgctggtgcgtaataagaaggtgggcgttatcttccgactgatccagctggtggtc

SEQ ID NO: 166766 - DNA, 120 bp, Artificial Sequence
  ENSG00000108405_3 (sequence is synthesized)
ctggtctacgtcatcgggtgggtgtttctctatgagaagggctaccagacctcgagcggcctcatcagcagtgtctctgtgaaactcaagggcctggccgtgacccagctccctggcctc

SEQ ID NO: 166767 - DNA, 120 bp, Artificial Sequence
  ENSG00000108405_4 (sequence is synthesized)
ggcccccaggtctgggatgtggctgactacgtcttcccagcccagggggacaactccttcgtggtcatgaccaatttcatcgtgaccccgaagcagactcaaggctactgcgcagagcac

SEQ ID NO: 166768 - DNA, 120 bp, Artificial Sequence
  ENSG00000108405_5 (sequence is synthesized)
ccagaagggggcatatgcaaggaagacagtggctgtacccctgggaaggccaagaggaaggcccaaggcatccgcacgggcaagtgtgtggccttcaacgacactgtgaagacgtgtgag

SEQ ID NO: 166769 - DNA, 120 bp, Artificial Sequence
  ENSG00000108405_6 (sequence is synthesized)
atctttggctggtgccccgtggaggtggatgacgacatcccgcgccctgcccttctccgagaggccgagaacttcactcttttcatcaagaacagcatcagctttccacgcttcaaggtc

SEQ ID NO: 166770 - DNA, 120 bp, Artificial Sequence
  ENSG00000108405_7 (sequence is synthesized)
aacaggcgcaacctggtggaggaggtgaatgctgcccacatgaagacctgcctctttcacaagaccctgcaccccctgtgcccagtcttccagcttggctacgtggtgcaagagtcaggc

SEQ ID NO: 166771 - DNA, 120 bp, Artificial Sequence
  ENSG00000108405_8 (sequence is synthesized)
cagaacttcagcaccctggctgagaagggtggagtggttggcatcaccatcgactggcactgtgacctggactggcacgtacggcactgcagacccatctatgagttccatgggctgtac

SEQ ID NO: 166772 - DNA, 120 bp, Artificial Sequence
  ENSG00000108405_9 (sequence is synthesized)
gaagagaaaaatctctccccaggcttcaacttcaggtttgccaggcactttgtggagaacgggaccaactaccgtcacctcttcaaggtgtttgggattcgctttgacatcctggtggac

SEQ ID NO: 166773 - DNA, 120 bp, Artificial Sequence
  ENSG00000108405_10 (sequence is synthesized)
ggcaaggccgggaagtttgacatcatccctacaatgaccaccatcggctctggaattggcatctttggggtggccacagttctctgtgacctgctgctgcttcacatcctgcctaagagg

SEQ ID NO: 166774 - DNA, 120 bp, Artificial Sequence
  ENSG00000108405_11 (sequence is synthesized)
tcaaatacgctgaggacatggggccaggggcggctgagcgtgacctcgcagctaccagctccaccctgggcctgcaggagaacatgaggacatcctgatgctcgggccccaactcctgac

SEQ ID NO: 166775 - DNA, 120 bp, Artificial Sequence
  ENSG00000108405_12 (sequence is synthesized)
tgggtgcagcgtgaggcttcagcctggagccctggtgggtcccagccagggcagaggggcctccccaggaagtctcctaccctctcagccaggcagagagcagtttgccagaagctcagg

SEQ ID NO: 166776 - DNA, 120 bp, Artificial Sequence
  ENSG00000108405_13 (sequence is synthesized)
gtgcatagtaggagagacctgtgcaaatctgagctccggctccgaccccacacaccctgagggagccctaccctagcctcagccgctcctggtggggaatggctggggctgggcaggacc

SEQ ID NO: 166777 - DNA, 120 bp, Artificial Sequence
  ENSG00000108405_14 (sequence is synthesized)
ctcccacacacctgcaccctagcttcgtgcttctctctccggactctcattatccaacccgctgcctccatttctctagatctgtgctctccgatgtggcagtcagtaaccataggtgac

SEQ ID NO: 166778 - DNA, 120 bp, Artificial Sequence
  ENSG00000108405_15 (sequence is synthesized)
taaattaaactaaaataaaatagaatgaaacacaaaattcaattcctcggctgaactagccacatttcaactgctcagtagatacgtgtggttagtggctgccatactggacagctcggg

SEQ ID NO: 166779 - DNA, 120 bp, Artificial Sequence
  ENSG00000108405_16 (sequence is synthesized)
gcattttcactgtcaaagaaagttctattagacagccctgcttgagccctgtttcttcctggccttcggtttccctggggaacttatcgacaatgcaagctcctgggcccacccccagac

SEQ ID NO: 166780 - DNA, 120 bp, Artificial Sequence
  ENSG00000108405_17 (sequence is synthesized)
ctcctgaaccaaaagctccagggctggccgtatgatctgtgtggatggcaaactccccaggccattctgggacctaagtttaagaagtgccgtcctcgaactttctgactctaagctcct

SEQ ID NO: 166781 - DNA, 120 bp, Artificial Sequence
  ENSG00000108405_18 (sequence is synthesized)
gagcgggagtcagacttagccctgagcctgcacttcctgttcaggtgcagacactgaacagggtctcaaacaccttcagcatgtgtgttgtgtgctcacgtgccacacagtgtctcatgc

SEQ ID NO: 166782 - DNA, 120 bp, Artificial Sequence
  ENSG00000108405_19 (sequence is synthesized)
acacaacccagtgtacacaccacctacgtgcacacagcatccttccacactgtgtatgtgaacagcttgggccctgcaaacacaaccatctacacacatctacacccccaagcacacaca

SEQ ID NO: 166783 - DNA, 120 bp, Artificial Sequence
  ENSG00000108405_20 (sequence is synthesized)
catggtccgtgccatgtcacctccatagggaaaggcttctctccaagtgtgccaggccaggacagccctcccagccatgaatccttactcagctacctcgggttggggtgggagccccag

SEQ ID NO: 166784 - DNA, 120 bp, Artificial Sequence
  ENSG00000108405_21 (sequence is synthesized)
ccaaatcctgggctccctgcctgtggctcagccccagctcccaaggcctgcctggctctgtctgaacagaaggtctgggggaagcgacgggtggagtacaataaagggaatgaggacaaa

SEQ ID NO: 166785 - DNA, 120 bp, Artificial Sequence
  ENSG00000108405_22 (sequence is synthesized)
agccggctcagtgttatggttcctttgagtggttagtggtgttcagggccagggcaccaccaaccacagccactgagtcctcgacctctgaccgcctgccaaaccaggccgccactgaca

SEQ ID NO: 166786 - DNA, 120 bp, Artificial Sequence
  ENSG00000108405_23 (sequence is synthesized)
cacagaggccataccccacacccgtcaccccatatgacaagttagagagagacagactctgctgccagcttccctgcctgagcaagggacatccagggacgtttgaggcccccggagcag

SEQ ID NO: 166787 - DNA, 120 bp, Artificial Sequence
  ENSG00000108405_24 (sequence is synthesized)
agaaactctcacattctgaatacctggtgccttcatgttggcatgtcaggcggaggacagagattggttctggtcccagggatgatagttcctttctgggcatctccggacctgtcccac

SEQ ID NO: 166788 - DNA, 120 bp, Artificial Sequence
  ENSG00000108405_25 (sequence is synthesized)
cgggctgggagtgcagaatcagaggcagcgtgggacgctcctgcagtatggttgtctcgggagccaagacaggcctggcagaggctggcacacttgtgagtgtgcatatggagctctgtg

SEQ ID NO: 166789 - DNA, 120 bp, Artificial Sequence
  ENSG00000108405_26 (sequence is synthesized)
cctatatgtgtctgggtgggtgtttctctatgagaagggctaccagacctcgagcggcctcatcagcagtgtctctgtgaaactcaagggcctggccgtgacccagctccctggcctcgg

SEQ ID NO: 166790 - DNA, 120 bp, Artificial Sequence
  ENSG00000108405_27 (sequence is synthesized)
agtgatggaaatttgggcgcatattcacacacagcaactgtcaacccttgcagagctgagccttcccgcccagcacacggtgtaccaggcagggtgccgagacttcgtgcccacccccac

SEQ ID NO: 166791 - DNA, 120 bp, Artificial Sequence
  ENSG00000108405_28 (sequence is synthesized)
cgcccagctgacattggcagtgggcagctgggcatgagcccggggggcgcctcggcagagcagtgtggggggaaatgggggaaggaggctgtgagcaggcgtcactccagagaggtctga

SEQ ID NO: 166792 - DNA, 120 bp, Artificial Sequence
  ENSG00000108405_29 (sequence is synthesized)
gccccgtggaggtggatgacgacatcccgcggtaacactctgaccttccagagagctaagaacagggtcccaggccagacagaggggggcctaggtctagaaaggatctttacccctttt

SEQ ID NO: 166793 - DNA, 120 bp, Artificial Sequence
  ENSG00000108405_30 (sequence is synthesized)
tctgaccccaccctcaccccatccgcgcaacctaggctgaagattcccctgggtcctggccacgctagagcacacccacccctccaccagcccagggctgcaggcgggtcccggaggctc

SEQ ID NO: 166794 - DNA, 120 bp, Artificial Sequence
  ENSG00000108405_31 (sequence is synthesized)
ggcccaccccctgctgtgccaagctctgtgtgggacacacagggggcctcctggggaggggcggtgagtgcgtgtggtgtcctccagccctgcccttctccgagaggccgagaacttcac

SEQ ID NO: 166795 - DNA, 120 bp, Artificial Sequence
  ENSG00000108406_0 (sequence is synthesized)
gtctttcccctcccatctcctcagatcggtggacgtgctcgcctccactcggggccaggtctatgtcccggtttcccgcagtcgcgggcagggcgccaaggcggcaggaggagggtgagc

SEQ ID NO: 166796 - DNA, 120 bp, Artificial Sequence
  ENSG00000108406_1 (sequence is synthesized)
ggtcaagagacctccaggaagagcggctctcggctgtttgcatcgccgatagagaagagaaaggatgcacgtcccaggagggaggaactactccaacttttcctattcagaaacaaagaa

SEQ ID NO: 166797 - DNA, 120 bp, Artificial Sequence
  ENSG00000108406_2 (sequence is synthesized)
aaaagattattcaagctgtgagggacaattcattccttattgttactggaaatacaggaagtggtaaaacaactcaactcccaaaatatctatatgaagcagggttttcacaacatggta

SEQ ID NO: 166798 - DNA, 120 bp, Artificial Sequence
  ENSG00000108406_3 (sequence is synthesized)
tgattggtgtaactcaaccacgaaaagtagctgctatatcagttgctcagagagtagctgaagaaatgaaatgcactttgggatccaaagtaggataccaagttcgttttgatgattgca

SEQ ID NO: 166799 - DNA, 120 bp, Artificial Sequence
  ENSG00000108406_4 (sequence is synthesized)
gttctaaggagacagcaatcaaatatatgactgatggatgtttactgaaacatattctgggagacccaaatcttaccaaattcagtgtcattattttggatgaagcccatgaaagaactc

SEQ ID NO: 166800 - DNA, 120 bp, Artificial Sequence
  ENSG00000108406_5 (sequence is synthesized)
taactacagatatcttatttggtttattgaagaagctatttcaggagaagtctcctaataggaaggagcatttaaaagtggtggtaatgtcagcaactatggaattagccaagctctctg

SEQ ID NO: 166801 - DNA, 120 bp, Artificial Sequence
  ENSG00000108406_6 (sequence is synthesized)
cattctttggaaattgtccaatatttgatatacctggaaggctttatccagtcagagagaaattctgcaatttgattggtccacgagacagagaaaatactgcgtatattcaagcgattg

SEQ ID NO: 166802 - DNA, 120 bp, Artificial Sequence
  ENSG00000108406_7 (sequence is synthesized)
tgaaagtcaccatggatatccatttgaatgaaatggctggagacatcttggtttttctgactggccagtttgaaatagaaaaaagttgtgagttactttttcagatggcagagtctgttg

SEQ ID NO: 166803 - DNA, 120 bp, Artificial Sequence
  ENSG00000108406_8 (sequence is synthesized)
attatgattatgatgttcaagataccaccctcgatggcttgttaatattgccgtgttatggatcaatgacaacagatcaacagaggaggatatttttgccaccaccacctggaattagaa

SEQ ID NO: 166804 - DNA, 120 bp, Artificial Sequence
  ENSG00000108406_9 (sequence is synthesized)
aatgtgtcatatccaccaatatttctgcaacgtctttgacaatagatggaatcagatatgtggtagatggtggcttcgtgaagcagttaaatcacaaccccagattagggttggacatcc

SEQ ID NO: 166805 - DNA, 120 bp, Artificial Sequence
  ENSG00000108406_10 (sequence is synthesized)
tggaggtggttccaatttcaaagagcgaggcattacagcgaagtggccgagctggcaggacttcttcaggaaaatgctttcggatctatagtaaagatttttggaaccagtgtatgcctg

SEQ ID NO: 166806 - DNA, 120 bp, Artificial Sequence
  ENSG00000108406_11 (sequence is synthesized)
accatgtgatccctgaaattaagagaactagtttgacatctgtagttctgaccttaaagtgccttgccatacacgatgtcataaggtttccctatttggatccacctaatgagagactta

SEQ ID NO: 166807 - DNA, 120 bp, Artificial Sequence
  ENSG00000108406_12 (sequence is synthesized)
ttttagaagctcttaaacaactttaccagtgtgatgctattgacaggagtggccatgtcaccagattgggtttgtctatggtggagtttcctttgcctccacatctgacatgtgcagtaa

SEQ ID NO: 166808 - DNA, 120 bp, Artificial Sequence
  ENSG00000108406_13 (sequence is synthesized)
taaaagctgcttccctggattgtgaagatctactacttccaatagcagcaatgttgtctgtggaaaacgtcttcattagacctgttgatccagagtaccagaaggaagcagaacagagac

SEQ ID NO: 166809 - DNA, 120 bp, Artificial Sequence
  ENSG00000108406_14 (sequence is synthesized)
tggtgccaaaaacactggattcattggaggtgcttattttctgcatttcgtgtggaagctcaacttcgagaactaatcaggaagcttaaacagcaaagtgatttcccaaaagagaccttt

SEQ ID NO: 166810 - DNA, 120 bp, Artificial Sequence
  ENSG00000108406_15 (sequence is synthesized)
gaaggccctaaacatgaagtactacgaagatgtctttgtgcgggctatttcaaaaatgtagctcgaagatctgttgggagaacgttttgcacaatggatggtcgtggaagcccagttcac

SEQ ID NO: 166811 - DNA, 120 bp, Artificial Sequence
  ENSG00000108406_16 (sequence is synthesized)
attcatccttcctcagcacttcatgaacaggaaaccaaacttgaatggatcatttttcatgaggtattggttaccaccaaagtctacgcaagaattgtatgcccaatccgttatgaatgg

SEQ ID NO: 166812 - DNA, 120 bp, Artificial Sequence
  ENSG00000108406_17 (sequence is synthesized)
gtaagagacttgttacccaagttgcatgaatttaatgcacatgatttgagcagtgtggcccgacgtgaagtgagagaagatgcaagaaggagatggacaaataaggaaaatgtaaagcag

SEQ ID NO: 166813 - DNA, 120 bp, Artificial Sequence
  ENSG00000108406_18 (sequence is synthesized)
ctaaaggatggaatatcgaaagacgtcttaaagaaaatgcaaagaagaaatgatgacaaatccatatctgatgcacgggctcgtttccttgagagaaagcagcagaggacccaggaccac

SEQ ID NO: 166814 - DNA, 120 bp, Artificial Sequence
  ENSG00000108406_19 (sequence is synthesized)
agtgacacacgaaaggaaacaggctaaggtggtgaaccctccaattcaggaagtgggaaaaggagccaggaaatgtgcttctactttgccagttatttcagacagcactaccaagaggag

SEQ ID NO: 166815 - DNA, 120 bp, Artificial Sequence
  ENSG00000108406_20 (sequence is synthesized)
gtggtcagcacttgttattggcctatgaactaaaagcaaatcaaagctcataaatcaaagctcatcagttcccataaatgcagttgtcaaagaaaagatttggttgccatagtcataagc

SEQ ID NO: 166816 - DNA, 120 bp, Artificial Sequence
  ENSG00000108406_21 (sequence is synthesized)
aatgatacatgaaaccaatgaaagacagtacatgtaataatattttcctcagtacaattttgctggccttaactggtatcaaacgctgtcattgagatgttttcaaagaacattgagttg

SEQ ID NO: 166817 - DNA, 120 bp, Artificial Sequence
  ENSG00000108406_22 (sequence is synthesized)
tatttaatcagcgtgtactccatttgcattgaagcattaaaaattatttttcttaaaatctctttaaggccttcttgttgctgttagaatagtgctatatatcaggtatgtgaccattta

SEQ ID NO: 166818 - DNA, 120 bp, Artificial Sequence
  ENSG00000108406_23 (sequence is synthesized)
tttcagaaggctgaacataagaggtttctactcagcaatacttagatgtctaactgtttaattgctacagagctttatagatatttagagaaaagacttaatcaattagtaaataaaatt

SEQ ID NO: 166819 - DNA, 120 bp, Artificial Sequence
  ENSG00000108406_24 (sequence is synthesized)
gcctatggcaggattctttcttgaattaatattaatccttaaattgatttttctgggattatacaaattcctttttatataaaagtatattgtttaaaacagtagctatagccattaacc

SEQ ID NO: 166820 - DNA, 120 bp, Artificial Sequence
  ENSG00000108406_25 (sequence is synthesized)
aaaggacagatgatatatatatatatgatatatatatatatataagttcttttttagctgtacctacgtacttatatcagcaccatgtatgtaggtgtgatagtactttcaaacagcgcc

SEQ ID NO: 166821 - DNA, 120 bp, Artificial Sequence
  ENSG00000108406_26 (sequence is synthesized)
tccacctggcctactctgttatttccacctgtttgggtagggccatttaacttccattatgccaaacttgggatgggattttcgaagcagacaacactatttcatcgtgtttcaaattgg

SEQ ID NO: 166822 - DNA, 120 bp, Artificial Sequence
  ENSG00000108406_27 (sequence is synthesized)
aaccttgaggctagttagtatcacactcaggccacactcagcacttgcccactcttgtttactgccttgtattctagttatttgtgtatttgtctccctcactagattatacgctccttg

SEQ ID NO: 166823 - DNA, 120 bp, Artificial Sequence
  ENSG00000108406_28 (sequence is synthesized)
tgggcagggactgtgtcttttttcatctttgtatctttcatgcacctagcatagtgctttgcacatagtagtcactcagtgtttgttaaataaagctattagtgtcattaaaattcaaaa

SEQ ID NO: 166824 - DNA, 120 bp, Artificial Sequence
  ENSG00000108406_29 (sequence is synthesized)
catctcctcagatcggtggacgtgctcgcctccactcggggccaggtctatgtcccggtttcccgcagtcgcgggcagggcgccaaggcggcaggaggaggaagagaaaggatgcacgtc

SEQ ID NO: 166825 - DNA, 120 bp, Artificial Sequence
  ENSG00000108406_30 (sequence is synthesized)
acatagatctataagggtattggttggcctgtgcctcctgtttgaagaagataggaattaattgagaaggatttggactatttggttggtttaatgtggaatagggcaggttattgagtt

SEQ ID NO: 166826 - DNA, 120 bp, Artificial Sequence
  ENSG00000108406_31 (sequence is synthesized)
tagaatgtatttgtatgtatgtaaatatttatatgtatatatgccctagctctgagataataacaatgaatagacatagtgcccagatcttgacttgggacatccatctgccacttaaag

SEQ ID NO: 166827 - DNA, 120 bp, Artificial Sequence
  ENSG00000108406_32 (sequence is synthesized)
gagtcaggggtctttggagaaatggggctgggaaaatgcaagatgagcccagaatatcttattttgccagcaagtaaagaagtgattaacaaaggttgaggccacgtcagaagaacatag

SEQ ID NO: 166828 - DNA, 120 bp, Artificial Sequence
  ENSG00000108406_33 (sequence is synthesized)
gagccagcatgaagaggccccaagtaatcaaatatgagacactttaagcatcaaaataagtagtgatagtagcggattattatgcacttaataaaatgtgaaatcgtgtctatcgtggta

SEQ ID NO: 166829 - DNA, 120 bp, Artificial Sequence
  ENSG00000108406_34 (sequence is synthesized)
taaataaatgagtaaaagtttattgagaaatggaattgtttacaagcacctctccataaaatttttgttaattacaaaagcaaaaagtaactttacagtggagaatcctggcatatgtga

SEQ ID NO: 166830 - DNA, 120 bp, Artificial Sequence
  ENSG00000108406_35 (sequence is synthesized)
cctaaatcaagcaatcaaagtgaacataatgaaataaataaaaatcatgttcttcctgataggatacaatgagaaaaacacagcattatgtctgtgatattcctgctaaagatgcataac

SEQ ID NO: 166831 - DNA, 120 bp, Artificial Sequence
  ENSG00000108406_36 (sequence is synthesized)
ctgaatctaatcatcctgaaacagacaaactcaaactgagggacataccacacagtaactagccttgacatctttaaaggtgccaagatcatgaaagtcaaagactgaggaagtattcca

SEQ ID NO: 166832 - DNA, 120 bp, Artificial Sequence
  ENSG00000108406_37 (sequence is synthesized)
gaatgaaggagaccaaagggaaatgaaaaataaaggcaatgtatgattctgaattacatccttttgctataaaggatattattaagacaaattggtgaaatgtcagtggggtctgaggat

SEQ ID NO: 166833 - DNA, 120 bp, Artificial Sequence
  ENSG00000108406_38 (sequence is synthesized)
taattgttagtaatgtatcagtgttaatttcctggttttgatggttatagtcatgtcggagaatgttcttgattgttgattgtaagaagtgcacagtcgagtatttgaggatgatggggt

SEQ ID NO: 166834 - DNA, 120 bp, Artificial Sequence
  ENSG00000108406_39 (sequence is synthesized)
attaggttggcagtttgctgtcaaatgattcaggtaaaaatttttttactctcaacttttctgtaaatttagattgtttcacacttttaaaaatatggtatatcttggttaccctctgta

SEQ ID NO: 166835 - DNA, 120 bp, Artificial Sequence
  ENSG00000108406_40 (sequence is synthesized)
tgccaaacactgggcaggtactaaaaatagaaaagtagagtaacatgagtccttacatcattcttgatgatacctgagtctaatggagggtacagatatgtaagtgaataattacagtgc

SEQ ID NO: 166836 - DNA, 120 bp, Artificial Sequence
  ENSG00000108406_41 (sequence is synthesized)
agtctgatctgggttatactatgaatatatacaaagtactataggaaataaattatgacaaatgaactaggtttatttttttgacaagttttttggaatgacatttaggtagggtaatgt

SEQ ID NO: 166837 - DNA, 120 bp, Artificial Sequence
  ENSG00000108406_42 (sequence is synthesized)
gcatgaatcggaaaaatgatagattaattgtcaagttttagagtagtgaaaaaatcatccctttaaaaagagatgcagcatagtataacataaagaaaccatatttaagtcagaagaact

SEQ ID NO: 166838 - DNA, 120 bp, Artificial Sequence
  ENSG00000108406_43 (sequence is synthesized)
gtttaggacttggttttaccatgcgttagcgctggtgatcttgagaagtctagctaatttatttgaattttagttttgactttttaataaagttcctggctctcaaagctcatagattat

SEQ ID NO: 166839 - DNA, 120 bp, Artificial Sequence
  ENSG00000108406_44 (sequence is synthesized)
tgttaatatttgtactgattccttatacctaattgtagtgacttatacctaattgtagtgactgtttaacctgtataattaatttaagatgaattggtagagagcttgtagtgacagttg

SEQ ID NO: 166840 - DNA, 120 bp, Artificial Sequence
  ENSG00000108406_45 (sequence is synthesized)
aataaatgtaaacctctgcttataatgctgtttgtagtagaacatattgtaattgttcattgctgaatgtaatgctccatttacttcattgctttactgttgtagtctttatcattttgt

SEQ ID NO: 166841 - DNA, 120 bp, Artificial Sequence
  ENSG00000108406_46 (sequence is synthesized)
tcattgatgtacattagcaccctttctattctaccacccttccattctatttgtttctatgacctccttgaccccatgaaacattcctagtagtgataaaagaattgtcttcacagaaat

SEQ ID NO: 166842 - DNA, 120 bp, Artificial Sequence
  ENSG00000108417_0 (sequence is synthesized)
agtctcagtggctcagccttcccagctgatctgaagctcctgtgcagcctcagccctacaccatgacctccttctacagcacctcctcatgccctctgggttgcaccatggctcctggag

SEQ ID NO: 166843 - DNA, 120 bp, Artificial Sequence
  ENSG00000108417_1 (sequence is synthesized)
caagaaatgtctttgtctctcctatcgatgttgggtgccagcctgtggcagaggccaatgctgcctccatgtgcctcttggccaacgtggcacacgccaacagagtccgtgtggggtcga

SEQ ID NO: 166844 - DNA, 120 bp, Artificial Sequence
  ENSG00000108417_2 (sequence is synthesized)
ctcccctgggccgccccagcctctgtctgcccccaaccagtcacactgcttgtcccttgccagggacctgtcacattcccggcaacatcggaatctgtggggcctacggcaaaaacaccc

SEQ ID NO: 166845 - DNA, 120 bp, Artificial Sequence
  ENSG00000108417_3 (sequence is synthesized)
tgaatggccatgagaaggagaccatgaagttcctgaatgaccgcctggccaactacctggagaaggtgcgccagctggagcaggagaatgcagagctggagaccacactcctcgagagga

SEQ ID NO: 166846 - DNA, 120 bp, Artificial Sequence
  ENSG00000108417_4 (sequence is synthesized)
gcaagtgccacgagtccaccgtgtgccccgactaccagtcctacttccgtacaatcgaggagctccagcagaagatcctgtgcagcaaggctgagaatgccaggctgattgtacaaattg

SEQ ID NO: 166847 - DNA, 120 bp, Artificial Sequence
  ENSG00000108417_5 (sequence is synthesized)
acaacgcgaagctggctgctgatgactttaggatcaagctggagagtgagcgctcccttcaccagctggtggaggcggacaagtgcgggacgcagaagctcctggatgacgcgaccctgg

SEQ ID NO: 166848 - DNA, 120 bp, Artificial Sequence
  ENSG00000108417_6 (sequence is synthesized)
ccaaggccgacctggaggcccagcaggagtccctgaaggaggagcagctctccctcaagagcaaccacgagcaggaagtaaagattctgaggagtcagctgggggagaagttccggatcg

SEQ ID NO: 166849 - DNA, 120 bp, Artificial Sequence
  ENSG00000108417_7 (sequence is synthesized)
aggccatggtggagaccaaccaccaggatgtggaacagtggttccaagcccagtctgaaggcatcagcctgcaggccatgtcctgctccgaggagctgcagtgctgccagtcggagatcc

SEQ ID NO: 166850 - DNA, 120 bp, Artificial Sequence
  ENSG00000108417_8 (sequence is synthesized)
tggagctgagatgcacggtgaatgccctggaggtggagcgccaagcccagcacaccttgaaggactgtctgcagaactccctgtgtgaagcggaggaccgctacggcacagagctggccc

SEQ ID NO: 166851 - DNA, 120 bp, Artificial Sequence
  ENSG00000108417_9 (sequence is synthesized)
agatgcagagcctcattagcaacttggaagagcagttgtctgagatccgggccgacctggagcggcagaaccaggagtaccaggtgctgctggacgtgaaggcccggttggagaacgaga

SEQ ID NO: 166852 - DNA, 120 bp, Artificial Sequence
  ENSG00000108417_10 (sequence is synthesized)
ttgccacataccggaaccttctggagagcgaggactgcaaactcccctgcaatccctgttccacgcctgcctcctgtacttcttgtccaagctgtggccctgtcaccggtgggtctccct

SEQ ID NO: 166853 - DNA, 120 bp, Artificial Sequence
  ENSG00000108417_11 (sequence is synthesized)
ctggccatggagccagcatggggagatgattctgaaggcccgagttaggagattgaggctggttgcactggggtcaggagtgccctcaccttgcccagtcttccttcaagactagactca

SEQ ID NO: 166854 - DNA, 120 bp, Artificial Sequence
  ENSG00000108417_12 (sequence is synthesized)
ctgaggcattttccctaaatcaaccggtagcagatacttccaaggagtggctccctgcctatgcctctaagctgtattttttgttgttgctaaaatgttgtaattatcttccatgaaagc

SEQ ID NO: 166855 - DNA, 120 bp, Artificial Sequence
  ENSG00000108417_13 (sequence is synthesized)
aattatttttcctggtgtctcttcttggtacttttagttctattccagtgtttcagaatctccaaaaatgtaactgggttccctgcattaaatggtcaataaacctccttcctgcaccaa

SEQ ID NO: 166856 - DNA, 120 bp, Artificial Sequence
  ENSG00000108423_0 (sequence is synthesized)
gcattgtcagctggagcgttcggtggacagtgagcatgcgtaccatatctgaagttcgtaaattgaaattgaacatgcgtaattaatctttctgaataggaaaaaatatatacacaacaa

SEQ ID NO: 166857 - DNA, 120 bp, Artificial Sequence
  ENSG00000108423_1 (sequence is synthesized)
aactctccgtttatggaacatgcgcatttgttctcagtaagtttttcgttttgaaagtgagcatgcgcatggtgagtaggttggtccgaagtttgaaccggacagaagcgctggtcggcg

SEQ ID NO: 166858 - DNA, 120 bp, Artificial Sequence
  ENSG00000108423_2 (sequence is synthesized)
tctggcggttgtttttagaggtaatacacctagtttgtggctcagcatgtcaattgtaacagtgcaacttggtcagtgtggcaatcagattggttttgaagtttttgatgctttgcttag

SEQ ID NO: 166859 - DNA, 120 bp, Artificial Sequence
  ENSG00000108423_3 (sequence is synthesized)
tgactcacacagttcccagggactctgctctatgagagagaatgaggcatatcaagcatcttgcaaagaaagattcttcagtgaggaggagaatggagttccaattgcccgggctgttct

SEQ ID NO: 166860 - DNA, 120 bp, Artificial Sequence
  ENSG00000108423_4 (sequence is synthesized)
tgttgacatggaacccaaagttatcaatcaaatgctgtcaaaggctgcccagtctggccaatggaaatatggtcaacatgcatgcttctgtcaaaaacaaggttctggaaacaactgggc

SEQ ID NO: 166861 - DNA, 120 bp, Artificial Sequence
  ENSG00000108423_5 (sequence is synthesized)
atatggttactctgttcatggacccaggcatgaagaatctataatgaacataatccggaaggaagtggagaaatgtgactctttcagtggttttttcatcataatgagtatggctggggg

SEQ ID NO: 166862 - DNA, 120 bp, Artificial Sequence
  ENSG00000108423_6 (sequence is synthesized)
cacaggatcaggattaggagctttcgttacacagaatttagaagatcagtactcaaactcattgaaaatgaatcagattatttggccttatggaactggtgaggttattgttcaaaacta

SEQ ID NO: 166863 - DNA, 120 bp, Artificial Sequence
  ENSG00000108423_7 (sequence is synthesized)
caactccattttgacactttctcacttgtaccgatcttcagacgccctccttcttcatgagaatgatgccatccataagatctgtgcaaaactgatgaatatcaagcagatctcctttag

SEQ ID NO: 166864 - DNA, 120 bp, Artificial Sequence
  ENSG00000108423_8 (sequence is synthesized)
tgatatcaatcaagtcctcgcacatcagctgggaagtgtgttccagcctacttattctgcagaaagctcatttcactacagacgaaatccactaggagacttaatggagcatttagttcc

SEQ ID NO: 166865 - DNA, 120 bp, Artificial Sequence
  ENSG00000108423_9 (sequence is synthesized)
ccatcctgaattcaagatgctgagtgttcgtaacattcctcacatgtctgagaattcattggcatacaccacatttacttgggctggcctcctcaagcatttgagacagatgctcatttc

SEQ ID NO: 166866 - DNA, 120 bp, Artificial Sequence
  ENSG00000108423_10 (sequence is synthesized)
ctgcattttaacacttccattgctaacttggtcattcttcgtgggaaagatgtgcaaagtgcagatgtggagggatttaaagatccagctctgtatacttcctggttgaagcctgttaat

SEQ ID NO: 166867 - DNA, 120 bp, Artificial Sequence
  ENSG00000108423_11 (sequence is synthesized)
gctttcaacgtgtggaaaacccagcgggcctttagcaaatatgagaagtctgcagtgttggtcagcaacagccagttcttagtaaaaccacttgatatgattgttgggaaggcatggaat

SEQ ID NO: 166868 - DNA, 120 bp, Artificial Sequence
  ENSG00000108423_12 (sequence is synthesized)
atgtttgcttcaaaagcctacattcatcagtacacaaaatttggaatcgaagaagaggactttttagacagtttcacgtcattagagcaggttgttgccagttactgtaatctctgatct

SEQ ID NO: 166869 - DNA, 120 bp, Artificial Sequence
  ENSG00000108423_13 (sequence is synthesized)
tctgatcttgaacaatgggaaaagtataccttaaggcatttctggactaaaatattttcaatactattttctctgtaaagttttcaaagttctccatcctggctaacacggtgaaacacc

SEQ ID NO: 166870 - DNA, 120 bp, Artificial Sequence
  ENSG00000108423_14 (sequence is synthesized)
gtctcaaaaaaaaaaaaaaaaaaaaatgttttcaaagttccattctgttaaagtaaccacgtagaatgctgagtctattctgcatactatgcccacagaaaaggaagaaaactttttaaa

SEQ ID NO: 166871 - DNA, 120 bp, Artificial Sequence
  ENSG00000108423_15 (sequence is synthesized)
tgcatactatgcccacagaaaaggaagaaaactttttaaaatggagaatcgcatgttttcaatgaaaacattcacttggtatttcatttgtaagaaaaaaaaatggtgcttttataaaga

SEQ ID NO: 166872 - DNA, 120 bp, Artificial Sequence
  ENSG00000108423_16 (sequence is synthesized)
actttggggaaacactttgctgaaatgttgggactctggaactagccaagaaaagagaatattctctttgtctacatgttcctaaatctttactccaaaacaactccaaaaacaactcac

SEQ ID NO: 166873 - DNA, 120 bp, Artificial Sequence
  ENSG00000108423_17 (sequence is synthesized)
aaagcatgaaccaaactttcacagcataatttcaagctaaggaattgtaattctgtacttaatatattcatgtttgaaatgaatgctttgaaccacaggagggagatgttgtcaaatgct

SEQ ID NO: 166874 - DNA, 120 bp, Artificial Sequence
  ENSG00000108423_18 (sequence is synthesized)
acagtgtgaacatgtattttgaatattctgtaacagggcaagtttccactctaagcagctatttaaaaataaatatgaggattttggtaataaatgcttatgcttaagtacaaaagtaaa

SEQ ID NO: 166875 - DNA, 68 bp, Artificial Sequence
  ENSG00000108423_19 (sequence is synthesized)
attcttcagtgaggaggagaatgggtgcaacctccgccttccaggttcaagcagttctcctgcctcag

SEQ ID NO: 166876 - DNA, 120 bp, Artificial Sequence
  ENSG00000108423_20 (sequence is synthesized)
ttagctgggcatggtggcacaagcctgtaattccagctgctcggggctgagacacaagaatctcgaaccgggaggccgaggttgcagtgagcagagatggtgccactgtactccagcctg

SEQ ID NO: 166877 - DNA, 120 bp, Artificial Sequence
  ENSG00000108423_21 (sequence is synthesized)
acagagtctctatctcaaaaaaaaaaaaaaaaaggaaactgagcatagagattaaaaaacttgtccaaggtcatacggctagaaagtgacagagcccggatttgaaccctgccaggatgc

SEQ ID NO: 166878 - DNA, 120 bp, Artificial Sequence
  ENSG00000108424_0 (sequence is synthesized)
ccctccctgcgcgccgcctctcactcacagcctcccttccttctttctccctccgcctcccgagcaccagcgcgctctgagctgcccccagggtccctcccccgccgccagcagcccatt

SEQ ID NO: 166879 - DNA, 120 bp, Artificial Sequence
  ENSG00000108424_1 (sequence is synthesized)
tggagggaggaagtaagggaagaggagaggaaggggagccggaccgactacccagacagagccggtgaatgggtttgtggtgacccccgccccccaccccaccctcccttcccacccgac

SEQ ID NO: 166880 - DNA, 120 bp, Artificial Sequence
  ENSG00000108424_2 (sequence is synthesized)
ccccaacccccatccccagttcgagccgccgcccgaaaggccgggccgtcgtcttaggaggagtcgccgccgccgccacctccgccatggagctgatcaccattctcgagaagaccgtgt

SEQ ID NO: 166881 - DNA, 120 bp, Artificial Sequence
  ENSG00000108424_3 (sequence is synthesized)
ctcccgatcggctggagctggaagcggcgcagaagttcctggagcgtgcggccgtggagaacctgcccactttccttgtggaactgtccagagtgctggcaaatccaggaaacagtcagg

SEQ ID NO: 166882 - DNA, 120 bp, Artificial Sequence
  ENSG00000108424_4 (sequence is synthesized)
ttgccagagttgcagctggtctacaaatcaagaactctttgacatctaaagatccagatatcaaggcacaatatcagcagaggtggcttgctattgatgctaatgctcgacgagaagtca

SEQ ID NO: 166883 - DNA, 120 bp, Artificial Sequence
  ENSG00000108424_5 (sequence is synthesized)
agaactatgttttgcagacattgggtacagaaacttaccggcctagttctgcctcacagtgtgtggctggtattgcttgtgcagagatcccagtaaaccagtggccagaactcattcctc

SEQ ID NO: 166884 - DNA, 120 bp, Artificial Sequence
  ENSG00000108424_6 (sequence is synthesized)
agctggtggccaatgtcacaaaccccaacagcacagagcacatgaaggagtcgacattggaagccatcggttatatttgccaagatatagacccagagcagctacaagataaatccaatg

SEQ ID NO: 166885 - DNA, 120 bp, Artificial Sequence
  ENSG00000108424_7 (sequence is synthesized)
agattctgactgccataatccaggggatgaggaaagaagagcctagtaataatgtgaagctagctgctacgaatgcactcctgaactcattggagttcaccaaagcaaactttgataaag

SEQ ID NO: 166886 - DNA, 120 bp, Artificial Sequence
  ENSG00000108424_8 (sequence is synthesized)
agtctgaaaggcactttattatgcaggtggtctgtgaagccacacagtgtccagatacgagggtacgagtggctgctttacagaatctggtgaagataatgtccttatattatcagtaca

SEQ ID NO: 166887 - DNA, 120 bp, Artificial Sequence
  ENSG00000108424_9 (sequence is synthesized)
tggagacatatatgggtcctgctctttttgcaatcacaatcgaagcaatgaaaagtgacattgatgaggtggctttacaagggatagaattctggtccaatgtctgtgatgaggaaatgg

SEQ ID NO: 166888 - DNA, 120 bp, Artificial Sequence
  ENSG00000108424_10 (sequence is synthesized)
atttggccattgaagcttcagaggcagcagaacaaggacggccccctgagcacaccagcaagttttatgcgaagggagcactacagtatctggttccaatcctcacacagacactaacta

SEQ ID NO: 166889 - DNA, 120 bp, Artificial Sequence
  ENSG00000108424_11 (sequence is synthesized)
aacaggacgaaaatgatgatgacgatgactggaacccctgcaaagcagcaggggtgtgcctcatgcttctggccacctgctgtgaagatgacattgtcccacatgtcctccccttcatta

SEQ ID NO: 166890 - DNA, 120 bp, Artificial Sequence
  ENSG00000108424_12 (sequence is synthesized)
aagaacacatcaagaacccagattggcggtaccgggatgcagcagtgatggcttttggttgtatcttggaaggaccagagcccagtcagctcaaaccactagttatacaggctatgccca

SEQ ID NO: 166891 - DNA, 120 bp, Artificial Sequence
  ENSG00000108424_13 (sequence is synthesized)
ccctaatagaattaatgaaagaccccagtgtagttgttcgagatacagctgcatggactgtaggcagaatttgtgagctgcttcctgaagctgccatcaatgatgtctacttggctcccc

SEQ ID NO: 166892 - DNA, 120 bp, Artificial Sequence
  ENSG00000108424_14 (sequence is synthesized)
tgctacagtgtctgattgagggtctcagtgctgaacccagagtggcttcaaatgtgtgctgggctttctccagtctggctgaagctgcttatgaagctgcagacgttgctgatgatcagg

SEQ ID NO: 166893 - DNA, 120 bp, Artificial Sequence
  ENSG00000108424_15 (sequence is synthesized)
aagaaccagctacttactgcttatcttcttcatttgaactcatagttcagaagctcctagagactacagacagacctgatggacaccagaacaacctgaggagttctgcatatgaatctc

SEQ ID NO: 166894 - DNA, 120 bp, Artificial Sequence
  ENSG00000108424_16 (sequence is synthesized)
tgatggaaattgtgaaaaacagtgccaaggattgttatcctgctgtccagaaaacgactttggtcatcatggaacgactgcaacaggttcttcagatggagtcacatatccagagcacat

SEQ ID NO: 166895 - DNA, 120 bp, Artificial Sequence
  ENSG00000108424_17 (sequence is synthesized)
ccgatagaatccagttcaatgaccttcagtctttactctgtgcaactcttcagaatgttcttcggaaagtgcaacatcaagatgctttgcagatctctgatgtggttatggcctccctgt

SEQ ID NO: 166896 - DNA, 120 bp, Artificial Sequence
  ENSG00000108424_18 (sequence is synthesized)
taaggatgttccaaagcacagctgggtctgggggagtacaagaggatgccctgatggcagttagcacactggtggaagtgttgggtggtgaattcctcaagtacatggaggcctttaaac

SEQ ID NO: 166897 - DNA, 120 bp, Artificial Sequence
  ENSG00000108424_19 (sequence is synthesized)
ccttcctgggcattggattaaaaaattatgctgaataccaggtttgtttggcagctgtgggcttagtgggagacttgtgccgtgccctgcaatccaacatcatacctttctgtgacgagg

SEQ ID NO: 166898 - DNA, 120 bp, Artificial Sequence
  ENSG00000108424_20 (sequence is synthesized)
tgatgcagctgcttctggaaaatttggggaatgagaacgtccacaggtctgtgaagccgcagattctgtcagtgtttggtgatattgcccttgctattggaggagagtttaaaaaatact

SEQ ID NO: 166899 - DNA, 120 bp, Artificial Sequence
  ENSG00000108424_21 (sequence is synthesized)
tagaggttgtattgaatactcttcagcaggcctcccaagcccaggtggacaagtcagactatgacatggtggattatctgaatgagctaagggaaagctgcttggaagcctatactggaa

SEQ ID NO: 166900 - DNA, 120 bp, Artificial Sequence
  ENSG00000108424_22 (sequence is synthesized)
tcgtccagggattaaagggggatcaggagaacgtacacccggatgtgatgctggtacaacccagagtagaatttattctgtctttcattgaccacattgctggagatgaggatcacacag

SEQ ID NO: 166901 - DNA, 120 bp, Artificial Sequence
  ENSG00000108424_23 (sequence is synthesized)
atggagtagtagcttgtgctgctggactaataggggacttatgtacagcatttgggaaggatgtactgaaattagtagaagctaggccaatgatccatgaattgttaactgaagggcgga

SEQ ID NO: 166902 - DNA, 120 bp, Artificial Sequence
  ENSG00000108424_24 (sequence is synthesized)
gatcgaagactaacaaagcaaaaacccttgctacatgggcaacaaaagaactgaggaaactgaagaaccaagcttgatctgttaccattgggatgataacctgaggacccccactggaaa

SEQ ID NO: 166903 - DNA, 120 bp, Artificial Sequence
  ENSG00000108424_25 (sequence is synthesized)
gaatgagaggatgagtgagtgaggcttgaaaacacaccacattgaaaatcctgccacagcagcagccgcagccgccaacagcagcgctgttagtgagctaagtaagcactgacttcgtag

SEQ ID NO: 166904 - DNA, 120 bp, Artificial Sequence
  ENSG00000108424_26 (sequence is synthesized)
aaaaccataacatcggccatcttggaaaagagaaaaacaatggagttacttatttaaaaaaaaagaaagaaagttatctcttcccaggagaggctagaagtagcttttctgtcttttggc

SEQ ID NO: 166905 - DNA, 120 bp, Artificial Sequence
  ENSG00000108424_27 (sequence is synthesized)
cagtgccgagtggaatgcctggtttgggggaggaggagggactgggttcagctgtggtgctttgttgtaaaaggcagcctggcctttgctactgaggagaaagatggagcctgggtctca

SEQ ID NO: 166906 - DNA, 120 bp, Artificial Sequence
  ENSG00000108424_28 (sequence is synthesized)
agcccaccttcgctgtacctttgccacatggtactgtatgcttgccagctagaaggagggtcagggattttttacagtctgagaatgagtgtgtgtgagtgaggcggtatccacattctc

SEQ ID NO: 166907 - DNA, 120 bp, Artificial Sequence
  ENSG00000108424_29 (sequence is synthesized)
aacttcaagtcattgcagtttctttttcccagaaaacaaggggttagatgttgcatttcataaaactaaccgaagttttgtttactgatgcagcacaagagatgtaaaaaaaaaaaaaaa

SEQ ID NO: 166908 - DNA, 75 bp, Artificial Sequence
  ENSG00000108424_30 (sequence is synthesized)
taggctctagggaaaacactgacgaatggtcagagctcctatcctgatcttttcatcaaggcgcctttcctaata

SEQ ID NO: 166909 - DNA, 120 bp, Artificial Sequence
  ENSG00000108424_31 (sequence is synthesized)
ctcctatcctgatcttttcatcaaggcgcctttcctaataatatggttcaactgtgaatgtagaagtgggggggaggggggagaaaaagaaaactctggcgttagaggatatagaaaaat

SEQ ID NO: 166910 - DNA, 120 bp, Artificial Sequence
  ENSG00000108424_32 (sequence is synthesized)
ataagtacaattgttacaaataacgcagacttcaaaaacaaaaaaatcacaacccaaacaaaccaaaatttaaatgatcagaattggcagcacaaagaaaacgccctctcctgacttgta

SEQ ID NO: 166911 - DNA, 120 bp, Artificial Sequence
  ENSG00000108424_33 (sequence is synthesized)
ttgtggcagtctgaacgcccccagaaaattgtgccaaagagtttagaaaaataaatatacaataaaagtaaacacatacacacaaaacagcaaacttcaggtaactattttggattgcaa

SEQ ID NO: 166912 - DNA, 120 bp, Artificial Sequence
  ENSG00000108424_34 (sequence is synthesized)
acaggataaattaaatgttcaaacaatctgataaaataaccatttggaaactgcttggccttctgttcttttatttgattgactacaatgcggtattggtctcttgctgcacttcaaaag

SEQ ID NO: 166913 - DNA, 120 bp, Artificial Sequence
  ENSG00000108424_35 (sequence is synthesized)
caaccaacaaaacaaaaacaaaaaaaagtgtgtgttgtgtgaatacacacacacactaactagaagtcttgtgatgaaaatggcacttggaaaaggttttatttttccactgaagttgaa

SEQ ID NO: 166914 - DNA, 120 bp, Artificial Sequence
  ENSG00000108424_36 (sequence is synthesized)
ggttaataaaatggtgtcaaacgtcccctggtcacacacttgaatatttttttagaagtgtgatgtggtatgattaccataaatcagacttaattattttcccttttacaagggaacagg

SEQ ID NO: 166915 - DNA, 120 bp, Artificial Sequence
  ENSG00000108424_37 (sequence is synthesized)
gcatcctgaattttagagcctttcagcaataagaagggatgttggtgagctttgatcctcttttggttttgcagttgttaggagtttttgctggcattttgaatatgctgctttcagaaa

SEQ ID NO: 166916 - DNA, 120 bp, Artificial Sequence
  ENSG00000108424_38 (sequence is synthesized)
aaccaaggaagttttaaaattgcttcctggtccttagaggactaaaaacaagaccctcattcccactttcatttccactctagcaaaaactgggcttgcgtttttctccaactcctcgtt

SEQ ID NO: 166917 - DNA, 120 bp, Artificial Sequence
  ENSG00000108424_39 (sequence is synthesized)
tatatcctcccttccatgtccaagccttccattcctaagtgggattggctcagttttgcccatccatatggcagcatctctaatagctcttgtacagggtatcagatattgtgccttttg

SEQ ID NO: 166918 - DNA, 120 bp, Artificial Sequence
  ENSG00000108424_40 (sequence is synthesized)
gtgccaggttcaaagtcaagtgccgatctatgaaccagtgtacaaaaaaaaaaaaatccaggtatttgaaggagagacgctccattgtgaataaagagctcataccagctcctaagccct

SEQ ID NO: 166919 - DNA, 120 bp, Artificial Sequence
  ENSG00000108424_41 (sequence is synthesized)
attaagaagaggcctggtcctctaatgccttgtttccatttcagttgttctttgagagacagaatgatgtactaaccattcgtgattattaagatagggttgggtcagggcttagggagg

SEQ ID NO: 166920 - DNA, 120 bp, Artificial Sequence
  ENSG00000108424_42 (sequence is synthesized)
gggcagaaatattggggatagaaaaaaaatctgatcattcctcagtgctacccatttctgtcctgtgtgggctgcttagctagacagcaggagaataaagtacaccgagaaccataatga

SEQ ID NO: 166921 - DNA, 120 bp, Artificial Sequence
  ENSG00000108424_43 (sequence is synthesized)
aaaaaccttccgtgtgttttgtcatgttttgttccagggaagcagttgatgagtgctgttactaatgctttctcccagatccattcagtggtggagaggaggaaaatgggctggttggat

SEQ ID NO: 166922 - DNA, 120 bp, Artificial Sequence
  ENSG00000108424_44 (sequence is synthesized)
gtggtcttggtgccttgcagttactctgcactggttatgcatttaattctcctcttttctagttaaccttttgccagtgggttttccatagtctgggtatttgtccttatatcagttata

SEQ ID NO: 166923 - DNA, 120 bp, Artificial Sequence
  ENSG00000108424_45 (sequence is synthesized)
ccacctaaggcaactgggtgcaaaatgcattctgttcactcactgtctgggccttccccaccctagtcttggcacattccttcaagaatgtagttaccgtctgcttgggaagatgtcagt

SEQ ID NO: 166924 - DNA, 120 bp, Artificial Sequence
  ENSG00000108424_46 (sequence is synthesized)
gcaaatgtgaagataatgggcatcggactaggctttggtttgccacaagtggcagctgcctgtatcaattacatttattaattttgcttttcatttttcccagttctcctcaccccccct

SEQ ID NO: 166925 - DNA, 120 bp, Artificial Sequence
  ENSG00000108424_47 (sequence is synthesized)
ttgttgaaatgttggacttgctgtcagaggcaactgtaatattgccttagggacttgtggagaaggggaattgctcagtgtagtgttttaactttcagaaccaagcaatctatttactct

SEQ ID NO: 166926 - DNA, 120 bp, Artificial Sequence
  ENSG00000108424_48 (sequence is synthesized)
tacaaatatttaagaagtgtgttagtccaactttaagaaaaatccaaactcatcagcttttgatagcatcttggtttttgaaacaacttcaatctgtaattggcattcagaatgcccttg

SEQ ID NO: 166927 - DNA, 120 bp, Artificial Sequence
  ENSG00000108424_49 (sequence is synthesized)
gcatgccagtctgtgatggcatttaagacctgtaaaacacttgagcccaactcgattaaccaaaaccgataaccaccacctttatcttctaaataaagtccgctttatttttattttcaa

SEQ ID NO: 166928 - DNA, 120 bp, Artificial Sequence
  ENSG00000108424_50 (sequence is synthesized)
agaattattagtatctcagtataacaagttcgtgtacacacagaactcgaaaatggtatagatgatgcggatcagaagctgttctcagaaggctttggtctgtgattggttgattgggag

SEQ ID NO: 166929 - DNA, 120 bp, Artificial Sequence
  ENSG00000108424_51 (sequence is synthesized)
aggaattccccacctgccttacctgtctgtctagaaagattcaaatcctacttatttacagatggtctagatgtaatcttgataaaatcaaaccaacttgacttctcctaattcaacata

SEQ ID NO: 166930 - DNA, 120 bp, Artificial Sequence
  ENSG00000108424_52 (sequence is synthesized)
ggagaacgtacaccgttgagtatacaacccagttcccttcgtccgctcgccaatgtgcacttagccaagtgggctatgtctgtcattctgtagctcgcttgtgaacctagtgcctgttgc

SEQ ID NO: 166931 - DNA, 120 bp, Artificial Sequence
  ENSG00000108424_53 (sequence is synthesized)
ttaaaaggctgggagaagggggagcagtgccctaatgaagagagtggcttggggaaaactgtagactactgtttttgctctgcttcttctttcttttttttgttttgagacggagtctca

SEQ ID NO: 166932 - DNA, 74 bp, Artificial Sequence
  ENSG00000108424_54 (sequence is synthesized)
gtgatccacctgccttcgccctaccatatttttatataggatgaagaacttgggacctgatggacaccagaaca

SEQ ID NO: 166933 - DNA, 120 bp, Artificial Sequence
  ENSG00000108424_55 (sequence is synthesized)
tgtcagattatcaaacaggatgatgagagatgtcagattatcagacaggatttctgtgattggaaacagaagaaatggcaggctttctccagtctggctgaagctgcttatgaagctgca

SEQ ID NO: 166934 - DNA, 120 bp, Artificial Sequence
  ENSG00000108424_56 (sequence is synthesized)
gttgccgggcacctcccgccttcccgcgccccgaccccgaactcctctccttagttctcccgggcaccctatcctatcaacgcctactatcccagccaatcgcgcaggatccgagtcgtg

SEQ ID NO: 166935 - DNA, 120 bp, Artificial Sequence
  ENSG00000108424_57 (sequence is synthesized)
cctccggtccaccctcctcccagcgctcagccggtctgagctcaaggcctttaccaagcccacccaatcaacggcgggctctctcctaccccatcccaatctccctcccctcggccaatc

SEQ ID NO: 166936 - DNA, 120 bp, Artificial Sequence
  ENSG00000108424_58 (sequence is synthesized)
cgcgcgctccattccgctgcccgcccagccaacccgggccttgaaaccagcaggcgaatgggcgcgagacggcccttcgacgctgagcgcctggccagttagggattccgcgtggccagg

SEQ ID NO: 166937 - DNA, 120 bp, Artificial Sequence
  ENSG00000108424_59 (sequence is synthesized)
atttaaggggtccggagaaaatgaagctaagtccgctagagactggtcctttgtataaaaatgtgggatggattggttgaaacagcctagatgccagttaagtttctctttggtgtccat

SEQ ID NO: 166938 - DNA, 120 bp, Artificial Sequence
  ENSG00000108424_60 (sequence is synthesized)
tcaccaaagcaaactttgataaagagtctgaaaggcactttattatgcaggtggtctgtgaagccacacagtgtccagatacgagggcgcatgtctgtaatccagctactcaggaggctg

SEQ ID NO: 166939 - DNA, 90 bp, Artificial Sequence
  ENSG00000108424_61 (sequence is synthesized)
atcttctgaccttgtgatccacccgcctgggcctcctgcacccgaccaataccttctctctcttttatagcggatgtgatgctggtacaa

SEQ ID NO: 166940 - DNA, 120 bp, Artificial Sequence
  ENSG00000108433_0 (sequence is synthesized)
ggggggctgtgaggacgtgttccgaggaagccagagccggagccgtggcctgcggggccggcgacatggatcccctgttccagcaaacgcacaagcaggtccacgagatccagtcttgca

SEQ ID NO: 166941 - DNA, 120 bp, Artificial Sequence
  ENSG00000108433_1 (sequence is synthesized)
tgggacgcctggagacggcagacaagcagtctgtgcacatagtagaaaacgaaatccaagcaagcatagaccagatattcagccgtctagaacgtctggagattttgtccagcaaggagc

SEQ ID NO: 166942 - DNA, 120 bp, Artificial Sequence
  ENSG00000108433_2 (sequence is synthesized)
cccctaacaaaaggcaaaatgccagacttcgggttgaccagttaaagtatgatgtccagcacctgcagactgcgctcagaaacttccagcatcggcgccatgcaagggagcagcaggaga

SEQ ID NO: 166943 - DNA, 120 bp, Artificial Sequence
  ENSG00000108433_3 (sequence is synthesized)
gacagcgagaagagcttctgtctcgaaccttcaccactaacgactctgacaccaccataccaatggacgaatcactgcagtttaactcctccctccagaaagttcacaacggcatggatg

SEQ ID NO: 166944 - DNA, 120 bp, Artificial Sequence
  ENSG00000108433_4 (sequence is synthesized)
acctcattttagatgggcacaatattttagatggactgaggacccagagactgaccttgaaggggactcagaagaagatccttgacattgccaacatgctgggcttgtccaacacagtga

SEQ ID NO: 166945 - DNA, 120 bp, Artificial Sequence
  ENSG00000108433_5 (sequence is synthesized)
tgcggctcatcgagaagcgggctttccaggacaagtactttatgataggtgggatgctgctgacctgtgtggtcatgttcctcgtggtgcagtacctgacatgagccagccacgctcagt

SEQ ID NO: 166946 - DNA, 120 bp, Artificial Sequence
  ENSG00000108433_6 (sequence is synthesized)
ggctgaacagcattcccacagcctgcaagtgtgtgtgtgtgtgaaagagagaggggggcccagaggccgccttttgaaatgtttgcctgtctgaactgtgaagacacttgggagtgattg

SEQ ID NO: 166947 - DNA, 120 bp, Artificial Sequence
  ENSG00000108433_7 (sequence is synthesized)
tggtctaatttccaacctgctctgttttctgtgacatcttggagggggagctagtgccaccaccatgcgcggtgcttaggaaatgaaagaagtcccgggtctgtctctctcactctcgct

SEQ ID NO: 166948 - DNA, 120 bp, Artificial Sequence
  ENSG00000108433_8 (sequence is synthesized)
ctcactgggggagggaaagaatggctttggtggctttgttcacatagctgatgcgtgccctgggaaggtgtccacagtgagccctgtgtgcaggactgtccacacggttcacaccttgtc

SEQ ID NO: 166949 - DNA, 120 bp, Artificial Sequence
  ENSG00000108433_9 (sequence is synthesized)
accatcaggcctttctggctcctgatagggtggagcaaaagtggaaaggaaaggaaagaggccttttctcacagccattatattaaatagtaggtcgattcacatcctcgtgctcctggc

SEQ ID NO: 166950 - DNA, 120 bp, Artificial Sequence
  ENSG00000108433_10 (sequence is synthesized)
caccctcccctgtgcctcagtgacatgtagatgactgactgccaatacttgtcaccattccctggaagcagctacctaggggaaacaagatgtagtgctattgccgataacaagtaagat

SEQ ID NO: 166951 - DNA, 120 bp, Artificial Sequence
  ENSG00000108433_11 (sequence is synthesized)
tttccacactacagctgggtgtttctcttttctaaagtgaggccagtgttatttcccgggagtgttcagtcttgaccctagtcactgattttttctagttgttaatagagtggttggctt

SEQ ID NO: 166952 - DNA, 120 bp, Artificial Sequence
  ENSG00000108433_12 (sequence is synthesized)
ttaaggttcagagactgtggcttggcacctgcgcccaggctttgtgggcctttgccccttagaaagtagctgtaggcaaagatttgtgattttccaattacagtctcagctctagtttta

SEQ ID NO: 166953 - DNA, 120 bp, Artificial Sequence
  ENSG00000108433_13 (sequence is synthesized)
gtatctctaattctttggttcccttctcttccctgaaatatattagcacctgccagccaggccctcattttgcccagccagtgtgggcagatcccaccgtggagacatctgtagtgtgta

SEQ ID NO: 166954 - DNA, 120 bp, Artificial Sequence
  ENSG00000108433_14 (sequence is synthesized)
tgtccttgtaacactctgttttcagggactacaacctttttccttctgtgaccagccccggattcaggctgtactaataccaggtatattgtggaatttagtataaaggccaatctgtcc

SEQ ID NO: 166955 - DNA, 120 bp, Artificial Sequence
  ENSG00000108433_15 (sequence is synthesized)
tgaagtccatctaatgtggtgaatcactgaaagtctcagaaagacctggttagtgtatgttctcatttaccacaggcctaccagccctgggcacagcagcttcatggcaagacataaaat

SEQ ID NO: 166956 - DNA, 120 bp, Artificial Sequence
  ENSG00000108433_16 (sequence is synthesized)
ctcaaaatccttcagatctggaaaccggctcagtattaaccctacctttggttgtcctgccctacctgctctgttagtttcttgttgcttgaactgtcttctgtcttatttcccttcctt

SEQ ID NO: 166957 - DNA, 120 bp, Artificial Sequence
  ENSG00000108433_17 (sequence is synthesized)
tctgtgttcctcttcacctctcttgttcccctccccgctgctctgtagtcatgttggtcctttcaggcacctctgtggcatagctcccctttggtaagttttcttaattgtcatagatta

SEQ ID NO: 166958 - DNA, 120 bp, Artificial Sequence
  ENSG00000108433_18 (sequence is synthesized)
actgagtttcctggatgctaatttcacactttcggttggaggagatctccattgttcctacccctccgggccaaatgggccccaggtttccaaggaaggagcaatctgtgactcctaaaa

SEQ ID NO: 166959 - DNA, 120 bp, Artificial Sequence
  ENSG00000108433_19 (sequence is synthesized)
tgggttggggccctgccagagttaaagcagtgactggagggtggactggggggttgcagcatctttagacctagatctgtctaactctggggaggcacattgacatttccattacacaca

SEQ ID NO: 166960 - DNA, 120 bp, Artificial Sequence
  ENSG00000108433_20 (sequence is synthesized)
gcactgctgcggtgccagggacctagcgcaggacttttggtaatccataaaatggattctgagactgcgacggcaaggctgtcctgtcccccaggcacccaaggatcctgccagacagca

SEQ ID NO: 166961 - DNA, 120 bp, Artificial Sequence
  ENSG00000108433_21 (sequence is synthesized)
cactttggaggaaggtctgcagggagcagctgagccatttgttcttgaactctgggaggcagaagtccccgcacccatcatgcgtggactgataggacatcttttcgtggtgtgcaccag

SEQ ID NO: 166962 - DNA, 120 bp, Artificial Sequence
  ENSG00000108433_22 (sequence is synthesized)
tgctttccacacttgacagtggttggctttgatgaaccctcatgctgcaccttcagagccagtcctctagtttggaataaaaattgcagaggtggtttttgggtctttaccacctgcggc

SEQ ID NO: 166963 - DNA, 120 bp, Artificial Sequence
  ENSG00000108433_23 (sequence is synthesized)
tggtggacagcagccagtgtgtctggacacccaggggcattgagactgcatgttgtcacatgaccacttctcttcacacatctgctttcagtgcctggtgaaaaatagaccttggcctaa

SEQ ID NO: 166964 - DNA, 120 bp, Artificial Sequence
  ENSG00000108433_24 (sequence is synthesized)
cagtgtgactctctccaccgcctcagtgtagggaagggtccaggccagggaaggagcaccctctagtggaggcgggggtgaattcttaggtcgagctgatgcaagaaactccggtagcca

SEQ ID NO: 166965 - DNA, 120 bp, Artificial Sequence
  ENSG00000108433_25 (sequence is synthesized)
gcctctgtgaccttgtacatgagtttggtgtgcctattgtgatttaaaacaggtgggttatcaagaggaacttgagatctctttattacatggacatttacttcagggggaccactgtaa

SEQ ID NO: 166966 - DNA, 120 bp, Artificial Sequence
  ENSG00000108433_26 (sequence is synthesized)
gaaaagccaaactccaagaccaagtaagttagaggagtcttgattttttagacttcactgcggagttctgtacaccctttgccctgatgaatttgaatgggtttgatttgcaaatttgga

SEQ ID NO: 166967 - DNA, 120 bp, Artificial Sequence
  ENSG00000108433_27 (sequence is synthesized)
tttacacccattgttttggaagcacatcagctgaataaagttgaggtttattttatttagaaaatcacattttgtaaaagaattcgatattcatttttataactaatggccccctttttt

SEQ ID NO: 166968 - DNA, 120 bp, Artificial Sequence
  ENSG00000108433_28 (sequence is synthesized)
tatgtttctaggccagagattctcaaacactgctccatggccaggggctgggctggctgcttcagaagcagtggggaagctttttaaaattacatattcctggggcctaccccagatctg

SEQ ID NO: 166969 - DNA, 88 bp, Artificial Sequence
  ENSG00000108433_29 (sequence is synthesized)
tttttaaaattacatattcctggggcctaccccagatctgaattagaaccttttttaaatctctaaggtgattttattttatttttta

SEQ ID NO: 166970 - DNA, 90 bp, Artificial Sequence
  ENSG00000108433_30 (sequence is synthesized)
tctagggttacaggtgttagccactgtacctggcctctaaggtgattctgatgtgtgtattttggaaccactgtctcctagacagaaagc

SEQ ID NO: 166971 - DNA, 120 bp, Artificial Sequence
  ENSG00000108433_31 (sequence is synthesized)
atgtgtgtattttggaaccactgtctcctagacagaaagcttctgtctcaaagatgatcacattggtgtaaagagcaaaacttgttaagtccaaaataaattcttactgtttatatccta

SEQ ID NO: 166972 - DNA, 120 bp, Artificial Sequence
  ENSG00000108433_32 (sequence is synthesized)
aaccttcaccactaacgtaagccaggcccgtggtgagggtcggcctgcacttgacagatcgtgggggctggagttcagatctctgagcgccatctgttttgggggtgtctgaagaagact

SEQ ID NO: 166973 - DNA, 120 bp, Artificial Sequence
  ENSG00000108433_33 (sequence is synthesized)
gatgatgaggaaaccaactggaaatgacaggaactttgtgcattgccacagagactagacctagacagagaatccctttttctaagacaaaaacctgaagaggaagcagttaaattgaag

SEQ ID NO: 166974 - DNA, 120 bp, Artificial Sequence
  ENSG00000108433_34 (sequence is synthesized)
gggaataggcagaggtgaaaattacctggttgggctggtctgagacagaaaggtggaagttcacatggtggaaacgtttttctgatcagatagagacagatgattagaacttaggccatt

SEQ ID NO: 166975 - DNA, 120 bp, Artificial Sequence
  ENSG00000108433_35 (sequence is synthesized)
gagaaggcagcatttcaaagctgcctgcgggcagttgccattgtgccgagtatgtgtgtggctccagtgtcaggtgcattaagatgtttttgcccctagtctgagcagcaatttggagga

SEQ ID NO: 166976 - DNA, 120 bp, Artificial Sequence
  ENSG00000108433_36 (sequence is synthesized)
atttgttaacagatgtttagggttagatggactgcttgcctgagtctgtctgaaagtgtgttggtttgcatgtttgatttttcagaacccattgtccctgccctttagtcttaaccagat

SEQ ID NO: 166977 - DNA, 120 bp, Artificial Sequence
  ENSG00000108433_37 (sequence is synthesized)
catttcctgcacatggctgtagaacatactggccttttctgtgtcctgcataatatattccactaaatgaagtgtgctttggctttttgtattttgtttttttacagaggattattttct

SEQ ID NO: 166978 - DNA, 120 bp, Artificial Sequence
  ENSG00000108433_38 (sequence is synthesized)
aaagagatgttagctttctaagccagttgttaaaattcacatcatttcctgctttgtagatgtttaaccctcaatgctgcatccttgctttgcaataaattttcccaagtgtttcaggct

SEQ ID NO: 166979 - DNA, 120 bp, Artificial Sequence
  ENSG00000108433_39 (sequence is synthesized)
gtgccaacatagtttttgcttccccagactaagcagtcaagttacagtgtttaacagttcaaaaatttaatgaactataagacacactaaaagatgtttggattttagatcgttataatg

SEQ ID NO: 166980 - DNA, 120 bp, Artificial Sequence
  ENSG00000108433_40 (sequence is synthesized)
tagtattcaggccttttttaggccaaggatgatcgcttgggattattttgttttttgccagcctggcgtgatgctgtgcacaccgtcagttcttaataaacattgacttgccagatgaaa

SEQ ID NO: 166981 - DNA, 120 bp, Artificial Sequence
  ENSG00000108433_41 (sequence is synthesized)
tttagtaactgtgtttatattttgattacgtgtcctcaaattgtgatattttgatgacaagacagagcccttgagtttgggatcctttctgttggagttgagttattgtgagcctgaaag

SEQ ID NO: 166982 - DNA, 120 bp, Artificial Sequence
  ENSG00000108433_42 (sequence is synthesized)
tacccagttcctttgccagtgcttgaaacaaaccatgaagtggcctctcttaggatccaggtcttttcccatttactgaacttatcatgaaagtgagtgctactacgaggggtccaatca

SEQ ID NO: 166983 - DNA, 120 bp, Artificial Sequence
  ENSG00000108433_43 (sequence is synthesized)
caggctgagaaattgtgttacagaatctactcttggaagaatgaagacgtggctgtcctttggtacctcgctttaaggtggctttcccttaggacccctactgtggactgccttataact

SEQ ID NO: 166984 - DNA, 120 bp, Artificial Sequence
  ENSG00000108433_44 (sequence is synthesized)
gtggcctgcggggccggcgacatggatcccctgttccagcaaacgcacaagttataaaactttgtccagcacttgtcaactcggtgctcctggttggtagacctcgagaggagacacgga

SEQ ID NO: 166985 - DNA, 120 bp, Artificial Sequence
  ENSG00000108433_45 (sequence is synthesized)
caacacagtgatgcggctcatcgagaagcgggctttccaggacaagtactttatgatagacaaagaacatatgttcttgacaagggagtgtgccttgttccccacccacagtcaccactg

SEQ ID NO: 166986 - DNA, 120 bp, Artificial Sequence
  ENSG00000108433_46 (sequence is synthesized)
aaggcaaaatgccagactgtaagtgctgacctctgacatggctctgatactccaggcccatcaagacaggcttttctccctgggggaggtgatagaatattctgaaaaccaacgtacatg

SEQ ID NO: 166987 - DNA, 120 bp, Artificial Sequence
  ENSG00000108433_47 (sequence is synthesized)
ttgaaaaactatgactatgcaaagaaaaagccccctcaaagggcacaattctatctgagtgatgccgctcaaaataaatagcctgtgaggtttgtgactcagaaaccttgtgacccctta

SEQ ID NO: 166988 - DNA, 120 bp, Artificial Sequence
  ENSG00000108433_48 (sequence is synthesized)
cctctttggtgtcattttgaaattttgcctccagttctgttttttgactagatccatagccacctgaagcctaatgttgccatggagttttgttctgctctttggttcctgctgggttct

SEQ ID NO: 166989 - DNA, 120 bp, Artificial Sequence
  ENSG00000108433_49 (sequence is synthesized)
tcttgggttgaaatgaaaaatcacttcaatcagtccacccataatgaaatgctgatctaatgtttgatactccagcatgaaattaaaatgaaaccacccttgccacctccacccccagcg

SEQ ID NO: 166990 - DNA, 120 bp, Artificial Sequence
  ENSG00000108433_50 (sequence is synthesized)
cctgtttccaaaagttttatgaaactttgtggatgctttacctcaaagatgcccttgggcttcttccaggagagccatataatccatagaaggtcaagaagaggtcagtgagcctgcttc

SEQ ID NO: 166991 - DNA, 120 bp, Artificial Sequence
  ENSG00000108433_51 (sequence is synthesized)
ctgtcccctgttctctgtcatgcatccagaatcagagcaacagattctgaagtcaagctgctggaatcttgtgtgctaccatctcactttaaccacaagtttcttcttgactttcaacat

SEQ ID NO: 166992 - DNA, 120 bp, Artificial Sequence
  ENSG00000108433_52 (sequence is synthesized)
cgttgatcaaaattagatcttgtggtgagggggtatagtgtggggtggtgtagggagaagtaaggaaacgccgtctttcctcagtacaaagcctggccccctcagattctgctgccctga

SEQ ID NO: 166993 - DNA, 120 bp, Artificial Sequence
  ENSG00000108433_53 (sequence is synthesized)
ttcttcctggtcattctaccatatggagctataatacatttttctgagagataatggcccatcagccatactgttttagatgggagggtaagaaagatttgtatgtgaatggcatttcat

SEQ ID NO: 166994 - DNA, 120 bp, Artificial Sequence
  ENSG00000108433_54 (sequence is synthesized)
aagtgctagtcaaattactgaagagaagtctctgagtctttcaaacgccagcatcttctgacacactgggcattagctgcatgcagaaaactagttaattcaggcactaggagtaaagca

SEQ ID NO: 166995 - DNA, 120 bp, Artificial Sequence
  ENSG00000108433_55 (sequence is synthesized)
catgatgaaattaaaagacctgacgcctatctgtgaggagctcccctgttagcaggggcagttgaaaacacgtatgtgcaaaatgattccaaatctgagcagcaaagaaacagtggcata

SEQ ID NO: 166996 - DNA, 88 bp, Artificial Sequence
  ENSG00000108433_56 (sequence is synthesized)
cttgtccaacacagtgatgcggctcatcgagaagcgggctttccaggacaagtactttatgatagagaatagcagcacaataagagct

SEQ ID NO: 166997 - DNA, 81 bp, Artificial Sequence
  ENSG00000108433_57 (sequence is synthesized)
agcgtgccatcacacctgtgtaattgacttattttttgtagagggtctcactttgttgcccaggctgatctcaaactcctg

SEQ ID NO: 166998 - DNA, 120 bp, Artificial Sequence
  ENSG00000108433_58 (sequence is synthesized)
tctcccacctcagcctcccaaagtgccgggatgacaagtgtggctgagttggtatgggctctcctttccccatatccaaggcaagcttccaggattcttctgggacatcaggtgttaggg

SEQ ID NO: 166999 - DNA, 120 bp, Artificial Sequence
  ENSG00000108433_59 (sequence is synthesized)
agggaccatcttagtccctacctcagtttcacacatgagaaaattgaagtccacagaggaggtgtggcttcatcaaaaacccactgagaacgagtgttagaatcaggctaggacacattg

SEQ ID NO: 167000 - DNA, 120 bp, Artificial Sequence
  ENSG00000108433_60 (sequence is synthesized)
gagcagcctctaaaagcagcctctgcgagcctctaagagcagccgggacctgctggagaacagaacatggcctaggagcgcaacagccaagtgttcagcaccacggacagcttcgctggc

SEQ ID NO: 167001 - DNA, 120 bp, Artificial Sequence
  ENSG00000108433_61 (sequence is synthesized)
ctattgctggggaggccagaggtggggaggctggttgtccagcaagacagagtgccatgggagagagaaaaaaacatgggaaagatctcagagaccatctagtccagcctcctcgatttg

SEQ ID NO: 167002 - DNA, 120 bp, Artificial Sequence
  ENSG00000108433_62 (sequence is synthesized)
gatgggaggagacccaggacaagagagaagtgacttgtccaaggtcacacaacaagtcagtagagagccagagatgggagctgacagcctacttcctcacacctcttcaaggccctcaga

SEQ ID NO: 167003 - DNA, 120 bp, Artificial Sequence
  ENSG00000108433_63 (sequence is synthesized)
tacctggtgtccatgacttattagtggcacagccagaccttgattaagggctccaaaattaaaattacctgtccttggaaatgacaagaaaagaaaaaaggagaaatcaaagaaatggaa

SEQ ID NO: 167004 - DNA, 120 bp, Artificial Sequence
  ENSG00000108433_64 (sequence is synthesized)
agagcacccggccctgatgggaaggtctgtgatttggcctctaactgcaaggctttgacaggagcttcctactttccaaggtgatgtggcctttcagaaacaatttagttaccatggcaa

SEQ ID NO: 167005 - DNA, 120 bp, Artificial Sequence
  ENSG00000108433_65 (sequence is synthesized)
cctcattccaggtttcatctccatggcaattcactggagtttttcaccctccgagacaaggtctcaccatgttgcccagaatggacccgaactcctgagctcaagagatcctcctgcatc

SEQ ID NO: 167006 - DNA, 120 bp, Artificial Sequence
  ENSG00000108433_66 (sequence is synthesized)
agcctcccgaagtgctgggattataggtatgagccaccaccctgacctccaaataccttttgaactcaggcttggatttgaactctggttctatcaactattagctgtgatttcagatca

SEQ ID NO: 167007 - DNA, 120 bp, Artificial Sequence
  ENSG00000108433_67 (sequence is synthesized)
gtgacttgagcaatttgtgccttgtttcattaagtggagatgacaatagcacctgccttgcaagaattatttgatgtggccgatgagaaaaatcagaattatgaaaagtgcttcacacca

SEQ ID NO: 167008 - DNA, 120 bp, Artificial Sequence
  ENSG00000108433_68 (sequence is synthesized)
ttcctggcatgtgaagagccctctctaaatggccattatgctaattagcaccttaaagggaaatcattttcatgaaattttatttgaatctggctagagaaaatgctcaccttcttcctt

SEQ ID NO: 167009 - DNA, 120 bp, Artificial Sequence
  ENSG00000108433_69 (sequence is synthesized)
gtggcctgcggggccggcgacatggatcccctgttccagcaaacgcacaagtgagggccggtcggggagcgggcaggggctagacgaggcgaggccaggtgagcctggcttctggggctg

SEQ ID NO: 167010 - DNA, 120 bp, Artificial Sequence
  ENSG00000108433_70 (sequence is synthesized)
aggcctcggacgtcagccagggtagaggccgagtttttccgccagggcactgctggggatgcctccgaagtgcttaatccttggcgggactcccaggtcagccacagacagtgggttcag

SEQ ID NO: 167011 - DNA, 120 bp, Artificial Sequence
  ENSG00000108433_71 (sequence is synthesized)
gctggggcctggagacgtggggcagatgactcctggggtctgcaagttcgtgactacctgctgggtagactgggtgacgggaaactggcacctgcaggttataaaactttgtccagcact

SEQ ID NO: 167012 - DNA, 120 bp, Artificial Sequence
  ENSG00000108433_72 (sequence is synthesized)
aagtactttatgatagagccccccaaattcttatctcaacaagagtcaaataaagacttgaaaagacttgacatctaaactacacttattaaggaaaaactcattaattccctatggaga

SEQ ID NO: 167013 - DNA, 120 bp, Artificial Sequence
  ENSG00000108433_73 (sequence is synthesized)
tctgaggccaagcacacctctgaagcagtgcatggcttggaatcctgtctgctcttcaccgaaccattccttctgcactcacctcctccagaaagccttccaaaccagctgcaaacagat

SEQ ID NO: 167014 - DNA, 120 bp, Artificial Sequence
  ENSG00000108433_74 (sequence is synthesized)
tgggacgcctggagacggcagacaagcagtctgtgcacagtgagtaattaactgtggagaccagagtcctttctctgatgacagggtgctaatgggctgggcttcctgactgcactctgc

SEQ ID NO: 167015 - DNA, 120 bp, Artificial Sequence
  ENSG00000108433_75 (sequence is synthesized)
cttgggggcttaatgattcagcgtggaatgagttttgttgttagggtggacagaaaaaccctatggcaaagtcactgatttccctgagtgtgccctttggaatcccacaagtcttatccc

SEQ ID NO: 167016 - DNA, 120 bp, Artificial Sequence
  ENSG00000108433_76 (sequence is synthesized)
ccattacccctccactcaacctgacatggccctatgggaatggaagcgcttgcctccatctatcttaatctaattacctagtccttagaggaatgtactccataaaaattcagagatgtt

SEQ ID NO: 167017 - DNA, 120 bp, Artificial Sequence
  ENSG00000108433_77 (sequence is synthesized)
taactggaattggccatttcttctgagctgagaactgtggctttttaggaggattattcagaaacgaacagcaatattaattagtttagttcccacagcatggtttcttttgagaagcat

SEQ ID NO: 167018 - DNA, 120 bp, Artificial Sequence
  ENSG00000108433_78 (sequence is synthesized)
ttttcattttttttttttttttctattctgaggaaaggtcctttttctgagttggtcatatggacaccacctgcgggggctgcctacccaccccactgctgggctccctcaggacccatt

SEQ ID NO: 167019 - DNA, 120 bp, Artificial Sequence
  ENSG00000108433_79 (sequence is synthesized)
tccctcaggacccattcctcctgttctctcatgtctcctttcgcagcttcaaaagcagctctgttcttggttctgtgccccaccttgttctaatctcaactgtctttgttcactgtgggc

SEQ ID NO: 167020 - DNA, 120 bp, Artificial Sequence
  ENSG00000108433_80 (sequence is synthesized)
acaaagggctaggaaggggcagtgtcactgctgtcacttctttatggggcaagaagcagtctggatgctttcttttgtgcacagtttagcttctttgttcatcggactttgtttgccttc

SEQ ID NO: 167021 - DNA, 120 bp, Artificial Sequence
  ENSG00000108433_81 (sequence is synthesized)
tcagcaatctcattgttacatgattagaaatggaaagaggtcattttgactgtcttatcgaaagggatagggaaaatgaccgtatttatcgtatctctttacctctgtggattctttcct

SEQ ID NO: 167022 - DNA, 120 bp, Artificial Sequence
  ENSG00000108433_82 (sequence is synthesized)
gggcctttcctattgatatttggtttattttggggacgtcaacattgctcagcccacccattcttacagaaagctttaagggaagaaagccttaagggaactcttctctgtatgtttcac

SEQ ID NO: 167023 - DNA, 120 bp, Artificial Sequence
  ENSG00000108433_83 (sequence is synthesized)
atactaatcttccccttcctttatgcttttttttttttaaataaaaaaaaaaaaactcattactatagggaattcaattggcagcctttttctaggtatttataatccacgtctgagaat

SEQ ID NO: 167024 - DNA, 120 bp, Artificial Sequence
  ENSG00000108433_84 (sequence is synthesized)
cccaaaggaaaagagacctatatcagaaaatttagcttaaagtatttatttggacaacctttgcatgtttattttctaaaggtaggaaatttatttctacagatttaccttcagcttttt

SEQ ID NO: 167025 - DNA, 120 bp, Artificial Sequence
  ENSG00000108433_85 (sequence is synthesized)
taaaaaattggcattgttatgtcattaacagctatatacatgtacttttttcaaaacaacatttacggcctaacttgaattttttctgttattcattagtgtatacatttttctcctttt

SEQ ID NO: 167026 - DNA, 120 bp, Artificial Sequence
  ENSG00000108433_86 (sequence is synthesized)
gaaatatgtagttctagtttattggatattgaaaaaaaaatctgtgatttatcattgtaatttaagttcactatctcttttccagcaattattcttttttcttttttgtacagtagtaga

SEQ ID NO: 167027 - DNA, 120 bp, Artificial Sequence
  ENSG00000108433_87 (sequence is synthesized)
agagccggagccgtggcctgcggggccggcgacatggatcccctgttccagcaaacgcacaagtgagggccggtcggggagcgggcaggggctagacgaggcgaggccaggcaggtccac

SEQ ID NO: 167028 - DNA, 120 bp, Artificial Sequence
  ENSG00000108433_88 (sequence is synthesized)
ccctagccttaggtattcctagaagccctgaccagttggcactgctgagactccagcccctgggagtggtttacagaaacattacacagactctgatgtcagtcatgatgtttcagcctc

SEQ ID NO: 167029 - DNA, 120 bp, Artificial Sequence
  ENSG00000108433_89 (sequence is synthesized)
tgcccttttcctgtatcaaccctgatggataatagggcgtgggttctgtctgttatcagggtgtggtcccctgtgaatgaagcactcccagccactgagctgtgagaaacagtcactcgg

SEQ ID NO: 167030 - DNA, 120 bp, Artificial Sequence
  ENSG00000108433_90 (sequence is synthesized)
aagtgtgagctttatcttagtttttgttggatcatgttgagtctgtcagctccacaggacttcagtacgtttctgaacagtccctgccatctctacgggggagagggtcaggcaagctgc

SEQ ID NO: 167031 - DNA, 120 bp, Artificial Sequence
  ENSG00000108433_91 (sequence is synthesized)
aagtgacactcacctcctgctgacagttgcagtgtctcagatggcctggaagggtggtctccagcagcctgctgggcgctcccctttcatgagagccacctgcagtgacctgaactgata

SEQ ID NO: 167032 - DNA, 120 bp, Artificial Sequence
  ENSG00000108433_92 (sequence is synthesized)
catgttgattagtctgccctttctttagaaaactgctactctccttttcatatctcagaaaaacagtagaggccttttaggaccaaactccatgtcacactgatgaagagccagtggggg

SEQ ID NO: 167033 - DNA, 120 bp, Artificial Sequence
  ENSG00000108433_93 (sequence is synthesized)
ttagagcgtcctgttaaggcacatgctaacttcccactcaagtctggcagcgctggggcatcagcacacctcttgccacccacactgataccagaggggaaggctgtgaggtggctgggg

SEQ ID NO: 167034 - DNA, 120 bp, Artificial Sequence
  ENSG00000108433_94 (sequence is synthesized)
gttgagacttgaggtttctaactttcctctgcacacctgtggctacctggtgtttgtctcttgattccctccacctgcctcacaccctgcctccgtcgggattttccacctacaccattc

SEQ ID NO: 167035 - DNA, 120 bp, Artificial Sequence
  ENSG00000108433_95 (sequence is synthesized)
aaaaggaacataggagagggcatgaaggggctaggctgaagcactctgatgactggggccaatttgtggctgaaaatgaatacattttttgaaatttatggtcattttcaagtgatttag

SEQ ID NO: 167036 - DNA, 120 bp, Artificial Sequence
  ENSG00000108433_96 (sequence is synthesized)
aaggttgatccttagcctcatacagtgatgaaataatctgtgtgttcagagccaagcaggactttagcaagagtctgattgtattgtcactatctcggggaaaaaaaaatacaaatacat

SEQ ID NO: 167037 - DNA, 120 bp, Artificial Sequence
  ENSG00000108433_97 (sequence is synthesized)
ggagccgtggcctgcggggccggcgacatggatcccctgttccagcaaacgcacaagtccacgagatccagtcttgcatgggacgcctggagacggcagacaagcagtctgtgcacatcg

SEQ ID NO: 167038 - DNA, 120 bp, Artificial Sequence
  ENSG00000108433_98 (sequence is synthesized)
gagccggagccgtggcctgcggggccggcgacatggatcccctgttccagcaaacgcacaatgtcctttattcgcatcgtcctgcactttcggaattgctgagatacgtagcaggtccac

SEQ ID NO: 167039 - DNA, 120 bp, Artificial Sequence
  ENSG00000108433_99 (sequence is synthesized)
actacgaactgagcacccaccaggtgccagtcacgggactgggccttggagaacagacgtgacccacctgcattgtgatccactgctgtgtaacaaatcaccacaaaacataggggctga

SEQ ID NO: 167040 - DNA, 120 bp, Artificial Sequence
  ENSG00000108433_100 (sequence is synthesized)
cggcaatagctctcagttgctacacctcacagcctctgagcataagaactggggaccaggcgtggctgggatagctgtctctgctcagcgatgtctggggcctcagatggaagatttgaa

SEQ ID NO: 167041 - DNA, 120 bp, Artificial Sequence
  ENSG00000108433_101 (sequence is synthesized)
ggctgggaggagaatcatctgaaggttcactgatgtggctggcacacagtgtcgctgggcacacaatgtcgctgagccctggactggggctatcctctggaacacctgcacacggcttct

SEQ ID NO: 167042 - DNA, 120 bp, Artificial Sequence
  ENSG00000108433_102 (sequence is synthesized)
ccatgggaccagggcttcctcagggcatgatgactgagttccaagaagacaaggtctcaccatgttgcccagaatggacccgaactcctgagctcaagagatcctcctgcatcagcctcc

SEQ ID NO: 167043 - DNA, 120 bp, Artificial Sequence
  ENSG00000108433_103 (sequence is synthesized)
cgaagtgctgggattatagcacctctacaatggccatgcagatcttcaggacacaaacagaaagcaggggctacctgagactggaacatcagggcatctcttgggatcagcaccacctgc

SEQ ID NO: 167044 - DNA, 120 bp, Artificial Sequence
  ENSG00000108433_104 (sequence is synthesized)
agtcattgaatgcagaagggccttctaatcctgggacctgtccagacccccaaggattctgatgtaattggtctggggtgcaaccccaaaagcaggacttttaaaagctcctccaggtaa

SEQ ID NO: 167045 - DNA, 120 bp, Artificial Sequence
  ENSG00000108433_105 (sequence is synthesized)
gtggcctgcggggccggcgacatggatcccctgttccagcaaacgcacaaggttcatctatattgtagcctgttaccagaatttcattctgttttatgacggaataatattccgttttat

SEQ ID NO: 167046 - DNA, 120 bp, Artificial Sequence
  ENSG00000108433_106 (sequence is synthesized)
gtgtctaccacattttgttatccattcatctgttgatggacacttgagttgtttccaccattgggctgttgagaataatactgctatgaactctggtgtagaagtatctgttttagtttc

SEQ ID NO: 167047 - DNA, 120 bp, Artificial Sequence
  ENSG00000108433_107 (sequence is synthesized)
tattttagtaactgaatccccactgtgcagtgttagggctgcctggttgtttgcagtagattagagctttagaagcttctagagcttctaaagcccgtgctggtgatcccagcgactctt

SEQ ID NO: 167048 - DNA, 120 bp, Artificial Sequence
  ENSG00000108433_108 (sequence is synthesized)
tcttaattgctttctgggcagaatgtagattttggattcctgtccatgatgcctaatgttgatctcactttccttgtttctctcagttgctcattaatgtgtatttattaaaaaaaaaaa

SEQ ID NO: 167049 - DNA, 120 bp, Artificial Sequence
  ENSG00000108433_109 (sequence is synthesized)
aaaaggatatggggcatgaggttagatgccatgcatataagttgcagtgggtgatatgtgctgagtgacttggggtctgccccggcattcacttatacttgtttcttactaagaaattga

SEQ ID NO: 167050 - DNA, 120 bp, Artificial Sequence
  ENSG00000108433_110 (sequence is synthesized)
atgtgctttaagctgaaaattagaaagcagtagggaaggacaggctggatggtttgggttgttggtttaggaataaaatgcccttttgttttggtggtgggtgatgccatctatagaagg

SEQ ID NO: 167051 - DNA, 120 bp, Artificial Sequence
  ENSG00000108433_111 (sequence is synthesized)
gttttaggtcattgtgttggtgtctttccgtctttcccacttgagaccctcttgtaaatatggacttgacccacccattgtactcagaagaaacctcaaagattgtactctacaaagtaa

SEQ ID NO: 167052 - DNA, 120 bp, Artificial Sequence
  ENSG00000108433_112 (sequence is synthesized)
ataggttggtatcaatgattattggaactagagagccgaggacaagttttttgatgttgccttctttttatagtataaaatattctaattttaagtatttttgttgagatataatttaca

SEQ ID NO: 167053 - DNA, 120 bp, Artificial Sequence
  ENSG00000108433_113 (sequence is synthesized)
gacagtaaggtatacagatcatatttttacaattcagtgaatttgggcaattgtatcagcctttgtaactcacactcccatcaaggcccggaccatttcacctctgaaagatccctcgta

SEQ ID NO: 167054 - DNA, 120 bp, Artificial Sequence
  ENSG00000108433_114 (sequence is synthesized)
ccccttcccagtcagttgacccctctgccccaggcagccactgttgtgatttatttcaccatagatgaggttttcttgttattgaacttcatataaaggtattcatgctactcttttcta

SEQ ID NO: 167055 - DNA, 86 bp, Artificial Sequence
  ENSG00000108433_115 (sequence is synthesized)
tcacaacggcatggatgacctcattttagatgggcacaatattttagatggactgaggacccagagactgaccttgaagggcctcc

SEQ ID NO: 167056 - DNA, 120 bp, Artificial Sequence
  ENSG00000108433_116 (sequence is synthesized)
acagagagagagacagagaaagagatggcaatatcagttaagtccctggattgagccatgcctgaagcctcagaacttcccaatttggagagccaatcaataaatccttttcctacttaa

SEQ ID NO: 167057 - DNA, 120 bp, Artificial Sequence
  ENSG00000108433_117 (sequence is synthesized)
cctgcatcagcctcccgaagtgctgggattataggtgaggaaaccgaggcacagagaggttgagctacttctccaaagttacagaactaggaagcagggcagccaggattttgaagacca

SEQ ID NO: 167058 - DNA, 120 bp, Artificial Sequence
  ENSG00000108433_118 (sequence is synthesized)
ggatcccaggccttctctcttgtgaacccaaggccctctgagatttatcggtgcatcctgggaagagctctcaatggacagcagttgtgggtgagtggggctttctagaaccatcctcca

SEQ ID NO: 167059 - DNA, 120 bp, Artificial Sequence
  ENSG00000108433_119 (sequence is synthesized)
ctcggatggctcaggattctgctctgtctggctctgccctggagcactgttcctcattcactcttaccttatgtaactcagtgttcccgccccctgccccaaggattatataaggcagcc

SEQ ID NO: 167060 - DNA, 120 bp, Artificial Sequence
  ENSG00000108439_0 (sequence is synthesized)
cattggctccgaggacttaggacctgttagcttggttgggcgactggcaaatccttccttccccggggtagaagtccagggtgagaaattggttccgaactcaaaggaacccagtgccgg

SEQ ID NO: 167061 - DNA, 120 bp, Artificial Sequence
  ENSG00000108439_1 (sequence is synthesized)
gccacagccgggtcacgtggccggcggccccccatgacgtgctggctgcggggcgtcacggcgacgttcgggcgacctgccgagtggccaggctacctcagtcacctgtgtggtcgcagt

SEQ ID NO: 167062 - DNA, 120 bp, Artificial Sequence
  ENSG00000108439_2 (sequence is synthesized)
gctgccatggacctgggacccatgcgcaagagttaccgcggggaccgagaggcatttgaggagactcatctgacctcccttgacccagtgaaacagtttgctgcctggtttgaggaggct

SEQ ID NO: 167063 - DNA, 120 bp, Artificial Sequence
  ENSG00000108439_3 (sequence is synthesized)
gttcagtgtcctgacataggggaagccaatgccatgtgtctggctacctgcaccagagatggaaaaccctctgctcgcatgttgctgctgaagggcttcgggaaagatggcttccgcttc

SEQ ID NO: 167064 - DNA, 120 bp, Artificial Sequence
  ENSG00000108439_4 (sequence is synthesized)
ttcactaacttcgagagtcgaaaaggaaaagagctggactctaatccctttgcttcccttgtcttctactgggagccacttaaccgtcaggtgcgtgtggaaggccctgtgaagaaactg

SEQ ID NO: 167065 - DNA, 120 bp, Artificial Sequence
  ENSG00000108439_5 (sequence is synthesized)
cctgaggaggaggctgagtgctacttccactcccgccccaagagcagccagattggggctgtggtcagccaccagagttctgtgatccctgatcgggagtatctgagaaagaaaaatgag

SEQ ID NO: 167066 - DNA, 120 bp, Artificial Sequence
  ENSG00000108439_6 (sequence is synthesized)
gaactggaacagctctaccaggatcaagaggtgcccaagccaaaatcctggggtggctatgtcctgtaccctcaggtgatggagttctggcaaggtcaaaccaaccgcctgcatgaccgg

SEQ ID NO: 167067 - DNA, 120 bp, Artificial Sequence
  ENSG00000108439_7 (sequence is synthesized)
atagtctttcggcggggcctacccacaggagattcccctttggggcccatgacccaccgcggggaggaagactggctctatgagagacttgcaccttaactctgggacctgctggcccag

SEQ ID NO: 167068 - DNA, 120 bp, Artificial Sequence
  ENSG00000108439_8 (sequence is synthesized)
agtggagctagggctaggtgtcaagagagggtgtgggattgggacccaggcccttctttctaaactcaacccatttccctccctaccccttatcttcaggactcttcagagctaatcctc

SEQ ID NO: 167069 - DNA, 120 bp, Artificial Sequence
  ENSG00000108439_9 (sequence is synthesized)
taagttctctgtactcagttggttctcagttagctggtcaagtggagtgtaatggtggcgtagagaatcacaaatggaaaataattccataattatttttttgaccttgcctatgattga

SEQ ID NO: 167070 - DNA, 120 bp, Artificial Sequence
  ENSG00000108439_10 (sequence is synthesized)
ttaggatagctccctctaggggtagcagccggtgtgactccctttctggtgacagacagggccccagcagccctgtctgttaccatgtgagtcatactggccaaagcttagtcctagcat

SEQ ID NO: 167071 - DNA, 120 bp, Artificial Sequence
  ENSG00000108439_11 (sequence is synthesized)
atgcacctgagccaacctggccaatcagattgttttgtcaataatttgaaatttgaactggagagatccagaaccttgggagtcattaaagccaagtcattcatagcagccaggaaacaa

SEQ ID NO: 167072 - DNA, 120 bp, Artificial Sequence
  ENSG00000108439_12 (sequence is synthesized)
taggaaccaaaagcctctgcctgctgctattgcaattcccaggatctctccttccctggatccctccctcccaggtctgggctgtgcagttcctccccctgccttaaaacaccccactat

SEQ ID NO: 167073 - DNA, 120 bp, Artificial Sequence
  ENSG00000108439_13 (sequence is synthesized)
ctctgtaaagtctctctctctcttttttttttttttacttaatctagctagaatctatttctgttgattacaacttaactaactcatttacggataggacttttttttttctttttttct

SEQ ID NO: 167074 - DNA, 120 bp, Artificial Sequence
  ENSG00000108439_14 (sequence is synthesized)
tgggattacagacatgagccaccacgcttggccgggatagtatatttttatagcacttcccctactgattgctgccttctctgtggctacaagggacccacagaattacagggaagttac

SEQ ID NO: 167075 - DNA, 120 bp, Artificial Sequence
  ENSG00000108439_15 (sequence is synthesized)
ctgtggctacaagggacccacagaattacagggaagttacagggaagcaggtttcatctcaatattgggagagatttcaaacaatcacacctgcctgagaaggagtgggctgtcactagg

SEQ ID NO: 167076 - DNA, 120 bp, Artificial Sequence
  ENSG00000108439_16 (sequence is synthesized)
aatttttattcccagtccgtcaggaattttgtagaagggcttcatgtgctggtaccaataggacaggaagattttaatcagctttactatctatgtttttttatggaaactgtgtgtatg

SEQ ID NO: 167077 - DNA, 120 bp, Artificial Sequence
  ENSG00000108439_17 (sequence is synthesized)
tatacatacattttccaaaaagaaaaattaaatgattatagagattatgtttttcagactactcacgtatctgcttttcttactccccacctctgctgataattcctagttcattggttt

SEQ ID NO: 167078 - DNA, 120 bp, Artificial Sequence
  ENSG00000108439_18 (sequence is synthesized)
ttcccccacactggaattacctggggagcttaaaaaaccctgatgcctgggtcccaccctcagagatgattgaaccagcctggccagcatggcaaaaccctgtctctactatgatatgaa

SEQ ID NO: 167079 - DNA, 120 bp, Artificial Sequence
  ENSG00000108439_19 (sequence is synthesized)
tgcagcctgggcactgggaaatttaaaaactccccagataattctgtgcagccaaggttgagacctcctagtctagagctttgctatacacagggtggtccacaagccaggagcatcagc

SEQ ID NO: 167080 - DNA, 120 bp, Artificial Sequence
  ENSG00000108439_20 (sequence is synthesized)
atcacttggcagcgccttagagattcagaccccagacccactgaatctgaccctgcattttcactagaccccaggtgatcagctgcactagactcaacctctaaaccaagacctcccacc

SEQ ID NO: 167081 - DNA, 120 bp, Artificial Sequence
  ENSG00000108439_21 (sequence is synthesized)
ctcacagtctatgatcctttagtgaccctcagctgagtcctgtgctgaactgtgtttgttctccttgagcacatgcccgctaaccagggacagactggatgagcaagcaacctgctggct

SEQ ID NO: 167082 - DNA, 120 bp, Artificial Sequence
  ENSG00000108439_22 (sequence is synthesized)
atggagaagagccaggctgggtaaatgtttgctgtgactaagccaggatcaaagaactgcctgttgcttgcactggctggcactgagcttgccactctgtgaactgtgcttccttcccct

SEQ ID NO: 167083 - DNA, 120 bp, Artificial Sequence
  ENSG00000108439_23 (sequence is synthesized)
gcatggacctgtgcctcagtcactattatccgcaggccttctccaagggcagccctctccttgtttatccctcttaagcctgcgtgcaggaaggcacattaaccctgtggccccctgcag

SEQ ID NO: 167084 - DNA, 120 bp, Artificial Sequence
  ENSG00000108439_24 (sequence is synthesized)
gcaggagggtgttgggtgcccttacctaccttgccctttttcttgtaccgtaggctgtgccgtttatgagtaagtgatgtgtgtctgtgtgtgtgtctagaagtgctgcactcaccttgt

SEQ ID NO: 167085 - DNA, 120 bp, Artificial Sequence
  ENSG00000108439_25 (sequence is synthesized)
gttattggaggttgtgtaaccccctagctttgagcctggtctcagatgttccttttccgttctctgtccagccgttaccgcccccagtctgtaataaaagcctatcagccgtgcacttta

SEQ ID NO: 167086 - DNA, 120 bp, Artificial Sequence
  ENSG00000108439_26 (sequence is synthesized)
gtctgtgacaataggcctacttttgagggtttaaatgagctcttacggtgggtgcatctgctgtgggcctgcgcactacagctctcctgccttttccctgcatgccggaggcctcctctc

SEQ ID NO: 167087 - DNA, 120 bp, Artificial Sequence
  ENSG00000108439_27 (sequence is synthesized)
atgttgctgctgaagggcttcgggaaagatggcttccgcttcttcactaacttcgagagtcgaaaaggaaaagagctggtgggtgaaaagagctagtaatctttcccagggcctgcaggg

SEQ ID NO: 167088 - DNA, 120 bp, Artificial Sequence
  ENSG00000108439_28 (sequence is synthesized)
tttggctcttgcttcctcagtcaccttcttatgccaccccacccccccagtctacttgctctctgtgtgcaggtgccctcctgccatgaggccttggcacttgctgtgctctttgccata

SEQ ID NO: 167089 - DNA, 120 bp, Artificial Sequence
  ENSG00000108439_29 (sequence is synthesized)
aatgaatgaatgcactttctaaccagcctcaccccatcagccatgacctgttccttcagatctcagcccacatgttacctcctcaggaaggccttccttgactctcactcagactcagcc

SEQ ID NO: 167090 - DNA, 120 bp, Artificial Sequence
  ENSG00000108439_30 (sequence is synthesized)
cctcatgctgtttgctgccattataacttgcaactttcttttttgtcttcttcttcagtttgtaactgagcatttgtttgggtgattatgtaactgatatttgtctcctctgctcaacag

SEQ ID NO: 167091 - DNA, 120 bp, Artificial Sequence
  ENSG00000108439_31 (sequence is synthesized)
taagctctgtaggagtggaggctgctctgttttatctctgctgtatcccccgcacgtctcctgttgtcagacccagagtgggcacttcgcgtgcattcaatgaatgaatccaaaatgagt

SEQ ID NO: 167092 - DNA, 120 bp, Artificial Sequence
  ENSG00000108439_32 (sequence is synthesized)
aaacctccctgagtccatgccagccaagcatgcatttctcaagactcacaaatctgtgggtgagagaaatcacccagtctcactttggagtccgactggcttaaacttagctccaccact

SEQ ID NO: 167093 - DNA, 120 bp, Artificial Sequence
  ENSG00000108439_33 (sequence is synthesized)
ccacttaaccgtcaggtgagtgaattttcccaggacagcctgggatgggctgggttggcagggcctgagtttatggctacgtctagcgaaggtccccagactgggcaaacatcccagctg

SEQ ID NO: 167094 - DNA, 120 bp, Artificial Sequence
  ENSG00000108439_34 (sequence is synthesized)
ggcactctgcctctaaaatagccctcagttagttggagccaagagtggtggggcagccgatcgaacagagaggaacggggcctgtgctggtagggagggcaggtggcatttaatgccatt

SEQ ID NO: 167095 - DNA, 120 bp, Artificial Sequence
  ENSG00000108439_35 (sequence is synthesized)
ggcttatccccagaagctgtccccaggagatgccaggagatgtccccaggagatgtcctctctctccagcccagtgaaaacagtgaaaaggacagtgagaagggaaagtgggggtaggga

SEQ ID NO: 167096 - DNA, 120 bp, Artificial Sequence
  ENSG00000108439_36 (sequence is synthesized)
gaggggaaataggcctcctctgtccatctggccatcctgttgactgctcctggaggacagaggccagtctgctctgctcacccatgtccccagcacatatccccaggaagtccttgttaa

SEQ ID NO: 167097 - DNA, 120 bp, Artificial Sequence
  ENSG00000108439_37 (sequence is synthesized)
ggagttccggggaaacgcaaatgaagatgggttcaaaaggcagcctttcgtaatgggtaagagctcgaactttggagcctgcctgggttggaatgtttaatgtatctgggcctcagtttc

SEQ ID NO: 167098 - DNA, 120 bp, Artificial Sequence
  ENSG00000108439_38 (sequence is synthesized)
ctccgatcctggaaactcattggctccgaggacttaggacctgttagcttggttgggcgactggcaaatccttccttccccggggtagaagtccagggcatttgaggagactcatctgac

SEQ ID NO: 167099 - DNA, 120 bp, Artificial Sequence
  ENSG00000108439_39 (sequence is synthesized)
gcaagagttaccgcggggaccgagaggtgccgccgctagggccaggcctcctgcaggggcgggggaaaaggggtccccggagtcatctacagcggggaggggagtagtaggagcccctcg

SEQ ID NO: 167100 - DNA, 120 bp, Artificial Sequence
  ENSG00000108439_40 (sequence is synthesized)
gggcttctggggccacccggtggggcaaggaggtttgaggatcaccccccgtgggaaaagggggcttcaaagacatcccaccaggggaggagttccggggaaacgcaaatgaagatgggt

SEQ ID NO: 167101 - DNA, 120 bp, Artificial Sequence
  ENSG00000108443_0 (sequence is synthesized)
gcactgagcctaagcagccggtgatggcggcagcggctgtggtggctgcggcgggtccgggcccatgaggcgacgaaggaggcgggacggcttttacccagccccggacttccgagacag

SEQ ID NO: 167102 - DNA, 120 bp, Artificial Sequence
  ENSG00000108443_1 (sequence is synthesized)
ggaagctgaggacatggcaggagtgtttgacatagacctggaccagccagaggacgcgggctctgaggatgagctggaggaggggggtcagttaaatgaaagcatggaccatgggggagt

SEQ ID NO: 167103 - DNA, 120 bp, Artificial Sequence
  ENSG00000108443_2 (sequence is synthesized)
tggaccatatgaacttggcatggaacattgtgagaaatttgaaatctcagaaactagtgtgaacagagggccagaaaaaatcagaccagaatgttttgagctacttcgggtacttggtaa

SEQ ID NO: 167104 - DNA, 120 bp, Artificial Sequence
  ENSG00000108443_3 (sequence is synthesized)
agggggctatggaaaggtttttcaagtacgaaaagtaacaggagcaaatactgggaaaatatttgccatgaaggtgcttaaaaaggcaatgatagtaagaaatgctaaagatacagctca

SEQ ID NO: 167105 - DNA, 120 bp, Artificial Sequence
  ENSG00000108443_4 (sequence is synthesized)
tacaaaagcagaacggaatattctggaggaagtaaagcatcccttcatcgtggatttaatttatgcctttcagactggtggaaaactctacctcatccttgagtatctcagtggaggaga

SEQ ID NO: 167106 - DNA, 120 bp, Artificial Sequence
  ENSG00000108443_5 (sequence is synthesized)
actatttatgcagttagaaagagagggaatatttatggaagacactgcctgcttttacttggcagaaatctccatggctttggggcatttacatcaaaaggggatcatctacagagacct

SEQ ID NO: 167107 - DNA, 120 bp, Artificial Sequence
  ENSG00000108443_6 (sequence is synthesized)
gaagccggagaatatcatgcttaatcaccaaggtcatgtgaaactaacagactttggactatgcaaagaatctattcatgatggaacagtcacacacacattttgtggaacaatagaata

SEQ ID NO: 167108 - DNA, 120 bp, Artificial Sequence
  ENSG00000108443_7 (sequence is synthesized)
catggcccctgaaatcttgatgagaagtggccacaatcgtgctgtggattggtggagtttgggagcattaatgtatgacatgctgactggagcacccccattcactggggagaatagaaa

SEQ ID NO: 167109 - DNA, 120 bp, Artificial Sequence
  ENSG00000108443_8 (sequence is synthesized)
gaaaacaattgacaaaatcctcaaatgtaaactcaatttgcctccctacctcacacaagaagccagagatctgcttaaaaagctgctgaaaagaaatgctgcttctcgtctgggagctgg

SEQ ID NO: 167110 - DNA, 120 bp, Artificial Sequence
  ENSG00000108443_9 (sequence is synthesized)
tcctggggacgctggagaagttcaagctcatccattctttagacacattaactgggaagaacttctggctcgaaaggtggagcccccctttaaacctctgttgcaatctgaagaggatgt

SEQ ID NO: 167111 - DNA, 120 bp, Artificial Sequence
  ENSG00000108443_10 (sequence is synthesized)
aagtcagtttgattccaagtttacacgtcagacacctgtcgacagcccagatgactcaactctcagtgaaagtgccaatcaggtctttctgggttttacatatgtggctccatctgtact

SEQ ID NO: 167112 - DNA, 120 bp, Artificial Sequence
  ENSG00000108443_11 (sequence is synthesized)
tgaaagtgtgaaagaaaagttttcctttgaaccaaaaatccgatcacctcgaagatttattggcagcccacgaacacctgtcagcccagtcaaattttctcctggggatttctggggaag

SEQ ID NO: 167113 - DNA, 120 bp, Artificial Sequence
  ENSG00000108443_12 (sequence is synthesized)
aggtgcttcggccagcacagcaaatcctcagacacctgtggaatacccaatggaaacaagtggcatagagcagatggatgtgacaatgagtggggaagcatcggcaccacttccaatacg

SEQ ID NO: 167114 - DNA, 120 bp, Artificial Sequence
  ENSG00000108443_13 (sequence is synthesized)
acagccgaactctgggccatacaaaaaacaagcttttcccatgatctccaaacggccagagcacctgcgtatgaatctatgacagagcaatgcttttaatgaatttaaggcaaaaaaggt

SEQ ID NO: 167115 - DNA, 120 bp, Artificial Sequence
  ENSG00000108443_14 (sequence is synthesized)
ggagagggagatgtgtgagcatcctgcaaggtgaaacgactcaaaatgacagtttcagagagtcaatgtcattacatagaacacttcagacacaggaaaaataaacgtggattttaaaaa

SEQ ID NO: 167116 - DNA, 120 bp, Artificial Sequence
  ENSG00000108443_15 (sequence is synthesized)
atcaatcaatggtgcaaaaaaaaacttaaagcaaaatagtattgctgaactcttaggcacatcaattaattgattcctcgcgacatcttctcaaccttatcaaggattttcatgttgatg

SEQ ID NO: 167117 - DNA, 120 bp, Artificial Sequence
  ENSG00000108443_16 (sequence is synthesized)
actcgaaactgacagtattaagggtaggatgttgcttctgaatcactgttgagttctgattgtgttgaagaagggttatcctttcattaggcaaagtacaaaattgcctataatacttgc

SEQ ID NO: 167118 - DNA, 120 bp, Artificial Sequence
  ENSG00000108443_17 (sequence is synthesized)
aactaaggacaaattagcatgcaagcttggtcaaactttttccagcaaaatggaagcaaagacaaaagaaacttaccaattgatgttttacgtgcaaacaacctgaatcttttttttata

SEQ ID NO: 167119 - DNA, 120 bp, Artificial Sequence
  ENSG00000108443_18 (sequence is synthesized)
taaatatatatttttcaaatagatttttgattcagctcattatgaaaaacatcccaaactttaaaatgcgaaattattggttggtgtgaagaaagccagacaacttctgtttcttctctt

SEQ ID NO: 167120 - DNA, 120 bp, Artificial Sequence
  ENSG00000108443_19 (sequence is synthesized)
ggtgaaataataaaatgcaaatgaatcattgttaaccacagctgtggctcgtttgagggattggggtggacctggggtttattttcagtaacccagctgcaatacctgtctgtaatatga

SEQ ID NO: 167121 - DNA, 120 bp, Artificial Sequence
  ENSG00000108443_20 (sequence is synthesized)
gaaaaaaaaaatgaatctatttaatcatttctacttgcagtactgctatgtgctaagcttaactggaagccttggaatgggcataagttgtatgtcctacatttcatcattgtcccgggc

SEQ ID NO: 167122 - DNA, 120 bp, Artificial Sequence
  ENSG00000108443_21 (sequence is synthesized)
ctgcattgcactggaaaaaaaaatcgccacctgttcttacaccagtatttggttcaagacaccaaatgtcttcagcccatggctgaagaacaacagaagagagtcaggataaaaaataca

SEQ ID NO: 167123 - DNA, 120 bp, Artificial Sequence
  ENSG00000108443_22 (sequence is synthesized)
gggatatccaggggaagagggtgttgctgtggcccactctctgtctaatctctttacagcaaattggtaagattttcagttttacttctttctactgtttctgctgtctaccttccttat

SEQ ID NO: 167124 - DNA, 120 bp, Artificial Sequence
  ENSG00000108443_23 (sequence is synthesized)
atttttttcctcaacagttttaaaaagaaaaaaaggtctatttttttttctcctatacttgggctacattttttgattgtaaaaatatttgatggccttttgatgaatgtcttccacagt

SEQ ID NO: 167125 - DNA, 120 bp, Artificial Sequence
  ENSG00000108443_24 (sequence is synthesized)
aaagaaaacttagtggcttaatttaggaaacatgttaacaggacactatgtttttgaaattgtaacaaaatctacataaatgatttacaggttaaaagaataaaaataaaggtaacttta

SEQ ID NO: 167126 - DNA, 120 bp, Artificial Sequence
  ENSG00000108443_25 (sequence is synthesized)
cctttcttaaatatttcctgccttaaagagagcatttccatgactttagctggtgaaagggtttaatatctgcagagctttataaaaatatatttcagtgcatactggtataatagatga

SEQ ID NO: 167127 - DNA, 120 bp, Artificial Sequence
  ENSG00000108443_26 (sequence is synthesized)
tcatgcagttgcagttgagttgtatcaccttttttgtttgtcttttataatgtcttcagtctgagtgtgcaaagtcaatttgtaatattttgcaaccctaggatttttttaaatagatgc

SEQ ID NO: 167128 - DNA, 120 bp, Artificial Sequence
  ENSG00000108443_27 (sequence is synthesized)
tgcttgctatgttttcaaacctttttgagccataggatccaagccataaaattctttatgcatgttgaattcagtcagaaaagagcaaggctttgctttttgaaattgcaactcaaatga

SEQ ID NO: 167129 - DNA, 120 bp, Artificial Sequence
  ENSG00000108443_28 (sequence is synthesized)
gatgggatgaaatcctatgacagtaagcaaaaacagaaccatgaaaaatgattggacatacaccttttcaattgtggcaataattgaaagaatcgataaaagttcatctttggacagaaa

SEQ ID NO: 167130 - DNA, 120 bp, Artificial Sequence
  ENSG00000108443_29 (sequence is synthesized)
gcctttaaaaaaaaaatcactccctcttccccctcctcccttattgcagcagcctactgagaactttgactgttgctggtaaattagaagctacaataataattaagggcagaaattata

SEQ ID NO: 167131 - DNA, 120 bp, Artificial Sequence
  ENSG00000108443_30 (sequence is synthesized)
cttaaaaagtgcagatccttgttctttgacaatttgtgatgtctgaaaaaacagaacccgaaaagctatggtgatatgtacaggcattatttcagactgtaaatggcttgtgatactctt

SEQ ID NO: 167132 - DNA, 120 bp, Artificial Sequence
  ENSG00000108443_31 (sequence is synthesized)
gatacttgttttcaaatatgtttactaactgtagtgttgactgcctgaccaaattccagtgaaacttatacaccaaaatattcttcctaggtcctatttgctagtaacatgagcactgtg

SEQ ID NO: 167133 - DNA, 120 bp, Artificial Sequence
  ENSG00000108443_32 (sequence is synthesized)
attggctggctataaccaccccagttaaaccattttcataattagtagtgccagcaatagtggcaaacactgcaacttttctgcataaaaagcattaattgcacagctaccatccacaca

SEQ ID NO: 167134 - DNA, 120 bp, Artificial Sequence
  ENSG00000108443_33 (sequence is synthesized)
aatacatagtttttctgacttcacatttattaagtgaaatttatttcccatgctgtggaaagtttattgagaacttgtttcataaatggatatccctactatgactgtgaaaacatgtca

SEQ ID NO: 167135 - DNA, 120 bp, Artificial Sequence
  ENSG00000108443_34 (sequence is synthesized)
agtgtcacattagtgtcacagacagaaagcacacacctatgcaatatggcttatctatatttatttgtaaaaatccaagcatagtttaaaatatgatgtcgatattactagtcttgagtt

SEQ ID NO: 167136 - DNA, 120 bp, Artificial Sequence
  ENSG00000108443_35 (sequence is synthesized)
tctaagagggttctttatgttataccaggtaagtgtataaaagagattaagtgcttttttttcatcacttgattattttctttaaaatcagctattacaggatatttttttattttatac

SEQ ID NO: 167137 - DNA, 120 bp, Artificial Sequence
  ENSG00000108443_36 (sequence is synthesized)
atgctgttttttaattaaaatataatcactgaagtttactaatttgattttataaggtttgtagcattacagaataactaaactgggatttataaaccagctgtgattaacaatgtaaag

SEQ ID NO: 167138 - DNA, 120 bp, Artificial Sequence
  ENSG00000108443_37 (sequence is synthesized)
tattaattattgaactttgaaccagatttttaggaaaattatgttctttttccccctttatggtcttaactaatttgaatccttcaagaaggatttttccatactattttttaagataga

SEQ ID NO: 167139 - DNA, 120 bp, Artificial Sequence
  ENSG00000108443_38 (sequence is synthesized)
agataatttgtgggcaggggtggaggatgcatgtatgatactccataaattcaacattctttactataggtaatgaatgattataaacaagatgcatcttagatagtattaatatactga

SEQ ID NO: 167140 - DNA, 120 bp, Artificial Sequence
  ENSG00000108443_39 (sequence is synthesized)
gccttggattatatatttaatataggacctattttgaatattcagttaatcatatggttcctagcttacaagggctagatctaagattattcccatgagaaatgttgaatttatgaagaa

SEQ ID NO: 167141 - DNA, 120 bp, Artificial Sequence
  ENSG00000108443_40 (sequence is synthesized)
tagattttaaggctttgaaaatggttaatttctcaaaaacatcaatgtccaaacatctaccttttttcataggagtagacactagcaagctggacaaactatcacaaaagtatttgtcac

SEQ ID NO: 167142 - DNA, 120 bp, Artificial Sequence
  ENSG00000108443_41 (sequence is synthesized)
acataacctgtggtctgttgctgattaatacagtactttttcttgtgtgattcttaacattatagcacaagtattatctcagtggattatccggaataacatctgaaagatgggttcatc

SEQ ID NO: 167143 - DNA, 120 bp, Artificial Sequence
  ENSG00000108443_42 (sequence is synthesized)
tatgtttgtgtttgctctttaaactattgtttctcctatcccaagttcgctttgcatctatcagtaaataaaattcttcagctgccttattaggagtgctatgagggtaacacctgttct

SEQ ID NO: 167144 - DNA, 120 bp, Artificial Sequence
  ENSG00000108443_43 (sequence is synthesized)
gcttttcatcttgtatttagttgactgtattatttgatttcggattgaatgaatgtaaatagaaattaaatgcaaatttgaatgaacataaatagaagtgatttatttttttattatctt

SEQ ID NO: 167145 - DNA, 120 bp, Artificial Sequence
  ENSG00000108443_44 (sequence is synthesized)
aaagataggaaggaattagtatacgtatcaggtgtataaatggtttaaatttattttaacatgtcagatgtgttcaagttgtcatataaataaactatgtatgtaaggaatgggttaaaa

SEQ ID NO: 167146 - DNA, 120 bp, Artificial Sequence
  ENSG00000108443_45 (sequence is synthesized)
gttgttcctaacagaaccattctcattgcggctttctttccttgaattgcttttacttggcagaaatctccatggctttggggcatttacatcaaaaggggatcatctacagagacctga

SEQ ID NO: 167147 - DNA, 120 bp, Artificial Sequence
  ENSG00000108443_46 (sequence is synthesized)
ggtctgtgctgagtcactatagcaagagacctgtcctgtgctttctgaacatgttaccagtggagttttcaaagcccaaagatttgttattagcagtttaacactaataatgctgtatga

SEQ ID NO: 167148 - DNA, 120 bp, Artificial Sequence
  ENSG00000108443_47 (sequence is synthesized)
ttatatgggatcccatactttccgaaacattttcttttaaatgatctatgtcatggcaggcctgtgaaatagatgttgaatagataatgcccttattttataaatggagaaattgaagca

SEQ ID NO: 167149 - DNA, 120 bp, Artificial Sequence
  ENSG00000108443_48 (sequence is synthesized)
taaaatcacatagctcacttatcacacagaaagttaatggtggaaacacaggcttccttccaggacactgctacttcctctgtcctgttgcttaaaaactgcacgtctgccggccacagt

SEQ ID NO: 167150 - DNA, 82 bp, Artificial Sequence
  ENSG00000108443_49 (sequence is synthesized)
ggtgcatgcctgtagcctataaggattattaatagaatctagccttgacaacatagttgagaccctgtctgtaaaacaaaat

SEQ ID NO: 167151 - DNA, 120 bp, Artificial Sequence
  ENSG00000108443_50 (sequence is synthesized)
cacagacagaacaaaacatgaccaatggcagtttagcatattctggacatctttgcaattttagcaatatattctaatggcaaaataaagcactttatagtttcactaaaatgagtgaaa

SEQ ID NO: 167152 - DNA, 120 bp, Artificial Sequence
  ENSG00000108443_51 (sequence is synthesized)
cataaatgtccccatgccttttggcagcatcctatgccatctctttttccaatacatccccctaccccactaatttggtctttggtgcatgtctgtttctttcaaggaattttgctccat

SEQ ID NO: 167153 - DNA, 120 bp, Artificial Sequence
  ENSG00000108443_52 (sequence is synthesized)
attacaggcatgagccaccgtgcctggtggtcccttgcatttctatatgaaatttaggatcagcttgtcaatttctgcaagaaaggaacctggggttttgataggattcagttgaatccg

SEQ ID NO: 167154 - DNA, 120 bp, Artificial Sequence
  ENSG00000108443_53 (sequence is synthesized)
ggctcaatggaattctgctttcttgaagtgtgtgcctcacgaaatggctggaaagaagttaacgggtctaaaaatgaggttgaggacgtgggagagtgtacacattggtggttttaggtg

SEQ ID NO: 167155 - DNA, 120 bp, Artificial Sequence
  ENSG00000108443_54 (sequence is synthesized)
tgcatcattgtgtaggtatgtcagactgaacaaccccattctcttgagatacatgacaaaatgccattctgtagtccactgttactgtctttcagggttttacatatgtggctccatctg

SEQ ID NO: 167156 - DNA, 120 bp, Artificial Sequence
  ENSG00000108443_55 (sequence is synthesized)
gaagctgcatttaagagccttagggatgaagtgcccttttttggaggaggctcactgagccgtgttggaggctgtgtttgtggtcgtgctggctgtgaaactgcctcagtcctctaggac

SEQ ID NO: 167157 - DNA, 120 bp, Artificial Sequence
  ENSG00000108443_56 (sequence is synthesized)
acaccctctccatcctggagtaatctgcaggattgcaacattgttatgcagccagtattgcagtgccttgtgcttttcgaatccagacagggttgattcagccctttattcttttgagct

SEQ ID NO: 167158 - DNA, 120 bp, Artificial Sequence
  ENSG00000108443_57 (sequence is synthesized)
gcttataagtttagcttattttgtgacttgtaacttcaaaaaggtgattaatttatcaatccagcaaagtctagtcccctcaacttttcttcctgctttttttttcctaggctcatccat

SEQ ID NO: 167159 - DNA, 120 bp, Artificial Sequence
  ENSG00000108448_0 (sequence is synthesized)
gtgcctcccggctggtttctgagatcagccacagaagttaaacttctttccagggaagaagggcggggatgtcagggctggagagtgcccgtgtccttctgtgtgcattgggctccttcc

SEQ ID NO: 167160 - DNA, 120 bp, Artificial Sequence
  ENSG00000108448_1 (sequence is synthesized)
tccttaattctctgctttccacttttaggctgaactccagtgcacccagttagacttggagcggaaactcaagttgaatgaaaatgccatctccaggctccaggctaaccaaaagtctgt

SEQ ID NO: 167161 - DNA, 120 bp, Artificial Sequence
  ENSG00000108448_2 (sequence is synthesized)
tctggtgtcggtgtcagaggtcaaagcagtggctgaaatgcagtttggggaactccttgctgctgtgaggaaggcccaggccaatgtgatgctcttcttagaggagaaggagcaagctgc

SEQ ID NO: 167162 - DNA, 120 bp, Artificial Sequence
  ENSG00000108448_3 (sequence is synthesized)
gctgagccaggccaacggtatcaaggcccacctggagtacaggagtgccgagatggagaagagtaagcaggagctggagacgatggcggccatcagcaacactgtccagttcttggagga

SEQ ID NO: 167163 - DNA, 120 bp, Artificial Sequence
  ENSG00000108448_4 (sequence is synthesized)
gtactgcaagtttaagaacactgaagacatcaccttccctagtgtttacatagggctgaaggataaactctcgggcatccgcaaagttatcacggaatccactgtacacttaatccagtt

SEQ ID NO: 167164 - DNA, 120 bp, Artificial Sequence
  ENSG00000108448_5 (sequence is synthesized)
gctggagaactataagaaaaagctccaggagttttccaaggaagaggagtatgacatcagaactcaagtgtctgccattgttcagcgcaaatattggacttccaaacctgagcccagcac

SEQ ID NO: 167165 - DNA, 120 bp, Artificial Sequence
  ENSG00000108448_6 (sequence is synthesized)
cagggaacagttcctccaatatgtgcatgacatcacgttcgacccggacacagcacacaagtatctccggctgcaggaggagaaccgcaaggtcaccaacaccacgccctgggagcatcc

SEQ ID NO: 167166 - DNA, 120 bp, Artificial Sequence
  ENSG00000108448_7 (sequence is synthesized)
ctacccggacctccccagcaggttcctgcactggcggcaggtgctgtcccagcagagtctgtacctgcacaggtactattttgaggtggagatcttcggggcaggcacctatgttggcct

SEQ ID NO: 167167 - DNA, 120 bp, Artificial Sequence
  ENSG00000108448_8 (sequence is synthesized)
tctcctggagcctccaatggaacgggaaggagttcacggcctggtacagtgacatggagaccccactcaaagctggccctttctggaggctcggggtctatattgacttcccaggaggga

SEQ ID NO: 167168 - DNA, 120 bp, Artificial Sequence
  ENSG00000108448_9 (sequence is synthesized)
tcctttccttctatggcgtagagtatgattccatgactctggttcacaagtttgcctgcaagttttcagaaccagtctatgctgccttctggctttccaagaaggaaaacgccatccgga

SEQ ID NO: 167169 - DNA, 120 bp, Artificial Sequence
  ENSG00000108448_10 (sequence is synthesized)
ttgtagatctgggagaggaacccgagaagccagcaccgtccttggtggggactgctccctagactccaggagccatatcccagacctttgccagctacagtgatgggatttgcattttag

SEQ ID NO: 167170 - DNA, 120 bp, Artificial Sequence
  ENSG00000108448_11 (sequence is synthesized)
ggtgatttgggggcaaaaataactgctgatggtagctggcttttgaaatcctatggggtctctgaatgaaaacattctccagctgctctcttttgctccatatggtgctgttctctatgt

SEQ ID NO: 167171 - DNA, 71 bp, Artificial Sequence
  ENSG00000108448_12 (sequence is synthesized)
ctgccaccacacccagctaaatctcaaacttctgacctcgtgatgcactcacctcggcctcccaaagtgct

SEQ ID NO: 167172 - DNA, 86 bp, Artificial Sequence
  ENSG00000108448_13 (sequence is synthesized)
tttgtagtaatttttaggcaccaaatctccctcatcttctagtgccattctcctctctgttcaggtaaatgtcacactgtgcccag

SEQ ID NO: 167173 - DNA, 120 bp, Artificial Sequence
  ENSG00000108448_14 (sequence is synthesized)
attctcctctctgttcaggtaaatgtcacactgtgcccagaatggatgaccaggaaccttcaagagtggctgaaaagattgcagagttatcataataaattgctaacttgcgtatttcct

SEQ ID NO: 167174 - DNA, 120 bp, Artificial Sequence
  ENSG00000108448_15 (sequence is synthesized)
gcttctggcccctttctctggaggagctccgcgcgtggcgagtctgtgtcctccctgtcccccagagcagagaaccctctctgtgtctggacgggggaggagcagacgctggacaggttt

SEQ ID NO: 167175 - DNA, 120 bp, Artificial Sequence
  ENSG00000108448_16 (sequence is synthesized)
ttggcaaaatgctggcaattcccaggaagatatgtggagaacggaaaggttgctacacccaaatagtggcgcaaaggctatgattatggaggattggacctgcaaactccagaacagagc

SEQ ID NO: 167176 - DNA, 120 bp, Artificial Sequence
  ENSG00000108448_17 (sequence is synthesized)
aaccttgtaaaatgtgtgtgggcagcacagagaccttgggcaagttaacagtttcctcatctgtaaatactgatttatggaaagcacctggtgtatgttctgccctctgaggaccctgcc

SEQ ID NO: 167177 - DNA, 120 bp, Artificial Sequence
  ENSG00000108448_18 (sequence is synthesized)
tttctctggaggagctccgcgcgtggcgagtctgtgtcctccctgtcccccagagcagagaaccctctctgtgtctggacgggggaggagcagacgctggacagggtgtgtgtgttcagc

SEQ ID NO: 167178 - DNA, 120 bp, Artificial Sequence
  ENSG00000108448_19 (sequence is synthesized)
agtggattgtcagacttggggtcccggctgctcccttttgggtctctccccgggcccgctgatctgactgtaattccttctgctggagctagggttcggccaccttgacgcgccccctct

SEQ ID NO: 167179 - DNA, 120 bp, Artificial Sequence
  ENSG00000108448_20 (sequence is synthesized)
gcccccggagcgtgtctttgggttttgtgtgtgtgggagtggggtgtatgtgtgtttcttatccgagacacctccgggtcgtttgcttggaaaccggctgagggcccgcacagcctggag

SEQ ID NO: 167180 - DNA, 120 bp, Artificial Sequence
  ENSG00000108448_21 (sequence is synthesized)
catttggttggaaagtgaggcaggtagcgcccaaggctcctgtaccagggccaggttaggcaccaacgcgtcccttatgtctctgcagcctgcagtgcggtggaaccgttttatagactg

SEQ ID NO: 167181 - DNA, 120 bp, Artificial Sequence
  ENSG00000108448_22 (sequence is synthesized)
acagtgtgaacgtgggaggggatggatatcagagacccgtttatccacattttcagagagtggtattgctccgatgtgagtgtaggcaggttactctctgtgtctcgtgttctttacctg

SEQ ID NO: 167182 - DNA, 120 bp, Artificial Sequence
  ENSG00000108448_23 (sequence is synthesized)
taatttgaggtttgttgtacctacttttaagtggtggttgtgaggattaaatggaattttgacatgcaacagttgacacagggccagacaccaagtaagggatcaatcagttgttgcttt

SEQ ID NO: 167183 - DNA, 120 bp, Artificial Sequence
  ENSG00000108448_24 (sequence is synthesized)
tattaatagtaggcatccatctgcccacttgtacgtaagaaggaaacacccaagaatgaaaagtagcttgttgtaggtcacccagccaactagcacataggggaaattagaatccaggca

SEQ ID NO: 167184 - DNA, 120 bp, Artificial Sequence
  ENSG00000108448_25 (sequence is synthesized)
ctcccagcagggcactttccaccaccctgcacttttgtattcatcaggcacaatatccttactgttgtctgtaactgtctatgttcccagtgtctgactctgcagggccctggtggtata

SEQ ID NO: 167185 - DNA, 120 bp, Artificial Sequence
  ENSG00000108448_26 (sequence is synthesized)
aaggtactgagacttgcctgtgtttagggcttcctgaagattaaatggctgctgaagttcttgagtttagctttagctcaaaagatactgcgtcagactctgcgttctgagtagagtctc

SEQ ID NO: 167186 - DNA, 120 bp, Artificial Sequence
  ENSG00000108448_27 (sequence is synthesized)
ctgtatataaaattactgtaaaacaaaactatcaaattatgtcaagggggtatacgcattttaagattttaagattctttaatatatgagtcaataaaatcttgtctttgacactgcgaa

SEQ ID NO: 167187 - DNA, 120 bp, Artificial Sequence
  ENSG00000108448_28 (sequence is synthesized)
agtcccagaaccccatgcaggtgtttcagggctttacgtcattcaaggatgtggctgtgaacttcactaggaagaatggagagtactggaccttgctcagagagtcttgtacagggatgt

SEQ ID NO: 167188 - DNA, 120 bp, Artificial Sequence
  ENSG00000108448_29 (sequence is synthesized)
aatgctggagaactataggaacctggtctccttgggatttccattttccaaacctggtatcatctcctagttggaagaagtggtaggcccacgaacgcaaatgcaggagggagaggtgcc

SEQ ID NO: 167189 - DNA, 120 bp, Artificial Sequence
  ENSG00000108448_30 (sequence is synthesized)
gaacgggaaggagttcacggcctggtaaatgtcacactgtgcccagaatggatgaccaggaaccttcaagagtggctgaaaagattgcagagttatcataataaattgctaacttgcgta

SEQ ID NO: 167190 - DNA, 120 bp, Artificial Sequence
  ENSG00000108448_31 (sequence is synthesized)
gcagagtcccaggatgtggctgtgaacttcactaggaagaatggagagtactggaccttgctcagagagtcttgtacagggatgtaatgctggagaactataggaacctggtctccttgg

SEQ ID NO: 167191 - DNA, 120 bp, Artificial Sequence
  ENSG00000108465_0 (sequence is synthesized)
acagtctccagcctgaagcggaagtggaggaaagatggaggaccatcagcacgtgcccatcgacatccagaccagcaagctgctcgattggctggtggacagaaggcactgcagcctgaa

SEQ ID NO: 167192 - DNA, 120 bp, Artificial Sequence
  ENSG00000108465_1 (sequence is synthesized)
atggcagagtctggtgctgacgatccgcgagaagatcaatgctgccatccaggacatgccagagagcgaagagatcgcccagctgctgtctgggtcctacattcactactttcactgcct

SEQ ID NO: 167193 - DNA, 120 bp, Artificial Sequence
  ENSG00000108465_2 (sequence is synthesized)
aagaatcctggaccttctcaaaggcacagaggcctccacgaagaatatttttggccgatactcttcacagcggatgaaggattggcaggagattatagctctgtatgagaaggacaacac

SEQ ID NO: 167194 - DNA, 120 bp, Artificial Sequence
  ENSG00000108465_3 (sequence is synthesized)
ctacttagtggaactctctagcctcctggttcggaatgtcaactatgagatcccctcactgaagaagcagattgccaagtgccagcagctgcagcaagaatacagccgcaaggaggagga

SEQ ID NO: 167195 - DNA, 120 bp, Artificial Sequence
  ENSG00000108465_4 (sequence is synthesized)
gtgccaggcaggggctgccgagatgcgggagcagttctaccactcctgcaagcagtatggcatcacgggcgaaaatgtccgaggagaactgctggccctggtgaaggacctgccgagtca

SEQ ID NO: 167196 - DNA, 120 bp, Artificial Sequence
  ENSG00000108465_5 (sequence is synthesized)
gctggctgagattggggcagcggctcagcagtccctgggggaagccattgacgtgtaccaggcgtctgtggggtttgtgtgtgagagccccacagagcaggtgttgccaatgctgcggtt

SEQ ID NO: 167197 - DNA, 120 bp, Artificial Sequence
  ENSG00000108465_6 (sequence is synthesized)
cgtgcagaagcggggaaactcaacggtgtacgagtggaggacagggacagagccctctgtggtggaacgaccccacctcgaggagcttcctgagcaggtggcagaagatgcgattgactg

SEQ ID NO: 167198 - DNA, 120 bp, Artificial Sequence
  ENSG00000108465_7 (sequence is synthesized)
actgactctggcatctctgccgaggctgctggaatcgactggggcatcttcccggaatcagattcaaaggatcctggaggtgatgggatagactggggagacgatgctgttgctttgcag

SEQ ID NO: 167199 - DNA, 120 bp, Artificial Sequence
  ENSG00000108465_8 (sequence is synthesized)
atcacagtgctggaagcaggaacccaggctccagaaggtgttgccaggggcccagatgccctgacactgcttgaatacactgagacccggaatcagttccttgatgagctcatggagctt

SEQ ID NO: 167200 - DNA, 120 bp, Artificial Sequence
  ENSG00000108465_9 (sequence is synthesized)
gagatcttcttagcccagagagcagtggagttgagtgaggaggcagatgtcctgtctgtgagccagttccagctggctccagccatcctgcagggccagaccaaagagaagatggttacc

SEQ ID NO: 167201 - DNA, 120 bp, Artificial Sequence
  ENSG00000108465_10 (sequence is synthesized)
atggtgtcagtgctggaggatctgattggcaagcttaccagtcttcagctgcaacacctgtttatgatcctggcctcaccaaggtatgtggaccgagtgactgaattcctccagcaaaag

SEQ ID NO: 167202 - DNA, 120 bp, Artificial Sequence
  ENSG00000108465_11 (sequence is synthesized)
ctgaagcagtcccagctgctggctttgaagaaagagctgatggtgcagaagcagcaggaggcacttgaggagcaggcggctctggagcctaagctggacctgctactggagaagaccaag

SEQ ID NO: 167203 - DNA, 120 bp, Artificial Sequence
  ENSG00000108465_12 (sequence is synthesized)
gagctgcagaagctgattgaagctgacatctccaagaggtacagcgggcgccctgtgaacctgatgggaacctctctgtgacaccctccgtgttcttgcctgcccatcttctccgctttt

SEQ ID NO: 167204 - DNA, 120 bp, Artificial Sequence
  ENSG00000108465_13 (sequence is synthesized)
gggatgaagatgatagccagggctgttgttttggggcccttcaaggcaaaagaccaggctgactggaagatggaaagccacaggaaggaagcggcacctgatggtgatcttggcactctc

SEQ ID NO: 167205 - DNA, 120 bp, Artificial Sequence
  ENSG00000108465_14 (sequence is synthesized)
catgttctctacaagaagctgtggtgattggccctgtggtctatcaggcgaaaaccacagattctccttctagttagtatagcggacttaataaaagaggaaaaaactcttgcttcagta

SEQ ID NO: 167206 - DNA, 120 bp, Artificial Sequence
  ENSG00000108465_15 (sequence is synthesized)
ccggtctccctccggaagcggctcaacccagcccatcgctctggccccgttctggccctgcagggtggtggttgggacgttgaaatgagcgcgcgagtggtacgtcctctctccgcgctc

SEQ ID NO: 167207 - DNA, 120 bp, Artificial Sequence
  ENSG00000108465_16 (sequence is synthesized)
tacttaggtaaagtggcccggcctgggagccctggtatccatggggaagcccactctcagagttctgagataccaggcttataggaggcacagtctgtgagtgggaagagactggagtgt

SEQ ID NO: 167208 - DNA, 120 bp, Artificial Sequence
  ENSG00000108465_17 (sequence is synthesized)
gccgtgcctcagcgagcaggtgtgtgtgggtcctccaccactcacctcttggttagcgggagtgtgctgcccccacccccacccccgcacccccattctacacaaggcagaagaggcacg

SEQ ID NO: 167209 - DNA, 120 bp, Artificial Sequence
  ENSG00000108465_18 (sequence is synthesized)
ctctttgctgaggtagtatgtatcagctgagctactctcttgttatttagccaccagggctggcctttagagagggagcgatttttatttgaggtatagatgctggcttcttccactatg

SEQ ID NO: 167210 - DNA, 120 bp, Artificial Sequence
  ENSG00000108465_19 (sequence is synthesized)
aaatgatttagggaaaagctacacactaaagttactggcagtatattatacatgaatcagccacctgcagtgcccagagtaggtgaagaagatactttagttctcgaaatcccgtctctt

SEQ ID NO: 167211 - DNA, 120 bp, Artificial Sequence
  ENSG00000108465_20 (sequence is synthesized)
gcgatcctcccaagtcagcctccaagatagctgggattacaggtttgcaccaccactcctagctaattttttattaacatctttgtagggacaggattttgccatattgcccaggctggt

SEQ ID NO: 167212 - DNA, 120 bp, Artificial Sequence
  ENSG00000108465_21 (sequence is synthesized)
ctcaaactcctgggctcaagcaatccactatcctcggcctcccaaagtactggggttacagacatgagccaccatgcccggccctttttaaatccatcttccatgagctaacactctctt

SEQ ID NO: 167213 - DNA, 120 bp, Artificial Sequence
  ENSG00000108465_22 (sequence is synthesized)
tgcctgagagcaactacaggactaactgtgtttgggttgggtgtagtataaataataataatggctaatatttcctgagcatctactaaatgcaaggaattgtgcttggtgtgtcatgtg

SEQ ID NO: 167214 - DNA, 120 bp, Artificial Sequence
  ENSG00000108465_23 (sequence is synthesized)
gattctctcttgcatcttcatgataaatgttattgtcgctgttttaccgatgagggttggattagaggggttaaacaacttgtcttaggctccacagctgggaacaagtggggctgggaa

SEQ ID NO: 167215 - DNA, 120 bp, Artificial Sequence
  ENSG00000108465_24 (sequence is synthesized)
gggggtgctttgcctgtgttccccagctcatgacccttctccagttgtcttgttcccatataacatttgaactctttacacacctgaacctgtgggggccttgcccatttgaccatgtgg

SEQ ID NO: 167216 - DNA, 120 bp, Artificial Sequence
  ENSG00000108465_25 (sequence is synthesized)
aatgtaggtgttctctttgggacgtctcaccgactctcttccttccccttccctgccctaatcgcccaacacgttgcaggtgctcaaccatgtctattagagaaactgaatgaggaggca

SEQ ID NO: 167217 - DNA, 120 bp, Artificial Sequence
  ENSG00000108465_26 (sequence is synthesized)
cctgagtggagtgctgggggaaggaggaggtccaggccggtagtggccattcgccgtgcctcagcgagcagcagattgccaagtgccagcagctgcagcaagaatacagccgcaaggagg

SEQ ID NO: 167218 - DNA, 120 bp, Artificial Sequence
  ENSG00000108465_27 (sequence is synthesized)
gccctggcaaaagtggggtgctcaagggcccccacgtgtctagaaacaaaaaatgcagcgctaagatgaggcttcttgcacatttaactgtttctcaaaaccttgatgaggatgtgagct

SEQ ID NO: 167219 - DNA, 120 bp, Artificial Sequence
  ENSG00000108465_28 (sequence is synthesized)
tcacagcggatgaaggcaagtgtgggccaagggccggtagtatgtggttggggacatccaatccgaggagtcatagcctctgtggtctctctgaggctccagtggggatgcctacataga

SEQ ID NO: 167220 - DNA, 120 bp, Artificial Sequence
  ENSG00000108465_29 (sequence is synthesized)
aataaaatatgcaggatgctagatggcaccaaatgccacggagaaagagaaagtaggggaggatgacgaggatgttggaaagggctatggttttgtatctggtggtcagggaaggcctca

SEQ ID NO: 167221 - DNA, 120 bp, Artificial Sequence
  ENSG00000108465_30 (sequence is synthesized)
ttgagaaggtgacctgtaatcaagactgcaggcggtgcagagagaaccatgcagatgtctggcagaagggcttcccaggcagagagagcaagtgcagaggtcccgaggtgggagcagacc

SEQ ID NO: 167222 - DNA, 120 bp, Artificial Sequence
  ENSG00000108465_31 (sequence is synthesized)
ttgcacagttgaccagcaacatggaggctggtgtggctgaggagagagagctggtggggagtagaagagctcagagatgtagcgtctgaaccttggtttgcctctgagtgaactgggaag

SEQ ID NO: 167223 - DNA, 120 bp, Artificial Sequence
  ENSG00000108465_32 (sequence is synthesized)
ctgttggaggtttcgagcaggttaggaacatgatctcatttgtgtttaaggacgatccctgtggctaaggtgttgagcagcccagcgtaaggagccagcgttcttggacctttgttgtaa

SEQ ID NO: 167224 - DNA, 120 bp, Artificial Sequence
  ENSG00000108465_33 (sequence is synthesized)
ggctgggaggacggggtcctgtctttgttaatctctgtatctgctcccttcccagtagcctgctggttcggagagcctcctgaaagttctgtcctcacccagttctctcctctttctgcc

SEQ ID NO: 167225 - DNA, 120 bp, Artificial Sequence
  ENSG00000108465_34 (sequence is synthesized)
cagaggctcctcccagcctcaaggggagaggacaaaagatatctgtgaagttttaacggcagaataggattgataagttaatatggctggctcttgtattcttttcagccttgccttaat

SEQ ID NO: 167226 - DNA, 120 bp, Artificial Sequence
  ENSG00000108465_35 (sequence is synthesized)
ccagtgcttctcaaacatgtatttctgttccctgaatctcattcctcccatggagacaaaataaataccttccctgggcagagagaaccctttgagtctctgtattctcagttatctgat

SEQ ID NO: 167227 - DNA, 120 bp, Artificial Sequence
  ENSG00000108465_36 (sequence is synthesized)
cccaggctggggagaaaggacagaggtctggggttaggatgagataggaggtggggactgaagggtgacagtagtctctcctagcgcttacagtgttcagaggaaactccttacccagag

SEQ ID NO: 167228 - DNA, 120 bp, Artificial Sequence
  ENSG00000108465_37 (sequence is synthesized)
tctagccctcatgtctcatttttgcatttcgagtagtccgagggcttagattctgagttcttctctcagtttgaaccaatttatcttctttttttctttcttcctttttttttaaaaaga

SEQ ID NO: 167229 - DNA, 90 bp, Artificial Sequence
  ENSG00000108465_38 (sequence is synthesized)
ttatcttctttttttctttcttcctttttttttaaaaagagtttctctgtcgcccagtctggagtgcagtgcagcaatcatagctcacta

SEQ ID NO: 167230 - DNA, 120 bp, Artificial Sequence
  ENSG00000108465_39 (sequence is synthesized)
cctcctgccttggcctcccacagtgctggaattgcaagtgtgagccatcatgtacagcctgaaccaatctttcttctgtcctcagcttgagatcttcttagcccagagagcagtggagtt

SEQ ID NO: 167231 - DNA, 120 bp, Artificial Sequence
  ENSG00000108465_40 (sequence is synthesized)
cttgagcagctctgcctccttgtattcctcctcttgttccatgaccccttaaaccccatccctgcctcctggccattgccatccactggggataggggttctctttgggacaagaggggg

SEQ ID NO: 167232 - DNA, 120 bp, Artificial Sequence
  ENSG00000108465_41 (sequence is synthesized)
aggtttcacatatacaggaagaatctgcttgcttcctgagtaggacaggggaactgggagtgggttttccttaaaaggaaagggtttaaggatgtgagggtaagcggccagttgggggtt

SEQ ID NO: 167233 - DNA, 120 bp, Artificial Sequence
  ENSG00000108465_42 (sequence is synthesized)
tggtttcccgagcctctcacctccccagcagctgaatgggaatgctcaggatgcacagctaacccagcactcacctgagtgccccgcacaggtatgtggaccgagtgactgaattcctcc

SEQ ID NO: 167234 - DNA, 120 bp, Artificial Sequence
  ENSG00000108465_43 (sequence is synthesized)
tgaaactttacctcctgcggtccaccagagcagagagccggcctttctacccctctgaacccagctctggtcctcctctcagtctgggagttggaaagtggtacctgattagagctgaga

SEQ ID NO: 167235 - DNA, 120 bp, Artificial Sequence
  ENSG00000108465_44 (sequence is synthesized)
ctcccccagagcctctgcagtcagcagaggcaggttctctcccagagcctctggctttgggacagcctccctggagtcagtagctgggcagaactgttctcaaacatccttctgctccac

SEQ ID NO: 167236 - DNA, 120 bp, Artificial Sequence
  ENSG00000108468_0 (sequence is synthesized)
gcgagcggcgggcagcgcagactgcgaggctcttttgttcggctgaggggagggccgttggccggggcctgcggtacgccgcttcagtgagggacgccactgcggccacccggcttgctg

SEQ ID NO: 167237 - DNA, 120 bp, Artificial Sequence
  ENSG00000108468_1 (sequence is synthesized)
ccttcctgggcgccactcccccaggcgacccgacgcgacgcgccagcagcgcagcaccgattcctctcgggctcttgggcgctgctctgagcagcgtcaccctttacaccagaaagctgg

SEQ ID NO: 167238 - DNA, 120 bp, Artificial Sequence
  ENSG00000108468_2 (sequence is synthesized)
cgggcactatggggaaaaaacaaaacaagaagaaagtggaggaggtgctagaagaggaggaagaggaatatgtggtggaaaaagttctcgaccgtcgagtggtaaagggcaaagtggagt

SEQ ID NO: 167239 - DNA, 120 bp, Artificial Sequence
  ENSG00000108468_3 (sequence is synthesized)
acctcctaaagtggaagggattctcagatgaggacaacacatgggagccagaagagaacctggattgccccgacctcattgctgagtttctgcagtcacagaaaacagcacatgagacag

SEQ ID NO: 167240 - DNA, 120 bp, Artificial Sequence
  ENSG00000108468_4 (sequence is synthesized)
ataaatcagagggaggcaagcgcaaagctgattctgattctgaagataagggagaggagagcaaaccaaagaagaagaaagaagagtcagaaaagccacgaggctttgctcgaggtttgg

SEQ ID NO: 167241 - DNA, 120 bp, Artificial Sequence
  ENSG00000108468_5 (sequence is synthesized)
agccggagcggattattggagctacagactccagtggagagctcatgttcctgatgaaatggaaaaactctgatgaggctgacctggtccctgccaaggaagccaatgtcaagtgcccac

SEQ ID NO: 167242 - DNA, 120 bp, Artificial Sequence
  ENSG00000108468_6 (sequence is synthesized)
aggttgtcatatccttctatgaggaaaggctgacgtggcattcctacccctcggaggatgatgacaaaaaagatgacaagaactaacgctcctgagtaccagcccctgtcacatctgact

SEQ ID NO: 167243 - DNA, 120 bp, Artificial Sequence
  ENSG00000108468_7 (sequence is synthesized)
gtgggtttcaagtgggaagggaaggagttctacttgtcttgacaccatagaggtggcttgagaagatgtcctttgaagagccagtatagtttctgtgccctgcagcagcccaagtgcttt

SEQ ID NO: 167244 - DNA, 120 bp, Artificial Sequence
  ENSG00000108468_8 (sequence is synthesized)
aaagccgtttcaagctgtatagtttgcacacccatcccagtggaggggaaaggggataagtgtttcaaggcaaccttttctgcactttgctgcgaaaagcaaagggccttctatgaagga

SEQ ID NO: 167245 - DNA, 120 bp, Artificial Sequence
  ENSG00000108468_9 (sequence is synthesized)
gtgggagagcaaaaaaatactgtagatcttcaaagagcatctccacaacccacagccttcttcccaatagtgttaactctgcatttttacagcgtagcatgtgtgtagtttttggctatt

SEQ ID NO: 167246 - DNA, 120 bp, Artificial Sequence
  ENSG00000108468_10 (sequence is synthesized)
actggtgtattatttgggggagggagggatggggaggggagaaagggagatgggtagcatcattttgattaacatttggggcctgataggggaaatggtgaagcaatggaaaagaacaga

SEQ ID NO: 167247 - DNA, 120 bp, Artificial Sequence
  ENSG00000108468_11 (sequence is synthesized)
caactaatgatttgcttctatgtccagaatattttacctttaaaaaaatgtcattggcaccataaataaggactgtgagagactgtttaaaagctgtgaaagtctgaaacctataagcca

SEQ ID NO: 167248 - DNA, 120 bp, Artificial Sequence
  ENSG00000108468_12 (sequence is synthesized)
aggtgttccctgcctaaacttattgctgttcccacaaaggactaagcctgttcataagttaccaaagttgccattttggagatggaaattgacgaggagggaaggtcttttattggagag

SEQ ID NO: 167249 - DNA, 120 bp, Artificial Sequence
  ENSG00000108468_13 (sequence is synthesized)
tatacagtacaagcagatcattctgccttagaggtgctaattcccgaaattagaagaccctttcttttccagtaacgaagttataaatatcagcttgttcatccaagccactggctgagg

SEQ ID NO: 167250 - DNA, 120 bp, Artificial Sequence
  ENSG00000108468_14 (sequence is synthesized)
tgttaggaagaggaagagggtggtagaggaggtaagacagtagggaaagacaagggcccatgctcttagtggggaaaactcttggagccgtttactttgagctttgaacactgaaaccat

SEQ ID NO: 167251 - DNA, 120 bp, Artificial Sequence
  ENSG00000108468_15 (sequence is synthesized)
tgttggcagggttcagtcactgacagcacaagtttcactgaattgatccaagagtttagtgatttcaaaagccttggtctcaggagaagattaaactttcatattgggcagtggttcact

SEQ ID NO: 167252 - DNA, 120 bp, Artificial Sequence
  ENSG00000108468_16 (sequence is synthesized)
ttaaaacacacacatacacacacaaaacaattttttaagaaatcctaataagtaacatacccaaaatgctctgtcttgagtcatgagaaccatcagttcttgatattgtctagacttgca

SEQ ID NO: 167253 - DNA, 120 bp, Artificial Sequence
  ENSG00000108468_17 (sequence is synthesized)
tctagagctacgttgtaaaattcttttaggcatgtgttagatttctgtgtaaactttgtttaaatgtaaacttcatactacattgtcagtttttgtcttaataaaactatagatttataa

SEQ ID NO: 167254 - DNA, 120 bp, Artificial Sequence
  ENSG00000108468_18 (sequence is synthesized)
gtgagggaacgcgctttcgaggcggaggttaggagcggggagcgcgcccgggtccagcgtcctgcttctccgcttcccgcgctgagctcttcgcctgtcgctgaggcgtcggtgccagct

SEQ ID NO: 167255 - DNA, 120 bp, Artificial Sequence
  ENSG00000108468_19 (sequence is synthesized)
gcgtgaaggatggagagggcggggcgcgaatcctgagccagagactgagtgcttgggggtgggccgagcacttgggggccgctcttcggggcccgggtggtctggaacaatgttgcttgg

SEQ ID NO: 167256 - DNA, 120 bp, Artificial Sequence
  ENSG00000108468_20 (sequence is synthesized)
ctgggcggctgcgggatagggcggaaggggacaggcttgaggcttggataggcgtgaggaggcgcatacgaccgcacaacccgaggtttgtaactgtattcggaagacgccgggtccggc

SEQ ID NO: 167257 - DNA, 120 bp, Artificial Sequence
  ENSG00000108468_21 (sequence is synthesized)
gccgcccttgcatcctgatgggtccttacagtggggaggctgtaagaataattcaagttttccatctggaaagcatttgcttcgcaaacagccacagcttacagactacaagcagtttag

SEQ ID NO: 167258 - DNA, 120 bp, Artificial Sequence
  ENSG00000108468_22 (sequence is synthesized)
ctacagactccagtggagagctcatgttcctgatgaaatggtgagtcggccagtggctctgtgtggttgttttttttcttctcccattggtttcatgccagaggaaaagagctggacctt

SEQ ID NO: 167259 - DNA, 120 bp, Artificial Sequence
  ENSG00000108468_23 (sequence is synthesized)
ctgcggccacccggcttgctgccttcctgggcgccactcccccaggcgacccgacgcgacgcgccagcagcgcagcaccgattcctctcgggctcttgggcgctgctctgagacggaggc

SEQ ID NO: 167260 - DNA, 82 bp, Artificial Sequence
  ENSG00000108468_24 (sequence is synthesized)
aggctcacaacactgtaacctccacctcccaggttgtagcaattcttctgcctctgcctcccaagtagctaggattacaggc

SEQ ID NO: 167261 - DNA, 120 bp, Artificial Sequence
  ENSG00000108469_0 (sequence is synthesized)
gaattcccagcgctttggcttctctgagttggggttgtgtataggggtcttcgaacagttccggaaccagccagcagcctttaattcttgggcggaccacggccggttctgtgttcttgg

SEQ ID NO: 167262 - DNA, 120 bp, Artificial Sequence
  ENSG00000108469_1 (sequence is synthesized)
ctaagatgagcagccaccataccacctttccttttgaccctgagcggcgagtccggagtacgctgaagaaggtctttgggtttgactcttttaagacgcctttacaggagagtgcgacca

SEQ ID NO: 167263 - DNA, 120 bp, Artificial Sequence
  ENSG00000108469_2 (sequence is synthesized)
tggctgtagtaaaaggtaacaaggacgtctttgtgtgcatgcccacaggggcaggaaaatccctatgctatcagctccctgctctgttggccaaaggcatcaccattgtagtctctcctc

SEQ ID NO: 167264 - DNA, 120 bp, Artificial Sequence
  ENSG00000108469_3 (sequence is synthesized)
tcattgctttgattcaggaccaagtggaccacttgctaaccctaaaggtacgagtaagttccctgaactcgaagctctctgcacaggaaaggaaggagctgcttgctgacctggagcgag

SEQ ID NO: 167265 - DNA, 120 bp, Artificial Sequence
  ENSG00000108469_4 (sequence is synthesized)
aaaagccccagaccaagattctgtacatcaccccagagatggcagcttcatcctccttccagcccaccctgaactccctggtgtcccgccacctgctgtcttacttggtggtggatgaag

SEQ ID NO: 167266 - DNA, 120 bp, Artificial Sequence
  ENSG00000108469_5 (sequence is synthesized)
ctcattgtgtttcccaatgggggcatgactttcgtcctgactacttgcgtctgggtgccctgcgctcccgcctgggacatgccccttgtgtggctctgaccgccacagccaccccacagg

SEQ ID NO: 167267 - DNA, 120 bp, Artificial Sequence
  ENSG00000108469_6 (sequence is synthesized)
tccaagaggacgtgtttgctgccctgcacctgaagaaaccagttgccatcttcaagactccctgcttccgggccaacctcttctatgatgtgcaattcaaggaactgatttctgatccct

SEQ ID NO: 167268 - DNA, 120 bp, Artificial Sequence
  ENSG00000108469_7 (sequence is synthesized)
atgggaacctgaaggacttctgccttaaggctcttggacaggaggctgataaagggttatctggctgcggcattgtgtactgcaggactagagaggcttgtgaacagctggccatagagc

SEQ ID NO: 167269 - DNA, 120 bp, Artificial Sequence
  ENSG00000108469_8 (sequence is synthesized)
tcagctgcaggggtgtgaacgccaaggcttaccatgcagggctgaaggcctctgaaagaacgctggtgcagaacgactggatggaggagaaggtccctgtaattgttgcaaccattagtt

SEQ ID NO: 167270 - DNA, 120 bp, Artificial Sequence
  ENSG00000108469_9 (sequence is synthesized)
ttgggatgggagtggataaagccaatgtcaggtttgtcgcccattggaatattgccaagtctatggctgggtactaccaggagtctggccgggctggcagggatgggaagccttcctggt

SEQ ID NO: 167271 - DNA, 120 bp, Artificial Sequence
  ENSG00000108469_10 (sequence is synthesized)
gccgtctctattactccaggaatgaccgggaccaagtcagcttcctgatcaggaaggaagtagcaaaactccaggaaaagagaggaaacaaagcatctgataaagccactatcatggcct

SEQ ID NO: 167272 - DNA, 120 bp, Artificial Sequence
  ENSG00000108469_11 (sequence is synthesized)
ttgatgccctggtgaccttctgtgaagaactggggtgccgccatgccgccattgccaagtacttcggggatgcgctgcctgcctgcgccaaaggctgcgaccactgccagaaccccacgg

SEQ ID NO: 167273 - DNA, 120 bp, Artificial Sequence
  ENSG00000108469_12 (sequence is synthesized)
ccgtgcggaggcggctggaggccttggagcgcagcagcagctggagcaagacctgcatcgggccctcccaggggaacggctttgaccccgagctgtatgagggaggccgcaagggctacg

SEQ ID NO: 167274 - DNA, 120 bp, Artificial Sequence
  ENSG00000108469_13 (sequence is synthesized)
gggacttcagcaggtatgacgaaggttctggaggcagcggggatgaaggcagagatgaggcccacaagcgggagtggaacctcttctatcagaagcagatgcagctgcgcaagggcaaag

SEQ ID NO: 167275 - DNA, 120 bp, Artificial Sequence
  ENSG00000108469_14 (sequence is synthesized)
accccaagatagaagaatttgtacccccagatgagaactgtcccctgaaagaggcttctagcaggaggatccccaggctgactgtgaaggcacgggagcactgcctgcggcttctggagg

SEQ ID NO: 167276 - DNA, 120 bp, Artificial Sequence
  ENSG00000108469_15 (sequence is synthesized)
agctggaacatgagacattccggaacgccaaggtggccaacctctacaaggccagcgtgctgaagaaggtggccgatatccacagagcctccaaggatgggcagccctatgacatgggag

SEQ ID NO: 167277 - DNA, 120 bp, Artificial Sequence
  ENSG00000108469_16 (sequence is synthesized)
gcagtgccaagagctgcagtgcccaagctgagcccccggagcccaatgagtatgacattccaccagcctcccatgtgtactcgctcaaacccaagcgggtgggagctggtttccccaaag

SEQ ID NO: 167278 - DNA, 120 bp, Artificial Sequence
  ENSG00000108469_17 (sequence is synthesized)
gctcctgcccgttccagacggccacggaactgatggagacaactcggatcagggagcaagccccccagcccgagcggggaggcgagcacgagcccccgagccggccctgtggcctcctgg

SEQ ID NO: 167279 - DNA, 120 bp, Artificial Sequence
  ENSG00000108469_18 (sequence is synthesized)
atgaggatgggagtgagcccctccctgggcccagaggggaggtccctggaggcagcgctcactatggggggccctcccctgagaagaaggcaaaaagttcctctgggggcagctcccttg

SEQ ID NO: 167280 - DNA, 120 bp, Artificial Sequence
  ENSG00000108469_19 (sequence is synthesized)
ccaagggccgggctagcaagaaacagcagctcctagccacagcggcccacaaggattctcagagcatcgcccgcttcttctgccgaagggtggaaagcccagctctgctggcatcagccc

SEQ ID NO: 167281 - DNA, 120 bp, Artificial Sequence
  ENSG00000108469_20 (sequence is synthesized)
cagaggcagaaggtgcctgcccctcctgtgagggggttcagggacccccgatggccccagagaagtacacaggggaggaagatggagccgggggacattcgcctgcccctccccagactg

SEQ ID NO: 167282 - DNA, 120 bp, Artificial Sequence
  ENSG00000108469_21 (sequence is synthesized)
aggagtgcctcagggagaggccaagcacctgcccgcccagagaccagggcacccctgaagtccagcccacccctgcaaaggacacatggaagggcaagcggcctcgatcccagcaggaga

SEQ ID NO: 167283 - DNA, 120 bp, Artificial Sequence
  ENSG00000108469_22 (sequence is synthesized)
acccagagagccagcctcagaagaggccacgcccctcagccaagccctccgtcgtagctgaggtcaagggcagcgtctcggccagcgaacagggcaccttgaatcccacggctcaagacc

SEQ ID NO: 167284 - DNA, 120 bp, Artificial Sequence
  ENSG00000108469_23 (sequence is synthesized)
ccttccagctctccgctcctggcgtctccttgaaggaggctgcaaatgttgtggtcaagtgcctcacccctttctacaaggagggcaagtttgcttccaaggagttgtttaaaggctttg

SEQ ID NO: 167285 - DNA, 120 bp, Artificial Sequence
  ENSG00000108469_24 (sequence is synthesized)
cccgccacctctcacacttgctgactcagaagacctctcctggaaggagcgtgaaagaagaggcccagaacctcatcaggcacttcttccatggccgggcccggtgcgagagcgaagctg

SEQ ID NO: 167286 - DNA, 120 bp, Artificial Sequence
  ENSG00000108469_25 (sequence is synthesized)
actggcatggcctgtgtggcccccagagatgaccaactgctggctgggcagggcccgcgtcctcccccagattctagcatgggtcatcctgggcctcacctgctgatgccagggccatcg

SEQ ID NO: 167287 - DNA, 120 bp, Artificial Sequence
  ENSG00000108469_26 (sequence is synthesized)
tcttttctcagtccttctcctttccaaccatacttggctttggggatgaccccagacaccccctgaatccaggtcagaggtcagcccacctttctttctgcttgcaaagcctatagaccc

SEQ ID NO: 167288 - DNA, 120 bp, Artificial Sequence
  ENSG00000108469_27 (sequence is synthesized)
ttctcagagcggtcctcatggctgggttttctgggacacatgtcgaggacagaaggtggagggtggtggagctgctgctggaagaaggggaaggaagagtggcccctccccgagttctaa

SEQ ID NO: 167289 - DNA, 120 bp, Artificial Sequence
  ENSG00000108469_28 (sequence is synthesized)
gtcaggatgaggcccacctgtccaaggtatcggaacctacccaggggaccctcagatcctccacccactcccccatccattacgatgccagcttccagccttgcccaggtcagagctgtg

SEQ ID NO: 167290 - DNA, 120 bp, Artificial Sequence
  ENSG00000108469_29 (sequence is synthesized)
gcagaggagaggcagccaggccctgttcctgctcagctcctgctcaggaaggccaggcctgacagatgtttgggagaggaataaagttgtgttgttgtggggcatgcaggcgtgcacaca

SEQ ID NO: 167291 - DNA, 120 bp, Artificial Sequence
  ENSG00000108469_30 (sequence is synthesized)
gagaaggggttcggggtcccggggtggaagaacggtcgtcgtggttgcgcttatagaagtaggagcaggtggtggatcttaggaaaacggttccccgttctccaagctgttctgaagaca

SEQ ID NO: 167292 - DNA, 120 bp, Artificial Sequence
  ENSG00000108469_31 (sequence is synthesized)
tttatgtttcttctcttgatctgatttctagctctgtgctataccgtggcctggaatagttcaatgttttcattttcattgagcgtaaaagtggagatgttaattactgaggaatgtatt

SEQ ID NO: 167293 - DNA, 120 bp, Artificial Sequence
  ENSG00000108469_32 (sequence is synthesized)
gcttgaggcagttcaccttcagctttattacttaaaaataatacattatttaagtgtaatatagcaaattgttacagaaaaataatctgtatttttaatgcaaaacagagggttctcgtg

SEQ ID NO: 167294 - DNA, 120 bp, Artificial Sequence
  ENSG00000108469_33 (sequence is synthesized)
cactgggcgtctgaagctcagagctcacccctgagatgggctctcctaggcctcctgggatgagggagccaccaggacccagtgctgtgatgcctgctcttccctctaccagcacctgcc

SEQ ID NO: 167295 - DNA, 120 bp, Artificial Sequence
  ENSG00000108469_34 (sequence is synthesized)
ggggcgatggggcaggggccacggaaagagtctgagggctgcttggtgtagtcaggttgtgtccaggcatgcggagctgtgagtgcctgcaggagagacacccaggaggagtttttacat

SEQ ID NO: 167296 - DNA, 120 bp, Artificial Sequence
  ENSG00000108469_35 (sequence is synthesized)
tttggtctaaaaagctcttggattcatctcatctcatggaatgatcctgtcggatgacgctgacgtgattgcttcagacttagaggtgaataaattgaggtccagagaggtcacagtcac

SEQ ID NO: 167297 - DNA, 120 bp, Artificial Sequence
  ENSG00000108469_36 (sequence is synthesized)
gaagctcatggtagactgaggccactaaacacccgtctcctgattttcagtggcgtcctcatttgcatacacctgggccatcttggtttttgcaagaaaaaagcgaggaaatcagagaaa

SEQ ID NO: 167298 - DNA, 120 bp, Artificial Sequence
  ENSG00000108469_37 (sequence is synthesized)
acagctcagggtggaggaagccggtgaggacagtgagaccaagggcttgcttcgggggctgccggccaaggcggcggctggtggtggtttctggcttcgctgttccattcccttgtcttg

SEQ ID NO: 167299 - DNA, 120 bp, Artificial Sequence
  ENSG00000108469_38 (sequence is synthesized)
aggtctcagccggttctcgctgagatggctacgtcagtgaggccagtcactcccggtgccgctgccttggcagagctggtttagaaccaccgtgaaggtcatcgaacggggccctccacc

SEQ ID NO: 167300 - DNA, 120 bp, Artificial Sequence
  ENSG00000108469_39 (sequence is synthesized)
tccccggcacgccctagttaagcagctgacataagacagcccgtaggctaccaagggacacctgcctgcaaaggctgttgtgtcgggcagtgtggaagtcaggaccttgctcttctctat

SEQ ID NO: 167301 - DNA, 120 bp, Artificial Sequence
  ENSG00000108469_40 (sequence is synthesized)
tggaggccccgggatctctcgcagtgtggggatttgctcagtattctgagtggtgtccttccctccactccaccctcttctgggatggctggccccacaagccactcagttccaagggat

SEQ ID NO: 167302 - DNA, 120 bp, Artificial Sequence
  ENSG00000108469_41 (sequence is synthesized)
gtgaccagctctgagccatcggctttgtggtcatcatgtgccaccgagctgggacttctggcatcacttgagtagtcctcacccttatccaggacccacacagaagcctgtggccccact

SEQ ID NO: 167303 - DNA, 120 bp, Artificial Sequence
  ENSG00000108469_42 (sequence is synthesized)
cttctggactgaagctattttcttctccaaactgctgtctctaatttggcctctgtggcaagaccacgcccagcaaaagtggtcggctgcagtgccaggaccacccttgcctgcagcctt

SEQ ID NO: 167304 - DNA, 120 bp, Artificial Sequence
  ENSG00000108469_43 (sequence is synthesized)
tgcgaccagagcccttttcaagcacaattaatatgggagttgctaaatttggccttcttaggcttcttgagcagagctcttatttctggtgaggaatgaaagggccaagtgttcctgttc

SEQ ID NO: 167305 - DNA, 120 bp, Artificial Sequence
  ENSG00000108469_44 (sequence is synthesized)
attgtgagtcctgtttgctgaaaaaagctctggggctgtctgaggctctggaatgctctctggagggttaactctgcctgtccccagggtctgctccgcctgccaggcaagggaacaggt

SEQ ID NO: 167306 - DNA, 120 bp, Artificial Sequence
  ENSG00000108469_45 (sequence is synthesized)
cctcccaagggcctctgccttcatttctcctgtcaccttccggggagctgggacttcttagtgcatcagtggcctggttgccaggggctggggtccaggcatctgtggactcaaggagtc

SEQ ID NO: 167307 - DNA, 120 bp, Artificial Sequence
  ENSG00000108469_46 (sequence is synthesized)
caggtgacggtgttgcgctgcctcttgagcagcctcgtgcctgtctcctttgctacatgtgatgattctgaaatccaggcagcaggctggaataaacgctgctggtatgtctgtattggc

SEQ ID NO: 167308 - DNA, 120 bp, Artificial Sequence
  ENSG00000108469_47 (sequence is synthesized)
tactgttctttgaataagtgaatgtttctttattgcataactggcgtgtagcacaaagaaaaagccccttctccaccagatatttgcttcctaagaatagttctcattggaggctgaggt

SEQ ID NO: 167309 - DNA, 120 bp, Artificial Sequence
  ENSG00000108469_48 (sequence is synthesized)
cgaagcagcctcccaccagcgatcccttggggcgggcacctggcagtgagggacagagctagtggggtgggctcagcagaagtgggtgcatttctgcaaaggaagctgtaggtttcttgt

SEQ ID NO: 167310 - DNA, 120 bp, Artificial Sequence
  ENSG00000108469_49 (sequence is synthesized)
cagtttgttgtggggtctgaggcacatgggagtgggaccagcagaaaagatactcaggtcagttaactaatgaggcggggctgtggcagccagcggttttcctctcttctctatctgtag

SEQ ID NO: 167311 - DNA, 120 bp, Artificial Sequence
  ENSG00000108469_50 (sequence is synthesized)
ctactttctctgggctgcagccttgaaaaagcagtgtttgattattcataacaatgagtgtcttttagtgtcacagggaacagttattaggtttgaagcaacctccagcttgaggcctcg

SEQ ID NO: 167312 - DNA, 120 bp, Artificial Sequence
  ENSG00000108469_51 (sequence is synthesized)
gcatcttgagatggaagagcagccttgtgtttagacctggattgaattgggccctgttgtttcctgggatcttggggctgggggtgcccaacagcctggcatcttcttgtttctctgtgt

SEQ ID NO: 167313 - DNA, 120 bp, Artificial Sequence
  ENSG00000108469_52 (sequence is synthesized)
gtttactcattcattcatttattcagctgataaatattgactgatgccagctctgtgccaggcacattggacatgggggatacactagtgggcagaaatagccccgtcccagagccggcc

SEQ ID NO: 167314 - DNA, 78 bp, Artificial Sequence
  ENSG00000108469_53 (sequence is synthesized)
tacactagtgggcagaaatagccccgtcccagagccggccatggtggctcatacctgttattgggagttcaagaccag

SEQ ID NO: 167315 - DNA, 120 bp, Artificial Sequence
  ENSG00000108469_54 (sequence is synthesized)
tgcccttcaggagcaagatggcagccggcatgtaccttctggatttccttctctgccaggggcctgctctagtgttttcagctgctcctccttgaatgccacctccacttcttccttttg

SEQ ID NO: 167316 - DNA, 120 bp, Artificial Sequence
  ENSG00000108469_55 (sequence is synthesized)
tgacatgaacaggttgcttcatgtctctgatatggaatgagatgcccgtgttttgaggctattgggaggactgaccatctagcagcacattgtagacagccataggggggtgcccggcac

SEQ ID NO: 167317 - DNA, 120 bp, Artificial Sequence
  ENSG00000108469_56 (sequence is synthesized)
acgagaatgcccccccgggacgggtctcactggctttgggggctgtcacccccgtgcaccgtcactagcacccccaacaccttttgggtgtctgtcctagggtgtctgcggtgtgtgccc

SEQ ID NO: 167318 - DNA, 120 bp, Artificial Sequence
  ENSG00000108469_57 (sequence is synthesized)
cacgtaccgctgatgagtgagttccacgatcactgggctgaggagcactccaagctctcgttcccttggagactgcaggaccctgtcaaccctggcctgtttgggccacctctccccaga

SEQ ID NO: 167319 - DNA, 120 bp, Artificial Sequence
  ENSG00000108469_58 (sequence is synthesized)
ttgtacctctcctactccaggggactgcccctacaaccccaccagggccaggcatggctacaacttaggtgctaccagcagctgctgagggacagtaagccacagggtgctcagagagcc

SEQ ID NO: 167320 - DNA, 120 bp, Artificial Sequence
  ENSG00000108469_59 (sequence is synthesized)
tctgtggccattgccactcacctgggagctcaggtgttgggggctgagcagcagtgccccagcgcggagcctccacgtgctgtcctcgtacttccttcgtgggcgccgctgctcccctgg

SEQ ID NO: 167321 - DNA, 120 bp, Artificial Sequence
  ENSG00000108469_60 (sequence is synthesized)
gcgcctcagcccagctcctctgctgacagccagctgctgtctctgcctggcttttttgttgttggtcgtcctggagatccaagtgtcaaattaccgtcgcgagggggagcccgaggaagc

SEQ ID NO: 167322 - DNA, 120 bp, Artificial Sequence
  ENSG00000108469_61 (sequence is synthesized)
cctgcttgggaacttgtcctccaacttcatgtcccggtgcctcacctctgccctgagagcgctgctcagggacaagacaagctccctctctcctcctccttcctcctcctctccctctcc

SEQ ID NO: 167323 - DNA, 120 bp, Artificial Sequence
  ENSG00000108469_62 (sequence is synthesized)
ccgactcccacgccgtgggctgggcctgggttgggagctgaagaaagaagtcggctctctgccttcctggccaggaggaccctggggaggctccacctgagcctgtggaggggagtcctg

SEQ ID NO: 167324 - DNA, 120 bp, Artificial Sequence
  ENSG00000108469_63 (sequence is synthesized)
cagcgctctcaggtctggggcacccaccctgccctcaggaaggccaccccttctgtccctctggccactccctggctggtccctccctctggcctctctcaggaacaacagtaaacagtg

SEQ ID NO: 167325 - DNA, 120 bp, Artificial Sequence
  ENSG00000108469_64 (sequence is synthesized)
gggagctggtggccctctcaagctgagcaggaggctttgcaaccagtccctggggaggcccttgtgccgctcagcatctgaaggcgtcttgggggagaacttggaatcctgagtgacctg

SEQ ID NO: 167326 - DNA, 120 bp, Artificial Sequence
  ENSG00000108469_65 (sequence is synthesized)
cctgtgaccaggaaaggcttcacttcccctctgccctcaggggtgcacctcttgccaaggcctggctccccaccagggtcctgcctgcctcttccctcccacactcctgagagccccgtc

SEQ ID NO: 167327 - DNA, 120 bp, Artificial Sequence
  ENSG00000108469_66 (sequence is synthesized)
ggcaggaggcaacaccctgtctgctaccattagcaccttccagagcccacctcccctgcccagccgtaccctgctctgccccatctgggatgctgtgctcaggcatgagctggcagggcc

SEQ ID NO: 167328 - DNA, 120 bp, Artificial Sequence
  ENSG00000108474_0 (sequence is synthesized)
agtgctgcttacccatcatggaagcaatgtggctcctgtgtgtggcgttggcggtcttggcatggggcttcctctgggtttgggactcctcagaacgaatgaagagtcgggagcagggag

SEQ ID NO: 167329 - DNA, 120 bp, Artificial Sequence
  ENSG00000108474_1 (sequence is synthesized)
gacggctgggagccgaaagccggaccctgctggtcatagcgcaccctgacgatgaagccatgttttttgctcccacagtgctaggcttggcccgcctaaggcactgggtgtacctgcttt

SEQ ID NO: 167330 - DNA, 120 bp, Artificial Sequence
  ENSG00000108474_2 (sequence is synthesized)
gcttctctgcaggaaattactacaatcaaggagagactcgtaagaaagaacttttgcagagctgtgatgttttggggattccactctccagtgtaatgattattgacaacagggatttcc

SEQ ID NO: 167331 - DNA, 120 bp, Artificial Sequence
  ENSG00000108474_3 (sequence is synthesized)
cagatgacccaggcatgcagtgggacacagagcacgtggccagagtcctccttcagcacatagaagtgaatggcatcaatctggtggtgactttcgatgcagggggagtaagtggccaca

SEQ ID NO: 167332 - DNA, 120 bp, Artificial Sequence
  ENSG00000108474_4 (sequence is synthesized)
gcaatcacattgctctgtatgcagctgtgagggccctgcactcagaagggaagttacctaaagggtgctctgtgctcacgcttcagtctgtgaatgtgctgcgcaagtacatctcccttc

SEQ ID NO: 167333 - DNA, 120 bp, Artificial Sequence
  ENSG00000108474_5 (sequence is synthesized)
tgccaccgcagccagctcctctggttccgccgcctctacattatcttctcccggtacatgagaatcaactcactgagcttcctctgaagccttgaagggttttcagatccaaggaacaaa

SEQ ID NO: 167334 - DNA, 120 bp, Artificial Sequence
  ENSG00000108474_6 (sequence is synthesized)
ggggaaaatagacaaaggagtgcagaggacctggcctggcactggcttatttacctgagctcaaggagatccccgctggagcagcctctgcaaaagggagcccatgtaggccaggggctg

SEQ ID NO: 167335 - DNA, 120 bp, Artificial Sequence
  ENSG00000108474_7 (sequence is synthesized)
tccaaactccagcttcttcccctgggaaaaaacccaaagaaccaaaaacaaaccaccccaaggataataatagctacactgctagcttctcaagttcttgtgaaaaacaatttacataat

SEQ ID NO: 167336 - DNA, 120 bp, Artificial Sequence
  ENSG00000108474_8 (sequence is synthesized)
gacacagtagatgtggaacacctagcccagtgcctgggcaggtccctattatcataaatgaacataaaagtgctctaaaaacactccacagatgtgacttttacattgtttccaaagcag

SEQ ID NO: 167337 - DNA, 120 bp, Artificial Sequence
  ENSG00000108474_9 (sequence is synthesized)
gttcaccaaaaacacatacacaaaatgcaacagtgtgtgttgaattggttcaatcataattcctttgatttttcttgtatcagaatgtgggtctaggaaaaacttgctctatttaacagg

SEQ ID NO: 167338 - DNA, 120 bp, Artificial Sequence
  ENSG00000108474_10 (sequence is synthesized)
ggttaagggactttgccaagtctgtcaattcttgactgacagagctggaaccaggtctctaaactcccaatacagtaattcctgtctcctttacttcctttggctttgaggtagccagat

SEQ ID NO: 167339 - DNA, 120 bp, Artificial Sequence
  ENSG00000108474_11 (sequence is synthesized)
ctcaacctctagcagccaacctttttctggtagggcacaccgcagggtagagggtagccagccaggtcttctatggcccttttactcgttctagctgcaagaatcatgggcacagggcag

SEQ ID NO: 167340 - DNA, 120 bp, Artificial Sequence
  ENSG00000108474_12 (sequence is synthesized)
gcaatgctgtggccactgtcctgccctgccctgagccacagggtagagggaggatgctcaggggaaaatctggctggaggcctcaaggcttatcacttcaccctgtctcctctccatcca

SEQ ID NO: 167341 - DNA, 120 bp, Artificial Sequence
  ENSG00000108474_13 (sequence is synthesized)
tcagcacatagaagtgaatggcatcaatctggtaagggggcagctccctgaatggaaaacctgaggtcttggtcccattcacaccaggtggtttctgtaattttttctgtggccaccctc

SEQ ID NO: 167342 - DNA, 120 bp, Artificial Sequence
  ENSG00000108474_14 (sequence is synthesized)
ccacttccagtccttctccagggccactctctaaggaggccagaacttccaatgctcaccattaaacctactgaagaacaaacacaccttttgatatctttacgatcttgtgtgagactg

SEQ ID NO: 167343 - DNA, 120 bp, Artificial Sequence
  ENSG00000108474_15 (sequence is synthesized)
cagagaactgaacaagataatacatgaaggtgcatatcaaagagtctcacatgctctgctggatcacacaaaagttgggaagagaaggatgtcaattagactacatcaaaatctgggcag

SEQ ID NO: 167344 - DNA, 120 bp, Artificial Sequence
  ENSG00000108474_16 (sequence is synthesized)
ctggtagctggagcaaactgcagagatcaagatgaccctagtcaacggaaccagcagcccagcaacaccagctctaccagcaccagtgaataagaatcacaacctggatgggctccaagt

SEQ ID NO: 167345 - DNA, 120 bp, Artificial Sequence
  ENSG00000108474_17 (sequence is synthesized)
ccaacttcaccacattcagatatgggattcagaaaagtttcaccggagcccgactcacattctatcatgtggaaagcgctctgctgaggagccctgttcctctaagatacgcatgtgaca

SEQ ID NO: 167346 - DNA, 120 bp, Artificial Sequence
  ENSG00000108474_18 (sequence is synthesized)
agtcagtcatcagattatagtagcctgggaatggggtgaatacaggcttgaagtggactagtatctatttccaaggaggcccaatctattgggttggagtgcaacggtgcgatctcggct

SEQ ID NO: 167347 - DNA, 120 bp, Artificial Sequence
  ENSG00000108474_19 (sequence is synthesized)
tctgagaaacttatgagggggaaatttgcaaatccacagagagctgccctcagccgagcagaggcagtggttggggaggccgccacactcttcctgactcacctcaaggtacctggcagg

SEQ ID NO: 167348 - DNA, 120 bp, Artificial Sequence
  ENSG00000108474_20 (sequence is synthesized)
ttgtatctaccagcaagtgcctgcctgcagggccacctctggatgagtggggaggccaggtttgcccctcaacctgtctagctttttcacagggtggatgttttacacctctggtattct

SEQ ID NO: 167349 - DNA, 120 bp, Artificial Sequence
  ENSG00000108474_21 (sequence is synthesized)
tccagtctgaactcaatcccatcccccaaccaattaggcaggttgtaaatgactgctgggtgcttgatgaaccaatctgcctgagttaggaactcttcctaacccacataaagtatttga

SEQ ID NO: 167350 - DNA, 120 bp, Artificial Sequence
  ENSG00000108474_22 (sequence is synthesized)
ggctgaggtggtgactttcgatgcagggggagtaagtggccacagcaatcacattgctctgtatgcagctgtgagggtgctctgtgctcacgcttcagtctgtgaatgtgctgcgcaagt

SEQ ID NO: 167351 - DNA, 120 bp, Artificial Sequence
  ENSG00000108474_23 (sequence is synthesized)
catgcttagcctctctggaccagtttctggtctgtcatacctcaccggcgcaatacgaagattcaatgaatgaaaacgtaagtagtttgtgccctttctatgtgggatgactgaaaggag

SEQ ID NO: 167352 - DNA, 120 bp, Artificial Sequence
  ENSG00000108474_24 (sequence is synthesized)
cttaccaagccatgatgactttggaacatgactatagtttgtttgattcttatatcaatcctgtgagacaggcaggtctcacactatcaacaccaatttacagattagaaaactgagact

SEQ ID NO: 167353 - DNA, 120 bp, Artificial Sequence
  ENSG00000108474_25 (sequence is synthesized)
acaccgaaggtcttacctctgaacccctcacagcctagggacaggagcggccggcttacctggtgggttgggggacgtcggcagctcgcgtactacgccagcaggattgaggagcagaga

SEQ ID NO: 167354 - DNA, 120 bp, Artificial Sequence
  ENSG00000108474_26 (sequence is synthesized)
ccacctgtacttgttattctgtggaacttttttttatttgtagaaggagcaagaatattgaccttactatatagcacacgaaacaatctatgctgtatcgtgcctgctcaatccttaaag

SEQ ID NO: 167355 - DNA, 120 bp, Artificial Sequence
  ENSG00000108474_27 (sequence is synthesized)
ttaacttctaatgatagtaaaagaccttcctgctgcctttaaaatgcagcttgtgctagtaacatgcatgtgtcaaattgaagaattagacatagatgactagatagaaagtaattttgt

SEQ ID NO: 167356 - DNA, 120 bp, Artificial Sequence
  ENSG00000108474_28 (sequence is synthesized)
aggtaattttagagttcaactccacccagctttcagtgaaggaacctttcaaataatagatttttgcttaccatagagaaaagatcaaatgacaaagcaaatattgaccattaagctgga

SEQ ID NO: 167357 - DNA, 120 bp, Artificial Sequence
  ENSG00000108474_29 (sequence is synthesized)
atatggtgataattgaacagttgtataaatgaagtaattgaattgtacacatacaatgggtgaattttatggcatgtcaaagtatacctcaataaagctatttttttaaattgcccatga

SEQ ID NO: 167358 - DNA, 120 bp, Artificial Sequence
  ENSG00000108474_30 (sequence is synthesized)
catcaatctgaaagacagagcaaattccagattgtgagcagccacctgcatcctctatgcctgagcggcccagccatgagagccagccgaccccacagatgatgcccctttcagcaccat

SEQ ID NO: 167359 - DNA, 120 bp, Artificial Sequence
  ENSG00000108474_31 (sequence is synthesized)
ctctgcctcaaagagcttacaatcaaatatgtcagctctcagtctttttggagaagtaggaagtaggaagataaatctgagacttaaaaaaacacaaaacattcaagaacctgatgtctt

SEQ ID NO: 167360 - DNA, 120 bp, Artificial Sequence
  ENSG00000108474_32 (sequence is synthesized)
aaaattgtcctacgaacaaaagctctctgaaagctctggcttggaaactactctcagaatccagctaacgctccagggaagtggcctgagtcagggaagctaagtggtgaagagcacagg

SEQ ID NO: 167361 - DNA, 120 bp, Artificial Sequence
  ENSG00000108474_33 (sequence is synthesized)
aggaagtgtgcccagaatagccagagaacttatttctaagagaattgatcctaaagaagaaatttctaaattgtcaaaaatgtataccaaggaggttcaccagtgttgttgataatcaga

SEQ ID NO: 167362 - DNA, 120 bp, Artificial Sequence
  ENSG00000108474_34 (sequence is synthesized)
gtggccactgtcctgccctgccctgagccactgctccgggcctcaaatactaaatatttttatgagctaggcacgaaggagagaacactaaacaagatacagcagacacgattgctaccc

SEQ ID NO: 167363 - DNA, 120 bp, Artificial Sequence
  ENSG00000108474_35 (sequence is synthesized)
ttaccgaccttaacaatttactcaaataataattaattatgattgtgataaaggaggtacaggctgctatgaaaaataagactgtgtactcaatcaagtccagaggtccagaagagcctt

SEQ ID NO: 167364 - DNA, 120 bp, Artificial Sequence
  ENSG00000108474_36 (sequence is synthesized)
ttgagaaacttaataaaggctcttatatttttgctctatttctttccagtattcttcatacacatgcgttttacatagttgtaatacacattacatagaattttttttttttgagaggga

SEQ ID NO: 167365 - DNA, 76 bp, Artificial Sequence
  ENSG00000108474_37 (sequence is synthesized)
agaattttttttttttgagagttcagcccaccgcaacctccacctccagggttcaaatgattctcctgcctcagcc

SEQ ID NO: 167366 - DNA, 120 bp, Artificial Sequence
  ENSG00000108474_38 (sequence is synthesized)
caggcatgagccacctcacccagcctacatacaattttaaccctttaaagcttatatataagccaaactcagaaatgaacattaagatctgataaatgtcttaaaatcgctttccaaaag

SEQ ID NO: 167367 - DNA, 120 bp, Artificial Sequence
  ENSG00000108474_39 (sequence is synthesized)
tccaaaaggattgaacacccttacccgataaataaatgagaaaacatttcactgtacagtctcaggcaataattataggaaaaatagctcactgcagttttaatttgcatgattaagact

SEQ ID NO: 167368 - DNA, 120 bp, Artificial Sequence
  ENSG00000108474_40 (sequence is synthesized)
gatcattttttcatgtttctttacgtttatgtattttaattttttctgcacacataatgcttattgtaaaaactccaaacttcacactatttgagagtgctcaaagtgaaagcctcctgt

SEQ ID NO: 167369 - DNA, 120 bp, Artificial Sequence
  ENSG00000108474_41 (sequence is synthesized)
aatctttacacccagagggatctacagttaattatttgttatatattcccccaaacttttttctacacaatattttaacgaaaatggtacagttatacacactttttgaatataatttag

SEQ ID NO: 167370 - DNA, 120 bp, Artificial Sequence
  ENSG00000108474_42 (sequence is synthesized)
tagactttataagtacaaagtcatggcaatctagtgggagaaaaacagcttttttatgtcaatattttaaaactttttcttgaccatttatcagtttgtcttaaaataaaaatttatctc

SEQ ID NO: 167371 - DNA, 120 bp, Artificial Sequence
  ENSG00000108479_0 (sequence is synthesized)
gctggcgggaatgtgcgcacccccgcgcggggccccgcccgagcatcccgcgccgacggggctgtgccggagcagctgtgcagagctgcaggcgcgcgtcatggctgctttgagacagcc

SEQ ID NO: 167372 - DNA, 120 bp, Artificial Sequence
  ENSG00000108479_1 (sequence is synthesized)
ccaggtcgcggagctgctggccgaggcccggcgagccttccgggaggagttcggggccgagcccgagctggccgtgtcagcgccgggccgcgtcaacctcatcggggaacacacggacta

SEQ ID NO: 167373 - DNA, 120 bp, Artificial Sequence
  ENSG00000108479_2 (sequence is synthesized)
caaccagggcctggtgctgcctatggctctggagctcatgacggtgctggtgggcagcccccgcaaggatgggctggtgtctctcctcaccacctctgagggtgccgatgagccccagcg

SEQ ID NO: 167374 - DNA, 120 bp, Artificial Sequence
  ENSG00000108479_3 (sequence is synthesized)
gctgcagtttccactgcccacagcccagcgctcgctggagcctgggactcctcggtgggccaactatgtcaagggagtgattcagtactacccagctgcccccctccctggcttcagtgc

SEQ ID NO: 167375 - DNA, 120 bp, Artificial Sequence
  ENSG00000108479_4 (sequence is synthesized)
agtggtggtcagctcagtgcccctggggggtggcctgtccagctcagcatccttggaagtggccacgtacaccttcctccagcagctctgtccagactcgggcacaatagctgcccgcgc

SEQ ID NO: 167376 - DNA, 120 bp, Artificial Sequence
  ENSG00000108479_5 (sequence is synthesized)
ccaggtgtgtcagcaggccgagcacagcttcgcagggatgccctgtggcatcatggaccagttcatctcacttatgggacagaaaggccacgcgctgctcattgactgcaggtccttgga

SEQ ID NO: 167377 - DNA, 120 bp, Artificial Sequence
  ENSG00000108479_6 (sequence is synthesized)
gcctggtgccactctcggaccccaagctggccgtgctcatcaccaactctaatgtccgccactccctggcctccagcgagtaccctgtgcggcggcgccaatgtgaagaagtggcccggg

SEQ ID NO: 167378 - DNA, 120 bp, Artificial Sequence
  ENSG00000108479_7 (sequence is synthesized)
cgctgggcaaggaaagcctccgggaggtacaactggaagagctagaggctgccagggacctggtgagcaaagagggcttccggcgggcccggcacgtggtgggggagattcggcgcacgg

SEQ ID NO: 167379 - DNA, 120 bp, Artificial Sequence
  ENSG00000108479_8 (sequence is synthesized)
cccaggcagcggccgccctgagacgtggcgactacagagcctttggccgcctcatggtggagagccaccgctcactcagagacgactatgaggtgagctgcccagagctggaccagctgg

SEQ ID NO: 167380 - DNA, 120 bp, Artificial Sequence
  ENSG00000108479_9 (sequence is synthesized)
tggaggctgcgcttgctgtgcctggggtttatggcagccgcatgacgggcggtggcttcggtggctgcacggtgacactgctggaggcctccgctgctccccacgccatgcggcacatcc

SEQ ID NO: 167381 - DNA, 120 bp, Artificial Sequence
  ENSG00000108479_10 (sequence is synthesized)
aggagcactacggcgggactgccaccttctacctctctcaagcagccgatggagccaaggtgctgtgcttgtgaggcacccccaggacagcacacgacggagtctggctctgtcaccctg

SEQ ID NO: 167382 - DNA, 79 bp, Artificial Sequence
  ENSG00000108479_11 (sequence is synthesized)
cccaggacagcacacgacggagtctggctctgtcaccctgtctggagtgcggtaacacgatctcggttcactgcaacct

SEQ ID NO: 167383 - DNA, 120 bp, Artificial Sequence
  ENSG00000108479_12 (sequence is synthesized)
ggccagtcccacggctctgtgcccggtgccatcttccatatccgggtgctcaataaacttgtgcctccaatgtggtacctgcctcctctagaggtgggtgtatgcttgggtgtcagagaa

SEQ ID NO: 167384 - DNA, 120 bp, Artificial Sequence
  ENSG00000108479_13 (sequence is synthesized)
gggatgccctgtggcatcatggaccagttcatctcacttatgggacagaaaggccacgcgctgctcattgactgcagcgagtaccctgtgcggcggcgccaatgtgaagaagtggcccgg

SEQ ID NO: 167385 - DNA, 120 bp, Artificial Sequence
  ENSG00000108479_14 (sequence is synthesized)
cggccgccctgagacgtggcgactacagagcctttggccgcctcatggtggagagccaccgctcactcaggtgaggccctctgggcgccccgctcctgccgggcacaggccggcccaggc

SEQ ID NO: 167386 - DNA, 120 bp, Artificial Sequence
  ENSG00000108479_15 (sequence is synthesized)
ccagccctccttccctgaggtctccaggtggtcccagcttctactatgccttatggagggggtggcagggactctccctggagtgtcattgaagccactgctgcttccaccagccctagc

SEQ ID NO: 167387 - DNA, 120 bp, Artificial Sequence
  ENSG00000108479_16 (sequence is synthesized)
tcgtcccctcccgccctgcactcagcagctcctgggtgggagtgtgcccactgcctggcgcagcaagcacacgcttggcctcgtcatctcccccattgtaactccaccccaggtccttgg

SEQ ID NO: 167388 - DNA, 120 bp, Artificial Sequence
  ENSG00000108479_17 (sequence is synthesized)
atactaggagtgccacctcacagccacagagcccattcatttgtctgatacactgtggggaaggcttgtagagtggagcatcccattgtacagatgaggaaactgatgcccccagaaggt

SEQ ID NO: 167389 - DNA, 120 bp, Artificial Sequence
  ENSG00000108479_18 (sequence is synthesized)
cgggaacttgccctgggtttcccgtgacctgattggaggagccaggatttgaaccccagccttttttccctccagagccctaaaccaggaggacaattagaagtgtcccagcaacctcag

SEQ ID NO: 167390 - DNA, 120 bp, Artificial Sequence
  ENSG00000108479_19 (sequence is synthesized)
agggtgggaaaatggagggcagtgggtcccttggcccagcaggttggtggcttctgacaattgagacacacaccctagaaacagctgctaggccgttgctgcccttcccgccaggacacc

SEQ ID NO: 167391 - DNA, 120 bp, Artificial Sequence
  ENSG00000108479_20 (sequence is synthesized)
tgcccttcctgtgccatcctcccaggcagcccctcttaccatcacctgttctttcccctgcagctgcccccctccctggcttcagtgcagtggtggtcagctcagtgcccctggggggtg

SEQ ID NO: 167392 - DNA, 120 bp, Artificial Sequence
  ENSG00000108506_0 (sequence is synthesized)
ctctgcctttcctctcgcagccacccttcctctcagaccagtacggtggccgacgggagtcagacgctggggatgaatgaaggatcaacaaacagtaataatgactgaatgtacaagtct

SEQ ID NO: 167393 - DNA, 120 bp, Artificial Sequence
  ENSG00000108506_1 (sequence is synthesized)
tcagtttgtcagcccttttgcttttgaggcaatgcagaaggtggatgttgtttgcctggcatctttaagtgatccagaattaagacttcttctgccctgtttggtacggatggcactttg

SEQ ID NO: 167394 - DNA, 120 bp, Artificial Sequence
  ENSG00000108506_2 (sequence is synthesized)
tgcacctgctgaccagagccaaagctgggctcaggataagaaactcatccttcgccttctttctggagtggaagctgtcaactccattgttgcattgttgtccgtggactttcatgcttt

SEQ ID NO: 167395 - DNA, 120 bp, Artificial Sequence
  ENSG00000108506_3 (sequence is synthesized)
agaacaagatgccagcaaagaacagcagcttaggcataaacttggaggaggcagtggagagagcatcctggtatcacagcttcagcatggactgacgttagagtttgaacacagtgattc

SEQ ID NO: 167396 - DNA, 120 bp, Artificial Sequence
  ENSG00000108506_4 (sequence is synthesized)
acctcgtcgattgcgtcttgtgcttagtgaactgttggcaattatgaacaaggtgtctgagtccaacggagaattttttttcaagtcttctgaactttttgagagtccagtatatttgga

SEQ ID NO: 167397 - DNA, 120 bp, Artificial Sequence
  ENSG00000108506_5 (sequence is synthesized)
ggaagctgcagatgtactttgtattttacaagcagagctcccttccttgctccctatagttgatgtagctgaagctttgctacatgttagaaatggtgcctggttcttgtgtctcttggt

SEQ ID NO: 167398 - DNA, 120 bp, Artificial Sequence
  ENSG00000108506_6 (sequence is synthesized)
ggccaatgttcctgatagttttaatgaagtttgtaggggcctgataaaaaatggagaacgacaagatgaagaaagtcttggaggaaggcgcaggacagatgccttacgcttcttgtgtaa

SEQ ID NO: 167399 - DNA, 120 bp, Artificial Sequence
  ENSG00000108506_7 (sequence is synthesized)
aatgaatccttctcaggccctcaaggtccgaggcatggtggtggaagaatgtcacttgccaggccttggtgtggctttgacattggatcatactaaaaatgaagcttgtgaggatggagt

SEQ ID NO: 167400 - DNA, 120 bp, Artificial Sequence
  ENSG00000108506_8 (sequence is synthesized)
gagtgacttggtttgttttgtaagtggtttgcttcttggaacaaatgcgaaagtccggacttggtttggaacttttatccgaaatggacagcagagaaaaagagagaccagcagttctgt

SEQ ID NO: 167401 - DNA, 120 bp, Artificial Sequence
  ENSG00000108506_9 (sequence is synthesized)
cctttggcagatgagaaggcagcttcttctggagttgatgggcattcttcccacagtaagaagcacccgaattgtggaagaagctgatgtggatatggagcccaatgtgtctgtgtattc

SEQ ID NO: 167402 - DNA, 120 bp, Artificial Sequence
  ENSG00000108506_10 (sequence is synthesized)
ggggctgaaagaagagcatgttgtgaaagccagtgcactcttacgtctgtactgtgctttgatggggatcgctggactcaaaccaactgaagaagaagctgagcaattactgcagttgat

SEQ ID NO: 167403 - DNA, 120 bp, Artificial Sequence
  ENSG00000108506_11 (sequence is synthesized)
gacgagccgtcctcctgctacgccagctggggttcgctttgtttcactttccttttgtatgctactggccttttctacacttgtcagtacacctgaacaggagcagctgatggtggtgtg

SEQ ID NO: 167404 - DNA, 120 bp, Artificial Sequence
  ENSG00000108506_12 (sequence is synthesized)
gctaagttggatgataaaagaagaagcgtattttgagagtacttcaggcgtctctgcttcttttggggagatgttattattggtggctatgtactttcacagcaaccagcttagtgctat

SEQ ID NO: 167405 - DNA, 120 bp, Artificial Sequence
  ENSG00000108506_13 (sequence is synthesized)
cattgacttggtctgttccactttggggatgaagattgtaattaagccaagctccttgagcaggatgaagacaatcttcacacaggaaatttttactgagcaggttgtcacagctcatgc

SEQ ID NO: 167406 - DNA, 120 bp, Artificial Sequence
  ENSG00000108506_14 (sequence is synthesized)
agttcgggtccctgtcaccagcaacctgagtgccaacattactggatttttgcctattcattgtatttaccagcttctcaggagccgttcctttaccaagcacaaagtgtcaataaaaga

SEQ ID NO: 167407 - DNA, 120 bp, Artificial Sequence
  ENSG00000108506_15 (sequence is synthesized)
ttggatttatagacagctgtgtgaaacctctactccacttcatcctcaattacttcctttgattgatgtgtacataaattctatacttactcctgcgtcgaaatctaatccagaagccac

SEQ ID NO: 167408 - DNA, 120 bp, Artificial Sequence
  ENSG00000108506_16 (sequence is synthesized)
aaatcagccagtcacagaacaggagatactcaatattttccaaggagtcattgggggtgacaacatccgccttaatcagcgtttcagtatcacagcacagcttttggtgctctactatat

SEQ ID NO: 167409 - DNA, 120 bp, Artificial Sequence
  ENSG00000108506_17 (sequence is synthesized)
actgtcttatgaagaggctcttctagcaaacacgaagactttagctgccatgcaaagaaagcccaaatcatattcttcttctttaatggatcagattcctatcaaattccttattcgaca

SEQ ID NO: 167410 - DNA, 120 bp, Artificial Sequence
  ENSG00000108506_18 (sequence is synthesized)
ggctcaagggctgcagcaggagttgggagggttgcattcagctttactacgtctccttgctactaactacccacatttatgtattgtggatgactggatttgtgaagaagaaatcacagg

SEQ ID NO: 167411 - DNA, 120 bp, Artificial Sequence
  ENSG00000108506_19 (sequence is synthesized)
gactgatgccctgctacggcgaatgctcctgactaataatgctaaaaatcattctcccaaacaactccaagaagcattttcagctgtcccagtaaataacacacaagtgatgcagattat

SEQ ID NO: 167412 - DNA, 120 bp, Artificial Sequence
  ENSG00000108506_20 (sequence is synthesized)
agaacacttgactctactctctgccagtgaacttataccatatgcggaagtgttaacatccaatatgagccagctattgaattcaggggttccacggagaattctgcaaacagtcaataa

SEQ ID NO: 167413 - DNA, 120 bp, Artificial Sequence
  ENSG00000108506_21 (sequence is synthesized)
actatggatggttcttaatactgtgatgcctagaaggctatgggtaatgacggttaatgcacttcagccttcaataaagtttgtacgacaacaaaagtatactcagaatgacctgatgat

SEQ ID NO: 167414 - DNA, 120 bp, Artificial Sequence
  ENSG00000108506_22 (sequence is synthesized)
agatcctctcattgtcctaaggtgtgatcagagggttcacagatgccccccactgatggatattaccctacacatgttgaatggatatcttcttgcatctaaagcctaccttagtgctca

SEQ ID NO: 167415 - DNA, 120 bp, Artificial Sequence
  ENSG00000108506_23 (sequence is synthesized)
tctgaaggaaacagagcaagataggccttcccagaataatacaattggtttagttggacaaactgatgctccggaagttaccagggaagaattgaaaaatgcattactggccgctcagga

SEQ ID NO: 167416 - DNA, 120 bp, Artificial Sequence
  ENSG00000108506_24 (sequence is synthesized)
ccaaataagggaatggaggaaggagaagacaatttgctctgtaaccttcgagaagttcagtgccttatctgttgtctcttgcaccaaatgtacattgcagatcccaacattgctaagctt

SEQ ID NO: 167417 - DNA, 120 bp, Artificial Sequence
  ENSG00000108506_25 (sequence is synthesized)
gttcactttcagggttatccatgtgaacttttgcctctgacggtcgcaggtattccatctatgcacatctgtctagatttcatacctgagcttattgcacagccagaacttgagaaacag

SEQ ID NO: 167418 - DNA, 120 bp, Artificial Sequence
  ENSG00000108506_26 (sequence is synthesized)
atatttgctatccagttgctttctcacttgtgtatacaatatgcattaccaaagtcacttagtgtggctcgtttagctgtcaatgtcatgggaactttgttaacagttttaacacaggct

SEQ ID NO: 167419 - DNA, 120 bp, Artificial Sequence
  ENSG00000108506_27 (sequence is synthesized)
aagcggtatgctttttttatgccaactctgccaagtttggtctctttttgtcgagcatttcctccattgtatgaggatattatgtctttgctgatccaaatagggcaagtttgtgcctct

SEQ ID NO: 167420 - DNA, 120 bp, Artificial Sequence
  ENSG00000108506_28 (sequence is synthesized)
gatgttgccactcagacaagagacattgatccaattattacacgtcttcaacaaataaaggagaaaccaagtggatggtctcaaatctgtaaagattcatcttataaaaatggatccagg

SEQ ID NO: 167421 - DNA, 120 bp, Artificial Sequence
  ENSG00000108506_29 (sequence is synthesized)
gacactggaagcatggatcctgatgtacagctctgtcactgtattgaaagaacagtaattgaaataataaatatgagtgttagtggaatttaaaacaaaatttaaaacaacaaaaagttg

SEQ ID NO: 167422 - DNA, 120 bp, Artificial Sequence
  ENSG00000108506_30 (sequence is synthesized)
tttgctgcatatacccaacatgaatctgcatattagtaacaactctaaactgaatgggaacagtaaagtattgtcttggaatcactaaaacaattcaattcaacatgagtatagtttaga

SEQ ID NO: 167423 - DNA, 120 bp, Artificial Sequence
  ENSG00000108506_31 (sequence is synthesized)
actttatgagaattatgcttgcttgtttctgattggcacatctttggatctactttgctgatatgtttctattgtagcagctgagctttttttttttccactgggaacacatgtaagaaa

SEQ ID NO: 167424 - DNA, 120 bp, Artificial Sequence
  ENSG00000108506_32 (sequence is synthesized)
ctcattattggaaagggaatttggccttgtatttagcttttgaagtgaagactgccatgcctttaatttcttataaaaatgagtctgtgggtagccctagtgtttattttaactgtgagc

SEQ ID NO: 167425 - DNA, 120 bp, Artificial Sequence
  ENSG00000108506_33 (sequence is synthesized)
ttgtaacagaatgtgacaaagatgcaaagatgggagaggaaaaaagggtaaagggaaaggagaattaaggaaataataggagttaaaaacacaagtagaaatctcaaagatttgcagtgc

SEQ ID NO: 167426 - DNA, 120 bp, Artificial Sequence
  ENSG00000108506_34 (sequence is synthesized)
aagtaatagtaatgcaagttggaattctagttctcaagaaagagtattgagaagacttttaaaaaggcaagtagcttttgtaaatgatttctgtggaaatacagatgaggatttaaagat

SEQ ID NO: 167427 - DNA, 120 bp, Artificial Sequence
  ENSG00000108506_35 (sequence is synthesized)
ttcacatatttgcttcaatttttattaatatatgaagccatatgtttaaagagatacttgaataatttggaattttaagatactggtgtaaaagtgtttacagaaacatctttgttcaaa

SEQ ID NO: 167428 - DNA, 120 bp, Artificial Sequence
  ENSG00000108506_36 (sequence is synthesized)
gaagaacctgagagatctcatttagttttatgttttaaatttatttttataatgctttattaacttacctaatgctcagaggggggaaatatgtatcaaattaaatgaaggtagagcaat

SEQ ID NO: 167429 - DNA, 120 bp, Artificial Sequence
  ENSG00000108506_37 (sequence is synthesized)
aaaacccactggattaaagagctcttggtttgtcatcaggattataattcatatcttactttgagaagatctttgagtaagaaaatgcagtgtttgaacctgaggaaaagttaaagtgta

SEQ ID NO: 167430 - DNA, 120 bp, Artificial Sequence
  ENSG00000108506_38 (sequence is synthesized)
gaaaatattgtcttgccgaaggattttgcagtcctctgtcagtaacttccattgattaggcagacatattcaggtaaaccctaatcattaaaaaaaaattatcaatgtagaaagtaattc

SEQ ID NO: 167431 - DNA, 120 bp, Artificial Sequence
  ENSG00000108506_39 (sequence is synthesized)
ccttttttctctctgagatatacctcaatcacacacttccccacccccacttgaaacagacctcttcacttgtgttttttttttttttttcctgaggtggagtcttcccctgttgcccag

SEQ ID NO: 167432 - DNA, 120 bp, Artificial Sequence
  ENSG00000108506_40 (sequence is synthesized)
gcagtgggatgatcttggctcactgcaacttctgccacctgggttcaagggattctcgtgcctcaacctcctgagtagctgggactgcaggcacgcgccacctgtatttttgtattttta

SEQ ID NO: 167433 - DNA, 84 bp, Artificial Sequence
  ENSG00000108506_41 (sequence is synthesized)
gagtagctgggactgcaggcacgcgccacctgtatttttgtatttttagtaaagacgggggtttgccatgttgcccagactggt

SEQ ID NO: 167434 - DNA, 120 bp, Artificial Sequence
  ENSG00000108506_42 (sequence is synthesized)
cctggccagaccgcttcacttgtaaaagaaattaggctaataagaaggtgtagtttttgagaaatgaaatttaactttagccttttcactagtaaatagtcacatctcattttcttcctt

SEQ ID NO: 167435 - DNA, 120 bp, Artificial Sequence
  ENSG00000108506_43 (sequence is synthesized)
tgtaaaatggggttactactggccctacctcatattctatgagaatgagtttgtagctgtttcaaatcatgaagtgcatagtatcacatgtgatagaatatttataactttttattagat

SEQ ID NO: 167436 - DNA, 120 bp, Artificial Sequence
  ENSG00000108506_44 (sequence is synthesized)
gcttaatgttcaattaagtaattttgatgtgaaaaataaaagtaataaaagtatcttaaaaatagcataagaattttcatatttttaaacaaggcagttttgtagtcccttaagattaaa

SEQ ID NO: 167437 - DNA, 120 bp, Artificial Sequence
  ENSG00000108506_45 (sequence is synthesized)
tacaactgctccttttttttttaaactgaggccttgcgatattttgtgtgaatagatatgccctaggagttcagaaaaagttaaaagtatgttttctaattaaatgcagtgcacattcct

SEQ ID NO: 167438 - DNA, 120 bp, Artificial Sequence
  ENSG00000108506_46 (sequence is synthesized)
ggatcaatattcaaagactggtcataacctgctgtgttaaaataatcacatatgctctttttcatcagatttgttgatgatgtaaataaaatgtgtaaatatattagtaaatgttaatat

SEQ ID NO: 167439 - DNA, 120 bp, Artificial Sequence
  ENSG00000108506_47 (sequence is synthesized)
tcatgtattttaagttaaggttataaaatttgtcacaatgtgtttttttattcaagtgaaaacagatgtgtgcagctattttgaatattggtttataaacattcatattctttatcaaac

SEQ ID NO: 167440 - DNA, 120 bp, Artificial Sequence
  ENSG00000108506_48 (sequence is synthesized)
cttcctctcagaccagtacggtggccgacgggagtcagacgctggggatgaatgaaggtgctgggtgcaggttgaaaaagtctcccgcttttccgttcctacagtcccggttctgccttt

SEQ ID NO: 167441 - DNA, 120 bp, Artificial Sequence
  ENSG00000108506_49 (sequence is synthesized)
gtgtggtgcccccatccttcccactttgtatcgacaacccggttggtcccggcgtctgagttcttggtgtccgagtcgactcgaggcacaactagggtttggggttccggatatcgccta

SEQ ID NO: 167442 - DNA, 120 bp, Artificial Sequence
  ENSG00000108506_50 (sequence is synthesized)
ggcccaacatcggaccgcgctctcgatttctgccgcgtcccgcctctaggacgcggagtccgtgtgcggttccgtgaggctggagggtagatcttaaggatcaacaaacagtaataatga

SEQ ID NO: 167443 - DNA, 120 bp, Artificial Sequence
  ENSG00000108506_51 (sequence is synthesized)
gtttatgtggctttttttctgttgatatttaccatattagaaattaacacttaaatatttgaaatatttatttagttcttttaaaaataggaacagctggtgtgttggtatgtgcctata

SEQ ID NO: 167444 - DNA, 120 bp, Artificial Sequence
  ENSG00000108506_52 (sequence is synthesized)
gtcctagctacttaggaggctgaagcaggaagattgcttaagccagggggttctagggtatagtgtgtgataattgtgcctgtgaatagcgactgtactttagcctgggcaacatagcga

SEQ ID NO: 167445 - DNA, 120 bp, Artificial Sequence
  ENSG00000108506_53 (sequence is synthesized)
gacctcatctcttaaaaaaaaaccaaaaccaaacaacaataaccctattaaatgtgaacataacatattttaaatgaaaactaactgtgttttcccaaacaaaatttaatgagaagaatg

SEQ ID NO: 167446 - DNA, 120 bp, Artificial Sequence
  ENSG00000108506_54 (sequence is synthesized)
atagttttattttattgtatttttttcaaatatcttcaatgtctggcttggtagaagcctttggaaactgcaccgtacccttgtgagtgaatgagaaagaaaaagacagataatgtcttg

SEQ ID NO: 167447 - DNA, 120 bp, Artificial Sequence
  ENSG00000108506_55 (sequence is synthesized)
agtattattaacacctttccagaccccctgaaagcatatatctccagggttctgggccagactcatgagaactggtgcattagatcactgaaataagttattatatttttaaattttaat

SEQ ID NO: 167448 - DNA, 120 bp, Artificial Sequence
  ENSG00000108506_56 (sequence is synthesized)
acatatgtgtatatatgtttttattatggtaaaatatacataacataaaattttgccatttaatcatttttaagtatataattcagtggcattaagtatatttacagtgtgcaaccatta

SEQ ID NO: 167449 - DNA, 63 bp, Artificial Sequence
  ENSG00000108506_57 (sequence is synthesized)
attcagtggcattaagtatatttacagtgtgcaaccattatcactcttcgtttccagaactat

SEQ ID NO: 167450 - DNA, 120 bp, Artificial Sequence
  ENSG00000108506_58 (sequence is synthesized)
ttgggattacaggtgcccaccaccacacttggctacttttattttgagtagaggctgggtttcgccatgttggtcaggctggtctagaactcttgacatcaggtgatccacccacctggg

SEQ ID NO: 167451 - DNA, 90 bp, Artificial Sequence
  ENSG00000108506_59 (sequence is synthesized)
tgggcctggcccatttccagaactttttcatcatcccaaacagaaactctgtatccattaaataactccccattccccctatcatcccat

SEQ ID NO: 167452 - DNA, 120 bp, Artificial Sequence
  ENSG00000108506_60 (sequence is synthesized)
gtatccattaaataactccccattccccctatcatcccatcctctggtaacctctattcaactttctgtctgtatgaatttaccctttctggctacctgaagtaaatggaattatacaat

SEQ ID NO: 167453 - DNA, 120 bp, Artificial Sequence
  ENSG00000108506_61 (sequence is synthesized)
tagtgtagggcacttttgcacatggcttctctcaacctgttatgaattttcttctgtctagttttaaatttcaggacattttccagatcttgctccaggtatgttcttgttcttcctgtg

SEQ ID NO: 167454 - DNA, 120 bp, Artificial Sequence
  ENSG00000108506_62 (sequence is synthesized)
tagccacttgttttcgtaatgattcttcatcttttatatgctatattcgcaggttaattgcattaaaagtaatttgactttgtttttgtttccatttgggttgaaggttaagatttctgt

SEQ ID NO: 167455 - DNA, 120 bp, Artificial Sequence
  ENSG00000108506_63 (sequence is synthesized)
aaattttgctaaagtaaaatttagtcaaaaagagcaagggcttctctactagtataatcagttcaatagatggcacattgtgcgctccatgtacattggtgacatattgtgcatttcttt

SEQ ID NO: 167456 - DNA, 120 bp, Artificial Sequence
  ENSG00000108506_64 (sequence is synthesized)
tattatagaatctattacaatgatgttacctttgcttctgagtatcagatatgttgtatttctgaaatcaggaataatcttcatgatatgaatgaaatagccatttaaataagatttata

SEQ ID NO: 167457 - DNA, 120 bp, Artificial Sequence
  ENSG00000108506_65 (sequence is synthesized)
ctgctagtcggtcggccttgagaggggactgctttggctgccagctcactgcctttttgtttactttttgtgccttggatgattcctggagacagagaagtgcgctaatgagacgcgtct

SEQ ID NO: 167458 - DNA, 120 bp, Artificial Sequence
  ENSG00000108506_66 (sequence is synthesized)
ttgagcccagattgtatgcttcaaaattttattttatttttttaccttatcacaccactgtgtatgtatctatgtttataaacaaaaaattagggaattatataaatccctaaatgtaca

SEQ ID NO: 167459 - DNA, 120 bp, Artificial Sequence
  ENSG00000108506_67 (sequence is synthesized)
tttcctcagcattcaaagacaattaaaacatgtaataatttattttcatcattcatttctagggaccacacttgtattaggtgttgacagtctacttactaatctctctttcaaaataat

SEQ ID NO: 167460 - DNA, 120 bp, Artificial Sequence
  ENSG00000108509_0 (sequence is synthesized)
ctgtcagccggcgctggggggggtcggtgtggggtagaatggccgctgccgccgtcacccgcgggaccccgggagcacagactccccctccccccggcccctcaggccgggggtgacctt

SEQ ID NO: 167461 - DNA, 120 bp, Artificial Sequence
  ENSG00000108509_1 (sequence is synthesized)
gtgaccttgccccctggagccctcaccatgaataccaaggacaccaccgaggttgctgaaaacagccaccacctgaagatctttctccccaagaagctgctggagtgtcttcctcgctgc

SEQ ID NO: 167462 - DNA, 120 bp, Artificial Sequence
  ENSG00000108509_2 (sequence is synthesized)
ccgctgctgcctccagagaggctacggtggaatacaaatgaggagattgcatcctacctgatcacctttgagaagcatgatgagtggctgtcttgtgccccaaagacaaggcctcagaat

SEQ ID NO: 167463 - DNA, 120 bp, Artificial Sequence
  ENSG00000108509_3 (sequence is synthesized)
ggctccatcatcctctacaatcgcaagaaggtgaaatatcggaaggatggttacctctggaagaagcggaaggatgggaagaccacccgagaggaccacatgaagctgaaggtccagggc

SEQ ID NO: 167464 - DNA, 120 bp, Artificial Sequence
  ENSG00000108509_4 (sequence is synthesized)
atggagtgtctctatggctgctacgttcactcttccatcgtccccacattccatcggcgctgctactggctgctccagaaccctgacatcgtccttgtgcactacctgaacgtcccagcc

SEQ ID NO: 167465 - DNA, 120 bp, Artificial Sequence
  ENSG00000108509_5 (sequence is synthesized)
ctggaggactgtggaaagggctgcagccccatcttttgttccatcagcagcgaccgtcgagagtggctgaagtggtcccgggaggagttgttgggacagctgaagcccatgtttcatggc

SEQ ID NO: 167466 - DNA, 120 bp, Artificial Sequence
  ENSG00000108509_6 (sequence is synthesized)
atcaagtggagctgcgggaatggaacagaagagttctctgtagaacacctggtgcagcagattttggacacccacccaaccaagcctgctccccgaacccacgcctgtctctgcagtggg

SEQ ID NO: 167467 - DNA, 120 bp, Artificial Sequence
  ENSG00000108509_7 (sequence is synthesized)
gggcttggttctgggagccttacccacaaatgcagcagcacgaaacaccgcatcatctctcccaaagtggagccccgagctttaaccctgacctctatcccccacgctcaccccccagag

SEQ ID NO: 167468 - DNA, 120 bp, Artificial Sequence
  ENSG00000108509_8 (sequence is synthesized)
cctcctccactgatagccccacttcccccagagctccccaaggcacacacctccccatcttcttcctcttcttcctcctcatcaggttttgcagagcccctagaaatcagacctagccct

SEQ ID NO: 167469 - DNA, 120 bp, Artificial Sequence
  ENSG00000108509_9 (sequence is synthesized)
cccacttctcgagggggttcttcaagaggaggcactgctatcctcctcctgacaggactggagcagcgggctggaggcttgacgcccaccaggcacttggctccacaggctgatcctagg

SEQ ID NO: 167470 - DNA, 120 bp, Artificial Sequence
  ENSG00000108509_10 (sequence is synthesized)
ccttccatgagtttggcagtggttgtaggcactgagccttctgccccaccagctcctcccagtcctgcctttgaccctgatcgttttctcaacagcccccagaggggccagacatatgga

SEQ ID NO: 167471 - DNA, 120 bp, Artificial Sequence
  ENSG00000108509_11 (sequence is synthesized)
ggggggcagggagtaagcccagacttccccgaggcagaggccgctcataccccctgttctgccctagagcctgctgctgccctggagccccaggcagctgctcggggtcccccaccacag

SEQ ID NO: 167472 - DNA, 120 bp, Artificial Sequence
  ENSG00000108509_12 (sequence is synthesized)
tcagtagcaggtgggagaagaggaaactgcttcttcatccaagatgatgacagtggggaggagctcaagggtcacggggctgccccacccataccttcaccccctccctcacccccaccc

SEQ ID NO: 167473 - DNA, 120 bp, Artificial Sequence
  ENSG00000108509_13 (sequence is synthesized)
tcacctgcccccttggagccgtcaagcagggtaggaagaggagaggccttgtttggaggacctgttggggccagtgaactggagcccttcagtctttcatcattcccagaccttatggga

SEQ ID NO: 167474 - DNA, 120 bp, Artificial Sequence
  ENSG00000108509_14 (sequence is synthesized)
gaactcatcagtgacgaagctccaagcatccctgctccgaccccccagctgtctcctgctcttagcaccatcacagacttctccccagagtggtcctacccagagggtggggtcaaggtg

SEQ ID NO: 167475 - DNA, 120 bp, Artificial Sequence
  ENSG00000108509_15 (sequence is synthesized)
ctcatcacaggtccttggaccgaagccgccgagcattactcctgtgtctttgatcacatcgcagtgccagcctcacttgtccagcctggtgtcttacgctgctactgtcccgcccatgag

SEQ ID NO: 167476 - DNA, 120 bp, Artificial Sequence
  ENSG00000108509_16 (sequence is synthesized)
gtagggctggtgtctttgcaggtggcagggcgggaggggcccctttctgcttctgtgctctttgagtatcgagcccgccgattcctgtctctgcctagtactcaacttgactggctgtca

SEQ ID NO: 167477 - DNA, 120 bp, Artificial Sequence
  ENSG00000108509_17 (sequence is synthesized)
ctggacgacaaccagttccggatgtccatactagagcgactggagcagatggagaagcggatggcagagatcgcagcagctgggcaggtgccttgccagggtcctgatgctcctccagtt

SEQ ID NO: 167478 - DNA, 120 bp, Artificial Sequence
  ENSG00000108509_18 (sequence is synthesized)
tggaagggtcctgaacgtctggcccatggaagccccttccggggcatgagccttctgcacctggctgctgcccagggctatgcccgcctcatcgagaccctgagccagtggcggagtgtg

SEQ ID NO: 167479 - DNA, 120 bp, Artificial Sequence
  ENSG00000108509_19 (sequence is synthesized)
gagactggaagcttggacttagagcaggaggttgacccgctcaacgtggatcatttctcttgcacccctctgatgtgggcttgtgccctgggacacctggaagctgctgtgctccttttc

SEQ ID NO: 167480 - DNA, 120 bp, Artificial Sequence
  ENSG00000108509_20 (sequence is synthesized)
cgttggaaccgacaggcactgagcattcccgactctctgggccgtctgccattgtctgtggctcattcccggggtcatgtgcgccttgcccgctgccttgaggaactacagagacaggag

SEQ ID NO: 167481 - DNA, 120 bp, Artificial Sequence
  ENSG00000108509_21 (sequence is synthesized)
ccttcggtggagcccccatttgccctatcgccaccctcctccagcccagacactggtctgagcagcgtctcctcgccctcggagctgtcggatggcaccttttccgtcacgtcagcctat

SEQ ID NO: 167482 - DNA, 120 bp, Artificial Sequence
  ENSG00000108509_22 (sequence is synthesized)
tctagtgccccagatggcagtcccccccctgcacctctgccagcctctgagatgactatggaggacatggccccaggccagctttcctctggtgtcccagaagcccccctactcctcatg

SEQ ID NO: 167483 - DNA, 120 bp, Artificial Sequence
  ENSG00000108509_23 (sequence is synthesized)
gactatgaggctaccaactccaaggggcccctctcctcccttcctgccctcccaccagcttcagatgatggggctgctccagaggacgctgacagcccacaggctgtggatgtgatcccg

SEQ ID NO: 167484 - DNA, 120 bp, Artificial Sequence
  ENSG00000108509_24 (sequence is synthesized)
gtggacatgatctcactagccaagcagatcatcgaagccacaccggagcggattaaacgagaggacttcgtggggctgcccgaggctggagcctcaatgcgggagcggacaggggctgtg

SEQ ID NO: 167485 - DNA, 120 bp, Artificial Sequence
  ENSG00000108509_25 (sequence is synthesized)
gggctcagtgagaccatgtcctggctggccagctacctggagaatgtggaccatttccccagctcaacccctcccagcgaactgccctttgagcgaggtcgcctggctgtcccttcagca

SEQ ID NO: 167486 - DNA, 120 bp, Artificial Sequence
  ENSG00000108509_26 (sequence is synthesized)
ccctcctgggcagagtttctctctgcatccaccagtggcaagatggaaagtgattttgccctgctgacactatcagatcacgagcagcgggaactgtatgaggctgcccgagtcatccag

SEQ ID NO: 167487 - DNA, 120 bp, Artificial Sequence
  ENSG00000108509_27 (sequence is synthesized)
acggccttccgaaagtacaagggccggcggctgaaggagcagcaggaggtagcagcagctgtaatccagcgctgttaccggaagtacaagcagctgacctggattgcacttaagtttgca

SEQ ID NO: 167488 - DNA, 120 bp, Artificial Sequence
  ENSG00000108509_28 (sequence is synthesized)
ctctataagaagatgacccaggcggccatcctgatccagagcaagttccgaagctactatgaacagaagcgatttcagcagagccgccgagcggctgtgctcatccagcagcactaccgc

SEQ ID NO: 167489 - DNA, 120 bp, Artificial Sequence
  ENSG00000108509_29 (sequence is synthesized)
tcctaccgccgcaggcccggccctccccaccggacttcggccaccctgcctgcccgcaacaaaggctcctttctcaccaagaagcaggaccaggcagcccggaagatcatgagattcctg

SEQ ID NO: 167490 - DNA, 120 bp, Artificial Sequence
  ENSG00000108509_30 (sequence is synthesized)
cggcgctgccgacacaggatgagggaactgaagcagaaccaggagctggaagggcttccccagccgggactggccacatgacctggccaccgcctttctcaccaccctgggggcgcctcg

SEQ ID NO: 167491 - DNA, 120 bp, Artificial Sequence
  ENSG00000108509_31 (sequence is synthesized)
tgcagtcttaacagggagagggctttctggggcagggggagcccctgtcggcagctttcctgttcacctttgttggagccctctgtaggcctcctccctcctccccacgccttgctccca

SEQ ID NO: 167492 - DNA, 120 bp, Artificial Sequence
  ENSG00000108509_32 (sequence is synthesized)
cacccctctcctcgtccctcctggtcgtgccccgtctcttttggtcctggctccagaaaacccgcgccccacatacctgcatcttccgctgtgacctccggagccctgcctgcccctgct

SEQ ID NO: 167493 - DNA, 120 bp, Artificial Sequence
  ENSG00000108509_33 (sequence is synthesized)
ccccagctcctcctgcctgcacccgactcggccccctcctgacttgccttatttatttgttcgacgcgtctctgaatgtatccgcctcggttcccaccactgccttcgctgcgcacgccc

SEQ ID NO: 167494 - DNA, 120 bp, Artificial Sequence
  ENSG00000108509_34 (sequence is synthesized)
ctcgtgtttcagggctgaccgtgtccccacccgactccgcatgtttgcgtctgtttcctccctctctggccctgtcttaccccatcacccgactctggccactgacctcagggccgaagg

SEQ ID NO: 167495 - DNA, 120 bp, Artificial Sequence
  ENSG00000108509_35 (sequence is synthesized)
ggaggtggtgtacataggaacgcgttgcggagtccgccccgtcccccgaggggaggggtcttgtacatactgtaacatacagagtatagtgaagaatctatttaaggcgccgcggggagg

SEQ ID NO: 167496 - DNA, 120 bp, Artificial Sequence
  ENSG00000108509_36 (sequence is synthesized)
gctgcacggccgggcttgtggttctctagcgcggcgggggcctcctgccggctccacgggcactttctacttgtgcatgggcttggtttatacgaattgccattaaacatcgctgcacca

SEQ ID NO: 167497 - DNA, 120 bp, Artificial Sequence
  ENSG00000108509_37 (sequence is synthesized)
ccccaaccccagcttcactgcacatagccgagcccgacgggcctcctcccatctccatcctggacacctggcggagcccgtgctgagagcctccgccagctcccatctgttccccgagga

SEQ ID NO: 167498 - DNA, 120 bp, Artificial Sequence
  ENSG00000108509_38 (sequence is synthesized)
tgatcatcatgcctcactgccattccctgcctagggttcctgggggggccgaaggcatgcgatgccttctgtgaggtccatcttttgtttctttcaccagaggctcctttctcaccaaga

SEQ ID NO: 167499 - DNA, 120 bp, Artificial Sequence
  ENSG00000108509_39 (sequence is synthesized)
tccccagcctcctcagcctgtcttccctctccctgacgtcaccctgttcccatccccaccttgtggcaagagtggctattctgggcaccctcttggcatgacgggcttcagactatttct

SEQ ID NO: 167500 - DNA, 120 bp, Artificial Sequence
  ENSG00000108509_40 (sequence is synthesized)
ggtctgaagaagggtggaggtgaaggagagggcgggggaggggtcaggagcactggggctcagatctctgtgggtcccaagtttctgaaagaagagggctaaggctcagagaaggctctg

SEQ ID NO: 167501 - DNA, 120 bp, Artificial Sequence
  ENSG00000108509_41 (sequence is synthesized)
gttagacttttgtcttaggacaaaagaagggttcttaggagggcagtgggtcttgctgggtccagatacctagaagcatcctccactagctgccagaactcagcagagagtgagacactg

SEQ ID NO: 167502 - DNA, 120 bp, Artificial Sequence
  ENSG00000108509_42 (sequence is synthesized)
ccggcacctgcactgtccctcgcccaccgcgtgcccgcggactctgctcccggcttctccagaacatccctctatgcgggcgggaccctcccacctcggaggttctcctgggaccaccac

SEQ ID NO: 167503 - DNA, 120 bp, Artificial Sequence
  ENSG00000108509_43 (sequence is synthesized)
tccgccggggggccgcccagagtgccaagcgtccgatccggcgccgcccaagtgcagcccaaggacccgctcccgctccgcaccctggcaggctgcctagccaggactgcgcacctgcgc

SEQ ID NO: 167504 - DNA, 120 bp, Artificial Sequence
  ENSG00000108509_44 (sequence is synthesized)
ccctaactccccttctctctccacaagctgacctggattgcacttaaggtattaggcatgagctctgagtgtgaggtctgtgatgattcagtctttccttgagtgtgtgggttacagaga

SEQ ID NO: 167505 - DNA, 120 bp, Artificial Sequence
  ENSG00000108510_0 (sequence is synthesized)
ctctctctggtcggaggcggcggtaatggcggatggtgggttgtggcgccggcggcggctgctgtgagggacgatgagtgcctccttcgtgccgaacggggccagcctggaagattgtca

SEQ ID NO: 167506 - DNA, 120 bp, Artificial Sequence
  ENSG00000108510_1 (sequence is synthesized)
ctgtaacctcttctgcctggctgacttgacaggaattaagtggaaaaaatatgtatggcaaggcccaacttctgcccctattctgtttcctgtgacagaagaagaccccattttgagcag

SEQ ID NO: 167507 - DNA, 120 bp, Artificial Sequence
  ENSG00000108510_2 (sequence is synthesized)
ttttagtcgctgccttaaggcagatgtacttggtgtttggcggcgagatcaaagacctggaagaagagaattgtggatattttggtggggtgaagaccccagttttgctgaccttattca

SEQ ID NO: 167508 - DNA, 120 bp, Artificial Sequence
  ENSG00000108510_3 (sequence is synthesized)
ccatgacttatcagaagaagaagatggagtgtgggagaatggactttcctatgaatgccgtactctgcttttcaaagcagttcacaatctattggaacggtgtttaatgaacaggaattt

SEQ ID NO: 167509 - DNA, 120 bp, Artificial Sequence
  ENSG00000108510_4 (sequence is synthesized)
tgtacgtattggcaagtggtttgtaaagccttatgaaaaagatgaaaaacctataaataaaagtgaacacttgtcctgctccttcacctttttcttgcatggagacagcaatgtttgtac

SEQ ID NO: 167510 - DNA, 120 bp, Artificial Sequence
  ENSG00000108510_5 (sequence is synthesized)
cagtgtggaaattaaccaacatcaacctgtataccttctcagtgaagagcatatcacccttgctcaacagtctaatagcccatttcaagttatcttatgcccatttggactaaatggcac

SEQ ID NO: 167511 - DNA, 120 bp, Artificial Sequence
  ENSG00000108510_6 (sequence is synthesized)
tctcacaggacaggcattcaagatgtctgattcagctacaaaaaaattaattggtgaatggaaacagttctatcctatctcatgttgcttgaaggagatgtctgaagaaaaacaggaaga

SEQ ID NO: 167512 - DNA, 120 bp, Artificial Sequence
  ENSG00000108510_7 (sequence is synthesized)
tatggattgggaagatgattctttagctgcagtagaagttcttgttgctggtgtccgaatgatctacccagcatgctttgttctagtccctcagtcagacattcctactcctagccctgt

SEQ ID NO: 167513 - DNA, 120 bp, Artificial Sequence
  ENSG00000108510_8 (sequence is synthesized)
gggatccactcactgttcatcttcttgcttgggtgtccaccaagtgcctgcttccacaagagatcctgctatgtcttcggttacgcttacaccacctacgtctcctgaggaagtccaaac

SEQ ID NO: 167514 - DNA, 120 bp, Artificial Sequence
  ENSG00000108510_9 (sequence is synthesized)
agttgatcctcagtctgtccagaagtgggtcaaattttcttcagtatctgatggcttcaactccgatagtactagccaccatggtgggaaaatacccagaaaattagcaaatcatgtggt

SEQ ID NO: 167515 - DNA, 120 bp, Artificial Sequence
  ENSG00000108510_10 (sequence is synthesized)
ggatagagtttggcaagaatgcaatatgaacagagcacagaacaagaggaagtattctgcttcatcaggtggtctatgcgaagaagcgacagctgctaaagtggcatcctgggattttgt

SEQ ID NO: 167516 - DNA, 120 bp, Artificial Sequence
  ENSG00000108510_11 (sequence is synthesized)
tgaagccacacaaagaacaaattgcagttgtttgaggcacaaaaatctcaagtcaagaaatgctggacaacaaggacaggcaccatctttaggtcagcaacaacaaatacttcctaagca

SEQ ID NO: 167517 - DNA, 120 bp, Artificial Sequence
  ENSG00000108510_12 (sequence is synthesized)
caagaccaatgagaagcaagaaaagagtgaaaagccacagaaacgccccttgactccttttcaccatcgtgtgtctgttagtgatgatgttggcatggacgcagattcagccagccaaag

SEQ ID NO: 167518 - DNA, 120 bp, Artificial Sequence
  ENSG00000108510_13 (sequence is synthesized)
acttgtgatctctgctccagacagtcaagtgagattttcaaatatccgaactaatgatgtagcaaagactcctcagatgcatggcaccgaaatggcaaattcacctcaaccacccccact

SEQ ID NO: 167519 - DNA, 120 bp, Artificial Sequence
  ENSG00000108510_14 (sequence is synthesized)
tagtcctcacccttgtgatgtggttgatgaaggagtgactaaaacaccttcaactcctcagagtcaacatttttatcaaatgccaacaccagatcccttggttccttctaaaccaatgga

SEQ ID NO: 167520 - DNA, 120 bp, Artificial Sequence
  ENSG00000108510_15 (sequence is synthesized)
agataggatagacagtttgtcccagtctttcccacctcaatatcaggaagctgtagaacctacagtatatgttggtacagcagtaaacttggaagaagatgaagccaatatagcctggaa

SEQ ID NO: 167521 - DNA, 120 bp, Artificial Sequence
  ENSG00000108510_16 (sequence is synthesized)
gtattacaagttcccaaagaaaaaagatgtagagtttttaccacctcaacttccaagtgataaattcaaggatgatccagttggaccttttggacaggaaagtgtaacatcagttacaga

SEQ ID NO: 167522 - DNA, 120 bp, Artificial Sequence
  ENSG00000108510_17 (sequence is synthesized)
gttaatggtgcaatgtaagaaacctttaaaagtttctgatgaattagtgcagcaatatcaaattaaaaaccagtgtctttcagcaatagcatctgatgcagaacaagaacctaaaattga

SEQ ID NO: 167523 - DNA, 120 bp, Artificial Sequence
  ENSG00000108510_18 (sequence is synthesized)
tccatatgcatttgttgaaggagatgaggaattcctttttcctgataaaaaagatagacaaaatagtgagagagaagctggaaaaaaacacaaggtagaagatgggacatctagtgtaac

SEQ ID NO: 167524 - DNA, 120 bp, Artificial Sequence
  ENSG00000108510_19 (sequence is synthesized)
agtgttatcacatgaagaagatgctatgtcattatttagtccctctatcaagcaagatgctccacgccctactagtcatgcccgtcctccatcaacaagtttgatttatgactcagacct

SEQ ID NO: 167525 - DNA, 120 bp, Artificial Sequence
  ENSG00000108510_20 (sequence is synthesized)
ggctgtctcttatactgaccttgataatctcttcaattctgatgaagatgaactaacacctggatctaaaaaatcagcaaatggatcagatgataaagccagctgcaaggaatcaaagac

SEQ ID NO: 167526 - DNA, 120 bp, Artificial Sequence
  ENSG00000108510_21 (sequence is synthesized)
aggaaatctggacccgttatcttgcataagcactgcagatcttcataaaatgtatcctacaccaccatcattggaacaacatattatgggattttccccaatgaatatgaataataaaga

SEQ ID NO: 167527 - DNA, 120 bp, Artificial Sequence
  ENSG00000108510_22 (sequence is synthesized)
atatggtagtatggatacaacacctggaggaactgttctagaaggaaatagttctagtataggagcgcagttcaaaattgaggttgatgagggattctgtagccccaaaccttctgaaat

SEQ ID NO: 167528 - DNA, 120 bp, Artificial Sequence
  ENSG00000108510_23 (sequence is synthesized)
taaagatttttcttatgtctataagcctgaaaattgtcaaattctagtgggatgttccatgtttgcacctctaaaaactctaccaagccaatatctgccccctatcaaattgccagaaga

SEQ ID NO: 167529 - DNA, 120 bp, Artificial Sequence
  ENSG00000108510_24 (sequence is synthesized)
gtgtatttaccgtcagagttggactgttggaaaattggaattgctttcttcagggccttcaatgccattcatcaaagagggtgatggaagtaatatggatcaagaatatggcactgctta

SEQ ID NO: 167530 - DNA, 120 bp, Artificial Sequence
  ENSG00000108510_25 (sequence is synthesized)
tacacctcaaactcatacttcttttgggatgcctcctagcagtgcacctcctagtaacagcggagcaggaattcttccttctccatccacccctcggtttccaactccaaggactccaag

SEQ ID NO: 167531 - DNA, 120 bp, Artificial Sequence
  ENSG00000108510_26 (sequence is synthesized)
gactcctcggactcctcgtggagctggtggacctgctagtgctcaaggttcagtcaaatatgaaaattcagacttgtattcaccagcttctaccccatctacatgcagaccccttaattc

SEQ ID NO: 167532 - DNA, 120 bp, Artificial Sequence
  ENSG00000108510_27 (sequence is synthesized)
tgttgaacctgcaactgtcccttccatccctgaagcacacagtctttatgtaaacctcatcctttcagaatcagttatgaatttgtttaaagactgtaactttgatagttgttgcatctg

SEQ ID NO: 167533 - DNA, 120 bp, Artificial Sequence
  ENSG00000108510_28 (sequence is synthesized)
tgtttgcaacatgaacatcaagggtgccgatgttggagtttacattccagatccaacgcaggaagcacaatataggtgtacctgtggcttcagtgctgtcatgaacagaaaatttggaaa

SEQ ID NO: 167534 - DNA, 120 bp, Artificial Sequence
  ENSG00000108510_29 (sequence is synthesized)
caattcaggattatttcttgaagatgaactagatatcataggacgcaatacagactgtggcaaagaagcagaaaaacgttttgaagctctcagggctacctctgctgaacatgttaatgg

SEQ ID NO: 167535 - DNA, 120 bp, Artificial Sequence
  ENSG00000108510_30 (sequence is synthesized)
aggactaaaggaatctgaaaaattatctgatgatttgatattattgctacaagatcagtgcactaatttattttcaccctttggagcagcagaccaagatccttttcctaaaagtggtgt

SEQ ID NO: 167536 - DNA, 120 bp, Artificial Sequence
  ENSG00000108510_31 (sequence is synthesized)
aattagcaattgggtacgtgttgaagagcgtgactgttgcaatgactgctaccttgcattagaacatgggcgtcagttcatggataacatgtcaggaggaaaagttgatgaagcacttgt

SEQ ID NO: 167537 - DNA, 120 bp, Artificial Sequence
  ENSG00000108510_32 (sequence is synthesized)
gaaaagttcatgcttacacccctggtccaaaagaaacgatgtgagtatgcagtgctcacaggatatacttcgaatgctcctctctcttcagccagttcttcaggatgccattcagaaaaa

SEQ ID NO: 167538 - DNA, 120 bp, Artificial Sequence
  ENSG00000108510_33 (sequence is synthesized)
aagaacagtaagaccttggggtgttcagggtcctctcacttggcaacaatttcataaaatggctggccgaggctcttatggaactgatgaatccccagaaccactgccaatccccacatt

SEQ ID NO: 167539 - DNA, 120 bp, Artificial Sequence
  ENSG00000108510_34 (sequence is synthesized)
tttgttgggttatgattatgattatctggtgctttctccatttgctcttccttattgggagagacttatgctggaaccctatggatctcaaagagatatagcctatgttgtactgtgtcc

SEQ ID NO: 167540 - DNA, 120 bp, Artificial Sequence
  ENSG00000108510_35 (sequence is synthesized)
agaaaatgaagccttgttaaatggagcaaaaagcttttttagagatcttactgcaatatatgagtcctgtcgattaggtcaacatagacctgtttctcgactgttaacagatgggatcat

SEQ ID NO: 167541 - DNA, 120 bp, Artificial Sequence
  ENSG00000108510_36 (sequence is synthesized)
gagagttggatctactgcatcaaagaaactatcagaaaagttggtagcagaatggttttctcaggcagctgacggtaacaatgaagcattttctaaactcaagctttatgcacaagtctg

SEQ ID NO: 167542 - DNA, 120 bp, Artificial Sequence
  ENSG00000108510_37 (sequence is synthesized)
cagatatgacctaggtccttatcttgcttccctgccattggacagctctctactttcccagccaaatttagttgcccctacaagtcagtctttgattactccacctcagatgacaaatac

SEQ ID NO: 167543 - DNA, 120 bp, Artificial Sequence
  ENSG00000108510_38 (sequence is synthesized)
tggaaatgctaatactccatctgccaccttagcatctgcagcgagcagcactatgacagtgacttcaggtgttgccatatctacttcagttgccacagctaattcaactttgaccacagc

SEQ ID NO: 167544 - DNA, 120 bp, Artificial Sequence
  ENSG00000108510_39 (sequence is synthesized)
ttcaacttcatcttcatcatcctccaacttgaatagtggagtatcatcaaataaactaccttcgtttccaccctttggcagtatgaacagtaatgctgcaggatccatgtctacacaagc

SEQ ID NO: 167545 - DNA, 120 bp, Artificial Sequence
  ENSG00000108510_40 (sequence is synthesized)
aaatacagttcagagtggtcagctaggagggcaacagacatcagctctacagacagctgggatttctggagaatcatcttcacttcccactcagccgcatcctgatgtgtctgaaagcac

SEQ ID NO: 167546 - DNA, 120 bp, Artificial Sequence
  ENSG00000108510_41 (sequence is synthesized)
gatggatcgggataaagtgggaatccccacagatggtgattcacatgcagtcacgtatccacctgcaattgttgtttatataattgatccttttacatacgaaaatacagacgagagcac

SEQ ID NO: 167547 - DNA, 120 bp, Artificial Sequence
  ENSG00000108510_42 (sequence is synthesized)
taactcttctagtgtgtggacattggggctacttcgatgctttctagaaatggtccagactcttcctcctcatatcaagagtactgtttctgtacagattattccttgtcagtacctgtt

SEQ ID NO: 167548 - DNA, 120 bp, Artificial Sequence
  ENSG00000108510_43 (sequence is synthesized)
tagagaaatctatccccagcatttaaaatccctggctttttcggcctttacccagtgtcggaggccacttccaacatcaaccaatgtgaaaacattgactggctttggtccaggtttagc

SEQ ID NO: 167549 - DNA, 120 bp, Artificial Sequence
  ENSG00000108510_44 (sequence is synthesized)
catggaaactgcccttagaagtcctgatagaccagagtgtattcgactttatgcacctccttttattctggctccagtgaaggacaaacagacagagctaggagaaacatttggagaagc

SEQ ID NO: 167550 - DNA, 120 bp, Artificial Sequence
  ENSG00000108510_45 (sequence is synthesized)
tggacagaaatataatgttctttttgtgggatactgtttatcacatgatcaaaggtggattcttgcatcttgcacagatctatatggagaacttttagaaacttgtatcattaacatcga

SEQ ID NO: 167551 - DNA, 120 bp, Artificial Sequence
  ENSG00000108510_46 (sequence is synthesized)
tgttccaaatagggctcgtcggaaaaaaagttctgctagaaaatttggtctacagaaactttgggagtggtgcttaggacttgtacaaatgagttcattgccatggagagttgtaattgg

SEQ ID NO: 167552 - DNA, 120 bp, Artificial Sequence
  ENSG00000108510_47 (sequence is synthesized)
tcgtctaggaaggattggtcatggagaattgaaagattggagctgtttgctgagtcgtcgaaacttgcagtctctaagtaaaaggctcaaagacatgtgtagaatgtgtggtatatctgc

SEQ ID NO: 167553 - DNA, 120 bp, Artificial Sequence
  ENSG00000108510_48 (sequence is synthesized)
tgcagactcccctagcattctcagtgcttgcttggtggcaatggagccgcaaggctcttttgttattatgccagattctgtgtcaactggttctgtatttggaagaagcacgactctaaa

SEQ ID NO: 167554 - DNA, 120 bp, Artificial Sequence
  ENSG00000108510_49 (sequence is synthesized)
tatgcagacatctcagctaaataccccacaggatacatcatgtactcatatacttgtgtttcctacttctgcttctgtgcaagtagcttcagctacttataccactgaaaatttggattt

SEQ ID NO: 167555 - DNA, 120 bp, Artificial Sequence
  ENSG00000108510_50 (sequence is synthesized)
agctttcaatcccaacaatgatggagcagatggaatgggtatctttgatttgttagacacaggagatgatcttgaccctgatatcattaatatccttcctgcttctccaactggttctcc

SEQ ID NO: 167556 - DNA, 120 bp, Artificial Sequence
  ENSG00000108510_51 (sequence is synthesized)
tgtacattctccaggatctcattacccccatggaggtgatgcgggcaagggtcagagtactgatcggctactatcaacagaacctcatgaggaagtacctaatattcttcagcaaccatt

SEQ ID NO: 167557 - DNA, 120 bp, Artificial Sequence
  ENSG00000108510_52 (sequence is synthesized)
ggcccttggttactttgtatcaactgccaaagcaggtccattacctgactggttctggtcagcatgtcctcaagcacaatatcagtgtcccctttttcttaaggcctctttgcacctcca

SEQ ID NO: 167558 - DNA, 120 bp, Artificial Sequence
  ENSG00000108510_53 (sequence is synthesized)
cgtgccttcagtgcaatctgacgagctgcttcacagtaaacactcccacccacttgactcaaatcagacttcagatgtcctcaggtttgttttggaacagtacaatgcactctcctggct

SEQ ID NO: 167559 - DNA, 120 bp, Artificial Sequence
  ENSG00000108510_54 (sequence is synthesized)
aacctgtgaccctgcaacccaggacagacgctcatgtctcccaattcattttgtggtgctgaatcagttatataactttattatgaatatgctgtgatcttcatttgatggaactgtgca

SEQ ID NO: 167560 - DNA, 120 bp, Artificial Sequence
  ENSG00000108510_55 (sequence is synthesized)
agaaaagaacaaggaaaaatggatgtttcgctgcaggattaagttacaattatcttctcagtgaaggtcatttgtgatggggtctaattcttattacttcaacaaatattgttttgactt

SEQ ID NO: 167561 - DNA, 120 bp, Artificial Sequence
  ENSG00000108510_56 (sequence is synthesized)
ggggggaggggctataaccctgctatttttcattgactctattgaactctttaggatgatgactgatcatacaaaacgtattataacattttcgtagcaaaattaaccttttttttttcc

SEQ ID NO: 167562 - DNA, 120 bp, Artificial Sequence
  ENSG00000108510_57 (sequence is synthesized)
agtcacagtatttgtgaaaagtaatgagccatagtacccagtcatgttaaatgaatattaaaagcatggagaggaaacatgaggaacaatgaatttcaacatatggcttcagaacatgaa

SEQ ID NO: 167563 - DNA, 120 bp, Artificial Sequence
  ENSG00000108510_58 (sequence is synthesized)
gatgttcttgtatggattatagtatctagtattcaaaaatgcctgcatctcttctcttatttattgtaagtttttaaatgtataaattgtcttatatttcttaacctcttttataaaaat

SEQ ID NO: 167564 - DNA, 120 bp, Artificial Sequence
  ENSG00000108510_59 (sequence is synthesized)
tttcctagaaggtttatactgccttcttgctttaaagcaattggtctaaaatatatgtaatcgtcttaattaaaaagttgcagtagggttgcttttagagtattatttttttgtaagggg

SEQ ID NO: 167565 - DNA, 120 bp, Artificial Sequence
  ENSG00000108510_60 (sequence is synthesized)
gtgggtgggacagtaaatttgtattgtctcgatgtacagtttaacggggatagagggggaataatgtccataccattgtgtgtggaggatttacagctaagctgtagttgcagagtacat

SEQ ID NO: 167566 - DNA, 120 bp, Artificial Sequence
  ENSG00000108510_61 (sequence is synthesized)
gtacagtaatgaagttcactgtgtttataaattgaaaaggtaccaggtcttacagcattttatatatcacatctttacagaataacatgatggcaatatacaagtggtattgttaggtgg

SEQ ID NO: 167567 - DNA, 120 bp, Artificial Sequence
  ENSG00000108510_62 (sequence is synthesized)
tttaacttagaataaaatgagaattcttcagttatattttgtactatggtttagggctatgactaatatttcaggccatttccggtgaaagaaacttagttttacaagaaaaaccatttg

SEQ ID NO: 167568 - DNA, 120 bp, Artificial Sequence
  ENSG00000108510_63 (sequence is synthesized)
ctactgaatgcttaaactaattttagtgtttaatgttacatgcttaaatttttttcagttttaacagtggcatatttaggcatggaaatattattatgaaatttattttcaggatctgct

SEQ ID NO: 167569 - DNA, 120 bp, Artificial Sequence
  ENSG00000108510_64 (sequence is synthesized)
ataaggttgaaatttagcccagctctaggcattttacaaattatttttcaagcagtcattcttgattgtttgacttttttttttaaattaaagattgggaatgtatgtgagagtatgcat

SEQ ID NO: 167570 - DNA, 120 bp, Artificial Sequence
  ENSG00000108510_65 (sequence is synthesized)
atgtatgggtgtgtgtgtgtgcgcgcaatcaaactgtggtgtaaatagattctcagtgaattctggtattcagactctattccactagtgaaagaaccattttttaaacttcccttgcct

SEQ ID NO: 167571 - DNA, 120 bp, Artificial Sequence
  ENSG00000108510_66 (sequence is synthesized)
tttttatttatttaattttcttggtttggagatgtcagtcccaaacaccagagtctgtacttttctataacacagctcagattaaggtagggcatatgccaaggaggttctcacctccct

SEQ ID NO: 167572 - DNA, 120 bp, Artificial Sequence
  ENSG00000108510_67 (sequence is synthesized)
aaagaagggacttgaattttagggactttaattcacccctccttcaatacaactttcccccttcttgtttgcacatgccaagataactgcttttatgcaggctgtacccccttgaaaaat

SEQ ID NO: 167573 - DNA, 120 bp, Artificial Sequence
  ENSG00000108510_68 (sequence is synthesized)
cctttctacagtgctgctcacaaaagagcccaagttcgcctcctacctgcattgctgacttgaattcacagtcgccgagtctacctagctttcttggaagcagtctagcaaaatttctat

SEQ ID NO: 167574 - DNA, 120 bp, Artificial Sequence
  ENSG00000108510_69 (sequence is synthesized)
ttgtacgttcactaattatctacaaggacaaaatcagttgtatttacaaaactctacttcagtgtttgttttagtttttttttttactgaaacttgtttttgtgaatactctgtgcttag

SEQ ID NO: 167575 - DNA, 120 bp, Artificial Sequence
  ENSG00000108510_70 (sequence is synthesized)
aattaaatatcactttcttatgaacaacataacttcttcagattgtgtatatgaaaacattagcaagtcttgttttttctatgaagcaaacacaattggtgacaaaggttgtcaatcatt

SEQ ID NO: 167576 - DNA, 120 bp, Artificial Sequence
  ENSG00000108510_71 (sequence is synthesized)
tcttcaaaattataatgcagttctaatggtcagcatattttgatattaaatttaaagatcacctctctgcatttgtttttaaattatgctaatacaccacacattatgttggtatgtttt

SEQ ID NO: 167577 - DNA, 120 bp, Artificial Sequence
  ENSG00000108510_72 (sequence is synthesized)
gttctgtactttctttaaaaaaaaaaaaaaaacttgtctgagatttgaaggaaaatgtgcttatttggaatttccataaaaagagtatcctttttatacacttaatagtgactttacaaa

SEQ ID NO: 167578 - DNA, 120 bp, Artificial Sequence
  ENSG00000108510_73 (sequence is synthesized)
ataaaagttatattctcagttgtttaaaatcactaacctatgataaccacacctcaatttgaaagtagatttaaaattattccctgacaggttatttaatatggagccataaggagggaa

SEQ ID NO: 167579 - DNA, 120 bp, Artificial Sequence
  ENSG00000108510_74 (sequence is synthesized)
cccagtacacaattattttttatttgggaatcagggaatagttcccaaatatacaggatttattgataagattttttttcttcccttcatatatccattcaaactcaatggaaagttatt

SEQ ID NO: 167580 - DNA, 120 bp, Artificial Sequence
  ENSG00000108510_75 (sequence is synthesized)
aaataaccattagaaaagctcagtagacttatttgagaaattaagccttgtgcaggatgatggatttgacttactaatgtactgtcacagacaaatatgggtagttttgtttaaataggt

SEQ ID NO: 167581 - DNA, 120 bp, Artificial Sequence
  ENSG00000108510_76 (sequence is synthesized)
aagcaaaatattatactttatagcagtggattaccaacaccttgacttctttgttacagtgctaacatctttttttttgtgcaggtatccatgattattaagcagggtggaagttcagta

SEQ ID NO: 167582 - DNA, 120 bp, Artificial Sequence
  ENSG00000108510_77 (sequence is synthesized)
ttttgtcatttaaaaagattagttatataatgtctgcttccagccagtgagaaacatctagccatacctttcttatgcaagccattgagttatcaggactgtgaattaacactgtatgaa

SEQ ID NO: 167583 - DNA, 120 bp, Artificial Sequence
  ENSG00000108510_78 (sequence is synthesized)
taaatttctgtacaccttattgtttggccagaaggccaccaagtgtacttatatgtaatccttaaattttaaagtagctgtaatttttaaatatttctaaacttttcttaaaccactaaa

SEQ ID NO: 167584 - DNA, 120 bp, Artificial Sequence
  ENSG00000108510_79 (sequence is synthesized)
attaagctcttactacttagtcaactatcctcagctgtattcgtactcaattgtcagtatggcacagattactgtattaaaatattctcctttcgtcttcatatttaccttctgaggtaa

SEQ ID NO: 167585 - DNA, 120 bp, Artificial Sequence
  ENSG00000108510_80 (sequence is synthesized)
ttttttaacttaatgtgttactacaaagatttgcagatctttaatcaagcactatgttaatactgtaatatcagaatactatgttgcattatttaaaatgttcaaattgaatagattaaa

SEQ ID NO: 167586 - DNA, 120 bp, Artificial Sequence
  ENSG00000108510_81 (sequence is synthesized)
aagtttttaaatgctattgcatcatataatttgctattcatccactatggcattgcatatcaatcagttaatacacttaatgttgcatgagtgatattttggtctgggtttcctcttaag

SEQ ID NO: 167587 - DNA, 120 bp, Artificial Sequence
  ENSG00000108510_82 (sequence is synthesized)
attttagtttgtctgaattaaggaaaaatgtttttaatatacattcttattttgtcccacccctccagaaataagctggaaatcttaactttttggggggtcttttttggtgttttaatg

SEQ ID NO: 167588 - DNA, 120 bp, Artificial Sequence
  ENSG00000108510_83 (sequence is synthesized)
ggcccagaactgtggtttaaatttttatgtatgtattttcttttttgtggagtataaatttaaaaactggatttgggacctaaaatactcctcaggttgatgtattcatgaagttttaaa

SEQ ID NO: 167589 - DNA, 120 bp, Artificial Sequence
  ENSG00000108510_84 (sequence is synthesized)
acatctttagttttcaaagtaaactggatatgtggaccttaaagttattgagtttaagctacaaattgtaacgtcattactggacatgtcagcatcaaccctctcaaaatagcttggtca

SEQ ID NO: 167590 - DNA, 120 bp, Artificial Sequence
  ENSG00000108510_85 (sequence is synthesized)
ctttatgaaggggcgttttaaagttgttgtttagcagtgacatttaatatggtccaattgcttttctttttaacgtgacaaaaagagaataaggaacaaacactattgctgccgaatgcc

SEQ ID NO: 167591 - DNA, 120 bp, Artificial Sequence
  ENSG00000108510_86 (sequence is synthesized)
aaaagagaataaggaacaaacactattgctgccgaatgccataacactgagttgtacaaattgtgattgaggaaatgaaaaggtttatactttttaaaaaaaaaaaaacaaaaacaaaaa

SEQ ID NO: 167592 - DNA, 120 bp, Artificial Sequence
  ENSG00000108510_87 (sequence is synthesized)
tcggttacgcttacaccacctacgtctcctgaggaagtccaaacaggtatagcagtaatttgtctcatcagctctggtaatttgttattttgtgtacagtaagtacttaagaaataattt

SEQ ID NO: 167593 - DNA, 120 bp, Artificial Sequence
  ENSG00000108510_88 (sequence is synthesized)
attttgaaatagtttcaaacttcttgagaatttacaagtgtagtacaagtaatttccttagccatatttccaaactgttattatttactccatcaccctgtctgtatgatgtacattcat

SEQ ID NO: 167594 - DNA, 120 bp, Artificial Sequence
  ENSG00000108510_89 (sequence is synthesized)
tatcattggtctttttctgaaccatttgagaacaacctacagacatgatgtcccatcactcctgtgtactcagtgtgtttcccagaattaaggacactctcctatacaactattactcga

SEQ ID NO: 167595 - DNA, 120 bp, Artificial Sequence
  ENSG00000108510_90 (sequence is synthesized)
tcctcttagtcagaaaatcagcattgatacactgccatccagtttgcattccctgttttagatattttgctttctgtatttaaaagtagcgtgcttttatttttaaaggtttatgtgttt

SEQ ID NO: 167596 - DNA, 120 bp, Artificial Sequence
  ENSG00000108510_91 (sequence is synthesized)
atctataattaaaattactccaacagagcagcccattgctgtgttctaattcttagcccttaagtcctacaaaaataaacccaagcttttacagtaactgtcaatacagaactaaagcgt

SEQ ID NO: 167597 - DNA, 120 bp, Artificial Sequence
  ENSG00000108510_92 (sequence is synthesized)
tttagctattaaaaggggtttagttaccaaggtgcttattttcagcaaaacgccctgttactcagaagaacatacgcatatactaaagttctgacccatcgattcatgcaacagtttata

SEQ ID NO: 167598 - DNA, 120 bp, Artificial Sequence
  ENSG00000108510_93 (sequence is synthesized)
tctctgccctccctccatctacctttaaaacaaaaacacagaagaactttttacaatggaggagaaacgtataaaaacacagaagagctttttacaatggaggggaaatatgctcatgct

SEQ ID NO: 167599 - DNA, 120 bp, Artificial Sequence
  ENSG00000108510_94 (sequence is synthesized)
cagctgaccttacaaaaaagactgtctaatttccaactaaatgagaacactaaagtgtttggctaaaatccagcaatgattgactgacccaggtcagaggctggcagggacagaagggcc

SEQ ID NO: 167600 - DNA, 120 bp, Artificial Sequence
  ENSG00000108510_95 (sequence is synthesized)
agagtgctgccgctgcaggggctcatcctggcctccaaaccccaccttgatgtggaagccaggctctgtgcagcagctccatggctggtgtccagggccccttcgcactactccgaagtc

SEQ ID NO: 167601 - DNA, 120 bp, Artificial Sequence
  ENSG00000108510_96 (sequence is synthesized)
gcatcaggatagtctggtttgcttatacagcatgatccatgggacacctccttccttgccctcagcccacctcccccgacacgccaccgtgtgctggccctgcctggctcctgagaaccc

SEQ ID NO: 167602 - DNA, 120 bp, Artificial Sequence
  ENSG00000108510_97 (sequence is synthesized)
cactcttggtactgagagtggtaggttacagagatgtacttgattgccacatttgcctaatgagatctggttccaaaaagtagcatgctttttatctcaaaatataaataattttaccag

SEQ ID NO: 167603 - DNA, 120 bp, Artificial Sequence
  ENSG00000108510_98 (sequence is synthesized)
tgcaatatgaacagagcacagaacaagtgtgtattttcatttataagttcaaaaattgcatgttgataattacttataattagaagatatctaaagtataaacagtcatttgtttgattt

SEQ ID NO: 167604 - DNA, 120 bp, Artificial Sequence
  ENSG00000108510_99 (sequence is synthesized)
ttctttaactcataatgttgatctttaaaattaatttcaatgctacattgaggtttgatagaaaattttatgaattttaaagaattttgtaactttaaatcttaggaggaagtattctgc

SEQ ID NO: 167605 - DNA, 120 bp, Artificial Sequence
  ENSG00000108510_100 (sequence is synthesized)
tgcctatgtgtgatagtttgttacgccactgaatgcttatgcccactttatttgaaacagcttacatgaacatatgtcaggattttttttcaaaagaaaattcaggaaaaatatttcagg

SEQ ID NO: 167606 - DNA, 120 bp, Artificial Sequence
  ENSG00000108510_101 (sequence is synthesized)
aatttgaagctgattatagaagtacatgtaaatataagctttcagttcattcactgttaccagaggcagactctgaaagttttgtttcctagtagctaaataaaagacaattttatatgg

SEQ ID NO: 167607 - DNA, 120 bp, Artificial Sequence
  ENSG00000108510_102 (sequence is synthesized)
tgtattttttttaatagtcaccattataatttaagggtggaagtgatgcaagttcttaatactaggactcagtattggattcaaggtaggatttacaagaataaattcattgagtattaa

SEQ ID NO: 167608 - DNA, 120 bp, Artificial Sequence
  ENSG00000108511_0 (sequence is synthesized)
agcattcttttggacaccacacctaggtcggagcactgtcgtccttcagggctccagcctcttgatatttttgtacttcagtatcagctcgatagagcaaaagagagagaggacgagaga

SEQ ID NO: 167609 - DNA, 120 bp, Artificial Sequence
  ENSG00000108511_1 (sequence is synthesized)
gggggtcagagaaggggaagcaacggctctcacgttgggacaatattatctggaagctgaagaagaaactgaatactccttccttcctccccacccattcctttaaatccggagggggaa

SEQ ID NO: 167610 - DNA, 120 bp, Artificial Sequence
  ENSG00000108511_2 (sequence is synthesized)
aaaatcccaaggtctgcaaaggcgcggcgctcggactataaaacacaacaaatcataaacccggcggagcagcagcggccgcgcgcgcctcccctcccaatgagttcctatttcgtgaac

SEQ ID NO: 167611 - DNA, 120 bp, Artificial Sequence
  ENSG00000108511_3 (sequence is synthesized)
tccaccttccccgtcactctggccagcgggcaggagtccttcctgggccagctaccgctctattcgtcgggctatgcggacccgctgagacattaccccgcgccctacgggccagggccg

SEQ ID NO: 167612 - DNA, 120 bp, Artificial Sequence
  ENSG00000108511_4 (sequence is synthesized)
ggccaggacaagggctttgccacttcctcctattacccgccggcgggcggtggctacggccgagcggcgccctgcgactacgggccggcgccggccttctaccgcgagaaagagtcggcc

SEQ ID NO: 167613 - DNA, 120 bp, Artificial Sequence
  ENSG00000108511_5 (sequence is synthesized)
tgcgcactctccggcgccgacgagcagcccccgttccaccccgagccgcggaagtcggactgcgcgcaggacaagagcgtgttcggcgagacagaagagcagaagtgctccactccggtc

SEQ ID NO: 167614 - DNA, 120 bp, Artificial Sequence
  ENSG00000108511_6 (sequence is synthesized)
ctacaatcgctacctgacgcggcggcggcgcatcgagatcgcgcacgccctgtgcctgacggagaggcagatcaagatatggttccagaaccgacgcatgaagtggaaaaaggagagcaa

SEQ ID NO: 167615 - DNA, 120 bp, Artificial Sequence
  ENSG00000108511_7 (sequence is synthesized)
actgctcagcgcgtctcagctcagtgccgaggaggaggaagaaaaacaggccgagtgaaggtgctggaaagggagggaggacgcgaggggaaaggcctgtggggagccgagggcgtcaga

SEQ ID NO: 167616 - DNA, 120 bp, Artificial Sequence
  ENSG00000108511_8 (sequence is synthesized)
gagacccgggaaggaaggctctcgggtgggggagccaggagacctgctctccggcgcagacaggcggggcccagcgctctcctggacgcccccgcccgcacagctcccggcgggtgctct

SEQ ID NO: 167617 - DNA, 120 bp, Artificial Sequence
  ENSG00000108511_9 (sequence is synthesized)
gaggcctcactactcgagcccacccagcatcccgcgcgcccttccttcccgaggaactcgcctcagcctgatcaggcttcctggtgagaactgaggagcggactcacttgatgtttcctg

SEQ ID NO: 167618 - DNA, 120 bp, Artificial Sequence
  ENSG00000108511_10 (sequence is synthesized)
gaagcagagcaaaatgctcttgtccctgtcgcgtctcattttgtccatgtcccccgtgcacggttcaatggtagattcgctgtcccctcagcgggggccttgaagactccctgatcccag

SEQ ID NO: 167619 - DNA, 120 bp, Artificial Sequence
  ENSG00000108511_11 (sequence is synthesized)
acctgtcgtctctcccaccccctccccaaagccactggaaggagcacatactacctagaagtaagaagaggagcctcagaagaaaacaaagttctattttattaattttctatgtgttgt

SEQ ID NO: 167620 - DNA, 120 bp, Artificial Sequence
  ENSG00000108511_12 (sequence is synthesized)
gtttgtagtcttgtcttagctctggacgtgaaatacttcgatgatgatgatgatgatgatgatgataataataataataataacaacaacaacaacaataataaagatgtgaaaactcga

SEQ ID NO: 167621 - DNA, 120 bp, Artificial Sequence
  ENSG00000108511_13 (sequence is synthesized)
tgatctgggattttagtcaccatggagggtaaatggacaatctgcccaggactgcagcccgatactatttttcaaagccagaacttactccattttctatgcaaatgtcagaaaaatgaa

SEQ ID NO: 167622 - DNA, 120 bp, Artificial Sequence
  ENSG00000108511_14 (sequence is synthesized)
ctggcctccgcgggcttgcccctccccctcctgccatccctcccttgtctcggcctctggctattgccccagcgcagttctcttgcctggtgcggatatcgctgggttcccggcagcact

SEQ ID NO: 167623 - DNA, 120 bp, Artificial Sequence
  ENSG00000108511_15 (sequence is synthesized)
atttacagagaaatgtttactatctcccttcggagacatttttgaaattaaagggctgtgggtggaaacaccaaaaatgagggagactcccccctcaccaggaagcctgcccgagaatgc

SEQ ID NO: 167624 - DNA, 120 bp, Artificial Sequence
  ENSG00000108511_16 (sequence is synthesized)
ccaagtatctcgccactcccgcaggagggagcctcgctctacagggagacagttttgtggttttaatgcgctaaaacccaatctcggatatactactaataggcgcggcgctcggactat

SEQ ID NO: 167625 - DNA, 120 bp, Artificial Sequence
  ENSG00000108511_17 (sequence is synthesized)
atttgttggccttaagtcccaactgatgtccattagccggactcgaaagtgaggagccgttaatgtggactatggatcgatctacgtcattacggattaacggcctggatttatcattgg

SEQ ID NO: 167626 - DNA, 120 bp, Artificial Sequence
  ENSG00000108511_18 (sequence is synthesized)
gacggggggtgggaacaagatggatggaaagggagggaaagacaagatgcaactaggaagagacacacctgaccagcccctccccccaggctcaggttcctcctttgggcccagcggccg

SEQ ID NO: 167627 - DNA, 120 bp, Artificial Sequence
  ENSG00000108515_0 (sequence is synthesized)
gcgcagcctgagagggggtgagctgacactgtcccagctgccacctagactcggagctccatccaaacctccagcgaagacatcccaggtcgggtgaatcttccagccctgggggtggag

SEQ ID NO: 167628 - DNA, 120 bp, Artificial Sequence
  ENSG00000108515_1 (sequence is synthesized)
gtagtaaaggccatggccatgcagaaaatctttgcccgggaaatcttggactccaggggcaaccccacggtggaggtggacctgcacacggccaagggccgattccgagcagctgtgccc

SEQ ID NO: 167629 - DNA, 120 bp, Artificial Sequence
  ENSG00000108515_2 (sequence is synthesized)
agtggggcttccacgggtatctatgaggctctggaactaagagacggagacaaaggccgctacctggggaaaggagtcctgaaggctgtggagaacatcaacaatactctgggccctgct

SEQ ID NO: 167630 - DNA, 120 bp, Artificial Sequence
  ENSG00000108515_3 (sequence is synthesized)
ctgctgcaaaagaaactaagcgttgtggatcaagaaaaagttgacaaatttatgattgagctagatgggaccgagaataagtccaagtttggggccaatgccatcctgggcgtgtccttg

SEQ ID NO: 167631 - DNA, 120 bp, Artificial Sequence
  ENSG00000108515_4 (sequence is synthesized)
gccgtgtgtaaggcgggagcagctgagaagggggtccccctgtaccgccacatcgcagatctcgctgggaaccctgacctcatactcccagtgccagccttcaatgtgatcaacgggggc

SEQ ID NO: 167632 - DNA, 120 bp, Artificial Sequence
  ENSG00000108515_5 (sequence is synthesized)
tcccatgctggaaacaagctggccatgcaggagttcatgattctgcctgtgggagccagctccttcaaggaagccatgcgcattggcgccgaggtctaccaccacctcaagggggtcatc

SEQ ID NO: 167633 - DNA, 120 bp, Artificial Sequence
  ENSG00000108515_6 (sequence is synthesized)
ctggagctgctgaagacggccatccaggcggctggttacccagacaaggtggtgatcggcatggatgtggcagcatctgagttctatcgcaatgggaagtacgatcttgacttcaagtcg

SEQ ID NO: 167634 - DNA, 120 bp, Artificial Sequence
  ENSG00000108515_7 (sequence is synthesized)
cctgatgatcccgcacggcacatcactggggagaagctcggagagctgtataagagctttatcaagaactatcctgtggtctccatcgaagacccctttgaccaggatgactgggccact

SEQ ID NO: 167635 - DNA, 120 bp, Artificial Sequence
  ENSG00000108515_8 (sequence is synthesized)
tggacctccttcctctcgggggtgaacatccagattgtgggggatgacttgacagtcaccaaccccaagaggattgcccaggccgttgagaagaaggcctgcaactgtctgctgctgaag

SEQ ID NO: 167636 - DNA, 120 bp, Artificial Sequence
  ENSG00000108515_9 (sequence is synthesized)
gtcaaccagatcggctcggtgaccgaatcgatccaggcgtgcaaactggctcagtctaatggctggggggtgatggtgagccaccgctctggggagactgaggacacattcattgctgac

SEQ ID NO: 167637 - DNA, 120 bp, Artificial Sequence
  ENSG00000108515_10 (sequence is synthesized)
cttgtggtggggctctgcacaggacagatcaagactggcgccccctgccgctcggagcgtctggccaaatacaaccaactcatgaggatcgaggaggctcttggggacaaggcaatcttt

SEQ ID NO: 167638 - DNA, 120 bp, Artificial Sequence
  ENSG00000108515_11 (sequence is synthesized)
gctggacgcaagttccgtaacccgaaggccaagtgagaagctggaggctccaggactccactggacagacccaggtcttccagacctgcttcctgaaataaacactggtgccaaccaaga

SEQ ID NO: 167639 - DNA, 120 bp, Artificial Sequence
  ENSG00000108515_12 (sequence is synthesized)
ttcttcccaagcccccttcttccaacgtggaaccagagctggaagctaggagaagcaggagtctctctctgcactgcctcctgtccctgagctcagagaggacacctcagccctttgaga

SEQ ID NO: 167640 - DNA, 79 bp, Artificial Sequence
  ENSG00000108515_13 (sequence is synthesized)
ctgtccctgagctcagagaggacacctcagccctttgagaggtagagagactccctgtgaggtccttggcccgggctgg

SEQ ID NO: 167641 - DNA, 120 bp, Artificial Sequence
  ENSG00000108515_14 (sequence is synthesized)
ggctcagggataaatgcgcagcctgagagggggtgagctgacactgtcccagctgccacctagactcggagctccatccaaacctccagcgaagacatcccagctccagcacctgccttc

SEQ ID NO: 167642 - DNA, 120 bp, Artificial Sequence
  ENSG00000108515_15 (sequence is synthesized)
cctcgcagtaccgtgatgttgacgaacgttttcccggggacggcggcccagacggagggcgagtccttgtagcccacgatggccgcgtcctgacaggtcccgtccgccatgaggttgtcg

SEQ ID NO: 167643 - DNA, 120 bp, Artificial Sequence
  ENSG00000108515_16 (sequence is synthesized)
ctcaccatagcctgcctctgccccagctctgcccactccagctacagtcttacccaccaactccaagcttacctttcccctggcacctgacttacccacaccttgatctcaagactttgt

SEQ ID NO: 167644 - DNA, 120 bp, Artificial Sequence
  ENSG00000108515_17 (sequence is synthesized)
ttgactaatccttggcctgactccaagagctttgcccctgtggctctgtcatgaccccccacccccagcccacaccattcctctctcagattccgctgttctcagcagcatctcaagagc

SEQ ID NO: 167645 - DNA, 120 bp, Artificial Sequence
  ENSG00000108515_18 (sequence is synthesized)
ccgaaatcaagataagtcttttcctctcctacttcccaaagaacttagtcactgccctccctgcagagtgcttgctacccaaaacagaagggagaggccccacccaacccctgctttccc

SEQ ID NO: 167646 - DNA, 120 bp, Artificial Sequence
  ENSG00000108515_19 (sequence is synthesized)
gctggtatggctgcagaggagctcggggcagaccccgcactggccccagagccggcaaagtggagatctctaccgagggcagagacctacctccccgcagtgctacaagtggggcgccgg

SEQ ID NO: 167647 - DNA, 120 bp, Artificial Sequence
  ENSG00000108515_20 (sequence is synthesized)
aagagccccaggcgtgcagaagctcacaaaaggccacccgtcctcggtccattcatttttgttcactgttgattcagccccattcattgatgggctggggccgtgcgctgagcgcccaca

SEQ ID NO: 167648 - DNA, 120 bp, Artificial Sequence
  ENSG00000108515_21 (sequence is synthesized)
gtcgatggggaaaggggctctgaccgacagtccccacgccgggcgacaagtgctgtcccagcgttatcagtcgggcgccttgccagccgaaagggcctgtctaaattcgtttcctgtccc

SEQ ID NO: 167649 - DNA, 120 bp, Artificial Sequence
  ENSG00000108515_22 (sequence is synthesized)
cgggcaactgagggacccactcacgtgcagccgccattcgcgccgcttccagggcaagcacccagtcagggcctctcgctgcgcgccctagaccgcgcccgcccccacccaagtccctcc

SEQ ID NO: 167650 - DNA, 120 bp, Artificial Sequence
  ENSG00000108515_23 (sequence is synthesized)
tccttgtagcccacgatggccgcgtcctgacagccatggccatgcagaaaatctttgcccgggaaatcttggactccaggggcaaccccacggtggaggtggacctgcacacggccaagg

SEQ ID NO: 167651 - DNA, 120 bp, Artificial Sequence
  ENSG00000108515_24 (sequence is synthesized)
tggaacccccaaggctcttgaggagctggggtccacagaaaggggcccagttgattgagctccaaaactcatcctctggcctgtctaggagtcctgaaggctgtggagaacatcaacaat

SEQ ID NO: 167652 - DNA, 120 bp, Artificial Sequence
  ENSG00000108515_25 (sequence is synthesized)
actctgggccctgctctgctgcaaaaggcaagtggggaagcccgctcgctgcagcctcctccccatgcccctgctccctcagcccagacaggcctctcccgaaacattttcccttatcct

SEQ ID NO: 167653 - DNA, 120 bp, Artificial Sequence
  ENSG00000108515_26 (sequence is synthesized)
acttattcaagtaataagaaagcaaagaagagtttggccaaatcctctagtcgctctcatagctgaaggcacccaccggggccacttctgtccccagcgtcttctcgggtcgtgcagcca

SEQ ID NO: 167654 - DNA, 120 bp, Artificial Sequence
  ENSG00000108515_27 (sequence is synthesized)
ccagtgttcctgcccgaatcccgtgcagctgcctaatatactgatttcagtgacctgctttgccatcgacttggatccttccaattcttagccccattaaaatccccatttaagctcttc

SEQ ID NO: 167655 - DNA, 120 bp, Artificial Sequence
  ENSG00000108515_28 (sequence is synthesized)
tgccctgtcacccctccatgaggctccttctgacctctagccgtgtctctgccctgtctctgccttgtctctgccctgtctctgctctgtctctgccctgtctctgccctgtctctgccc

SEQ ID NO: 167656 - DNA, 120 bp, Artificial Sequence
  ENSG00000108515_29 (sequence is synthesized)
ctctgccttgtctctgccctgtctctgctctgtctctgccctgtctctgccctgtctctgccctgtctctgctctgtctctgccctgtctctgccctgtctctgctctgtctctgccctg

SEQ ID NO: 167657 - DNA, 120 bp, Artificial Sequence
  ENSG00000108515_30 (sequence is synthesized)
ttcccagatctcgcctggacagagccaaccccgcccagccagggttggcccccctggaaaatccacctttcagaccagctcctaagaagcagtttcctgaaattgaatctctcctgctgt

SEQ ID NO: 167658 - DNA, 120 bp, Artificial Sequence
  ENSG00000108515_31 (sequence is synthesized)
ggtcccacccctccctctcttccacaatccaaaccttccctgaaggctctatgtgcttccttccctgccatataacccagttccttcccattccaatcctaggctcgataactccagcct

SEQ ID NO: 167659 - DNA, 120 bp, Artificial Sequence
  ENSG00000108515_32 (sequence is synthesized)
cgttccaaccccacaccctacacccaaatcatattgagagtttctttgaggcaaagatcttggcatttctttgtatcttcttgagtccttcttaaaccagtgccttcttgatgaatggaa

SEQ ID NO: 167660 - DNA, 120 bp, Artificial Sequence
  ENSG00000108518_0 (sequence is synthesized)
ctcccggccccggcgcaggcgcaggcgcgggcacacgcgccgccgcccgccggtccttcccttcggcggaggtgggggaaggaggagtcatcccgtttaaccctgggctccccgaactct

SEQ ID NO: 167661 - DNA, 120 bp, Artificial Sequence
  ENSG00000108518_1 (sequence is synthesized)
ccttaatttgctaaatttgcagcttgctaattcctcctgctttctccttccttccttcttctggctcactccctgccccgataccaaagtctggtttatattcagtgcaaattggagcaa

SEQ ID NO: 167662 - DNA, 120 bp, Artificial Sequence
  ENSG00000108518_2 (sequence is synthesized)
accctacccttcacctctctcccgccaccccccatccttctgcattgctttccatcgaactctgcaaattttgcaatagggggagggatttttaaaattgcatttgcaaagttcggtgtc

SEQ ID NO: 167663 - DNA, 120 bp, Artificial Sequence
  ENSG00000108518_3 (sequence is synthesized)
tgggctggcgagtgggggagggagggaatggggagtaggccccgcccctaccgtcctttgcaaataaaaatctagcggggcggggggggggaggagcaggaagtggcggtgcgagggctg

SEQ ID NO: 167664 - DNA, 120 bp, Artificial Sequence
  ENSG00000108518_4 (sequence is synthesized)
caggaagtggcggtgcgagggctgctgcacagcgagcggagccgcggtccggacggcagcgcgtgccccgagctctccgcctccccccgcccgccagccgaggcagctcgagcccagtcc

SEQ ID NO: 167665 - DNA, 120 bp, Artificial Sequence
  ENSG00000108518_5 (sequence is synthesized)
ctacaaggactcgccctccgtctgggccgccgtccccgggaaaacgttcgtcaacatcacgccagctgaggtgggtgtcctggttggcaaagaccggtcaagtttttacgtgaatgggct

SEQ ID NO: 167666 - DNA, 120 bp, Artificial Sequence
  ENSG00000108518_6 (sequence is synthesized)
gacacttgggggccagaaatgttcggtgatccgggactcactgctgcaggatggggaatttagcatggatcttcgtaccaagagcaccggtggggcccccaccttcaatgtcactgtcac

SEQ ID NO: 167667 - DNA, 120 bp, Artificial Sequence
  ENSG00000108518_7 (sequence is synthesized)
caagactgacaagacgctagtcctgctgatgggcaaagaaggtgtccacggtggtttgatcaacaagaaatgttatgaaatggcctcccaccttcggcgttcccagtactgacctcgtct

SEQ ID NO: 167668 - DNA, 120 bp, Artificial Sequence
  ENSG00000108518_8 (sequence is synthesized)
gtcccttccccttcaccgctccccacagctttgcacccctttcctccccatacacacacaaaccattttattttttgggccattaccccataccccttattgctgccaaaaccacatggg

SEQ ID NO: 167669 - DNA, 120 bp, Artificial Sequence
  ENSG00000108518_9 (sequence is synthesized)
ctgggggccagggctggatggacagacacctccccctacccatatccctcccgtgtgtggttggaaaacttttgttttttggggttttttttttctgaataaaaaagattctactaacaa

SEQ ID NO: 167670 - DNA, 120 bp, Artificial Sequence
  ENSG00000108518_10 (sequence is synthesized)
gggggcttggggtgaaagggggaggggggaaaggttcccggggtacctagacccgagagctggcctgccgggtctggcccctgtccaccttcaaaagttttccaactttcccggaaagcc

SEQ ID NO: 167671 - DNA, 120 bp, Artificial Sequence
  ENSG00000108518_11 (sequence is synthesized)
cccaggggtctgcttcctcatctcagagcagagatacctggagctaaactctaggttacttggagacccaggcgtccgggccctaacagctcctgcagaacctttgaccaaataagggca

SEQ ID NO: 167672 - DNA, 120 bp, Artificial Sequence
  ENSG00000108518_12 (sequence is synthesized)
aagttgcttctcttgcctcgcccgcccccctcccttcccctctccgcttctgcttttcctgaaggagagttctgagcatccaaaggctcctcacttacctcactgactccctttatttcc

SEQ ID NO: 167673 - DNA, 120 bp, Artificial Sequence
  ENSG00000108518_13 (sequence is synthesized)
tgggtttactttccccattaacactgacatctaaatctctagaggagtatgtcatcccttcctccctggttccatattctaagtttcagaatcatgatctttttctgcactaacgtccca

SEQ ID NO: 167674 - DNA, 120 bp, Artificial Sequence
  ENSG00000108518_14 (sequence is synthesized)
caggtgggtctttggagaacacggtgggaatcttggtgcactgactaacttgatgggcgcttggttcctcttccagccagctgaggtgggtgtcctggttggcaaagaccggtcaagttt

SEQ ID NO: 167675 - DNA, 80 bp, Artificial Sequence
  ENSG00000108518_15 (sequence is synthesized)
gcactcccggccccggcgcaggcgcaggcgcgggcacacgcgccgccgcccgccggtccttcccttcggcggaggaagtg

SEQ ID NO: 167676 - DNA, 120 bp, Artificial Sequence
  ENSG00000108523_0 (sequence is synthesized)
aggggcgtaactgatttggaaaccagaggaaaggcgctgttttcaccgaattagaatcgcgggaaaatagagaagagtttgtttgaaggtctcgcgagatcgagtgagtacggctcgcca

SEQ ID NO: 167677 - DNA, 120 bp, Artificial Sequence
  ENSG00000108523_1 (sequence is synthesized)
agttggagcgctctcgcgatagacacagcaactattcagctgcgaggggacgggagaggtggtgagcactctcgcgagatttgaaggagcggcggaggccagagggaggagaggaccgga

SEQ ID NO: 167678 - DNA, 120 bp, Artificial Sequence
  ENSG00000108523_2 (sequence is synthesized)
agtccttcatctcaagcatccaatgctgaaagcggcctgattttctctaccggaagcccttttccagaggctgggaacacggcccacctagcaggaagtcccacctccttgagctccgcc

SEQ ID NO: 167679 - DNA, 120 bp, Artificial Sequence
  ENSG00000108523_3 (sequence is synthesized)
acccttcccgaagtttttctgtcacctgtgttaggctccgtcccctttccgcgttttatccccgtaccagaaaaggatacatttagtgcctcccacccagctccactaaacgggttggat

SEQ ID NO: 167680 - DNA, 120 bp, Artificial Sequence
  ENSG00000108523_4 (sequence is synthesized)
atctcattctttgagttggtgttccttccccggcgcccccatgtagctgggaagtgggacctgggggtggttggacccctgggatcctaaaggaggggcagggagggcgcagaactccgc

SEQ ID NO: 167681 - DNA, 120 bp, Artificial Sequence
  ENSG00000108523_5 (sequence is synthesized)
ttctgctccttgctaccaggacgcgcggcctcctcagcctctttcctcccgctgccatgcaccctgcagccttcccgcttcctgtggttgtggccgctgtgctgtggggagcggccccga

SEQ ID NO: 167682 - DNA, 120 bp, Artificial Sequence
  ENSG00000108523_6 (sequence is synthesized)
cccgggggctcattcgagcgacctcggaccacaatgccagcatggactttgcagaccttccagctctgtttggggctaccttgagccaggagggcctccaggggttccttgtggaggctc

SEQ ID NO: 167683 - DNA, 120 bp, Artificial Sequence
  ENSG00000108523_7 (sequence is synthesized)
tgcccagaaggctggatatggtgccgctgtagtacacaatgtgaattccaatgaacttctgaacatggtgtggaatagtgaggaaatccagcagcagatctggatcccgtctgtatttat

SEQ ID NO: 167684 - DNA, 120 bp, Artificial Sequence
  ENSG00000108523_8 (sequence is synthesized)
tggggagagaagctccgagtacctgcgtgccctctttgtctacgagaagggggctcgggtgcttctggttccagacaataccttccccttgggctattacctcatccctttcacagggat

SEQ ID NO: 167685 - DNA, 120 bp, Artificial Sequence
  ENSG00000108523_9 (sequence is synthesized)
tgtgggactgctggttttggccatgggagcagtaatgatagctcgttgtatccagcaccggaaacggctccagcggaatcgacttaccaaagagcaactgaaacagattcctacacatga

SEQ ID NO: 167686 - DNA, 120 bp, Artificial Sequence
  ENSG00000108523_10 (sequence is synthesized)
ctatcagaagggagaccagtatgatgtctgtgccatttgcctggatgaatatgaggatggggacaagctgcgggtactcccctgtgctcatgcctaccacagccgctgcgtggacccctg

SEQ ID NO: 167687 - DNA, 120 bp, Artificial Sequence
  ENSG00000108523_11 (sequence is synthesized)
gctcactcagacccggaagacctgccccatttgcaagcagcctgttcatcggggtcctggggacgaagaccaagaggaagaaactcaagggcaagaggagggtgatgaaggggagccaag

SEQ ID NO: 167688 - DNA, 120 bp, Artificial Sequence
  ENSG00000108523_12 (sequence is synthesized)
ggaccaccctgcctcagaaaggaccccacttttgggttctagccccactcttcccacctcctttggttccttagccccagctccccttgtttttcctgggccttcaacagatcccccact

SEQ ID NO: 167689 - DNA, 120 bp, Artificial Sequence
  ENSG00000108523_13 (sequence is synthesized)
gtcccctccctcttcccctgttatcctggtctaataaccccccacacatacacctctggtgacctatttgcacagaccgtcgtcttccctccagtcttctgagggataggggacattcca

SEQ ID NO: 167690 - DNA, 120 bp, Artificial Sequence
  ENSG00000108523_14 (sequence is synthesized)
tcccaagcttctcccttacccacacctatccttttgaggggctttggggtggagctggggcaagcagagggactgggtcttcacttcttgggctaataaaattgtttctttgtggactaa

SEQ ID NO: 167691 - DNA, 120 bp, Artificial Sequence
  ENSG00000108523_15 (sequence is synthesized)
cgcccctccagctctcaggtccgacacccgctggaagccggcgcgggcgcaggcgcgcagcgcaaaggcggccgggagtaaggcggagctgaaggaggagcttgatggaagcgtgcgaga

SEQ ID NO: 167692 - DNA, 120 bp, Artificial Sequence
  ENSG00000108523_16 (sequence is synthesized)
gccctctttgtctacgagaaggggtaggacatgtgcctccttcccattcttccttcagcaagcagttccatgccaacctggagcccaggcctcctcattacccgaaccattcagcctcct

SEQ ID NO: 167693 - DNA, 120 bp, Artificial Sequence
  ENSG00000108523_17 (sequence is synthesized)
tgcttgtcccttctagccctaaattcttccatgttctgccctgaccttatcctgcctacctgtcttatctcttccactggctttgtaggtgaggggaaatttttgcaaggctttaaaagc

SEQ ID NO: 167694 - DNA, 120 bp, Artificial Sequence
  ENSG00000108523_18 (sequence is synthesized)
ttcccattcctgtccccacctatgggctttgtccagagccagttactttgtccctctttttttctccctttgcctttctcgccctgctgagactggtcatccttttcccagggctcgggt

SEQ ID NO: 167695 - DNA, 120 bp, Artificial Sequence
  ENSG00000108523_19 (sequence is synthesized)
gcttctggttccagacaataccttccccttgggctattacctcatccctttcacagggattgtgggactgctggttttggccatgggagcagtaatggtgagtagctgagggaacatgat

SEQ ID NO: 167696 - DNA, 120 bp, Artificial Sequence
  ENSG00000108523_20 (sequence is synthesized)
gaggccagactggatctggagttgggagatgggagtggcttgtcctagattgtctagttttgttcctaagccttgtccatccacccccgcttcccccagatagctcgttgtatccagcac

SEQ ID NO: 167697 - DNA, 120 bp, Artificial Sequence
  ENSG00000108528_0 (sequence is synthesized)
ggcttccagcgggtgtcggacctgagagctggaggggcgtgcgcgcgccctcgctctgttgcgcgcgcggtgtcaccttgggcgcgagcggggccgcgcgcgcacgggacccggagccga

SEQ ID NO: 167698 - DNA, 120 bp, Artificial Sequence
  ENSG00000108528_1 (sequence is synthesized)
gggccattgagtggcgatggcggcgacggcgagtgccggggccggcgggatagacgggaagccccgtacctcccctaagtccgtcaagttcctgtttgggggcctggccgggatgggagc

SEQ ID NO: 167699 - DNA, 120 bp, Artificial Sequence
  ENSG00000108528_2 (sequence is synthesized)
tacagtttttgtccagcccctggacctggtgaagaaccggatgcagttgagcggggaaggggccaagactcgagagtacaaaaccagcttccatgccctcaccagtatcctgaaggcaga

SEQ ID NO: 167700 - DNA, 120 bp, Artificial Sequence
  ENSG00000108528_3 (sequence is synthesized)
aggcctgaggggcatttacactgggctgtcggctggcctgctgcgtcaggccacctacaccactacccgccttggcatctataccgtgctgtttgagcgcctgactggggctgatggtac

SEQ ID NO: 167701 - DNA, 120 bp, Artificial Sequence
  ENSG00000108528_4 (sequence is synthesized)
tccccctggctttctgctgaaggctgtgattggcatgaccgcaggtgccactggtgcctttgtgggaacaccagccgaagtggctcttatccgcatgactgccgatggccggcttccagc

SEQ ID NO: 167702 - DNA, 120 bp, Artificial Sequence
  ENSG00000108528_5 (sequence is synthesized)
tgaccagcgccgtggctacaaaaatgtgtttaacgccctgattcgaatcacccgggaagagggtgtcctcacactgtggcggggctgcatccctaccatggctcgggccgtcgtcgtcaa

SEQ ID NO: 167703 - DNA, 120 bp, Artificial Sequence
  ENSG00000108528_6 (sequence is synthesized)
tgctgcccagctcgcctcctactcccaatccaagcagttcttactggactcaggctacttctctgacaacatcttgtgccacttctgtgccagcatgatcagcggtcttgtcaccactgc

SEQ ID NO: 167704 - DNA, 120 bp, Artificial Sequence
  ENSG00000108528_7 (sequence is synthesized)
tgtggacattgccaagacccgaatccagaacatgcggatgattgatgggaagccggaatacaagaacgggctggacgtgctgttcaaagttgtccgctacgagggcttcttcagcctgtg

SEQ ID NO: 167705 - DNA, 120 bp, Artificial Sequence
  ENSG00000108528_8 (sequence is synthesized)
gaagggcttcacgccgtactatgcccgcctgggcccccacaccgtcctcaccttcatcttcttggagcagatgaacaaggcctacaagcgtctcttcctcagtggctgaagcggccgggg

SEQ ID NO: 167706 - DNA, 120 bp, Artificial Sequence
  ENSG00000108528_9 (sequence is synthesized)
gctcccactcgcctgctgcgcctatagccactgcgccctgggggcctgggctctgctgccctggacccctctatttatttcccttccacagtgtggtttcttcctctgcggtaaaggact

SEQ ID NO: 167707 - DNA, 120 bp, Artificial Sequence
  ENSG00000108528_10 (sequence is synthesized)
tggtctgttctaccccctgctccagcttgccctgctcgtcctgatcctgtgatttctctgtccttggctattcttgcagggagctggaaaacttctgaggatttctggcctccccctggg

SEQ ID NO: 167708 - DNA, 120 bp, Artificial Sequence
  ENSG00000108528_11 (sequence is synthesized)
ttttagtttcagggcacacaggacagcagaagatcccctttgtcagtggggaaaccaaggcagagctgaggggacagggaggagcagaagccatcaagatggtcaaagggcctgcagagg

SEQ ID NO: 167709 - DNA, 120 bp, Artificial Sequence
  ENSG00000108528_12 (sequence is synthesized)
gagatgtggcccttcctccccctcattgaggacttaataaattggattgatgacaccagccccaaatctggagagtctggggggtggctaggagaggggaggagactggacaaagaagct

SEQ ID NO: 167710 - DNA, 120 bp, Artificial Sequence
  ENSG00000108528_13 (sequence is synthesized)
ggagaataggaactggagtttttaagaaaaattgttaaagaaaaagcagccgctggttttttgcaaatgctgtataaatctgtcatgccacagcagctgacagggccagaaaaactcaaa

SEQ ID NO: 167711 - DNA, 120 bp, Artificial Sequence
  ENSG00000108528_14 (sequence is synthesized)
aaagaggaggaagggaagggcaaaaggaaccgggcccggttcatctctgggtctgttgcagtgaactgtgccggcacggggtcagcgcgatctccagcgtattgcgagttccccgatggg

SEQ ID NO: 167712 - DNA, 120 bp, Artificial Sequence
  ENSG00000108528_15 (sequence is synthesized)
ctgctagggccccattgcaggacccttatggactgcatgcagggtcgttgcacaacccccgccgggccagctgagtttcccagcgcattgctaagctcggccgggcggcagggggttcca

SEQ ID NO: 167713 - DNA, 120 bp, Artificial Sequence
  ENSG00000108528_16 (sequence is synthesized)
ggccattaaatggctcctgcaggactacctggagtcctaaatcttggatgccccttcctcccctccctgtgtcggactgcgtgcagccccaggtcactgcttgactgtcatgaagctgct

SEQ ID NO: 167714 - DNA, 120 bp, Artificial Sequence
  ENSG00000108528_17 (sequence is synthesized)
tggagcactttcattgcatggcccctactggacaactagacttttcagacccgttgcacttggtgtacatatagactcttatacacatgctcaccagcatcctgattcttgaatcgcatg

SEQ ID NO: 167715 - DNA, 120 bp, Artificial Sequence
  ENSG00000108528_18 (sequence is synthesized)
ccccgcctcacctcccccaggctacttctctgacaacatcttgtgccacttctgtgccagcatgatcagcggtcttgtcaccactgctgcctccatgcctgtggacattgccaagacccg

SEQ ID NO: 167716 - DNA, 120 bp, Artificial Sequence
  ENSG00000108551_0 (sequence is synthesized)
agagcaagcggcctgtgcccagatcctgggagaaccccagccgagcccagcctagcccgagcccagcccgagcggagccggagccccaagcccgagccgcgcccagcccgagcagagccc

SEQ ID NO: 167717 - DNA, 120 bp, Artificial Sequence
  ENSG00000108551_1 (sequence is synthesized)
tccagccgctcaccccgcgtgccaccccagcgaccctcagccgctctctgcccttctctcggccccgcgcccgccctcgcggcccctctgcccaatgaaactggccgcgatgatcaagaa

SEQ ID NO: 167718 - DNA, 120 bp, Artificial Sequence
  ENSG00000108551_2 (sequence is synthesized)
gatgtgcccgagcgactcggagctgagtatcccggccaagaactgctatcgcatggtcatcctcggctcgtccaaggtgggcaagacggccatcgtgtcgcgcttcctcaccggccgctt

SEQ ID NO: 167719 - DNA, 120 bp, Artificial Sequence
  ENSG00000108551_3 (sequence is synthesized)
cgaggacgcctacacgcctaccatcgaggacttccaccgcaagttctactccatccgcggcgaggtctaccagctcgacatcctcgacacgtccggcaaccacccgttccccgccatgcg

SEQ ID NO: 167720 - DNA, 120 bp, Artificial Sequence
  ENSG00000108551_4 (sequence is synthesized)
gcgcctctccatcctcacaggagacgttttcatcctggtgttcagtctggacaaccgcgactccttcgaggaggtgcagcggctcaggcagcagatcctcgacaccaagtcttgcctcaa

SEQ ID NO: 167721 - DNA, 120 bp, Artificial Sequence
  ENSG00000108551_5 (sequence is synthesized)
gaacaaaaccaaggagaacgtggacgtgcccctggtcatctgcggcaacaagggtgaccgcgacttctaccgcgaggtggaccagcgcgagatcgagcagctggtgggcgacgaccccca

SEQ ID NO: 167722 - DNA, 120 bp, Artificial Sequence
  ENSG00000108551_6 (sequence is synthesized)
gcgctgcgcctacttcgagatctcggccaagaagaacagcagcctggaccagatgttccgcgcgctcttcgccatggccaagctgcccagcgagatgagcccagacctgcaccgcaaggt

SEQ ID NO: 167723 - DNA, 120 bp, Artificial Sequence
  ENSG00000108551_7 (sequence is synthesized)
gcggcggcggcggcggcgacccgggcgacgcctttggcatcgtggcacccttcgcgcgccggcccagcgtacacagcgacctcatgtacatccgcgagaaggccagcgccggcagccagg

SEQ ID NO: 167724 - DNA, 120 bp, Artificial Sequence
  ENSG00000108551_8 (sequence is synthesized)
ccaaggacaaggagcgctgcgtcatcagctaggagccccgccgcgctggcgacacaacctaaggaggacctttttgttaagtcaaatccaacggcccggtgcgccccaggccgggagcgc

SEQ ID NO: 167725 - DNA, 120 bp, Artificial Sequence
  ENSG00000108551_9 (sequence is synthesized)
gcgcggactggcgtctcccctcccggcgatccgcccccagcactggggaggcgccactgaaccgagaagggacggtcatctgctccggaaggaaagagaacgggccaagactgggactat

SEQ ID NO: 167726 - DNA, 120 bp, Artificial Sequence
  ENSG00000108551_10 (sequence is synthesized)
tccccacccccggtcccccattgaggcccgccacccccataactttgggagcgagggcccagccgagggtggatttatcttctcaaagacctaagagtgagcgcggggtgggggagggat

SEQ ID NO: 167727 - DNA, 120 bp, Artificial Sequence
  ENSG00000108551_11 (sequence is synthesized)
gtgaagttatccagcctctgctaggcttcaagaaaccgtcatgcccgcttgagggtcaggacccacggggcattatcttgtctgtgattccgggttgctgtgacagccggtagagcctct

SEQ ID NO: 167728 - DNA, 120 bp, Artificial Sequence
  ENSG00000108551_12 (sequence is synthesized)
gccctcccaaaactaagcgggggggcgtgggtcaaatcatagccaagtgacttgtttacatgtgagtgaaactgcacaaaggaacacaaaacaaaacttgcactttaacggtagttccgg

SEQ ID NO: 167729 - DNA, 120 bp, Artificial Sequence
  ENSG00000108551_13 (sequence is synthesized)
tgtcaacatggacacgaacaaaaccttacccaggtgtttatactgtgtgtgtctgaggtctttaaagttattgctttatttggttttttaatatacaataaaataatttaaaatggaaaa

SEQ ID NO: 167730 - DNA, 120 bp, Artificial Sequence
  ENSG00000108556_0 (sequence is synthesized)
agagctcagaataaccctgagaaccacgcagcaggatggcaagggctccgcttggggtcctgctcctcttggggcttctcggcaggggtgtggggaagaacgaggaactgcgtctttatc

SEQ ID NO: 167731 - DNA, 120 bp, Artificial Sequence
  ENSG00000108556_1 (sequence is synthesized)
accatctcttcaacaactatgacccaggaagccggccagtgcgggagcctgaggatactgtcaccatcagcctcaaggtcaccctgacgaatctcatctcactgaatgaaaaagaggaga

SEQ ID NO: 167732 - DNA, 120 bp, Artificial Sequence
  ENSG00000108556_2 (sequence is synthesized)
ctctcaccactagcgtctggattggaatcgattggcaggattaccgactcaactacagcaaggacgactttgggggtatagaaaccctgcgagtcccttcagaactcgtgtggctgccag

SEQ ID NO: 167733 - DNA, 120 bp, Artificial Sequence
  ENSG00000108556_3 (sequence is synthesized)
agattgtgctggaaaacaatattgatggccagttcggagtggcctacgacgccaacgtgctcgtctacgagggcggctccgtgacgtggctgcctccggccatctaccgcagcgtctgcg

SEQ ID NO: 167734 - DNA, 120 bp, Artificial Sequence
  ENSG00000108556_4 (sequence is synthesized)
cagtggaggtcacctacttccccttcgattggcagaactgttcgcttattttccgctctcagacgtacaatgccgaagaggtggagttcacttttgccgtagacaacgacggcaagacca

SEQ ID NO: 167735 - DNA, 120 bp, Artificial Sequence
  ENSG00000108556_5 (sequence is synthesized)
tcaacaagatcgacatcgacacagaggcctatactgagaacggcgagtgggccatcgacttctgcccgggggtgatccgccgccaccacggtggcgccaccgacggcccaggggagactg

SEQ ID NO: 167736 - DNA, 120 bp, Artificial Sequence
  ENSG00000108556_6 (sequence is synthesized)
acgtcatctactcgctcatcatccgccggaagccgctcttctacgtcattaacatcatcgtgccctgtgtgctcatctcgggcctggtgctgctcgcctacttcctgccggcgcaggccg

SEQ ID NO: 167737 - DNA, 120 bp, Artificial Sequence
  ENSG00000108556_7 (sequence is synthesized)
gcggccagaaatgcacggtctccatcaacgtcctgctcgcccagaccgtcttcttgttcctcattgcccagaaaatcccagagacttctctgagcgtgccgctcctgggcaggttcctta

SEQ ID NO: 167738 - DNA, 120 bp, Artificial Sequence
  ENSG00000108556_8 (sequence is synthesized)
ttttcgtcatggtggtcgccacgctcattgtcatgaattgcgtcatcgtgctcaacgtgtcccagcggacgcccaccacccacgccatgtccccgcggctgcgccacgttctcctggagc

SEQ ID NO: 167739 - DNA, 120 bp, Artificial Sequence
  ENSG00000108556_9 (sequence is synthesized)
tgctgccgcgcctcctgggctccccgccgccgcccgaggccccccgggccgcctcgcccccaaggcgggcgtcgtcggtgggcttattgctccgcgcggaggagctgatactgaaaaagc

SEQ ID NO: 167740 - DNA, 120 bp, Artificial Sequence
  ENSG00000108556_10 (sequence is synthesized)
cgcccccgaggtccgctgctgtgtggatgccgtgaacttcgtggccgagagcacgagagatcaggaggccaccggcgaggaagtgtccgactgggtgcgcatggggaatgcccttgacaa

SEQ ID NO: 167741 - DNA, 120 bp, Artificial Sequence
  ENSG00000108556_11 (sequence is synthesized)
catctgcttctgggccgctctggtgctcttcagcgtgggctccagcctcatcttcctcggggcctacttcaaccgagtgcctgatctcccctacgcgccgtgtatccagccttagctcgc

SEQ ID NO: 167742 - DNA, 120 bp, Artificial Sequence
  ENSG00000108556_12 (sequence is synthesized)
accgacttcaatttcccacccatctccagtaggaaattgattttgaaaaagtaggctgccgccaccacggcattatgatcccttccccctgctgatcaatctgcagtttgtgaacttcac

SEQ ID NO: 167743 - DNA, 120 bp, Artificial Sequence
  ENSG00000108556_13 (sequence is synthesized)
aagaatggtgtgtgcccgttccctggcgtgtgtaggcctggccgcagtccaggggtcagcaggaggaaagggttcacataggctctcaggtgccagtcttccagaaagcaaggactgccc

SEQ ID NO: 167744 - DNA, 120 bp, Artificial Sequence
  ENSG00000108556_14 (sequence is synthesized)
ttcattcagccttgctgacctcccagcctttctaaggctcagccccacgggactctggtggctgccagcttgtgagctatctatctatattcatttcatagccaaacaggagaccccttt

SEQ ID NO: 167745 - DNA, 120 bp, Artificial Sequence
  ENSG00000108556_15 (sequence is synthesized)
gcaggacttgcacacagggaggctgtagccaggaaaccctcttcttccctggtctggctctgctggagcgggtgggaaccaaacaccttcagtgctggtggccctcaggcccacaggttt

SEQ ID NO: 167746 - DNA, 120 bp, Artificial Sequence
  ENSG00000108556_16 (sequence is synthesized)
aaggctgaggctgccctgacccttccacagtcatttcttctaggttttcttggcccagcactgcccatcccaccccatgaggctcactcattgcagatcccagcccaccctgcccctttc

SEQ ID NO: 167747 - DNA, 120 bp, Artificial Sequence
  ENSG00000108556_17 (sequence is synthesized)
ttccccaccctggaggctctctctgcctagtctacagtactgacagaaagcaaggacatgcggcctgcatggtgggagctggttgaattgtctttattaacaaacaggatatccaaggcc

SEQ ID NO: 167748 - DNA, 120 bp, Artificial Sequence
  ENSG00000108556_18 (sequence is synthesized)
actacattgaggaggggtggggggggagggagaagggttacttgctgctcacactatatacagatgcaagcaaggggcgtggagagtgagggctccctgctccctccctccaccggggaa

SEQ ID NO: 167749 - DNA, 120 bp, Artificial Sequence
  ENSG00000108556_19 (sequence is synthesized)
gggcatgggctagaagaggagaggggggtcgggaatggggggaatgttttggctggcggggtcccccctccattccctggagtttgggggaaggggaatcattaaagtgctttcagaaaa

SEQ ID NO: 167750 - DNA, 120 bp, Artificial Sequence
  ENSG00000108556_20 (sequence is synthesized)
acaggaagaggctggagcggaaagtgggaagcgaacctcgaaggaagagcagccaggcccggggcactgtcacttgccgtcccctctgcagctccaggcaggggtgtggggaagaacgag

SEQ ID NO: 167751 - DNA, 120 bp, Artificial Sequence
  ENSG00000108556_21 (sequence is synthesized)
aggcactgggtgggacgctccagcgcggccggaggtacagatgggaacagaggcgtgcgggctgggcttgggtgaaggggtgggcttgggatcgcggccccgctagatcccagcttccag

SEQ ID NO: 167752 - DNA, 120 bp, Artificial Sequence
  ENSG00000108556_22 (sequence is synthesized)
gggggcacaggggttagcggggaggcagaggtccttgttcccgctacccgatcgccgcgtatcctaagccccccagtaccccacctctaacaaggtggtgccgaagctcacgaggctggc

SEQ ID NO: 167753 - DNA, 120 bp, Artificial Sequence
  ENSG00000108556_23 (sequence is synthesized)
tgtggcttctctcaacaccagccccagggtgggcttcggggcaggcagcatcccctgcatcttcggttcgggtggctccagggacttcagctctctgaacctctgctccagatattcatg

SEQ ID NO: 167754 - DNA, 120 bp, Artificial Sequence
  ENSG00000108556_24 (sequence is synthesized)
ggctgcggccacggagagttccagggaagacagaagcgggggctggagggccacctggagaaggagcagagcagtagagtagcagggcaggggtcacaggggcgaacaggagacctaccc

SEQ ID NO: 167755 - DNA, 120 bp, Artificial Sequence
  ENSG00000108556_25 (sequence is synthesized)
agaaggtctcgaggtgcagcccttggcgggcgtagcctcacctcggtggagctgtggaagtggtagatccacatcagggtgtccagggagctgggggtccccttcatggccgccacaagt

SEQ ID NO: 167756 - DNA, 120 bp, Artificial Sequence
  ENSG00000108556_26 (sequence is synthesized)
ggtaggacaggagaagggctgggggacgcgtctgtcgtcgtgtagggggcgcagctggagggcgtaaccagcccgtaccaggagaagccgtgtttgtgaggtcagcgcgcggcgccttcg

SEQ ID NO: 167757 - DNA, 80 bp, Artificial Sequence
  ENSG00000108557_0 (sequence is synthesized)
cggccaaggcccgctccccgcgtccccgggcgccgcccccgcccgcggctgggctccgagagacgagtgggagagcgagt

SEQ ID NO: 167758 - DNA, 120 bp, Artificial Sequence
  ENSG00000108557_1 (sequence is synthesized)
cgagagacgagtgggagagcgagtgcagcgagggcgagaggcgagccgagcaggccgccctgcccgcggccctagcgccggcgcgaggagggggcgccgcggcccaccctccttcctgcc

SEQ ID NO: 167759 - DNA, 120 bp, Artificial Sequence
  ENSG00000108557_2 (sequence is synthesized)
gggccgccgcgccccgacccccatggccacccaggcctccgggccgcgaagtcgcagcgccagacccaaggcccccgagtgagcgcgggcgccgaggatctcatctggccaccgcgttct

SEQ ID NO: 167760 - DNA, 120 bp, Artificial Sequence
  ENSG00000108557_3 (sequence is synthesized)
ggaagaggcgagagggagagcgtgcgcgagaggagagagacggcgggggaaagggagacggcgagacgcgcagcgccggcgcccgggagacccaggaggagcccgcagataaccagcccg

SEQ ID NO: 167761 - DNA, 120 bp, Artificial Sequence
  ENSG00000108557_4 (sequence is synthesized)
agtcatgcagtcttttcgagaaaggtgtggtttccatggcaaacaacagaactaccagcagacctcgcaggaaacatcacgcctagagaattacaggcagccgagtcaggccgggctaag

SEQ ID NO: 167762 - DNA, 120 bp, Artificial Sequence
  ENSG00000108557_5 (sequence is synthesized)
ctgcgaccggcagcggctgctcgccaaggactattataacccgcagccttacccgagctatgagggtggcgctggcacgccctctggcactgcagccgcggtggccgccgacaagtacca

SEQ ID NO: 167763 - DNA, 120 bp, Artificial Sequence
  ENSG00000108557_6 (sequence is synthesized)
ccgaggcagcaaggccctgcccacacagcaaggcctgcaggggaggccggctttccctggctacggcgtccaggacagcagcccctacccaggccgctatgctggtgaggagagccttca

SEQ ID NO: 167764 - DNA, 120 bp, Artificial Sequence
  ENSG00000108557_7 (sequence is synthesized)
ggcttggggggccccacagccaccacccccacagccgcagccactacctgcaggggtggccaagtatgatgagaacttgatgaaaaagacagcagtgccccccagcaggcagtatgcaga

SEQ ID NO: 167765 - DNA, 120 bp, Artificial Sequence
  ENSG00000108557_8 (sequence is synthesized)
gcagggcgcccaggtgccctttcggactcactccctgcacgtccagcagccaccgccgccccagcagcccctggcataccccaagctccaaaggcagaagctgcagaacgacattgcctc

SEQ ID NO: 167766 - DNA, 120 bp, Artificial Sequence
  ENSG00000108557_9 (sequence is synthesized)
ccctctgcccttcccccagggtacccactttcctcagcattcccagtccttccccacctcctccacctactcctcctctgtccagggtggtgggcagggggcccactcctataagagttg

SEQ ID NO: 167767 - DNA, 120 bp, Artificial Sequence
  ENSG00000108557_10 (sequence is synthesized)
cacagcaccgactgcccagccccatgacaggccgctgactgccagctccagcctggccccggggcagcgggtccagaatcttcatgcctaccagtcgggccgcctcagctatgaccagca

SEQ ID NO: 167768 - DNA, 120 bp, Artificial Sequence
  ENSG00000108557_11 (sequence is synthesized)
gcagcagcagcagcagcagcagcaagcccttcagagccggcaccatgcccaggaaaccctccattaccaaaacctcgccaagtatcagcactacgggcagcaaggccagggctactgcca

SEQ ID NO: 167769 - DNA, 120 bp, Artificial Sequence
  ENSG00000108557_12 (sequence is synthesized)
gggctactgccagccggacgcagccgtccggaccccagagcagtactaccagaccttcagccccagctccagccactcacccgcccgctccgtgggccgctcaccttcctacagttccac

SEQ ID NO: 167770 - DNA, 120 bp, Artificial Sequence
  ENSG00000108557_13 (sequence is synthesized)
accgtcgccgctgatgccaaacctggagaactttccctacagccagcagccgctcagcaccggggccttccccgcagggatcactgaccacagccacttcatgcccctgctcaatccctc

SEQ ID NO: 167771 - DNA, 120 bp, Artificial Sequence
  ENSG00000108557_14 (sequence is synthesized)
cccaacggatgccaccagctctgtggacacccaggctggcaactgcaagccccttcagaaggacaagctccctgagaacctgctgtcggatctcagcctgcagagcctcacggcgctgac

SEQ ID NO: 167772 - DNA, 120 bp, Artificial Sequence
  ENSG00000108557_15 (sequence is synthesized)
ctcacaggtggagaacatctccaacaccgtccagcagctgctgctctccaaggctgctgtgccgcagaagaaaggtgtcaagaacctcgtgtccaggaccccagagcagcataaaagcca

SEQ ID NO: 167773 - DNA, 120 bp, Artificial Sequence
  ENSG00000108557_16 (sequence is synthesized)
gcactgcagccccgaagggagcggctactcagccgagcccgcaggcacaccgctgtcagagccgccgagcagcacgccacagtccacgcatgcggagccgcaggaggccgactacctgag

SEQ ID NO: 167774 - DNA, 120 bp, Artificial Sequence
  ENSG00000108557_17 (sequence is synthesized)
cggctccgaggacccactggagcgcagcttcctctactgcaaccaggcccgtggcagccctgccagggtcaacagcaactcgaaggccaagcccgagtccgtgtccacctgttctgtgac

SEQ ID NO: 167775 - DNA, 120 bp, Artificial Sequence
  ENSG00000108557_18 (sequence is synthesized)
ctctcctgacgacatgtccaccaaatctgacgactccttccagagcctacacggcagtctgccgctcgacagcttctccaagttcgtggcgggtgagcgggactgtccgcggctgctgct

SEQ ID NO: 167776 - DNA, 120 bp, Artificial Sequence
  ENSG00000108557_19 (sequence is synthesized)
cagcgccctggcacaggaggacctggcctccgagatcctggggctgcaggaagccatcggtgagaaggccgacaaagcttgggctgaagcacccagcctggtcaaggacagcagcaagcc

SEQ ID NO: 167777 - DNA, 120 bp, Artificial Sequence
  ENSG00000108557_20 (sequence is synthesized)
acccttctcgctggagaaccacagcgcctgcctggactctgtggccaagagtgcgtggccccggcctggggagccggaggccctgcccgactccttgcagctggacaagggcggcaatgc

SEQ ID NO: 167778 - DNA, 120 bp, Artificial Sequence
  ENSG00000108557_21 (sequence is synthesized)
caaggacttcagcccagggctgtttgaagacccttccgtggccttcgctacgcctgaccccaaaaagacaactggtcctctctcctttggtaccaagcccacccttggggttcctgctcc

SEQ ID NO: 167779 - DNA, 120 bp, Artificial Sequence
  ENSG00000108557_22 (sequence is synthesized)
agaccccactacagcagcttttgactgtttcccggacacaaccgctgccagctcagcggacagcgccaacccctttgcctggccagaggaaaacctgggggatgcttgtcccaggtgggg

SEQ ID NO: 167780 - DNA, 120 bp, Artificial Sequence
  ENSG00000108557_23 (sequence is synthesized)
attgcaccctggcgagcttaccaagggcctggagcagggtgggaaggcctcagatggcatcagcaaaggggacacccatgaggcttcggcctgcctgggcttccaggaggaggacccccc

SEQ ID NO: 167781 - DNA, 120 bp, Artificial Sequence
  ENSG00000108557_24 (sequence is synthesized)
tggggagaaggtggcctcgttgcccggggacttcaagcaggaggaggtgggtggggtgaaggaggaggcaggtgggctgctgcagtgccccgaggtggccaaggctgaccggtggctgga

SEQ ID NO: 167782 - DNA, 120 bp, Artificial Sequence
  ENSG00000108557_25 (sequence is synthesized)
ggacagccggcactgctgttccaccgccgacttcggggacctcccactgctgccacccaccagcaggaaggaggacctggaagctgaggaggagtactcctccctatgtgagctcctggg

SEQ ID NO: 167783 - DNA, 120 bp, Artificial Sequence
  ENSG00000108557_26 (sequence is synthesized)
cagccccgagcagaggcctggcatgcaggacccgctgtcacccaaggccccactcatctgcaccaaggaggaggtggaggaggtgctggactccaaggccggctggggctctccgtgcca

SEQ ID NO: 167784 - DNA, 120 bp, Artificial Sequence
  ENSG00000108557_27 (sequence is synthesized)
cctctcaggggagtccgtcatcctgctgggccctacagtgggcaccgagtcaaaggtccagagctggtttgagtcctctctgtcacacatgaagccaggtgaagaggggcctgatgggga

SEQ ID NO: 167785 - DNA, 120 bp, Artificial Sequence
  ENSG00000108557_28 (sequence is synthesized)
gcgagctccaggggattccaccacctcggacgcctctctggcccagaagcccaacaagcctgctgtgcccgaggcgcccatcgcaaagaaagagcctgtgccacggggcaaaagcttacg

SEQ ID NO: 167786 - DNA, 120 bp, Artificial Sequence
  ENSG00000108557_29 (sequence is synthesized)
gagccgtcgggtgcaccgggggctgcccgaggccgaggactccccatgcagggcaccagtgctgcccaaagacctcttgctccctgaatcctgcacagggcccccccagggacagatgga

SEQ ID NO: 167787 - DNA, 120 bp, Artificial Sequence
  ENSG00000108557_30 (sequence is synthesized)
aggggctggagccccaggccggggggcctcggaagggctccccaggatgtgtactcgttctctcacggccctgagtgagccccgcacgcccggacccccaggcctgaccaccacccctgc

SEQ ID NO: 167788 - DNA, 120 bp, Artificial Sequence
  ENSG00000108557_31 (sequence is synthesized)
ctccgacagcagcccgatgggctccaagaccaaggagacagactcacccagcacgcctggcaaggaccagcgctccatgatccttcggtcacgcaccaaaacccaggagatcttccactc

SEQ ID NO: 167789 - DNA, 120 bp, Artificial Sequence
  ENSG00000108557_32 (sequence is synthesized)
caagcggcggaggccctctgagggccggctccccaactgccgtgccaccaagaagctcctcgacaacagccacttgcccgccacattcaaggtctccagcagcccccagaaggagggcag

SEQ ID NO: 167790 - DNA, 120 bp, Artificial Sequence
  ENSG00000108557_33 (sequence is synthesized)
ggtgagccagcgggcaagggtccccaaacctggtgcaggcagcaagctctctgaccggcccctccatgcgctcaaaaggaagtcggccttcatggcgccggtccccaccaagaagcggaa

SEQ ID NO: 167791 - DNA, 120 bp, Artificial Sequence
  ENSG00000108557_34 (sequence is synthesized)
cctggtcttgcggagccgcagcagcagcagcagcaacgccagtggcaatgggggagatgggaaggaggagaggcctgagggttcccccaccctcttcaagaggatgtcttctcccaagaa

SEQ ID NO: 167792 - DNA, 120 bp, Artificial Sequence
  ENSG00000108557_35 (sequence is synthesized)
agccaagcccaccaagggcaatggcgagcctgccacaaagctcccacccccggagacccccgatgcctgcctcaagctcgcctctcgggcagccttccagggggccatgaagaccaaggt

SEQ ID NO: 167793 - DNA, 120 bp, Artificial Sequence
  ENSG00000108557_36 (sequence is synthesized)
gctgccaccccggaagggccggggcctgaagctggaagccatcgtgcagaagatcacctcgcccagcctcaagaagttcgcatgtaaagcgccaggggcctctcctggtaatcctctgag

SEQ ID NO: 167794 - DNA, 120 bp, Artificial Sequence
  ENSG00000108557_37 (sequence is synthesized)
cccatccctttccgacaaagaccgtgggctcaagggtgctgggggcagcccagtgggggtggaagaaggcctggtaaatgtgggcaccgggcagaagctcccaacttctggggctgatcc

SEQ ID NO: 167795 - DNA, 120 bp, Artificial Sequence
  ENSG00000108557_38 (sequence is synthesized)
gttatgcagaaatccaaccaacagatccttaaaaggcaaactcatgaacagtaagaaactgtcttctactgactgtttcaaaaccgaggccttcacatccccggaggccctgcagcctgg

SEQ ID NO: 167796 - DNA, 120 bp, Artificial Sequence
  ENSG00000108557_39 (sequence is synthesized)
ggggactgccctggcgcctaagaagaggagccggaaaggccgggcaggggcccatggactctccaaaggcccgctggagaagcggccctatcttggcccggctctgctcctgactccccg

SEQ ID NO: 167797 - DNA, 120 bp, Artificial Sequence
  ENSG00000108557_40 (sequence is synthesized)
agacagggccagtggcacacaaggggccagtgaggacaactctggtggaggaggcaagaagccaaagatggaggagctgggcctggcctcccagcccccggagggcaggccctgccagcc

SEQ ID NO: 167798 - DNA, 120 bp, Artificial Sequence
  ENSG00000108557_41 (sequence is synthesized)
ccagacaagggcacagaaacagccaggccacaccaactacagcagctattccaagcggaagcgcctcactcggggccgggccaagaacaccacctcttcaccctgtaaggggcgtgccaa

SEQ ID NO: 167799 - DNA, 120 bp, Artificial Sequence
  ENSG00000108557_42 (sequence is synthesized)
gcgacgacgacagcagcaggtgctgcccctggatcccgcagagcctgaaatccgcctcaagtacatttcctcttgcaagcggctgaggtcagacagccggacccccgccttctcaccctt

SEQ ID NO: 167800 - DNA, 120 bp, Artificial Sequence
  ENSG00000108557_43 (sequence is synthesized)
cgtgcgggtggagaagcgagacgcgttcaccaccatatgcactgttgtcaactcccctggagatgcgcccaagccccacaggaagccttcctcctctgcctcctcttcctcatcctcgtc

SEQ ID NO: 167801 - DNA, 120 bp, Artificial Sequence
  ENSG00000108557_44 (sequence is synthesized)
ctcgttctccttggatgcagccggggcctccctggccacactccctggaggctccatcctgcagccgcggccctccttgcccctctcctccacgatgcacttggggcctgtggtttccaa

SEQ ID NO: 167802 - DNA, 120 bp, Artificial Sequence
  ENSG00000108557_45 (sequence is synthesized)
ggccctgagtacctcttgccttgtttgctgcctctgccaaaacccggccaacttcaaggaccttggggacctctgtgggccctactaccctgaacactgcctccccaaaaagaagccaaa

SEQ ID NO: 167803 - DNA, 120 bp, Artificial Sequence
  ENSG00000108557_46 (sequence is synthesized)
actcaaggagaaggtgcggccagaaggcacctgtgaggaggcctcgctgccgcttgagagaacactcaaaggtcccgagtgtgcagctgccgccactgccgggaagccccccaggcctga

SEQ ID NO: 167804 - DNA, 120 bp, Artificial Sequence
  ENSG00000108557_47 (sequence is synthesized)
cggcccagctgacccggccaagcagggcccactgcgcaccagtgcccggggcctgtcccggaggctgcagagctgctactgctgtgatggccgggaggatgggggcgaggaggcagcccc

SEQ ID NO: 167805 - DNA, 120 bp, Artificial Sequence
  ENSG00000108557_48 (sequence is synthesized)
agccgacaagggtcgcaaacatgagtgcagcaaggaggctccggcagagcccggcggggaggcccaggagcactgggtgcatgaggcctgtgccgtgtggaccggcggcgtctacctggt

SEQ ID NO: 167806 - DNA, 120 bp, Artificial Sequence
  ENSG00000108557_49 (sequence is synthesized)
ggccgggaagctctttgggctgcaggaggccatgaaggtggccgtggacatgatgtgttccagctgccaagaagccggggccaccattgggtgctgccacaaaggatgcctccacaccta

SEQ ID NO: 167807 - DNA, 120 bp, Artificial Sequence
  ENSG00000108557_50 (sequence is synthesized)
ccactacccgtgtgccagcgatgcaggttgcatattcatcgaagagaacttttctttgaaatgtcccaaacataagaggctgccgtagtaatccaccccaacggccggaggagccgccgg

SEQ ID NO: 167808 - DNA, 120 bp, Artificial Sequence
  ENSG00000108557_51 (sequence is synthesized)
agcccgcctgcccgcccgccgccgaaggagaggagccgcctgcgcagcccccgggcctttgagctgctcccagcgctggtccagagccgatccttgatccgggtcccggatcgtggatcc

SEQ ID NO: 167809 - DNA, 120 bp, Artificial Sequence
  ENSG00000108557_52 (sequence is synthesized)
ggccgcctagggctcagacttgcggccccgggttgggaggaaaacccgttccggagccgcctgctcccggaaccggacggcacagggcgttcttgcccaccccaggggccaggcttgcgg

SEQ ID NO: 167810 - DNA, 120 bp, Artificial Sequence
  ENSG00000108557_53 (sequence is synthesized)
agggggagcccgcggagcggccagactccccggggcgctcagcctccggcgagggtgggagacggctttgtcctggggacactttccctctggaatctcaagacgacgtggcacacattc

SEQ ID NO: 167811 - DNA, 120 bp, Artificial Sequence
  ENSG00000108557_54 (sequence is synthesized)
cacgtgggtgctgccgccaccccagtcggtcgtggcgtgcagctgggagccctgggcttgggggtgggggtcgaaacagtactggaagaggcggagggcggctcctagctccgtggacta

SEQ ID NO: 167812 - DNA, 120 bp, Artificial Sequence
  ENSG00000108557_55 (sequence is synthesized)
ggcgggggagaaaggaagcctttctgagagcgggctaggccggcactggagaggccggagcctttggaacaaaccgtgcggaacgcgtccaggggccttcccgcccagcctttgccagat

SEQ ID NO: 167813 - DNA, 120 bp, Artificial Sequence
  ENSG00000108557_56 (sequence is synthesized)
ctctcgtgcggttcgggcaaagccggggtagacctgggctatgctcagttaggggttgcgggatccccgagtgtgggcgggactgggacaccctttggcctctgtttgtcccctttccag

SEQ ID NO: 167814 - DNA, 120 bp, Artificial Sequence
  ENSG00000108557_57 (sequence is synthesized)
tcctccaccccacccctggagcccagcctgggagcgcaaaacccaagaagcggccagaacgcacctccggctccggcggacgcgcgaccgttgtgcaccaccagggaccgccgcgcctac

SEQ ID NO: 167815 - DNA, 120 bp, Artificial Sequence
  ENSG00000108557_58 (sequence is synthesized)
tctgcacgggagcagggacagcgctagatttcgtgtacaaaacctgtgtacccctctatatatatgttacatagaatgtatatatgttgggaacatgctcgcttctcccgtgtgtcgccg

SEQ ID NO: 167816 - DNA, 120 bp, Artificial Sequence
  ENSG00000108557_59 (sequence is synthesized)
ccgtgcgtcgtgcgcccgcaacagagccccaaccgggcctttgccgggtaaggggctaccgcgacgccacttgtccacgcagccaccaccggcccgggccagtccctgccagtccgtccg

SEQ ID NO: 167817 - DNA, 120 bp, Artificial Sequence
  ENSG00000108557_60 (sequence is synthesized)
cctgtccgtccgtgtcctcagctctgtccacgcttcgataggcctgacgcagcccccagcccagggccgccctagcaacttcctgtacatatgactgtaaaatggtaaacgtgtgtatta

SEQ ID NO: 167818 - DNA, 120 bp, Artificial Sequence
  ENSG00000108557_61 (sequence is synthesized)
tatctggcctcgttatatagtgtatatatatgtatacatatacatatatataatatatatgaagactgtaaatgttaagacgactagtgttcttattagtatattgcttcacactgaaga

SEQ ID NO: 167819 - DNA, 120 bp, Artificial Sequence
  ENSG00000108557_62 (sequence is synthesized)
ttgtgtgtatcgagctgtttctaaaagatgtttattttccttaagagtaaaaaacagtcattgcattcagaaaaaaaaaaaaaaaaaagtcaataaagatacaacgattgttttggaaaa

SEQ ID NO: 167820 - DNA, 120 bp, Artificial Sequence
  ENSG00000108557_63 (sequence is synthesized)
ggcattggagcccatccaagcagtccagggggaccctccctgggcacagctccccaaacccaggccccatctcactcttcagtttccctcctctcttgccccagcaattcttttatcctt

SEQ ID NO: 167821 - DNA, 120 bp, Artificial Sequence
  ENSG00000108557_64 (sequence is synthesized)
ctgtctgcctagacctctgctgggcaatgccagggacatggaaatgaggcattccccaggcacctgcttgaggagtgcccagagcagtgagggaagatagaagcataaattacaatgtgg

SEQ ID NO: 167822 - DNA, 120 bp, Artificial Sequence
  ENSG00000108557_65 (sequence is synthesized)
cgccccacagacggcggcgcagcccgccgcccttttcgaggccggccccccctctcacgcgccttgaaggcaagccggtatattcggggcccaggagcaaggaaaagtggccttttgcgt

SEQ ID NO: 167823 - DNA, 120 bp, Artificial Sequence
  ENSG00000108557_66 (sequence is synthesized)
gacacagaagtggacacatcattctgatctcagggcaggctcagccccataactctggcaaaagctctcacaagcaaaagccttggagaggaggagaatgtatcaaggatctcatctggc

SEQ ID NO: 167824 - DNA, 120 bp, Artificial Sequence
  ENSG00000108557_67 (sequence is synthesized)
gtctggagcctcgcgggcagtgcggctcccctcctggctgcagacaaaaccccacagctgtggggcccccaccctgtcctaaccaccgaaacttctctttggtcacaggttgcatattca

SEQ ID NO: 167825 - DNA, 120 bp, Artificial Sequence
  ENSG00000108557_68 (sequence is synthesized)
gaagccaactgtggagtgggcaaaataggacctttcccaccagcctagcatccctctggcttctgtggagataaagggaactcaggggtactggagctgcctttctcttccactagactg

SEQ ID NO: 167826 - DNA, 120 bp, Artificial Sequence
  ENSG00000108557_69 (sequence is synthesized)
tggggctctcataggcagggaccctgtcttactcctctttgttttatttttgagacagggtcttgctgtgtggcccaggctggagtgccttggcacaaacacagctcacttcagcctcaa

SEQ ID NO: 167827 - DNA, 120 bp, Artificial Sequence
  ENSG00000108557_70 (sequence is synthesized)
cctccagggctcaagcgatcctccagcatcagtctcctgagtagctgggatcacaggcgcccgacaccacacgtagctaattttaaatttttttttttttctagagacaggggtcttgcc

SEQ ID NO: 167828 - DNA, 80 bp, Artificial Sequence
  ENSG00000108557_71 (sequence is synthesized)
ttttaaatttttttttttttctagagacaggggtcttgccatggctggtcttgaagtcctgggctcaagcgatcctccct

SEQ ID NO: 167829 - DNA, 120 bp, Artificial Sequence
  ENSG00000108557_72 (sequence is synthesized)
ttcaaattcttgcccgtgacctatagtaagaaatacatcgtaggtaactacacaggtcacactgtatatagctgaaacaaaagtttactgaaataactcccttactgtgtctgctggtct

SEQ ID NO: 167830 - DNA, 120 bp, Artificial Sequence
  ENSG00000108557_73 (sequence is synthesized)
gtaatcctttttgttcttgtgtatttgttttttttttaattactgattgctacccacgaaattaattttgcaatccactgatgggtcatacccagaatttgaaaaaaacaagcctaggaa

SEQ ID NO: 167831 - DNA, 120 bp, Artificial Sequence
  ENSG00000108557_74 (sequence is synthesized)
atgaatttgccatctattcatgcaacaaatgttaattgcaaccctaataattcctctcatgttaaactactcaagtaacacttggatacttgggtgaaaaatgcaaataagccagaaata

SEQ ID NO: 167832 - DNA, 120 bp, Artificial Sequence
  ENSG00000108557_75 (sequence is synthesized)
tatgtagtaaaagtaaaagttcccttggcaccctccctgcaggtaaccccagttaatagtttgaacgtatccttccagactttttgttactcacttaatgcatatatatatatatatata

SEQ ID NO: 167833 - DNA, 120 bp, Artificial Sequence
  ENSG00000108557_76 (sequence is synthesized)
tatatatatgtatgtatgtatgtatattacatataccaatccatgcatagttttctttttccccaagtgaggacatactgtgggctcttcctcggcagcttcctttttcctctccgtttg

SEQ ID NO: 167834 - DNA, 120 bp, Artificial Sequence
  ENSG00000108557_77 (sequence is synthesized)
tccgtttgtcttggagaggttggttgtgtggcgaagtccttcagggcaagttctgggttgactcctggctccaccacatactgaacaggccatttacctctctgtgcctcagtgtcccca

SEQ ID NO: 167835 - DNA, 120 bp, Artificial Sequence
  ENSG00000108557_78 (sequence is synthesized)
tctttacaatcaggagaataacagtacagacctcacggtactgaagtaaagatgcagtgagttaatccatatgaagtttagagcagtgcttttgccaataaatgctgattgctgccgtca

SEQ ID NO: 167836 - DNA, 120 bp, Artificial Sequence
  ENSG00000108559_0 (sequence is synthesized)
agttgggccaagatggcggccgccgagggaccggtgggcgacggcgagctgtggcagacctggcttcctaaccacgtcgtgttcttgcggctccgggagggactgaaaaaccagagtcca

SEQ ID NO: 167837 - DNA, 120 bp, Artificial Sequence
  ENSG00000108559_1 (sequence is synthesized)
accgaagctgagaaaccagcttcttcgtcgttgccttcgtcgccgccgccgcagttgctgacgagaaacgtggtctttggcctcggcggagagcttttcctgtgggacggagaagacagc

SEQ ID NO: 167838 - DNA, 120 bp, Artificial Sequence
  ENSG00000108559_2 (sequence is synthesized)
tccttcttagtcgttcgccttcggggccccagcggcggcggcgaagagcccgccctgtcccagtaccagagattgctttgcataaatccacccctgtttgaaatctatcaagtcttgtta

SEQ ID NO: 167839 - DNA, 120 bp, Artificial Sequence
  ENSG00000108559_3 (sequence is synthesized)
agcccaacacaacatcatgtagcacttataggaataaaaggacttatggtattagaattacctaaaagatgggggaagaattctgaatttgaaggtggaaaatcaacagtgaattgtagt

SEQ ID NO: 167840 - DNA, 120 bp, Artificial Sequence
  ENSG00000108559_4 (sequence is synthesized)
accactccagttgcggagagatttttcaccagttccacctctctgactctaaagcatgctgcatggtatccaagtgaaatcctggatccccacgtagtgctgttaacatcagacaacgta

SEQ ID NO: 167841 - DNA, 120 bp, Artificial Sequence
  ENSG00000108559_5 (sequence is synthesized)
atcagaatttactcactacgtgagccgcagacacccactaacgtgataatactttcagaagccgaagaggaaagtctagtactcaataaaggaagggcgtataccgcatctctaggagag

SEQ ID NO: 167842 - DNA, 120 bp, Artificial Sequence
  ENSG00000108559_6 (sequence is synthesized)
acagcagttgcatttgactttgggccattggcagcagtcccaaagactctatttggacaaaacggcaaagatgaagtagtggcatacccactgtacatcttatatgaaaatggagagact

SEQ ID NO: 167843 - DNA, 120 bp, Artificial Sequence
  ENSG00000108559_7 (sequence is synthesized)
ttcctgacatacatcagtctgttacacagccctggaaatattggaaagctgttgggtccattgcccatgcatcctgcggctgaagataactatggttatgatgcgtgtgctgtactctgc

SEQ ID NO: 167844 - DNA, 120 bp, Artificial Sequence
  ENSG00000108559_8 (sequence is synthesized)
ttaccctgtgtccccaatatcttagtgatcgctactgaatcaggaatgctgtatcactgtgtcgtgctagaaggggaagaagaagatgaccacacgtcagaaaagtcctgggattccagg

SEQ ID NO: 167845 - DNA, 120 bp, Artificial Sequence
  ENSG00000108559_9 (sequence is synthesized)
attgacctcattccttctctgtatgtgtttgaatgtgttgagttggagcttgctttgaaactggcatctggagaggatgacccttttgattctgacttttcttgtccagtcaaacttcat

SEQ ID NO: 167846 - DNA, 120 bp, Artificial Sequence
  ENSG00000108559_10 (sequence is synthesized)
agagatcccaagtgtccttcaagatatcactgtactcatgaagctggtgtacatagtgttgggctaacttggattcataaacttcacaaatttcttggatcagatgaagaagataaggat

SEQ ID NO: 167847 - DNA, 120 bp, Artificial Sequence
  ENSG00000108559_11 (sequence is synthesized)
agtttacaggaactctctacagaacagaaatgctttgttgaacacatcctttgtacgaagccattgccctgcaggcagccagctccaattcgaggattttggattgtacctgacattctg

SEQ ID NO: 167848 - DNA, 120 bp, Artificial Sequence
  ENSG00000108559_12 (sequence is synthesized)
ggacccacgatgatctgcatcaccagtacctatgaatgcctcatatggccgttattaagtacagtccatccagcgtctcctcccctgctttgtactcgagaagatgttgaagtggcagag

SEQ ID NO: 167849 - DNA, 120 bp, Artificial Sequence
  ENSG00000108559_13 (sequence is synthesized)
tctcccctccgtgttctggctgaaaccccagattcctttgaaaagcatattagaagcattttgcaacgtagtgttgccaatccagcatttttgaaagcttctgaaaaggacatagcccct

SEQ ID NO: 167850 - DNA, 120 bp, Artificial Sequence
  ENSG00000108559_14 (sequence is synthesized)
cctcctgaagaatgccttcagctcctcagcagagccacccaggtgttcagagagcagtacattctcaaacaggacttggcaaaggaggagattcagcggagggtcaaattattatgtgac

SEQ ID NO: 167851 - DNA, 120 bp, Artificial Sequence
  ENSG00000108559_15 (sequence is synthesized)
acaactagaagatctcagttattgtcgagaagagaggaaaagtctgcgggaaatggctgagcgtttagctgacaaatatgaggaagctaaagaaaaacaagaggatatcatgaacaggat

SEQ ID NO: 167852 - DNA, 120 bp, Artificial Sequence
  ENSG00000108559_16 (sequence is synthesized)
gaaaaaactacttcacagttttcactctgagctcccagttctctctgatagtgagcgagacatgaagaaagaattacagctgatacctgatcaacttcgacatttgggcaatgccatcaa

SEQ ID NO: 167853 - DNA, 120 bp, Artificial Sequence
  ENSG00000108559_17 (sequence is synthesized)
acaggttactatgaaaaaggattatcaacagcaaaagatggagaaggtgttgagtcttccaaaacccaccattattctcagtgcctaccagcgaaagtgcattcagtccatcctgaaaga

SEQ ID NO: 167854 - DNA, 120 bp, Artificial Sequence
  ENSG00000108559_18 (sequence is synthesized)
ggagggtgaacatataagggaaatggtgaagcaaatcaatgatatccgcaatcatgtaaacttctgacaccaccaggagctgactcacacctgaactgaacaccattgaaggcttaaacc

SEQ ID NO: 167855 - DNA, 120 bp, Artificial Sequence
  ENSG00000108559_19 (sequence is synthesized)
catattgtaaaacaggtagaattatctaatttataaaaaggtgttttgatgacctttggtgtggttcatctttttaaatatgttgttttataataattgagtaaatgcttttatttaaaa

SEQ ID NO: 167856 - DNA, 120 bp, Artificial Sequence
  ENSG00000108559_20 (sequence is synthesized)
tttggaatgtgctttataactcaagcctacagttgtgttcagcaaggactcaggattatttcacactgcacactgccagaacctccctgaaccctattgagttttctccatatttgagca

SEQ ID NO: 167857 - DNA, 120 bp, Artificial Sequence
  ENSG00000108559_21 (sequence is synthesized)
agttagttattcttgtgagctgtgttttaaagtagcagcaccagaaacatgactctgaagagggatagaaccctaggattcaaaggagaagaccacacagtgtacttggcagcagctttt

SEQ ID NO: 167858 - DNA, 120 bp, Artificial Sequence
  ENSG00000108559_22 (sequence is synthesized)
ttaatttgaacactttcttcttgaggacacaccttcagtacagttaacaaatggttacacctgaaatctgctgagagcagagctcaagatccacaattgcaaaggccactgctggctcac

SEQ ID NO: 167859 - DNA, 120 bp, Artificial Sequence
  ENSG00000108559_23 (sequence is synthesized)
ttcctcacaagctgtattacctttcagagctgagtgaggctgtgctctacgtcccaatacttgttactgagtggacatgaggtgcaagtttagcaccttaaagggagaaaaaaataggtt

SEQ ID NO: 167860 - DNA, 120 bp, Artificial Sequence
  ENSG00000108559_24 (sequence is synthesized)
agtatgcagaatgtgattttgtcctcacttcaccttaagtcatctttttacacttgccaatgtgagttctgaaaggtactactatatctgcttagaaatggctgagtgactgtcaattaa

SEQ ID NO: 167861 - DNA, 120 bp, Artificial Sequence
  ENSG00000108559_25 (sequence is synthesized)
aagccacatgataaggtaggttacaggtaagaggtaaatcaggttagacatgcatgagaacatgtaggcacagactgaatataagcacaggaacactcgtgaaacccaactgagcttttc

SEQ ID NO: 167862 - DNA, 120 bp, Artificial Sequence
  ENSG00000108559_26 (sequence is synthesized)
ttttgcctagaagggctaaatcctgccttctacatcagttcccatttatgctgaaaacccagttgaaagaattgtttcctacctggacagtgacacagtagtttgtttcataccagaaac

SEQ ID NO: 167863 - DNA, 120 bp, Artificial Sequence
  ENSG00000108559_27 (sequence is synthesized)
acattgctaaacaaaacttaagagtctcagtttgggtttttctacaataaagtgaattccaacagttggcatttgccacagtagagaccactaaccattccctaattgtgatgattttat

SEQ ID NO: 167864 - DNA, 120 bp, Artificial Sequence
  ENSG00000108559_28 (sequence is synthesized)
tacccagcaccatcttctggagaaaaatatctgtaaggtgctcagtctcagcagaacacttcactgcaagctctagttcagtcagttcagaaaggctgtgaattgcccaccctgatttac

SEQ ID NO: 167865 - DNA, 120 bp, Artificial Sequence
  ENSG00000108559_29 (sequence is synthesized)
agcactaattttaataatctgaagacaaattcgcttggggcttatccaagggactagtcttaaacctacgtaatttaaattgattgcattttataattaataaaatcccctgtaactcaa

SEQ ID NO: 167866 - DNA, 89 bp, Artificial Sequence
  ENSG00000108559_30 (sequence is synthesized)
gtctgcctcagccccccccgcgagtagctgggattacagagattgctttgcataaatccacccctgtttgaaatctatcaagtcttgtt

SEQ ID NO: 167867 - DNA, 120 bp, Artificial Sequence
  ENSG00000108559_31 (sequence is synthesized)
tgacaccaccaggagctgactcacacctgaactgaacaccattgaaggcttaaacccatattgtaaaacagcatcaacagcagaccggcaattgcgcttttgatctaaaggaaagatgaa

SEQ ID NO: 167868 - DNA, 120 bp, Artificial Sequence
  ENSG00000108559_32 (sequence is synthesized)
agcctggatcctgcaatacactgagattatagaaaactgcaaagcaaaccaaatccaggttgctctaacttaaattccgcaatgctagtcaggcagattgctccaacctgagagctgtga

SEQ ID NO: 167869 - DNA, 120 bp, Artificial Sequence
  ENSG00000108559_33 (sequence is synthesized)
gttcaggtggggaggttcacattcactgtgattaactagctagctcctttctctgtcacaattacctggaatacccaaggcagactatgacaagggtcaggtgacacacgttaatatcca

SEQ ID NO: 167870 - DNA, 120 bp, Artificial Sequence
  ENSG00000108559_34 (sequence is synthesized)
cttgctggcaacatgtgcctgcactgactccaggaaccgtctgttgaatgaacgctaaatcccagagcttcccagtgtgcctcagcgtgagcaagaggaaaaacgtgagaaaggtaactc

SEQ ID NO: 167871 - DNA, 120 bp, Artificial Sequence
  ENSG00000108559_35 (sequence is synthesized)
cttgttctggtgtcatcgccttgattgctctttcctgatctttggttaacataaacccacttggcatctggagtgacccaagggatgcagtatcaaagttctcagacactgaatctgctc

SEQ ID NO: 167872 - DNA, 120 bp, Artificial Sequence
  ENSG00000108559_36 (sequence is synthesized)
ctaccagtggtccaaaatctgactcgtccaggtttccagcagattttgctttgtagttatagcctaaagctttggattgcaatgagcccgaggttcccaagctgtctgtagactgtgctc

SEQ ID NO: 167873 - DNA, 120 bp, Artificial Sequence
  ENSG00000108559_37 (sequence is synthesized)
tcctgagtccatctttaaacatgtcattgtccgatttactgaaaggatctccagatggcaacagcaagcctgcatctaaggaatgaactgagccacgggtgctgtctaaatgctcctgaa

SEQ ID NO: 167874 - DNA, 120 bp, Artificial Sequence
  ENSG00000108559_38 (sequence is synthesized)
atgtgaaaatacatatggccaagttagacaattctctgcgtttttaaagacaaaaactataataaatgtattccgccactcattacacatgataatcattaatgtgctaccttcacagac

SEQ ID NO: 167875 - DNA, 120 bp, Artificial Sequence
  ENSG00000108559_39 (sequence is synthesized)
tcattgaacaaacactaagtgtcatttctacatgctggacacaaaaccaggccctcaggatacaactgtgagcaagatataatccctgacctcgagatacatacggcttcaaaaaaaaaa

SEQ ID NO: 167876 - DNA, 120 bp, Artificial Sequence
  ENSG00000108559_40 (sequence is synthesized)
gtcaaaaataagaagaatacaataggtcagtaagactggaaccatattctcaccctaagatgctgagccacattaggtggtttcagcatcaaggggtggacctcaagagtctcttgtgtc

SEQ ID NO: 167877 - DNA, 120 bp, Artificial Sequence
  ENSG00000108559_41 (sequence is synthesized)
ttacatcattaggaaaagtctgcgggaaatggctgagcgtttagctgacaaatatgaggaagctaaagaaaaacaagaggatatcatgaacaggatgaaaaaactacttcacagttttca

SEQ ID NO: 167878 - DNA, 120 bp, Artificial Sequence
  ENSG00000108559_42 (sequence is synthesized)
ccagtacctatgaatgcctcatatggccgttattgtacgtcccattttatattctccacacagctcttgttaattctgcaatatctaagttgggaaaatgcactcagtaaccaacttgaa

SEQ ID NO: 167879 - DNA, 120 bp, Artificial Sequence
  ENSG00000108559_43 (sequence is synthesized)
cctttctgtcctcatctgtttcatatactttttactgtgataaatttggaagaaactggatatatttgatcagctagtgaatggggagcaggagggaagtggcacctgagaatgataaac

SEQ ID NO: 167880 - DNA, 66 bp, Artificial Sequence
  ENSG00000108559_44 (sequence is synthesized)
atggggagcaggagggaagtggcacctgagaatgataaacaggaagtgtttaaaaagaagttagga

SEQ ID NO: 167881 - DNA, 120 bp, Artificial Sequence
  ENSG00000108561_0 (sequence is synthesized)
gcttccggcggcgcctcaggtcgcggggcgcctaggcctgggttgtcctttgcatctgcacgtgttcgcagtcgtttccgcgatgctgcctctgctgcgctgcgtgccccgtgtgctggg

SEQ ID NO: 167882 - DNA, 120 bp, Artificial Sequence
  ENSG00000108561_1 (sequence is synthesized)
ctcgcctttccggcagctcctgcagccggcaccccggctgtgcacccggcccttcgggctgctcagcgtgcgcgcaggttccgagcggcggccgggcctcctgcggcctcgcggaccctg

SEQ ID NO: 167883 - DNA, 120 bp, Artificial Sequence
  ENSG00000108561_2 (sequence is synthesized)
gcggcggccgggcctcctgcggcctcgcggaccctgcgcctgtggctgtggctgcggctcgctgcacaccgacggagacaaagcttttgttgatttcctgagtgatgaaattaaggagga

SEQ ID NO: 167884 - DNA, 120 bp, Artificial Sequence
  ENSG00000108561_3 (sequence is synthesized)
aagaaaaattcagaagcataaaaccctccctaagatgtctggaggttgggagctggaactgaatgggacagaagcgaaattagtgcggaaagttgccggggaaaaaatcacggtcacttt

SEQ ID NO: 167885 - DNA, 120 bp, Artificial Sequence
  ENSG00000108561_4 (sequence is synthesized)
catcaactcccaatttcgtggttgaagttataaagaatgatgatggcaagaaggcccttgtgttggactgtcattatccagaggatgaggttggacaagaagacgaggctgagagtgaca

SEQ ID NO: 167886 - DNA, 120 bp, Artificial Sequence
  ENSG00000108561_5 (sequence is synthesized)
tcttctctatcagggaagttagctttcagtccactggcgagtctgaatggaaggatactaattatacactcaacacagattccttggactgggccttatatgaccacctaatggatttcc

SEQ ID NO: 167887 - DNA, 120 bp, Artificial Sequence
  ENSG00000108561_6 (sequence is synthesized)
ttgccgaccgaggggtggacaacacttttgcagatgagctggtggagctcagcacagccctggagcaccaggagtacattacttttcttgaagacctcaagagttttgtcaagagccagt

SEQ ID NO: 167888 - DNA, 120 bp, Artificial Sequence
  ENSG00000108561_7 (sequence is synthesized)
agagcagacagatgctgaaagccatagtttcatggcaggctttggccagtgaacaaatcctactctgaagctagacatgtgctttgaaatgattatcatcctaatatcatgggggaaaaa

SEQ ID NO: 167889 - DNA, 120 bp, Artificial Sequence
  ENSG00000108561_8 (sequence is synthesized)
ataccaaatttaaattatatgttttgtgttctcatttattatcatttttttctgtacaaatctattatttctagatttttgtataacatgatagacataaaattggtttatctcctccaa

SEQ ID NO: 167890 - DNA, 120 bp, Artificial Sequence
  ENSG00000108561_9 (sequence is synthesized)
ccgacctctgaggtctgggacatttttccattgattggcaaccagcgggctaaacccacgtatgatcatatttcccccacctcccctatccagcagtttcgttttcttttggtagggggt

SEQ ID NO: 167891 - DNA, 120 bp, Artificial Sequence
  ENSG00000108561_10 (sequence is synthesized)
cctttttccttagtcttattctatcgaaagtggacctttgggaaggcccatggtcgtggttgaaaatagcatagttatatcgtttggcaagtggaagaggattggaaattctcctggttt

SEQ ID NO: 167892 - DNA, 120 bp, Artificial Sequence
  ENSG00000108561_11 (sequence is synthesized)
atagcggaaagtggagacaaagcttttgttgatttcctgagtgatgaaattaaggaggaaagaaaaattcagaagcataaaaccctccctaagatgtctggaggttgggagctggaactg

SEQ ID NO: 167893 - DNA, 120 bp, Artificial Sequence
  ENSG00000108561_12 (sequence is synthesized)
cctcgcaagggcagaaggttgaagaacaggaggtaagctaatactataatcagcttttacctcagttctgacaggctgtgcctggggcttagaggaggagcgtttttctttggtctttca

SEQ ID NO: 167894 - DNA, 69 bp, Artificial Sequence
  ENSG00000108561_13 (sequence is synthesized)
cctggggcttagaggaggagcgtttttctttggtctttcaaaaaaaaaaaattcctctaagtccagtcg

SEQ ID NO: 167895 - DNA, 120 bp, Artificial Sequence
  ENSG00000108561_14 (sequence is synthesized)
gctgagggacatctgcttaaaggtatcgtctggtcctagtgttctgtgggtgacaaagctgtcactttgttcaaggagacaaagcttttgttgatttcctgagtgatgaaattaaggagg

SEQ ID NO: 167896 - DNA, 120 bp, Artificial Sequence
  ENSG00000108561_15 (sequence is synthesized)
caagctggaaagagatcttgaaactttaggaaagctttgcagtgtacgggtggaggaaaaggcttggaatgttaagggactgatataaactcagttaattggcacatagctgaggctggt

SEQ ID NO: 167897 - DNA, 120 bp, Artificial Sequence
  ENSG00000108561_16 (sequence is synthesized)
atccacatttcttaactgaaaacccagtgtgttatttaaccaagcagggtgccaacagaagtgagatcaagctcttcatttgggaatagtatggcataagactattcaaatggctacata

SEQ ID NO: 167898 - DNA, 120 bp, Artificial Sequence
  ENSG00000108561_17 (sequence is synthesized)
cagaggatgaggtatgcaggatggagtgctagcctcttggcacccctggggaacagtgtgtcccttgggaacttcctgtccctattttagcagaaatttaaacacttttctagcttagac

SEQ ID NO: 167899 - DNA, 120 bp, Artificial Sequence
  ENSG00000108561_18 (sequence is synthesized)
cagcccagcagggggagagaggtggggagtgagggaagagggttaaaacctgatgagtttcatgctgtcagtggccccctttcttcccctgagtctagcttgtcctggagaacccttcag

SEQ ID NO: 167900 - DNA, 120 bp, Artificial Sequence
  ENSG00000108576_0 (sequence is synthesized)
gctcctccctgcgagcgtgtgtgtgtgtcgggggtccctcccctcctggctctggggtcgggcgcgcaccccgccccgtagcgcggcccctccctggcgagcgcaaccccatccagcggg

SEQ ID NO: 167901 - DNA, 120 bp, Artificial Sequence
  ENSG00000108576_1 (sequence is synthesized)
agcgcggagccgcggccgcggggaagcattaagtttattcgcctcaaagtgacgcaaaaattcttcaagagctctttggcggcggctatctagagatcagaccatgtgagggcccgcggg

SEQ ID NO: 167902 - DNA, 120 bp, Artificial Sequence
  ENSG00000108576_2 (sequence is synthesized)
cctccgcacagccagcgccgccgggtgcctcgagggcgcgaggccagcccgcctgcccagcccgggaccagcctccccgcgcagcctggcaggtctcctggaggcaaggcgaccttgctt

SEQ ID NO: 167903 - DNA, 120 bp, Artificial Sequence
  ENSG00000108576_3 (sequence is synthesized)
cctggaggcaaggcgaccttgcttgccctctcttgcagaataacaaggggcttagccacaggagttgctggcaagtggaaagaagaacaaatgagtcaatcccgacgtgtcaatcccgac

SEQ ID NO: 167904 - DNA, 120 bp, Artificial Sequence
  ENSG00000108576_4 (sequence is synthesized)
gatagagagctcggaggtgatccacaaatccaagcacccagagatcaattgggatccttggcagatggacatcagtgtcatttactaaccagcaggatggagacgacgcccttgaattct

SEQ ID NO: 167905 - DNA, 120 bp, Artificial Sequence
  ENSG00000108576_5 (sequence is synthesized)
cagaagcagctatcagcgtgtgaagatggagaagattgtcaggaaaacggagttctacagaaggttgttcccaccccaggggacaaagtggagtccgggcaaatatccaatgggtactca

SEQ ID NO: 167906 - DNA, 120 bp, Artificial Sequence
  ENSG00000108576_6 (sequence is synthesized)
gcagttccaagtcctggtgcgggagatgacacacggcactctatcccagcgaccaccaccaccctagtggctgagcttcatcaaggggaacgggagacctggggcaagaaggtggatttc

SEQ ID NO: 167907 - DNA, 120 bp, Artificial Sequence
  ENSG00000108576_7 (sequence is synthesized)
cttctctcagtgattggctatgctgtggacctgggcaatgtctggcgcttcccctacatatgttaccagaatggagggggggcattcctcctcccctacaccatcatggccatttttggg

SEQ ID NO: 167908 - DNA, 120 bp, Artificial Sequence
  ENSG00000108576_8 (sequence is synthesized)
ggaatcccgctcttttacatggagctcgcactgggacagtaccaccgaaatggatgcatttcaatatggaggaaaatctgcccgattttcaaagggattggttatgccatctgcatcatt

SEQ ID NO: 167909 - DNA, 120 bp, Artificial Sequence
  ENSG00000108576_9 (sequence is synthesized)
gccttttacattgcttcctactacaacaccatcatggcctgggcgctatactacctcatctcctccttcacggaccagctgccctggaccagctgcaagaactcctggaacactggcaac

SEQ ID NO: 167910 - DNA, 120 bp, Artificial Sequence
  ENSG00000108576_10 (sequence is synthesized)
tgcaccaattacttctccgaggacaacatcacctggaccctccattccacgtcccctgctgaagaattttacacgcgccacgtcctgcagatccaccggtctaaggggctccaggacctg

SEQ ID NO: 167911 - DNA, 120 bp, Artificial Sequence
  ENSG00000108576_11 (sequence is synthesized)
gggggcatcagctggcagctggccctctgcatcatgctgatcttcactgttatctacttcagcatctggaaaggcgtcaagacctctggcaaggtggtgtgggtgacagccaccttccct

SEQ ID NO: 167912 - DNA, 120 bp, Artificial Sequence
  ENSG00000108576_12 (sequence is synthesized)
tatatcatcctttctgtcctgctggtgaggggtgccaccctccctggagcctggaggggtgttctcttctacttgaaacccaattggcagaaactcctggagacaggggtgtggatagat

SEQ ID NO: 167913 - DNA, 120 bp, Artificial Sequence
  ENSG00000108576_13 (sequence is synthesized)
gcagccgctcagatcttcttctctcttggtccgggctttggggtcctgctggcttttgctagctacaacaagttcaacaacaactgctaccaagatgccctggtgaccagcgtggtgaac

SEQ ID NO: 167914 - DNA, 120 bp, Artificial Sequence
  ENSG00000108576_14 (sequence is synthesized)
tgcatgacgagcttcgtttcgggatttgtcatcttcacagtgctcggttacatggctgagatgaggaatgaagatgtgtctgaggtggccaaagacgcaggtcccagcctcctcttcatc

SEQ ID NO: 167915 - DNA, 120 bp, Artificial Sequence
  ENSG00000108576_15 (sequence is synthesized)
acgtatgcagaagcgatagccaacatgccagcgtccactttctttgccatcatcttctttctgatgttaatcacgctgggcttggacagcacgtttgcaggcttggagggggtgatcacg

SEQ ID NO: 167916 - DNA, 120 bp, Artificial Sequence
  ENSG00000108576_16 (sequence is synthesized)
gctgtgctggatgagttcccacacgtctgggccaagcgccgggagcggttcgtgctcgccgtggtcatcacctgcttctttggatccctggtcaccctgacttttggaggggcctacgtg

SEQ ID NO: 167917 - DNA, 120 bp, Artificial Sequence
  ENSG00000108576_17 (sequence is synthesized)
gtgaagctgctggaggagtatgccacggggcccgcagtgctcactgtcgcgctgatcgaagcagtcgctgtgtcttggttctatggcatcactcagttctgcagggacgtgaaggaaatg

SEQ ID NO: 167918 - DNA, 120 bp, Artificial Sequence
  ENSG00000108576_18 (sequence is synthesized)
ctcggcttcagcccggggtggttctggaggatctgctgggtggccatcagccctctgtttctcctgttcatcatttgcagttttctgatgagcccgccacaactacgacttttccaatat

SEQ ID NO: 167919 - DNA, 120 bp, Artificial Sequence
  ENSG00000108576_19 (sequence is synthesized)
aattatccttactggagtatcatcttgggttactgcataggaacctcatctttcatttgcatccccacatatatagcttatcggttgatcatcactccagggacatttaaagagcgtatt

SEQ ID NO: 167920 - DNA, 120 bp, Artificial Sequence
  ENSG00000108576_20 (sequence is synthesized)
attaaaagtattaccccagaaacaccaacagaaattccttgtggggacatccgcttgaatgctgtgtaacacactcaccgagaggaaaaaggcttctccacaacctcctcctccagttct

SEQ ID NO: 167921 - DNA, 120 bp, Artificial Sequence
  ENSG00000108576_21 (sequence is synthesized)
gatgaggcacgcctgccttctcccctccaagtgaatgagtttccagctaagcctgatgatggaagggccttctccacagggacacagtctggtgcccagactcaaggcctccagccactt

SEQ ID NO: 167922 - DNA, 120 bp, Artificial Sequence
  ENSG00000108576_22 (sequence is synthesized)
atttccatggattcccctggacatattcccatggtagactgtgacacagctgagctggcctattttggacgtgtgaggatgtggatggaggtgatgaaaaccaccctatcatcagttagg

SEQ ID NO: 167923 - DNA, 120 bp, Artificial Sequence
  ENSG00000108576_23 (sequence is synthesized)
attaggtttagaatcaagtctgtgaaagtctcctgtatcatttcttggtatgatcattggtatctgatatctgtttgcttctaaaggtttcactgttcatgaatacgtaaactgcgtagg

SEQ ID NO: 167924 - DNA, 120 bp, Artificial Sequence
  ENSG00000108576_24 (sequence is synthesized)
agagaacagggatgctatctcgctagccatatattttctgagtagcatatataattttattgctggaatctactagaaccttctaatccatgtgctgctgtggcatcaggaaaggaagat

SEQ ID NO: 167925 - DNA, 120 bp, Artificial Sequence
  ENSG00000108576_25 (sequence is synthesized)
gtaagaagctaaaatgaaaaatagtgtgtccatgcaagcttgtgagtctgtgtatattgttgtttcagtgtattcttatctctagtccaatattttgggcccattacaaatatatgaatt

SEQ ID NO: 167926 - DNA, 120 bp, Artificial Sequence
  ENSG00000108576_26 (sequence is synthesized)
ccccaaatttttcttacattaacaaattctaccaactcaattgtgtatggaggttattatttgaagggtacaatcactacaacatgctctgccacccactccttttccagtgacactact

SEQ ID NO: 167927 - DNA, 120 bp, Artificial Sequence
  ENSG00000108576_27 (sequence is synthesized)
ccacacactttcctttacaggccagcctctggcgtttgctgcacctcattgccaccttcctgtctctctgtgctaaacattcaggacagtgttccacaggcagatctggcctatttcatt

SEQ ID NO: 167928 - DNA, 120 bp, Artificial Sequence
  ENSG00000108576_28 (sequence is synthesized)
agtcaccatggcttggctgtgaagtacgttgaaggtggatcttgtcacatgccccttcagtgttcacctggccctctggtttaagttctgtctgccttacgtgactgagtttgactgtcc

SEQ ID NO: 167929 - DNA, 120 bp, Artificial Sequence
  ENSG00000108576_29 (sequence is synthesized)
aggttgctttgctcggtgaagagaggagggtaaatcggattctcgtttagcactgggttatacagatctggcaccctaacctaaaccaaggcatcttcactccaagagcagttggagagt

SEQ ID NO: 167930 - DNA, 120 bp, Artificial Sequence
  ENSG00000108576_30 (sequence is synthesized)
ctgggttagccttacgtggacctcgccgctcgctggcggtcacgattgtgagccctccagataatttttaaggttgagtctaagtaaggctgcttgggaaatggtcagctaagtaaatca

SEQ ID NO: 167931 - DNA, 120 bp, Artificial Sequence
  ENSG00000108576_31 (sequence is synthesized)
cctttcatttcacataaggcccttaatatagataagtaaatttggcctttggtgtctcgtgactctcagaggcgtaggtagaggagcaaattaatatttgcagcatgggaattccttatc

SEQ ID NO: 167932 - DNA, 120 bp, Artificial Sequence
  ENSG00000108576_32 (sequence is synthesized)
agaattttgaggggaataaatcctcatcagagacaaaaggacttaatcatctggccacctatcacttcagttctctgtataaatgaaatttaattctaacaaccttataaaaagaaggtc

SEQ ID NO: 167933 - DNA, 120 bp, Artificial Sequence
  ENSG00000108576_33 (sequence is synthesized)
cagacagcagaggaaacatcctgtccaattctaggttttcctcccttggcctcctttccccagcattgtctaccctggcccacttcctgcattctccccatgccctgctatttctgattc

SEQ ID NO: 167934 - DNA, 120 bp, Artificial Sequence
  ENSG00000108576_34 (sequence is synthesized)
tttgcttctcctagcgagatactttccttatatgatagctgctgagaagtttcccagaactgctagaggaaaagaagtggggaatttaggaaatatccctcactgacctaactccattat

SEQ ID NO: 167935 - DNA, 120 bp, Artificial Sequence
  ENSG00000108576_35 (sequence is synthesized)
cttcactctttccttcttcctgccacctcatgcccattctctttactgtctagcatgctgaaagaaggaagtgatctaaatgccagcgtgttcagtggtaaatattagttggtgcaaaag

SEQ ID NO: 167936 - DNA, 120 bp, Artificial Sequence
  ENSG00000108576_36 (sequence is synthesized)
aaaaaccatgattacttttgcactaacctaatagctttgcaaattttaagaacttgctttatgaagatattcggatatggattctccccaccccacatacttagacattgttcaaatata

SEQ ID NO: 167937 - DNA, 120 bp, Artificial Sequence
  ENSG00000108576_37 (sequence is synthesized)
ctacttttaaaaaaacaccttttcaaacagaattagcgttttgccaagtctggtattaatggaattgtacaggagctttgaaagttttcaaactttattaaactaaaaaaaaaaaatcga

SEQ ID NO: 167938 - DNA, 120 bp, Artificial Sequence
  ENSG00000108576_38 (sequence is synthesized)
aaatctctgtctgttccgcatagtatgcatttatttgacccctatttatcaatactatgatggggttttttttttttaaagaaaatttaagagtaggtaggtggattttaaaataatatt

SEQ ID NO: 167939 - DNA, 120 bp, Artificial Sequence
  ENSG00000108576_39 (sequence is synthesized)
ttaaagaccttttatatctatatgtagcatttatagaaaaataaaaactaaaaatagaattgaattgtaacattatttaaggactgaagttttttttcttgtatcagtaagaaataccca

SEQ ID NO: 167940 - DNA, 82 bp, Artificial Sequence
  ENSG00000108576_40 (sequence is synthesized)
tttgggaggctgcagtgggaggatcacatgaccgccgtctctattaaaaatacagaaaattagctgaatgtggtggcaggcg

SEQ ID NO: 167941 - DNA, 84 bp, Artificial Sequence
  ENSG00000108576_41 (sequence is synthesized)
agaccagcttggccaacatagtgaaacgccgtctctattaaaaatacagaaaattagctgaatgtggtggcaggcgcctataat

SEQ ID NO: 167942 - DNA, 120 bp, Artificial Sequence
  ENSG00000108576_42 (sequence is synthesized)
ctccgtctcaaaaaaaaaaaaaaaaattgttatgcttagttccatggaaagactattctgaagctttaagtcttctttttctattttccatagtattgccccttccccacttcattgctt

SEQ ID NO: 167943 - DNA, 120 bp, Artificial Sequence
  ENSG00000108576_43 (sequence is synthesized)
tttccatagtattgccccttccccacttcattgcttaactgtctctaaattttaatgataataatattttaaaggtcagataatgccattagaggcagagacaaacctggggaccaagct

SEQ ID NO: 167944 - DNA, 120 bp, Artificial Sequence
  ENSG00000108576_44 (sequence is synthesized)
agctaatttctctgttattgagagcgctaaagacaggtgaactggagttttatttcctctgctagagtgaaataataccctctccaccaggcacaatggctcacacctgtaattccagca

SEQ ID NO: 167945 - DNA, 120 bp, Artificial Sequence
  ENSG00000108576_45 (sequence is synthesized)
taaaaaacaaaaacaaaaacaaaaaaaccctctcaattggtttaataccacgatagaaaagataaatattttaggatggaatcttaaatatgtctgtccttttgtttcatatagttgaaa

SEQ ID NO: 167946 - DNA, 120 bp, Artificial Sequence
  ENSG00000108576_46 (sequence is synthesized)
tcaattcagtattgtttctacattaggtgtttcaaaaacagtcacctttgcaacagaagagctcttttgttgaaaatgattcacaatatatttcagttggaatgtcaggtggtatttctc

SEQ ID NO: 167947 - DNA, 120 bp, Artificial Sequence
  ENSG00000108576_47 (sequence is synthesized)
ttaccaacacctcacagaatctatgccaagctgctctaccaccaatgcaagtatttttttaaagctactaaaataaactttcttcaccagccaactctaatttggagacagtgtgcattg

SEQ ID NO: 167948 - DNA, 120 bp, Artificial Sequence
  ENSG00000108576_48 (sequence is synthesized)
gtgaaggacctcgtcagaataagtttgaatgtctactgaactaagaagaattttgtcgtttgggggagagaatagatggcatcagtccttcaattctgtaactgaagactccaattatag

SEQ ID NO: 167949 - DNA, 120 bp, Artificial Sequence
  ENSG00000108576_49 (sequence is synthesized)
tagataagaattgtgtctagcaatttttaaacactgacagtccaaacaaaaatatttggtgaggaaggatgtcccatatttttgcttaaatatcataaacaaatatgagcatttactaat

SEQ ID NO: 167950 - DNA, 120 bp, Artificial Sequence
  ENSG00000108576_50 (sequence is synthesized)
agattattcttatttacactctaaaattaaaggtgtactttatcttaagaaaatgatatattaaaaattcatattttaaaagataaaattggggaatttacagttattttgtgaatggcc

SEQ ID NO: 167951 - DNA, 120 bp, Artificial Sequence
  ENSG00000108576_51 (sequence is synthesized)
cagttattttgtgaatggcctttaaactatgatttgatctatatacaacttttcagaatacttttgattgtgtgttggacatatctaaaattaattttatctggcagaattaaacctaaa

SEQ ID NO: 167952 - DNA, 120 bp, Artificial Sequence
  ENSG00000108576_52 (sequence is synthesized)
tttatttgtataaaagagtcccctttctaaaattcatacagtgcccttgtattcatttatgcagtgtttataaatatttcaagttagattgtgagatattaataaatgatttatgctgtg

SEQ ID NO: 167953 - DNA, 120 bp, Artificial Sequence
  ENSG00000108576_53 (sequence is synthesized)
aaggttgccagtctctttgcctgggcagaggcctgtgctgaagtgggagctgcaggcttcagccccgactgtaggggcagctgtagggctgctgcaacatccccctataggaagtgaggg

SEQ ID NO: 167954 - DNA, 120 bp, Artificial Sequence
  ENSG00000108576_54 (sequence is synthesized)
ctggggaggaaaatcagggaaagcacctggctggtgtagtcttgcagcttgggtacagaagttggtaattctgtgtgtcagagttcaatccaggatatatcacatcttgggaatttcctg

SEQ ID NO: 167955 - DNA, 120 bp, Artificial Sequence
  ENSG00000108578_0 (sequence is synthesized)
ctttttccggcgctccgggtgcgagagacaggtcgggccccctaggcagcgagccgcagcgcaatcccggcgctcgcccaaggaccctggaagctaccgttaccccgccgggcagcgtgg

SEQ ID NO: 167956 - DNA, 120 bp, Artificial Sequence
  ENSG00000108578_1 (sequence is synthesized)
gcgccatgagcagctcgggactgaattcggagaaggtagctgctctgatacagaaactgaattccgacccccagttcgtacttgcccagaatgtcgggaccacccacgacctgctggaca

SEQ ID NO: 167957 - DNA, 120 bp, Artificial Sequence
  ENSG00000108578_2 (sequence is synthesized)
tctgtctgaagcgggccacggtgcagcgcgcgcagcatgtgttccagcacgccgtgccccaggagggcaagccaatcaccaaccagaagagctcagggcgatgctggatcttttcttgtc

SEQ ID NO: 167958 - DNA, 120 bp, Artificial Sequence
  ENSG00000108578_3 (sequence is synthesized)
tgaatgttatgaggcttccattcatgaaaaagttaaatattgaagaatttgagtttagccaatcttacctgtttttttgggacaaggttgaacgctgttatttcttcttgagtgcttttg

SEQ ID NO: 167959 - DNA, 120 bp, Artificial Sequence
  ENSG00000108578_4 (sequence is synthesized)
tggacacagcccagagaaaggagcctgaggatgggaggctggtgcagtttttgcttatgaaccctgcaaatgatggtggccaatgggatatgcttgttaatattgttgaaaaatatggtg

SEQ ID NO: 167960 - DNA, 120 bp, Artificial Sequence
  ENSG00000108578_5 (sequence is synthesized)
ttatccctaagaaatgcttccctgaatcttatacaacagaggcaaccagaaggatgaatgatattctgaatcacaagatgagagaattctgtatacgactgcggaacctggtacacagtg

SEQ ID NO: 167961 - DNA, 120 bp, Artificial Sequence
  ENSG00000108578_6 (sequence is synthesized)
gagcaaccaaaggagaaatctcggccacacaggacgtcatgatggaggagatattccgagtggtgtgcatctgtttgggtaatccaccagagacattcacctgggaatatcgagacaaag

SEQ ID NO: 167962 - DNA, 120 bp, Artificial Sequence
  ENSG00000108578_7 (sequence is synthesized)
ataaaaattatcagaaaattggccccataacacccttggagttttacagggaacatgtcaagccactcttcaatatggaagataagatttgtttagtgaatgaccctaggccccagcaca

SEQ ID NO: 167963 - DNA, 120 bp, Artificial Sequence
  ENSG00000108578_8 (sequence is synthesized)
agtacaacaaactttacacagtggaatacttaagcaatatggttggagggagaaaaactctatacaacaaccagcccattgacttcctgaaaaagatggttgctgcctccatcaaagatg

SEQ ID NO: 167964 - DNA, 120 bp, Artificial Sequence
  ENSG00000108578_9 (sequence is synthesized)
ttggaaaacacttcaatagcaagctgggcctcagtgacatgaatctctatgaccatgagttagtgtttggtgtctccttgaagaacatgaataaagcggagaggctgacttttggtgagt

SEQ ID NO: 167965 - DNA, 120 bp, Artificial Sequence
  ENSG00000108578_10 (sequence is synthesized)
cacttatgacccacgccatgaccttcactgctgtctcagagaaggatgatcaggatggtgctttcacaaaatggagagtggagaattcatggggtgaagaccatggccacaaaggttacc

SEQ ID NO: 167966 - DNA, 120 bp, Artificial Sequence
  ENSG00000108578_11 (sequence is synthesized)
tgtgcatgacagatgagtggttctctgagtatgtctacgaagtggtggtggacaggaagcatgtccctgaagaggtgctagctgtgttagagcaggaacccattatcctgccagcatggg

SEQ ID NO: 167967 - DNA, 120 bp, Artificial Sequence
  ENSG00000108578_12 (sequence is synthesized)
accccatgggagctttggctgagtgatactgccctccagctctttcctccttccatggaacctgacgtagctgcaaaggacagatccagggactgaagccaaagttatgcaagggactgt

SEQ ID NO: 167968 - DNA, 120 bp, Artificial Sequence
  ENSG00000108578_13 (sequence is synthesized)
gtgttgccacaggacacagtcagatttccagtctccaccaggaacctcttcagaaagtgtgctttatgctgaaacagaatactgttaaaggaaaaaaaagaggggggaagatcaggtcat

SEQ ID NO: 167969 - DNA, 120 bp, Artificial Sequence
  ENSG00000108578_14 (sequence is synthesized)
actatctactctcctcatctctaacagctcaggatctcttagcattttaattagatgtaattgtttgtctttaactgtcaaaaagtttggttctgtgtctgtgttttaataagacgagag

SEQ ID NO: 167970 - DNA, 120 bp, Artificial Sequence
  ENSG00000108578_15 (sequence is synthesized)
gacgagcgattgaggtgtatggagagaaaacagacctaatgctccttgttcctagagtagagtggagggagggtggcctaagagttgagctctcggaactgcatgctgctggacagtatc

SEQ ID NO: 167971 - DNA, 120 bp, Artificial Sequence
  ENSG00000108578_16 (sequence is synthesized)
actgtctttcctagatggcagtcactgaattccattttttcaaggtaatttcttgtgcctctaatagcccaagaatgggaggttgatcagatctgacatgattccttcctgttctgaact

SEQ ID NO: 167972 - DNA, 120 bp, Artificial Sequence
  ENSG00000108578_17 (sequence is synthesized)
gtggggtgtgcacatctctgcttgagtcaggtttgagtagaggcttagagacagttgggtgagaacaaccaaaatcttatcatggtctcagtcataatcattagggggaactctagccaa

SEQ ID NO: 167973 - DNA, 120 bp, Artificial Sequence
  ENSG00000108578_18 (sequence is synthesized)
atggtttaacttctgcctgtggaactggggattgggtgggcaggaaaaggtgatatccattctttctgataactagatggtgctgagaagcttttgaataaaaactttgctaaatgagaa

SEQ ID NO: 167974 - DNA, 66 bp, Artificial Sequence
  ENSG00000108578_19 (sequence is synthesized)
tttacactgctatttctcttgctgtgcagaagccttttagtttaattaggtcccatttatttcaat

SEQ ID NO: 167975 - DNA, 120 bp, Artificial Sequence
  ENSG00000108578_20 (sequence is synthesized)
aattctttgcctaagccaatgtctggaagagtttttccgatgttatcttctagaacttgtattggtttcaggttttagctttcagcctttgaccatcttgagttgatttttgtgtaaggt

SEQ ID NO: 167976 - DNA, 120 bp, Artificial Sequence
  ENSG00000108578_21 (sequence is synthesized)
ctgaaggggaatttgtgttggcctagtggagcctgagatgcaggttaatcctccttatggaaggcaactattactaggatgggtacccgatgacaccacactttttctctcagctgagct

SEQ ID NO: 167977 - DNA, 120 bp, Artificial Sequence
  ENSG00000108578_22 (sequence is synthesized)
ttcaaccttaaatggggcattagtgccggggcacctctgtatagtcctaacccactggagaggccttcctaaggagagcaggttaagcagatgtctgagtcttctagttccgcctgatcg

SEQ ID NO: 167978 - DNA, 120 bp, Artificial Sequence
  ENSG00000108578_23 (sequence is synthesized)
tcatcgtagatttcctcctaggaaaacaaggactgttttatcatttgactcccacactatcatctgcaaataagtgcatacctaggaatgatgacttggccccatcagaatgctcacagc

SEQ ID NO: 167979 - DNA, 120 bp, Artificial Sequence
  ENSG00000108578_24 (sequence is synthesized)
agcccgcctggttgttgtaggagtgtgtgatagaaaggaatgggggagaacagccattgacactggtagggtaagaaaggaactgggatgcttgcccttctgaccctagagatttatgcc

SEQ ID NO: 167980 - DNA, 120 bp, Artificial Sequence
  ENSG00000108578_25 (sequence is synthesized)
ctaggtgtggctgtatgaatgagaagtttttctgcctccctactagtatacaggtcatcactcaccatcaccaaggcagcggaggaagagagcatcagtacaggatctggtgttagcctt

SEQ ID NO: 167981 - DNA, 120 bp, Artificial Sequence
  ENSG00000108578_26 (sequence is synthesized)
aggtccaaggcccagctctgaacctcaccatgtgacctgggcacatcacctagttactcaagacccggttttctaatttttctaaaaatagagccatgcctgtcctatctgcttcacaga

SEQ ID NO: 167982 - DNA, 120 bp, Artificial Sequence
  ENSG00000108578_27 (sequence is synthesized)
gaaagctgaaaaatatgtatgaatattagttttgtaaaaggtttatcctacaaaaagggtttctgctctttgtcccttgccctctggactcataagtcttctgttcttttctccaggtta

SEQ ID NO: 167983 - DNA, 120 bp, Artificial Sequence
  ENSG00000108578_28 (sequence is synthesized)
ttcaaatggctgttaaccacagggaattgtataagattcttggttagcatgtatgagtatcaaactagacagcaaacaaacatttttccccacttcctctgaagtattttatgcagctaa

SEQ ID NO: 167984 - DNA, 120 bp, Artificial Sequence
  ENSG00000108578_29 (sequence is synthesized)
tgaagttggtggtgccaggatttatcagcttttccacaatgttcctcttcagagactttttaaactgtaagccagcagtcattttaattcccacatgcgcccctgtataggaccagaatc

SEQ ID NO: 167985 - DNA, 120 bp, Artificial Sequence
  ENSG00000108578_30 (sequence is synthesized)
aggtagatgcacctcctaattgtgtctcttacgcgaattagaataagcaaggacctctctcacatgtattttgccaccttgtgtttctttgttacttaacaatgtggctgtagtacttag

SEQ ID NO: 167986 - DNA, 120 bp, Artificial Sequence
  ENSG00000108578_31 (sequence is synthesized)
cttgtaggcagagatgatgagcttgatggaaacatgaacctagaggagagctgtgtgttgcttgacattcctggttttgtgccctaattaatgtgttcttgatcttgatagatttgttta

SEQ ID NO: 167987 - DNA, 120 bp, Artificial Sequence
  ENSG00000108578_32 (sequence is synthesized)
tggctgtgatgttggaaaacacttcaatagcaagctgggcctcagtgacatgaatctgtgagtgcaggaaatttaaaatggaaagtcatttgtgggttgttgctgttggagtgtgctgtt

SEQ ID NO: 167988 - DNA, 120 bp, Artificial Sequence
  ENSG00000108578_33 (sequence is synthesized)
ggtacaaaatgactctgccgaggttcatccaaagatgaaggttgacctaagggcgcgtctctttctttgcatcctttagagtttgaggactcatagcagaaactccacatacttaaacac

SEQ ID NO: 167989 - DNA, 120 bp, Artificial Sequence
  ENSG00000108578_34 (sequence is synthesized)
tctaacccaggacatcaaaatcccactttctatctgagtggaaatcgttgggcgttcctaaaaagccatcctctatgagaaagacactttaaaaaaataattgactattgcggaaatgtg

SEQ ID NO: 167990 - DNA, 120 bp, Artificial Sequence
  ENSG00000108578_35 (sequence is synthesized)
cctaggcagcgagccgcagcgcaatcccggcgctcgcccaaggaccctggaagctaccgttaccccgccgggcagcgtgggcgccatgagcagctcgggactgaattcggagaagaggca

SEQ ID NO: 167991 - DNA, 120 bp, Artificial Sequence
  ENSG00000108578_36 (sequence is synthesized)
aaattcgtactgaaagaactggtcgtaaattcgtaaagaatgaggcacaggtacaggcaggtctaagaacattacccatgtggtttgttttgctgttctgtggcttgttagtacatgcgg

SEQ ID NO: 167992 - DNA, 120 bp, Artificial Sequence
  ENSG00000108578_37 (sequence is synthesized)
ttagagtacaaaagtgacatgtccatgagtatacgtttgagtgtaattgactatattatgttccaatgctgtgtggtttgtagcccgtgtcttggagatgtatggtcttggtcacaaaac

SEQ ID NO: 167993 - DNA, 120 bp, Artificial Sequence
  ENSG00000108578_38 (sequence is synthesized)
gagctgttgagccccttcagtttcttctgaattccttttacaaccaaaagccagttttccccatgatcgtactccctttattttgtactatcattctttttacagctatgaccatgagtt

SEQ ID NO: 167994 - DNA, 120 bp, Artificial Sequence
  ENSG00000108578_39 (sequence is synthesized)
taaattcgtactgaaagaactggtcgtaaattcgtaaagaatgaggcacagggcgatgctggatcttttcttgtctgaatgttatgaggcttccattcatgaaaaagttaaatattgaag

SEQ ID NO: 167995 - DNA, 120 bp, Artificial Sequence
  ENSG00000108582_0 (sequence is synthesized)
gcccggagcgctgagccgcgggagcggagccggggttagcggcgctgctggaagatggcgagcggccgggacgagcggccgccttggcggctagggcggctcctgttgctcatgtgcctg

SEQ ID NO: 167996 - DNA, 120 bp, Artificial Sequence
  ENSG00000108582_1 (sequence is synthesized)
ctgctgctggggagctcggcccgggcggctcacatcaagaaggcggaggcgactaccacaactacgagcgcgggcgccgaggcggccgagggccagttcgaccgctactaccacgaagag

SEQ ID NO: 167997 - DNA, 120 bp, Artificial Sequence
  ENSG00000108582_2 (sequence is synthesized)
gagttggagtcggcgctgagggaggcggcggccgcgggcctccccggcctggcccgcctctttagcatcggccgctcggtggaaggccggccgctgtgggtgcttcgcctcaccgccggc

SEQ ID NO: 167998 - DNA, 120 bp, Artificial Sequence
  ENSG00000108582_3 (sequence is synthesized)
ctggggtcgctaatccctgagggcgacgcggggcctgacgctgccgggcccgacgctgcggggccgctgctgcccggccggccccaggtgaagctggtgggcaacatgcatggcgacgag

SEQ ID NO: 167999 - DNA, 120 bp, Artificial Sequence
  ENSG00000108582_4 (sequence is synthesized)
accgtgtcgcgccaggtgttgatctacttggcccgcgagctggcggccggctaccgccgcggggacccgcgcctggtccgcctgctcaacaccaccgacgtgtacctgctgcccagcctc

SEQ ID NO: 168000 - DNA, 120 bp, Artificial Sequence
  ENSG00000108582_5 (sequence is synthesized)
aaccccgatggcttcgagcgtgcccgcgagggcgactgtggcttcggcgacggcggcccgtccggggccagcggccgcgacaatagtcgcggccgcgacctcaaccgaagctttcccgac

SEQ ID NO: 168001 - DNA, 120 bp, Artificial Sequence
  ENSG00000108582_6 (sequence is synthesized)
cagtttagcaccggcgaaccccccgccctggacgaggtgcccgaggtgcgcgccctcatcgagtggatccgcaggaacaagtttgtgctttctggaaatctgcatggtggctcagtggta

SEQ ID NO: 168002 - DNA, 120 bp, Artificial Sequence
  ENSG00000108582_7 (sequence is synthesized)
gcaagctatccttttgatgattctccagaacataaggccactggaatctatagcaaaacctcagatgatgaagtatttaaatacttggcaaaagcttatgcttcaaaccaccccataatg

SEQ ID NO: 168003 - DNA, 120 bp, Artificial Sequence
  ENSG00000108582_8 (sequence is synthesized)
aaaactggtgagcctcattgtccaggagatgaagacgagactttcaaagatggaatcacaaacggcgcacattggtatgatgtggaaggtggtatgcaagattacaattatgtgtgggcc

SEQ ID NO: 168004 - DNA, 120 bp, Artificial Sequence
  ENSG00000108582_9 (sequence is synthesized)
aactgttttgagatcacattagaactgtcttgttgcaagtacccacctgcttcacagcttcgacaggaatgggagaacaatcgtgagtctttgatcacattgattgaaaaggttcacatt

SEQ ID NO: 168005 - DNA, 120 bp, Artificial Sequence
  ENSG00000108582_10 (sequence is synthesized)
ggagtgaaaggatttgttaaagattccataacaggatctgggttagagaatgcaaccatctcagtggctggtattaatcataatatcacaacaggcagatttggtgatttctaccgatta

SEQ ID NO: 168006 - DNA, 120 bp, Artificial Sequence
  ENSG00000108582_11 (sequence is synthesized)
cttgttcctggaacttacaaccttacagtagttttaactgggtatatgccattgactgttactaatgtagtggtgaaagaaggaccagccacagaggtggatttttctcttaggccaact

SEQ ID NO: 168007 - DNA, 120 bp, Artificial Sequence
  ENSG00000108582_12 (sequence is synthesized)
gtaacttcagtaatccctgacacgacagaggctgtatcaactgctagcacagttgctatacctaatattctttctggaacatcatcctcctaccagccaattcagccaaaggactttcac

SEQ ID NO: 168008 - DNA, 120 bp, Artificial Sequence
  ENSG00000108582_13 (sequence is synthesized)
caccaccatttccctgatatggaaatcttcttgagaaggtttgccaatgaatatcctaacattacccggctttattccttgggaaaatcagtagagtcaagagaactttatgtgatggag

SEQ ID NO: 168009 - DNA, 120 bp, Artificial Sequence
  ENSG00000108582_14 (sequence is synthesized)
atatctgataatccgggtgtccatgaaccaggtgaaccagaatttaagtacattggaaatatgcatggaaatgaagtggttggaagagaactgctgttgaacctcatagaatacctttgt

SEQ ID NO: 168010 - DNA, 120 bp, Artificial Sequence
  ENSG00000108582_15 (sequence is synthesized)
aagaactttggaacagaccctgaagtcacagatttggttcataacactagaattcaccttatgccatccatgaatcctgatgggtatgaaaagtcccaggaaggagattcaataagtgta

SEQ ID NO: 168011 - DNA, 120 bp, Artificial Sequence
  ENSG00000108582_16 (sequence is synthesized)
attggcagaaacaacagcaacaactttgacctgaaccgaaatttcccagaccagtttgttcagatcacagatcctacgcaaccagaaactattgctgtaatgagctggatgaagtcctat

SEQ ID NO: 168012 - DNA, 120 bp, Artificial Sequence
  ENSG00000108582_17 (sequence is synthesized)
ccatttgtactttcagcaaacctgcatggaggttctttggtggttaactacccttttgatgatgatgaacaaggacttgccacatatagtaaatcaccagatgatgctgtgttccaacaa

SEQ ID NO: 168013 - DNA, 120 bp, Artificial Sequence
  ENSG00000108582_18 (sequence is synthesized)
atagcactttcttattccaaggaaaattcccagatgtttcaaggtagaccttgcaagaatatgtatcctaatgaatattttcctcatggaataacaaatggagctagttggtataatgtg

SEQ ID NO: 168014 - DNA, 120 bp, Artificial Sequence
  ENSG00000108582_19 (sequence is synthesized)
ccaggaggaatgcaggactggaactatttacaaacaaattgctttgaagtgactattgaactaggttgtgtgaaatatccacttgagaaagagctgccaaacttttgggaacagaatcga

SEQ ID NO: 168015 - DNA, 120 bp, Artificial Sequence
  ENSG00000108582_20 (sequence is synthesized)
agatcactaatccagtttatgaaacaggttcatcagggcgtcagaggatttgttctagatgccacagatggcaggggtatattaaatgccaccattagtgttgctgagattaatcaccca

SEQ ID NO: 168016 - DNA, 120 bp, Artificial Sequence
  ENSG00000108582_21 (sequence is synthesized)
gtgactacttacaaaactggagattactggcgtctcttggttccaggaacttataaaatcacagcatctgctcgagggtataatccagttaccaagaatgtgactgtcaagagtgaaggc

SEQ ID NO: 168017 - DNA, 120 bp, Artificial Sequence
  ENSG00000108582_22 (sequence is synthesized)
gctattcaggtcaacttcacacttgttcgatcctcaacagattcaaacaatgaatcaaagaaaggaaaaggggctagcagcagcaccaatgatgccagtgatccaactactaaagagttt

SEQ ID NO: 168018 - DNA, 120 bp, Artificial Sequence
  ENSG00000108582_23 (sequence is synthesized)
gaaactttaattaaagacctttcagcggagaatggtttggaaagcctcatgttacgctcctcctcaaatctggctctggctctttatcgataccattcctacaaagacttatcagagttt

SEQ ID NO: 168019 - DNA, 120 bp, Artificial Sequence
  ENSG00000108582_24 (sequence is synthesized)
ctgagaggacttgtaatgaactatccacatattacaaatcttaccaatttgggacagagcactgaatatcgtcacatttggtcccttgaaatctccaataagcccaatgtatctgagcct

SEQ ID NO: 168020 - DNA, 120 bp, Artificial Sequence
  ENSG00000108582_25 (sequence is synthesized)
gaagaaccaaagattcgttttgttgctggtatccatggaaatgcgccagttggaactgaactgcttttggctctggcagaatttctctgcctgaactacaaaaagaacccagctgttacc

SEQ ID NO: 168021 - DNA, 120 bp, Artificial Sequence
  ENSG00000108582_26 (sequence is synthesized)
caattggttgacaggactaggattgtgattgtcccttctctaaatccagatgggcgagagagagctcaagagaaagactgtacttcaaaaataggacaaacaaatgctcgtggcaaagat

SEQ ID NO: 168022 - DNA, 120 bp, Artificial Sequence
  ENSG00000108582_27 (sequence is synthesized)
ttggatacagacttcacaaataatgcctcccaacctgagaccaaagccatcattgaaaatttgattcaaaaacaggactttagtctttctgttgccttagatggtggttccatgctggtc

SEQ ID NO: 168023 - DNA, 120 bp, Artificial Sequence
  ENSG00000108582_28 (sequence is synthesized)
acatatccttatgacaagccagtacagacagtggaaaataaagagactctgaagcatttggcatctctttatgcaaataatcatccatccatgcacatgggtcagcccagttgcccaaat

SEQ ID NO: 168024 - DNA, 120 bp, Artificial Sequence
  ENSG00000108582_29 (sequence is synthesized)
aaatcagatgagaatattccaggaggagtaatgcgtggagcagaatggcatagtcacctgggcagcatgaaggattatagtgtcacctatggccattgtccggaaatcacagtatacaca

SEQ ID NO: 168025 - DNA, 120 bp, Artificial Sequence
  ENSG00000108582_30 (sequence is synthesized)
agctgctgttactttcctagtgctgcacgactcccttccttgtgggcagacaataagagatctcttcttagtatgttagtggaggttcacaagggagttcatggatttgttaaagataag

SEQ ID NO: 168026 - DNA, 120 bp, Artificial Sequence
  ENSG00000108582_31 (sequence is synthesized)
actggaaagccaatctctaaagcagtcattgtacttaatgaaggaataaaggtacaaacaaaagagggaggttatttccatgtactcttagcgccaggtgtccataacattattgccatc

SEQ ID NO: 168027 - DNA, 120 bp, Artificial Sequence
  ENSG00000108582_32 (sequence is synthesized)
gctgatgggtaccagcaacaacattcacaggtctttgtgcatcatgatgcagctagttctgtggtgatagtctttgacacagataaccggatatttggtttgccaagggagcttgtggta

SEQ ID NO: 168028 - DNA, 120 bp, Artificial Sequence
  ENSG00000108582_33 (sequence is synthesized)
actgtatcaggtgctactatgtcggcattgatcctaacagcttgcattatttggtgcatctgctcaatcaagtctaatagacacaaggatggctttcatcggctcaggcagcatcatgat

SEQ ID NO: 168029 - DNA, 120 bp, Artificial Sequence
  ENSG00000108582_34 (sequence is synthesized)
gagtatgaagatgaaattcgcatgatgtctaccggctccaagaagtccctcctaagccatgagttccaggatgaaacagacactgaagaggaaacattatattctagcaaacattgaaaa

SEQ ID NO: 168030 - DNA, 120 bp, Artificial Sequence
  ENSG00000108582_35 (sequence is synthesized)
acacattttgcatatctcccagcataagtaccaagcaaaattacagttcctcttgggagaacactgcattaagaagagagactctcttgcttcttcaaagagctttgggaaattaaattg

SEQ ID NO: 168031 - DNA, 120 bp, Artificial Sequence
  ENSG00000108582_36 (sequence is synthesized)
ctaaatttgtattctctgtgaatttcactggcagttttgaacttcccttccttaaagtactctaaacctttaaaaaaaaatctgatttatgcagcagagatgggacagccactttttctt

SEQ ID NO: 168032 - DNA, 120 bp, Artificial Sequence
  ENSG00000108582_37 (sequence is synthesized)
tttaatttaagatgagctatttggagcttatgtaataatggcataaagccaactagaggatgttgtattttgcacatcagatgtttactagtggctttagtatttttctttgttttaaat

SEQ ID NO: 168033 - DNA, 120 bp, Artificial Sequence
  ENSG00000108582_38 (sequence is synthesized)
ggccaaaagaatccagaaacattaaggcagggacagcagtcagaatcgacataaagctttaaaaactcaaggttttttcaacctactgaggagtacttttctctagttgttaaatagctg

SEQ ID NO: 168034 - DNA, 120 bp, Artificial Sequence
  ENSG00000108582_39 (sequence is synthesized)
ttcaggtttaatggaggttgaattgatttttaaacacatataacagtaggaaatgaataaatgggcttctgcatttggctttctacctgttccaaggctagatcggaactggtagactac

SEQ ID NO: 168035 - DNA, 120 bp, Artificial Sequence
  ENSG00000108582_40 (sequence is synthesized)
gctgtaagcaggatttcactacctctcttaaggtttagcaaacttctaaatagcccattttaagggagaacttactaactttattgtgaaaggtctaaatgcccacttgaatgaagctga

SEQ ID NO: 168036 - DNA, 120 bp, Artificial Sequence
  ENSG00000108582_41 (sequence is synthesized)
gagagagatctagcaaaagctaaaactcatgttgtctatctttgaacttggtaaaaacccacaggtgctgctgcttatatctgtgaagcactagcttattctaggaatgcctgattcttt

SEQ ID NO: 168037 - DNA, 120 bp, Artificial Sequence
  ENSG00000108582_42 (sequence is synthesized)
aatattgcctaaatcggaacctttttctatgttgcacacatggttttcagatgacccagccatctacaagatctgaattctactgaaaatatctagaaatgtggaagagacctacttgca

SEQ ID NO: 168038 - DNA, 120 bp, Artificial Sequence
  ENSG00000108582_43 (sequence is synthesized)
cattcttaacctgtatttgaacacaaaatatctatacttcatgctccagcccaagcctataccctgtaatagcatactattattgaaatcgcttgaccggtcttgttcacataggcctct

SEQ ID NO: 168039 - DNA, 120 bp, Artificial Sequence
  ENSG00000108582_44 (sequence is synthesized)
gggagtgatttggttctttgccctaatgtttcatttgacggtctctttttgatcaaccaatttttctaaaagttcagtcgaaagcttttaagtatagcttcctcccttgaaaaaaaatgt

SEQ ID NO: 168040 - DNA, 120 bp, Artificial Sequence
  ENSG00000108582_45 (sequence is synthesized)
aaactatgactgctgagtgataaaacactgtggtgtgaaagtgtcatcttcactgccaatcaggcaaagaccggaaagatttgcattttattatgtctgtcttatcatgcaatggaaatg

SEQ ID NO: 168041 - DNA, 120 bp, Artificial Sequence
  ENSG00000108582_46 (sequence is synthesized)
atgctttttgtaagtatgcatcttaccaatgatgtaacggtttaatacctttgaatgttttaataaccaagttgctgctgaacttatactaaatcaggggaccaaaaaacttgctcttat

SEQ ID NO: 168042 - DNA, 120 bp, Artificial Sequence
  ENSG00000108582_47 (sequence is synthesized)
cttctcaaattgtattctatatccattaatgtatcagttatcccaaagccttcaggtggaggggtttaccaccttcctaggtcgttcaaccaggttttgtgaggaatgcattcaaagtgg

SEQ ID NO: 168043 - DNA, 120 bp, Artificial Sequence
  ENSG00000108582_48 (sequence is synthesized)
ctttataaaagaagattttctttagcaagaataatgaggtcatgtcatttgttaataagtatctgtgataaatccgtggttcaaggttaagccattctggtattctggtattagcaactg

SEQ ID NO: 168044 - DNA, 120 bp, Artificial Sequence
  ENSG00000108582_49 (sequence is synthesized)
taaattctgccacctcatacatggaacagagcttgtgggatgctaatagttagtgaagtatacatgatttaatttctaataatctttatgttttctttaaggatggtggtgtattgctct

SEQ ID NO: 168045 - DNA, 120 bp, Artificial Sequence
  ENSG00000108582_50 (sequence is synthesized)
ttttcagctttatttttaagagtacagtcaggaaaccaacaaggggcctaagagtggctgcccctgcttgggacattacagcaagtgaaacaaagttaatgtgacaagctttgctttgtt

SEQ ID NO: 168046 - DNA, 120 bp, Artificial Sequence
  ENSG00000108582_51 (sequence is synthesized)
atcattggtcttcactagaggataccttttacatgtacttctctcttggatcaaatatgtctttaactgtacatctcagtggctggaggccatgccttttaagcatgtgtaaaattttta

SEQ ID NO: 168047 - DNA, 120 bp, Artificial Sequence
  ENSG00000108582_52 (sequence is synthesized)
aagaaatgaacatacacatagttattttagtaatatttcctgaaagaaaaaccaaattctgctataagtcttgatcttcaatgaacttttaaataatgcatttagctggaaaacaagact

SEQ ID NO: 168048 - DNA, 120 bp, Artificial Sequence
  ENSG00000108582_53 (sequence is synthesized)
ttcccagcttgtattacctagaagcgtgaatgtataggatacctgactactaagactatattctcagccctgccctgtcttttatttgcgggtctaatctaatattagaatatattaacc

SEQ ID NO: 168049 - DNA, 120 bp, Artificial Sequence
  ENSG00000108582_54 (sequence is synthesized)
gcttaaggcattgaagccatatgggatggggaatgcatttcttcagtgtttctccgagagactttccatttccttggagttatggcggcaagtaagtatcatagtattaagaaatttgcc

SEQ ID NO: 168050 - DNA, 120 bp, Artificial Sequence
  ENSG00000108582_55 (sequence is synthesized)
taaatctgagttgtgcctttctttactcacaaggcatgggctttgtcctggtgatcagtttgtaagccttcttccttcccagctccttaataaaagcaaagtgattgagtaggtaatgtt

SEQ ID NO: 168051 - DNA, 120 bp, Artificial Sequence
  ENSG00000108582_56 (sequence is synthesized)
caaagtgtctgcctgtgtacatgtacttgtattgattatgtagttcagtaagatgtgcccaagtcatttcagaaagaaagacccttcagttttgatgcattttgctgaacacttgggtag

SEQ ID NO: 168052 - DNA, 120 bp, Artificial Sequence
  ENSG00000108582_57 (sequence is synthesized)
tgagtgggatcctatccagttgaggaatgcttgcaatgctcattgaagggatttgctttgggactttgtcatcttccagaaaggaaacatattgtatatttggcccagtgtgattgattg

SEQ ID NO: 168053 - DNA, 120 bp, Artificial Sequence
  ENSG00000108582_58 (sequence is synthesized)
ctttatctttggtaacttttacttgaatgggatttgctgaattaatgactattgaatttaaaactaattatgagttgacaaataaataaaaggtagtgtttatgtctgagcttattgtgt

SEQ ID NO: 168054 - DNA, 120 bp, Artificial Sequence
  ENSG00000108582_59 (sequence is synthesized)
ttgagctaacaccaggttactcagtaaccatgacctgctcctccatttccatttattctcaacattaaatagttttatcttgttgttgccagaaatgcacttgtgccaggtattgtccct

SEQ ID NO: 168055 - DNA, 120 bp, Artificial Sequence
  ENSG00000108582_60 (sequence is synthesized)
gctgtatgaaaagcttcttggcaatgaattctgtaatagtgccctacattatggttttctggtggaattgttttaacagtgacaacccaggatttccaatatatttttgttttattgtta

SEQ ID NO: 168056 - DNA, 120 bp, Artificial Sequence
  ENSG00000108582_61 (sequence is synthesized)
ttaccaaaaattccactatgattgatgttcagtgattttctatagcaacttttttggtaactctttgggtttctgatttgttttagctaaaattttggggatatgatttgggtctttgat

SEQ ID NO: 168057 - DNA, 120 bp, Artificial Sequence
  ENSG00000108582_62 (sequence is synthesized)
taatgtcagctgaacttggatttctagttcatgaagaaatctctcccaatacccatttatcctatttttagcaataattcgttaatgattccacttgattttcagaatattgtcctggtt

SEQ ID NO: 168058 - DNA, 120 bp, Artificial Sequence
  ENSG00000108582_63 (sequence is synthesized)
gattttgatttgacagcatacattatgaaatttgaaagtaggttaccattttgaggcagttggatataaattatgtaaatatgtatgattatgatttttataaatggcataacatgagtg

SEQ ID NO: 168059 - DNA, 120 bp, Artificial Sequence
  ENSG00000108582_64 (sequence is synthesized)
tactaactaccttctatgctggccatgctacagattttctggaggtatgacaatagtatttttttatgctcagattaaaaatcagcttttcacctctccagtttttccaagtgatactcc

SEQ ID NO: 168060 - DNA, 120 bp, Artificial Sequence
  ENSG00000108582_65 (sequence is synthesized)
cagttctagagcaatctacagctgtttatgtgaggtgcccaacacccattcatctcaagtgcttcagtctttggtttatttcatgcactgtgccttcaaaatgaaatttttaaaagggac

SEQ ID NO: 168061 - DNA, 120 bp, Artificial Sequence
  ENSG00000108582_66 (sequence is synthesized)
tttaaatgaagttgaatagtagtttttaaaagtcaatttgtaatttatgtgaaatctaactgtaatgaggtcctttctgttttttatatgtaaacagatctactaatcctgtataaaagt

SEQ ID NO: 168062 - DNA, 120 bp, Artificial Sequence
  ENSG00000108582_67 (sequence is synthesized)
tattttacgatgtttgtctttctttgtgttttgtctcataatcttttttcagatgcaatatgccggaaaaagttataggtccagtttgaaaattatttagtttttctgcctatgctagtg

SEQ ID NO: 168063 - DNA, 120 bp, Artificial Sequence
  ENSG00000108582_68 (sequence is synthesized)
gaaaaatagtaccaggatcagaatacagggtatcacctatggaatgtttctgtatttatgaattgactcaaaagaaagctttgtttctgaaatcgcattatgtagtagccacagttttct

SEQ ID NO: 168064 - DNA, 120 bp, Artificial Sequence
  ENSG00000108582_69 (sequence is synthesized)
gtttgtagctcagctagattgttatatatgttcaatcatttcacaataacaacacaaaactggtcattgaaaggtttttatgtacgcattttaaacttgttcgttaaaaatttggtcctt

SEQ ID NO: 168065 - DNA, 120 bp, Artificial Sequence
  ENSG00000108582_70 (sequence is synthesized)
tttccaggtgaggcccagttagaataatgtgtcccggcacttttaggcacagcaaggatgaattcaatatccccttttcacttagcaacaatgtgttacttctaccctaataggaattgg

SEQ ID NO: 168066 - DNA, 120 bp, Artificial Sequence
  ENSG00000108582_71 (sequence is synthesized)
gaaagcaaagttgtatgagaaacagactctgctgataaagtactcatagtccagaccagagaaatataaatggaaataggttatatttcaatagtgattggttcatctaaaagtctctgc

SEQ ID NO: 168067 - DNA, 120 bp, Artificial Sequence
  ENSG00000108582_72 (sequence is synthesized)
tgtaaaggaaataaagcatagaggtttgagcatggactttggagttggaccaatctgtgactgattcttcgttctgctacttgcttccaatgtgaccttgtacaagtttcttgacattct

SEQ ID NO: 168068 - DNA, 120 bp, Artificial Sequence
  ENSG00000108582_73 (sequence is synthesized)
ctgagcctcagtttctctactggttgaataatccttgataggattgcagtggaaaattaaatgaaataatgttagcaaaggtcccaacataatatttgacttggaattgaatgcccatgg

SEQ ID NO: 168069 - DNA, 120 bp, Artificial Sequence
  ENSG00000108582_74 (sequence is synthesized)
taaccagcatcattttccttcatgtgatgtcttcttatgcctttgaaagaaagttactttatcaaatgtataaataaagatctgtttataggtgatctttttaatttagaagaaattctg

SEQ ID NO: 168070 - DNA, 120 bp, Artificial Sequence
  ENSG00000108582_75 (sequence is synthesized)
agacacaaataaaaaaagaaattttttattatgtggttcaatagattgtctaaagcatggcagtaaagttttaattatgccaagatgcttcatatttgtttttaaatgaaattaagttgt

SEQ ID NO: 168071 - DNA, 120 bp, Artificial Sequence
  ENSG00000108582_76 (sequence is synthesized)
atttatgcttctttagtgaaaacaacgttacttaactgctacaggaagtgtgaatagtgataacagttctttttctctcagtgtttgaaatattttcctgaattttcttagttttctcat

SEQ ID NO: 168072 - DNA, 120 bp, Artificial Sequence
  ENSG00000108582_77 (sequence is synthesized)
acctgaatcaagaacccttttggtttgtttcataaacagtaatctagttattatgttcagcttttcagatttataatagctgattgttctcagcaaattaaacatgatggtcaacgctaa

SEQ ID NO: 168073 - DNA, 90 bp, Artificial Sequence
  ENSG00000108582_78 (sequence is synthesized)
ctctttgctaaaacataacaagaatcatctttgctccagttcccaacaagttcattatctccggtcatatcactatcagcatttttgtca

SEQ ID NO: 168074 - DNA, 120 bp, Artificial Sequence
  ENSG00000108582_79 (sequence is synthesized)
cattcaacaagtctctaggaagttctatgctttcccacattttcccatcttcttctgagccctacaaactattccaacctctgcctgttacccagctccaaagctgcttccacatttttg

SEQ ID NO: 168075 - DNA, 90 bp, Artificial Sequence
  ENSG00000108582_80 (sequence is synthesized)
tactgtattagtctgttttcaaactgctaggagatttaattggacttacagtcccacatggctggggaggtttcacaatcatagcggagg

SEQ ID NO: 168076 - DNA, 120 bp, Artificial Sequence
  ENSG00000108582_81 (sequence is synthesized)
gtcccacatggctggggaggtttcacaatcatagcggaggatgaaaggcacttcttacatggcagtggcaagagagaatgagaaggaagtgaaagtggaatcccctggtaaacccatcag

SEQ ID NO: 168077 - DNA, 69 bp, Artificial Sequence
  ENSG00000108582_82 (sequence is synthesized)
caaagacccgcccccatgattcagtcacctcccactgggtacctcccacaacacgtgggaattctggga

SEQ ID NO: 168078 - DNA, 120 bp, Artificial Sequence
  ENSG00000108582_83 (sequence is synthesized)
gttgagatttgggtgggggtacagccaaaccatatcagataggttatttatatattccctaaattattttgtaaagctggatatgcttattctttttgtttttttaataagatttttctt

SEQ ID NO: 168079 - DNA, 120 bp, Artificial Sequence
  ENSG00000108582_84 (sequence is synthesized)
taacttgcttagagtcattagtatatacacatcctgaagtacataataaaactcagactaacctaccttctgtaatgtatctttcttgcttgagatagtggcttatggagaaataaaata

SEQ ID NO: 168080 - DNA, 120 bp, Artificial Sequence
  ENSG00000108582_85 (sequence is synthesized)
tttttaagttagcattttgattgtattcaagtagagaatattttcttagatactcatactaagatttaaaatttgatattttatatttgacttttctcttttttagataatgcctcccaa

SEQ ID NO: 168081 - DNA, 120 bp, Artificial Sequence
  ENSG00000108582_86 (sequence is synthesized)
taaatagtgagcatttgagcacactctatgagcaaattaccaaccaaagaagattgtacatacatcagcagttcagttacttggagagctcagatctaatggtagcccagctttattgag

SEQ ID NO: 168082 - DNA, 120 bp, Artificial Sequence
  ENSG00000108582_87 (sequence is synthesized)
tctagctatcttgttccatctgttccatttagtccacaagcatttactgagcaattattatgtctgtaaatattgagaatataaaagtgagtatgacacggtttctgcctcatgaaactc

SEQ ID NO: 168083 - DNA, 120 bp, Artificial Sequence
  ENSG00000108582_88 (sequence is synthesized)
ctatgtaaccaaatactaacagtacagatttgtccttccctgttttaaactttgactaagtggttgcaccttatggtgagttaaatagttggttgtttaatctctgtggggtcgcagtat

SEQ ID NO: 168084 - DNA, 120 bp, Artificial Sequence
  ENSG00000108582_89 (sequence is synthesized)
atggagatagtttgggtggttttcagtgcatcttacaaagaatattgttattaggctacagttgtcccaaaatgcagtaagacataccaaaacaagtttgtattttagtgtgatagtctg

SEQ ID NO: 168085 - DNA, 120 bp, Artificial Sequence
  ENSG00000108582_90 (sequence is synthesized)
ttgtgaaaactcaccattagaaccttttcatgtaaagaggatgtttgtcttctattatcttgggctaaataaaaccttttagggttaattatagtaacagtatacttaagtggagtgcaa

SEQ ID NO: 168086 - DNA, 120 bp, Artificial Sequence
  ENSG00000108582_91 (sequence is synthesized)
aatttattaggagaaaaagatgacttgtatccatgaaggttaacttgggggaaaaaaatcatttggatttctccactgacttctaaatttttctttctatagtggaaaataaagagactc

SEQ ID NO: 168087 - DNA, 120 bp, Artificial Sequence
  ENSG00000108582_92 (sequence is synthesized)
agaatggcatagtcacctgggcagcatgaaggtatgctttctagaacatggttagaatggagttatggccaggcacaatgccgtatgtgtaaacccagtgctttgggaggccaaggcagg

SEQ ID NO: 168088 - DNA, 120 bp, Artificial Sequence
  ENSG00000108582_93 (sequence is synthesized)
agttggaactgaactgcttttggctctggcagaatttctctgcctgaactacaaaaagaacccagctgttacccaaatgggcgagagagagctcaagagaaagactgtacttcaaaaata

SEQ ID NO: 168089 - DNA, 120 bp, Artificial Sequence
  ENSG00000108582_94 (sequence is synthesized)
agtgtggctgggacttagaattaggcaatctgattcccgatagtcctcttagccacggagggacactggagcccaaaaatggcagatgatattcccaggatcttccccttgcctatttga

SEQ ID NO: 168090 - DNA, 120 bp, Artificial Sequence
  ENSG00000108582_95 (sequence is synthesized)
cagaagctgatttttctccaatttttacctctgactcagcttaagaagatatggacttagctggagaacttgcacagatctgtgagccgcttcattttagactctgaagggtttgtgatg

SEQ ID NO: 168091 - DNA, 120 bp, Artificial Sequence
  ENSG00000108582_96 (sequence is synthesized)
tcatttgtgcaccttattagcctgggcagaatggctaatggtcacacttctaatacacactttaagtgttattaagcattgcatgaggtttaaaaaattacaaagtagaagaaggaggac

SEQ ID NO: 168092 - DNA, 120 bp, Artificial Sequence
  ENSG00000108582_97 (sequence is synthesized)
ttctggaggattattactagaacgttctagagagcctgttaagcaactttgaatggattgctgcgaagtttagggctggttatacctttgactctcctttagtggcagatagagtacacg

SEQ ID NO: 168093 - DNA, 120 bp, Artificial Sequence
  ENSG00000108587_0 (sequence is synthesized)
acacgcaccatggtgactttccggcctgcatcgcctctgctcccctatcccggctgacgttggacgacaaagatggcggcagggaccagcagttactgggaagatctcaggaaacaggct

SEQ ID NO: 168094 - DNA, 120 bp, Artificial Sequence
  ENSG00000108587_1 (sequence is synthesized)
cgacagctggaaaatgaacttgacctgaaactagtttccttcagcaaactatgtacaagttacagtcatagcagtacccgagatggaagacgcgacaggtatagttctgatacaacaccc

SEQ ID NO: 168095 - DNA, 120 bp, Artificial Sequence
  ENSG00000108587_2 (sequence is synthesized)
cttttaaatggatcaagccaagacagaatgtttgagacaatggcgattgagattgaacaacttttggcaaggcttacaggggtaaatgataaaatggcagaatataccaacagtgcaggt

SEQ ID NO: 168096 - DNA, 120 bp, Artificial Sequence
  ENSG00000108587_3 (sequence is synthesized)
gtcccctccttgaatgcagccctgatgcatacattacagcggcatagagacatattgcaggattatacacatgaattccataaaaccaaagcaaactttatggcaatacgggaaagggag

SEQ ID NO: 168097 - DNA, 120 bp, Artificial Sequence
  ENSG00000108587_4 (sequence is synthesized)
aatcttatgggatcagtacgaaaagatattgagtcatataaaagtgggtctggagtaaacaacagaagaactgagctatttttgaaagaacatgaccaccttcgaaactcagatcgtctg

SEQ ID NO: 168098 - DNA, 120 bp, Artificial Sequence
  ENSG00000108587_5 (sequence is synthesized)
atagaagagacaataagcattgctatggcaacaaaagaaaatatgacttcacagagaggaatgttgaagtcaattcacagcaaaatgaacactttggccaatcgttttcctgctgtaaac

SEQ ID NO: 168099 - DNA, 120 bp, Artificial Sequence
  ENSG00000108587_6 (sequence is synthesized)
agcctgatccagaggatcaacctgaggaagcggcgggactcgctcatcctagggggtgttattgggatctgtaccatcctgttgctgctgtatgcgttccattgatgggacatcttcagg

SEQ ID NO: 168100 - DNA, 120 bp, Artificial Sequence
  ENSG00000108587_7 (sequence is synthesized)
gactcttgacagccaccgctttcacaccctggtctggaataaggaaacatcggagggagaagttgactgtcttgataattagcctgaccagcaggatgaatgcaagactgacagtgatgg

SEQ ID NO: 168101 - DNA, 120 bp, Artificial Sequence
  ENSG00000108587_8 (sequence is synthesized)
actctgtgacatggtcaggttgagctgaagccacagtttctctgtgctgtgttttctaacacatttttctgtttttaattaaaaaaaaaaaaaaaaggttttcagttgcttttgtctccc

SEQ ID NO: 168102 - DNA, 120 bp, Artificial Sequence
  ENSG00000108587_9 (sequence is synthesized)
taggaggcaggtaaaccaatcaaaaacagagttttctgtgtttccatgatagtgttgaagcctaatgacaagccaggtcttacagctgggctcttcagaaaaccaggtttctacatccaa

SEQ ID NO: 168103 - DNA, 120 bp, Artificial Sequence
  ENSG00000108587_10 (sequence is synthesized)
tacagctgggctcttcagaaaaccaggtttctacatccaaagactgcttttcttttagctgccagattggattgtgaataaaaataattcttccctctccctctccctctccccacggtc

SEQ ID NO: 168104 - DNA, 74 bp, Artificial Sequence
  ENSG00000108587_11 (sequence is synthesized)
tctgggatgtgaggagcttctggccaccccgtctgagaagtgaggagacctccgcccggcagccgccctgtctg

SEQ ID NO: 168105 - DNA, 120 bp, Artificial Sequence
  ENSG00000108587_12 (sequence is synthesized)
cccaagaatgatcaattaaaaaaaaaataatataataataattcttgtcctcttattttacactcataatgagaaatcacaagttctttcttgatgatctgtgctatagatttctactct

SEQ ID NO: 168106 - DNA, 120 bp, Artificial Sequence
  ENSG00000108587_13 (sequence is synthesized)
ctctgtctcctcaactctgttgatatttggggaaaattctgtttttcatagattctttgagatgctgatggaccagcttcagcatgtttgaggttgtctgaaatggagatcactgtaaaa

SEQ ID NO: 168107 - DNA, 120 bp, Artificial Sequence
  ENSG00000108587_14 (sequence is synthesized)
ctgtctttttcttttaaattacaagtacactggggttaactgtattgctggaaaaacatcaagaatgacagtcttatatttaaggcaccagtcattgtttccattttttttttaattctt

SEQ ID NO: 168108 - DNA, 120 bp, Artificial Sequence
  ENSG00000108587_15 (sequence is synthesized)
tcagttccactatgataaaagaaacgaatcaccagtgtctgtcagtgcccccactgctcctcctcataccagcattgacactggtagctgaggaaggggactgctcaatttctaatgtga

SEQ ID NO: 168109 - DNA, 120 bp, Artificial Sequence
  ENSG00000108587_16 (sequence is synthesized)
tctattcaagaagccacatataaaaaggcattgagggctcactgtccagagaattgcttttgtaaatgctccacaacgtatgggcaaaagtttaaggactactgcctgatgtaccaggaa

SEQ ID NO: 168110 - DNA, 120 bp, Artificial Sequence
  ENSG00000108587_17 (sequence is synthesized)
tcctgagttctgtgaaaatctgttcattccaaatctgttaagcatttccaaacatccagagaatggtttcactgttgagggtgcatgtggcagaatctgtctctctctgcacctgtcttc

SEQ ID NO: 168111 - DNA, 120 bp, Artificial Sequence
  ENSG00000108587_18 (sequence is synthesized)
tgttaccatccctggacagtgacagattttaagccagccaccagaattcttttcgagttaaccatttcttagtttctgtaaattcatgacttgtcttactgaactacagcctggtttgta

SEQ ID NO: 168112 - DNA, 120 bp, Artificial Sequence
  ENSG00000108587_19 (sequence is synthesized)
gacttccaacatctacactgctgctcttcaccattggaattcactgtggtatttatagtattggcttcagtccgagccacaggcaataaaaggatatcagctgtagttctcagctacatc

SEQ ID NO: 168113 - DNA, 120 bp, Artificial Sequence
  ENSG00000108587_20 (sequence is synthesized)
atggtgtatagatgctgttattcaggcgaacttgctcatgggtggactaacacctggtttggtacagagactgagaagtttttcattctggtgtcaaagttttgttacattatgggtgtg

SEQ ID NO: 168114 - DNA, 120 bp, Artificial Sequence
  ENSG00000108587_21 (sequence is synthesized)
aagggcatttgatatatttttcttaactatggggtttatttttctaaatgtgggttgattgactgttaattgattcagggtacccttaaaagaaaagaagttttcccattgtgaacctta

SEQ ID NO: 168115 - DNA, 120 bp, Artificial Sequence
  ENSG00000108587_22 (sequence is synthesized)
aatgatcagagaagtaagttcattgattaaattctctgttgggagaacaaaacttttctcccttgacactttattatctttgatttttcaaagggccttgattggtggttgtgtctcggt

SEQ ID NO: 168116 - DNA, 120 bp, Artificial Sequence
  ENSG00000108587_23 (sequence is synthesized)
taaaatttatgggactttgctatgtagttggcatttataaaatctgaagtatcataaataaagttatttatttaattatactaccagtcttttttactggtctgattcttttgtgcattc

SEQ ID NO: 168117 - DNA, 120 bp, Artificial Sequence
  ENSG00000108587_24 (sequence is synthesized)
attaaagctgattgtgtgagagtgaactgggacacaagctagtctagctcactgcagccaagcaaaccctgttgatggctgatgggcctttccattagggttttgcttatgtgaagtaat

SEQ ID NO: 168118 - DNA, 120 bp, Artificial Sequence
  ENSG00000108587_25 (sequence is synthesized)
ggaattatgttggttattttctttatgaaaataaaccagttcttccaaggaagttaaaaggcttggtatggatgttggtgtcagataggtctgactaacctctccgtgctgcagcctata

SEQ ID NO: 168119 - DNA, 120 bp, Artificial Sequence
  ENSG00000108587_26 (sequence is synthesized)
ctaaggtgacccagggccacatgtagacagctaggccagtgctttttcctcttagggtttctttgcagaaagaaacctccagcaagggaagagaggtgtgtgtccacaggaaggggctcc

SEQ ID NO: 168120 - DNA, 120 bp, Artificial Sequence
  ENSG00000108587_27 (sequence is synthesized)
gtggggatcccatgaagggatttgagctctttcagctccatgtcatttaacttttttgtttaaccaccttggctttctctccttttttgctgtcctccttacggaccagttaccagattc

SEQ ID NO: 168121 - DNA, 120 bp, Artificial Sequence
  ENSG00000108587_28 (sequence is synthesized)
agaggctaacagttagttacttgttaatgctagtcacagccaggaggtcagaaggaattttctacttctggatccaaatgttacctcttaggggaagttatgccccctcaactattgtct

SEQ ID NO: 168122 - DNA, 120 bp, Artificial Sequence
  ENSG00000108587_29 (sequence is synthesized)
gtcttattataatgaatctttcctttttggtccttttaagtaaccactcaaaacttttcatttcactgaaaaaatatgaaaaaccatgacaatagggctgggtgcagtggctcacgcctg

SEQ ID NO: 168123 - DNA, 81 bp, Artificial Sequence
  ENSG00000108587_30 (sequence is synthesized)
tctgtctctgcaaaaaaaattaaaagatacctgagagctcactttaatatcaaggtatttgcatccattcccaccctgtta

SEQ ID NO: 168124 - DNA, 120 bp, Artificial Sequence
  ENSG00000108587_31 (sequence is synthesized)
ctttaatatcaaggtatttgcatccattcccaccctgttagctcttaagggaggagggaaatcaattccaaccatactttcctgtgatggaagatgtttcctcttgaaaaaatgccaata

SEQ ID NO: 168125 - DNA, 120 bp, Artificial Sequence
  ENSG00000108587_32 (sequence is synthesized)
cagatttttaaaacctattgttttccaaatgcactttgtaagtttttgcttttaaaatagcttcttggaaccaattttattgtatttgtacttaatttttgttctcatctaaatgtgcat

SEQ ID NO: 168126 - DNA, 120 bp, Artificial Sequence
  ENSG00000108587_33 (sequence is synthesized)
tttctgactgtatagaagaagctttggtatgtaatttaataataaattagaaatctaaatgattgcatttgtaattgtttatattgaaacagtaaccatcaaggtagtttggggatagag

SEQ ID NO: 168127 - DNA, 120 bp, Artificial Sequence
  ENSG00000108587_34 (sequence is synthesized)
attatggtatctctggtgttgataagtgtttctcatgatgtcctgaaacccaggatgaaataatacaggtgctgaaaagctgtcacatgtcattcagaaaccatcatatgaacagtccac

SEQ ID NO: 168128 - DNA, 120 bp, Artificial Sequence
  ENSG00000108587_35 (sequence is synthesized)
tagtattttagccctagaagtgaaggggaatctcttaacatgaaacttcaggaggcataatgggaatctacaattgtagaattggctgggtgcagtggctaacacctgtaatcccagcag

SEQ ID NO: 168129 - DNA, 120 bp, Artificial Sequence
  ENSG00000108587_36 (sequence is synthesized)
ttcgagaggccgaggcaggaggattgcttgagaccagggatttgagaccagtctgggcaacacagcaaagaccttgtctctacaaaaactaaaattagccattcatgatggtgtgcacct

SEQ ID NO: 168130 - DNA, 70 bp, Artificial Sequence
  ENSG00000108587_37 (sequence is synthesized)
gagcccaggaggtcaaggctgcagtaagcaactaaattaattttttaaaaatcgtgtactgctgggcttt

SEQ ID NO: 168131 - DNA, 120 bp, Artificial Sequence
  ENSG00000108587_38 (sequence is synthesized)
aataaattaattttttaaaaatcgtgtactgctgggctttagtacattagttgtgcaaccagccccactgtctaattttagagctttgcaattaatccagccagtgatcaattcctcttc

SEQ ID NO: 168132 - DNA, 120 bp, Artificial Sequence
  ENSG00000108587_39 (sequence is synthesized)
tataaaatggtgataaggatggctaccataattgtgccctgattatattgtcagggttatgtgaggaaatgctcataagcatctcagcaaagccaggggtacagggctcacctgacataa

SEQ ID NO: 168133 - DNA, 90 bp, Artificial Sequence
  ENSG00000108587_40 (sequence is synthesized)
gaagctgaggcaggagaatagcttgaacctaggaggcggcagctgcagtgagttgagattacactactgcactccagcccagaaaaaaat

SEQ ID NO: 168134 - DNA, 120 bp, Artificial Sequence
  ENSG00000108587_41 (sequence is synthesized)
taaaaaagaaaaaaattagagtccagaattttctccagatgctttgaaaaagctagacattctgtatacataaatgactaaaaagtttatagatgtagaaaaattaatacaggttttaca

SEQ ID NO: 168135 - DNA, 120 bp, Artificial Sequence
  ENSG00000108587_42 (sequence is synthesized)
tatattattttgtagaatatttattcagatttggctttaggatatgttcacggttaattgcaaattgagtggcagaaccgtggttgagattttagggtttccaattcccatttcactgtc

SEQ ID NO: 168136 - DNA, 120 bp, Artificial Sequence
  ENSG00000108587_43 (sequence is synthesized)
gtgcttatagtttaaaacatgtattacaatgcccatttgaaatgtgtgtaccagctagaaaacttttttttttttttttttggagactcgctatgtcgcccaggctggagtgcggtggcg

SEQ ID NO: 168137 - DNA, 120 bp, Artificial Sequence
  ENSG00000108587_44 (sequence is synthesized)
gctagaaaacattttaaaattatgtagaagaggctactgatatctttattactagtcattagcctgtggttttttgaagcagcatgctataatattacagcggctcattactgacaacct

SEQ ID NO: 168138 - DNA, 120 bp, Artificial Sequence
  ENSG00000108587_45 (sequence is synthesized)
actctgtgccagctgctgtaagcatatgattaccaatacataagcaaaccctgaaggtaggggtttaaaaaacaagaagctgaagttcataggttaagtagattgttgataaatcataga

SEQ ID NO: 168139 - DNA, 120 bp, Artificial Sequence
  ENSG00000108587_46 (sequence is synthesized)
gtcagtaagtggctgtgccgagattcgaactggcatttggtctctgggcaaatatgctccactatgttaactacgctttctatttctggttgaaaagcatattgaaataatgttttgtat

SEQ ID NO: 168140 - DNA, 120 bp, Artificial Sequence
  ENSG00000108587_47 (sequence is synthesized)
tctttttgaaagagagattcttataccattacctctggtacttctgcccttttattttaaccttcacttcaccatgaatgagaatactcgtatctgtgtgtgggtgtccagactgtggct

SEQ ID NO: 168141 - DNA, 120 bp, Artificial Sequence
  ENSG00000108587_48 (sequence is synthesized)
tctgtcacgcaacccttagatgccagactgctaaaccaatttctctacttgcctgtttgcttctgctattaaaacttatgtacttatttctatcatactcatattcgaccttgttagtag

SEQ ID NO: 168142 - DNA, 120 bp, Artificial Sequence
  ENSG00000108587_49 (sequence is synthesized)
tctatcatactcatattcgaccttgttagtagcacattgtttattgttagttttagccctccaaattactttcagtaagtttttttcttttttttagatggagtctcgcactgtcgccca

SEQ ID NO: 168143 - DNA, 120 bp, Artificial Sequence
  ENSG00000108587_50 (sequence is synthesized)
taaaggcggtttttggccaggtgcgatgtctcatgcctgtaattctagcacttttggaggcccaggcaggagggtcactggagtttaggagttcgagagcagcctgggcaacattgtgag

SEQ ID NO: 168144 - DNA, 89 bp, Artificial Sequence
  ENSG00000108587_51 (sequence is synthesized)
attgtgagggcaatttttgtggtaactttttttctttatgttcaattgagaagtcattttggtccgggcgtggtggctcacacctgtaa

SEQ ID NO: 168145 - DNA, 120 bp, Artificial Sequence
  ENSG00000108587_52 (sequence is synthesized)
attacaggcgtgcaccaccgtgcccagccaacacttttctttatgggggtaacaagatcagtatatgatcattttcatagtttgttttctttagaatggtgctgtgatttttgtgtctac

SEQ ID NO: 168146 - DNA, 120 bp, Artificial Sequence
  ENSG00000108587_53 (sequence is synthesized)
gaagcaaacataggaagtggcttactgccttgtataaaaagatatcagagaacagtggagtcatttggaaaaagcgcagtggtaaagtggcttcggaagtgattttttccccttattttc

SEQ ID NO: 168147 - DNA, 120 bp, Artificial Sequence
  ENSG00000108587_54 (sequence is synthesized)
tggcacagtgctttctaagatgatgttgctcactgtagttttctttcacttttaaaggcatgatggttccaggcaggataatcttaaatggtgatttgtcatctttttttccccttgcag

SEQ ID NO: 168148 - DNA, 120 bp, Artificial Sequence
  ENSG00000108587_55 (sequence is synthesized)
tatattgggctcgagatgttttcattatcacaggagtttgggtttttttttttttaatccctgcattggatatgtgcacatatatttaaaaggacaaagagaaaaatctgagaaaataaa

SEQ ID NO: 168149 - DNA, 120 bp, Artificial Sequence
  ENSG00000108587_56 (sequence is synthesized)
tgccatgctaaagggacttgttttacttttttttggggtcaccattataaaattctgaaaatatctaatagctcttgctatttcttggcgaagttgagtaatattcatcactgggtacat

SEQ ID NO: 168150 - DNA, 120 bp, Artificial Sequence
  ENSG00000108587_57 (sequence is synthesized)
atacttccactatgggagacctagctagctagctgtaacagtgaaatagccaatggtcatgtatagacaataacgtggtgggtaagcgtgtactttcagctagctttgaagataatatgg

SEQ ID NO: 168151 - DNA, 120 bp, Artificial Sequence
  ENSG00000108587_58 (sequence is synthesized)
taatgccagtggtcatcaccaggtgtagatcagtcaccttttacccaggctgggaccaccaccttctcatctacagctcagatcgtctgatagaagagacaataagcattgctatggcaa

SEQ ID NO: 168152 - DNA, 120 bp, Artificial Sequence
  ENSG00000108587_59 (sequence is synthesized)
caaaagaaaatatgacttcacagagaggaatgttgaagtcaattcacagcaaaatgaacactttggccagtatcctttttgaatgttcgcagtctgtgttttgagggtagaggggagaag

SEQ ID NO: 168153 - DNA, 120 bp, Artificial Sequence
  ENSG00000108587_60 (sequence is synthesized)
tgtctgtgtgtgcttttatagggggcaggttgccatcatcagtagcagtagagcccatcagtaattgcataatatgaatatactgtgcattcctactttgtgaaagtttatgctctttag

SEQ ID NO: 168154 - DNA, 120 bp, Artificial Sequence
  ENSG00000108587_61 (sequence is synthesized)
taccattcctaaaagactgcacctcagaagtttcttactactagatgtagaagaaaaaaattataaatgtgaatttaaaaattatccaccaatttcttctacattttagaaagcttttaa

SEQ ID NO: 168155 - DNA, 120 bp, Artificial Sequence
  ENSG00000108587_62 (sequence is synthesized)
attcatgttagaactccacactatacattattcttacctaaacatgataaattatatgcctttgttgtttttcccatttagagataagtcagtggcagatgcttggaagggggaaggaag

SEQ ID NO: 168156 - DNA, 120 bp, Artificial Sequence
  ENSG00000108588_0 (sequence is synthesized)
gtaacggacggcggaggctacgtgaagagaggcgcggcgtgactgagctacggttctggctgcgtcctagaggcatccggggcagtaaaaccgctgcgatcgcggaggcggcggccaggc

SEQ ID NO: 168157 - DNA, 120 bp, Artificial Sequence
  ENSG00000108588_1 (sequence is synthesized)
cgagaggcaggccgggcaggggtgtcggacgcagggcgctgggccgggtttcggcttcggccacagctttttttctcaaggtgcaatgaaagccttccacactttctgtgttgtccttct

SEQ ID NO: 168158 - DNA, 120 bp, Artificial Sequence
  ENSG00000108588_2 (sequence is synthesized)
ggtgtttgggagtgtctctgaagccaagtttgatgattttgaggatgaggaggacatagtagagtatgatgataatgacttcgctgaatttgaggatgtcatggaagactctgttactga

SEQ ID NO: 168159 - DNA, 120 bp, Artificial Sequence
  ENSG00000108588_3 (sequence is synthesized)
atctcctcaacgggtcataatcactgaagatgatgaagatgagaccactgtggagttggaagggcaggatgaaaaccaagaaggagattttgaagatgcagatacccaggagggagatac

SEQ ID NO: 168160 - DNA, 120 bp, Artificial Sequence
  ENSG00000108588_4 (sequence is synthesized)
tgagagtgaaccatatgatgatgaagaatttgaaggttatgaagacaaaccagatacttcttctagcaaaaataaagacccaataacgattgttgatgttcctgcacacctccagaacag

SEQ ID NO: 168161 - DNA, 120 bp, Artificial Sequence
  ENSG00000108588_5 (sequence is synthesized)
ctgggagagttattatctagaaattttgatggtgactggtctgcttgcttatatcatgaattacatcattgggaagaataaaaacagtcgccttgcacaggcctggtttaacactcatag

SEQ ID NO: 168162 - DNA, 120 bp, Artificial Sequence
  ENSG00000108588_6 (sequence is synthesized)
ggagcttttggagagcaactttactttagtgggggatgatggaactaacaaagaagccacaagcacaggaaagttgaaccaggagaatgagcacatctataacctgtggtgttctggtcg

SEQ ID NO: 168163 - DNA, 120 bp, Artificial Sequence
  ENSG00000108588_7 (sequence is synthesized)
agtgtgctgtgagggcatgcttatccagctgaggttcctcaagagacaagacttactgaatgtcctggcccggatgatgaggccagtgagtgatcaagtgcaaataaaagtaaccatgaa

SEQ ID NO: 168164 - DNA, 120 bp, Artificial Sequence
  ENSG00000108588_8 (sequence is synthesized)
tgatgaagacatggatacctacgtatttgctgttggcacacggaaagccttggtgcgactacagaaagagatgcaggatttgagtgagttttgtagtgataaacctaagtctggagcaaa

SEQ ID NO: 168165 - DNA, 120 bp, Artificial Sequence
  ENSG00000108588_9 (sequence is synthesized)
gtatggactgccggactctttggccatcctgtcagagatgggagaagtcacagacggaatgatggatacaaagatggttcactttcttacacactatgctgacaagattgaatctgttca

SEQ ID NO: 168166 - DNA, 120 bp, Artificial Sequence
  ENSG00000108588_10 (sequence is synthesized)
tttttcagaccagttctctggtccaaaaattatgcaagaggaaggtcagcctttaaagctacctgacactaagaggacactgttgtttacatttaatgtgcctggctcaggtaacactta

SEQ ID NO: 168167 - DNA, 120 bp, Artificial Sequence
  ENSG00000108588_11 (sequence is synthesized)
cccaaaggatatggaggcactgctacccctgatgaacatggtgatttattctattgataaagccaaaaagttccgactcaacagagaaggcaaacaaaaagcagataagaaccgtgcccg

SEQ ID NO: 168168 - DNA, 120 bp, Artificial Sequence
  ENSG00000108588_12 (sequence is synthesized)
agtagaagagaacttcttgaaactgacacatgtgcaaagacaggaagcagcacagtctcggcgggaggagaaaaaaagagcagagaaggagcgaatcatgaatgaggaagatcctgagaa

SEQ ID NO: 168169 - DNA, 120 bp, Artificial Sequence
  ENSG00000108588_13 (sequence is synthesized)
aagttggaaaagaagcaaatgaaaatgaaacaaatcaaagtgaaagccatgtaaagccatcccagagatttgagttctgatgccacctgtaagctctgaattcacaggaaacatgaaaaa

SEQ ID NO: 168170 - DNA, 120 bp, Artificial Sequence
  ENSG00000108588_14 (sequence is synthesized)
cgccagtccatttctcaaccttaaatttcagacagtcttgggcaactgagaaatccttatttcatcatctactctgtttggggtttggggttttacagagattgaagatacctggaaagg

SEQ ID NO: 168171 - DNA, 120 bp, Artificial Sequence
  ENSG00000108588_15 (sequence is synthesized)
tggaaagggctctgtttcaagaatttttttttccagataatcaaattattttgattattttataaaaggaatgatctatgaaatctgtgtaggttttaaatattttaaaaattataatac

SEQ ID NO: 168172 - DNA, 120 bp, Artificial Sequence
  ENSG00000108588_16 (sequence is synthesized)
agtgcttttagtacttcagtgtttaaagaaataccgtgaaatttataggtagataaccagattgttgctttttgtttaaaccaagcagttgaaatggctataaagactgactctaaacca

SEQ ID NO: 168173 - DNA, 120 bp, Artificial Sequence
  ENSG00000108588_17 (sequence is synthesized)
agattctgcaaataatgattggaattgcacaataaacattgcttgatgttttcttgtatgtctacattaaacttgagaaaaagtaaaaattagaacactgtatgtagtaatgaaatttca

SEQ ID NO: 168174 - DNA, 120 bp, Artificial Sequence
  ENSG00000108588_18 (sequence is synthesized)
gggacccagaacataatgtagtatatgtttttaggtgggagatgctgataacaaaattaataggaagtctgtaggcattaggatactgacatgtacatggaaaattctagggacaggagc

SEQ ID NO: 168175 - DNA, 120 bp, Artificial Sequence
  ENSG00000108588_19 (sequence is synthesized)
atcattttttccttacctgataccacgaaccagtgacaacgtgaatgctgtattttaagtggttgtatgtttattttcttgagtaacaaatgcatgaaaaattaatgcttcacctaggta

SEQ ID NO: 168176 - DNA, 120 bp, Artificial Sequence
  ENSG00000108588_20 (sequence is synthesized)
agatcattggtctgtgtgaaatcacaaatgttttttccttcttggttgctgcagcctggtggatgttcatggagaagctctgttctctatattatggctgtgtgccgttgcttctccctc

SEQ ID NO: 168177 - DNA, 120 bp, Artificial Sequence
  ENSG00000108588_21 (sequence is synthesized)
tgcttttatcttttccacagttgaggctgggtatgttctttcaaagaaatggccatgaatatgtgtaagtatacttttgaaaatgagctttcctaaactattgagagttctttccacctc

SEQ ID NO: 168178 - DNA, 120 bp, Artificial Sequence
  ENSG00000108588_22 (sequence is synthesized)
ttgcggaaccaactcttggaggagaggcccatgtatctgcacgagcacttagcttgttcagatctctgcattttataaatgcttcttaccaagaaagcatttttaggtcattgcttgtac

SEQ ID NO: 168179 - DNA, 120 bp, Artificial Sequence
  ENSG00000108588_23 (sequence is synthesized)
caggtaatttttgccggggatgggtaagggttgggttttctggtgggagtggggtggtgggtattttttgttgatgctttagtgcaggcctgttctgaggcaataacaagttgctgtgaa

SEQ ID NO: 168180 - DNA, 120 bp, Artificial Sequence
  ENSG00000108588_24 (sequence is synthesized)
aacagcatgtgctgctgcctttgtaactgcatggaaacttttcacatgggtttttctccaagttaatacagaaatatgtaaactgagagatgcaaatgtaatatttttaacagttcatga

SEQ ID NO: 168181 - DNA, 120 bp, Artificial Sequence
  ENSG00000108588_25 (sequence is synthesized)
aaaacttaattactttaatattatataattatagtagtggccttgttttacaaacctttaaattacattttagaaatcaaagttgatagtcttagttatcttttgagtaagaaaagcttt

SEQ ID NO: 168182 - DNA, 120 bp, Artificial Sequence
  ENSG00000108588_26 (sequence is synthesized)
tatcttttgagtaagaaaagctttcctaaagtcccatacatttggaccatggcagctaattttgtaacttaagcattcatatgaactacctatggacatctattaaagtgattgacaaaa

SEQ ID NO: 168183 - DNA, 120 bp, Artificial Sequence
  ENSG00000108588_27 (sequence is synthesized)
gacgcagggcgctgggccgggtttcggcttcggccacaggagtcatagaggctgggtggtctggcaaggacttgtgcatttgagaactgacaggtgcagcggagacttctaagagggaaa

SEQ ID NO: 168184 - DNA, 120 bp, Artificial Sequence
  ENSG00000108588_28 (sequence is synthesized)
cttgtgttctgttggttgttaaggtaatctttgtaggctaaaagtttagcattttctcaacatttgggacattgtatcaattgataacactataaagaagaataaataatccttcctgtt

SEQ ID NO: 168185 - DNA, 120 bp, Artificial Sequence
  ENSG00000108588_29 (sequence is synthesized)
gaaagctgggtagagacgtgcagacgaagacattccagggagaaagactgaactagcaaaggctaggaagtgagaataaatgtggaacacacttataaaggaagacaatttagctagttt

SEQ ID NO: 168186 - DNA, 120 bp, Artificial Sequence
  ENSG00000108588_30 (sequence is synthesized)
gtgttttcggcaatggcggaaaataagatatgatctaaatgactttaaatatagtggactaaaaacaactgattatataagccacattactttatcacttgtatttttggaggtggaagg

SEQ ID NO: 168187 - DNA, 120 bp, Artificial Sequence
  ENSG00000108588_31 (sequence is synthesized)
ttttgcctctcaggaccccaaattcggaggcctgcatctcccaagcgctgcctccttgggtcagaattctccccgcgctattcctgccctggagccgggcaccctgcaaatccttttcct

SEQ ID NO: 168188 - DNA, 120 bp, Artificial Sequence
  ENSG00000108588_32 (sequence is synthesized)
aggcgagggggcgccgcctccggaaagccgccaactgggcctcgctttttttctcaaggtgcaatgaaagccttccacactttctgtgttgtccttctggtgtttgggagtgtctctgaa

SEQ ID NO: 168189 - DNA, 120 bp, Artificial Sequence
  ENSG00000108588_33 (sequence is synthesized)
tttgtaactagcacctttcccaaacattaaaattaatcctcaggctcaagagacctttactgtctggagtcttcattttcattcactaggtagagctcttctaaatgttctgtggtaagt

SEQ ID NO: 168190 - DNA, 120 bp, Artificial Sequence
  ENSG00000108590_0 (sequence is synthesized)
gtggtttccggaacttcgcccgcgtctctgggcttttgctctgtcaggctggtggcgttttggtgtcttcgtttgttatggccgctgctgtcgctatggagacagatgatgctggaaatc

SEQ ID NO: 168191 - DNA, 120 bp, Artificial Sequence
  ENSG00000108590_1 (sequence is synthesized)
gacttcggtttcagttggagttggaatttgtgcaatgtttagccaacccaaattaccttaattttcttgcccaaagaggttacttcaaagacaaagcttttgttaattatcttaaatact

SEQ ID NO: 168192 - DNA, 120 bp, Artificial Sequence
  ENSG00000108590_2 (sequence is synthesized)
tgctttactggaaagacccagaatatgccaagtatctaaagtaccctcagtgtttacacatgttagagctgctccaatatgaacacttccgaaaggagctggtgaatgctcagtgtgcga

SEQ ID NO: 168193 - DNA, 120 bp, Artificial Sequence
  ENSG00000108590_3 (sequence is synthesized)
aatttattgatgaacagcagattctacattggcagcactattcccggaagcggatgcgccttcagcaagccttggcagagcagcaacagcaaaataacacatcgggaaaatgaaaaactg

SEQ ID NO: 168194 - DNA, 120 bp, Artificial Sequence
  ENSG00000108590_4 (sequence is synthesized)
gatacaaacgaggcacttaatacatgtatataatgtatttcttttgtacagtgaagacaaaaaaaatgaaaactcttcctatctacctttattatggtagcccctagaacctttagtgtg

SEQ ID NO: 168195 - DNA, 120 bp, Artificial Sequence
  ENSG00000108590_5 (sequence is synthesized)
ctttttcatccaactttttattgttaatagactatttctgttaaacctgaattgttctttgatttccctgtggatttgtaaggtgtttttcttttttacgcatttagcataatcagctga

SEQ ID NO: 168196 - DNA, 120 bp, Artificial Sequence
  ENSG00000108590_6 (sequence is synthesized)
aagtatactgaattctaaggctagctgttcctgacatatagtagggcaagaccatctcctggaaccttactgtctcagatcaactactctaccactctactctaagatgtagtgagagta

SEQ ID NO: 168197 - DNA, 120 bp, Artificial Sequence
  ENSG00000108590_7 (sequence is synthesized)
gcggagtcactgacctctttaaatcataggacaggaactgcataaaggttcttgaattctgcaggacaggaaataactgtattacctgctttgcaaggtggctttaagaatcactgaatc

SEQ ID NO: 168198 - DNA, 120 bp, Artificial Sequence
  ENSG00000108590_8 (sequence is synthesized)
actgtggcctcacttgacctagtcatggcaggacaactagtggttagttactaactggactcttgactttagaacaaacatgaggagcctcaaatacttgtgttcatttgggaaagctac

SEQ ID NO: 168199 - DNA, 120 bp, Artificial Sequence
  ENSG00000108590_9 (sequence is synthesized)
cattgatttgggaggtaccacaaaccaggtgctatgttaagtgcttccttgaattctcattttattctaagaaccttgtttatagaagagaaaactgaggtttggacggggtgagtaact

SEQ ID NO: 168200 - DNA, 120 bp, Artificial Sequence
  ENSG00000108590_10 (sequence is synthesized)
tgcctgtggttacacagctagtaagtggtagagtcagtgtgactgactcccagcttggagttcttcccagaactgggttatagagtctttccggccgctctccgccacctgcctcatccc

SEQ ID NO: 168201 - DNA, 120 bp, Artificial Sequence
  ENSG00000108590_11 (sequence is synthesized)
aagtaaagcacattgagacagctgcaaaacaaactgcttctagtgctcaggagtctgttttttattaaacaaaacaaaactgcctgaattaagcagaggctagattagaggtcatgtgct

SEQ ID NO: 168202 - DNA, 120 bp, Artificial Sequence
  ENSG00000108590_12 (sequence is synthesized)
ttccttcagtggtgaggttaggttctacattccaaaatcaaagaaggggtttcaggaatatcatcagttgctttgcagatggagataacttaaaataaaagatactgatcttttgagaga

SEQ ID NO: 168203 - DNA, 120 bp, Artificial Sequence
  ENSG00000108590_13 (sequence is synthesized)
tgcaatgtttagccaacccaaattaccttaattgtaagttgttaagcacctcattaaattgagtagctattaatgatttctgacagaagagttgcagttcaaaatagtatctacttttac

SEQ ID NO: 168204 - DNA, 120 bp, Artificial Sequence
  ENSG00000108590_14 (sequence is synthesized)
ttacacttatgctggtatatagatataattgcgtactgggacttgtgttttgaatccaatgtgtgttggtggtgggggtgttatgtaaatagatcctttatattaggggtaacaaatcac

SEQ ID NO: 168205 - DNA, 120 bp, Artificial Sequence
  ENSG00000108590_15 (sequence is synthesized)
agtttaaggattggtttgacctacagatttttttttttaatgcttttcagttcttgcccaaagaggttacttcaaagacaaagcttttgttaattatcttaaatacttgctttactggaa

SEQ ID NO: 168206 - DNA, 120 bp, Artificial Sequence
  ENSG00000108590_16 (sequence is synthesized)
agacccagaatatgccaagtatctaaagtaagtttaatttttataatcctaagcatgtgtatactttattatataatagatttcttagtttcacattggcaaaaatgtatttggaatctc

SEQ ID NO: 168207 - DNA, 120 bp, Artificial Sequence
  ENSG00000108591_0 (sequence is synthesized)
actctgtcgccgccgtcagaccggaattgccggtgccgccgccaccgctgtctgtgcgcccacctctgctgctaccatggggatcttagagaagatctcggagatcgagaaggagatcgc

SEQ ID NO: 168208 - DNA, 120 bp, Artificial Sequence
  ENSG00000108591_1 (sequence is synthesized)
tcggacacagaagaacaaggccactgagtatcatctgggcctgctgaaagctaagctcgccaagtatcgggcccagctcctggaaccgtccaaatcggcctcgtccaaaggagagggctt

SEQ ID NO: 168209 - DNA, 120 bp, Artificial Sequence
  ENSG00000108591_2 (sequence is synthesized)
tgatgtcatgaagtcgggtgatgcccgtgtggcgctgattggatttccctctgtgggtaagtccacattcttgagtctgatgacctccacggccagcgaggcagcgtcctatgagttcac

SEQ ID NO: 168210 - DNA, 120 bp, Artificial Sequence
  ENSG00000108591_3 (sequence is synthesized)
cactctgacgtgtattcctggggtcattgaatacaaaggtgccaacatccagctcctggaccttcctggaatcattgaaggcgcagcccaaggaaaaggccgtggccggcaggtgatcgc

SEQ ID NO: 168211 - DNA, 120 bp, Artificial Sequence
  ENSG00000108591_4 (sequence is synthesized)
tgtggcgcgcacggctgacgtcatcatcatgatgctggatgccaccaagggagaggtgcagaggtctctgctggagaaggagctggagtctgtgggcatccgcctcaacaagcacaagcc

SEQ ID NO: 168212 - DNA, 120 bp, Artificial Sequence
  ENSG00000108591_5 (sequence is synthesized)
taacatctacttcaagcccaagaaaggtggtggcatctcctttaactcgacagtcacgctgacccagtgctcggaaaagctggtgcagctcatcctgcacgaatacaagatcttcaatgc

SEQ ID NO: 168213 - DNA, 120 bp, Artificial Sequence
  ENSG00000108591_6 (sequence is synthesized)
agaagtgcttttccgagaagactgctccccggacgagttcatcgatgtgatcgtgggcaaccgggtgtacatgccctgcctgtatgtttataacaaaatcgaccagatctccatggaaga

SEQ ID NO: 168214 - DNA, 120 bp, Artificial Sequence
  ENSG00000108591_7 (sequence is synthesized)
ctgacctgcatctacaccaagaagagaggacagaggccagacttcacagacgccatcattctccggaaaggggcctcagtggagcacgtgtgccaccgcatccaccggtcactcgccagc

SEQ ID NO: 168215 - DNA, 120 bp, Artificial Sequence
  ENSG00000108591_8 (sequence is synthesized)
cagttcaagtacgccctggtgtggggcaccagcaccaagtacagtccgcagcgggtgggcctgacccacaccatggagcatgaggacgtcatccagatcgtgaagaagtaacggcgcctg

SEQ ID NO: 168216 - DNA, 120 bp, Artificial Sequence
  ENSG00000108591_9 (sequence is synthesized)
ccgggcctcccgcccacctgcctcgtctccctggggaggtggtcccactgggacacacaaacacccaaacagaaaaatacaaatacacgtaccccaggaaggggtccctcaagtctctgc

SEQ ID NO: 168217 - DNA, 120 bp, Artificial Sequence
  ENSG00000108591_10 (sequence is synthesized)
tatttacagaagtttcttcagtaggcagacgaagagtgtgttggggcaaaggggctcggttggaggcatttcccataagactgagccctctcatgggggttttgagtttgtagtgctgag

SEQ ID NO: 168218 - DNA, 120 bp, Artificial Sequence
  ENSG00000108591_11 (sequence is synthesized)
cctgcatctgtgcctcccagccccctgcactgagggagcaagttgcccacatgcccgccagccagggcctaaagcagatggcatgctcagtgccaggctggtagctgggcctgtttgggt

SEQ ID NO: 168219 - DNA, 120 bp, Artificial Sequence
  ENSG00000108591_12 (sequence is synthesized)
ccctggaggctgtggctgctgtcatggcacctcactccctcagctcttgccagcttctctgacacttgggttgggggcccttccaggaggaaacccccttgggtgccccacacagggctc

SEQ ID NO: 168220 - DNA, 120 bp, Artificial Sequence
  ENSG00000108591_13 (sequence is synthesized)
tccatgatgggaaccagtggttagtggcttcaaaggcccagctgacaccctccacagcctaaggggtgtcctaaagtgcctccccctgtattccccctcccagggcagcccctgcccagc

SEQ ID NO: 168221 - DNA, 120 bp, Artificial Sequence
  ENSG00000108591_14 (sequence is synthesized)
acaaaaccccaggaccctggctctgcacgcctggggcagggacttttgagtttaggatctgtattttctaagtccccagttctcctggctctcctttctgaaataaaggattgaaaacgg

SEQ ID NO: 168222 - DNA, 120 bp, Artificial Sequence
  ENSG00000108591_15 (sequence is synthesized)
caggtgtgtgggaagcagactggagctctgttactgatcgttgaaattgggtgtggctgtcatggagatcactctggatccctggtccattatcccgctttccagaaaagacaggttcca

SEQ ID NO: 168223 - DNA, 120 bp, Artificial Sequence
  ENSG00000108591_16 (sequence is synthesized)
taagcccaagaaaggtggtggcatctcctttaactcgacagtcacgctgacccagtgctcggaaaagctggtgcagctcatcctgcacgaatacaagatcttcaatgcagaagtgctttt

SEQ ID NO: 168224 - DNA, 120 bp, Artificial Sequence
  ENSG00000108591_17 (sequence is synthesized)
gagctcgtactaggcggcctgtgggtgtttggctctctcacacgtgagagtagtggtaggacttgtcacagactaaacccaacaccacccagcctatggcgtcttctcctcaaggcttgt

SEQ ID NO: 168225 - DNA, 120 bp, Artificial Sequence
  ENSG00000108591_18 (sequence is synthesized)
gtccagccagcacagaggtatcttgggactgggggccgaggggcttggcctggccctgcttcctgttcagaggcacaggtgcctcatcactgcccagaacctgccaggagcccagcccca

SEQ ID NO: 168226 - DNA, 120 bp, Artificial Sequence
  ENSG00000108591_19 (sequence is synthesized)
ggcacagaagcattgttcatccacatcctggcagaggggtacaccaggcctgcctcctcgggaccagaaggagtaccctcatgtggtcacctcgcgggggctccaccacttgcctgtgca

SEQ ID NO: 168227 - DNA, 120 bp, Artificial Sequence
  ENSG00000108591_20 (sequence is synthesized)
tgccgaccgtaaaccgggccagtcccctctgggactgtggcagagtttagaagttccctgcagctctagggcattgggaaggagtgttctctgggttgctggggaagggggtggaggaga

SEQ ID NO: 168228 - DNA, 120 bp, Artificial Sequence
  ENSG00000108591_21 (sequence is synthesized)
gaatagtcttagatttacagaaaaattgcaaaggtaatacagagttcccatataccccacacccattttccctggcagttaacattttacaccaatgaatattgatctgttcttgcctca

SEQ ID NO: 168229 - DNA, 120 bp, Artificial Sequence
  ENSG00000108591_22 (sequence is synthesized)
agtctggctttatgcagatttccttagctcctccccactgtcctttttctgtcctgagatcccacatcacagttcagttgttatgtctccttaggctcttctagacagttccttagactt

SEQ ID NO: 168230 - DNA, 120 bp, Artificial Sequence
  ENSG00000108591_23 (sequence is synthesized)
gccttgatttgataaccttgacggttttaaggagtaccattcccatattttgtagaaagtccttcagttggggtgtgtccaatgtttttctcgtggttaatctggggttatagttagcaa

SEQ ID NO: 168231 - DNA, 120 bp, Artificial Sequence
  ENSG00000108591_24 (sequence is synthesized)
ggaaggccacagaggtaaagtgccatttttatcacatcgcatgaaggccacatactgtcaacatgacttacccctgctgatgttgatcttgaccacctggctgaggtgtgtcaggtttct

SEQ ID NO: 168232 - DNA, 120 bp, Artificial Sequence
  ENSG00000108591_25 (sequence is synthesized)
ccaccgtggagacgctctcttctccccttgccatgccgctttggggagggaggtgactgtgtgcagtccaattccatcgcctccttgaggggagcatctacagaaactgtttggaattct

SEQ ID NO: 168233 - DNA, 120 bp, Artificial Sequence
  ENSG00000108591_26 (sequence is synthesized)
tctgcatgggagatttgtctctcttctcccattcatttgttttattcaatcatttattgatatccgtatggattcgtggggggttattttgtgctttggggtctaaacccataccatgtt

SEQ ID NO: 168234 - DNA, 120 bp, Artificial Sequence
  ENSG00000108591_27 (sequence is synthesized)
cttttgctgctcaaatctttttagctttggagctattttagttggcttctttgatgtacttccaccattgtgtttttccagcacttcctcactttctgacactgcaagatgcctcaggct

SEQ ID NO: 168235 - DNA, 120 bp, Artificial Sequence
  ENSG00000108591_28 (sequence is synthesized)
cattttgtatattccctgccctggcctagaatctgccatttctctaaggagccctggttcctttgattggagaatagcattagaaactaccatctgggcgctgacttacttttttacaga

SEQ ID NO: 168236 - DNA, 120 bp, Artificial Sequence
  ENSG00000108591_29 (sequence is synthesized)
atcactctggctgttgtgtagatagcaggttatagcagggcaaagtgaagtgggacagtggagaggttgctagaatataggccaagtgagcaacaaccaaagctctggacaggtgctggg

SEQ ID NO: 168237 - DNA, 120 bp, Artificial Sequence
  ENSG00000108591_30 (sequence is synthesized)
gagcagcttctaactcagttcagctgaacaatttgagcccacacccagtttccattgctctgggccaggcacaggggatggtggttaacagctaccttttcttgagtgcttgctgcaggc

SEQ ID NO: 168238 - DNA, 120 bp, Artificial Sequence
  ENSG00000108591_31 (sequence is synthesized)
tgggcagtgtttagttttatttgttgtactgtctgcctatatgattggtatatgtatcagagagagagagattgatagagaagccgctctagttaccaagagccgtgacccttgaagtct

SEQ ID NO: 168239 - DNA, 120 bp, Artificial Sequence
  ENSG00000108591_32 (sequence is synthesized)
gggcccatggcagatcccacctgccttattgggagtataggctctcccaccgtgggagggcccaggtcttacaggggccagacagaatcagggagtggccccgaggttggttgctggctg

SEQ ID NO: 168240 - DNA, 120 bp, Artificial Sequence
  ENSG00000108591_33 (sequence is synthesized)
tctcaacagccattgctcttggggccaccgtgtctatccctatacctgtccactccaccaggtttttctcatttcttgagtttccaggagatccccaaggctgagggtttctggatttgg

SEQ ID NO: 168241 - DNA, 120 bp, Artificial Sequence
  ENSG00000108591_34 (sequence is synthesized)
gaactcgatgtatttccatcacatgccacattctggacttgagaggtctaagggtgccttggggagggtgcccccagtcttcctgccagtcagccaggaggcagggtctggatagctggc

SEQ ID NO: 168242 - DNA, 120 bp, Artificial Sequence
  ENSG00000108591_35 (sequence is synthesized)
cctgcaactcagagtctcaggcttctcgttcctggggccctgctgattaggatggggcaggaggcatggggctgggtttcttccctccctgggtctgcccactgcttggctggcctcagc

SEQ ID NO: 168243 - DNA, 120 bp, Artificial Sequence
  ENSG00000108591_36 (sequence is synthesized)
cacagcatctatcactgatgttacagtgtttggagtgaggcacatcccgggccttatctttttaatccctgtgcagtcctgtgaggtagggaccgggttcatgcccattctacatgtaaa

SEQ ID NO: 168244 - DNA, 120 bp, Artificial Sequence
  ENSG00000108591_37 (sequence is synthesized)
gaccctgaactgagagtatggagtttcctgcccaatcccaggacaccccggcagaggcaggattcaaagccaggtttctccaactcccagccacagtgaacggtggtctgagtggtcaca

SEQ ID NO: 168245 - DNA, 120 bp, Artificial Sequence
  ENSG00000108591_38 (sequence is synthesized)
tccacatcttcccagttccccactccctccctgcgacacctctcctgtcagctgtctctgcctcagcccaggaggttgacatctccttgcacacctccttacaccctccctgggtgcaca

SEQ ID NO: 168246 - DNA, 120 bp, Artificial Sequence
  ENSG00000108591_39 (sequence is synthesized)
gcatgtctgggtactggttccacgagtgccgtgggactgccacctgcttaaagttctctggggccaagagggcctggaggattgtgtggggttaggagaggctcctgatgtatatgggga

SEQ ID NO: 168247 - DNA, 120 bp, Artificial Sequence
  ENSG00000108591_40 (sequence is synthesized)
accccatcagaatccagatccctgcctctacctgagacagtcctgaggcctccaaggaacagatgggcctctggtgtctgacccatccaggacagggccagaggtgagccctctggctgg

SEQ ID NO: 168248 - DNA, 120 bp, Artificial Sequence
  ENSG00000108591_41 (sequence is synthesized)
gaggtctcttcacagccacctaggtcaccaagccgagggtgagagggtctcctcctgctgcctgcacctgcaggcccccagcccctggggcctctcccagaaggccagggacaaggctcc

SEQ ID NO: 168249 - DNA, 120 bp, Artificial Sequence
  ENSG00000108591_42 (sequence is synthesized)
ttacagcatagttttgaggattaagtgaggaaatgttcaggaagcatttagcctgggccctgccacatggtaggggtgggcgtaggacagccgttattatcctgttactccttttatgat

SEQ ID NO: 168250 - DNA, 120 bp, Artificial Sequence
  ENSG00000108591_43 (sequence is synthesized)
ggtggtgtcggattttcttctgaaataagtctccgtcagtaaaacatgtggattaaagaaaaatgccaagcttgtgctagtatgtggcagaggctgtggtaggtctgtaaaggacaggag

SEQ ID NO: 168251 - DNA, 120 bp, Artificial Sequence
  ENSG00000108591_44 (sequence is synthesized)
tccagggcgccgtgggctgggtagcagtcacatgggtccacatatgtaactgcatccctcacacccatccaggaaaaggccgtggccggcaggtgatcgctgtggcgcgcacggctgacg

SEQ ID NO: 168252 - DNA, 120 bp, Artificial Sequence
  ENSG00000108591_45 (sequence is synthesized)
cagtgacatcctgcgtaacagggaagctgtgcatctggctctgtggacagcctgtgaggggcttaaggggtactcttcctaggtctctgctggagaaggagctggagtctgtgggcatcc

SEQ ID NO: 168253 - DNA, 120 bp, Artificial Sequence
  ENSG00000108591_46 (sequence is synthesized)
ttcattccgcaagcccagccccaggtctctgagtgccaccctagaggtgttaaacaaaggaggccaggcaaagtcccatctccctcagggcctaggcttgagatcacagcaggaggagcc

SEQ ID NO: 168254 - DNA, 120 bp, Artificial Sequence
  ENSG00000108591_47 (sequence is synthesized)
aaggagactcacgattaccctcctgaatcccttcagtcactcacaagtggcaatgctgggcaagctgagtaaaacaaaacccatctgcagaccagagtcagccaccttcccatctgtgtc

SEQ ID NO: 168255 - DNA, 120 bp, Artificial Sequence
  ENSG00000108591_48 (sequence is synthesized)
aaggaagtgttcctgcaggcctggcgccggcctccgccccagggacgctgggctgaggtgttgggtctcccaccagggcctggaagacctgtgggcatgtgggaggaggagtcacattgc

SEQ ID NO: 168256 - DNA, 120 bp, Artificial Sequence
  ENSG00000108591_49 (sequence is synthesized)
acaattgcagagtcccctccccaccgccctccactgtgccaccatcagcgtggcaaccagaggtctacactctcagggcaattgctggctgcctcctccagggtctccttccagttttat

SEQ ID NO: 168257 - DNA, 120 bp, Artificial Sequence
  ENSG00000108591_50 (sequence is synthesized)
atgacatctgggacccctgggatcttcacccctaccaaggagcactgaagtttatacactgccctgggagttgggggtgatgtgatgtgtgggaagcttcaggccacaggtggggccagg

SEQ ID NO: 168258 - DNA, 120 bp, Artificial Sequence
  ENSG00000108591_51 (sequence is synthesized)
aggagtgagagatggtgaccaagcaggggggactccaagctatcaccctgtcccattctaaaggagcatctgttcaggcaaggcaagcagagggccactagcagccaggcccctgacctt

SEQ ID NO: 168259 - DNA, 120 bp, Artificial Sequence
  ENSG00000108591_52 (sequence is synthesized)
cccctggtggctttgggaacattcctaactatgcaccacagctggcagatcaggagtgggaatggcagggccacctgcagctgtgattgggtggctatgtgcgaattgagcacgtcagtc

SEQ ID NO: 168260 - DNA, 120 bp, Artificial Sequence
  ENSG00000108591_53 (sequence is synthesized)
cctgtgtcctgagctttgggtgtgcagccaagcttgggatggggttaggtgaagcctcacctctctacctgactctctcctgtcctccagtgccaccgcatccaccggtcactcgccagc

SEQ ID NO: 168261 - DNA, 120 bp, Artificial Sequence
  ENSG00000108591_54 (sequence is synthesized)
aggattaagaaactgatgcacaagaagactaacttttccaaagtaaaatggccccactaatggcagggtggagttctgacacaagctctcactgccctctgagactgggcaggggaggcc

SEQ ID NO: 168262 - DNA, 120 bp, Artificial Sequence
  ENSG00000108591_55 (sequence is synthesized)
cctggggtcattgaagtaagtgggtgtgctgggcccagaaggagaaggggcgcatgcttgtgtttggacttgtgcctgtgcccaccctgtgtgtgagtctgggtggatgtccccatgtca

SEQ ID NO: 168263 - DNA, 120 bp, Artificial Sequence
  ENSG00000108591_56 (sequence is synthesized)
caggctcccctcgctgcctttctgcttagctccagggacacagaagacctggcctcccccagggtcagatcccagccctttatcatcctaacatggaggacgctctttcctcttgccagc

SEQ ID NO: 168264 - DNA, 120 bp, Artificial Sequence
  ENSG00000108591_57 (sequence is synthesized)
agatggagccctacttggtcttccgactcagtcatcacacacaaatacttctcgagtgtgtatctctagcggtgtcatgtgctgggcactgtgccagggactagagacatagcatgaatg

SEQ ID NO: 168265 - DNA, 120 bp, Artificial Sequence
  ENSG00000108592_0 (sequence is synthesized)
agatccggtcgcaggcagcgtccagcatggactggtccaggcacctccgacccacccgacgctcctgccccggcccgctctccactcagatcacgctcgctccgcacccagccccgtaac

SEQ ID NO: 168266 - DNA, 120 bp, Artificial Sequence
  ENSG00000108592_1 (sequence is synthesized)
ctgccgggccgccactgcacccgccatacctgctctggtccgtcaagcgccatcttctctcttcagcagagaccgccggcatccgagccgtcttggcgcgcaagcgcggaagcggaggat

SEQ ID NO: 168267 - DNA, 120 bp, Artificial Sequence
  ENSG00000108592_2 (sequence is synthesized)
tgggacctgaagaccaggcagagaagaattccgggtcaatgggcggggtgtgcggcgagaccacactaagggaaccatgatgggaggggcggctactcgagttcaggggctttggaaggg

SEQ ID NO: 168268 - DNA, 120 bp, Artificial Sequence
  ENSG00000108592_3 (sequence is synthesized)
gatgaggaaggagtagaactcctcctcagtgttgcctcattgaaactctgtttatagttcttgtgatatgccttcctagtctcaactttcaacttacaaaacccaaggacagagtattga

SEQ ID NO: 168269 - DNA, 120 bp, Artificial Sequence
  ENSG00000108592_4 (sequence is synthesized)
gaacaatctagggccacactcaaaatggcggaaaacctcgagccagggacgcaggggacgcaagcggaagcggaagtagttagctgcatacttgtgcggttccaagtgtggagaaagcgg

SEQ ID NO: 168270 - DNA, 120 bp, Artificial Sequence
  ENSG00000108592_5 (sequence is synthesized)
ctctgggtctagattgagggatactccccctttccaccatgggcaagaagggcaaagttggcaagagccgacgagacaagttttatcacttggcgaaggagacgggttaccgttcccgat

SEQ ID NO: 168271 - DNA, 120 bp, Artificial Sequence
  ENSG00000108592_6 (sequence is synthesized)
ctgctttcaagctgatccagctcaatcgccgctttcagttcctgcagaaagcccgagccttgctggacctgtgtgctgcgccagggggatggctgcaggtagctgccaagtttatgcctg

SEQ ID NO: 168272 - DNA, 120 bp, Artificial Sequence
  ENSG00000108592_7 (sequence is synthesized)
tatccagccttattgtgggagtggacctggttccaatcaagcctctccccaatgtggtgactctccagcaggacatcacaacagaacgttgtaggcaggccctgaggaaggagctgaaga

SEQ ID NO: 168273 - DNA, 120 bp, Artificial Sequence
  ENSG00000108592_8 (sequence is synthesized)
cctggaaggttgatgttgtgctcaatgatggggcccccaacgttggggctagctgggtccatgatgcttactcacaagcccatttgacactgatggctctacgtttggcttgtgactttt

SEQ ID NO: 168274 - DNA, 120 bp, Artificial Sequence
  ENSG00000108592_9 (sequence is synthesized)
tggcccgtggtggcagcttcatcacaaaggttttccgttctcgtgactatcagcctctgctatggatctttcagcagctgttccgccgtgtccaggccaccaagccccaagcctctcgcc

SEQ ID NO: 168275 - DNA, 120 bp, Artificial Sequence
  ENSG00000108592_10 (sequence is synthesized)
atgaatctgcagagatctttgtagtctgccaaggattcctggcccctgacaaggttgacagtaaattctttgaccccaaatttgcctttaaggaggttgaagttcaggctaagaccgtta

SEQ ID NO: 168276 - DNA, 120 bp, Artificial Sequence
  ENSG00000108592_11 (sequence is synthesized)
ctgaattggttactaagaagaagccaaaggctgaaggctatgctgagggtgacctcactctctatcaccgtacctcagtcactgacttcctccgagctgccaaccctgttgacttcctct

SEQ ID NO: 168277 - DNA, 120 bp, Artificial Sequence
  ENSG00000108592_12 (sequence is synthesized)
ccaaggccagcgaaatcatggtagatgatgaagagttggcacagcatccagctaccactgaggacatacgggtgtgctgtcaggacatcagagtgttggggcgcaaggagctcaggtcgc

SEQ ID NO: 168278 - DNA, 120 bp, Artificial Sequence
  ENSG00000108592_13 (sequence is synthesized)
tactaaactggagaacaaaacttcggcgatatgtggccaagaagctgaaagaacaagcaaaggcactggacatcagcctcagctctggagaggaagatgaaggtgatgaggaggactcaa

SEQ ID NO: 168279 - DNA, 120 bp, Artificial Sequence
  ENSG00000108592_14 (sequence is synthesized)
ttggcagaaatgaaggcccaggaggtggcggaattgaagaggaagaaaaagaagctgttgcgtgagcagagaaagcagcgggagcgtgtggagctgaagatggatctgcctggggtttcc

SEQ ID NO: 168280 - DNA, 120 bp, Artificial Sequence
  ENSG00000108592_15 (sequence is synthesized)
attgcagacgagggggagactggcatgttctccttgagcaccatccggggtcaccagttattagaggaagtaacacaaggggatatgagtgcagcagacacatttctgtccgatctgcca

SEQ ID NO: 168281 - DNA, 120 bp, Artificial Sequence
  ENSG00000108592_16 (sequence is synthesized)
agggatgatatctatgtgtcagatgttgaggacgacggtgatgacacatctctggatagtgacctggatccagaggagctggcaggagtcaggggacatcagggtctaagggaccaaaag

SEQ ID NO: 168282 - DNA, 120 bp, Artificial Sequence
  ENSG00000108592_17 (sequence is synthesized)
cgtatgcgacttactgaagtgcaagatgataaagaggaggaggaggaggagaatccactgctggtaccactggaggaaaaggcagtactgcaggaagaacaagccaacctgtggttctca

SEQ ID NO: 168283 - DNA, 120 bp, Artificial Sequence
  ENSG00000108592_18 (sequence is synthesized)
aagggcagctttgctgggatcgaggacgatgccgatgaggccctggagatcagtcaggcccagctgttatttgagaaccggcggaagggacggcagcagcagcagaagcagcagctgcca

SEQ ID NO: 168284 - DNA, 120 bp, Artificial Sequence
  ENSG00000108592_19 (sequence is synthesized)
cagacacccccttcctgtttgaagactgagataatgtctcccctgtaccaagatgaagcccctaagggaacagaggcttcttcggggacagaagctgccactggccttgaaggggaagaa

SEQ ID NO: 168285 - DNA, 120 bp, Artificial Sequence
  ENSG00000108592_20 (sequence is synthesized)
aaggatggcatctcagacagtgatagcagtactagcagtgaggaagaagagagctgggaacccctccgtggtaagaagcgaagccgtgggcctaagtcagatgatgacgggtttgagata

SEQ ID NO: 168286 - DNA, 120 bp, Artificial Sequence
  ENSG00000108592_21 (sequence is synthesized)
gtgcctattgaggacccagcgaaacatcggatactggaccccgaaggccttgctctaggtgctgttattgcctcttccaaaaaggccaagagagacctcatagataactccttcaaccgg

SEQ ID NO: 168287 - DNA, 120 bp, Artificial Sequence
  ENSG00000108592_22 (sequence is synthesized)
tacacatttaatgaggatgagggggagcttccggagtggtttgtgcaagaggaaaagcagcaccggatacgacagttgcctgttggtaagaaggaggtggagcattaccggaaacgctgg

SEQ ID NO: 168288 - DNA, 120 bp, Artificial Sequence
  ENSG00000108592_23 (sequence is synthesized)
cgggaaatcaatgcacgtcccatcaagaaggtggctgaggctaaggctagaaagaaaaggaggatgctgaagaggctggagcagaccaggaagaaggcagaagccgtggtgaacacagtg

SEQ ID NO: 168289 - DNA, 120 bp, Artificial Sequence
  ENSG00000108592_24 (sequence is synthesized)
gacatctcagaacgagagaaagtggcacagctgcgaagtctctacaagaaggctgggcttggcaaggagaaacgccatgtcacctacgttgtagccaaaaaaggtgtgggccgcaaagtg

SEQ ID NO: 168290 - DNA, 120 bp, Artificial Sequence
  ENSG00000108592_25 (sequence is synthesized)
cgccggccagctggagtcagaggtcatttcaaggtggtggactcaaggatgaagaaggaccaaagagcacagcaacgtaaggaacaaaagaaaaaacacaaacggaagtaagcagagctg

SEQ ID NO: 168291 - DNA, 120 bp, Artificial Sequence
  ENSG00000108592_26 (sequence is synthesized)
ccaggctcccaggagagcatggggactaggaggaagggtgtggcatggctcagtctggcccccttgattaccggcctagcccctgctcacatcacagctgtctgaagaacagtgaggtgg

SEQ ID NO: 168292 - DNA, 120 bp, Artificial Sequence
  ENSG00000108592_27 (sequence is synthesized)
agtgcctagaactcccgtggtggtcctgagcagagaggaggatgtcctcctgcctgcctgaaggtctcccatgaaaacactgctgaactgtgttgacactcatgaccctttttttaaacc

SEQ ID NO: 168293 - DNA, 120 bp, Artificial Sequence
  ENSG00000108592_28 (sequence is synthesized)
gttaaagggaagttcggtgttggagcgatactcaatgtagtcagtctacacctggacgtgtgggccacttaagccctccccacccccatcctattcctgaataaaaccaggataatggaa

SEQ ID NO: 168294 - DNA, 120 bp, Artificial Sequence
  ENSG00000108592_29 (sequence is synthesized)
aaagcggctctgggtctaggtagtgtgcggagaggggcgcggggtggaattgctgcgggaagtgggaaactggaagtgggaaactggaagtggaatctggtgctccggaaagagacgttc

SEQ ID NO: 168295 - DNA, 120 bp, Artificial Sequence
  ENSG00000108592_30 (sequence is synthesized)
gtctctctcttccttccccctttatacggaaacatctacatccctgaaatcctctaaaggcaagtttttcctttttaccgtgctttgagcacgttcttgcctgacatctgtacgacaaga

SEQ ID NO: 168296 - DNA, 120 bp, Artificial Sequence
  ENSG00000108592_31 (sequence is synthesized)
acacacaaaggggtgggaatgcagtggagaccgagctggtccctggggtcatgctgcttttaccttgaccaacactttcttcttatccatggcccggactacttcccccacataggagcc

SEQ ID NO: 168297 - DNA, 120 bp, Artificial Sequence
  ENSG00000108592_32 (sequence is synthesized)
ctgctcctgcagcagctgtagctcctcccgcaataggcgaactagatggcaaacagacacagtggtcacctagctactcctttggagtctccaggacccaattctacgtgcatgagctaa

SEQ ID NO: 168298 - DNA, 120 bp, Artificial Sequence
  ENSG00000108592_33 (sequence is synthesized)
ccggggtcaccaggtgaggcggcattgggggtgcaggtttaggagacagaaggatctgtttgggtgtttggaggtggggggtgttgaatgtctttttaggttgccgaacgataggctgtg

SEQ ID NO: 168299 - DNA, 120 bp, Artificial Sequence
  ENSG00000108592_34 (sequence is synthesized)
gttgctgtcttcaccacagggtgccttggtgagtataaggccacaaagaaacataaaccaaaaaggatgagttaggtagatagatgagtgtgatagatttattttttttttttttgagac

SEQ ID NO: 168300 - DNA, 120 bp, Artificial Sequence
  ENSG00000108592_35 (sequence is synthesized)
agattgagggatactccccctttccaccatgggcaagaagggcaaagttggcaagagccgacgagacaagttttatcacttggcgaaggagacggtttgcgcacttggttgttttgtcca

SEQ ID NO: 168301 - DNA, 120 bp, Artificial Sequence
  ENSG00000108592_36 (sequence is synthesized)
gccacaggttgctcctggtggccgctttctgggttctgagctgggatggcttccagtttcactgcgggaggggaacccgaatcccggtcctcttgggggccgtttcctttcttgattgca

SEQ ID NO: 168302 - DNA, 120 bp, Artificial Sequence
  ENSG00000108592_37 (sequence is synthesized)
gagaaagggcttggaatacgtgcctatgatatgctttggccagtacacgtaacaccagggatgagagatcagttgccaagagggggaaaaggatggctctaggtttttaaatttctgttc

SEQ ID NO: 168303 - DNA, 120 bp, Artificial Sequence
  ENSG00000108592_38 (sequence is synthesized)
cttttataggctgcaggtagctgccaagtttatgcctgtatccagccttattgtgggagtggacctggttccaatcaagcctctccccaatgtggtgactctccagcaggacatcacaac

SEQ ID NO: 168304 - DNA, 120 bp, Artificial Sequence
  ENSG00000108592_39 (sequence is synthesized)
cagggaaaggccatgatgttggacctctgggaagaggatattgctgtgctaaaggtttgggatgggggcctgagccttttgatttatgtagccgaagcccgaaaggtgggtagtgagcct

SEQ ID NO: 168305 - DNA, 120 bp, Artificial Sequence
  ENSG00000108599_0 (sequence is synthesized)
aactccgggcgggcggcttgttgataatatggcggctggagctgcctgggcatcccgaggaggcggtggggcccactcccggaagaagggtcccttttcgcgctagtgcagcggcccctc

SEQ ID NO: 168306 - DNA, 120 bp, Artificial Sequence
  ENSG00000108599_1 (sequence is synthesized)
tggacccggaagtccgggccggttgctgaatgaggggagccgggccctccccgcgccagtccccccgcaccctccgtcccgacccgggccccgccatgtccttcttccggcggaaagtga

SEQ ID NO: 168307 - DNA, 120 bp, Artificial Sequence
  ENSG00000108599_2 (sequence is synthesized)
aaggcaaagaacaagagaagacctcagatgtgaagtccattaaagcttcaatatccgtacattccccacaaaaaagcactaaaaatcatgccttgctggaggctgcaggaccaagtcatg

SEQ ID NO: 168308 - DNA, 120 bp, Artificial Sequence
  ENSG00000108599_3 (sequence is synthesized)
ttgcaatcaatgccatttctgccaacatggactccttttcaagtagcaggacagccacacttaagaagcagccaagccacatggaggccgctcattttggtgacctgggcagatcttgtc

SEQ ID NO: 168309 - DNA, 120 bp, Artificial Sequence
  ENSG00000108599_4 (sequence is synthesized)
tggactaccagactcaagagaccaaatcaagcctttctaagacccttgaacaagtcttgcacgacactattgtcctcccttacttcattcaattcatggaacttcggcgaatggagcatt

SEQ ID NO: 168310 - DNA, 120 bp, Artificial Sequence
  ENSG00000108599_5 (sequence is synthesized)
tggtgaaattttggttagaggctgaaagttttcattcaacaacttggtcgcgaataagagcacacagtctaaacacagtgaagcagagctcactggctgagcctgtctctccatctaaaa

SEQ ID NO: 168311 - DNA, 120 bp, Artificial Sequence
  ENSG00000108599_6 (sequence is synthesized)
agcatgaaactacagcgtcttttttaactgattctcttgataagagattggaggattctggctcagcacagttgtttatgactcattcagaaggaattgacctgaataatagaactaaca

SEQ ID NO: 168312 - DNA, 120 bp, Artificial Sequence
  ENSG00000108599_7 (sequence is synthesized)
gcactcagaatcacttgctgctttcccaggaatgtgacagtgcccattctctccgtcttgaaatggccagagcaggaactcaccaagtttccatggaaacccaagaatcttcctctacac

SEQ ID NO: 168313 - DNA, 120 bp, Artificial Sequence
  ENSG00000108599_8 (sequence is synthesized)
ttacagtagccagtagaaatagtcccgcttctccactaaaagaattgtcaggaaaactaatgaaaagtatagaacaagatgcagtgaatacttttaccaaatatatatctccagatgctg

SEQ ID NO: 168314 - DNA, 120 bp, Artificial Sequence
  ENSG00000108599_9 (sequence is synthesized)
ctaaaccaataccaattacagaagcaatgagaaatgacatcatagcaaggatttgtggagaagatggacaggtggatcccaactgtttcgttttggcacagtccatagtctttagtgcaa

SEQ ID NO: 168315 - DNA, 120 bp, Artificial Sequence
  ENSG00000108599_10 (sequence is synthesized)
tggagcaagagcactttagtgagtttctgcgaagtcaccatttctgtaaataccagattgaagtgctgaccagtggaactgtttacctggctgacattctcttctgtgagtcagccctct

SEQ ID NO: 168316 - DNA, 120 bp, Artificial Sequence
  ENSG00000108599_11 (sequence is synthesized)
tttatttctctgagtacatggaaaaagaggatgcagtgaatatcttacaattctggttggcagcagataacttccagtctcagcttgctgccaaaaagggccaatatgatggacaggagg

SEQ ID NO: 168317 - DNA, 120 bp, Artificial Sequence
  ENSG00000108599_12 (sequence is synthesized)
cacagaatgatgccatgattttatatgacaagtacttctccctccaagccacacatcctcttggatttgatgatgttgtacgattagaaattgaatccaatatctgcagggaaggtgggc

SEQ ID NO: 168318 - DNA, 120 bp, Artificial Sequence
  ENSG00000108599_13 (sequence is synthesized)
cactccccaactgtttcacaactccattacgtcaggcctggacaaccatggagaaggtctttttgcctggctttttgtccagcaatctttattataaatatttgaatgatctcatccatt

SEQ ID NO: 168319 - DNA, 120 bp, Artificial Sequence
  ENSG00000108599_14 (sequence is synthesized)
cggttcgaggagatgaatttctgggcgggaacgtgtcgctgactgctcctggctctgttggccctcctgatgagtctcacccagggagttctgacagctctgcgtctcagtccagtgtga

SEQ ID NO: 168320 - DNA, 120 bp, Artificial Sequence
  ENSG00000108599_15 (sequence is synthesized)
aaaaagccagtattaaaatactgaaaaattttgatgaagcgataattgtggatgcggcaagtctggatccagaatctttatatcaacggacatatgccgggaagatgacatttggaagag

SEQ ID NO: 168321 - DNA, 120 bp, Artificial Sequence
  ENSG00000108599_16 (sequence is synthesized)
aaatactgatgaggcccaggaagagctagcttggaagattgctaaaatgatagtcagtgacattatgcagcaggctcagtatgatcaaccgttagagaaatctacaaagttatgactcaa

SEQ ID NO: 168322 - DNA, 120 bp, Artificial Sequence
  ENSG00000108599_17 (sequence is synthesized)
aacttgagataaaggaaatctgcttgtgaaaaataagagaacttttttcccttggttggattcttcaacacagccaatgaaaacagcactatatttctgatctgtcactgttgtttccag

SEQ ID NO: 168323 - DNA, 120 bp, Artificial Sequence
  ENSG00000108599_18 (sequence is synthesized)
gagagaatgggagacaatcctagacttccaccataatgcagttacctgtaggcataattgatgcacatgatgttcacacagtgagagtcttaaagatacaaaatggtattgtttacatta

SEQ ID NO: 168324 - DNA, 120 bp, Artificial Sequence
  ENSG00000108599_19 (sequence is synthesized)
ctagaaaattattagttttccaatggcaataacccatttatgagagtgttttagcctactggaatagacagggaccacatcctctgggaagcagataagcatagaactgatacttgatgc

SEQ ID NO: 168325 - DNA, 120 bp, Artificial Sequence
  ENSG00000108599_20 (sequence is synthesized)
acactcgtagtggtaactcatccctaatcagcattgtaaagcaggtgccagaggtggtttgctttgtccttccaaagcaggtgagtcagccccaccgagagccaggcagctttgagtggc

SEQ ID NO: 168326 - DNA, 120 bp, Artificial Sequence
  ENSG00000108599_21 (sequence is synthesized)
agcgtggtgctagcagcttcagcggaacagggtgagagttaattatgcagtcttcttgacagcggcattaatttggaaggaaactgacaagtcatgggtcaagtttcagtgacttcctcc

SEQ ID NO: 168327 - DNA, 120 bp, Artificial Sequence
  ENSG00000108599_22 (sequence is synthesized)
ttcctctgatggcagtatatagttttcacattttaattcctcctcctgagatgcactatacttaaaaccattctctcccctgctaacagaagggtgtgaatctggtttactttgagcatt

SEQ ID NO: 168328 - DNA, 120 bp, Artificial Sequence
  ENSG00000108599_23 (sequence is synthesized)
aggatttgcccctttggaattctgcactccagttacttaactttcccttcagaatacatgtggaaagaaagaaagaaatagcgatgactccacttttgcccctgtggcaccttgaacaaa

SEQ ID NO: 168329 - DNA, 120 bp, Artificial Sequence
  ENSG00000108599_24 (sequence is synthesized)
gcagttcttcccaaattatactttttttttttttaaataaggtgagcaggatgactggggagagagaaacatttgactttgactgcctcccccattctttgctgtgagctggaaagtgtg

SEQ ID NO: 168330 - DNA, 120 bp, Artificial Sequence
  ENSG00000108599_25 (sequence is synthesized)
cagttggtcgtctttcttctcctttctttaggatagtaagagactcactcactgcacttctgctcagttggcttctgcatcgggatcacacagccatcagcaggactgcccagttggtga

SEQ ID NO: 168331 - DNA, 120 bp, Artificial Sequence
  ENSG00000108599_26 (sequence is synthesized)
gcacactccattgaccacgtggcgccagcgcttcctcaatgcacatgattgagaggaaagaaagttctcttagatgttactgcttttgctcagactttgcaaaaaaaaaaatatatatat

SEQ ID NO: 168332 - DNA, 120 bp, Artificial Sequence
  ENSG00000108599_27 (sequence is synthesized)
atatgtataaatatataattattaatcacttttgtccttgagaaagtcttgaatgaacagagaatttattccattgcaatatttgattgtatagaggcacactgtttcatcgacagaaga

SEQ ID NO: 168333 - DNA, 120 bp, Artificial Sequence
  ENSG00000108599_28 (sequence is synthesized)
agcaaaaaggctttgtgtaagtttttggtactatgtaccacctctgttattcttttaaagctgaagtattcatgtacttaaaccatattatatttaattgtgtttgattttaaaatatat

SEQ ID NO: 168334 - DNA, 120 bp, Artificial Sequence
  ENSG00000108599_29 (sequence is synthesized)
atatatgaattctatttaaaattgtgtcaactttctgctttcagggcatttatggctcttctgttgaaatatattgatctttccaaatattttcatttgctttctaaaaacccagaacat

SEQ ID NO: 168335 - DNA, 120 bp, Artificial Sequence
  ENSG00000108599_30 (sequence is synthesized)
gagccactactggactttgccttgtgtttgaagtgtatggcataaacccaaggtttttattagtcatctatgctgtgattaattcattttgttcttttaacaaaatatttccatccactt

SEQ ID NO: 168336 - DNA, 120 bp, Artificial Sequence
  ENSG00000108599_31 (sequence is synthesized)
cacattgcttcaatctttaacagaaaagcaatataaaggttatagaataaaatgtggttttgggcaactcttgctgcctctgcatgttttggaataacaatttctacaagactctaggct

SEQ ID NO: 168337 - DNA, 120 bp, Artificial Sequence
  ENSG00000108599_32 (sequence is synthesized)
gtttaaactagtgctttcagttaagataaattctaatcatttctttgtatatacattttgtgcttctgagctagagatgccaagtagttgtaaactgcttataaagagaatagcagcaaa

SEQ ID NO: 168338 - DNA, 120 bp, Artificial Sequence
  ENSG00000108599_33 (sequence is synthesized)
ggtagaactcataaaatataaggtgggaaaaccaagcagaatagcacagtggaaattgaagcagtccagcaaagtgattaagagcagaggccttgagtctggcctggtatgtacagtcac

SEQ ID NO: 168339 - DNA, 120 bp, Artificial Sequence
  ENSG00000108599_34 (sequence is synthesized)
gtgccacataacattttagtcaacagtggactgcgtgtacgatggtcctgtacgattataatggatcaaagctggtagtgcaataataacaaaagttagaaaaaataaattttaataagt

SEQ ID NO: 168340 - DNA, 82 bp, Artificial Sequence
  ENSG00000108599_35 (sequence is synthesized)
ttcaatatccgtacattccccacaaaaaagcactaaaaatcatgccttgctggaggctgcaggaccaagtcatgttgcaatc

SEQ ID NO: 168341 - DNA, 120 bp, Artificial Sequence
  ENSG00000108599_36 (sequence is synthesized)
aaaaaaaatgacaaaaaatgcacagaactgacaattttcgttattgactaagataattttttcttaacatggaatttagcagttcccttcctaatttgttttctgagtattttttatatc

SEQ ID NO: 168342 - DNA, 120 bp, Artificial Sequence
  ENSG00000108599_37 (sequence is synthesized)
ggattatagctcactttaaaagtttctcggctgcattcggtgcgagggtctttgcctgggccagatgggctgcagtgtagcgggtgctcaggcctgcccgctgctgagcagccgggccgg

SEQ ID NO: 168343 - DNA, 120 bp, Artificial Sequence
  ENSG00000108602_0 (sequence is synthesized)
gttccaggagccccagttaccgggagaggctgtgtcaaaggcgccatgagcaagatcagcgaggccgtgaagcgcgcccgcgccgccttcagctcgggcaggacccgtccgctgcagttc

SEQ ID NO: 168344 - DNA, 120 bp, Artificial Sequence
  ENSG00000108602_1 (sequence is synthesized)
cggatccagcagctggaggcgctgcagcgcctgatccaggagcaggagcaggagctggtgggcgcgctggccgcagacctgcacaagaatgaatggaacgcctactatgaggaggtggtg

SEQ ID NO: 168345 - DNA, 120 bp, Artificial Sequence
  ENSG00000108602_2 (sequence is synthesized)
tacgtcctagaggagatcgagtacatgatccagaagctccctgagtgggccgcggatgagcccgtggagaagacgccccagactcagcaggacgagctctacatccactcggagccactg

SEQ ID NO: 168346 - DNA, 120 bp, Artificial Sequence
  ENSG00000108602_3 (sequence is synthesized)
ggcgtggtcctcgtcattggcacctggaactaccccttcaacctcaccatccagcccatggtgggcgccatcgctgcagggaactcagtggtcctcaagccctcggagctgagtgagaac

SEQ ID NO: 168347 - DNA, 120 bp, Artificial Sequence
  ENSG00000108602_4 (sequence is synthesized)
atggcgagcctgctggctaccatcatcccccagtacctggacaaggatctgtacccagtaatcaatgggggtgtccctgagaccacggagctgctcaaggagaggttcgaccatatcctg

SEQ ID NO: 168348 - DNA, 120 bp, Artificial Sequence
  ENSG00000108602_5 (sequence is synthesized)
tacacgggcagcacgggggtggggaagatcatcatgacggctgctgccaagcacctgacccctgtcacgctggagctgggagggaagagtccctgctacgtggacaagaactgtgacctg

SEQ ID NO: 168349 - DNA, 120 bp, Artificial Sequence
  ENSG00000108602_6 (sequence is synthesized)
gtgacccctcgatccagaaccaaattgtggagaagctcaagaagtcactgaaagagttctacggggaagatgctaagaaatcccgggactatggaagaatcattagtgcccggcacttcc

SEQ ID NO: 168350 - DNA, 120 bp, Artificial Sequence
  ENSG00000108602_7 (sequence is synthesized)
agagggtgatgggcctgattgagggccagaaggtggcttatgggggcaccggggatgccgccactcgctacatagcccccaccatcctcacggacgtggacccccagtccccggtgatgc

SEQ ID NO: 168351 - DNA, 120 bp, Artificial Sequence
  ENSG00000108602_8 (sequence is synthesized)
aagaggagatcttcgggcctgtgctgcccatcgtgtgcgtgcgcagcctggaggaggccatccagttcatcaaccagcgtgagaagcccctggccctctacatgttctccagcaacgaca

SEQ ID NO: 168352 - DNA, 120 bp, Artificial Sequence
  ENSG00000108602_9 (sequence is synthesized)
aggtgattaagaagatgattgcagagacatccagtggtggggtggcggccaacgatgtcatcgtccacatcaccttgcactctctgcccttcgggggcgtggggaacagcggcatgggat

SEQ ID NO: 168353 - DNA, 120 bp, Artificial Sequence
  ENSG00000108602_10 (sequence is synthesized)
cctaccatggcaagaagagcttcgagactttctctcaccgccgctcttgcctggtgaggcctctgatgaatgatgaaggcctgaaggtcagataccccccgagcccggccaagatgaccc

SEQ ID NO: 168354 - DNA, 120 bp, Artificial Sequence
  ENSG00000108602_11 (sequence is synthesized)
agcactgaggaggggttgctccgcctggcctggccatactgtgtcccatcggagtgcggaccaccctcactggctctcctggccctgggagaatcgctcctgcagccccagcccagcccc

SEQ ID NO: 168355 - DNA, 120 bp, Artificial Sequence
  ENSG00000108602_12 (sequence is synthesized)
actcctctgctgacctgctgacctgtgcacaccccactcccacatgggcccaggcctcaccattccaagtctccacccctttctagaccaataaagagacgaatacaattttctaactca

SEQ ID NO: 168356 - DNA, 120 bp, Artificial Sequence
  ENSG00000108602_13 (sequence is synthesized)
gctttttagaacaatggcttagccaggagggtggtgctgggtttttctttatcggcttgggtgtggaatcgcggactgcgcccctccaatctgatctggagagtggctgactgcgtgtgc

SEQ ID NO: 168357 - DNA, 120 bp, Artificial Sequence
  ENSG00000108602_14 (sequence is synthesized)
atcagctttgcaagcaagtaagggagcggaaaaggccgggaaaggccctgccgcgagcacgctgccaagagcccccagcagcagttcggcttaggactcgggttgcggcgggtgtcacct

SEQ ID NO: 168358 - DNA, 120 bp, Artificial Sequence
  ENSG00000108602_15 (sequence is synthesized)
tctcaggggctagcaaggcagccagggcccaggcgtctgagtgaggggcgggagaggaggcgaggcagaaagtggaccttccagcggaaaggccattttccccaaggccgagcccaggga

SEQ ID NO: 168359 - DNA, 120 bp, Artificial Sequence
  ENSG00000108602_16 (sequence is synthesized)
agtcccttcctatagaattcaggcagggtgggaggcagggcgcgctcgtgcccctcagccagctgcaggtgctctctgtccccaggcgccatgagcaagatcagcgaggccgtgaagcgc

SEQ ID NO: 168360 - DNA, 120 bp, Artificial Sequence
  ENSG00000108602_17 (sequence is synthesized)
acctcaccatccagcccatggtgggcgccatcgctgcaggtgcatggccctgtgggaagggaagctgggggagcaccgtcccccagcgtggagccaagccaggatgggctcaggcctgtg

SEQ ID NO: 168361 - DNA, 120 bp, Artificial Sequence
  ENSG00000108602_18 (sequence is synthesized)
ttaagagtcctggggtcagataagggtttgctgggtctgtcacaggaggctgtggggaccaagctgtttagccaggcctcttggtgcctgaggtccagtcaggctcaggtgtccacacct

SEQ ID NO: 168362 - DNA, 120 bp, Artificial Sequence
  ENSG00000108602_19 (sequence is synthesized)
agaagtgagcagaccgcttgggaggactcactggtggcaaggtcacagccgatggcttctgctgaccagagagctcaggggtctgcaaaacgagatgcaactcctggggaaccttttgga

SEQ ID NO: 168363 - DNA, 120 bp, Artificial Sequence
  ENSG00000108602_20 (sequence is synthesized)
caggggtccccagcaagttcacagcaagtgggcacagatgcttgataagcggacacgacctcgggatgggtataaattgctttcaccagggagcctgcggtagactccagcaggcagggg

SEQ ID NO: 168364 - DNA, 120 bp, Artificial Sequence
  ENSG00000108602_21 (sequence is synthesized)
gggcgccatcgctgcaggacacacaatggaggggaggcttcaggtgtggtccttgggagggcagagcctctggtgaagtaccctgggcataggcctggctcggtgtgctctgcagggaac

SEQ ID NO: 168365 - DNA, 120 bp, Artificial Sequence
  ENSG00000108602_22 (sequence is synthesized)
aggaactccaagggctcaatggacgggaagcagggtccttaaatacgtcccctcttggctcttgccgttccaggagccccagttaccgggagaggctgtgtcaaagaatgaatggaacgc

SEQ ID NO: 168366 - DNA, 120 bp, Artificial Sequence
  ENSG00000108602_23 (sequence is synthesized)
taatatgcatcagggcttccttcctagaatgggccagcgctgttctaccaaccgggcccccagagcctctctcccctttctgcttttcctccaacatctcagcaactcagagggccaggt

SEQ ID NO: 168367 - DNA, 120 bp, Artificial Sequence
  ENSG00000108602_24 (sequence is synthesized)
ggtgcagctctggccagcgtgtgcccgtgtgtgtccctctgtcatgtgcccgtgcgtgctcctgggtgtgccccgtgacatgtgcttgtttgctaacaactcttccatccactgtcccga

SEQ ID NO: 168368 - DNA, 120 bp, Artificial Sequence
  ENSG00000108602_25 (sequence is synthesized)
ggacacacaatggaggggaggcttcaggtgtggtccttgggagggcagagcctctggtgaagtaccctgggcataggcctggctcggtgtgctctgcagggaactcagtggtcctcaagc

SEQ ID NO: 168369 - DNA, 120 bp, Artificial Sequence
  ENSG00000108602_26 (sequence is synthesized)
gccagtgtcggggccatgcgatggggcgtggggggaggggctggggagagtgcgacccagagaggttcaggaaggacttggggccacctggcccctcggtcgcggagactgggcgcaccg

SEQ ID NO: 168370 - DNA, 120 bp, Artificial Sequence
  ENSG00000108602_27 (sequence is synthesized)
aggagccccagttaccgggagaggctgtgtcaaaggtaatcctcttccctgcattccttattttttctcttgtctaggtggagtctgcactcagagccggggccctaagtgtcaagagtc

SEQ ID NO: 168371 - DNA, 120 bp, Artificial Sequence
  ENSG00000108602_28 (sequence is synthesized)
ctacatcatctctccagggggtccctgcctctgggaccatcatctctggagcatcctcctggacctctggcagctctgccatcccccaaaccaggaggcagaggtcccagggatccgcgg

SEQ ID NO: 168372 - DNA, 120 bp, Artificial Sequence
  ENSG00000108602_29 (sequence is synthesized)
gcttttccagactccttccttcccaagcatctctggttttcggtgaccacacagacccttggccctcttctcagctattcaacgagagagcagatttatggattggagacccccatcaaa

SEQ ID NO: 168373 - DNA, 120 bp, Artificial Sequence
  ENSG00000108602_30 (sequence is synthesized)
gcagcagagccgagtgctaaaggcatgagctgctgacagagatgcatgtgggttcaaaccctgacatgccacctgctaactgcgccatgagcaagatcagcgaggccgtgaagcgcgccc

SEQ ID NO: 168374 - DNA, 80 bp, Artificial Sequence
  ENSG00000108604_0 (sequence is synthesized)
gggacggagcgatgtcgggccgaggcgcgggcgggttcccgctgcccccgctaagccctggcggcggcgccgtggctgcg

SEQ ID NO: 168375 - DNA, 80 bp, Artificial Sequence
  ENSG00000108604_1 (sequence is synthesized)
cggggccgccgccttccgccccatgggccccgcgggccccgcggcgcagtaccagcgacctggcatgtcaccagggaacc

SEQ ID NO: 168376 - DNA, 120 bp, Artificial Sequence
  ENSG00000108604_2 (sequence is synthesized)
caccagggaaccggatgcccatggctggcttgcaggtgggaccccctgctggctccccatttggtgcagcagctccgcttcgacctggcatgccacccaccatgatggatccattccgaa

SEQ ID NO: 168377 - DNA, 120 bp, Artificial Sequence
  ENSG00000108604_3 (sequence is synthesized)
aacgcctgcttgtgccccaggcgcagcctcccatgcctgcccagcgccgggggttaaagaggaggaagatggcagataaggttctacctcagcgaatccgggagcttgttccagagtctc

SEQ ID NO: 168378 - DNA, 120 bp, Artificial Sequence
  ENSG00000108604_4 (sequence is synthesized)
aggcgtacatggatctcttggcttttgagcggaagctggaccagaccattgctcgcaagcggatggagatccaggaggccatcaaaaagcctctgacacaaaagcgaaagcttcggatct

SEQ ID NO: 168379 - DNA, 120 bp, Artificial Sequence
  ENSG00000108604_5 (sequence is synthesized)
acatttccaatacgttcagtcccagcaaggcggaaggcgatagtgcaggaactgcagggacccctgggggaaccccagcaggggacaaggtggcttcctgggaactccgagtggaaggaa

SEQ ID NO: 168380 - DNA, 120 bp, Artificial Sequence
  ENSG00000108604_6 (sequence is synthesized)
aactgctggatgatcctagcaaacagaagaggaagttttcttcattctttaagagcctcgtcattgagctggacaaggagctgtacgggcctgacaatcacctggtggagtggcaccgga

SEQ ID NO: 168381 - DNA, 120 bp, Artificial Sequence
  ENSG00000108604_7 (sequence is synthesized)
tgcccaccacccaggagacagatggcttccaagtaaaacggcctggagacctcaacgtcaagtgcaccctcctgctcatgctggatcatcagcctccccagtacaaattggacccccgat

SEQ ID NO: 168382 - DNA, 120 bp, Artificial Sequence
  ENSG00000108604_8 (sequence is synthesized)
tggcaaggctgctgggagtgcacacgcagacgagggccgccatcatgcaggccctgtggctttacatcaagcacaaccagctgcaggatgggcacgagcgggagtacatcaactgcaacc

SEQ ID NO: 168383 - DNA, 120 bp, Artificial Sequence
  ENSG00000108604_9 (sequence is synthesized)
gttacttccgccagatcttcagttgtggccgactccgtttctccgagattcccatgaagctggcagggttgctgcagcatccagaccccattgtcatcaaccatgtcattagtgtcgacc

SEQ ID NO: 168384 - DNA, 120 bp, Artificial Sequence
  ENSG00000108604_10 (sequence is synthesized)
ccaaatgagcaattttctggcctctaccaccaatcagcaggagatcgcctcccttgatgtcaagatccatgagaccattgagtccatcaaccagctgaagacccagagagatttcatgct

SEQ ID NO: 168385 - DNA, 120 bp, Artificial Sequence
  ENSG00000108604_11 (sequence is synthesized)
cagttttagcaccgacccccaggacttcatccaggaatggctccgttcccagcgccgagacctcaagatcatcactgatgtgattggaaatcctgaggaggagagacgagctgctttcta

SEQ ID NO: 168386 - DNA, 120 bp, Artificial Sequence
  ENSG00000108604_12 (sequence is synthesized)
ccaccagccctgggcccaggaagcagtaggcaggcacatctttgccaaggtgcagcagcgaaggcaggaactggaacaggtgctgggaattcgcctgacctaactgctcagggatctttc

SEQ ID NO: 168387 - DNA, 120 bp, Artificial Sequence
  ENSG00000108604_13 (sequence is synthesized)
ttcccagccctggagcctggagggagaccaccctctgggtccttgctggggccgcagacacgtaggctggggtgaggagtgtctgctgtcaccctctactctccagctttagtcttataa

SEQ ID NO: 168388 - DNA, 120 bp, Artificial Sequence
  ENSG00000108604_14 (sequence is synthesized)
atgtagtgataggattccttgttgcttggtccccaaagccttatactttttgcattggctttaattgggttcagcagatgcctcctctgcccccctgcaggcaggcccaagtaggactgc

SEQ ID NO: 168389 - DNA, 120 bp, Artificial Sequence
  ENSG00000108604_15 (sequence is synthesized)
tggaggctgtgctttgacattgtaagacatttccgaaccaaaggctgctgggtttgcatgtttacagactccccctggggcgagggtcagagctggctctggggagctgggctaggaaga

SEQ ID NO: 168390 - DNA, 120 bp, Artificial Sequence
  ENSG00000108604_16 (sequence is synthesized)
ggaggtgcagcccagactcttcctagcctttctaaaccaaagttctttgccattcctacaagcccagccttgctgctggttttttcctttcctttgggtatttgcactattttgggagca

SEQ ID NO: 168391 - DNA, 120 bp, Artificial Sequence
  ENSG00000108604_17 (sequence is synthesized)
agttttctatgtgggagccactttttttgtacaggggtaagttgggggttttcagggagcctgttaggtgcctccttcttttctttcctcaatctatgcaagcggctctggccgccatca

SEQ ID NO: 168392 - DNA, 120 bp, Artificial Sequence
  ENSG00000108604_18 (sequence is synthesized)
tctcctgggatgccagagggctgcctctccagcggcttgggccggggaggggacactccagttctctagcatggcctgaggtatggggtatgtgcatgtggaggccagggtaaggtgaat

SEQ ID NO: 168393 - DNA, 120 bp, Artificial Sequence
  ENSG00000108604_19 (sequence is synthesized)
ggggaggctgggaggactggtgttgccctttggagcttggtgaggagggtgggcctagggcttggcgagtgccacatctggcaggtttggaaatttccaaataaatccttttgtctattg

SEQ ID NO: 168394 - DNA, 120 bp, Artificial Sequence
  ENSG00000108604_20 (sequence is synthesized)
tctcagaaaaaaaaagactgggccagacacttgggcgctcccagagaagtcctgccatagggaggggggcgctgctccaagcccgttggaggttgatttgtgtggttattacagtgttcc

SEQ ID NO: 168395 - DNA, 120 bp, Artificial Sequence
  ENSG00000108604_21 (sequence is synthesized)
tgcagatggcagtcgagtgtctcgaggaagtccctcgtgggctgcaagagggcaccatttccctgcctccagtctgcccagagtcctgcttccatccttcagggcccaggaatcttcagt

SEQ ID NO: 168396 - DNA, 120 bp, Artificial Sequence
  ENSG00000108604_22 (sequence is synthesized)
atcatcaggtgacagagaccctggggtcatttctgggcccacagggacccctcaggaggggagctggttcctagaaacccttcctgtccctgccctattttcccactgttctactataag

SEQ ID NO: 168397 - DNA, 120 bp, Artificial Sequence
  ENSG00000108604_23 (sequence is synthesized)
tcgcgaggggcaggattcgaggaggcactcgagcattgggcaccaggagcggaatctgtcccgaaccgggtctgtgaggaactcgcgaacttggattaggaaatcccggagcccggatcg

SEQ ID NO: 168398 - DNA, 120 bp, Artificial Sequence
  ENSG00000108604_24 (sequence is synthesized)
ttgttttccaggggccaagcaagttgggctagagccgggtttttcacatgcaggatgcagcccactagtagagtacgaactcagttgaatgtgttggggccagtatgttttaaatgaata

SEQ ID NO: 168399 - DNA, 120 bp, Artificial Sequence
  ENSG00000108604_25 (sequence is synthesized)
agtgtgtgcaaggcagagctgccaaacaggccttgcaggcagcagccatggggaggcgggtgggggtggaggtgactcccagatgggctccacagaaatgtcagggagcaaggcctcagc

SEQ ID NO: 168400 - DNA, 120 bp, Artificial Sequence
  ENSG00000108622_0 (sequence is synthesized)
ggagaagactgaataagccgtgaactgggcagctgtgacacgcgcaccttgtcaccttgtcaccaatttcctgcccgggatcccagagctacccttcttggagcccacaggggtaaggtt

SEQ ID NO: 168401 - DNA, 120 bp, Artificial Sequence
  ENSG00000108622_1 (sequence is synthesized)
gagcttctcactttccctccaatgaagcgtggcagcatgggaaggattttggcagtgtcgaggtctgagttttagtccgttcccctctctgggtctcagtttctcgctggaataaagtga

SEQ ID NO: 168402 - DNA, 120 bp, Artificial Sequence
  ENSG00000108622_2 (sequence is synthesized)
aacacctcaggctccaaccctcccaacccaaggctccctcctggagggagagagaggatggaggacatcaggcagcccttggctggtccctgcgagcccgtggagactgccagagatgtc

SEQ ID NO: 168403 - DNA, 120 bp, Artificial Sequence
  ENSG00000108622_3 (sequence is synthesized)
ctctttcggttacaggaccctgactgtggccctcttcaccctgatctgctgtccaggatcggatgagaaggtattcgaggtacacgtgaggccaaagaagctggcggttgagcccaaagg

SEQ ID NO: 168404 - DNA, 120 bp, Artificial Sequence
  ENSG00000108622_4 (sequence is synthesized)
gtccctcgaggtcaactgcagcaccacctgtaaccagcctgaagtgggtggtctggagacctctctagataagattctgctggacgaacaggctcagtggaaacattacttggtctcaaa

SEQ ID NO: 168405 - DNA, 120 bp, Artificial Sequence
  ENSG00000108622_5 (sequence is synthesized)
cggtcctccaatgccacttcacctgctccgggaagcaggagtcaatgaattccaacgtcagcgtgtaccagcctccaaggcaggtcatcctgacactgcaacccactttggtggctgtgg

SEQ ID NO: 168406 - DNA, 120 bp, Artificial Sequence
  ENSG00000108622_6 (sequence is synthesized)
gcaagtccttcaccattgagtgcagggtgcccaccgtggagcccctggacagcctcaccctcttcctgttccgtggcaatgagactctgcactatgagaccttcgggaaggcagcccctg

SEQ ID NO: 168407 - DNA, 120 bp, Artificial Sequence
  ENSG00000108622_7 (sequence is synthesized)
ctccgcaggaggccacagccacattcaacagcacggctgacagagaggatggccaccgcaacttctcctgcctggctgtgctggacttgatgtctcgcggtggcaacatctttcacaaac

SEQ ID NO: 168408 - DNA, 120 bp, Artificial Sequence
  ENSG00000108622_8 (sequence is synthesized)
actcagccccgaagatgttggagatctatgagcctgtgtcggacagccagatggtcatcatagtcacggtggtgtcggtgttgctgtccctgttcgtgacatctgtcctgctctgcttca

SEQ ID NO: 168409 - DNA, 120 bp, Artificial Sequence
  ENSG00000108622_9 (sequence is synthesized)
tcttcggccagcacttgcgccagcagcggatgggcacctacggggtgcgagcggcttggaggaggctgccccaggccttccggccatagcaaccatgagtggcatggccaccaccacggt

SEQ ID NO: 168410 - DNA, 120 bp, Artificial Sequence
  ENSG00000108622_10 (sequence is synthesized)
ggtcactggaactcagtgtgactcctcagggttgaggtccagccctggctgaaggactgtgacaggcagcagagacttgggacattgccttttctagcccgaatacaaacacctggactt

SEQ ID NO: 168411 - DNA, 120 bp, Artificial Sequence
  ENSG00000108622_11 (sequence is synthesized)
ctgggttatgccctgcttatcagcagcttcccagcttcctctgcctggattcttagaggcctggggtcctagaacgagctggtgcacgtggcttcccaaagatctctcagataatgagag

SEQ ID NO: 168412 - DNA, 120 bp, Artificial Sequence
  ENSG00000108622_12 (sequence is synthesized)
gaaatgcagtcatcagtttgcagaaggctagggattctgggccatagctcagacctgcgcccaccatctccctccaggcagcccttggctggtccctgcgagcccgtggagactgccaga

SEQ ID NO: 168413 - DNA, 120 bp, Artificial Sequence
  ENSG00000108622_13 (sequence is synthesized)
gagaagactgaataagccgtgaactgggcagctgtgacacgcgcaccttgtcaccttgtcaccaatttcctgcccgggatcccagagctacccttcttggagcccacaggggcagccctt

SEQ ID NO: 168414 - DNA, 120 bp, Artificial Sequence
  ENSG00000108622_14 (sequence is synthesized)
gggacagaggctgtgtctactgaatgcacacagagcccctctgtgcctgctcctgggcactgtcatcgtggggccctgcctccctgagctcctggggtgacaaggggcaggaccaggcca

SEQ ID NO: 168415 - DNA, 120 bp, Artificial Sequence
  ENSG00000108622_15 (sequence is synthesized)
gccaaatccagaagtcatttcccaacatagctgagtcaccagagcaccccatgtcccatgccaagtagtggggtcaccatcaggggagctgagcctgtccatctcatggcaagaaggttg

SEQ ID NO: 168416 - DNA, 120 bp, Artificial Sequence
  ENSG00000108622_16 (sequence is synthesized)
aagtgtcgcccagggtttttatcttcccctcagggcccacagcaaatgtgtggccatcacactccacctgcacatgagccatgaaaaccttccagatgggctgggataggacatcttggc

SEQ ID NO: 168417 - DNA, 120 bp, Artificial Sequence
  ENSG00000108622_17 (sequence is synthesized)
gctaagggtatcacctgggtccattccatcaccagtttcagtggatcaatgaacagaaaaacatcttaaatccaacatattttctcggggtgggaggtggggtgagtggaagtgaagtat

SEQ ID NO: 168418 - DNA, 120 bp, Artificial Sequence
  ENSG00000108622_18 (sequence is synthesized)
tctaattcaaaagagaatccagggcaccccctcgggtggttgaatacgtgaggaatcgtggtggccatggccctgaccctggagaacctgggcaggtctggctctggcctctgcctccta

SEQ ID NO: 168419 - DNA, 120 bp, Artificial Sequence
  ENSG00000108622_19 (sequence is synthesized)
agtgatgaacttcacagctcagttcctccagtgcccagttccagtgagcaatgcccatctaagtctctctcaacgtgatcacccaactgtttaatgtttgaaatttatatttcatttctg

SEQ ID NO: 168420 - DNA, 120 bp, Artificial Sequence
  ENSG00000108622_20 (sequence is synthesized)
atttggcacatgccagccgagagggtgggggtgccctgttccctgtggcttcaggtggaagagaagtcccaaaagttgctgaggttcttaggtttttttgttttgttttaagacagggtc

SEQ ID NO: 168421 - DNA, 120 bp, Artificial Sequence
  ENSG00000108622_21 (sequence is synthesized)
ggcatgagccaccatgcccagcctgctgaagctttttaaattttttatttttattataggcaggttcctgttctgttgcccaggctggagtgcagggtgtgatcatagctcactgcagcc

SEQ ID NO: 168422 - DNA, 120 bp, Artificial Sequence
  ENSG00000108622_22 (sequence is synthesized)
ctgcagcctccaactcctgggctcaacaatcctcctgccccagcctttgcactgctggcccccttcccctggatcactgcccccaagtatctgcagggcgtgccacgcccctgcatgcct

SEQ ID NO: 168423 - DNA, 120 bp, Artificial Sequence
  ENSG00000108622_23 (sequence is synthesized)
atctgcagggcgtgccacgcccctgcatgcctttgcccacagagtcaccatctgggtgaggccttcattgagcacagtatttaaagtggcctcacccccactccctgctccctttctcgg

SEQ ID NO: 168424 - DNA, 120 bp, Artificial Sequence
  ENSG00000108622_24 (sequence is synthesized)
tctccctccaggcagcccttggctggtccctgcgagcccgtggagactgccagagatgtcctctttcggttacaggaccctgactgtggccctcttcaccctgatctgctgtccagacag

SEQ ID NO: 168425 - DNA, 76 bp, Artificial Sequence
  ENSG00000108622_25 (sequence is synthesized)
tgactgtggccctcttcaccctgatctgctgtccagacagggtctcggtctcctccctgggctcgggtgatcctcc

SEQ ID NO: 168426 - DNA, 120 bp, Artificial Sequence
  ENSG00000108622_26 (sequence is synthesized)
cttgtccttgtagacacctggtcaccggaaaccatcatgtctgtaaaactaccacacagtccagcctccatcctcaactgctgccctcttcctctctgcactggagccggccaggccacc

SEQ ID NO: 168427 - DNA, 120 bp, Artificial Sequence
  ENSG00000108622_27 (sequence is synthesized)
tcctccccaaccgtggaacaccatgagcctccaaggcaggtcatcctgacactgcaacccactttggtggctgtgggcaagtccttcaccattgagtgcagggtgcccaccgtggagccc

SEQ ID NO: 168428 - DNA, 120 bp, Artificial Sequence
  ENSG00000108639_0 (sequence is synthesized)
gcgccgggcaggttcctctgcgttccgcggcggcggcagcggcggcgacggcgacatggagagcggggcctacggcgcggccaaggcgggcggctccttcgacctgcggcgcttcctgac

SEQ ID NO: 168429 - DNA, 120 bp, Artificial Sequence
  ENSG00000108639_1 (sequence is synthesized)
tgacgcagccgcaggtggtggcgcgcgccgtgtgcttggtcttcgccttgatcgtgttctcctgcatctatggtgagggctacagcaatgcccacgagtctaagcagatgtactgcgtgt

SEQ ID NO: 168430 - DNA, 120 bp, Artificial Sequence
  ENSG00000108639_2 (sequence is synthesized)
tcaaccgcaacgaggatgcctgccgctatggcagtgccatcggggtgctggccttcctggcctcggccttcttcttggtggtcgacgcgtatttcccccagatcagcaacgccactgacc

SEQ ID NO: 168431 - DNA, 120 bp, Artificial Sequence
  ENSG00000108639_3 (sequence is synthesized)
gcaagtacctggtcattggtgacctgctcttctcagctctctggaccttcctgtggtttgttggtttctgcttcctcaccaaccagtgggcagtcaccaacccgaaggacgtgctggtgg

SEQ ID NO: 168432 - DNA, 120 bp, Artificial Sequence
  ENSG00000108639_4 (sequence is synthesized)
gggccgactctgtgagggcagccatcaccttcagcttcttttccatcttctcctggggtgtgctggcctccctggcctaccagcgctacaaggctggcgtggacgacttcatccagaatt

SEQ ID NO: 168433 - DNA, 120 bp, Artificial Sequence
  ENSG00000108639_5 (sequence is synthesized)
acgttgaccccactccggaccccaacactgcctacgcctcctacccaggtgcatctgtggacaactaccaacagccacccttcacccagaacgcggagaccaccgagggctaccagccgc

SEQ ID NO: 168434 - DNA, 120 bp, Artificial Sequence
  ENSG00000108639_6 (sequence is synthesized)
cccctgtgtactgagcggcggttagcgtgggaagggggacagagagggccctcccctctgccctggactttcccatgagcctcctggaactgccagcccctctctttcacctgttccatc

SEQ ID NO: 168435 - DNA, 120 bp, Artificial Sequence
  ENSG00000108639_7 (sequence is synthesized)
ctgtgcagctgacacacagctaaggagcctcatagcctggcgggggctggcagagccacaccccaagtgcctgtgcccagagggcttcagtcagccgctcactcctccagggcactttta

SEQ ID NO: 168436 - DNA, 120 bp, Artificial Sequence
  ENSG00000108639_8 (sequence is synthesized)
ggaaagggtttttagctagtgtttttcctcgcttttaatgacctcagccccgcctgcagtggctagaagccagcaggtgcccatgtgctactgacaagtgcctcagcttccccccggccc

SEQ ID NO: 168437 - DNA, 120 bp, Artificial Sequence
  ENSG00000108639_9 (sequence is synthesized)
actcgtgggggccatcacacctgccctgtgcagcggagccggaccaggctcttgtgtcctcactcaggtttgcttcccctgtgcccactgctgtatgatctgggggccaccaccctgtgc

SEQ ID NO: 168438 - DNA, 120 bp, Artificial Sequence
  ENSG00000108639_10 (sequence is synthesized)
cggtggcctctgggctgcctcccgtggtgtgagggcggggctggtgctcatggcacttcctccttgctcccacccctggcagcagggaagggctttgcctgacaacacccagctttatgt

SEQ ID NO: 168439 - DNA, 120 bp, Artificial Sequence
  ENSG00000108639_11 (sequence is synthesized)
aaatattctgcagttgttacttaggaagcctggggagggcaggggtgccccatggctcccagactctgtctgtgccgagtgtattataaaatcgtgggggagatgcccggcctgggatgc

SEQ ID NO: 168440 - DNA, 120 bp, Artificial Sequence
  ENSG00000108639_12 (sequence is synthesized)
tgtttggagacggaataaatgttttctcattcagtctccagtcattggttgagccacagcctaggggttggaggaagactccactctgggtacacccttaggggctggctttatggaact

SEQ ID NO: 168441 - DNA, 120 bp, Artificial Sequence
  ENSG00000108639_13 (sequence is synthesized)
tgtagtttgaacaaggcagtggcaatccgccccctccagcctgcctggctggcccccttccctctgtctggggtcgcattccgcacaagcctttcatcaacatcttaaaatagtaactgt

SEQ ID NO: 168442 - DNA, 120 bp, Artificial Sequence
  ENSG00000108639_14 (sequence is synthesized)
gctcagcttgtaaacaagatgatttttctggcctgcagtgccagggtcctgctgctcccttcctagagtgggggtgggggtacctgggagttgtcggtgaatgcccctttcttgcactga

SEQ ID NO: 168443 - DNA, 120 bp, Artificial Sequence
  ENSG00000108639_15 (sequence is synthesized)
ataggggtaccataggtaagaccaggtttctaccttcctccagggtcagcacctctggagccttcctgggacacggccttggccgtccagcccacccctcggagataaggcccatctctg

SEQ ID NO: 168444 - DNA, 120 bp, Artificial Sequence
  ENSG00000108639_16 (sequence is synthesized)
gaagaggtcaaggccctaaagcaacttctggcttcttcttttgagcaatgacagagggagctgtcatcggcaagtcccgattgtttaaaaatccccagtacgaactaacagggcactgct

SEQ ID NO: 168445 - DNA, 120 bp, Artificial Sequence
  ENSG00000108639_17 (sequence is synthesized)
cccagcctcacccgatggctttggcttgggacacatcactagcgaaggggagagggaggctggggaggccctgggagtggtgaccctgcctgcacaggacacaccttaccccagcgatgc

SEQ ID NO: 168446 - DNA, 120 bp, Artificial Sequence
  ENSG00000108639_18 (sequence is synthesized)
ttgcccccaagtgagctgccaacagcccatctctgaggcacagctgagagatgtcttgactcctgaattaccaagagtttgtttcacaaacaaaacctgacctcacaggcccagcgggca

SEQ ID NO: 168447 - DNA, 120 bp, Artificial Sequence
  ENSG00000108639_19 (sequence is synthesized)
attaactctagggttccgcagctgggagggtctcggcctctctgggaggggcagggagcagctcactcctccagggcatttttaggaaagggttttcagctagtgtttttccgtgcttga

SEQ ID NO: 168448 - DNA, 120 bp, Artificial Sequence
  ENSG00000108639_20 (sequence is synthesized)
atggcaccagccctgcctggggtagctagaagctgagtggacctgcagcacacccgagcagatgggctttgcctctgccccttttgtcccctaggctgtctgctgtggcccaccctgcca

SEQ ID NO: 168449 - DNA, 120 bp, Artificial Sequence
  ENSG00000108639_21 (sequence is synthesized)
aggcccgagtgtgggggactttggaggtggctcccggcccggcttccaagtcctcccctccatagtgtggaggctcccccgggaggtccctgccctacctgcccgcgtcccctcccagag

SEQ ID NO: 168450 - DNA, 120 bp, Artificial Sequence
  ENSG00000108639_22 (sequence is synthesized)
gtcccacacctgctgaggtggagcaggcgtgggtggtggccttcaagtttagggaggtggtatggggctcttcccaaggggctggagctcccctacatccaccctgggtcctccaggtgt

SEQ ID NO: 168451 - DNA, 120 bp, Artificial Sequence
  ENSG00000108639_23 (sequence is synthesized)
ctgagttcagagctgtatccacaggcctgagttagtccccttgtagtgccctgtgcatgcagggccctctgtggggtgggagacagactgggagggaccaggatgccacagaggctgcaa

SEQ ID NO: 168452 - DNA, 120 bp, Artificial Sequence
  ENSG00000108639_24 (sequence is synthesized)
gtccttgtgtggagacagctggccaggctgaaccagggagggttccaggggttccaggaggtgaagacacaggggcgccagcatggccttcccaagagggcctgtccaccttcaccaagg

SEQ ID NO: 168453 - DNA, 120 bp, Artificial Sequence
  ENSG00000108639_25 (sequence is synthesized)
tgttcaggcagaggctgggtgctgtagaagtgacttgggctgaaggtgacgggggatgggtagtctttgtgacttggcctgtcttggttaaacctctttcaaggtgaggttgggctgggg

SEQ ID NO: 168454 - DNA, 120 bp, Artificial Sequence
  ENSG00000108639_26 (sequence is synthesized)
atggaaggactgcccttcatccatcaggtacctaagcagaatgattcctgcagcaggccgatggggcaggagcagcccctgcctaggaggtccctgcccattccccacccctccccggtc

SEQ ID NO: 168455 - DNA, 120 bp, Artificial Sequence
  ENSG00000108639_27 (sequence is synthesized)
caggattcccaggggcaggccccctggtgcctgcagattctcatcctggggtgcatcaggaagcactttgctcatcagctcacctccacaagtttggaggggctaagatgtcagcctcca

SEQ ID NO: 168456 - DNA, 120 bp, Artificial Sequence
  ENSG00000108639_28 (sequence is synthesized)
aacaagagcaagactccatctcaaacaacaacaaaaacccaaaaggggacagcagtagtgggagaggccagcatctgtacaccccatcagggtccccgctgtgtgtgcccctcaggcggc

SEQ ID NO: 168457 - DNA, 120 bp, Artificial Sequence
  ENSG00000108639_29 (sequence is synthesized)
cttctcctgggtaggatggccaggggccggttcttgggtcaagggtggtggagggtggggtcccccacccacctgtaccctgctgtgctccccctgcagggtgtgctggcctccctggcc

SEQ ID NO: 168458 - DNA, 120 bp, Artificial Sequence
  ENSG00000108639_30 (sequence is synthesized)
cggcgacggcgacatggagagcggggcctacggcgcggccaaggcgggcggctccttcgacctgcggcgcttcctgacgcagccgcaggtggtggcgcgcgccgtgtgcttgctctctgg

SEQ ID NO: 168459 - DNA, 120 bp, Artificial Sequence
  ENSG00000108639_31 (sequence is synthesized)
ggcggcgacggcgacatggagagcggggcctacggcgcggccaaggcgggcggctccttcgacctgcggcgcttcctgacgcagccgcaggtggtggcgcgcgccgtgtgcttggaggca

SEQ ID NO: 168460 - DNA, 120 bp, Artificial Sequence
  ENSG00000108641_0 (sequence is synthesized)
gcatgccacacgcgcactcgcgtggccttcgcgaaggtgtcgctgccaagaaacgtgtcctgcgcgctacgccgtctgtttctagggcaacgccggcgtctcttagcaaccgcgcgcggc

SEQ ID NO: 168461 - DNA, 120 bp, Artificial Sequence
  ENSG00000108641_1 (sequence is synthesized)
ctaggtgggtccccccggcacccccagacctgccatggcgaccgcgagtcctagcgtctttctactcatggtcaacgggcaggtggagagcgcccagtttccagagtatgatgacctcta

SEQ ID NO: 168462 - DNA, 120 bp, Artificial Sequence
  ENSG00000108641_2 (sequence is synthesized)
ctgcaagtactgctttgtgtacggccaggactgggcccccacagcgggtctggaggaggggatctcacagatcacatccaagagccaagatgtgcggcaagcactggtgtggaacttccc

SEQ ID NO: 168463 - DNA, 120 bp, Artificial Sequence
  ENSG00000108641_3 (sequence is synthesized)
cattgatgtcacctttaaaagcaccaacccctacggctggccacagatcgtgctcagcgtgtatggaccagatgtgttcgggaacgatgtggttcgaggctatggggccgtgcacgtgcc

SEQ ID NO: 168464 - DNA, 120 bp, Artificial Sequence
  ENSG00000108641_4 (sequence is synthesized)
ttacaagctggttcatggggcggcggcccgagtacacagaccccaaggtggtggctcagggtgaaggccgggaagtgacccgtgtccgttctcagggctttgtcaccctcctcttcaacg

SEQ ID NO: 168465 - DNA, 120 bp, Artificial Sequence
  ENSG00000108641_5 (sequence is synthesized)
tggtgaccaaggacatgaggaaactgggctatgacactgggccttctgatacacagggtgtgttggggcccagcccaccccagagcttcccccagtgaaggctccacaggctgcacagtc

SEQ ID NO: 168466 - DNA, 120 bp, Artificial Sequence
  ENSG00000108641_6 (sequence is synthesized)
tctgataatgaagggctgccttcccgaagtcagccgctgcccatcggcctgaggggcagcctggtggccagagctgggggcacacagaatagttttgtataataaagtctcattttcaga

SEQ ID NO: 168467 - DNA, 120 bp, Artificial Sequence
  ENSG00000108641_7 (sequence is synthesized)
gagcctaggcctggggctgccttctctcctgtttagcccctcccccacaggagctgggggctcttgggcctttcctggccccacctccagggctctccctgtccctaccccttgtgccgt

SEQ ID NO: 168468 - DNA, 120 bp, Artificial Sequence
  ENSG00000108641_8 (sequence is synthesized)
tgtcacctttaaaagcaccaacccctacggctgctgtgcagctggccttctggaagttcagagtgcatcagggctagtggccacgcctgtaaaagggccacagatcgtgctcagcgtgta

SEQ ID NO: 168469 - DNA, 120 bp, Artificial Sequence
  ENSG00000108641_9 (sequence is synthesized)
caagatgaaagcggcttgagtccctgagtcactgacttctgtgagaaacttccgcgggaagccgctgagacctggagatgtgttactgcagcgtaaccaagagcatcccacacacccttc

SEQ ID NO: 168470 - DNA, 120 bp, Artificial Sequence
  ENSG00000108641_10 (sequence is synthesized)
tttctctcctgtcccctgcactgaacgggcaccccctgccaccagtccctagcctcctagctctgagtcaagcttgtctgcttatccttgggtggacaccaggagccaggcacttgcaca

SEQ ID NO: 168471 - DNA, 120 bp, Artificial Sequence
  ENSG00000108641_11 (sequence is synthesized)
gagagcagagggctgcagggcagtcccagacctccctccaggctcgtctcaaggcctctccaacccttcccatcagggtctcccagccgcctctgcctcggccttgcctcttcccgtgac

SEQ ID NO: 168472 - DNA, 120 bp, Artificial Sequence
  ENSG00000108641_12 (sequence is synthesized)
cagagcacctcttccacctctgctgcctggagatgcacgtgtcctcccgccgctgccctcgtctggttggtggctctgaggcacaggccctctgtcggtcagctgttgcacagcaagcca

SEQ ID NO: 168473 - DNA, 120 bp, Artificial Sequence
  ENSG00000108641_13 (sequence is synthesized)
cctaagaaccagtggctccaacaggcccttcctctcaggaacacgcagttggctgggcagctccacgcactccctccctctgttgcctcagctgacaggcagtggcttcccagagcagct

SEQ ID NO: 168474 - DNA, 120 bp, Artificial Sequence
  ENSG00000108641_14 (sequence is synthesized)
cttctgcagcatggacacaagaggaggcagagcacaggaagcctctggggacccggcacactgtcacttccacctcatccaaagcagcctccaccagtgacaaggccgcattaagagggc

SEQ ID NO: 168475 - DNA, 120 bp, Artificial Sequence
  ENSG00000108641_15 (sequence is synthesized)
ggacacagaagggtaaagggcagtggctagcacttcccccagcacacccgtgcaggccaccagtctcagcacctcacaaaaggcacgcctcccaccccctttccctgaggttcaggggca

SEQ ID NO: 168476 - DNA, 120 bp, Artificial Sequence
  ENSG00000108641_16 (sequence is synthesized)
accaaatgcccagctcacgcgggcactaggaccaggctggtggcctcaataactgcagaccaagctccacaagaatcggctccctcatctcccacctctccagtggcacaggactgatga

SEQ ID NO: 168477 - DNA, 120 bp, Artificial Sequence
  ENSG00000108641_17 (sequence is synthesized)
agatggggtgggagaaggacacagccagaaaccgcatcatggtacaaatgataaattatatttatacagtaaataagtatcaacagtcaacacaagttcaaaaccagccaccggcctctg

SEQ ID NO: 168478 - DNA, 120 bp, Artificial Sequence
  ENSG00000108641_18 (sequence is synthesized)
ggactgagaaacagctgggtgacttcctccaccacggtgcccatcaggagggagcacgatggcacaggtgcaacatgcgtggcagtggccggtggcttcatgatcagtgcagtgggcaac

SEQ ID NO: 168479 - DNA, 120 bp, Artificial Sequence
  ENSG00000108641_19 (sequence is synthesized)
atggcctgtgccagaagatggggcagggggctgtcttcttgggtcccggtggcccagtggctgtcatgttggggcctcaaagtcacatcatgaaagactcgttacaaaagaatcactgac

SEQ ID NO: 168480 - DNA, 120 bp, Artificial Sequence
  ENSG00000108641_20 (sequence is synthesized)
cccaagtagtcgagtctagtctactgacctgtaaggctggcccaggccctgcaccgtctgaaggaaagcacctttctgggcaagcatcctgcctcccatcccattgcacctccccaccct

SEQ ID NO: 168481 - DNA, 120 bp, Artificial Sequence
  ENSG00000108641_21 (sequence is synthesized)
tcccccggcagacgagaccagccaccggcttacccaaatggcagcgggagcctaagacccagccgcaggcctgcagttctggcagaaggtggctggtcaggaactctagacacggctcct

SEQ ID NO: 168482 - DNA, 120 bp, Artificial Sequence
  ENSG00000108641_22 (sequence is synthesized)
gggactggagagggcggcctcaggaacagcatgagtgggtgcagtccccactcagagcctgcatgtcccagcagcccagagaccatttaagatctctcctgtgccggtgcgaagggtaat

SEQ ID NO: 168483 - DNA, 120 bp, Artificial Sequence
  ENSG00000108641_23 (sequence is synthesized)
cttctggaaccagagaggggctggcaggtggtcagctgcccttagagctagaggtgagaaattcccatggtggaaaaagggccagaaacatccaccaggcaagctgcccagacacaggat

SEQ ID NO: 168484 - DNA, 120 bp, Artificial Sequence
  ENSG00000108641_24 (sequence is synthesized)
tgggggaatgtcccctccctgggtaaaagcaagtcttttctggtctttaatgcacgacgtaatacttttacagtggtgggtgaggtgaggacagtaggagtttggaagagggaggtaata

SEQ ID NO: 168485 - DNA, 120 bp, Artificial Sequence
  ENSG00000108641_25 (sequence is synthesized)
ttagtgcatgtttgttaaaaatccctcccaggtgaatgacttttttcttcatctccaaaatacaagagaattatttttaggtctccaacttaaaaataatatctggagttagcaggtagg

SEQ ID NO: 168486 - DNA, 120 bp, Artificial Sequence
  ENSG00000108641_26 (sequence is synthesized)
tggatcagggccagccctggtcccttagccccccacccctgtcttagcctagggactgttgcccagggacccgtgggcacagaagcaccccccaccccacgccctcgggacaactgccat

SEQ ID NO: 168487 - DNA, 120 bp, Artificial Sequence
  ENSG00000108641_27 (sequence is synthesized)
ttccacattatccccatctttagcctgagcgtggattaagacagaggagatcacagacacacaaggttaaagatgtttcttccatttcagatttccattgtaaacagaagtcctgttaat

SEQ ID NO: 168488 - DNA, 120 bp, Artificial Sequence
  ENSG00000108641_28 (sequence is synthesized)
ccctgcatgcctttaataaaaaaaaggaattagttgataaaaattggtgagtcacattcatacattagatttttttctttaactttcaggatgttggtatattcgtaagaaaaatagcct

SEQ ID NO: 168489 - DNA, 120 bp, Artificial Sequence
  ENSG00000108641_29 (sequence is synthesized)
ctcaggatctagccaaaaaggctgaaagtcaatcagtttagtaattcaccaaaaacaggagctaaagaaaggaaaaggcaactggaggctaggattttttgttgctgttgtttttttttt

SEQ ID NO: 168490 - DNA, 120 bp, Artificial Sequence
  ENSG00000108641_30 (sequence is synthesized)
aaataaacatcatcatctatgtgtaatcaaattcccatattttcttcctataaagaatttgctttagtttttcaataaggcatttttttgtcatccaaacatctcttccttttaaaattt

SEQ ID NO: 168491 - DNA, 120 bp, Artificial Sequence
  ENSG00000108641_31 (sequence is synthesized)
tcttagagttaaaaccataaataagaggatttaaaccactaaaatgacacgtgccaacatcttcattcagccagacctggtaaattctatcaaaactagacagttaaataagaaccacgt

SEQ ID NO: 168492 - DNA, 120 bp, Artificial Sequence
  ENSG00000108641_32 (sequence is synthesized)
tataaaaatattagccaaaaaaagactattagataattctgcaaactcaaatatgaaactgtactaaacaaaatatgtgcaaaggtacacaagcatagagccacgttgggggttatgctc

SEQ ID NO: 168493 - DNA, 120 bp, Artificial Sequence
  ENSG00000108641_33 (sequence is synthesized)
agattagttttaaagctcgctctagtggatttaattcaagagttgtccacggtggtggtgtttactttgaactcacacgagtcaaagaaaaataaaatatgcacaaccacttccccaaaa

SEQ ID NO: 168494 - DNA, 120 bp, Artificial Sequence
  ENSG00000108641_34 (sequence is synthesized)
ggctcagggtgaaggccgggaagatgagaacgctgaggctgagattcccagatcaacctgggtctctctctgccccagcccagcctggctgatgctgcccttctgtccccagtgacccgt

SEQ ID NO: 168495 - DNA, 120 bp, Artificial Sequence
  ENSG00000108641_35 (sequence is synthesized)
gccaagttggactgcagctcgcggtttcctggcttctaggggtattgcaggcaccaatggaacaggttggggaggagagtttgggaccaagaacacccatgaacccttagaagccaccat

SEQ ID NO: 168496 - DNA, 120 bp, Artificial Sequence
  ENSG00000108641_36 (sequence is synthesized)
atcgctgtgtgtcagcatctgcagaaactaccttctcctccaacctgactgtcctgacctgaaggacagcctgcccaaggacttctagtacaccaggctctccactgggcccttgaactg

SEQ ID NO: 168497 - DNA, 120 bp, Artificial Sequence
  ENSG00000108641_37 (sequence is synthesized)
gtgatggttgatgggactcccctagtctgctcccaagctagaagctgcagaatgtgatgacctggggtccctgctcggagcctggcctcccgggagtctacacacctgtgaatcccttca

SEQ ID NO: 168498 - DNA, 120 bp, Artificial Sequence
  ENSG00000108641_38 (sequence is synthesized)
ccctctcttacccccatcccccatacaggttacagcctgggagtgggtgggcccagggttggggtgaatgccggggacctgccaggcacataggagctagcccacaaatgttcccagatg

SEQ ID NO: 168499 - DNA, 120 bp, Artificial Sequence
  ENSG00000108641_39 (sequence is synthesized)
agggcctggttggagcacagagggtttgtcatgtctgcctgtcccggcagcccctttacctcccagtgaggggcttgggtcaggcactgttgtccccattttacagatgagaacgctgag

SEQ ID NO: 168500 - DNA, 120 bp, Artificial Sequence
  ENSG00000108641_40 (sequence is synthesized)
gctgagattcccagatcaacctgggtctctctctgccccagcccagcctggctgatgctgcccttctgtccccagtgacccgtgtccgttctcagggctttgtcaccctcctcttcaacg

SEQ ID NO: 168501 - DNA, 120 bp, Artificial Sequence
  ENSG00000108641_41 (sequence is synthesized)
ctcacccagggcactggccttggtccacatcaaggggacctgaagcttccctgaagcctctagcctgtggtgtgcacgtacaagcctcaggccccatttgtccagcctgtcagcagctgg

SEQ ID NO: 168502 - DNA, 120 bp, Artificial Sequence
  ENSG00000108641_42 (sequence is synthesized)
gaaatactaagtcaccctcttctggttatgtttaattttccaatttttctcaacattactgaaatgtctaaatgtggaaaagttgacatcattttacagtgaacaccacatacccaccac

SEQ ID NO: 168503 - DNA, 120 bp, Artificial Sequence
  ENSG00000108641_43 (sequence is synthesized)
ctagattttaccattaccaatttcctgttccgtacttgtatattcacatatatccaactattcatccctgcttcaatccatcctatttttattgcatttcaaaataaactgtgaaatcag

SEQ ID NO: 168504 - DNA, 120 bp, Artificial Sequence
  ENSG00000108641_44 (sequence is synthesized)
atctagtggctgaatgtattttaaacactcggcttgctgagggcgtgagtcggagcgctgctccccaggactcagctctcattcgcctctgcgcttcggcggggacggggagccgggccg

SEQ ID NO: 168505 - DNA, 120 bp, Artificial Sequence
  ENSG00000108641_45 (sequence is synthesized)
tggactgcagctcgcggtttcctggcttctaggggcacctgacacaaggtctggcccttcacccacactgcagcagccgcccttgttaacgctgtccccgctccgcccagtccctgcggt

SEQ ID NO: 168506 - DNA, 120 bp, Artificial Sequence
  ENSG00000108641_46 (sequence is synthesized)
aggagagtttgggaccaagaacacccatgaacccttagaagccaccatagagtttccagagtatgatgacctctactgcaagtactgctttgtgtacggccaggactgggcccccacagc

SEQ ID NO: 168507 - DNA, 120 bp, Artificial Sequence
  ENSG00000108641_47 (sequence is synthesized)
ggttctgccactcaaagctgtgtggccttttctataccgcaacacattgttccttgaactaactgggcatggcaccctccttagaggcttggggttaagtagaatcacccgttcagccat

SEQ ID NO: 168508 - DNA, 120 bp, Artificial Sequence
  ENSG00000108641_48 (sequence is synthesized)
gcttctggccaccagcctcccttggcaaggacagaaccctgttattgggagctggaatggtgaggtaccccgggggatggcagaccctcagcctgcccactcccctctctgcccccctac

SEQ ID NO: 168509 - DNA, 120 bp, Artificial Sequence
  ENSG00000108641_49 (sequence is synthesized)
ccacagtccaaggatgggggctggaaacctctcagaggtgggaggccgctggctggggtccagctttctggcagccccttggcaggagaggaaggtgagccccctggctcaacaccctga

SEQ ID NO: 168510 - DNA, 120 bp, Artificial Sequence
  ENSG00000108641_50 (sequence is synthesized)
cctctgaggttgtccaggcccttctggaagcagagccccttcagcattactttgggaggccctgaccctgggcctccccaccttcacaagaacccctcgcacctcacgaggcagccccag

SEQ ID NO: 168511 - DNA, 120 bp, Artificial Sequence
  ENSG00000108641_51 (sequence is synthesized)
gccctctctgccctgccactgagctttcggcagacatggtgccccagcctagatactgccctcagcgggatccaagagaaaccacaggctcctggcaaacccccacctcccagcctcgcc

SEQ ID NO: 168512 - DNA, 120 bp, Artificial Sequence
  ENSG00000108641_52 (sequence is synthesized)
catgttgccctggactgtcgtcatggcacttgccctgagaccatctgggccgaccctcttctgccttttatctcacgagcactcccgtgccctccccccaactcactgtgcgttctgaaa

SEQ ID NO: 168513 - DNA, 120 bp, Artificial Sequence
  ENSG00000108641_53 (sequence is synthesized)
ctcatcgtctgttgtcagcaaaattcctgtgattccatcttctcggaataggaagttccctctgccttctggccttactgaagcccactcagtaccctgcagccctcttaagtggaatct

SEQ ID NO: 168514 - DNA, 120 bp, Artificial Sequence
  ENSG00000108641_54 (sequence is synthesized)
ttttcctcccactccccatgtgcggtgagcctagagcaggggtgtgtccttgcctcttcctcaacctcctcacttggaacagtctgtcttcacctctacccctcacagccaggcaggcat

SEQ ID NO: 168515 - DNA, 120 bp, Artificial Sequence
  ENSG00000108641_55 (sequence is synthesized)
atctcttgttactggtgaaggcactgcctccaaagtctggattgaggcatccctccctcaggccaggccctccctcatgtggcgcttccctgtgctcttcaaaccaccaggccctccaag

SEQ ID NO: 168516 - DNA, 120 bp, Artificial Sequence
  ENSG00000108641_56 (sequence is synthesized)
ctcctggcccagccccttttcgccaaccatcagcccctctttccttgctttcctcccagcccagtttagaactcttggtcatctgcatgcacttcccatagtgccctccatccttcgttt

SEQ ID NO: 168517 - DNA, 120 bp, Artificial Sequence
  ENSG00000108641_57 (sequence is synthesized)
atgctcacctggcaaggtctccaccctggtgacagccagctgttccttcgcctgccctgcacctgcctgagcccccagagccacaacggctcgcgttccatccatggcccaggtctgtgt

SEQ ID NO: 168518 - DNA, 120 bp, Artificial Sequence
  ENSG00000108641_58 (sequence is synthesized)
ttccctagacaactccctcatgcattctctgaggaaacttaacagcctttgtctcttcaggcctccagcaccctccctgccagcttagctaaggcgctcccttctgttcccacaaccacc

SEQ ID NO: 168519 - DNA, 120 bp, Artificial Sequence
  ENSG00000108641_59 (sequence is synthesized)
ccacattagctgccttccttaccctacctgaggacatgcctcaggtgtgtgggagatacagtgctctcaagggtctttcttctccccttctccctccatcgtgagttttcctacacgggc

SEQ ID NO: 168520 - DNA, 120 bp, Artificial Sequence
  ENSG00000108641_60 (sequence is synthesized)
tccttcacgccagcctccacatgtgccccacgtgtcatgggacgacacagagcaaaagcccagcaccctcagctgctcctgtcctctgccccattttatcacagctatcacagctccccg

SEQ ID NO: 168521 - DNA, 120 bp, Artificial Sequence
  ENSG00000108641_61 (sequence is synthesized)
tgcagaagtttacaagatctgcaagctgctccacccactgaggacaaatagaaacaggtcccctgggagtgctgagtcacggggctcccttcagccctgttccagcagcagaaggccggg

SEQ ID NO: 168522 - DNA, 120 bp, Artificial Sequence
  ENSG00000108641_62 (sequence is synthesized)
cgattttaccctgtgccctgtgaaaaatctttgtgtctgagggagcagaggaaaaactcttgtcagatgggaaaaatgctcatgacataatgtgacattaaaaggtgggaaacaagagga

SEQ ID NO: 168523 - DNA, 120 bp, Artificial Sequence
  ENSG00000108641_63 (sequence is synthesized)
gctcggggaactgcccggcctgagatgcccaggtctgggactgttaccttggctactggctcccgaagtccccttccgcccagggaattgtgtccgccatttgcttggtcccaggagctc

SEQ ID NO: 168524 - DNA, 120 bp, Artificial Sequence
  ENSG00000108641_64 (sequence is synthesized)
tgggaatgtgtcatccccggtagagggtgcccgtcacggccaaccacagagatcccggtcctccgggattctagagcgtccggccgaaccctccactgacttccggtggctgagcctctc

SEQ ID NO: 168525 - DNA, 120 bp, Artificial Sequence
  ENSG00000108641_65 (sequence is synthesized)
agtttgggaccaagaacacccatgaacccttagaagccaccatagaggtaaggactgaattgtaatcccatcagctggtgaccttaggcaagtctcggccctctctgagcctcagtctca

SEQ ID NO: 168526 - DNA, 120 bp, Artificial Sequence
  ENSG00000108641_66 (sequence is synthesized)
cttctgcaaaatgggagtagtgatctgttccccggtcctgcaggaaggaatctcgccaaggctgaaagtggggtgttgatctaaatcataactggttccaggcgcctatacacacacgtt

SEQ ID NO: 168527 - DNA, 120 bp, Artificial Sequence
  ENSG00000108641_67 (sequence is synthesized)
gacacacagacaacactcttaggtacaggtttacattcacaaagatttgcacaaacacacacagagatttgcacaagcacacacccagggcacaggtacacacaagctactgggacatac

SEQ ID NO: 168528 - DNA, 120 bp, Artificial Sequence
  ENSG00000108641_68 (sequence is synthesized)
atccccatgtttgtcccagaatctacgtctaaactgcagaagtttacaaggtgagttttgtacccataaccccagcccctcctgatctactggatgaatggatgtcccattctacccctc

SEQ ID NO: 168529 - DNA, 120 bp, Artificial Sequence
  ENSG00000108641_69 (sequence is synthesized)
gaaggcgagggtctgagggttggggctgtaaagacagccctttcatcaggaagctggagctgaaaagccctaatacccctaatccccaaactcttggatcccgtcccacagacgagagtc

SEQ ID NO: 168530 - DNA, 120 bp, Artificial Sequence
  ENSG00000108651_0 (sequence is synthesized)
gtctccgaacctgaaaccgggagcttcctgctcgtgttcgctgttgagaagctacccgcggggttgtagacctcggacctcatggcagagataattcaggaacgcatagaagatcggctc

SEQ ID NO: 168531 - DNA, 120 bp, Artificial Sequence
  ENSG00000108651_1 (sequence is synthesized)
ccggaattggaacagctggagcgcattggactgttcagtcatgcggagattaaggctatcattaagaaggcttccgatctagagtacaaaatccagagaagaacccttttcaaggaagac

SEQ ID NO: 168532 - DNA, 120 bp, Artificial Sequence
  ENSG00000108651_2 (sequence is synthesized)
tttatcaattatgttcaatatgaaattaatcttttggagctgatccagagaagaagaacacgcattggatattcatttaagaaggatgagattgagaattctattgtacaccgggtacaa

SEQ ID NO: 168533 - DNA, 120 bp, Artificial Sequence
  ENSG00000108651_3 (sequence is synthesized)
ggtgttttccagcgtgcctcagcaaaatggaaagacgatgttcaactttggctctcctatgtggctttttgtaagaagtgggctactaaaactcgacttagcaaggtattctctgccatg

SEQ ID NO: 168534 - DNA, 120 bp, Artificial Sequence
  ENSG00000108651_4 (sequence is synthesized)
ttggcgattcattccaacaaaccagctttgtggattatggcagccaaatgggaaatggaagatcgattgtcttcagaaagcgcaaggcaactatttcttcgcgcactgcgctttcatcca

SEQ ID NO: 168535 - DNA, 120 bp, Artificial Sequence
  ENSG00000108651_5 (sequence is synthesized)
gagtgcccaaaactttataaagaatactttaggatggagctgatgcatgctgaaaaactgaggaaggagaaggaagaatttgaaaaagccagtatggatgtggagaatcctgattattct

SEQ ID NO: 168536 - DNA, 120 bp, Artificial Sequence
  ENSG00000108651_6 (sequence is synthesized)
gaagaaatccttaagggcgagttggcatggatcatctacaaaaattctgtaagcataattaaaggtgcagaatttcacgtgtcactgctttcgattgcacagctatttgactttgccaaa

SEQ ID NO: 168537 - DNA, 120 bp, Artificial Sequence
  ENSG00000108651_7 (sequence is synthesized)
gatctacaaaaagagatttatgatgaccttcaggctctacacacagatgatcctctcacttgggattatgtggcaaggcgagaattagagattgagtcacagacagaagagcagcctaca

SEQ ID NO: 168538 - DNA, 120 bp, Artificial Sequence
  ENSG00000108651_8 (sequence is synthesized)
acgaaacaagccaaagcagtggaggtcggccggaaggaggagaggtgctgtgctgtgtatgaagaggcagtgaagactctgccaacagaggccatgtggaagtgttacatcaccttttgc

SEQ ID NO: 168539 - DNA, 120 bp, Artificial Sequence
  ENSG00000108651_9 (sequence is synthesized)
ttggaaagatttactaagaagtcaaatagtgggttccttagagggaagaggttggaaagaaccatgactgtattcaggaaggcacatgaactgaagcttctgtcagaatgccaatacaag

SEQ ID NO: 168540 - DNA, 120 bp, Artificial Sequence
  ENSG00000108651_10 (sequence is synthesized)
cagttgagtgtttcgttgctgtgttataacttcctgagggaagctctggaagtggcagtagctggaactgaattgtttagagactctgggacaatgtggcagctgaagctgcaggtgctg

SEQ ID NO: 168541 - DNA, 120 bp, Artificial Sequence
  ENSG00000108651_11 (sequence is synthesized)
atcgagtcaaagagccctgacatagccatgctttttgaagaagcctttgtgcacctgaaaccccaggtttgtctgccattgtggatttcctgggcagagtggagtgaaggtgccaaaagc

SEQ ID NO: 168542 - DNA, 120 bp, Artificial Sequence
  ENSG00000108651_12 (sequence is synthesized)
caagaagacactgaggcagtctttaagaaagctctcttagctgtcataggtgccgactcagtaaccctgaagaataagtacctggattgggcttatcgaagtggtggctacaaaaaggcc

SEQ ID NO: 168543 - DNA, 120 bp, Artificial Sequence
  ENSG00000108651_13 (sequence is synthesized)
agagctgtgtttaaaagtttacaggagagccgaccattttcagttgactttttcaggaaaatgattcagtttgaaaaggagcaagaatcctgcaatatggcgaacataagagaatattat

SEQ ID NO: 168544 - DNA, 120 bp, Artificial Sequence
  ENSG00000108651_14 (sequence is synthesized)
gagagagctttgagagagtttggatccgcagattctgatctttggatggattatatgaaagaagaattgaaccacccccttggtagacctgagaactgtggacagatctactggcgagcg

SEQ ID NO: 168545 - DNA, 120 bp, Artificial Sequence
  ENSG00000108651_15 (sequence is synthesized)
atgaaaatgttgcagggagagtcagcagaggcatttgtagctaaacatgctatgcatcagactggccatttatgaagatgaagaatacagtcagctttgtgaaatagtattgcaagcaag

SEQ ID NO: 168546 - DNA, 120 bp, Artificial Sequence
  ENSG00000108651_16 (sequence is synthesized)
ccccgtgggcaaatttgtattgagtccatctgtaatttgctcagtgatggcagacaagatggctgtctggttttgagacacactttaattttatgttaacttgttaaatctttttaaaaa

SEQ ID NO: 168547 - DNA, 90 bp, Artificial Sequence
  ENSG00000108651_17 (sequence is synthesized)
cactttaattttatgttaacttgttaaatctttttaaaaattaaaaaatttttatgattgagactgggtcttgctctgttgccctccttc

SEQ ID NO: 168548 - DNA, 120 bp, Artificial Sequence
  ENSG00000108651_18 (sequence is synthesized)
gtttgatgtgctaatctgattccagtaaagagaattgctgatttaatgttgaggcccgatcttccacaggtcctaaatgtttcccaaaatacatggatagcatacgactgggttttttta

SEQ ID NO: 168549 - DNA, 120 bp, Artificial Sequence
  ENSG00000108651_19 (sequence is synthesized)
tttttttaaaattatcccaggtcaagcatgagtatctctaatctcgacctaagagccagttaaaatgaaggagaaagtggccaggcatggtgactcaacgcctgtaatcccagcactttg

SEQ ID NO: 168550 - DNA, 81 bp, Artificial Sequence
  ENSG00000108651_20 (sequence is synthesized)
tactccatcctgggtaagaagagcgaaactccttctcaaggaaaaaaaaaaaggagaaagtacagttttgttggtttattc

SEQ ID NO: 168551 - DNA, 120 bp, Artificial Sequence
  ENSG00000108651_21 (sequence is synthesized)
aaaaaaaaaaaggagaaagtacagttttgttggtttattctcattataaaagatacgtggtatgcatttgttctggaaaatatggaggaaatagaatagtgtggtaaaaaaaagcatcct

SEQ ID NO: 168552 - DNA, 120 bp, Artificial Sequence
  ENSG00000108651_22 (sequence is synthesized)
gtcactgggagaagctttcagtgtagcttattgttacgtttcacttagtattgtttttctgtgtcattaaatagccttaaaaacatttaatgaattcgtaacattacattgtaaaaatga

SEQ ID NO: 168553 - DNA, 87 bp, Artificial Sequence
  ENSG00000108651_23 (sequence is synthesized)
aaacatttaatgaattcgtaacattacattgtaaaaatgagccataatatattttactaatcctctggttagactgtctccaggctg

SEQ ID NO: 168554 - DNA, 120 bp, Artificial Sequence
  ENSG00000108651_24 (sequence is synthesized)
tcccgggttcaagtggttctggctcagcctcccgagcagctgggtgggattacaggcacccgccaccgcgcccagccaatttttgtatttttagtagtgcgggggtttcatcatattggc

SEQ ID NO: 168555 - DNA, 80 bp, Artificial Sequence
  ENSG00000108651_25 (sequence is synthesized)
aagcctggcctggactgtcatttctaatttttttaaaaattagataaatgctgttgatgaagattcttgtcaatctttgt

SEQ ID NO: 168556 - DNA, 120 bp, Artificial Sequence
  ENSG00000108651_26 (sequence is synthesized)
tagataaatgctgttgatgaagattcttgtcaatctttgttcacatccctggccatttccttaggagattgacatccgacagtggaattactggatcaaaggatactgcttttagagaat

SEQ ID NO: 168557 - DNA, 120 bp, Artificial Sequence
  ENSG00000108651_27 (sequence is synthesized)
actgatatgtattgctggtttgctccttctttcaagcaatacatgaaagtgtcagtacccttacctgtactggtgtaattatatcttttatttttaccattttataggtgaaatgtgata

SEQ ID NO: 168558 - DNA, 120 bp, Artificial Sequence
  ENSG00000108651_28 (sequence is synthesized)
atgtgatatgtcattgttttaccatactttgatattagtgaagttagtgtattttatgtttctcatctttttacatccttagactatttaaaaattttttttcttactaatttatgagtt

SEQ ID NO: 168559 - DNA, 86 bp, Artificial Sequence
  ENSG00000108651_29 (sequence is synthesized)
taaaaattttttttcttactaatttatgagttaatttttttttttaaattggacaagttcttgctttgtcacctacagccttaact

SEQ ID NO: 168560 - DNA, 120 bp, Artificial Sequence
  ENSG00000108651_30 (sequence is synthesized)
gctgggactgcaggtgcacaccaccatgcctggttaatttaaatttttttttgtagagactggtcttgctatgttgccagggctggtctcttaaacagttgggctcaaacaatcctccta

SEQ ID NO: 168561 - DNA, 120 bp, Artificial Sequence
  ENSG00000108651_31 (sequence is synthesized)
aaagtgctggtattataggcatgagccattgtgcctggccagagtttttaaaaacatattcagaatattaatatcttgtttctcatttgttgcaaataattttacccccagccttgtttg

SEQ ID NO: 168562 - DNA, 120 bp, Artificial Sequence
  ENSG00000108651_32 (sequence is synthesized)
ttttttgagacagagtcttgctctgtggtccaggctggagtgcagtggtgtggtcttactgcaacctctgcctcctaggttcaaacagttctccctgccaaagcctcccaagtagctggg

SEQ ID NO: 168563 - DNA, 120 bp, Artificial Sequence
  ENSG00000108651_33 (sequence is synthesized)
ctcccaagtagctgggattataggcaccttttgtggcgatttttgatgcccagaggtattttgtgtgtgtatgtgtgatgtctgtttttaaaatgctttggaagctcttcctggtgctga

SEQ ID NO: 168564 - DNA, 120 bp, Artificial Sequence
  ENSG00000108651_34 (sequence is synthesized)
ggtgctgagaacaactctttttccccaagcagttaattttgccaacactatttgggcagttatgtttctctctgctgatttgtgatgttacctttattatatattaaatttctatgagta

SEQ ID NO: 168565 - DNA, 120 bp, Artificial Sequence
  ENSG00000108651_35 (sequence is synthesized)
caaaccaggtatggtgaaatctttgtcaatttttctatgttttatttagactcaagccattttggattttatttcgattgatgaatctaagagaaattattttgaggacttgagcttagg

SEQ ID NO: 168566 - DNA, 120 bp, Artificial Sequence
  ENSG00000108651_36 (sequence is synthesized)
ggcttctttgccttgtcttcctcttttctccatgttctttctgtctccttttcttgagatagatacctggtagtacttcctttctctcttcggggacttactcccttatggatggtgcct

SEQ ID NO: 168567 - DNA, 120 bp, Artificial Sequence
  ENSG00000108651_37 (sequence is synthesized)
tagaacatttgagggccaagctttagataaaatcccaaataagagaaagaatgtattggaagctgcactgttttctgagtcatttgtcaggataaaagagaaactgctatttaattcttt

SEQ ID NO: 168568 - DNA, 120 bp, Artificial Sequence
  ENSG00000108651_38 (sequence is synthesized)
ttttgagatggagtctcactcttgttgctcaggcaggagtgcaatggtgtgttcttggctcactgcaacctccacgcccggggttcaaacgattctcctgcctcagcccccgaagtagct

SEQ ID NO: 168569 - DNA, 120 bp, Artificial Sequence
  ENSG00000108651_39 (sequence is synthesized)
ctgaggcaggaggatcacttgaggtcagttgtttcaggccaggcagcaacgtagcaagatcctgtctctacaaaaaataaaaataaaaaaattatctgagtgtgatggaatgcacctcta

SEQ ID NO: 168570 - DNA, 120 bp, Artificial Sequence
  ENSG00000108651_40 (sequence is synthesized)
atggaatgcacctctaatcctagctactcaggaagctgaggcaaggggatcacttgagtgcaggaattcatggccgaaatgagctgtcatcaccagtgcactccagcttgggtgacagag

SEQ ID NO: 168571 - DNA, 120 bp, Artificial Sequence
  ENSG00000108651_41 (sequence is synthesized)
aggaatagtatccctgattgtgaaacttaagctcctgttcccattgccaaaatcaatattggggatgtctctgtaacatagtttacgatgagcctggccttttttttttttttttattgg

SEQ ID NO: 168572 - DNA, 83 bp, Artificial Sequence
  ENSG00000108651_42 (sequence is synthesized)
gtttacgatgagcctggccttttttttttttttttattgggaggcagagtcttgttctgtcaccctggctggagttcagtggc

SEQ ID NO: 168573 - DNA, 120 bp, Artificial Sequence
  ENSG00000108651_43 (sequence is synthesized)
attgatacataatattttacatatttatagggtacatgcgatgttttgttatatgctgttctctaactaacattttttaaactgggagtaggtttgtctgccattgtggatttcctgggc

SEQ ID NO: 168574 - DNA, 80 bp, Artificial Sequence
  ENSG00000108651_44 (sequence is synthesized)
tctaccccatgctcagccgctcatacccagattatttgaatcacagatagcatctgagggagtaatctgatacacttttt

SEQ ID NO: 168575 - DNA, 90 bp, Artificial Sequence
  ENSG00000108651_45 (sequence is synthesized)
cagagctgtgtttaaaagtttacaggagagccgaccattttcagttgactttttcaggaaaatgattcagtttgaaaaggagcaactctt

SEQ ID NO: 168576 - DNA, 120 bp, Artificial Sequence
  ENSG00000108651_46 (sequence is synthesized)
gtgcagtggtacaattatggctcactgtagcctcgacttcatgggctcaggtgattctcccatttcagcctcctgagtagctgggcatggacctctatgcctggctagtttttgtacttg

SEQ ID NO: 168577 - DNA, 120 bp, Artificial Sequence
  ENSG00000108654_0 (sequence is synthesized)
acctcattcatttctaccggtctctagtagtgcagcttcggctggtgtcatcggtgtccttcctccgctgccgcccccgcaaggcttcgccgtcatcgaggccatttccagcgacttgtc

SEQ ID NO: 168578 - DNA, 120 bp, Artificial Sequence
  ENSG00000108654_1 (sequence is synthesized)
gcacgcttttctatatacttcgttccccgccaaccgcaaccattgacgccatgtcgggttattcgagtgaccgagaccgcggccgggaccgagggtttggtgcacctcgatttggaggaa

SEQ ID NO: 168579 - DNA, 120 bp, Artificial Sequence
  ENSG00000108654_2 (sequence is synthesized)
gtagggcagggcccttatctggaaagaagtttggaaaccctggggagaaattagttaaaaagaagtggaatcttgatgagctgcctaaatttgagaagaatttttatcaagagcaccctg

SEQ ID NO: 168580 - DNA, 120 bp, Artificial Sequence
  ENSG00000108654_3 (sequence is synthesized)
atttggctaggcgcacagcacaagaggtggaaacatacagaagaagcaaggaaattacagttagaggtcacaactgcccgaagccagttctaaatttttatgaagccaatttccctgcaa

SEQ ID NO: 168581 - DNA, 120 bp, Artificial Sequence
  ENSG00000108654_4 (sequence is synthesized)
atgtcatggatgttattgcaagacagaatttcactgaacccactgctattcaagctcagggatggccagttgctctaagtggattggatatggttggagtggcacagactggatctggga

SEQ ID NO: 168582 - DNA, 120 bp, Artificial Sequence
  ENSG00000108654_5 (sequence is synthesized)
aaacattgtcttatttgcttcctgccattgtccacatcaatcatcagccattcctagagagaggcgatgggcctatttgtttggtgctggcaccaactcgggaactggcccaacaggtgc

SEQ ID NO: 168583 - DNA, 120 bp, Artificial Sequence
  ENSG00000108654_6 (sequence is synthesized)
agcaagtagctgctgaatattgtagagcatgtcgcttgaagtctacttgtatctacggtggtgctcctaagggaccacaaatacgtgatttggagagaggtgtggaaatctgtattgcaa

SEQ ID NO: 168584 - DNA, 120 bp, Artificial Sequence
  ENSG00000108654_7 (sequence is synthesized)
cacctggaagactgattgactttttagagtgtggaaaaaccaatctgagaagaacaacctaccttgtccttgatgaagcagatagaatgcttgatatgggctttgaaccccaaataagga

SEQ ID NO: 168585 - DNA, 120 bp, Artificial Sequence
  ENSG00000108654_8 (sequence is synthesized)
agattgtggatcaaataagacctgataggcaaactctaatgtggagtgcgacttggccaaaagaagtaagacagcttgctgaagatttcctgaaagactatattcatataaacattggtg

SEQ ID NO: 168586 - DNA, 120 bp, Artificial Sequence
  ENSG00000108654_9 (sequence is synthesized)
cacttgaactgagtgcaaaccacaacattcttcagattgtggatgtgtgtcatgacgtagaaaaggatgaaaaacttattcgtctaatggaagagatcatgagtgagaaggagaataaaa

SEQ ID NO: 168587 - DNA, 120 bp, Artificial Sequence
  ENSG00000108654_10 (sequence is synthesized)
ccattgtttttgtggaaaccaaaagaagatgtgatgagcttaccagaaaaatgaggagagatgggtggcctgccatgggtatccatggtgacaagagtcaacaagagcgtgactgggttc

SEQ ID NO: 168588 - DNA, 120 bp, Artificial Sequence
  ENSG00000108654_11 (sequence is synthesized)
taaatgaattcaaacatggaaaagctcctattctgattgctacagatgtggcctccagagggctagatgtggaagatgtgaaatttgtcatcaattatgactaccctaactcctcagagg

SEQ ID NO: 168589 - DNA, 120 bp, Artificial Sequence
  ENSG00000108654_12 (sequence is synthesized)
attatattcatcgaattggaagaactgctcgcagtaccaaaacaggcacagcatacactttctttacacctaataacataaagcaagtgagcgaccttatctctgtgcttcgtgaagcta

SEQ ID NO: 168590 - DNA, 120 bp, Artificial Sequence
  ENSG00000108654_13 (sequence is synthesized)
atcaagcaattaatcccaagttgcttcagttggtcgaagacagaggttcaggtcgttccaggggtagaggaggcatgaaggatgaccgtcgggacagatactctgcgggcaaaaggggtg

SEQ ID NO: 168591 - DNA, 120 bp, Artificial Sequence
  ENSG00000108654_14 (sequence is synthesized)
gatttaatacctttagagacagggaaaattatgacagaggttactctagcctgcttaaaagagattttggggcaaaaactcagaatggtgtttacagtgctgcaaattacaccaatggga

SEQ ID NO: 168592 - DNA, 120 bp, Artificial Sequence
  ENSG00000108654_15 (sequence is synthesized)
atagcactcagcaatacggaagtaatgttccaaatatgcacaatggtatgaaccaacaggcatatgcatatcctgctactgcagctgcacctatgattggttatccaatgccaacaggat

SEQ ID NO: 168593 - DNA, 120 bp, Artificial Sequence
  ENSG00000108654_16 (sequence is synthesized)
attcccaataagactttagaagtatatgtaaatgtctgtttttcataattgctctttatattgtgtgttatctgacaagatagttatttaagaaacatgggaattgcagaaatgactgca

SEQ ID NO: 168594 - DNA, 120 bp, Artificial Sequence
  ENSG00000108654_17 (sequence is synthesized)
gtgcagcagtaattatggtgcactttttcgctatttaagttggatatttctctacattcctgaaacaatttttaggttttttttgtactagaaaatgcaggcagtgttttcacaaaagta

SEQ ID NO: 168595 - DNA, 120 bp, Artificial Sequence
  ENSG00000108654_18 (sequence is synthesized)
aatgtacagtgatttgaaatacaataaatgaaggcaatgcatggccttccaataaaaaatatttgaagactgaattaagtggaaattgtactttattttatataatgtcatgtaaaactt

SEQ ID NO: 168596 - DNA, 120 bp, Artificial Sequence
  ENSG00000108654_19 (sequence is synthesized)
tttgtttttgtttggttttttttttccatgaaaacaaatgactgttcctttttatttaatttgggaggcagggggaatcagaaggcccttctttataatgagctattcatattgcaggag

SEQ ID NO: 168597 - DNA, 120 bp, Artificial Sequence
  ENSG00000108654_20 (sequence is synthesized)
aatgagctattcatattgcaggagtcagaatgaattgatacaggtgaatttttagttacaggctaaattgcataaaagctttgtcagcttccagcatcaggggagtcatttaatagcctt

SEQ ID NO: 168598 - DNA, 120 bp, Artificial Sequence
  ENSG00000108654_21 (sequence is synthesized)
tttccttatttgctagtatggttaaatgagaaaatagtaaaatagatacaaagtcatctatatagtgtgagaacgtgggtgactttttcaaagtttataatttaaaaagctccaaataac

SEQ ID NO: 168599 - DNA, 120 bp, Artificial Sequence
  ENSG00000108654_22 (sequence is synthesized)
tggctttttcaagagacttatactcatgctcttggctatactgtgaattactgaaatgttgaacaaacctgtgaaagacatacattagccctttaagatggccaggagctaagcttgagt

SEQ ID NO: 168600 - DNA, 120 bp, Artificial Sequence
  ENSG00000108654_23 (sequence is synthesized)
ctcctttactgaatttcgttcttagtgcaggttacttgtagattctagtcttcacaggctccctggggctcttaactagtcacactgggagtcatgaatgtctttccaataattcaggga

SEQ ID NO: 168601 - DNA, 120 bp, Artificial Sequence
  ENSG00000108654_24 (sequence is synthesized)
attctagagatcctcaaactgtaaggtctattcatactcaacacaaggaaaaaacctcattaaaattaatgactaatcaggaggcaacgtaaccaaaagcacagtgaatgaaagttttca

SEQ ID NO: 168602 - DNA, 120 bp, Artificial Sequence
  ENSG00000108654_25 (sequence is synthesized)
tggtaggttcaacatgggtttattgctagaaagatccaggggatagctttaggtttaacttcggctcaccaacgtaactttctaatcatttatttcagtaatagctagaagtgggtctga

SEQ ID NO: 168603 - DNA, 120 bp, Artificial Sequence
  ENSG00000108654_26 (sequence is synthesized)
atgttttcccagagtctgatacgtgtttttttttgccagaagagaggtcttcaggagacttcatttaaattctgattattaaactgaggctttaattgatgttaatgccttatgtcaaat

SEQ ID NO: 168604 - DNA, 120 bp, Artificial Sequence
  ENSG00000108654_27 (sequence is synthesized)
gtaaagttagaatttgctagggctgggatagggagtgatatttctaggacttagacattgaaaactaattcagcctgtagtaacctggatggttttcaatggcatggttagtcaaattca

SEQ ID NO: 168605 - DNA, 120 bp, Artificial Sequence
  ENSG00000108654_28 (sequence is synthesized)
tggttttaaacttagaagcagctttcgggggagagggtaggttggagcatttattacatattttactgtttaatgtcttaaccgtgggccttttaatttgtaaacactgaaatgattgtt

SEQ ID NO: 168606 - DNA, 120 bp, Artificial Sequence
  ENSG00000108654_29 (sequence is synthesized)
gggctgtggaaaacatttacctatttaccttggaagttttaaaagacagtccactttttagcatgtgtgttgtgtccagcctgtggtcgtcttaactaataaatgtgatttttctcccca

SEQ ID NO: 168607 - DNA, 120 bp, Artificial Sequence
  ENSG00000108654_30 (sequence is synthesized)
gggcataataaatcttaagaatgctgttcctttaaagaccaatacaaaagcaggtacgacctcagggcccatagtgcaagggcggagggcacacggacagcggctagacgccccacagaa

SEQ ID NO: 168608 - DNA, 120 bp, Artificial Sequence
  ENSG00000108654_31 (sequence is synthesized)
agacaagtccggggacgacccttctgaccgctctttttacagccaggacccaagtgtcctaccggcctcgccccagtgcctctctctctcccacagcatactgctgttccacggcctcga

SEQ ID NO: 168609 - DNA, 120 bp, Artificial Sequence
  ENSG00000108654_32 (sequence is synthesized)
agcgaagaggtggtgaagctgagagaccctatccagggaacccgccagcgcgacgcggcgtctgaaggtcacgagccccgccgacagcccagacccagtccgggctagcccgaggcctcc

SEQ ID NO: 168610 - DNA, 120 bp, Artificial Sequence
  ENSG00000108654_33 (sequence is synthesized)
ctggaggtggacggtttcagtccacacatactgggaccccagggagacactcaccagcatccgagcctgccatgtttcagaggcaggtcgccgccggactccgacgcggccgggaaggcg

SEQ ID NO: 168611 - DNA, 120 bp, Artificial Sequence
  ENSG00000108654_34 (sequence is synthesized)
cggacgttaaaagagcttctcgccgctgattggtcatcagaggagcacttcctttcacaggacgtgaaacgggggcggtttgggaagtttagagaccattctccgccgaccaaaacccgt

SEQ ID NO: 168612 - DNA, 120 bp, Artificial Sequence
  ENSG00000108654_35 (sequence is synthesized)
ttgtggatcaaataagagtaagtgtcctttgaaatatgtgatcaaactgaattgtgttttcactcttaagagtctgatactaatttttccccccaaaatccattagcctgataggcaaac

SEQ ID NO: 168613 - DNA, 120 bp, Artificial Sequence
  ENSG00000108654_36 (sequence is synthesized)
ctccgccgacgtcaacgggaaagtagtgcggaccgctctctcggtggtccggggtggtacagccacgtgacaacgccaggccccgccttccccctcttttggttacagacgtgagggctc

SEQ ID NO: 168614 - DNA, 120 bp, Artificial Sequence
  ENSG00000108654_37 (sequence is synthesized)
tttggagacgtaaacatctccgagtggcgagggtgggcggggctgggcttgggaaagggcggggtggcttgcttgaggtgtggaaagaccagaagaagtgcagcttcggctggtgtcatc

SEQ ID NO: 168615 - DNA, 120 bp, Artificial Sequence
  ENSG00000108654_38 (sequence is synthesized)
acgtagaaaaggatgaaaagtaagttttattaactctgttatatttgcttcctaacaactttgctgtaaaattgagggatcattgtttggtgagttgttttaggttatttcagttggtgt

SEQ ID NO: 168616 - DNA, 120 bp, Artificial Sequence
  ENSG00000108654_39 (sequence is synthesized)
gatttcatttagttagcctactaatcctgaaaatttcttgaatccttcaaataatggctgtcaccatttatagctttcctatagaaggaattcatgtgtcccctggttgacttaaggacc

SEQ ID NO: 168617 - DNA, 120 bp, Artificial Sequence
  ENSG00000108654_40 (sequence is synthesized)
aagggtcgaactgctcgataagtggattagcaggcgtttcctctttgacttccagccatgtaaattgaacttaatgttttgctgaccataaatgtgtggccctagcaatggtcttttaaa

SEQ ID NO: 168618 - DNA, 120 bp, Artificial Sequence
  ENSG00000108654_41 (sequence is synthesized)
ttcacataaaggtgctgtctttgtggcaaggcctaggcatgacaatcggaggactcgagggggatggaggactagtgatcggctggctgcttccagtcgattagagaggtgaaaaagctg

SEQ ID NO: 168619 - DNA, 120 bp, Artificial Sequence
  ENSG00000108654_42 (sequence is synthesized)
aacgtgtgccagtaatcttcaaaaggcagaacatatcacctctgccccgtaaactgttctctccgagggaaaaaatggaagttatcctcacagttcactgccgtggtatttcttctgtcc

SEQ ID NO: 168620 - DNA, 120 bp, Artificial Sequence
  ENSG00000108654_43 (sequence is synthesized)
catgctttgcatgactgccatggtacagccttgtttcaaactgttcactgtgatctgtgggtctttgagtttcagtgagtttgctgaaatgtcgaagaagtagttccaaacttcaatgtt

SEQ ID NO: 168621 - DNA, 120 bp, Artificial Sequence
  ENSG00000108654_44 (sequence is synthesized)
caatgaaatttttgttcaagtttgaaatggagagagcagctttaaaaggtactaagccttttacaaattggtgagtactggcacatgagatctagagcaggagcaacttctcacacatag

SEQ ID NO: 168622 - DNA, 120 bp, Artificial Sequence
  ENSG00000108654_45 (sequence is synthesized)
gtgaatcctggcttcttggaagcgcttgcctagacgagacacagtgcataaaaacaacttttgggggacaggtcctcaaaatgagcacatgaagaggttgctgtgaaactttaagtggcc

SEQ ID NO: 168623 - DNA, 120 bp, Artificial Sequence
  ENSG00000108654_46 (sequence is synthesized)
ttaccactaaagctgtttggttccaaaacggccatatgagtaacatcgtcgtgatgctcttcggttcatgtagccttgttattgctgatagtgaattgctaggctggtggggaagattac

SEQ ID NO: 168624 - DNA, 120 bp, Artificial Sequence
  ENSG00000108654_47 (sequence is synthesized)
agtaaccacaagaagtggtgtgtgccagaatcccaaattctggcatgtgggtgacaagtttccgacatgataaatccccggcttccgacatgataaatcccaggctgtttacatgaccta

SEQ ID NO: 168625 - DNA, 120 bp, Artificial Sequence
  ENSG00000108654_48 (sequence is synthesized)
atggcggcggcgcctttgttaccccgcccggcggaggagctcaaaatggcagcgtcgagaaaatgtggcgcagagagaaatgcgagacaaagggggaagcgccgccccagcgggaacgcc

SEQ ID NO: 168626 - DNA, 120 bp, Artificial Sequence
  ENSG00000108654_49 (sequence is synthesized)
acagctggccaaaccatgacaactggtttgtacgcagtccttgtgaaaaggatgaaagcgtcctagacaaccaaattaattcgctcttcaaaagcggtgctagacaaagcccatgactct

SEQ ID NO: 168627 - DNA, 120 bp, Artificial Sequence
  ENSG00000108654_50 (sequence is synthesized)
agagggcactgaagagaaaaaagcacaactattctacaggggcatattctactattctgcaggggcataataaatcttaagaatgctgttcctttaaagaccaatacaaaagcagcatac

SEQ ID NO: 168628 - DNA, 120 bp, Artificial Sequence
  ENSG00000108654_51 (sequence is synthesized)
caacttttgggggacaggtatgttttcttgcagctgcggttgtaaggtcttggcaagacaagcagtgtggccagaattttgaacttctgatgaatgtgtaatgcaaaggaccttgtacat

SEQ ID NO: 168629 - DNA, 120 bp, Artificial Sequence
  ENSG00000108654_52 (sequence is synthesized)
ttttttgtttcaaggtcctcaaaatgagcacatgaagaggttgctgtgaaactttaagtggccctactgcgcagaagcattcagatgtcacttgatgatctgtaagggaacttgctgatt

SEQ ID NO: 168630 - DNA, 120 bp, Artificial Sequence
  ENSG00000108654_53 (sequence is synthesized)
tgggaatgtgcttagggaacacacattccttttgacagggtctgtcactgggtgggtgatgaattatacagatgacatgtgcttttttttcttttttcaacctcaatggtattcctacag

SEQ ID NO: 168631 - DNA, 120 bp, Artificial Sequence
  ENSG00000108654_54 (sequence is synthesized)
gaaatggataaccattttaactgtattttttgcagcccgtaccttcttgggaatacaattgtctaactttttatttttggtctggctgttgtggtgtgcaaaactccgtacattgctatt

SEQ ID NO: 168632 - DNA, 120 bp, Artificial Sequence
  ENSG00000108654_55 (sequence is synthesized)
gactcctcccccggtagtcgccggctcctccttttcttttttcctgcgttatataattttgattcgttgatccggagctctaccgcggcgttcccccagctgggtttgctagcagaagtg

SEQ ID NO: 168633 - DNA, 120 bp, Artificial Sequence
  ENSG00000108654_56 (sequence is synthesized)
tcctttcccgaaggcttgcgccattttgatattcacgtcacagtgattggaagagatttgacggtgtagtgtcttcaagcttgctttttgtgtggggattggggagctgtcggggcggct

SEQ ID NO: 168634 - DNA, 120 bp, Artificial Sequence
  ENSG00000108654_57 (sequence is synthesized)
aaataactcaattttggtagagttacatgttctgacttcataattgggaaaggtgtgactcacttttggatataggtggctttgggatttttacttaaattaggttgagtataacaataa

SEQ ID NO: 168635 - DNA, 120 bp, Artificial Sequence
  ENSG00000108654_58 (sequence is synthesized)
attttttttttcataatagggtgttcataggtgggtccagattaaaatgaaggctactttaaactagttactaaattatgaagttaggggcttatcaattacgtatttagctaggggtgg

SEQ ID NO: 168636 - DNA, 120 bp, Artificial Sequence
  ENSG00000108654_59 (sequence is synthesized)
ttaatggaggctgcttcgcacttgcaatagtattggtcttgtgtttacccaattatcttgtgcaagtcagggtttctctggtgccggaaaaagtggtgattaaacttaggctgttaagaa

SEQ ID NO: 168637 - DNA, 120 bp, Artificial Sequence
  ENSG00000108654_60 (sequence is synthesized)
cagacgtgagggctctttggagacgtaaacatctccgagtggcgagggtgggcggggctgggcttgggaaagggcggggtggcttgcttgaggtgtggaaagaccagaagaaggtttggt

SEQ ID NO: 168638 - DNA, 120 bp, Artificial Sequence
  ENSG00000108654_61 (sequence is synthesized)
ggagctgttttgggtattggacaacacatgaagaaaggatctgctagtataataagttagcagtttaaaactagtatccaggtttgtgctgaaagctgtttctctttccttagtgtttgg

SEQ ID NO: 168639 - DNA, 120 bp, Artificial Sequence
  ENSG00000108654_62 (sequence is synthesized)
ttgatctgatatatgcaagaaaatgtaatggtaatttaaaaacgagtattttaatgtgatttctgtttgtccccactttcaccctaaatagtatttgcttcctgccattgtccacatcaa

SEQ ID NO: 168640 - DNA, 120 bp, Artificial Sequence
  ENSG00000108654_63 (sequence is synthesized)
tcatcagccattcctagagagaggcgatgggcctattgtaagtatatatttttaactttttattagaagcataatgtgtagattttagactacatagctaaagatgtaatcatttgtggt

SEQ ID NO: 168641 - DNA, 120 bp, Artificial Sequence
  ENSG00000108654_64 (sequence is synthesized)
attcgttgatccggagctctaccgcggcgttcccccagctgggtttgctagcagaagtgtttctgagaaaacccttgttctgttatcgctgactgtactgtttaggttcttaccactaaa

SEQ ID NO: 168642 - DNA, 120 bp, Artificial Sequence
  ENSG00000108654_65 (sequence is synthesized)
agctcctccattgaagcagattgattaaaacagcttaggaaagggcaaacttggatcacgagcagtggatttttttcatatctgatagtgaatttaactttttcatttctggcgaaatta

SEQ ID NO: 168643 - DNA, 120 bp, Artificial Sequence
  ENSG00000108654_66 (sequence is synthesized)
aagagatctgtgaccaaaagtggtcaagcactggagtctgaggttttcaatgtgagtttaataacacaacttgtcttttaacttaggtggcctgccatgggtatccatggtgacaagagt

SEQ ID NO: 168644 - DNA, 120 bp, Artificial Sequence
  ENSG00000108654_67 (sequence is synthesized)
caacaagagcgtgactgggttctaaatggtaaatatttcaaatgaagtatttttcccccttacttaacctagctagaattctgctcagataattgatcatgtatatgccttcctttgtag

SEQ ID NO: 168645 - DNA, 120 bp, Artificial Sequence
  ENSG00000108666_0 (sequence is synthesized)
ggcggagacacagggccgctcagaggccgccgcaatgctcccctctttgcaggagtcgatggatggagatgaaaaggaactagagagcagcgaagagggaggctcagccgaggagcggag

SEQ ID NO: 168646 - DNA, 120 bp, Artificial Sequence
  ENSG00000108666_1 (sequence is synthesized)
actcgagccgccgtccagcagccactactgtctttacagctatcgcggaagcagattggcacagcaacgaggggacagtgaggacggaagcccaagtggcacaaatgcagaaactccctc

SEQ ID NO: 168647 - DNA, 120 bp, Artificial Sequence
  ENSG00000108666_2 (sequence is synthesized)
tggtgatgatttcagcctctccttggcagatactaatctaccatccgaagtggagccagagctgcgcagtttcattgctaagcgtctttcaagaggtgcagtctttgaagggctgggtaa

SEQ ID NO: 168648 - DNA, 120 bp, Artificial Sequence
  ENSG00000108666_3 (sequence is synthesized)
tgttgcatctgtggagctaaaaattccaggttaccgagttggttgttattactgccttttccaaaatgaaaaactgcttcctgaaacagtaacgatagactctgaacgtaacccttcaga

SEQ ID NO: 168649 - DNA, 120 bp, Artificial Sequence
  ENSG00000108666_4 (sequence is synthesized)
atatgtggtctgttttttaggagggtctgaaaaaggacttgagcttttcaggcttgaattggacaagtacattcaagggctgaaaaataacatgaattgtgaggcaaggggcctggagag

SEQ ID NO: 168650 - DNA, 120 bp, Artificial Sequence
  ENSG00000108666_5 (sequence is synthesized)
tcacataaaatcctatctgagcagctggtttgaggatgttgtatgcccaatccaaagggttgttcttctctttcaggaaaagcttacctttctgctacatgctgctttgagttacactcc

SEQ ID NO: 168651 - DNA, 120 bp, Artificial Sequence
  ENSG00000108666_6 (sequence is synthesized)
tgttgaagttaaagaatcagatgaaaaaacaaagagagacattaacaggtttctgagtgtggccagtcttcaaggacttattcatgaaggcaccatgacttctttgtgcatggccatgac

SEQ ID NO: 168652 - DNA, 120 bp, Artificial Sequence
  ENSG00000108666_7 (sequence is synthesized)
agaggagcagcataagtctgtggtcatcgattgcagcagctcccagcctcagttctgcaatgcaggaagtaaccggttttgtgaggattggatgcaagcttttttaaatggtgccaaagg

SEQ ID NO: 168653 - DNA, 120 bp, Artificial Sequence
  ENSG00000108666_8 (sequence is synthesized)
aggtaacccttttcttttccgacaagtactggagaactttaaactaaaggccatacaagacacaaacaatttgaagagatttatccgacaggcagaaatgaatcattatgctttgtttaa

SEQ ID NO: 168654 - DNA, 120 bp, Artificial Sequence
  ENSG00000108666_9 (sequence is synthesized)
atgttacatgttcctaaagaactgtggtagtggagatatacttttgaagattgttaaagtggaacatgaagaaatgcctgaagccaaaaatgtgatagctgtccttgaagaattcatgaa

SEQ ID NO: 168655 - DNA, 120 bp, Artificial Sequence
  ENSG00000108666_10 (sequence is synthesized)
agaagctcttgaccaaagtttttgatcatatgttttgagataattgtatgatcaagttgtatatttaagtcttagtgtttgaaattgcagttataattgttcataggattgctatttaag

SEQ ID NO: 168656 - DNA, 120 bp, Artificial Sequence
  ENSG00000108666_11 (sequence is synthesized)
atgatttgaaactcaatccagattttctttttgtattttaccaatttaacttaaataaaaatctgaagaacatcttcactgagtcctagatagataatgtatgtgagagttgtgaaattt

SEQ ID NO: 168657 - DNA, 120 bp, Artificial Sequence
  ENSG00000108666_12 (sequence is synthesized)
tagtgtctcactggccccataaattccacgcttcaggaagttgttgcttaaaaaatttcagagatgattttgtttgtggcttttctcaggaaaagcctgagtttgctgcagtatttagca

SEQ ID NO: 168658 - DNA, 120 bp, Artificial Sequence
  ENSG00000108666_13 (sequence is synthesized)
acttttcttctcagaaaaaccataatacttccttttcagtggactgtagcttcttaaaaaaaaaaatgtaattctagtcttagaacagattaataccactacaccagttcagagatagat

SEQ ID NO: 168659 - DNA, 120 bp, Artificial Sequence
  ENSG00000108666_14 (sequence is synthesized)
ctgtgcatcctgtgggtgcttgatacatttttttgtctagttgataacggcatggatgataaagtcagattttaagtcaatatgcaaatcctgagtatgtagaaaattaaatgagcttta

SEQ ID NO: 168660 - DNA, 79 bp, Artificial Sequence
  ENSG00000108666_15 (sequence is synthesized)
tatgcaaatcctgagtatgtagaaaattaaatgagctttacaaatcgatgcactagcttcaagataaaatattatcttt

SEQ ID NO: 168661 - DNA, 67 bp, Artificial Sequence
  ENSG00000108666_16 (sequence is synthesized)
attatctctgagagaaagctactgcagaaatcgccttcagtcaccatttcatttatttgttcacagg

SEQ ID NO: 168662 - DNA, 120 bp, Artificial Sequence
  ENSG00000108666_17 (sequence is synthesized)
gaaacaaagtacatacagtttacaagcaaactgtaacataaggaatgcaaacagtttcttcctattagagttactcattgattttagttttttgtacatttgttacaagcctcagattgt

SEQ ID NO: 168663 - DNA, 120 bp, Artificial Sequence
  ENSG00000108666_18 (sequence is synthesized)
tttactctgaatcaattgaaagtgccctcagctagccatttacaattcccatggaagcctatgtagctacatacatacaattgcaatttgctcgggatagctctttaataaattcatttg

SEQ ID NO: 168664 - DNA, 120 bp, Artificial Sequence
  ENSG00000108666_19 (sequence is synthesized)
ataatgatttttgcttagaagaacagaagtcttgtgttctcacttccctgaggatgctcagaggagcacaaacccataaaactgaggaatcctctcttaaatggatctaaattcacatta

SEQ ID NO: 168665 - DNA, 120 bp, Artificial Sequence
  ENSG00000108666_20 (sequence is synthesized)
agtgctgagttttaactttcaaaatgactgacaatggccttctgctttctcctctacataagcctcgggacatgactcacatttcttttcttttaatgagaaatacaattcagaatcttc

SEQ ID NO: 168666 - DNA, 120 bp, Artificial Sequence
  ENSG00000108666_21 (sequence is synthesized)
ataaatgctttcatacggttttaaactttaataacttggaatgtaggcagtatagaaaaaaatctaagtagcatttttcatagtattaaagtgagagtggctgggcacgatggctcatgc

SEQ ID NO: 168667 - DNA, 120 bp, Artificial Sequence
  ENSG00000108666_22 (sequence is synthesized)
agcgagactctgtctcaaaaaaataaagtcagggtgactaaggaaaaccagcaattttatgacactgtccttgaatctgactgtcttttcccaatgtagttggttccccacttggaaatc

SEQ ID NO: 168668 - DNA, 120 bp, Artificial Sequence
  ENSG00000108666_23 (sequence is synthesized)
aatcattttttaaagtaagctacattagcacatcaacgttttaagtctgaaaaaatacttcattttcaaattcatgtcattcaagagtctatgttgtaaatggcatttaaaagcaaatgt

SEQ ID NO: 168669 - DNA, 120 bp, Artificial Sequence
  ENSG00000108666_24 (sequence is synthesized)
gttacctgcttcaaatcatttatggatataggcaaggtgtaattacatattctctgtgtggttgtatatatttttgtaatgtaggctcactacattacacagctctatatgatagtctta

SEQ ID NO: 168670 - DNA, 120 bp, Artificial Sequence
  ENSG00000108666_25 (sequence is synthesized)
cattacacagctctatatgatagtcttattttatctttttttttttttaatgaaatggggtctcactatgttgctcagactggtcttaaactcttggactcaagcaatcctcccaccttg

SEQ ID NO: 168671 - DNA, 70 bp, Artificial Sequence
  ENSG00000108666_26 (sequence is synthesized)
cctcccaccttggcctcccaaactgagccactgcacccggcctctggtagtcttattttaaaaaaagtaa

SEQ ID NO: 168672 - DNA, 67 bp, Artificial Sequence
  ENSG00000108666_27 (sequence is synthesized)
ctgacaaactctgtatcactactgtagacaaggaaaatggtgtcatggaactgaatatcttggtcat

SEQ ID NO: 168673 - DNA, 120 bp, Artificial Sequence
  ENSG00000108666_28 (sequence is synthesized)
acaaggaaaatggtgtcatggaactgaatatcttggtcatgagaagaaaccacagagttcatgactagaaacatgtactgtattcaaattttaataagctactatcttggcttttaaagt

SEQ ID NO: 168674 - DNA, 85 bp, Artificial Sequence
  ENSG00000108666_29 (sequence is synthesized)
ttttaaagttttaaaaaggatttgttcagacatggaatatatttgtgtatattacttgtgtgctgtacacacagaggaaatgtat

SEQ ID NO: 168675 - DNA, 120 bp, Artificial Sequence
  ENSG00000108666_30 (sequence is synthesized)
tgtatattacttgtgtgctgtacacacagaggaaatgtatgtttgtcatgtatgaagaatggcttcagtttctctgtaattaatttgtaattataataataaaacttagcttctcatcaa

SEQ ID NO: 168676 - DNA, 120 bp, Artificial Sequence
  ENSG00000108666_31 (sequence is synthesized)
gcagctcccagcctcagttctgcaatgcagaaatcctggatccaccaccgctgctgttcaccctctcccacccatcctgacccagacccagatgaaacaggccctaatgccagcccttca

SEQ ID NO: 168677 - DNA, 120 bp, Artificial Sequence
  ENSG00000108666_32 (sequence is synthesized)
ggtcacttcctgaataaccaatggcttggaaaaagaaaaaaaatatttaatggaatctgtgctcaaataatatgttacaacaaaaatatacagaatgtacacaatacaaaaatacttaga

SEQ ID NO: 168678 - DNA, 120 bp, Artificial Sequence
  ENSG00000108666_33 (sequence is synthesized)
ttccctgagtcaaaccgtcaattcctcctatcccctaggaacctcatcctgatttcctcattggctggttcattcaaggctggggcaaacaaatccacatactgatagtgtgcttggtga

SEQ ID NO: 168679 - DNA, 81 bp, Artificial Sequence
  ENSG00000108666_34 (sequence is synthesized)
tggggcaaacaaatccacatactgatagtgtgcttggtgattagccaaaaagaaatcctttttttttctttttccttttaa

SEQ ID NO: 168680 - DNA, 120 bp, Artificial Sequence
  ENSG00000108666_35 (sequence is synthesized)
ggtctgttttttaggagggtctgaaaaaggacttgagctatatcctttctttggtttttgagaacatcaggaaggaaaacatgggaaggcaggtggaagaatattactaccaacctccaa

SEQ ID NO: 168681 - DNA, 120 bp, Artificial Sequence
  ENSG00000108666_36 (sequence is synthesized)
aaagcttttctactcctcgtgtatttagttgaatttcataccttcatgtggccattttgccttggcttgtttgcatttgcagctcacattatttgagagattttatatttcttgttgaga

SEQ ID NO: 168682 - DNA, 120 bp, Artificial Sequence
  ENSG00000108666_37 (sequence is synthesized)
ccagccaaggtctctggcctgaagggcgctcctcgcctcccgctgctcttcctggcccccgtcgtggacttattggcacagcaacgaggggacagtgaggacggaagcccaagtggcaca

SEQ ID NO: 168683 - DNA, 120 bp, Artificial Sequence
  ENSG00000108666_38 (sequence is synthesized)
tggccatgacagaggagcagcataagtctgtggtcatcgattgcagcagctcccagcctcagttctgcaatgcaggccatacaagacacaaacaatttgaagagatttatccgacaggca

SEQ ID NO: 168684 - DNA, 120 bp, Artificial Sequence
  ENSG00000108666_39 (sequence is synthesized)
cgcccccggcccgccgcccggccttgcaccccacccccggcccagcggcccggccgctcctaaaagccatcttctcctctcccagccaagattggcacagcaacgaggggacagtgagga

SEQ ID NO: 168685 - DNA, 120 bp, Artificial Sequence
  ENSG00000108666_40 (sequence is synthesized)
gtccgtttcagagtttttcgctttcgctggctgtgcttgcggagcactttgggtttcatttgtaaaggagccggagccccaggagtcgatggatggagatgaaaaggaactagagagcag

SEQ ID NO: 168686 - DNA, 120 bp, Artificial Sequence
  ENSG00000108666_41 (sequence is synthesized)
agaacagttttttcaaagagaaaagcttttccacagcaagattgacatctgtgtttgtaaactgctccttccatcccttccccaccagcccagtgcaaaataaatttgttttcatccttc

SEQ ID NO: 168687 - DNA, 120 bp, Artificial Sequence
  ENSG00000108669_0 (sequence is synthesized)
cggcgggacgcgagcggcgagccggagcgcggagcccggctcccgcaccatggaggaggacgacagctacgttcccagtgacctgacagcagaggagcgtcaagaactggagaacatccg

SEQ ID NO: 168688 - DNA, 120 bp, Artificial Sequence
  ENSG00000108669_1 (sequence is synthesized)
acggagaaaacaggagctgctggctgacattcagaggctgaaggatgagatagcagaagtagctaatgaaattgaaaacctgggatccacagaggaaaggaaaaacatgcagaggaacaa

SEQ ID NO: 168689 - DNA, 120 bp, Artificial Sequence
  ENSG00000108669_2 (sequence is synthesized)
acaggtagccatgggcaggaaaaaatttaatatggaccctaaaaaggggatccagttcttaatagagaacgacctcctgaagaacacttgtgaagacattgcccagttcttatataaagg

SEQ ID NO: 168690 - DNA, 120 bp, Artificial Sequence
  ENSG00000108669_3 (sequence is synthesized)
cgaagggctcaacaagacagccatcggcgactacctaggggagagagatgagtttaatatccaggttcttcatgcatttgtggagctgcatgagttcactgatcttaatctcgtccaggc

SEQ ID NO: 168691 - DNA, 120 bp, Artificial Sequence
  ENSG00000108669_4 (sequence is synthesized)
actacggcagttcctgtggagcttccggctacccggagaggcccagaagatcgaccggatgatggaggcgtttgcccagcgatattgtcagtgcaataatggcgtgttccagtccacgga

SEQ ID NO: 168692 - DNA, 120 bp, Artificial Sequence
  ENSG00000108669_5 (sequence is synthesized)
tacttgttacgtcctctcctttgccatcatcatgttgaacaccagtctgcacaaccccaatgtcaaagataagcccactgtggagaggttcattgccatgaaccgaggcatcaatgatgg

SEQ ID NO: 168693 - DNA, 120 bp, Artificial Sequence
  ENSG00000108669_6 (sequence is synthesized)
gggagacctgccggaggagctcctccggaatctctatgagagcataaaaaatgaaccctttaaaatcccagaagacgacgggaatgacctcactcacactttcttcaatccagaccgaga

SEQ ID NO: 168694 - DNA, 120 bp, Artificial Sequence
  ENSG00000108669_7 (sequence is synthesized)
aggctggctattgaaactcggtggcagggtaaagacttggaagagacgctggttcattctgactgacaactgcctttactactttgagtataccacggataaggagccccgtggaatcat

SEQ ID NO: 168695 - DNA, 120 bp, Artificial Sequence
  ENSG00000108669_8 (sequence is synthesized)
ccctttagagaatctgagtatccgggaagtggaggactccaaaaaaccaaactgctttgagctttatatccccgacaataaagaccaagttatcaaggcctgcaagaccgaggctgacgg

SEQ ID NO: 168696 - DNA, 120 bp, Artificial Sequence
  ENSG00000108669_9 (sequence is synthesized)
gcgggtggtggaggggaaccacactgtttaccggatctcagctccgacgcccgaggagaaggaggagtggattaagtgcattaaagcagccatcagcagggaccctttctacgaaatgct

SEQ ID NO: 168697 - DNA, 120 bp, Artificial Sequence
  ENSG00000108669_10 (sequence is synthesized)
cgcagcacggaaaaagaaggtctcctccacgaagcgacactgagcgtgcagccaagggcgttggtctgcgggggccttggagctcctgctcttctcccgcacctccatggatgcactgct

SEQ ID NO: 168698 - DNA, 120 bp, Artificial Sequence
  ENSG00000108669_11 (sequence is synthesized)
gccgagcagagcgtcctctgccaggccccgccctggattcctagagactagcttcagcttttgctattttttttaagtgggagaagggtgggcagttatcactggggaagagaggaccgg

SEQ ID NO: 168699 - DNA, 120 bp, Artificial Sequence
  ENSG00000108669_12 (sequence is synthesized)
ccacctgtccagcatgggctccagagccttcctctctcacagggcagagctcttgtcggcagggcagcctcctggccagtttctctgctcagtgttctggtagcagagctcagagccaac

SEQ ID NO: 168700 - DNA, 120 bp, Artificial Sequence
  ENSG00000108669_13 (sequence is synthesized)
ccataaatacatgtgtccatatattattatatgttaagagaaaaaggtggaaaggaagagaagccacatactataaagatctatttttttttttttaagagagaacgtagggctgttcag

SEQ ID NO: 168701 - DNA, 120 bp, Artificial Sequence
  ENSG00000108669_14 (sequence is synthesized)
gtgcattctgccctggctgcgctggggagcttctccctggagaagagcacctggggctgcggccaaggggcatcagcctgggcccgcggcagggcctggcctgcctctcctgtgctgtgg

SEQ ID NO: 168702 - DNA, 120 bp, Artificial Sequence
  ENSG00000108669_15 (sequence is synthesized)
gagctcgctgcctggtgcttgtctgggcgagatggacaggtgaggtcgaggacgcagagggcagaggcccagtggagcctcagacggcacagtcagagtcgggggcctgccctggccggg

SEQ ID NO: 168703 - DNA, 120 bp, Artificial Sequence
  ENSG00000108669_16 (sequence is synthesized)
gtcgcagtcggcagcagcgtgcagtccggcatctcccgcggatgcttttccatcccaagtgcctgcggagcgccgaggagaggagagagctgactggacgcttacgttattttcctcctt

SEQ ID NO: 168704 - DNA, 120 bp, Artificial Sequence
  ENSG00000108669_17 (sequence is synthesized)
cagaatccaagttcttgttgggctttaaagtagaaagtcagcattttccttgagctaaatacctaataaccaaaactgtgaggaaggttatcgggacagaggttccggataacctgtttc

SEQ ID NO: 168705 - DNA, 120 bp, Artificial Sequence
  ENSG00000108669_18 (sequence is synthesized)
attttgggttttcttcctcttccccagactccagtcctcgttctagaggaaggagtaggacttccccgatccccgtagggcttcagctttttctgcctcaaaaccagccctaactggact

SEQ ID NO: 168706 - DNA, 120 bp, Artificial Sequence
  ENSG00000108669_19 (sequence is synthesized)
actctggatgcattttgtggtgggccccctagaggggaagatgggcctttatctgctccgtggggtgcactggagtgaggggggtggccgggctgcctctcgcatctctgtcttcccctg

SEQ ID NO: 168707 - DNA, 120 bp, Artificial Sequence
  ENSG00000108669_20 (sequence is synthesized)
caggcgctgtgtgagctggccctgcccctcctcattacagtatgaagggagccgtgacacgcagcattttcctgccgttctctcagggactctcagggcagctcctgccactccgccagg

SEQ ID NO: 168708 - DNA, 120 bp, Artificial Sequence
  ENSG00000108669_21 (sequence is synthesized)
gccagcatgccagtccaggcagagcaggtggctggctgtctggccgtctcgccccgcccctccacaggaccctggaccagggcggtgcagggcgcagccctgaggaggcaggtggaggag

SEQ ID NO: 168709 - DNA, 120 bp, Artificial Sequence
  ENSG00000108669_22 (sequence is synthesized)
ctgcgggttttcacagggccgcgtcgccacggctcctctgatcctttagggttggcgagcatctctggaaatagcttttgcagaggagtggtgggaggaatagagggggacagtctgtca

SEQ ID NO: 168710 - DNA, 120 bp, Artificial Sequence
  ENSG00000108669_23 (sequence is synthesized)
cctccctccccgccactttgtgtagatcctacctggagggaatggctttaggcacttttgtgccagagcttgtgagggtgacagaagagggtccaggctggaaacctgaactttctgggt

SEQ ID NO: 168711 - DNA, 120 bp, Artificial Sequence
  ENSG00000108669_24 (sequence is synthesized)
gggagaaccaggtggtgcctgccgaggtctgggcgtgtttgggccggtgctggagcctgtccagctggcccgggccctggcctggttctcaagtgtttcctagacagagaggcacctggg

SEQ ID NO: 168712 - DNA, 120 bp, Artificial Sequence
  ENSG00000108669_25 (sequence is synthesized)
tgggtcagtattagtctatttatcagaggtgtaaataatctatgtatagtttttctccttttagattattttgtatttgtttaaaagaagttttgtcaaaatacaaaaatataaagaaat

SEQ ID NO: 168713 - DNA, 120 bp, Artificial Sequence
  ENSG00000108669_26 (sequence is synthesized)
gaaagttgttgacagggtttttaagaaataattattctaattgtttttgtttgtttgtttttgccttgtaaactagcgccaaggaactgcagcaaataaactccaactctgcccaagcca

SEQ ID NO: 168714 - DNA, 120 bp, Artificial Sequence
  ENSG00000108669_27 (sequence is synthesized)
agtttaaccctaatggctacacaggagagaagcggcatgaatagacgggtttcccagggtgcggacggtgctttcccagaaactcccgggctgtgagttcccagtgacctgacagcagag

SEQ ID NO: 168715 - DNA, 120 bp, Artificial Sequence
  ENSG00000108669_28 (sequence is synthesized)
ggcattcttgcagtgaaagcaggcattaggcttttgcttctgagggagagaggaaagcaagtgcagcctgtgcgcaaatgctggtggtgcctcccctcccccccgggaggccgggaatgg

SEQ ID NO: 168716 - DNA, 120 bp, Artificial Sequence
  ENSG00000108669_29 (sequence is synthesized)
gggatagtaggaggggctggctgtgactgcattcatggaaatgagcctggaggagcggagcagcacacactcggagcgtctgctagggctgcagctctgcgcgtccatctctgcgctctg

SEQ ID NO: 168717 - DNA, 120 bp, Artificial Sequence
  ENSG00000108669_30 (sequence is synthesized)
cgccagccttccccaccgggcccagcgagtttccacctgcagggccggtgctctcagcttttgttttctctggacaccttcttctctacccctgctgtgctggcgcacacatgctgtcct

SEQ ID NO: 168718 - DNA, 120 bp, Artificial Sequence
  ENSG00000108669_31 (sequence is synthesized)
tgctccggctctccctgcacctacagctgtgggagctcccggcagcctggtactgtggggtcgctgcacggagccaccatggcctctgacgtggagagctgtgacctgccgaggctttga

SEQ ID NO: 168719 - DNA, 120 bp, Artificial Sequence
  ENSG00000108669_32 (sequence is synthesized)
aactgggtggtggcactgactgggagtgccgcttctttggaggctggaggttgattggcccaggcgtgcagccagccattgcctgtctgttcaggaagcagctctgagctgccctagtgg

SEQ ID NO: 168720 - DNA, 120 bp, Artificial Sequence
  ENSG00000108669_33 (sequence is synthesized)
ctggacagcttcacaggtatccccggcccctcccagtcagaccccacaggaaaacttggctcccagtaagttaccgctctcctggaagcacagaacggacttttcgtgtcccgctgtaag

SEQ ID NO: 168721 - DNA, 120 bp, Artificial Sequence
  ENSG00000108669_34 (sequence is synthesized)
taggagagtggcatggtggtttcaccaacgtaagaaccacagtgacagttccatttgtatgaaagggtgtcctttgcagagtgtctcctcaagacacttttgacctgccctcactacagc

SEQ ID NO: 168722 - DNA, 120 bp, Artificial Sequence
  ENSG00000108669_35 (sequence is synthesized)
tgttgataatcagtcacctttcctctacagctgaggagatgcagtgtcagagaggttgagtggcttgtccaggttcacccagttggtcggttgtcggagctggagatagcctgcaagact

SEQ ID NO: 168723 - DNA, 120 bp, Artificial Sequence
  ENSG00000108669_36 (sequence is synthesized)
cctgtctcctgagtagtcctctctgctgtgtttgcccttgcggagcagagtggatgaggagaggcaatgagaatgtgggcttcaggcgaagctcggcccacgccctggctctggctctgc

SEQ ID NO: 168724 - DNA, 120 bp, Artificial Sequence
  ENSG00000108669_37 (sequence is synthesized)
cgcttactggctgaatgatttgagacaagagagttccggttccttgaacttcagtttcttcatctgtcagatcatgaaaacacctgctacacagttggaaggacttagcatgaaagacag

SEQ ID NO: 168725 - DNA, 120 bp, Artificial Sequence
  ENSG00000108669_38 (sequence is synthesized)
cataatttctggtccctatagatgtacttagtgatagcaattttacaattacaatttttccaagttcctttttgtaactatcaagcttgtaggaaataagtctagaagccaatagttgga

SEQ ID NO: 168726 - DNA, 120 bp, Artificial Sequence
  ENSG00000108669_39 (sequence is synthesized)
ttattttcgccctaagacagcaaatgttattctttcagaattcttcacaagacattaggagtggggttaaggagggaatcctgttgcccaaagtagcaaaatgaggaaagacttgacttt

SEQ ID NO: 168727 - DNA, 120 bp, Artificial Sequence
  ENSG00000108669_40 (sequence is synthesized)
agcacctcttcagctagttctggagtgggtgtgctgccctggatctcaaaggtgcagagcttggcctgccttctgctcctcctcactgctctccttggctgcccctgccataggtctcgt

SEQ ID NO: 168728 - DNA, 120 bp, Artificial Sequence
  ENSG00000108669_41 (sequence is synthesized)
ctttcttcctcctacagttctgccccctgcatgggcaggagataggggacggtccaagagcagcctcatgagagcagccaagacagagaagaagaagcctgccctcctaacacactgagt

SEQ ID NO: 168729 - DNA, 120 bp, Artificial Sequence
  ENSG00000108669_42 (sequence is synthesized)
ttatggattcattggcatcgcccccactgacttcatatgctctccttagagtgtacccagctcccccaccacgcttcatgcacctgttgctccaccgcgcctcccagcgtgagcgccgcc

SEQ ID NO: 168730 - DNA, 120 bp, Artificial Sequence
  ENSG00000108669_43 (sequence is synthesized)
cgcccctccccctgtggcatcgtggtgtcctttgactgtgctggctggcgagttccctgtcctccctcactggtctttcaaaacagttttggctggttttgtacatgtgtctttcatatg

SEQ ID NO: 168731 - DNA, 120 bp, Artificial Sequence
  ENSG00000108669_44 (sequence is synthesized)
gtttttacttctatagtcagaaaaactaagcatttttcaaagtcacatttagaatcattcaatcctttcatgagcgtgagtgccaagttctcctgtgggcttgctggactcctctgctct

SEQ ID NO: 168732 - DNA, 120 bp, Artificial Sequence
  ENSG00000108669_45 (sequence is synthesized)
gtcccggagcgggctggcctcagcctcgggatctgcagacaccccctttggcactctgcaggcacactgtcctcaaaccttcttgcacccagtgcgaggtgggaccattaggattatccc

SEQ ID NO: 168733 - DNA, 120 bp, Artificial Sequence
  ENSG00000108669_46 (sequence is synthesized)
catttcacagatgagggacactgaggcacagcaaagttgagtaagttgtccaaaaccccacagaggtggagctggtcctcaaacctgagcagtgtgactcatgcagctgcactggtaacc

SEQ ID NO: 168734 - DNA, 120 bp, Artificial Sequence
  ENSG00000108669_47 (sequence is synthesized)
accgtgcagcctcagctgtccttggccctagatactcctcccagtggaaacattggtgacaacaggagcaggaagatgatctggctggtggatgcctcctccccagtattgccagaaagg

SEQ ID NO: 168735 - DNA, 120 bp, Artificial Sequence
  ENSG00000108669_48 (sequence is synthesized)
ctttcgaggtcaagttcaggacgtgttttcctctcacgaagtgcttttcctggagttcccagcaccctcagttctagtgcccctgcgtgtgggtggtcccagcattcggttctgtagaat

SEQ ID NO: 168736 - DNA, 120 bp, Artificial Sequence
  ENSG00000108669_49 (sequence is synthesized)
caggtgtgttctctaatgctgggactttcttcacgctgtacccagaggtacagcagtagaactgcgtgtcagcggtaacagcggctgccatcgagtgtgtcggctaggcgctgagatgtg

SEQ ID NO: 168737 - DNA, 120 bp, Artificial Sequence
  ENSG00000108669_50 (sequence is synthesized)
ctctttgaatatgggatctctttttgactctccggaacccagggaggtggaggtggggcatctccagcttgcatgtgaggaagcgggagttgagaagcagcaggcagggccaggcagggc

SEQ ID NO: 168738 - DNA, 120 bp, Artificial Sequence
  ENSG00000108669_51 (sequence is synthesized)
cgggcctggggcctggtgtccgaccgcagcccagcccccctcatcgcctgacactctgcctctgcacacagggcagtgccacacgcacctctctgcagaaccccccagcttacccgaaag

SEQ ID NO: 168739 - DNA, 120 bp, Artificial Sequence
  ENSG00000108669_52 (sequence is synthesized)
ggttggcctacccaggaagccaagggagattcaccccaacacctccaaacatgaaagcaggtgtcccggccgccagattccctcgtgaaagcacttcaggtggtcagaccgcttcccagt

SEQ ID NO: 168740 - DNA, 120 bp, Artificial Sequence
  ENSG00000108669_53 (sequence is synthesized)
gagatcccatcgggacatgtttctagtgctcttcagttcctagcattccccggggagctgcggaagcattttctcatggacacactgtctcttgtgaataggttccaggtcagcccagga

SEQ ID NO: 168741 - DNA, 120 bp, Artificial Sequence
  ENSG00000108669_54 (sequence is synthesized)
gagccatagcagctgctggtgccaccgttcagcaggggtgagtgccctgcctgcagtcaggaggcttgtgcccgagctctggaacaaatcatcacttaggatacagcttccctggaaaga

SEQ ID NO: 168742 - DNA, 120 bp, Artificial Sequence
  ENSG00000108669_55 (sequence is synthesized)
aattaagtgtcaggacttttagaccataagttgcttgaaagtcgagaatggcagacatagggttgtggtgttgccagtccactgcaggtgctccagcccgcggcgcggcctgcgctgctg

SEQ ID NO: 168743 - DNA, 120 bp, Artificial Sequence
  ENSG00000108669_56 (sequence is synthesized)
tctttgaggctgtagcacaagcatgagctcgggccccctccctgtgcaccggagacccagccaggtccagccggtctgtccatggtgccccaccagcagcatcgtgctgggcagtgccgc

SEQ ID NO: 168744 - DNA, 120 bp, Artificial Sequence
  ENSG00000108669_57 (sequence is synthesized)
ctgcagagtcatggagccttagttactgagcaggtgcacgtggggggcttggaaggccccactgcattaccatgccagctatcacacaccccgtgccagaggactgcatgtgacacggct

SEQ ID NO: 168745 - DNA, 120 bp, Artificial Sequence
  ENSG00000108669_58 (sequence is synthesized)
tgattacgtggcactcgctgctgcaaagcaaagtcagatgtcatcatggaaactcaagcaccagtctttttctctgaattggaatatagctgtaagaatgtggtatgattctgttcctaa

SEQ ID NO: 168746 - DNA, 120 bp, Artificial Sequence
  ENSG00000108669_59 (sequence is synthesized)
atgtgaattgattattatgttgaaacaggtaaaaaccccaaaattttcttgtcacgtgttcctgtgtctctttcgaagtgtgtcaccttaggtcactgtgtggacacagcaagggtggag

SEQ ID NO: 168747 - DNA, 120 bp, Artificial Sequence
  ENSG00000108669_60 (sequence is synthesized)
cgggggcgcgggtggcgcggcgggacgcgagcggcgagccggagcgcggagcccggctcccgcaccatggaggaggacgacagctacgaggctgaaggatgagatagcagaagtagctaa

SEQ ID NO: 168748 - DNA, 120 bp, Artificial Sequence
  ENSG00000108669_61 (sequence is synthesized)
ttggtggctgcgagtgtactgagtaggaggcgagtccttcttggtgaaaaggctggagtgtccctcgtggaagtggagggcatgggatccctggaggaagggagcaaaggatactcctcc

SEQ ID NO: 168749 - DNA, 120 bp, Artificial Sequence
  ENSG00000108671_0 (sequence is synthesized)
gtgagagcggtaagatggcggcggcggcggtggtggagttccagagagcccagtctctactcagcaccgaccgggaggcctccatcgacatcctccactccatcgtgaagcgtgacattc

SEQ ID NO: 168750 - DNA, 120 bp, Artificial Sequence
  ENSG00000108671_1 (sequence is synthesized)
aggaaaacgatgaagaggcagtgcaagtcaaagagcagagcatcctggaactgggatctctcctggcaaagactggacaagctgcagagcttggaggactcctgaagtatgtacgaccct

SEQ ID NO: 168751 - DNA, 120 bp, Artificial Sequence
  ENSG00000108671_2 (sequence is synthesized)
tcttgaattccatcagcaaggctaaagcagctcgcctggtccgatctcttcttgatctgtttcttgatatggaagcagctacagggcaggaggtcgagctgtgtttagagtgcatcgaat

SEQ ID NO: 168752 - DNA, 120 bp, Artificial Sequence
  ENSG00000108671_3 (sequence is synthesized)
gggccaagtcagagaaaagaactttcttacgccaagctttggaggcaagactggtgtctttgtactttgataccaagaggtaccaggaagcattgcatttgggttctcagctgctgcggg

SEQ ID NO: 168753 - DNA, 120 bp, Artificial Sequence
  ENSG00000108671_4 (sequence is synthesized)
agttgaaaaagatggacgacaaagctcttttggtggaagtacagcttttagaaagcaaaacataccatgccctgagcaacctgccgaaagcccgagctgccttaacttctgctcgaacca

SEQ ID NO: 168754 - DNA, 120 bp, Artificial Sequence
  ENSG00000108671_5 (sequence is synthesized)
cagcaaatgccatctactgcccccctaaattgcaggccaccttggacatgcagtcgggtattatccatgcagcagaagagaaggactggaaaactgcgtactcatacttctatgaggcat

SEQ ID NO: 168755 - DNA, 120 bp, Artificial Sequence
  ENSG00000108671_6 (sequence is synthesized)
ttgagggttatgactccatcgacagccccaaggccatcacatctctgaagtacatgttgctgtgcaaaatcatgctcaacaccccagaagatgtccaggctttggtgagcgggaagcttg

SEQ ID NO: 168756 - DNA, 120 bp, Artificial Sequence
  ENSG00000108671_7 (sequence is synthesized)
cacttcggtatgcagggaggcagacagaagcattaaaatgcgtggctcaggctagcaagaacagatcactggcagattttgaaaaggctctgacagattaccgggcagagctccgggatg

SEQ ID NO: 168757 - DNA, 120 bp, Artificial Sequence
  ENSG00000108671_8 (sequence is synthesized)
acccaatcatcagcacacacttggccaagttgtatgataacttactagaacagaatctgatccgagtcattgagcctttttccagagtacagattgaacacatatctagtctcatcaaac

SEQ ID NO: 168758 - DNA, 120 bp, Artificial Sequence
  ENSG00000108671_9 (sequence is synthesized)
tctccaaggccgacgtggaaaggaaattatcacagatgattcttgacaagaaatttcatgggattttggaccagggggagggtgtcctgattattttcgatgaacccccagtagataaaa

SEQ ID NO: 168759 - DNA, 120 bp, Artificial Sequence
  ENSG00000108671_10 (sequence is synthesized)
cttacgaagctgctctggaaacaattcagaacatgagcaaagtagtggattccctctacaacaaagccaagaaactgacatagagttggatctgtagcggtcctttggagagtgtgtgtg

SEQ ID NO: 168760 - DNA, 120 bp, Artificial Sequence
  ENSG00000108671_11 (sequence is synthesized)
gcgggagagtgaaaccttgggggaaaatgctaggagattcttttttctttttgttctacttttcgctcggaaagtttttaaatcctcatttggtgcatctgtattccagccaataggtgt

SEQ ID NO: 168761 - DNA, 90 bp, Artificial Sequence
  ENSG00000108671_12 (sequence is synthesized)
aatcctcatttggtgcatctgtattccagccaataggtgtgccagttttcatgtaatctttactggcccaacttgggagtggggaaattg

SEQ ID NO: 168762 - DNA, 120 bp, Artificial Sequence
  ENSG00000108671_13 (sequence is synthesized)
agctgtgctctctgcctcctgggagagggccgcaaagccaggcaccccgccaaccactgggggtcctaatccacctgctgggcatcacctctcctcctcctcagaattgggtgtttgctg

SEQ ID NO: 168763 - DNA, 120 bp, Artificial Sequence
  ENSG00000108671_14 (sequence is synthesized)
accatcaaaagcaatgactttttattctgtttgtactgaaccaaaacaaacaactgtgtatagactgctgttttcttttttatttgaaatgaggcattttggtgttctttcccctaccat

SEQ ID NO: 168764 - DNA, 120 bp, Artificial Sequence
  ENSG00000108671_15 (sequence is synthesized)
acggcctgtctgcccttccctccccacattggctccagcagagtagccgaaggtcctgccgccgccgccaccaccaccaccactgcagcaacaacagcagcagcagcagcagcgcctgca

SEQ ID NO: 168765 - DNA, 120 bp, Artificial Sequence
  ENSG00000108671_16 (sequence is synthesized)
ctgacctgtgaaggaatggggatgaggccaggagctagtgtctaccacggccacacagggagcagtgtgggcccttagcccccaaggggcctgctatgcatgtggctttttttttttttt

SEQ ID NO: 168766 - DNA, 120 bp, Artificial Sequence
  ENSG00000108671_17 (sequence is synthesized)
taaacacagtaaactagattagtcgtcagtgttttaattgcccctcttctcctctcctgcattcctctcctctcttctttcctctctgtcccttctctttcccctctcaaccaggagacc

SEQ ID NO: 168767 - DNA, 120 bp, Artificial Sequence
  ENSG00000108671_18 (sequence is synthesized)
atcatgtctctctgccttcctcctctcccctccaggggagtcaggctgtctgtgaaagccatgagcttctctccctctcccactcctcctctcctactttcagatggatttattcctttt

SEQ ID NO: 168768 - DNA, 120 bp, Artificial Sequence
  ENSG00000108671_19 (sequence is synthesized)
ttaaacaatgaacatcggaaatgagactgtggggtgtggtttctctctctcttttttttttaattttctttgttgggtttttgagcaacctcatgtccccttcccagggagctttttaat

SEQ ID NO: 168769 - DNA, 120 bp, Artificial Sequence
  ENSG00000108671_20 (sequence is synthesized)
ttacctcttagaactcaagtggatgggaagtagagcactatgtgtcagtatgctttgttttctgacacgattacacagcgaggctttaatgccatttgggtaggtgagcttctgcacttc

SEQ ID NO: 168770 - DNA, 120 bp, Artificial Sequence
  ENSG00000108671_21 (sequence is synthesized)
tgttgtgctgaactgtattttcttctctcatctcctctttgtctttttctcttttcctctccttcctgccttcttctgctggcctccttttctctttctttaccttccttggattatcct

SEQ ID NO: 168771 - DNA, 120 bp, Artificial Sequence
  ENSG00000108671_22 (sequence is synthesized)
tccaggttttcataataaatttatattttgtaaaaggattttgttgtaccaggttttgcatcctcactgaatctgactggcttttattttcctctccaaaatcaggtttttgttctcaac

SEQ ID NO: 168772 - DNA, 120 bp, Artificial Sequence
  ENSG00000108671_23 (sequence is synthesized)
atctttccccatcatgtctagtcactgttttggttttggcaccatcagtatcaaatgtacaaacggttcttgctaaccaacaccaggtatatctgatgttcagatgagttccaataaaaa

SEQ ID NO: 168773 - DNA, 120 bp, Artificial Sequence
  ENSG00000108671_24 (sequence is synthesized)
taatttttttttttttcaaaaggtgtctttttcttgagtgctggagggcttccaagcaagtccagacagctctgtgtggccccacactagtctagctctcatctggccaaagctgttatc

SEQ ID NO: 168774 - DNA, 120 bp, Artificial Sequence
  ENSG00000108671_25 (sequence is synthesized)
tcatttgtgtaatgggagtccttaaggtaaatttggggtccaaacttggagggctttgggggcaagaaagttggtgtgtgagttctgaggttggaaatgagttcaggtgtcttcttccag

SEQ ID NO: 168775 - DNA, 120 bp, Artificial Sequence
  ENSG00000108671_26 (sequence is synthesized)
ggcagcatggtccagtgagcacatgtaagtttgggcagtagatcctctgagcctactttctcttctactcagtgaggatgctgcttccttggcaggtgattgtgatgtgaagcttagtaa

SEQ ID NO: 168776 - DNA, 120 bp, Artificial Sequence
  ENSG00000108671_27 (sequence is synthesized)
gtcatagacgtgcaggtgtctggagagtcctgacatgcagttgtggtttcgtttccttttggaatcttcaaaggcagcgattttcatattgcctcacaccctggcgggggcggggggctc

SEQ ID NO: 168777 - DNA, 120 bp, Artificial Sequence
  ENSG00000108671_28 (sequence is synthesized)
tgggaccactgggggacctgctaaatcctcttcagtctgagcagttcagccattgtcagttttagtattgtgtctctgtatttcacttgcagaaagagctttgcttctataaaggacttt

SEQ ID NO: 168778 - DNA, 120 bp, Artificial Sequence
  ENSG00000108671_29 (sequence is synthesized)
aaaaagtactccaaagagatctagttttggagtagaggggagatgttttctcaaacttagggcagtcctgagatgctcaggcagtagcccttttctcagttccctttgcgggtcttggtc

SEQ ID NO: 168779 - DNA, 120 bp, Artificial Sequence
  ENSG00000108671_30 (sequence is synthesized)
agatgatgccctctagacccgtgctgtccaatatgtagccgctagccatgtgcagctgtcaggcccttgcaacgtggctggttcgagctgtgatacactgcaagtgtaaacacaaaccag

SEQ ID NO: 168780 - DNA, 120 bp, Artificial Sequence
  ENSG00000108671_31 (sequence is synthesized)
acttcgaaggcttagtatgataacaaaagaaaaggagtgtaaaatatgtcaataacttttttatatatgtgttgaaatattttgggtattgggttaaataaaatatattattaaaattca

SEQ ID NO: 168781 - DNA, 120 bp, Artificial Sequence
  ENSG00000108671_32 (sequence is synthesized)
gtgagtgctggcttcaggaccccagggctgggcagctctgtcttctgcgtgtcgagactgaaaacctcctcctggtgtcctcatggcttcctgattgacactgctctgtcttctcttgca

SEQ ID NO: 168782 - DNA, 120 bp, Artificial Sequence
  ENSG00000108671_33 (sequence is synthesized)
gaattggctcaacaagtagtatgagaatgcacctgtatgtgggacttgcaagatgttggcatttgacttagtgtgttgaattttggtattccagacctgcacggagaaaggacaatgaca

SEQ ID NO: 168783 - DNA, 120 bp, Artificial Sequence
  ENSG00000108671_34 (sequence is synthesized)
agatcttgatactttatcattggggatactagagaaggagaggaagtgggcgtcaaggtgtatctttgaatgatattggtaaaaggtgtttcattttaaaagttctgatcttaggtcagt

SEQ ID NO: 168784 - DNA, 120 bp, Artificial Sequence
  ENSG00000108671_35 (sequence is synthesized)
gtcttttgttggagtgaagaatcatgggactgatccacaaactgaattcagctttattttcttggcaacttgttgagcttcagttttttagcaggcaattaagtggcctttaaactcact

SEQ ID NO: 168785 - DNA, 120 bp, Artificial Sequence
  ENSG00000108671_36 (sequence is synthesized)
tctttcctggtagtttagttttgcaaatgagagacaatcttatttttgttgggatatagtgatttctgatttgtttctggtttttgaattctcactgtattcccttacatagaggcagca

SEQ ID NO: 168786 - DNA, 120 bp, Artificial Sequence
  ENSG00000108671_37 (sequence is synthesized)
ctttgttacagggcatttgatactttgggtctgttccatgctttgctttgtaagtggagattgtcagtggtccctggaatcctcattacatcagggtcacaaactgattcttgtctttga

SEQ ID NO: 168787 - DNA, 120 bp, Artificial Sequence
  ENSG00000108671_38 (sequence is synthesized)
atgatattgggttggtatggaatgtgagtggaagagagggacgtttaagtacttcaaaacacacttttaaaaataattatagtttcaaaagaagttgcaaatgattccatgtatccttca

SEQ ID NO: 168788 - DNA, 120 bp, Artificial Sequence
  ENSG00000108671_39 (sequence is synthesized)
cctaggacagtattaaaaccaggaaatagttaagcactttgtacaatgaaacttactgagttgatataaaatatatattatttatacataatacctttctatttcaaaagttctttctgt

SEQ ID NO: 168789 - DNA, 120 bp, Artificial Sequence
  ENSG00000108671_40 (sequence is synthesized)
ttttttaaccatgttagaagttgttctcaactattgattataccttcatcactctgtggggtcttaacatttggtgtaatatgttaatgccgcaacctttttttgagacggattcttttt

SEQ ID NO: 168790 - DNA, 120 bp, Artificial Sequence
  ENSG00000108671_41 (sequence is synthesized)
actgtgcctggccttgatgcctcagtgttaatgaggtagaccttgttcagtgccttgttccaaacctagcagaatgaatcttgataaagcacagatataatagggtctaagggcaagaag

SEQ ID NO: 168791 - DNA, 120 bp, Artificial Sequence
  ENSG00000108671_42 (sequence is synthesized)
gagtttgggtggatgtggcgataacaagccttggaggaagggagaagaaatcacagttctcttgtcatttttccttttagcttgtcatctctagagaatgctatattagggtcggtctgt

SEQ ID NO: 168792 - DNA, 120 bp, Artificial Sequence
  ENSG00000108671_43 (sequence is synthesized)
ttggaaaatttctgtttcctagtattattaagtcatttcaggtttcaaagggaaacaggttggcatatagtggtattcagtacttgcggctcttcttcccgggcgtctgaagaagaacga

SEQ ID NO: 168793 - DNA, 120 bp, Artificial Sequence
  ENSG00000108671_44 (sequence is synthesized)
tggtggggcgggttcttccttttggcagaagttgtgtggacacagcatactgcttatgagacttgggtaaatgttagtgtgcagaataaatcgctttcatggtttgtctctttattctca

SEQ ID NO: 168794 - DNA, 120 bp, Artificial Sequence
  ENSG00000108671_45 (sequence is synthesized)
tcgaggagagagatgctgtgggtagaggcatgtgggttgcccctgcatgtgttctgagcagtttcctcctcgcttttagtcactgcatgtgttgtacctgttttctgtattgggtgtgtg

SEQ ID NO: 168795 - DNA, 120 bp, Artificial Sequence
  ENSG00000108671_46 (sequence is synthesized)
ggataagagtctgtttattgtgtgtagcagtgaagggcaggcagatgggcagagaacaagagacttaagcacggccaaggagggtcttacattagaattttgagaaatacagcagttctc

SEQ ID NO: 168796 - DNA, 120 bp, Artificial Sequence
  ENSG00000108671_47 (sequence is synthesized)
cccctgttccctcccttctcttattggaggcaaaagtaaaactttcagtgttggtgtctctctgcctttccttttagattgaacacatatctagtctcatcaaactctccaaggtaagga

SEQ ID NO: 168797 - DNA, 120 bp, Artificial Sequence
  ENSG00000108671_48 (sequence is synthesized)
gtcttaaggccatctgcagggaggaatgggacggggtggcgaggaggggtggcacatgcacctgattggcctcattggaaagctccccagcttctcagtggggaatgggcagtgtggact

SEQ ID NO: 168798 - DNA, 120 bp, Artificial Sequence
  ENSG00000108671_49 (sequence is synthesized)
agagtaggagttgcattgttgctattttgttttcagtccatttggcctaagacccctccaacaaagctactgtgtcagggtgatctctgactagtggatactggtccctttaatcatgtg

SEQ ID NO: 168799 - DNA, 120 bp, Artificial Sequence
  ENSG00000108671_50 (sequence is synthesized)
gcgcccggcggagagactacaactcccggagtgctctgggaacggagccacgggagctacaggcggagggacccgagggcgggctttccgggtgtgtgtttccggcgtcggcggccgcgg

SEQ ID NO: 168800 - DNA, 120 bp, Artificial Sequence
  ENSG00000108671_51 (sequence is synthesized)
ttcatggtaagtaacagtcacacaggcaagggggctggtggtggtgatgagatggttgaagaagtttattttcaaagaagatgttctatttgtttcccccgatggttcaccctggggtcc

SEQ ID NO: 168801 - DNA, 120 bp, Artificial Sequence
  ENSG00000108671_52 (sequence is synthesized)
tggcccctcttccctgtgatgagaatgtgtaataagcatgtgtacatggaatagggagatgaattctatttcccttcttttctggacacagtgagtcaactagggagtgggctgcttcac

SEQ ID NO: 168802 - DNA, 120 bp, Artificial Sequence
  ENSG00000108671_53 (sequence is synthesized)
gtttgccatggcagagatggcctgagcagggagtttggccagttacagaaacagcagcagctgcggcctctagggctggctaagcccagaagatgtccaggctttggtgagcgggaagct

SEQ ID NO: 168803 - DNA, 120 bp, Artificial Sequence
  ENSG00000108679_0 (sequence is synthesized)
atactgggagaggcttctgggtcaaaggaccagtctgcagagggatcctgtggctggaagcgaggaggctccacacggccgttgcagctaccgcagccaggatctgggcatccaggcacg

SEQ ID NO: 168804 - DNA, 120 bp, Artificial Sequence
  ENSG00000108679_1 (sequence is synthesized)
gccatgacccctccgaggctcttctgggtgtggctgctggttgcaggaacccaaggcgtgaacgatggtgacatgcggctggccgatgggggcgccaccaaccagggccgcgtggagatc

SEQ ID NO: 168805 - DNA, 120 bp, Artificial Sequence
  ENSG00000108679_2 (sequence is synthesized)
ttctacagaggccagtggggcactgtgtgtgacaacctgtgggacctgactgatgccagcgtcgtctgccgggccctgggcttcgagaacgccacccaggctctgggcagagctgccttc

SEQ ID NO: 168806 - DNA, 120 bp, Artificial Sequence
  ENSG00000108679_3 (sequence is synthesized)
gggcaaggatcaggccccatcatgctggatgaggtccagtgcacgggaaccgaggcctcactggccgactgcaagtccctgggctggctgaagagcaactgcaggcacgagagagacgct

SEQ ID NO: 168807 - DNA, 120 bp, Artificial Sequence
  ENSG00000108679_4 (sequence is synthesized)
ggtgtggtctgcaccaatgaaaccaggagcacccacaccctggacctctccagggagctctcggaggcccttggccagatctttgacagccagcggggctgcgacctgtccatcagcgtg

SEQ ID NO: 168808 - DNA, 120 bp, Artificial Sequence
  ENSG00000108679_5 (sequence is synthesized)
aatgtgcagggcgaggacgccctgggcttctgtggccacacggtcatcctgactgccaacctggaggcccaggccctgtggaaggagccgggcagcaatgtcaccatgagtgtggatgct

SEQ ID NO: 168809 - DNA, 120 bp, Artificial Sequence
  ENSG00000108679_6 (sequence is synthesized)
gagtgtgtgcccatggtcagggaccttctcaggtacttctactcccgaaggattgacatcaccctgtcgtcagtcaagtgcttccacaagctggcctctgcctatggggccaggcagctg

SEQ ID NO: 168810 - DNA, 120 bp, Artificial Sequence
  ENSG00000108679_7 (sequence is synthesized)
cagggctactgcgcaagcctctttgccatcctcctcccccaggacccctcgttccagatgcccctggacctgtatgcctatgcagtggccacaggggacgccctgctggagaagctctgc

SEQ ID NO: 168811 - DNA, 120 bp, Artificial Sequence
  ENSG00000108679_8 (sequence is synthesized)
ctacagttcctggcctggaacttcgaggccttgacgcaggccgaggcctggcccagtgtccccacagacctgctccaactgctgctgcccaggagcgacctggcggtgcccagcgagctg

SEQ ID NO: 168812 - DNA, 120 bp, Artificial Sequence
  ENSG00000108679_9 (sequence is synthesized)
gcctcccatgaggaggtggagggcttggtggagaagatccgcttccccatgatgctccctgaggagctctttgagctgcagttcaacctgtccctgtactggagccacgaggccctgttc

SEQ ID NO: 168813 - DNA, 120 bp, Artificial Sequence
  ENSG00000108679_10 (sequence is synthesized)
cagaagaagactctgcaggccctggaattccacactgtgcccttccagttgctggcccggtacaaaggcctgaacctcaccgaggatacctacaagccccggatttacacctcgcccacc

SEQ ID NO: 168814 - DNA, 120 bp, Artificial Sequence
  ENSG00000108679_11 (sequence is synthesized)
tggagtgcctttgtgacagacagttcctggagtgcacggaagtcacaactggtctatcagtccagacgggggcctttggtcaaatattcttctgattacttccaagccccctctgactac

SEQ ID NO: 168815 - DNA, 120 bp, Artificial Sequence
  ENSG00000108679_12 (sequence is synthesized)
agatactacccctaccagtccttccagactccacaacaccccagcttcctcttccaggacaagagggtgtcctggtccctggtctacctccccaccatccagagctgctggaactacggc

SEQ ID NO: 168816 - DNA, 120 bp, Artificial Sequence
  ENSG00000108679_13 (sequence is synthesized)
ttctcctgctcctcggacgagctccctgtcctgggcctcaccaagtctggcggctcagatcgcaccattgcctacgaaaacaaagccctgatgctctgcgaagggctcttcgtggcagac

SEQ ID NO: 168817 - DNA, 120 bp, Artificial Sequence
  ENSG00000108679_14 (sequence is synthesized)
gtcaccgatttcgagggctggaaggctgcgattcccagtgccctggacaccaacagctcgaagagcacctcctccttcccctgcccggcagggcacttcaacggcttccgcacggtcatc

SEQ ID NO: 168818 - DNA, 120 bp, Artificial Sequence
  ENSG00000108679_15 (sequence is synthesized)
cgccccttctacctgaccaactcctcaggtgtggactagacggcgtggcccaagggtggtgagaaccggagaaccccaggacgccctcactgcaggctcccctcctcggcttccttcctc

SEQ ID NO: 168819 - DNA, 120 bp, Artificial Sequence
  ENSG00000108679_16 (sequence is synthesized)
tctgcaatgaccttcaacaaccggccaccagatgtcgccctactcacctgagcgctcagcttcaagaaattactggaaggcttccactagggtccaccaggagttctcccaccacctcac

SEQ ID NO: 168820 - DNA, 120 bp, Artificial Sequence
  ENSG00000108679_17 (sequence is synthesized)
cagtttccaggtggtaagcaccaggacgccctcgaggttgctctgggatccccccacagcccctggtcagtctgcccttgtcactggtctgaggtcattaaaattacattgaggttccta

SEQ ID NO: 168821 - DNA, 120 bp, Artificial Sequence
  ENSG00000108679_18 (sequence is synthesized)
aaggagatattctgcctggggcccggggcccagcggttagccagatcttctctcctgcttgaagcaccaggtatccccagtgatgatgacttggaggttcccgggggctcacctgggttc

SEQ ID NO: 168822 - DNA, 120 bp, Artificial Sequence
  ENSG00000108679_19 (sequence is synthesized)
aggtgagatgcaggttatagagaggacactagggaatcctccattccgtccagagggaaccagaggggctgatcaaaccagcagtcacaggggccgttgtgaggtcagtggccttggacg

SEQ ID NO: 168823 - DNA, 120 bp, Artificial Sequence
  ENSG00000108679_20 (sequence is synthesized)
ccgaggctcttctgggtgtggctgctggttgcaggaacccaagcaccaggtatccccagtgatgatgacttggaggttcccgggggctcacctgggttcaggcgtgaacgatggtgacat

SEQ ID NO: 168824 - DNA, 120 bp, Artificial Sequence
  ENSG00000108679_21 (sequence is synthesized)
agagtgaatgaggcagccacaaatccctcactttcagatgaagacactgaccccagagagtggcagtgccccggctcctaacgcagcccacttccctcccgccccttcttagaaaccagg

SEQ ID NO: 168825 - DNA, 120 bp, Artificial Sequence
  ENSG00000108679_22 (sequence is synthesized)
acacctgcacatactcatgcatgcacatgtacacacgcagtcacacatgcactcacgcagttgcacacacacgcatgctcactcccacactgtgtgcactcaggtggctgtgttggacag

SEQ ID NO: 168826 - DNA, 120 bp, Artificial Sequence
  ENSG00000108679_23 (sequence is synthesized)
ttgggcccagggctcccctgctgtcctgtggggccggcatctgctctccttctttctccccaggtacttctactcccgaaggattgacatcaccctgtcgtcagtcaagtgcttccacaa

SEQ ID NO: 168827 - DNA, 120 bp, Artificial Sequence
  ENSG00000108679_24 (sequence is synthesized)
gaggtccagtgcacgggaaccgaggcctcactggccgactgcaagtccctgggctggctgaagagcaactgcaggcacgagagagacgctggtgtggtctgcaccaatggagcacccaca

SEQ ID NO: 168828 - DNA, 120 bp, Artificial Sequence
  ENSG00000108679_25 (sequence is synthesized)
atactgggagaggcttctgggtcaaaggaccagtctgcagagggatcctgtggctggaagcgaggaggctccacacggccgttgcagctaccgcagccagtagagacagggtttcgccat

SEQ ID NO: 168829 - DNA, 63 bp, Artificial Sequence
  ENSG00000108679_26 (sequence is synthesized)
caccccacccctctctctacacaggatctgggcatccaggcacggccatgacccctccgaggc

SEQ ID NO: 168830 - DNA, 120 bp, Artificial Sequence
  ENSG00000108679_27 (sequence is synthesized)
ctgacattgcaatcacaaatccagcccatgctggaatatcctccgtggttcgctggtgaaggacctgtaagcagatggacccacacggccggggcggagaacaaagggctgagtcgcgct

SEQ ID NO: 168831 - DNA, 120 bp, Artificial Sequence
  ENSG00000108684_0 (sequence is synthesized)
cacctgggagagccgaggcgagaagcgacacttccctgcggctagcatccttgaaggaccccggcggcgaacagcctcccgcaggacgccctgagaagctctcagccccaggcgagagcg

SEQ ID NO: 168832 - DNA, 120 bp, Artificial Sequence
  ENSG00000108684_1 (sequence is synthesized)
ggcgcctggcaggacttaggcgcaggacttggggaagcctaagcaggtctctgccgagcgcagcccagggagcagtaacaaggaagggtcctggaggggaagggaaagaaggcggcagcc

SEQ ID NO: 168833 - DNA, 120 bp, Artificial Sequence
  ENSG00000108684_2 (sequence is synthesized)
ggcaaggcgaccactcacccccgtacacacccaccccgcccgcccagccaggagccgcggtgcgcctctgggggcgctcgttccttggcgccttctctcccgtgtcccagcaccgctggg

SEQ ID NO: 168834 - DNA, 120 bp, Artificial Sequence
  ENSG00000108684_3 (sequence is synthesized)
ctacgggccgggctggtggggtccctggggatgtccagatcaggcatggtggccgagtggcccttctcccaggaccagcgtaaaagctggggttaggcggggcaggggggactcggctca

SEQ ID NO: 168835 - DNA, 120 bp, Artificial Sequence
  ENSG00000108684_4 (sequence is synthesized)
gggtcccccgaggtccaggacgagggaaggcgggcgcagcacccagggactggagaggcggctcccagtgggacccctccagaagtagtgccgggcgccgggcatcctccaggaagacca

SEQ ID NO: 168836 - DNA, 120 bp, Artificial Sequence
  ENSG00000108684_5 (sequence is synthesized)
gtagtgccgggcgccgggcatcctccaggaagaccaggggccgggaaagcctgggaggcgctcgggagaggccactgccaggggctgcgggctgaggcggcgctcagccccgggcgggcg

SEQ ID NO: 168837 - DNA, 120 bp, Artificial Sequence
  ENSG00000108684_6 (sequence is synthesized)
gcatgccgcgccaccggagctcctttcgggcgcacgcttccctggcgcgggctgcgcgcggctgccgctgctgctgcttccactgctgctgcggactcccatggcggctccgcccggccg

SEQ ID NO: 168838 - DNA, 80 bp, Artificial Sequence
  ENSG00000108684_7 (sequence is synthesized)
cgccgccgctgccgccagccgcgggctgaatgaatgagccggattggcggagccgggctgcccgcagccgcgctcaccgg

SEQ ID NO: 168839 - DNA, 80 bp, Artificial Sequence
  ENSG00000108684_8 (sequence is synthesized)
gcggcgagcgggcgctgcaggggccaggggtcgcccgcagggggcggccatcgctgagccgcgctaaactgcacgggctg

SEQ ID NO: 168840 - DNA, 120 bp, Artificial Sequence
  ENSG00000108684_9 (sequence is synthesized)
cggcacatgtgtgccgggcgcacggcggctgggggctccttccagcggcgggcgctgtgggtgctggccttctgtacatccttcggcttgctgctgtcctggtcctcgaaccgcttgctc

SEQ ID NO: 168841 - DNA, 120 bp, Artificial Sequence
  ENSG00000108684_10 (sequence is synthesized)
tactggctcagcttcccgtcacacacgcgggtgcaccgcgagtggagccgccagttacccttccccgccgtcactgtgtgcaacaacaacccgctgcgcttcccgcgcctctccaagggg

SEQ ID NO: 168842 - DNA, 120 bp, Artificial Sequence
  ENSG00000108684_11 (sequence is synthesized)
gacctctactatgccggccactggctcgggctgctgctgcccaaccgcaccgcgcgcccgcttgtcagcgagctgctgcggggcgacgagccgcgccgccagtggttccgcaagctggcg

SEQ ID NO: 168843 - DNA, 120 bp, Artificial Sequence
  ENSG00000108684_12 (sequence is synthesized)
gacttccgcctcttcctgcctccgcgccacttcgagggaatcagcgccgccttcatggaccgcctgggccaccagctggaggacatgctgctctcctgcaagtaccgcggcgagctctgc

SEQ ID NO: 168844 - DNA, 120 bp, Artificial Sequence
  ENSG00000108684_13 (sequence is synthesized)
gggccgcacaacttctcctccgtgtttacaaaatatgggaagtgttacatgtttaactcaggcgaggatggcaaacctctgctcaccacggtcaagggggggacaggcaacgggctggag

SEQ ID NO: 168845 - DNA, 120 bp, Artificial Sequence
  ENSG00000108684_14 (sequence is synthesized)
tcagatccacagtcagtctgagccacctttcatccaagagctgggctttggggtggctccagggttccagacctttgtggccacacaggagcagaggctcacatacctgcccccaccgtg

SEQ ID NO: 168846 - DNA, 120 bp, Artificial Sequence
  ENSG00000108684_15 (sequence is synthesized)
gggtgagtgccgatcctcagagatgggcctcgacttttttcctgtttacagcatcaccgcctgtaggattgactgtgagacccgctacattgtggaaaactgcaactgccgcatggttca

SEQ ID NO: 168847 - DNA, 120 bp, Artificial Sequence
  ENSG00000108684_16 (sequence is synthesized)
catgccaggggatgcccctttttgtacccctgagcagcacaaggagtgtgcagagcctgccctaggtctgttggcggaaaaggacagcaattactgtctctgcaggacaccctgcaacct

SEQ ID NO: 168848 - DNA, 120 bp, Artificial Sequence
  ENSG00000108684_17 (sequence is synthesized)
aacccgctacaacaaagagctctccatggtgaagatccccagcaagacatcagccaagtaccttgagaagaaatttaacaaatcagaaaaatatatctcagagaacatccttgttctgga

SEQ ID NO: 168849 - DNA, 120 bp, Artificial Sequence
  ENSG00000108684_18 (sequence is synthesized)
tatattttttgaagctctcaattatgagacaattgaacagaagaaggcgtatgaagttgctgccttacttggtgatattggtggtcagatgggattgttcattggtgctagtatccttac

SEQ ID NO: 168850 - DNA, 120 bp, Artificial Sequence
  ENSG00000108684_19 (sequence is synthesized)
aatactagagctctttgattatatttatgagctgatcaaagagaagctattagacctgcttggcaaagaggaggacgaagggagccacgatgagaatgtgagtacttgtgacacaatgcc

SEQ ID NO: 168851 - DNA, 120 bp, Artificial Sequence
  ENSG00000108684_20 (sequence is synthesized)
aaaccactctgaaaccatcagtcacactgtgaacgtgcccctgcagacgaccctggggaccttggaggagattgcctgctgacacccctcgagtcacccagcactccctccaaacagacc

SEQ ID NO: 168852 - DNA, 120 bp, Artificial Sequence
  ENSG00000108684_21 (sequence is synthesized)
ttgaggcccaagacccaggacaaggaacagcaagctcaggtgggatggccccagtgctggaaagaagcaagagccccctatgcacacattgcagactagctgcctagacctcgctccggc

SEQ ID NO: 168853 - DNA, 120 bp, Artificial Sequence
  ENSG00000108684_22 (sequence is synthesized)
cacgtccaacacgacgcatccttgggccccgccgtgcgtccctcttaggagagatgagtcacactctggaactgtccaagaacgaacctgccatcacatctcactgccagatgtataaag

SEQ ID NO: 168854 - DNA, 120 bp, Artificial Sequence
  ENSG00000108684_23 (sequence is synthesized)
cacctgcatgctcagacttcttgtggcgccacctccacgtctgtcttgtacatgacactcctccacgcggtttccagtgtccacactgctgcccgtgcagtgggaccagattccaggtcc

SEQ ID NO: 168855 - DNA, 120 bp, Artificial Sequence
  ENSG00000108684_24 (sequence is synthesized)
aaagtcaccatgaggccaccctggaatcagaactgcacaatcaagagggaacccatgggactctctgctacattcagttcttgtgtcgtttgtgaaagttcttaacctgcccaaaaaccc

SEQ ID NO: 168856 - DNA, 120 bp, Artificial Sequence
  ENSG00000108684_25 (sequence is synthesized)
ccttttccccaagctgcccatggggcttcggcgccaaaggtgacccgcgccaacctccctcccccccagtgcctatgacggcggcacagcagccagcgggtgggggacgcctgtgttcac

SEQ ID NO: 168857 - DNA, 120 bp, Artificial Sequence
  ENSG00000108684_26 (sequence is synthesized)
ccatggtgcccatgtcgttcttctctccctgtgacacagcttgtacagtctgattctttttatctggggtaggggggcttttatgtttgtccgatggagatttgttttgttttgcttcat

SEQ ID NO: 168858 - DNA, 120 bp, Artificial Sequence
  ENSG00000108684_27 (sequence is synthesized)
tttatgcttttttattttagttttgatgttctgaggtttgctttggtttttccattttctttggcatttatttattcgtgcttcaaatcacagtcatattaaaagctggtcttgtggaaa

SEQ ID NO: 168859 - DNA, 120 bp, Artificial Sequence
  ENSG00000108684_28 (sequence is synthesized)
ttttttcccaggaggcgaggagagaatggatcccggtctgagctccccgcttccgtccccagtctccagataccggtcctcgcctctccgcgccgcgcgctgcctcctctccccggtgct

SEQ ID NO: 168860 - DNA, 120 bp, Artificial Sequence
  ENSG00000108684_29 (sequence is synthesized)
agcagcggccgctggcatttggaattctgcccacaaaagggggcctggaggaggaggagaggagggacggaggccggcggcgagaaacggcattcggagtccaaaacatcatgggaaaag

SEQ ID NO: 168861 - DNA, 120 bp, Artificial Sequence
  ENSG00000108684_30 (sequence is synthesized)
gaaccgagcggcggcggctctgaaggctgtgccgctgcgcccgaccgcagtgcatcagcgtggccgccctgacatcccccaggatggttaacatggggcattatgcgctggttaacaggc

SEQ ID NO: 168862 - DNA, 120 bp, Artificial Sequence
  ENSG00000108684_31 (sequence is synthesized)
tccgagctgctcagcgacttgttttaagcattttctctctcgctctcgcttttaatcttgtctctagtggcgtgtgtaggggggaggactttatttccattggctaagctctcccttccc

SEQ ID NO: 168863 - DNA, 120 bp, Artificial Sequence
  ENSG00000108684_32 (sequence is synthesized)
acccacatctcttccacatcaccttggtgtctccctaaataaaaccagccctccttatcgcctggaaaaaatcaagagctagagtttgaatgggttttatataaacactcacccctgtca

SEQ ID NO: 168864 - DNA, 120 bp, Artificial Sequence
  ENSG00000108684_33 (sequence is synthesized)
gcgtgcggctgggctctcaggataaactcacagcatctggcgcgatgcttgccttgcgttctctcccctgaacgtcaaggtttaagcagagcccgaggactgggagctcttctctgaaat

SEQ ID NO: 168865 - DNA, 120 bp, Artificial Sequence
  ENSG00000108684_34 (sequence is synthesized)
tcgatcaacctgaagccagttgcggaactgcacggggtcccgatggacctcaaggaaagccccagtgagggcagcctgcaaccttctagcatccagatctttgccaacacctccaccctc

SEQ ID NO: 168866 - DNA, 120 bp, Artificial Sequence
  ENSG00000108684_35 (sequence is synthesized)
catggcatccgccacatcttcgtgtatgggccgctgaccatccggcgtgtgctgtgggcagtggccttcgtgggctctctgggcctgctgctggtggagagctctgagagggtgtcctac

SEQ ID NO: 168867 - DNA, 120 bp, Artificial Sequence
  ENSG00000108684_36 (sequence is synthesized)
tacttctcctaccagcatgtcactaaggtggacgaagtggtggctcaaagcctggtcttcccagctgtgaccctctgtaacctgaatggcttccggttctccaggctcaccaccaatgac

SEQ ID NO: 168868 - DNA, 120 bp, Artificial Sequence
  ENSG00000108684_37 (sequence is synthesized)
ctgtaccatgctggggagctgctggccctgctggatgtcaacctgcagatcccggacccccatctggctgacccctccgtgctggaggccctgcggcagaaggccaacttcaagcactac

SEQ ID NO: 168869 - DNA, 120 bp, Artificial Sequence
  ENSG00000108684_38 (sequence is synthesized)
aaacccaagcagttcagcatgctggagttcctgcaccgtgtgggccatgacctgaaggatatgatgctctactgcaagttcaaagggcaggagtgcggccaccaagacttcaccacagtg

SEQ ID NO: 168870 - DNA, 120 bp, Artificial Sequence
  ENSG00000108684_39 (sequence is synthesized)
cggcgagctctgcgggccgcacaacttctcctccgagtcttgagcatccagcggaactgagcagtggtgcgccagggttgggcccttcacctggcctccgtcccccataaaatgtgttta

SEQ ID NO: 168871 - DNA, 120 bp, Artificial Sequence
  ENSG00000108684_40 (sequence is synthesized)
cattcatgccctactcctagcatgtgtttggtgcacagcgagcactatagtaactattgatgttgttaacacattatttccttcctattatccttaagagggagttcttaccttctcatc

SEQ ID NO: 168872 - DNA, 120 bp, Artificial Sequence
  ENSG00000108684_41 (sequence is synthesized)
ccatctctttagttttcttaatataactctaaattaaaataaaactcttcactttgttaggaagaggaccatgacttgcttaggcccgactaacatttgcactcaccattttgttacaca

SEQ ID NO: 168873 - DNA, 120 bp, Artificial Sequence
  ENSG00000108684_42 (sequence is synthesized)
tacagaagggagttgggcagcctctgttcctgtttggctctgtccttgaagaaagtgataagaagtgcacagattttggaattaaacagaccatggtttgaagtctggatcttccagttg

SEQ ID NO: 168874 - DNA, 120 bp, Artificial Sequence
  ENSG00000108684_43 (sequence is synthesized)
taaccaggtggcattgggaggcgaggagagaatggatcccggtctgagctccccgcttccgtccccagtctccagataccggtcctcgcctctccgcgccgcgcgctgcctcctctcccc

SEQ ID NO: 168875 - DNA, 120 bp, Artificial Sequence
  ENSG00000108684_44 (sequence is synthesized)
agtcagcctccttcttcccgacctcaactccaggccctcaggactccaagaaactgctctgtgtttggagtgtagatctcttaagtgcggacttcttgtctttgggaaaaccaatagacg

SEQ ID NO: 168876 - DNA, 120 bp, Artificial Sequence
  ENSG00000108684_45 (sequence is synthesized)
gctcttaaaaaaaaaaaaaaaaaaaaggaagcgcttgaaaaatggatcatcaggggaatcacgcagagtccctaagcaggcctacgatccgaagcagcttatgtcttcaaagttcccaaa

SEQ ID NO: 168877 - DNA, 120 bp, Artificial Sequence
  ENSG00000108688_0 (sequence is synthesized)
agcagaggggctgagaccaaaccagaaacctccaattctcatgtggaagcccatgccctcaccctccaacatgaaagcctctgcagcacttctgtgtctgctgctcacagcagctgcttt

SEQ ID NO: 168878 - DNA, 120 bp, Artificial Sequence
  ENSG00000108688_1 (sequence is synthesized)
cagcccccaggggcttgctcagccagttgggattaatacttcaactacctgctgctacagatttatcaataagaaaatccctaagcagaggctggagagctacagaaggaccaccagtag

SEQ ID NO: 168879 - DNA, 120 bp, Artificial Sequence
  ENSG00000108688_2 (sequence is synthesized)
ccactgtccccgggaagctgtaatcttcaagaccaaactggacaaggagatctgtgctgaccccacacagaagtgggtccaggactttatgaagcacctggacaagaaaacccaaactcc

SEQ ID NO: 168880 - DNA, 120 bp, Artificial Sequence
  ENSG00000108688_3 (sequence is synthesized)
attattttaatctaattctaaggaatatgagctttatgtaataatgtgaatcatggtttttcttagtagattttaaaagttattaatattttaatttaatcttccatggattttggtggg

SEQ ID NO: 168881 - DNA, 120 bp, Artificial Sequence
  ENSG00000108688_4 (sequence is synthesized)
tgggttttgaacataaagccttggatgtatatgtcatctcagtgctgtaaaaactgtgggatgctcctcccttctctacctcatgggggtattgtataagtccttgcaagaatcagtgca

SEQ ID NO: 168882 - DNA, 120 bp, Artificial Sequence
  ENSG00000108688_5 (sequence is synthesized)
aagatttgctttaattgttaagatatgatgtccctatggaagcatattgttattatataattacatatttgcatatgtatgactcccaaattttcacataaaatagatttttgtataaca

SEQ ID NO: 168883 - DNA, 120 bp, Artificial Sequence
  ENSG00000108691_0 (sequence is synthesized)
gagaggctgagactaacccagaaacatccaattctcaaactgaagctcgcactctcgcctccagcatgaaagtctctgccgcccttctgtgcctgctgctcatagcagccaccttcattc

SEQ ID NO: 168884 - DNA, 120 bp, Artificial Sequence
  ENSG00000108691_1 (sequence is synthesized)
cccaagggctcgctcagccagatgcaatcaatgccccagtcacctgctgttataacttcaccaataggaagatctcagtgcagaggctcgcgagctatagaagaatcaccagcagcaagt

SEQ ID NO: 168885 - DNA, 120 bp, Artificial Sequence
  ENSG00000108691_2 (sequence is synthesized)
gtcccaaagaagctgtgatcttcaagaccattgtggccaaggagatctgtgctgaccccaagcagaagtgggttcaggattccatggaccacctggacaagcaaacccaaactccgaaga

SEQ ID NO: 168886 - DNA, 120 bp, Artificial Sequence
  ENSG00000108691_3 (sequence is synthesized)
ccaagaatctgcagctaacttattttcccctagctttccccagacaccctgttttattttattataatgaattttgtttgttgatgtgaaacattatgccttaagtaatgttaattctta

SEQ ID NO: 168887 - DNA, 120 bp, Artificial Sequence
  ENSG00000108691_4 (sequence is synthesized)
tttaagttattgatgttttaagtttatctttcatggtactagtgttttttagatacagagacttggggaaattgcttttcctcttgaaccacagttctacccctgggatgttttgagggt

SEQ ID NO: 168888 - DNA, 120 bp, Artificial Sequence
  ENSG00000108691_5 (sequence is synthesized)
ctttgcaagaatcattaatacaaagaattttttttaacattccaatgcattgctaaaatattattgtggaaatgaatattttgtaactattacaccaaataaatatatttttgtacaaaa

SEQ ID NO: 168889 - DNA, 120 bp, Artificial Sequence
  ENSG00000108691_6 (sequence is synthesized)
ttgtcttctctctgagttatcatggaccatccaagcagacgtggtacccacagtcttgctttaacgctacttttccaagataaggtgactcagaaaaggacaaggggtgagcccaaccac

SEQ ID NO: 168890 - DNA, 120 bp, Artificial Sequence
  ENSG00000108691_7 (sequence is synthesized)
acagctgctgctcggcagagcctgaactagaattccagctgtgaaccccaaatccagctccttccaggattccagctctgggaacacactcagcgcagttactcccccagctgcttccag

SEQ ID NO: 168891 - DNA, 120 bp, Artificial Sequence
  ENSG00000108691_8 (sequence is synthesized)
ggtgggtgtgtaggctgtttccagacacgctggagacccagaatctggtctgtgcttcattcaccttagcttccagagacggtgactctgcagaggtaatgagtatcagggaaactcatg

SEQ ID NO: 168892 - DNA, 120 bp, Artificial Sequence
  ENSG00000108691_9 (sequence is synthesized)
accaggcatagcctattcagagtctaaaaggaggctcatagtggggctccccagctgatcttccctggtgctgatcatctggattattggtccgtcttaatgacacttgtaggcattatc

SEQ ID NO: 168893 - DNA, 120 bp, Artificial Sequence
  ENSG00000108691_10 (sequence is synthesized)
tagctttaacagctcctccttctctctgtccattatcaatgttatatacccattttacagcataggaaactgagtcattgggtcaaagatcacattctagctctgaggtataggcagaag

SEQ ID NO: 168894 - DNA, 120 bp, Artificial Sequence
  ENSG00000108691_11 (sequence is synthesized)
cactgggatttaatgagctctttgtcttctcctgcctgccttttgctttttcctcatgactcttttctgctcttaagatcagaataatccagttcatcctaaaatgctttttctttgtgg

SEQ ID NO: 168895 - DNA, 120 bp, Artificial Sequence
  ENSG00000108691_12 (sequence is synthesized)
gtcccaaagaagctgtgatgtgagttcagcacaccaaccttccctggcctgaagttcttccttgtggagcaagggacaagcctcataaacctagagtcagagagtgcactatttaactta

SEQ ID NO: 168896 - DNA, 120 bp, Artificial Sequence
  ENSG00000108691_13 (sequence is synthesized)
aatgggaaaactgaggcaccaagggaaaaagtgaaccccaacatcactctccacctgggtgcctattcagaacaccccaatttctttagcttgaagtcaggatggctccacctggacacc

SEQ ID NO: 168897 - DNA, 120 bp, Artificial Sequence
  ENSG00000108691_14 (sequence is synthesized)
tataggagcagtttgccctgggttccctccttccacctgcgttcctcctctagctcccatggcagccctttggtgcagaatgggctgcacttctagaccaaaactgcaaaggaacttcat

SEQ ID NO: 168898 - DNA, 120 bp, Artificial Sequence
  ENSG00000108700_0 (sequence is synthesized)
agagaggttgagaacaacccagaaaccttcacctctcatgctgaagctcacacccttgccctccaagatgaaggtttctgcagcgcttctgtgcctgctgctcatggcagccactttcag

SEQ ID NO: 168899 - DNA, 120 bp, Artificial Sequence
  ENSG00000108700_1 (sequence is synthesized)
ccctcagggacttgctcagccagattcagtttccattccaatcacctgctgctttaacgtgatcaataggaaaattcctatccagaggctggagagctacacaagaatcaccaacatcca

SEQ ID NO: 168900 - DNA, 120 bp, Artificial Sequence
  ENSG00000108700_2 (sequence is synthesized)
atgtcccaaggaagctgtgatcttcaagaccaaacggggcaaggaggtctgtgctgaccccaaggagagatgggtcagggattccatgaagcatctggaccaaatatttcaaaatctgaa

SEQ ID NO: 168901 - DNA, 120 bp, Artificial Sequence
  ENSG00000108700_3 (sequence is synthesized)
ctgagagtcagagcttgaagaaaagcttatttattttccccaacctcccccaggtgcagtgtgacattattttattataacatccacaaagagattatttttaaataatttaaagcataa

SEQ ID NO: 168902 - DNA, 120 bp, Artificial Sequence
  ENSG00000108700_4 (sequence is synthesized)
tatttcttaaaaagtatttaattatatttaagttgttgatgttttaactctatctgtcatacatcctagtgaatgtaaaatgcaaaatcctggtgatgtgttttttgtttttgttttcct

SEQ ID NO: 168903 - DNA, 120 bp, Artificial Sequence
  ENSG00000108700_5 (sequence is synthesized)
gtgagctcaactaagttcacggcaaaatgtcattgttctccctcctacctgtctgtagtgttgtggggtcctcccatggatcatcaaggtgaaacactttggtattctttggcaatcagt

SEQ ID NO: 168904 - DNA, 120 bp, Artificial Sequence
  ENSG00000108700_6 (sequence is synthesized)
gctcctgtaagtcaaatgtgtgctttgtactgctgttgttgaaattgatgttactgtatataactatggaattttgaaaaaaaatttcaaaaagaaaaaaatatatataatttaaaacta

SEQ ID NO: 168905 - DNA, 120 bp, Artificial Sequence
  ENSG00000108702_0 (sequence is synthesized)
acagtggtgagctcttagcttcaccaggctcatcaaagctgctccaggaaggcccaagccagaccagaagacatgcagatcatcaccacagccctggtgtgcttgctgctagctgggatg

SEQ ID NO: 168906 - DNA, 120 bp, Artificial Sequence
  ENSG00000108702_1 (sequence is synthesized)
tggccggaagatgtggacagcaagagcatgcaggtacccttctccagatgttgcttctcatttgcggagcaagagattcccctgagggcaatcctgtgttacagaaataccagctccatc

SEQ ID NO: 168907 - DNA, 120 bp, Artificial Sequence
  ENSG00000108702_2 (sequence is synthesized)
agaaaatgagcagatttctttccattgtgggctctggaaaccacatggcttcacctgtccccgaaactaccagccctacaccattccttctgccctgcttttgctaggtcacagaggatc

SEQ ID NO: 168908 - DNA, 120 bp, Artificial Sequence
  ENSG00000108702_3 (sequence is synthesized)
tgcttggtcttgataagctatgttgttgcactttaaacatttaaattatacaatcatcaacccccaaccctctgggtctcttggatttcagagtgaaaacttgattggcattgagaggtg

SEQ ID NO: 168909 - DNA, 120 bp, Artificial Sequence
  ENSG00000108733_0 (sequence is synthesized)
gtcataaagcggagacctcccttcaaacgtggcgtcgtgggttgtttgcgcctcgcctggggtcagcgagcaaggacgggcgcgggcggggatactcaaagccaacagctggagtcagcc

SEQ ID NO: 168910 - DNA, 120 bp, Artificial Sequence
  ENSG00000108733_1 (sequence is synthesized)
cttgtgtcccgggctcacagtggcacgactgaatcctcagagtcggctggcttttgagctctcacgattggggaggagggggcgtttctggttcgcagctccagaggattgcgttccttc

SEQ ID NO: 168911 - DNA, 120 bp, Artificial Sequence
  ENSG00000108733_2 (sequence is synthesized)
ccccatacctgtcccccacagtcacgctctgccctgacgtgcagcatttgacaagttaccccctcgccacatactacttccacccacgtccgagttaactttgttcttaaccttcttgag

SEQ ID NO: 168912 - DNA, 120 bp, Artificial Sequence
  ENSG00000108733_3 (sequence is synthesized)
actaccctcggcctccaggtctttttttcccagttcatttttgcccataagattgagtttcgagtttcagatatcatgcagaaagtttacctttaagactgagcacccatctgatactct

SEQ ID NO: 168913 - DNA, 120 bp, Artificial Sequence
  ENSG00000108733_4 (sequence is synthesized)
tcctcccgaaaaagttcatgctcacgagagagtttgtgggaaaagtgaaagccagtacacgcaggaaactatggctgagcacggggctcacttcacagctgcttctgtggccgatgacca

SEQ ID NO: 168914 - DNA, 120 bp, Artificial Sequence
  ENSG00000108733_5 (sequence is synthesized)
gccatccatctttgaggtggtagcacaggacagtttaatgacagcagtgagacccgctcttcagcatgtggtcaaggttcttgcagaatcaaatcccacccactatggcttcttgtggag

SEQ ID NO: 168915 - DNA, 120 bp, Artificial Sequence
  ENSG00000108733_6 (sequence is synthesized)
gtggtttgatgaaatctttactctgctagatcttctgctccagcaacattatctgtctagaaccagtgcctcattttctgaaaacttttacggcttaaagagaattgtaatgggggacac

SEQ ID NO: 168916 - DNA, 120 bp, Artificial Sequence
  ENSG00000108733_7 (sequence is synthesized)
tcacaagtctcagagattggctagtgctggtctcccaaagcagcagctttggaaatctattatgttcctggttcttcttccctatctgaaagtgaagctggagaagctggtttctagcct

SEQ ID NO: 168917 - DNA, 120 bp, Artificial Sequence
  ENSG00000108733_8 (sequence is synthesized)
gagagaagaggatgaatattctattcatcccccttcttcccgctggaaacgattttacagagctttcctggcagcctacccatttgtgaacatggcctgggaaggatggtttcttgtaca

SEQ ID NO: 168918 - DNA, 120 bp, Artificial Sequence
  ENSG00000108733_9 (sequence is synthesized)
acaacttcgatacatcctaggaaaagctcagcatcactcaccactgctgaggctggctggagttcagctaggtcgactgacagttcaggatatacaagctctggagcacaaaccagctaa

SEQ ID NO: 168919 - DNA, 120 bp, Artificial Sequence
  ENSG00000108733_10 (sequence is synthesized)
ggcctttctgtgggtgtattcttcttgcagttccttgactggtggtactcatctgaaaatcaagaaaccatcaagtcattgactgccctgcctactccaccaccacctgtacacctagac

SEQ ID NO: 168920 - DNA, 120 bp, Artificial Sequence
  ENSG00000108733_11 (sequence is synthesized)
tataactctgattctcccctcttacccaaaatgaagactgtgtgcccactgtgtcgtaaaacccgggtgaatgatactgttcttgccacctctggctatgtgttttgttaccgctgtgtg

SEQ ID NO: 168921 - DNA, 120 bp, Artificial Sequence
  ENSG00000108733_12 (sequence is synthesized)
tttcattatgtgaggagtcaccaagcttgtcccatcacaggttatccaacagaagtacaacatctgattaaactctactcccctgagaactgaaagggaatcatgtcttatcctcacaac

SEQ ID NO: 168922 - DNA, 120 bp, Artificial Sequence
  ENSG00000108733_13 (sequence is synthesized)
aaaagtattgcgctgtaatgtcacagagctggtttcagcatggtattgagttgacacttctcagcctcaattcataactatatgaactttaaatgattatatggatttctttaaaaggat

SEQ ID NO: 168923 - DNA, 120 bp, Artificial Sequence
  ENSG00000108733_14 (sequence is synthesized)
atgcccatttgatcctaaccttttagcctgctctctagaaccctacttacagttgaccaagctgcttaaagtagaaggatcaggactggcaggggatatgagggccagtgtagagattaa

SEQ ID NO: 168924 - DNA, 120 bp, Artificial Sequence
  ENSG00000108733_15 (sequence is synthesized)
acagaataatgagtacacaagtttttgcctatccctttccttaaaatataagaaataaaggagctcttacgaaaaacccaggttagaccgcataaaaaataaagtgaacagtgaggtggt

SEQ ID NO: 168925 - DNA, 120 bp, Artificial Sequence
  ENSG00000108733_16 (sequence is synthesized)
agcaagacttctttttagaaaagaaagcatttacctgcctgtctgtaaggtggaaatttcatcagtttgcaaacgataagaaatgcagacttgctcttgatagaaatgcttagaaacact

SEQ ID NO: 168926 - DNA, 120 bp, Artificial Sequence
  ENSG00000108733_17 (sequence is synthesized)
ctgggggggaaaaaagctccttccatatactgtgagacatttgttaagtgacatctattgtttatcagcttttaaggataaaaaaggtattttaaaagttggatatttaggatatttgag

SEQ ID NO: 168927 - DNA, 120 bp, Artificial Sequence
  ENSG00000108733_18 (sequence is synthesized)
gatattcctttatgagctctccatatccttcttgagaaactggttaaaaaaggaataggggttgagtgttacagagagtagtctgaagattcctgtgtaaaagcaaagctaacaagcaat

SEQ ID NO: 168928 - DNA, 120 bp, Artificial Sequence
  ENSG00000108733_19 (sequence is synthesized)
gaagacatgaagcaaaatactaatctaattgtgtaaagaaaggatattttaataagttctttctgcttgctgctaagagtttgctaaagtgtcatgaattattctggttattactaaagt

SEQ ID NO: 168929 - DNA, 120 bp, Artificial Sequence
  ENSG00000108733_20 (sequence is synthesized)
ttctatgaaacacttaagtagattttaagaataaatgtttctggaaaagaactatgttatgattttgtagaaatgtaaagattacttgaggtgtttaaaataaatttttcattcagacta

SEQ ID NO: 168930 - DNA, 120 bp, Artificial Sequence
  ENSG00000108733_21 (sequence is synthesized)
agacgtctgcgcggtgccccaaacagcttgtcaaaaagacctcgcagagagaggttcagagctgtagctttccagcgaggctaccatgcagacccagctacgaaaagtaaaccaaactag

SEQ ID NO: 168931 - DNA, 120 bp, Artificial Sequence
  ENSG00000108759_0 (sequence is synthesized)
ttctatcatgagccccctcactgcaagggcataaaatggcccgggcggcatggggtctgtagacatccaggtagctgtggctgaggagaaagggcctctccaacatgacatcctcctgct

SEQ ID NO: 168932 - DNA, 120 bp, Artificial Sequence
  ENSG00000108759_1 (sequence is synthesized)
gtgtcaccaacaacttgcaagcctctctcaagagctgcccccggcctgcctcggtctgttccagcggcgtgaactgccggcctgagctgtgcctgggctatgtctgccagcccatggcat

SEQ ID NO: 168933 - DNA, 120 bp, Artificial Sequence
  ENSG00000108759_2 (sequence is synthesized)
gcctgccttcggtctgcctgcccaccaccttccggccagccagctgcctctccaaaacctatctatccagttcctgccaggcagccagtggcatctccggctccatgggccccggcagct

SEQ ID NO: 168934 - DNA, 120 bp, Artificial Sequence
  ENSG00000108759_3 (sequence is synthesized)
ggtacagcgaaggggccttcaatggcaatgagaaggaaaccatgcagttccttaacgaccgcctggccagctacctgacgagggtgcggcagctggagcaggagaatgcggagctggaga

SEQ ID NO: 168935 - DNA, 120 bp, Artificial Sequence
  ENSG00000108759_4 (sequence is synthesized)
gcaggatccaagaggcctctcactcccaggtgctcaccatgactcctgactaccagtctcatttcaggaccattgaggagctccagcagaagattctgtgtaccaaggcagagaatgcca

SEQ ID NO: 168936 - DNA, 120 bp, Artificial Sequence
  ENSG00000108759_5 (sequence is synthesized)
ggatggttgtgaacattgataatgccaaactggctgccgatgacttcagggccaagtacgaggcagagctggccatgcggcagctggtggaggccgacatcaatggcctgcgcaggatcc

SEQ ID NO: 168937 - DNA, 120 bp, Artificial Sequence
  ENSG00000108759_6 (sequence is synthesized)
tggatgatctcactctgtgcaaggctgacctggaggcccaggttgagtccctgaaggaggagctgatgtgcctcaaaaagaaccatgaggaggaagtcggttcccttcgatgccagcttg

SEQ ID NO: 168938 - DNA, 120 bp, Artificial Sequence
  ENSG00000108759_7 (sequence is synthesized)
gtgtcagtacgaggccatggtggaggccaaccgcagggacgtggaggaatggttcaatatgcagatggaggagcttaaccaacaggtggccacaagctctgagcagcttcagaactacca

SEQ ID NO: 168939 - DNA, 120 bp, Artificial Sequence
  ENSG00000108759_8 (sequence is synthesized)
gtcagacatcattgacctgagacgcacggtcaacacgctggagatcgagctgcaggcccagcacagcctgagggactccctggaaaacacgctgacggagagtgaggcccgctacagctc

SEQ ID NO: 168940 - DNA, 120 bp, Artificial Sequence
  ENSG00000108759_9 (sequence is synthesized)
ccagctggcccagatgcagtgcatgatcaccaacgttgaggcccagctggctgagatccgggctgacctggagcggcagaaccaggagtaccaggtgctgctggacgtccgggcccggct

SEQ ID NO: 168941 - DNA, 120 bp, Artificial Sequence
  ENSG00000108759_10 (sequence is synthesized)
ggagggcgagatcaacacgtaccggagcctgctggagaacgaggactgcaagctgccctgtaacccatgctccactccttcctgcaccacctgtgtgccctccccatgcgtgccccgcac

SEQ ID NO: 168942 - DNA, 120 bp, Artificial Sequence
  ENSG00000108759_11 (sequence is synthesized)
cgtctgtgtgccacgcactgttggcatgccttgctcaccctgcccccagggccgctactgaagtccctttgtgccagtggatcctggagggcctggggctgggcagcctggtattcagtg

SEQ ID NO: 168943 - DNA, 120 bp, Artificial Sequence
  ENSG00000108759_12 (sequence is synthesized)
gccaccagaagagcagggccagccccggtcagcaaggaagaccctgagcaggaccgtggatcacctgcaacaagctctgatactccaggggatacttaagccctcatcacttcaaaactg

SEQ ID NO: 168944 - DNA, 120 bp, Artificial Sequence
  ENSG00000108759_13 (sequence is synthesized)
cctcttttttccatgggtgaactgttctctttggtgatgtttctggttgtctgtgctgcctcaaagagcgtgtgttcttagttaactggcaaatagagctgtactcagtggccttgcaaa

SEQ ID NO: 168945 - DNA, 120 bp, Artificial Sequence
  ENSG00000108771_0 (sequence is synthesized)
gatttctgctctctgcgctgagcacagcggcaccaggctgagctaagcagggccgccttgggcaggcctacgtggtggtgcaggcgagacccaggctgggcaaggcgcagtttcagtttc

SEQ ID NO: 168946 - DNA, 120 bp, Artificial Sequence
  ENSG00000108771_1 (sequence is synthesized)
catcttgggtctctgagctgagcagagtggcaccaggctgagttaagtgggactgccctgggcagacctacctactagagcagaatggagcttcggtcctaccaatgggaggtgatcatg

SEQ ID NO: 168947 - DNA, 120 bp, Artificial Sequence
  ENSG00000108771_2 (sequence is synthesized)
cctgccctggagggcaagaatatcatcatctggctgcccacgggtgccgggaagacccgggcggctgcttatgtggccaagcggcacctagagactgtggatggagccaaggtggttgta

SEQ ID NO: 168948 - DNA, 120 bp, Artificial Sequence
  ENSG00000108771_3 (sequence is synthesized)
ttggtcaacagggtgcacctggtgacccagcatggtgaagagttcaggcgcatgctggatggacgctggaccgtgacaaccctgagtggggacatgggaccacgtgctggctttggccac

SEQ ID NO: 168949 - DNA, 120 bp, Artificial Sequence
  ENSG00000108771_4 (sequence is synthesized)
ctggcccggtgccatgacctgctcatctgcacagcagagcttctgcagatggcactgaccagccccgaggaggaggagcacgtggagctcactgtcttctccctgatcgtggtggatgag

SEQ ID NO: 168950 - DNA, 120 bp, Artificial Sequence
  ENSG00000108771_5 (sequence is synthesized)
tgccaccacacgcacaaggacaccgtctacaacgtcatcatgagccagtacctagaacttaaactccagagggcacagccgctaccccaggtgctgggtctcacagcctccccaggcact

SEQ ID NO: 168951 - DNA, 120 bp, Artificial Sequence
  ENSG00000108771_6 (sequence is synthesized)
ggcggggcctccaaactcgatggggccatcaaccacgtcctgcagctctgtgccaacttggacacgtggtgcatcatgtcaccccagaactgctgcccccagctgcaggagcacagccaa

SEQ ID NO: 168952 - DNA, 120 bp, Artificial Sequence
  ENSG00000108771_7 (sequence is synthesized)
cagccttgcaaacagtacaacctctgccacaggcgcagccaggatccgtttggggacttgctgaagaagctcatggaccaaatccatgaccacctggagatgcctgagttgagccggaaa

SEQ ID NO: 168953 - DNA, 120 bp, Artificial Sequence
  ENSG00000108771_8 (sequence is synthesized)
tttgggacgcaaatgtatgagcagcaggtggtgaagctgagtgaggctgcggctttggctgggcttcaggagcaacgggtgtatgcgcttcacctgaggcgctacaatgacgcgctgctc

SEQ ID NO: 168954 - DNA, 120 bp, Artificial Sequence
  ENSG00000108771_9 (sequence is synthesized)
atccatgacaccgtccgcgccgtggatgccttggctgcgctgcaggatttctatcacagggagcacgtcactaaaacccagatcctgtgtgccgagcgccggctgctggccctgttcgat

SEQ ID NO: 168955 - DNA, 120 bp, Artificial Sequence
  ENSG00000108771_10 (sequence is synthesized)
gatcctgcaaaggcagttcagtagctctaacagccctcggggtatcatcttcacccgcacccgccaaagcgcacactccctcctgctctggctccagcagcagcagggcctgcagactgt

SEQ ID NO: 168956 - DNA, 120 bp, Artificial Sequence
  ENSG00000108771_11 (sequence is synthesized)
ggacatccgggcccagctactgattggggctgggaacagcagccagagcacccacatgacccagagggaccagcaagaagtgatccagaagttccaagatggaaccctgaaccttctggt

SEQ ID NO: 168957 - DNA, 120 bp, Artificial Sequence
  ENSG00000108771_12 (sequence is synthesized)
ggccacgagtgtggcggaggaggggctggacatcccacattgcaatgtggtggtgcgttatgggctcttgaccaatgaaatctccatggtccaggccaggggccgtgcccgggccgatca

SEQ ID NO: 168958 - DNA, 120 bp, Artificial Sequence
  ENSG00000108771_13 (sequence is synthesized)
gagtgtatacgcgtttgtagcaactgaaggtagccgggagctgaagcgggagctgatcaacgaggcgctggagacgctgatggagcaggcagtggctgctgtgcagaaaatggaccaggc

SEQ ID NO: 168959 - DNA, 120 bp, Artificial Sequence
  ENSG00000108771_14 (sequence is synthesized)
cgagtaccaggccaagatccgggatctgcagcaggcagccttgaccaagcgggcggcccaggcagcccagcgggagaaccagcggcagcagttcccagtggagcacgtgcagctactctg

SEQ ID NO: 168960 - DNA, 120 bp, Artificial Sequence
  ENSG00000108771_15 (sequence is synthesized)
catcaactgcatggtggctgtgggccatggcagcgacctgcggaaggtggagggcacccaccatgtcaatgtgaaccccaacttctcgaactactataatgtctccagggatcctgtggt

SEQ ID NO: 168961 - DNA, 120 bp, Artificial Sequence
  ENSG00000108771_16 (sequence is synthesized)
catcaacaaagtcttcaaggactggaagcctgggggtgtcatcagctgcaggaactgtggggaggtctggggtctgcagatgatctacaagtcagtgaagctgccagtgctcaaagtccg

SEQ ID NO: 168962 - DNA, 120 bp, Artificial Sequence
  ENSG00000108771_17 (sequence is synthesized)
cagcatgctgctggagacccctcaggggcggatccaggccaaaaagtggtcccgcgtgcccttctccgtgcctgactttgacttcctgcagcattgtgccgagaacttgtcggacctctc

SEQ ID NO: 168963 - DNA, 120 bp, Artificial Sequence
  ENSG00000108771_18 (sequence is synthesized)
cctggactgaccacctcattgctgcagtgcccggtttgggctgtagggggcgggagagtctgcagcagactccaggcccctccttcctgaatcatcagctgtgggcatcaggcccaccag

SEQ ID NO: 168964 - DNA, 120 bp, Artificial Sequence
  ENSG00000108771_19 (sequence is synthesized)
ccacacaggagtcctgggcaccctggcttaggctcccgcaatgggaaaacaaccggagggccagagcttagtccagacctaccttgtacgcacatagacattttcatatgcactggatgg

SEQ ID NO: 168965 - DNA, 120 bp, Artificial Sequence
  ENSG00000108771_20 (sequence is synthesized)
agttagggaaactgaggcaaaagaatttgccatactgtactcagaatcacgacattccttccctaccaaggccacttctattttttgaggctcctcataaaaataaatgaaaaaatggga

SEQ ID NO: 168966 - DNA, 120 bp, Artificial Sequence
  ENSG00000108771_21 (sequence is synthesized)
aaaaaaaaagcgacaccagttgacctgagtggaagggactgtgaataatgagatttagaaaaagacagactagcccgtggaagatttgaaaggtcaggtgtgaaagtgtagcctttatcc

SEQ ID NO: 168967 - DNA, 120 bp, Artificial Sequence
  ENSG00000108771_22 (sequence is synthesized)
aggaggttcctcttaggaatcttggatagattttaaggaacagaatgtcagggcagatttatatttttagatccctctagcagttggtggaaggatggcttgggattgggagtaaaaatg

SEQ ID NO: 168968 - DNA, 120 bp, Artificial Sequence
  ENSG00000108771_23 (sequence is synthesized)
gaggcagagagacccataaggagactgtgaagaccaggtaaccgatgctgaggcttgaacctgggcacaagggaacgtgcgatggaggccacacaggtagaactcaccaaagattggatt

SEQ ID NO: 168969 - DNA, 120 bp, Artificial Sequence
  ENSG00000108771_24 (sequence is synthesized)
gctctggccaggagttgggatgagtggagggcccagtgggtctgagtcccctgccattcccagaatggagctgtggccctaccaatgggaggtgatcatgcctgccagggcgctggcgca

SEQ ID NO: 168970 - DNA, 120 bp, Artificial Sequence
  ENSG00000108771_25 (sequence is synthesized)
ctgggaatccttcccatccagacagtgctttgaagctttgggaagctaaagagcattgtagcaagtactttgcattttcacaataatctggttagacaggttttatccctgtctccattt

SEQ ID NO: 168971 - DNA, 120 bp, Artificial Sequence
  ENSG00000108771_26 (sequence is synthesized)
tacaggcaaggaaatagaggctcagagaggctatgtgacttgcccaagttcccacagccactatctggttgagcaagaactggaattcaggatactaagtgtcaaaagaccacacattga

SEQ ID NO: 168972 - DNA, 120 bp, Artificial Sequence
  ENSG00000108771_27 (sequence is synthesized)
ccctctggtcctacctattccgaagatatcaagagagcttggccatccctgggccatcctccatccactatctcctagagagtaaccttcccccatcctccatccattcattatgttacc

SEQ ID NO: 168973 - DNA, 80 bp, Artificial Sequence
  ENSG00000108773_0 (sequence is synthesized)
gctggttgcccatgcggccctagggctgggagcgcggcgccgctctccgctgcgggggaggccatggcggaaccttccca

SEQ ID NO: 168974 - DNA, 120 bp, Artificial Sequence
  ENSG00000108773_1 (sequence is synthesized)
cagtccccagcccctgccccaactccgactcctgcacccagcccggcttcagccccgattccgactcccaccccggcaccagcccctgccccagctgcagccccagccggcagcacaggg

SEQ ID NO: 168975 - DNA, 120 bp, Artificial Sequence
  ENSG00000108773_2 (sequence is synthesized)
actggggggcccggggtaggaagtgggggggccgggagcgggggggatccggctcgacctggcctgagccagcagcagcgcgccagtcagaggaaggcgcaagtccgggggctgccgcgc

SEQ ID NO: 168976 - DNA, 120 bp, Artificial Sequence
  ENSG00000108773_3 (sequence is synthesized)
gccaagaagcttgagaagctaggggtcttctcggcttgcaaggccaatgaaacctgtaagtgtaatggctggaaaaaccccaagccccccactgcaccccgcatggatctgcagcagcca

SEQ ID NO: 168977 - DNA, 120 bp, Artificial Sequence
  ENSG00000108773_4 (sequence is synthesized)
gctgccaacctgagtgagctgtgccgcagttgtgagcaccccttggctgaccacgtatcccacttggagaatgtgtcagaggatgagataaaccgactgctggggatggtggtggatgtg

SEQ ID NO: 168978 - DNA, 120 bp, Artificial Sequence
  ENSG00000108773_5 (sequence is synthesized)
gagaatctcttcatgtctgttcacaaggaagaggacacagacaccaagcaggtctatttctacctcttcaagctactgcggaaatgcatcctgcagatgacccggcctgtggtggagggg

SEQ ID NO: 168979 - DNA, 120 bp, Artificial Sequence
  ENSG00000108773_6 (sequence is synthesized)
tccctgggcagccctccatttgagaaacctaatattgagcagggtgtgctgaactttgtgcagtacaagtttagtcacctggctccccgggagcggcagacgatgttcgagctctcaaag

SEQ ID NO: 168980 - DNA, 120 bp, Artificial Sequence
  ENSG00000108773_7 (sequence is synthesized)
atgttcttgctctgccttaactactggaagcttgagacacctgcccagtttcggcagaggtctcaggctgaggacgtggctacctacaaggtcaattacaccagatggctctgttactgc

SEQ ID NO: 168981 - DNA, 120 bp, Artificial Sequence
  ENSG00000108773_8 (sequence is synthesized)
cacgtgccccagagctgtgatagcctcccccgctacgaaaccactcatgtctttgggcgaagccttctccggtccattttcaccgttacccgccggcagctgctggaaaagttccgagtg

SEQ ID NO: 168982 - DNA, 120 bp, Artificial Sequence
  ENSG00000108773_9 (sequence is synthesized)
gagaaggacaaattggtgcccgagaagaggaccctcatcctcactcacttccccaaattcctgtccatgctggaggaggagatctatggggcaaactctccaatctgggagtcaggcttc

SEQ ID NO: 168983 - DNA, 120 bp, Artificial Sequence
  ENSG00000108773_10 (sequence is synthesized)
accatgccaccctcagaggggacacagctggttccccggccagcttcagtcagtgcagcggttgttcccagcacccccatcttcagccccagcatgggtgggggcagcaacagctccctg

SEQ ID NO: 168984 - DNA, 120 bp, Artificial Sequence
  ENSG00000108773_11 (sequence is synthesized)
agtctggattctgcaggggccgagcctatgccaggcgagaagaggacgctcccagagaacctgaccctggaggatgccaagcggctccgtgtgatgggtgacatccccatggagctggtc

SEQ ID NO: 168985 - DNA, 120 bp, Artificial Sequence
  ENSG00000108773_12 (sequence is synthesized)
tcatcgagttccatgtcatcggcaactcactgacgcccaaggccaaccggcgggtgttgctgtggctcgtggggctgcagaatgtcttttcccaccagctgccgcgcatgcctaaggagt

SEQ ID NO: 168986 - DNA, 120 bp, Artificial Sequence
  ENSG00000108773_13 (sequence is synthesized)
atatcgcccgcctcgtctttgacccgaagcacaagactctggccttgatcaaggatgggcgggtcatcggtggcatctgcttccgcatgtttcccacccagggcttcacggagattgtct

SEQ ID NO: 168987 - DNA, 120 bp, Artificial Sequence
  ENSG00000108773_14 (sequence is synthesized)
tctgtgctgtcacctcgaatgagcaggtcaagggttatgggacccacctgatgaaccacctgaaggagtatcacatcaagcacaacattctctacttcctcacctacgccgacgagtacg

SEQ ID NO: 168988 - DNA, 120 bp, Artificial Sequence
  ENSG00000108773_15 (sequence is synthesized)
ccatcggctacttcaaaaagcagggtttctccaaggacatcaaggtgcccaagagccgctacctgggctacatcaaggactacgagggagcgacgctgatggagtgtgagctgaatcccc

SEQ ID NO: 168989 - DNA, 120 bp, Artificial Sequence
  ENSG00000108773_16 (sequence is synthesized)
gcatcccctacacggagctgtcccacatcatcaagaagcagaaagagatcatcaagaagctgattgagcgcaaacaggcccagatccgcaaggtctacccggggctcagctgcttcaagg

SEQ ID NO: 168990 - DNA, 120 bp, Artificial Sequence
  ENSG00000108773_17 (sequence is synthesized)
agggcgtgaggcagatccctgtggagagcgttcctggcattcgagagacaggctggaagccattggggaaggagaaggggaaggagctgaaggaccccgaccagctctacacaaccctca

SEQ ID NO: 168991 - DNA, 120 bp, Artificial Sequence
  ENSG00000108773_18 (sequence is synthesized)
aaaacctgctggcccaaatcaagtctcaccccagtgcctggcccttcatggagcctgtgaagaagtcggaggcccctgactactacgaggtcatccgcttccccattgacctgaagacca

SEQ ID NO: 168992 - DNA, 120 bp, Artificial Sequence
  ENSG00000108773_19 (sequence is synthesized)
tgactgagcggctgcgaagccgctactacgtgacccggaagctctttgtggccgacctgcagcgggtcatcgccaactgtcgcgagtacaaccccccggacagcgagtactgccgctgtg

SEQ ID NO: 168993 - DNA, 120 bp, Artificial Sequence
  ENSG00000108773_20 (sequence is synthesized)
ccagcgccctggagaagttcttctacttcaagctcaaggagggaggcctcattgacaagtaggcccatctttgggccgcagccctgacctggaatgtctccacctcggattctgatctga

SEQ ID NO: 168994 - DNA, 120 bp, Artificial Sequence
  ENSG00000108773_21 (sequence is synthesized)
tccttagggggtgccctggccccacggacccgactcagcttgagacactccagccaagggtcctccggacccgatcctgcagctctttctggaccttcaggcacccccaagcgtgcagct

SEQ ID NO: 168995 - DNA, 120 bp, Artificial Sequence
  ENSG00000108773_22 (sequence is synthesized)
ctgtcccagccttcactgtgtgtgagaggtctcctgggttggggcccagcccctctagagtagctggtggccagggatgaaccttgcccagccgtggtggcccccaggcctggtccccaa

SEQ ID NO: 168996 - DNA, 120 bp, Artificial Sequence
  ENSG00000108773_23 (sequence is synthesized)
gagctttggaggcttggattcctgggcctggcccaggtggctgtttccctgaggaccagaactgctcattttagcttgagtgatggcttcaggggttggaagttcagcccaaactgaagg

SEQ ID NO: 168997 - DNA, 120 bp, Artificial Sequence
  ENSG00000108773_24 (sequence is synthesized)
gggccatgccttgtccagcactgttctgtcagtctcccccaggggtggggggtatggggaccattcattccctggcattaatcccttagagggaataataaagctttttatttctctgtg

SEQ ID NO: 168998 - DNA, 120 bp, Artificial Sequence
  ENSG00000108773_25 (sequence is synthesized)
caaccggcgggtgttgctgtggctcgtggggctgcagaatgtcttttcccaccagctgccgcgcatgcctaaggagtatatcgcccgcctcgtctttgacccgtgcgtcccccagagagc

SEQ ID NO: 168999 - DNA, 120 bp, Artificial Sequence
  ENSG00000108773_26 (sequence is synthesized)
ccctcccccagggcagcacacccagttcccttcctcctcggcctcttcactcctcaaaattggggatcccctgctccccacttctgaggttcatcctttgagcattcttacttctcactg

SEQ ID NO: 169000 - DNA, 120 bp, Artificial Sequence
  ENSG00000108773_27 (sequence is synthesized)
gcaggagagacaggctggaagccattggggaaggagaaggggtgagtgtcaaaggagccgggttgggggtggggcagagggacttggagcctcagacttggtgtctctcgccccaggaag

SEQ ID NO: 169001 - DNA, 120 bp, Artificial Sequence
  ENSG00000108773_28 (sequence is synthesized)
gagctgaaggaccccgaccagctctacacaaccctcaaaaacctgctggcccaaatcaaggtggggagaccaggtttcctttccagggcccctgcaccaatggctgtggcctcttgatgc

SEQ ID NO: 169002 - DNA, 120 bp, Artificial Sequence
  ENSG00000108773_29 (sequence is synthesized)
tggcctaccaggatttggccccaagttcacatcctccctgttgtccccttttttccaggaaggcttcctggattggtccctcctctccctccatgggccttttgggatctgggcgtctac

SEQ ID NO: 169003 - DNA, 120 bp, Artificial Sequence
  ENSG00000108774_0 (sequence is synthesized)
agatccggatccggagcggctgaaaggcggaagtggaggccggagcctgggacaccgccggcggggagagaagcggatcccgtccgagccccggccccaagtaacgccgccgccccggag

SEQ ID NO: 169004 - DNA, 120 bp, Artificial Sequence
  ENSG00000108774_1 (sequence is synthesized)
ccgccttggaggtccccctccccactaagtgcctctttgcatagcaccagtccccacccgcacgctctctggaccactacagctggacgggcaatggcgggtcggggaggcgcagcacga

SEQ ID NO: 169005 - DNA, 120 bp, Artificial Sequence
  ENSG00000108774_2 (sequence is synthesized)
cccaatggaccagctgctgggaacaagatctgtcaatttaagctggttctgctgggggagtctgcggtaggcaaatccagcctcgtcctccgctttgtcaagggacagtttcacgagtac

SEQ ID NO: 169006 - DNA, 120 bp, Artificial Sequence
  ENSG00000108774_3 (sequence is synthesized)
caggagagcacaattggagcggccttcctcacacagactgtctgcctggatgacacaacagtcaagtttgagatctgggacacagctggacaggagcggtatcacagcctggcccccatg

SEQ ID NO: 169007 - DNA, 120 bp, Artificial Sequence
  ENSG00000108774_4 (sequence is synthesized)
tactatcggggggcccaggctgccatcgtggtctatgacatcaccaacacagatacatttgcacgggccaagaactgggtgaaggagctacagaggcaggccagccccaacatcgtcatt

SEQ ID NO: 169008 - DNA, 120 bp, Artificial Sequence
  ENSG00000108774_5 (sequence is synthesized)
gcactcgcgggtaacaaggcagacctggccagcaagagagccgtggaattccaggaagcacaagcctatgcagacgacaacagtttgctgttcatggagacatcagcaaagactgcaatg

SEQ ID NO: 169009 - DNA, 120 bp, Artificial Sequence
  ENSG00000108774_6 (sequence is synthesized)
ccagccagccggagccagtgctgcagcaactgagccccccttgcctgcccgctgcccccgcctcctccgcctgaatgacccgactggaatccactctaaccaatcgcacttaacgactcg

SEQ ID NO: 169010 - DNA, 120 bp, Artificial Sequence
  ENSG00000108774_7 (sequence is synthesized)
ggccaccactgggggggcagggggaggggtccaccatgatttctccatataattttgatcataggccggagtgagtcattccacctgcacctttctgtacaaatactaattcaattttaa

SEQ ID NO: 169011 - DNA, 120 bp, Artificial Sequence
  ENSG00000108774_8 (sequence is synthesized)
gtcttaagtcacttttttaatatatatgatcttctgctcttcccacttcctcccctttctactgctctcccattttcccttgctgggagtagccacatgctcttgccccccaacccttgt

SEQ ID NO: 169012 - DNA, 120 bp, Artificial Sequence
  ENSG00000108774_9 (sequence is synthesized)
atatggggacagtggggtcagtgcagctaccctttctttccctcctgcggaacagcggacccagcaagagcatccacatcctcactttgttcggagtggtctttggtttgggcggtgggg

SEQ ID NO: 169013 - DNA, 120 bp, Artificial Sequence
  ENSG00000108774_10 (sequence is synthesized)
cagaccttgggaaggggcttaggaagggagaggcagctcttccttcagctggctctcatcaggctgcagccccctccccgctcccacctccctgctgggaaaccacagcattatcacagc

SEQ ID NO: 169014 - DNA, 120 bp, Artificial Sequence
  ENSG00000108774_11 (sequence is synthesized)
attattgtgacagccacgaacccattgcccacaacccctccaccctcggtcaccccaacctctggctctgagccctgttctgaccaaatcatgatgatgagtatttgggggtgggtgggt

SEQ ID NO: 169015 - DNA, 120 bp, Artificial Sequence
  ENSG00000108774_12 (sequence is synthesized)
aagggggggagtgggaggggacggaaccaactttttctgtattttgtattgtatgttttcttcaacatgtaaccaatcagtatcttgtcaatatagtcagccgatcgatcgacctcacaa

SEQ ID NO: 169016 - DNA, 120 bp, Artificial Sequence
  ENSG00000108774_13 (sequence is synthesized)
agtgattcagatgtcgggactggaacaccagctgttggggatgcaggacttggtctctgccctcccacacctcctgcctcttctttctctccatcgccccatctctgccagtagagaatg

SEQ ID NO: 169017 - DNA, 120 bp, Artificial Sequence
  ENSG00000108774_14 (sequence is synthesized)
ggcaataggtcagttgcttctcctcccctcctctctccaccacagcaagggcatatcacctgtctgctggtctagagtgggcctgcggggtcccttcaccactctttttttttttttttt

SEQ ID NO: 169018 - DNA, 120 bp, Artificial Sequence
  ENSG00000108774_15 (sequence is synthesized)
ggtctatgacatcaccaacacagtaaagatttccccttgcttcttcctttgcccttcatcttctcaaagtcccagggattgggttatcagagccctgatttcaggccgcttaaccctctg

SEQ ID NO: 169019 - DNA, 120 bp, Artificial Sequence
  ENSG00000108774_16 (sequence is synthesized)
aaacccggctcagcctcccaagtcctaacctgctagccacgctggggaaggttgtgggtacctcgtgtggatcgtggctggcgttgcttcagattcttctttcctctgggtctgcaacca

SEQ ID NO: 169020 - DNA, 120 bp, Artificial Sequence
  ENSG00000108774_17 (sequence is synthesized)
gaccttgaggagatgggaagctgcctgcctgcattagggactaaatgcgtctgtggtggcagccccacttcctcacctgggccctggaattgagcccagcaactggtctccatgccagag

SEQ ID NO: 169021 - DNA, 120 bp, Artificial Sequence
  ENSG00000108774_18 (sequence is synthesized)
accgccggcggggagagaagcggatcccgtccgagccccggccccaagtaacgccgccgccccggagccgccagtctcgctctctcgccaggccggagtgcagtggcactatctcagctc

SEQ ID NO: 169022 - DNA, 80 bp, Artificial Sequence
  ENSG00000108784_0 (sequence is synthesized)
ctggccgtcgcgggacccgcaggactgagaccatggaggcggtggcggtggccgcggcggtgggggtccttctcctggcc

SEQ ID NO: 169023 - DNA, 120 bp, Artificial Sequence
  ENSG00000108784_1 (sequence is synthesized)
cggccgtgcgggcgctcgtggcccggctgctggggccaggccccgcggccgacttctccgtgtcggtggagcgcgctctggctgccaagccgggcttggacacctacagcctgggcggcg

SEQ ID NO: 169024 - DNA, 120 bp, Artificial Sequence
  ENSG00000108784_2 (sequence is synthesized)
gtgcgcggctccacgggcgtggcggccgccgcggggctgcaccgctacctgcgcgacttctgtggctgccacgtggcctggtccggctctcagctgcgcctgccgcggccactgccagcc

SEQ ID NO: 169025 - DNA, 120 bp, Artificial Sequence
  ENSG00000108784_3 (sequence is synthesized)
tgccgcggccactgccagccgtgccgggggagctgaccgaggccacgcccaacaggtaccgctattaccagaatgtgtgcacgcaaagctactctttcgtgtggtgggactgggcccgct

SEQ ID NO: 169026 - DNA, 120 bp, Artificial Sequence
  ENSG00000108784_4 (sequence is synthesized)
gggagcgagagatagactggatggcgctgaatggcatcaacctggcactggcctggagcggccaggaggccatctggcagcgggtgtacctggccttgggcctgacccaggcagagatca

SEQ ID NO: 169027 - DNA, 120 bp, Artificial Sequence
  ENSG00000108784_5 (sequence is synthesized)
atgagttctttactggtcctgccttcctggcctgggggcgaatgggcaacctgcacacctgggatggccccctgcccccctcctggcacatcaagcagctttacctgcagcaccgggtcc

SEQ ID NO: 169028 - DNA, 120 bp, Artificial Sequence
  ENSG00000108784_6 (sequence is synthesized)
tggaccagatgcgctccttcggcatgaccccagtgctgcctgcattcgcggggcatgttcccgaggctgtcaccagggtgttccctcaggtcaatgtcacgaagatgggcagttggggcc

SEQ ID NO: 169029 - DNA, 120 bp, Artificial Sequence
  ENSG00000108784_7 (sequence is synthesized)
actttaactgttcctactcctgctccttccttctggctccggaagaccccatattccccatcatcgggagcctcttcctgcgagagctgatcaaagagtttggcacagaccacatctatg

SEQ ID NO: 169030 - DNA, 120 bp, Artificial Sequence
  ENSG00000108784_8 (sequence is synthesized)
gggccgacactttcaatgagatgcagccaccttcctcagagccctcctaccttgccgcagccaccactgccgtctatgaggccatgactgcagtggatactgaggctgtgtggctgctcc

SEQ ID NO: 169031 - DNA, 120 bp, Artificial Sequence
  ENSG00000108784_9 (sequence is synthesized)
aaggctggctcttccagcaccagccgcagttctgggggcccgcccagatcagggctgtgctgggagctgtgccccgtggccgcctcctggttctggacctgtttgctgagagccagcctg

SEQ ID NO: 169032 - DNA, 120 bp, Artificial Sequence
  ENSG00000108784_10 (sequence is synthesized)
gtctttttggagccctagaggctgtgaacggaggcccagaagctgcccgcctcttccccaactccaccatggtaggcacgggcatggcccccgagggcatcagccagaacgaagtggtct

SEQ ID NO: 169033 - DNA, 120 bp, Artificial Sequence
  ENSG00000108784_11 (sequence is synthesized)
attccctcatggctgagctgggctggcgaaaggacccagtgccagatttggcagcctgggtgaccagctttgccgcccggcggtatggggtctcccacccggacgcaggggcagcgtgga

SEQ ID NO: 169034 - DNA, 120 bp, Artificial Sequence
  ENSG00000108784_12 (sequence is synthesized)
ggctactgctccggagtgtgtacaactgctccggggaggcctgcaggggccacaatcgtagcccgctggtcaggcggccgtccctacagatgaataccagcatctggtacaaccgatctg

SEQ ID NO: 169035 - DNA, 120 bp, Artificial Sequence
  ENSG00000108784_13 (sequence is synthesized)
atgtgtttgaggcctggcggctgctgctcacatctgctccctccctggccaccagccccgccttccgctacgacctgctggacctcactcggcaggcagtgcaggagctggtcagcttgt

SEQ ID NO: 169036 - DNA, 120 bp, Artificial Sequence
  ENSG00000108784_14 (sequence is synthesized)
actatgaggaggcaagaagcgcctacctgagcaaggagctggcctccctgttgagggctggaggcgtcctggcctatgagctgctgccggcactggacgaggtgctggctagtgacagcc

SEQ ID NO: 169037 - DNA, 120 bp, Artificial Sequence
  ENSG00000108784_15 (sequence is synthesized)
gcttcttgctgggcagctggctagagcaggcccgagcagcggcagtcagtgaggccgaggccgatttctacgagcagaacagccgctaccagctgaccttgtgggggccagaaggcaaca

SEQ ID NO: 169038 - DNA, 120 bp, Artificial Sequence
  ENSG00000108784_16 (sequence is synthesized)
tcctggactatgccaacaagcagctggcggggttggtggccaactactacacccctcgctggcggcttttcctggaggcgctggttgacagtgtggcccagggcatccctttccaacagc

SEQ ID NO: 169039 - DNA, 120 bp, Artificial Sequence
  ENSG00000108784_17 (sequence is synthesized)
accagtttgacaaaaatgtcttccaactggagcaggccttcgttctcagcaagcagaggtaccccagccagccgcgaggagacactgtggacctggccaagaagatcttcctcaaatatt

SEQ ID NO: 169040 - DNA, 120 bp, Artificial Sequence
  ENSG00000108784_18 (sequence is synthesized)
acccccgctgggtggccggctcttggtgatagattcgccaccactgggccttgttttccgctaattccagggcagattccagggcccagagctggacagacatcacaggataacccaggc

SEQ ID NO: 169041 - DNA, 120 bp, Artificial Sequence
  ENSG00000108784_19 (sequence is synthesized)
ctgggaggaggccccacggcctgctggtggggtctgacctggggggattggagggaaatgacctgccctccaccaccacccaaagtgtgggattaaagtactgttttctttccacttaaa

SEQ ID NO: 169042 - DNA, 120 bp, Artificial Sequence
  ENSG00000108784_20 (sequence is synthesized)
gtttggcacagaccacatctatggggccgacactttcaatgagatgcagccaccttcctcagagccctcctaccttgccgcagccaccactgccgtctatgaggccatgactgcagttct

SEQ ID NO: 169043 - DNA, 120 bp, Artificial Sequence
  ENSG00000108784_21 (sequence is synthesized)
ttgccttcctcccccaccttctctttgaacctgcggactgaggaaggacgcctccatcccccaccctacaggcctgtgttccagcgcctgccacactatggagtgatgtgttcacacagc

SEQ ID NO: 169044 - DNA, 120 bp, Artificial Sequence
  ENSG00000108784_22 (sequence is synthesized)
tgtcctcccctgcccatctgttagactgtgggggcagggattccccgttccaggaaaacaccgtgcagaggaggggctctggcagtgtggcatgaaagtggaatatgccacccaaatacc

SEQ ID NO: 169045 - DNA, 120 bp, Artificial Sequence
  ENSG00000108784_23 (sequence is synthesized)
acgagtgcctcagaagcccagccccggtacctggtctcagctccacctggggtgggtcccagtgtgcagcagaagggccgagtttggagcccctcccctctcctctaggtgggggatggg

SEQ ID NO: 169046 - DNA, 120 bp, Artificial Sequence
  ENSG00000108786_0 (sequence is synthesized)
agttaggtgggacttgggttggggtagagtcaggttgtgacctgcactccattagccatgagacctcaggcaagttccttgctttctctgagtgctttcctttcctttcccttttctttt

SEQ ID NO: 169047 - DNA, 120 bp, Artificial Sequence
  ENSG00000108786_1 (sequence is synthesized)
cagagtgctgggattacaggcatgacccaccccatccggccctctgagtctttcttatctgtaaaatgggtataataatacctatctaatcggttttagtaatggtggagataatgcctg

SEQ ID NO: 169048 - DNA, 120 bp, Artificial Sequence
  ENSG00000108786_2 (sequence is synthesized)
aaagtgctagtatagaggtttaatacccagcaaggactgttattagaatgaatagtaatatgactactgtcacattttgcaaatgtgtaaagaagaaagagggctaagtgaatcaaaggg

SEQ ID NO: 169049 - DNA, 120 bp, Artificial Sequence
  ENSG00000108786_3 (sequence is synthesized)
agacagccccactcaccctgttctgccccagaggactgagcgatccccaccatctgggaagctgcctcaccaggaggtccagctggggctacaggactggctactttgctacaatggccc

SEQ ID NO: 169050 - DNA, 120 bp, Artificial Sequence
  ENSG00000108786_4 (sequence is synthesized)
atctttcctgagcccagtggagggtcccaggggggcagaagtcattgataggggccagtagggttgtagagccactgtctgaacttctgtggaggtctggtgcaggggaggtgtgaacag

SEQ ID NO: 169051 - DNA, 120 bp, Artificial Sequence
  ENSG00000108786_5 (sequence is synthesized)
ataggaggctaggtgaggatgcagcagaggaagggggcaggagtgccccaggagggggcggtaccgaggcagggattcagctgggtctgagagggagggaaggctgagggggatggccct

SEQ ID NO: 169052 - DNA, 120 bp, Artificial Sequence
  ENSG00000108786_6 (sequence is synthesized)
ttggagtgggcagggacatgaccacagaaagcctgggaagtggaaacagacaggagcctgctggagctcttggagctttgtgtggggcactaggggaaggaggcaggcactccaccctga

SEQ ID NO: 169053 - DNA, 120 bp, Artificial Sequence
  ENSG00000108786_7 (sequence is synthesized)
cctgcccctacctctggatgagggtcttctctgcctgttggatgatgtgctgcccctgctcttggaggaagaggcctcccagccaccccctcctgccagtcgccttgccctgctgaccca

SEQ ID NO: 169054 - DNA, 120 bp, Artificial Sequence
  ENSG00000108786_8 (sequence is synthesized)
gacagatctgctatccctacagcatccaggaaggccacagggagggggcccaggtggcatgggtttctgaggcctgggatctgctctcagtcccgctctcgccaaccccctttgcccctc

SEQ ID NO: 169055 - DNA, 120 bp, Artificial Sequence
  ENSG00000108786_9 (sequence is synthesized)
tgtgacagtgtgtgtacatatgcgtgcatgtgtgtacctgtgtggtgtggctcacaaggtcacccctgggggtgggataataagaggtaaagtgtgaccccctctcttccgtacattcat

SEQ ID NO: 169056 - DNA, 120 bp, Artificial Sequence
  ENSG00000108786_10 (sequence is synthesized)
tttttcaagcttgtgaatattcacattgttaatataatcttctgcagtcccatgacttcgaatagcacttagatgccgatgacccccccaccaaagaaaccccactgtctcccacagact

SEQ ID NO: 169057 - DNA, 120 bp, Artificial Sequence
  ENSG00000108786_11 (sequence is synthesized)
ccaggtctgtatctccaactgcctactcaatacaacacgtccacctgatacaatgaacttaatgtgtctaaaccccaattccacatttccagtcctcctaccggctcctcccccagtctt

SEQ ID NO: 169058 - DNA, 120 bp, Artificial Sequence
  ENSG00000108786_12 (sequence is synthesized)
ctctactttactatatgacaactccatttttcccaatactggttttaaaaaccctggagtagtccttgactccagtctctctcacctttcaaccaattcagcagcaaatactgacagctc

SEQ ID NO: 169059 - DNA, 120 bp, Artificial Sequence
  ENSG00000108786_13 (sequence is synthesized)
tacctttgctcatcaaagcatatccccaaatcaccctattccagactgcacactgtcatctctcccttcaattacagcagtagcctcctaactagttttcttgattccactcctgcccat

SEQ ID NO: 169060 - DNA, 84 bp, Artificial Sequence
  ENSG00000108786_14 (sequence is synthesized)
tagcctcctaactagttttcttgattccactcctgcccatcagcagtgaaattaccccagagcagttaaaatgatcttttagga

SEQ ID NO: 169061 - DNA, 61 bp, Artificial Sequence
  ENSG00000108786_15 (sequence is synthesized)
tgggaggtggaggctggctgatccccttaggttgggagttcaagaccatcctgacgtgtct

SEQ ID NO: 169062 - DNA, 120 bp, Artificial Sequence
  ENSG00000108786_16 (sequence is synthesized)
acccgggaggtggaggttgcagtgagccagaatcgtgccacagcactccagcctgggcaagaagcgcgaaactccgtctcaaaataaaataatcttctaaaaatgacagggccaggtggg

SEQ ID NO: 169063 - DNA, 84 bp, Artificial Sequence
  ENSG00000108786_17 (sequence is synthesized)
tctcaaaataaaataatcttctaaaaatgacagggccaggtggggtggcacttttttataatccgcatcaggggtttgagacca

SEQ ID NO: 169064 - DNA, 120 bp, Artificial Sequence
  ENSG00000108786_18 (sequence is synthesized)
aggagaatcgcctgaaccaggcagatgcaggatgcagtgagccaagattaagacactgcactccaacctaagcaatactttgtctcaaaaataaaaaaaagcctgggaaacaaagtgaga

SEQ ID NO: 169065 - DNA, 120 bp, Artificial Sequence
  ENSG00000108786_19 (sequence is synthesized)
ccccgtctctacaaaaaagtcaaaaaattagctgggtatggtggcagtgatggcacacacctgtagtcccggctacttgggaagctttttaatattttttgcagagaccgggtctcactc

SEQ ID NO: 169066 - DNA, 87 bp, Artificial Sequence
  ENSG00000108786_20 (sequence is synthesized)
gaagctttttaatattttttgcagagaccgggtctcactctgttacctggcctggtcttgaactcctgggctccaacaatccccttt

SEQ ID NO: 169067 - DNA, 120 bp, Artificial Sequence
  ENSG00000108786_21 (sequence is synthesized)
agaaataaacagccatatgaagagatacagacagggcggtctggaagggtccagagcaggagcttctatctccatagagttggggttacgtcaccctctgggcacattctgtcagcctcc

SEQ ID NO: 169068 - DNA, 120 bp, Artificial Sequence
  ENSG00000108786_22 (sequence is synthesized)
acacgttcagccctcagaagctcccgaaccctgtcctttgggccttttatggagaactccattggctgtccatgactgaagcatggacaactgtgataatgtgattgggcaaaaagggtc

SEQ ID NO: 169069 - DNA, 120 bp, Artificial Sequence
  ENSG00000108786_23 (sequence is synthesized)
tgatctaagcccagcaaggccagtccagattctttgggcctttgtgcagcattcctttctccagggtatggggcaaggacccactctggaatgaggatcctacaacccacaatcagatta

SEQ ID NO: 169070 - DNA, 120 bp, Artificial Sequence
  ENSG00000108786_24 (sequence is synthesized)
gagtcctgccttgggcagctgaaaagaggacaggagaaggtcagagagacgaaaggctgttttttgaggcctgaggcaccccaacatgacaacgtaagactgtaaccatggtcatgtgag

SEQ ID NO: 169071 - DNA, 120 bp, Artificial Sequence
  ENSG00000108786_25 (sequence is synthesized)
ttatgagctaggaaccctggacgaaaccagcacatatacaatcatctcccacctcccaacgcctttactttcacagcctctgcagcaaactgcggtcactataatcgctcctgtggcaca

SEQ ID NO: 169072 - DNA, 120 bp, Artificial Sequence
  ENSG00000108786_26 (sequence is synthesized)
gaggcatacccaggggaatctgcccagggggccactctgtgcccacgtgggaacccacacctgcttgtaaagcctcccctccctctgaccagcaaccaggacagtttgttgttccaagca

SEQ ID NO: 169073 - DNA, 120 bp, Artificial Sequence
  ENSG00000108786_27 (sequence is synthesized)
gtgggctcatgtctgttttggctcagaacagggtggggagagcgggccagggacccgcaggaaggcttatccttgagattgcgtgggagacacaacaaggggtgggggcccgcaggcggg

SEQ ID NO: 169074 - DNA, 120 bp, Artificial Sequence
  ENSG00000108786_28 (sequence is synthesized)
gcggggcgaagcaggtgatatcaagcccagagccccagcctctccccacagtctcaccatggcccgcaccgtggtgctcatcaccggctgttcctcgggcatcggcctgcacttggccgt

SEQ ID NO: 169075 - DNA, 120 bp, Artificial Sequence
  ENSG00000108786_29 (sequence is synthesized)
acgtctggcttcagatccatcccagagcttcaaagtgtatgccacgttgagggacctgaaaacacagggccggctgtgggaggcggcccgggccctggcatgccctccgggatccctgga

SEQ ID NO: 169076 - DNA, 120 bp, Artificial Sequence
  ENSG00000108786_30 (sequence is synthesized)
gacgttgcagctggacgtaagggactcaaaatccgtggccgctgcccgggaacgcgtgactgagggccgcgtggacgtgctggtgtgtaacgcaggcctgggcctgctggggccgctgga

SEQ ID NO: 169077 - DNA, 120 bp, Artificial Sequence
  ENSG00000108786_31 (sequence is synthesized)
ggcgctgggggaggacgccgtggcctctgtgctggacgtgaatgtagtagggactgtgcggatgctgcaggccttcctgccagacatgaagaggcgcggttcgggacgcgtgttggtgac

SEQ ID NO: 169078 - DNA, 120 bp, Artificial Sequence
  ENSG00000108786_32 (sequence is synthesized)
cgggagcgtgggaggattgatggggctgcctttcaatgacgtttattgcgccagcaagttcgcgctcgaaggcttatgcgagagtctggcggttctgctgctgccctttggggtccactt

SEQ ID NO: 169079 - DNA, 120 bp, Artificial Sequence
  ENSG00000108786_33 (sequence is synthesized)
gagcctgatcgagtgcggcccagtgcacaccgccttcatggagaaggtgttgggcagcccagaggaggtgctggaccgcacggacatccacaccttccaccgcttctaccaatacctcgc

SEQ ID NO: 169080 - DNA, 120 bp, Artificial Sequence
  ENSG00000108786_34 (sequence is synthesized)
ccacagcaagcaagtctttcgcgaggcggcgcagaaccctgaggaggtggcggaggtcttcctcaccgctttgcgcgccccgaagccgaccctgcgctacttcaccaccgagcgcttcct

SEQ ID NO: 169081 - DNA, 120 bp, Artificial Sequence
  ENSG00000108786_35 (sequence is synthesized)
gcccctgctgcggatgcgcctggacgaccccagcggctccaactacgtcaccgccatgcaccgggaagtgttcggcgacgttccggcaaaggccgaggctggggccgaggctgggggcgg

SEQ ID NO: 169082 - DNA, 120 bp, Artificial Sequence
  ENSG00000108786_36 (sequence is synthesized)
ggccgggcctggggcagaggacgaggccgggcgcggtgcggtgggggaccctgagctcggcgatcctccggccgccccgcagtaaaggcttcctcagccgctgtctcccgcgcccttctt

SEQ ID NO: 169083 - DNA, 120 bp, Artificial Sequence
  ENSG00000108786_37 (sequence is synthesized)
tgtcccctgggtctgtgtggtccctggggatggggcggcggtagcagctgtgggtggctaattaagatagatcgcgttagccagttttaccagcgcagctaggcgcgatggctgtcgcct

SEQ ID NO: 169084 - DNA, 120 bp, Artificial Sequence
  ENSG00000108786_38 (sequence is synthesized)
gtaatgccagcgctttgggaggcggaggcaggaggatcgctcaagccccggagttggagaccagccagagcaacacagtgagacccccatctctacaaaaataaagaaaatttaaaaatc

SEQ ID NO: 169085 - DNA, 120 bp, Artificial Sequence
  ENSG00000108786_39 (sequence is synthesized)
cgctgcgcctcaggaacctcgtctccccacctaagggctgcctttcaatgacgtttattgcgccagcaagttcgcgctcgaaggcttatgcgagagtctggcggttctgctgctgccctt

SEQ ID NO: 169086 - DNA, 120 bp, Artificial Sequence
  ENSG00000108786_40 (sequence is synthesized)
tggggtccagtgagtcaacacccccgttccccgaaccctcttaactctgacctagagacgccgagcaccctgtcctgcgggagccgctctggggcgatctccctggccctctctgcccgg

SEQ ID NO: 169087 - DNA, 120 bp, Artificial Sequence
  ENSG00000108786_41 (sequence is synthesized)
ctcacattagctgtgtgccaggcacttgggctgggcgcatggcacgcattgtgccacctgctgacctagctgctgaagtgttggtattgttatggggaagctccagcccagagaggttag

SEQ ID NO: 169088 - DNA, 120 bp, Artificial Sequence
  ENSG00000108786_42 (sequence is synthesized)
gtgactggcccaaggtcacacagcggccagggaccccgctagattcgaatcctgacaccagggctcccttgtagcctcagatggatttgggagggctgctccggcaggaacccgcgtttc

SEQ ID NO: 169089 - DNA, 120 bp, Artificial Sequence
  ENSG00000108786_43 (sequence is synthesized)
gggaacgcgtgactgagggccgcgtggacgtgctgggtgagcctcctggaagcatatgggctcctaggagccttctccgccctgcgttgaaaccaacatgttcccaggcccagggagcac

SEQ ID NO: 169090 - DNA, 120 bp, Artificial Sequence
  ENSG00000108788_0 (sequence is synthesized)
cctcgccgcagggggcccgcccgctggcccgtttccggtccggtgggtacaagatgacggagccgggcgcctctcccgaggacccttgggtcaaggcaagccccgtgggcgcgcacgccg

SEQ ID NO: 169091 - DNA, 120 bp, Artificial Sequence
  ENSG00000108788_1 (sequence is synthesized)
gcgaggggagggcgggtcgggctcgtgcacgtaggggggccggaagacgaggggcttccctcctgtccccaaagtcccccacgctctccgtgccccggggctgcagagaagacagctctc

SEQ ID NO: 169092 - DNA, 120 bp, Artificial Sequence
  ENSG00000108788_2 (sequence is synthesized)
accccgcgtgtgccaaggtggagtatgcctacagcgacaacagcctggaccccgggctttttgtagaaagcacccgcaaggggagtgtagtgtccagagctaatagcatcggttccacca

SEQ ID NO: 169093 - DNA, 120 bp, Artificial Sequence
  ENSG00000108788_3 (sequence is synthesized)
gtgcctcttctgtccccaacacagatgatgaggacagtgattaccaccaggaggcctacaaggagtcctacaaagaccggcggcggcgcgcacacactcaggctgagcagaagaggaggg

SEQ ID NO: 169094 - DNA, 120 bp, Artificial Sequence
  ENSG00000108788_4 (sequence is synthesized)
acgccatcaagagaggctatgatgaccttcagaccatcgtccccacttgccagcagcaggacttctccattggctcccaaaagctcagcaaagccatcgttctacaaaagaccattgact

SEQ ID NO: 169095 - DNA, 120 bp, Artificial Sequence
  ENSG00000108788_5 (sequence is synthesized)
acattcagtttttgcacaaggagaagaaaaagcaggaggaggaggtgtccacgttacgcaaggatgtcaccgccctaaagatcatgaaagtgaactatgagcagattgtgaaggcacacc

SEQ ID NO: 169096 - DNA, 120 bp, Artificial Sequence
  ENSG00000108788_6 (sequence is synthesized)
aggacaacccccatgaaggggaggaccaggtctctgaccaggtcaagttcaacgtgtttcaaggcatcatggattccctgttccagtccttcaatgcctccatctcagtggccagcttcc

SEQ ID NO: 169097 - DNA, 120 bp, Artificial Sequence
  ENSG00000108788_7 (sequence is synthesized)
aggagctgtcagcgtgtgtcttcagctggatcgaggagcactgtaagcctcagaccctgcgggagattgtgattggcgtcctgcaccaattgaaaaaccagctttactgaccggttcttg

SEQ ID NO: 169098 - DNA, 120 bp, Artificial Sequence
  ENSG00000108788_8 (sequence is synthesized)
gaaacctggagaacagccaacaagaggcccttgaatctctacgtggccactgaactgctgggcccgggagactggactacaacacctcacactggtcagctggtttctacttggtgtttg

SEQ ID NO: 169099 - DNA, 120 bp, Artificial Sequence
  ENSG00000108788_9 (sequence is synthesized)
gtttttcccagccccattttatcttcagcggagccgcggtgtttgttttgtgaaagcttctgattaatttattatattgacgataaaactcaaacctacccagccttccccccactccat

SEQ ID NO: 169100 - DNA, 120 bp, Artificial Sequence
  ENSG00000108788_10 (sequence is synthesized)
tcaagcctcagatttctgctcatgatctacatagatttggaaactgttttcctctgttttggtctcttgggcaacatttttggcccaagtttgggcaacatttggcccaagtttgggcat

SEQ ID NO: 169101 - DNA, 120 bp, Artificial Sequence
  ENSG00000108788_11 (sequence is synthesized)
tttggcagtagctgtatgggagaaaaagagtaagaggaaatattcccacagccatgaagggtgaaagggcaccttgtgcctagactagggctgcctggtcagtcccaggtgaggccaagg

SEQ ID NO: 169102 - DNA, 120 bp, Artificial Sequence
  ENSG00000108788_12 (sequence is synthesized)
gctttctggccatctcagggaggggccaccaggttcctcccctcaccccatattccatcaccttcctcctctgctctgggtggtaagggaagccctcccggttcccacaggctatgatgc

SEQ ID NO: 169103 - DNA, 120 bp, Artificial Sequence
  ENSG00000108788_13 (sequence is synthesized)
tgcatggcagaggcaggtataacacagcactacatattggaaattttttatttttctaaataccaatgcagttttgctacggttacaattttgaaatattaactgagcctcaaaatcacc

SEQ ID NO: 169104 - DNA, 120 bp, Artificial Sequence
  ENSG00000108788_14 (sequence is synthesized)
ctttctgtcaagcatatcttggcctctcccatgtctcagtgttgcctgcatttctcccaggacttgggggtggggtgaaaagcgtacaaaagatacttaaaagggctcctggggtacaca

SEQ ID NO: 169105 - DNA, 120 bp, Artificial Sequence
  ENSG00000108788_15 (sequence is synthesized)
agcccagcaggtcctgagtgaagccgtgggccctccaaatgctcgttttatagcaacctctctctaccctagttctccaaattcacttctgccttcctcaggtttgatatctggcaggtt

SEQ ID NO: 169106 - DNA, 120 bp, Artificial Sequence
  ENSG00000108788_16 (sequence is synthesized)
tgactatccagaggaaattaaatatttttatataaaattaaattataataaatattgccaaatgctttcctttagcattgttccaagtctaaatgttaacctcaagctactgcaatttag

SEQ ID NO: 169107 - DNA, 120 bp, Artificial Sequence
  ENSG00000108788_17 (sequence is synthesized)
acaatgaaatgggctgggtctacccccagccaccagccctcatcctctctacccagtgctctggtttatgcttgtctcctgactgctctgcttaaaggtgaaagtagcaggaacaacaac

SEQ ID NO: 169108 - DNA, 120 bp, Artificial Sequence
  ENSG00000108788_18 (sequence is synthesized)
aaaagccaaccaaaaacaaggtagccagtgcaagacatctcactcttctgacatcctgcagtccccaccagtcctgaccgtgggcccctcaggggtctgggagtgtgacgttgtaatctt

SEQ ID NO: 169109 - DNA, 120 bp, Artificial Sequence
  ENSG00000108788_19 (sequence is synthesized)
catccgtctctatcccaacttcctcctgtgagacagggagacaagtgaatgagatgtcaccaggataagaccacagggaagcaaagaaggaagagagctccacttacaaagaactgcttc

SEQ ID NO: 169110 - DNA, 120 bp, Artificial Sequence
  ENSG00000108788_20 (sequence is synthesized)
ttgctcttggggtatccttcaagtattgcatcagacagctctgtagcctgacaagaaataaaaccacccgttttcagatgggcagcactgggcactgcctgtcagtttatgatattgtgt

SEQ ID NO: 169111 - DNA, 120 bp, Artificial Sequence
  ENSG00000108788_21 (sequence is synthesized)
cgcgccactgcactctagcctgggcgactgagcgagactctgtctaaaaaaaaaataaataaataaaagaaagccattgtgtcctacaggtgtctgagggtctggcaatgttccccaccc

SEQ ID NO: 169112 - DNA, 120 bp, Artificial Sequence
  ENSG00000108788_22 (sequence is synthesized)
caggtaggcagtaacatcccccccgacctcggggggctcagatatgtcataattgtagtacctttcctagacagggaagccccagccatccacacaggggtgctggagccaaagtatcag

SEQ ID NO: 169113 - DNA, 120 bp, Artificial Sequence
  ENSG00000108788_23 (sequence is synthesized)
acacaaggtctcaccatctttcacctcatctggaacattaggtggttctgtccatctgccttctctggacaccaggttcttcccagctggggaaaggtgggctagctggaccccactggg

SEQ ID NO: 169114 - DNA, 120 bp, Artificial Sequence
  ENSG00000108788_24 (sequence is synthesized)
gtttccggtccggtgggtacaagatgacggagccgggcgcctctcccgaggacccttgggtcaaggtggagtatgcctacagcgacaacagcctggaccccggtgagtagctgccccatc

SEQ ID NO: 169115 - DNA, 120 bp, Artificial Sequence
  ENSG00000108788_25 (sequence is synthesized)
ttaagctctagagggacactcccgcccaggctctctagattcttgtggcgttgccaaccacgcctgagcacagtccactctccctgagcagagttcctggcttgagacagcaggagctga

SEQ ID NO: 169116 - DNA, 120 bp, Artificial Sequence
  ENSG00000108788_26 (sequence is synthesized)
tgatcactcaccactcagtggagcagctgatcactcacaccctcatcacgtccacatgcccgtttgtgagccaggggggtatcatgcaggcctatggagcagtgtagacactagggagca

SEQ ID NO: 169117 - DNA, 120 bp, Artificial Sequence
  ENSG00000108788_27 (sequence is synthesized)
gagcactgcagcgtggtctggcaggaagtggggggcccagtatggttggctttgggttgaagggaagaggtcagcatttaagaaagccattgtgtggccgggcgcggtggctcacccctg

SEQ ID NO: 169118 - DNA, 120 bp, Artificial Sequence
  ENSG00000108788_28 (sequence is synthesized)
aagaaaaagcaggaggaggaggtgtccacgttacgcaaggatgtcaccgccctaaagatcatgaaagtgtaagaggggtgctgaatggggggaaccagaacttctgaggcaacttcattg

SEQ ID NO: 169119 - DNA, 120 bp, Artificial Sequence
  ENSG00000108788_29 (sequence is synthesized)
cacaccctcccttgttcaaaggccacatcagttactgctgtacagataatactcttagttcctgagctagccagtaggactgtgtatccccaactgtccttacacatggcagacactcag

SEQ ID NO: 169120 - DNA, 120 bp, Artificial Sequence
  ENSG00000108788_30 (sequence is synthesized)
gctgccattcctgggagtacacaggatagtcccgtcattcttcttgggtgggcggagctgctgcagcacctcagccctggcctgcatgcttttaggaactatgagcagattgtgaaggca

SEQ ID NO: 169121 - DNA, 120 bp, Artificial Sequence
  ENSG00000108788_31 (sequence is synthesized)
ggctcggccttggtgtggtgattgccatgggatagttggggtctggggtaaggggaacaaagtcagccttatcttcttggttgagaatacttctgtacctgtcctttttttcttgccccc

SEQ ID NO: 169122 - DNA, 120 bp, Artificial Sequence
  ENSG00000108797_0 (sequence is synthesized)
gaaaccggcgcgtgccaggagacagaggctggggaaggggggaggtgagaggaaagagggtggaaaggagaggatagagagagaagagcggaggaccaggaaccagagagagagagagag

SEQ ID NO: 169123 - DNA, 120 bp, Artificial Sequence
  ENSG00000108797_1 (sequence is synthesized)
aaaagagagaggagagacagagcgcttgggggcgaaaggagagagggagggaagggtgggtaaggaggagagagcggtctgctgcaaaccccaggaggagagcttggagcccaagccaga

SEQ ID NO: 169124 - DNA, 120 bp, Artificial Sequence
  ENSG00000108797_2 (sequence is synthesized)
actcgagccctagccggagccgttcacagggaggcggctgccgggaccgtcagccctgcatgatgcatctccggctcttctgcatcctgctcgccgcggtctcaggagccgagggctggg

SEQ ID NO: 169125 - DNA, 120 bp, Artificial Sequence
  ENSG00000108797_3 (sequence is synthesized)
gctactacggctgcgacgaggagctggtgggtcccctgtatgcacgctccctgggcgcctcctcctactacagtctccttactgcgccgagattcgccaggctgcacggcataagcgggt

SEQ ID NO: 169126 - DNA, 120 bp, Artificial Sequence
  ENSG00000108797_4 (sequence is synthesized)
ggtcaccacggattggggatccgaatccctggctccagatagacttaatgaagaagcaccggatccgggccgtggccacacagggctcctttaattcttgggactgggtcacacgttaca

SEQ ID NO: 169127 - DNA, 120 bp, Artificial Sequence
  ENSG00000108797_5 (sequence is synthesized)
tgctactctacggcgaccgagtggacagctggacaccgttctaccagcgagggcacaactcgaccttctttggtaacgtgaacgagtcggcggtggtgcgccatgacctgcacttccact

SEQ ID NO: 169128 - DNA, 120 bp, Artificial Sequence
  ENSG00000108797_6 (sequence is synthesized)
tcactgcgcgctacatccgcatcgtgcccctggcctggaacccacgcggcaagatcggcctgaggctcggcctctatggctgcccatacaaggccgacatactctatttcgacggcgacg

SEQ ID NO: 169129 - DNA, 120 bp, Artificial Sequence
  ENSG00000108797_7 (sequence is synthesized)
atgccatctcctaccgcttcccgcgaggggtcagccgaagcctgtgggacgtgttcgccttcagcttcaagaccgaggagaaggacggtcttctgctgcacgccgagggcgcccagggcg

SEQ ID NO: 169130 - DNA, 120 bp, Artificial Sequence
  ENSG00000108797_8 (sequence is synthesized)
actacgtgacgctcgagctggagggggcacacctgctgctgcacatgagcctgggcagcagccctatccagccaagaccaggtcacaccaccgtgagcgcaggcggagtcctcaatgacc

SEQ ID NO: 169131 - DNA, 120 bp, Artificial Sequence
  ENSG00000108797_9 (sequence is synthesized)
agcactggcactatgtgcgggtggaccgatttggccgcgatgtaaatttcaccctggacggctatgtgcagcgctttattctcaatggagacttcgagaggctgaacctggacactgaga

SEQ ID NO: 169132 - DNA, 120 bp, Artificial Sequence
  ENSG00000108797_10 (sequence is synthesized)
tgttcatcggaggtctggtgggcgccgcgcggaagaacctggcctatcggcataacttccgcggctgcatagaaaacgtaatcttcaaccgcgtcaacatcgcagacctggccgtgcggc

SEQ ID NO: 169133 - DNA, 120 bp, Artificial Sequence
  ENSG00000108797_11 (sequence is synthesized)
gccattcccggatcaccttcgagggtaaggtggcttttcgttgcctggacccggtaccgcaccctatcaacttcggaggccctcacaacttcgttcaagtgcccggtttcccacgccgtg

SEQ ID NO: 169134 - DNA, 120 bp, Artificial Sequence
  ENSG00000108797_12 (sequence is synthesized)
gccgcctggcagtctcatttcgcttccgcacctgggacctcaccgggcttctccttttctcccgtctgggggacgggctgggccacgtggagctgacgctcagcgaagggcaggtcaacg

SEQ ID NO: 169135 - DNA, 120 bp, Artificial Sequence
  ENSG00000108797_13 (sequence is synthesized)
tgtccatcgcgcagagcggccgaaagaagcttcagttcgctgctgggtaccgactgaatgacggcttttggcacgaggtgaattttgtggcacaggaaaaccatgcagttatcagcattg

SEQ ID NO: 169136 - DNA, 120 bp, Artificial Sequence
  ENSG00000108797_14 (sequence is synthesized)
atgatgtggaaggggcagaggtcagggtctcatacccgttgctgatccggacagggacctcatatttctttgggggttgtcccaagccagccagtcgatgggactgccactccaaccaga

SEQ ID NO: 169137 - DNA, 120 bp, Artificial Sequence
  ENSG00000108797_15 (sequence is synthesized)
cggcattccatggctgcatggagctgctcaaggtggatggtcaactggtcaacctgactctggtggagggccggcggcttggattctatgctgaggtcctctttgatacatgtggcatca

SEQ ID NO: 169138 - DNA, 120 bp, Artificial Sequence
  ENSG00000108797_16 (sequence is synthesized)
ctgataggtgcagccctaacatgtgtgagcatgatggacgctgctaccagtcttgggatgacttcatttgctactgcgaactgacgggctacaagggagagacctgccacacacctttgt

SEQ ID NO: 169139 - DNA, 120 bp, Artificial Sequence
  ENSG00000108797_17 (sequence is synthesized)
ataaggaatcctgtgaggcttatcggctcagtgggaaaacttctggaaacttcaccattgatcctgatggcagtggccccctgaagccatttgtagtgtactgtgatatccgagagaacc

SEQ ID NO: 169140 - DNA, 120 bp, Artificial Sequence
  ENSG00000108797_18 (sequence is synthesized)
gagcgtggacagttgtgcggcatgacaggctgtggacaactcgagtgacaggttccagcatggagcggccattcctgggggctatccagtactggaatgcatcctgggaggaagtcagtg

SEQ ID NO: 169141 - DNA, 120 bp, Artificial Sequence
  ENSG00000108797_19 (sequence is synthesized)
cccttgccaatgcttcccagcattgtgaacagtggatcgagttctcctgctacaattcccggctgctcaacactgcaggaggctacccctacagcttttggattggccgaaatgaggagc

SEQ ID NO: 169142 - DNA, 120 bp, Artificial Sequence
  ENSG00000108797_20 (sequence is synthesized)
agcacttctactggggaggctcccagcctgggatccagcgctgtgcctgtggtctggaccggagctgtgtggaccctgccttgtactgcaactgtgacgctgaccagccccagtggagaa

SEQ ID NO: 169143 - DNA, 120 bp, Artificial Sequence
  ENSG00000108797_21 (sequence is synthesized)
ctgacaagggactgctgacctttgtggaccatctgcctgtcactcaggtagtgataggggatacgaaccgctccacttctgaggcccagttcttcctgaggcctctgcgctgctatggcg

SEQ ID NO: 169144 - DNA, 120 bp, Artificial Sequence
  ENSG00000108797_22 (sequence is synthesized)
atcgaaattcctggaacaccatttccttccacaccggggctgcactacgcttccccccaatccgtgccaaccacagcctggatgtctccttctacttcaggacctctgctccctcggggg

SEQ ID NO: 169145 - DNA, 120 bp, Artificial Sequence
  ENSG00000108797_23 (sequence is synthesized)
gggggcccttactgccagtggcgccgaccttatgtgcgggtggaactcaacacatcccgggatgtggtcttcgcctttgatgtggggaatggggatgagaacctcacagtacactcagac

SEQ ID NO: 169146 - DNA, 120 bp, Artificial Sequence
  ENSG00000108797_24 (sequence is synthesized)
gactttgagttcaatgatgacgagtggcacctggtccgggctgaaatcaacgtgaagcaggcccggctccgagtggatcaccggccctgggttctgcggcctatgccactgcagacctac

SEQ ID NO: 169147 - DNA, 120 bp, Artificial Sequence
  ENSG00000108797_25 (sequence is synthesized)
atctggatggagtatgaccagcccctctatgtgggatctgcagagcttaagagacgcccctttgtgggttgcttgagggccatgcgtctgaacggagtgactctgaacctggagggccgt

SEQ ID NO: 169148 - DNA, 120 bp, Artificial Sequence
  ENSG00000108797_26 (sequence is synthesized)
gccaatgcctctgagggtacctcacccaactgcacaggccactgtgcccaccctcggctcccctgtttccatggaggccgctgcgtggagcgctatagctactacacgtgtgactgtgac

SEQ ID NO: 169149 - DNA, 120 bp, Artificial Sequence
  ENSG00000108797_27 (sequence is synthesized)
ctcacggcttttgatgggccatactgcaaccacgatattggtggtttctttgagccgggcacctggatgcgctataacctacagtcagcgctgcgctctgcagccagggagttctcccac

SEQ ID NO: 169150 - DNA, 120 bp, Artificial Sequence
  ENSG00000108797_28 (sequence is synthesized)
atgctgagccggccagtgccaggctatgagcctggctacatcccgggctatgatactccgggctatgtgcctggctaccatggccccgggtaccgcctgcccgactacccccggcctggt

SEQ ID NO: 169151 - DNA, 120 bp, Artificial Sequence
  ENSG00000108797_29 (sequence is synthesized)
cggcctgtgcccggttaccgtgggcctgtctacaacgttacgggagaggaggtctccttcagcttcagcaccagctccgcccctgctgtcctgctctacgtcagttcctttgttcgtgac

SEQ ID NO: 169152 - DNA, 120 bp, Artificial Sequence
  ENSG00000108797_30 (sequence is synthesized)
tacatggctgtgctcatcaaggatgatgggacccttcagctgcgatatcagctgggcaccagtccctacgtgtaccagctaaccactcgaccagtgaccgatggccagccccatagcatc

SEQ ID NO: 169153 - DNA, 120 bp, Artificial Sequence
  ENSG00000108797_31 (sequence is synthesized)
aatatcacccgtgtttaccggaacctcttcatccaggtggactacttcccactgacagagcagaagttctcgctgttggtggacagccagttggactcacccaaggccttgtatttaggg

SEQ ID NO: 169154 - DNA, 120 bp, Artificial Sequence
  ENSG00000108797_32 (sequence is synthesized)
cgtgtgatggagacaggagtcattgacccggagatccagcgctacaacaccccaggtttctcaggctgcctgtctggtgttcgattcaacaacgtggctcccctcaagacccacttccga

SEQ ID NO: 169155 - DNA, 120 bp, Artificial Sequence
  ENSG00000108797_33 (sequence is synthesized)
acccctcgacccatgactgctgagctagctgaggcccttcgagttcagggagaactgtccgaatctaattgcggagctatgccacgtcttgtttcagaggtgccacctgagcttgatccc

SEQ ID NO: 169156 - DNA, 120 bp, Artificial Sequence
  ENSG00000108797_34 (sequence is synthesized)
tggtatctgcccccagacttcccctactaccatgatgaaggatgggttgccatacttttaggctttttggtggcctttctgctgctggggctggtgggaatgttggtgctcttctatctg

SEQ ID NO: 169157 - DNA, 120 bp, Artificial Sequence
  ENSG00000108797_35 (sequence is synthesized)
caaaatcatcgctataagggctcctaccataccaatgagcccaaggctgcccacgagtaccatcctggcagcaaacctcccctacccacttcaggccctgcccaggtccccacccctaca

SEQ ID NO: 169158 - DNA, 120 bp, Artificial Sequence
  ENSG00000108797_36 (sequence is synthesized)
gcagctcccaaccaagctccagcctcagccccagccccagccccaactccagccccagcccctggcccccgggatcagaacctaccccagatcctggaggagtccaggtctgaatgagtc

SEQ ID NO: 169159 - DNA, 120 bp, Artificial Sequence
  ENSG00000108797_37 (sequence is synthesized)
agaagggcttctgggaccaattccagctcctgacattcccccagtcctgcctctcccccatcctatcagggacatttggctcctcttagctggctctgctcatccagaggatattccccc

SEQ ID NO: 169160 - DNA, 120 bp, Artificial Sequence
  ENSG00000108797_38 (sequence is synthesized)
atcccccccccatcaagtttggtgggcagagctacagatgggacccaagggagtggccgagcctcactgcctaaaccaatgcccttctcatccctgtttccccaggctcctggctgttta

SEQ ID NO: 169161 - DNA, 120 bp, Artificial Sequence
  ENSG00000108797_39 (sequence is synthesized)
tctgccccaaaggagaagcctcatggggttgacataggtcctttctgccatctctgttccagctgctgtcagggattaacaacagagtgtaggggagattaactgcctcccttccaatag

SEQ ID NO: 169162 - DNA, 120 bp, Artificial Sequence
  ENSG00000108797_40 (sequence is synthesized)
acactatcagcagggacagatgtgtgggagtgcagggctgcagagggtatggggggaggaggctgctaaaccctatcccccagcctcccccctgccctgaagatcttccatttgcttcca

SEQ ID NO: 169163 - DNA, 120 bp, Artificial Sequence
  ENSG00000108797_41 (sequence is synthesized)
ctcagctggaggctcaagagggcttgatggctgtcccctgcccccctccttttgttttgtacacagagaccaagaggcctcagtttagcaccttagtacctccgctgcttcacttgcttt

SEQ ID NO: 169164 - DNA, 120 bp, Artificial Sequence
  ENSG00000108797_42 (sequence is synthesized)
agccaaagccataaaaaacctgcaacgtagagaaaataatgcagataccctgactagccagccctctactcctccaaccttttccaagatatgcaatggcctttgtgcctgcccaaaggc

SEQ ID NO: 169165 - DNA, 120 bp, Artificial Sequence
  ENSG00000108797_43 (sequence is synthesized)
ttcgccccctccagtgcatgaggaaccctctttcctccgctcagagatgctgcttcatttacccaggaggtcatattctttatatatattttttgttgcaaagtgtctctctagagaaac

SEQ ID NO: 169166 - DNA, 120 bp, Artificial Sequence
  ENSG00000108797_44 (sequence is synthesized)
tctatatattattcgaatttttaaattatttgtttatatataaaagaaaagctcaattggctgtgctgtcctgtgctgtgctgtgcccacagtctgtagtttgcctttcctgtgttggaa

SEQ ID NO: 169167 - DNA, 120 bp, Artificial Sequence
  ENSG00000108797_45 (sequence is synthesized)
gtgtcgtgagtcctgctggtcacccaccagcctggtccggcctccactctgaagcagggttgagcctgctgtgctctcagacgcggagccgttccaataaagcagagtggcagagcccca

SEQ ID NO: 169168 - DNA, 120 bp, Artificial Sequence
  ENSG00000108797_46 (sequence is synthesized)
ttagttcatagatgaagaaagtaaggcgcagacacagggagtggcttgtccaggggtcgtgcagctgcacggtggctgagtagggacttgaaccgatggcttctctgatatgcccccctc

SEQ ID NO: 169169 - DNA, 120 bp, Artificial Sequence
  ENSG00000108797_47 (sequence is synthesized)
aaccctctccgactctggagctctgttgggaagctggcaggagccaggtctgtggtccaaaattgcctctcgatactggaaggagagaagcggtcgaatcgcagacggtggagatcagcg

SEQ ID NO: 169170 - DNA, 120 bp, Artificial Sequence
  ENSG00000108797_48 (sequence is synthesized)
agagcaagcgagcagagttccgagggccgactgggttggggccccctccacagatggacgagcttggaggggaagaggtcacgtcatggttggagatctcacccccgccaacaccgaagg

SEQ ID NO: 169171 - DNA, 120 bp, Artificial Sequence
  ENSG00000108798_0 (sequence is synthesized)
agacagaggctgggggtgatggcggagctacagcagctgcaggagtttgagatccccactggccgggaggctctgaggggcaaccacagtgccctgctgcgggtcgctgactactgcgag

SEQ ID NO: 169172 - DNA, 120 bp, Artificial Sequence
  ENSG00000108798_1 (sequence is synthesized)
gacaactatgtgcaggccacagacaagcggaaggcgctggaggagaccatggccttcactacccaggcactggccagcgtggcctaccaggtgggcaacctggccgggcacactctgcgc

SEQ ID NO: 169173 - DNA, 120 bp, Artificial Sequence
  ENSG00000108798_2 (sequence is synthesized)
atgttggacctgcagggggccgccctgcggcaggtggaagcccgtgtaagcacgctgggccagatggtgaacatgcatatggagaaggtggcccgaagggagatcggcaccttagccact

SEQ ID NO: 169174 - DNA, 120 bp, Artificial Sequence
  ENSG00000108798_3 (sequence is synthesized)
gtccagcggctgccccccggccagaaggtcatcgccccagagaacctaccccctctcacgccctactgcaggagacccctcaactttggctgcctggacgacattggccatgggatcaag

SEQ ID NO: 169175 - DNA, 120 bp, Artificial Sequence
  ENSG00000108798_4 (sequence is synthesized)
gacctcagcacgcagctgtcaagaacaggcaccctgtctcgaaagagcatcaaggcccctgccacacccgcctccgccaccttggggagaccaccccggattcccgagccagtgcacctg

SEQ ID NO: 169176 - DNA, 120 bp, Artificial Sequence
  ENSG00000108798_5 (sequence is synthesized)
ccggtggtgcccgacggcagactctccgccgcctcctctgcgttttccctggcctcggccggcagcgccgaaggtgtcggtggggcccccacgcccaaggggcaggcagcacctccagcc

SEQ ID NO: 169177 - DNA, 120 bp, Artificial Sequence
  ENSG00000108798_6 (sequence is synthesized)
acgctggaggagttgtccccacccccaccggacgaagagctgcccctgccactggacctgcctcctcctccacccctggatggagatgaattggggctgcctccacccccaccaggattt

SEQ ID NO: 169178 - DNA, 120 bp, Artificial Sequence
  ENSG00000108798_7 (sequence is synthesized)
gggcctgatgagcccagctgggtgcctgcctcatacttggagaaagtggtgacactgtacccatacaccagccagaaggacaatgagctctccttctctgagggcactgtcatctgtgtc

SEQ ID NO: 169179 - DNA, 120 bp, Artificial Sequence
  ENSG00000108798_8 (sequence is synthesized)
actcgccgctactccgatggctggtgcgagggcgtcagctcagaggggactggattcttccctgggaactatgtggagcccagctgctgacagcccagggctctctgggcagctgatgtc

SEQ ID NO: 169180 - DNA, 120 bp, Artificial Sequence
  ENSG00000108798_9 (sequence is synthesized)
tgcactgagtgggtttcatgagccccaagccaaaaccagctccagtcacagctggactgggtctgcccacctcttgggctgtgagctgtgttctgtccttcctcccatcggagggagaag

SEQ ID NO: 169181 - DNA, 120 bp, Artificial Sequence
  ENSG00000108798_10 (sequence is synthesized)
gggtcctggggagagagaatttatccagaggcctgctgcagatggggaagagctggaaaccaagaagtttgtcaacagaggacccctactccatgcaggacagggtctcctgctgcaagt

SEQ ID NO: 169182 - DNA, 120 bp, Artificial Sequence
  ENSG00000108798_11 (sequence is synthesized)
cccaactttgaataaaacagatgatgtcctgtgactgccccacagagataaggggccaggagggattgaaaggcatcccagttctaaggctgctgctaattacagcccccaacctccaac

SEQ ID NO: 169183 - DNA, 120 bp, Artificial Sequence
  ENSG00000108798_12 (sequence is synthesized)
ccaccagctgacctagaagcagcatcttcccatttcctcagtacccacaaagtgcagcccacattggaccccagacacccctctgcagccattgactgcaacttgttcttttgcccattg

SEQ ID NO: 169184 - DNA, 120 bp, Artificial Sequence
  ENSG00000108798_13 (sequence is synthesized)
ccaggaccagggagcaatcacagctgccccgaccttggcttcctctgctgggtgggattgggggctgggcccccaaatgggcccctggcttcccccttcctctgggcaggggacagagag

SEQ ID NO: 169185 - DNA, 120 bp, Artificial Sequence
  ENSG00000108798_14 (sequence is synthesized)
acacaggctcggggagcaggactgacttcctcttgtcccggaatgagcatgcctgccctttgcaagcaggtttgggtctcacgcagaggaaaccaaaagcaataagagggagggaaggca

SEQ ID NO: 169186 - DNA, 120 bp, Artificial Sequence
  ENSG00000108798_15 (sequence is synthesized)
cccacctcctccaccagcagccgtcgaggtgttccagcggcctcccacgctggaggagttgtccccacccccaccggcctttctgcttttcccccaagacgaagagctgcccctgccact

SEQ ID NO: 169187 - DNA, 120 bp, Artificial Sequence
  ENSG00000108798_16 (sequence is synthesized)
gcctgcctcatacttggagaaaggtacctgacttctgggactgaggggcaccggatcccacttcctctgttgccctgatccccattctcctccctctgcaaaggtgtgaatctatccccc

SEQ ID NO: 169188 - DNA, 120 bp, Artificial Sequence
  ENSG00000108798_17 (sequence is synthesized)
gggccccccacacaatttttctgacgaactgacagaactggggagagggcagctggcctggtattaaatattaactaagctggggaggggtcctgaaggcttgcaagaaggcccccaaga

SEQ ID NO: 169189 - DNA, 120 bp, Artificial Sequence
  ENSG00000108798_18 (sequence is synthesized)
tggcccctagagtctagtacttgagaccgtgcatccccatggtggtggggggtgagggggagagggcaagaggcattatctcacggcaccctcttctcttgccctgcagtggtgacactg

SEQ ID NO: 169190 - DNA, 120 bp, Artificial Sequence
  ENSG00000108799_0 (sequence is synthesized)
agcagcgggacccgcggctcgggatggaggctggacacctgttctgctgttgtgtcctgccattctcctgaagaacagaggcacactgtaaaacccaacacttccccttgcattctataa

SEQ ID NO: 169191 - DNA, 120 bp, Artificial Sequence
  ENSG00000108799_1 (sequence is synthesized)
gattacagcaagatggaaataccaaatccccctacctccaaatgtatcacttactggaaaagaaaagtgaaatctgaatacatgcgacttcgacaacttaaacggcttcaggcaaatatg

SEQ ID NO: 169192 - DNA, 120 bp, Artificial Sequence
  ENSG00000108799_2 (sequence is synthesized)
ggtgcaaaggctttgtatgtggcaaattttgcaaaggttcaagaaaaaacccagatcctcaatgaagaatggaagaagcttcgtgtccaacctgttcagtcaatgaagcctgtgagtgga

SEQ ID NO: 169193 - DNA, 120 bp, Artificial Sequence
  ENSG00000108799_3 (sequence is synthesized)
cacccttttctcaaaaagtgtaccatagagagcattttcccgggatttgcaagccaacatatgttaatgaggtcactgaacacagttgcattggttcccatcatgtattcctggtcccct

SEQ ID NO: 169194 - DNA, 120 bp, Artificial Sequence
  ENSG00000108799_4 (sequence is synthesized)
ctccaacagaactttatggtagaagatgagacggttttgtgcaatattccctacatgggagatgaagtgaaagaagaagatgagacttttattgaggagctgatcaataactatgatggg

SEQ ID NO: 169195 - DNA, 120 bp, Artificial Sequence
  ENSG00000108799_5 (sequence is synthesized)
aaagtccatggtgaagaagagatgatccctggatccgttctgattagtgatgctgtttttctggagttggtcgatgccctgaatcagtactcagatgaggaggaggaagggcacaatgac

SEQ ID NO: 169196 - DNA, 120 bp, Artificial Sequence
  ENSG00000108799_6 (sequence is synthesized)
acctcagatggaaagcaggatgacagcaaagaagatctgccagtaacaagaaagagaaagcgacatgctattgaaggcaacaaaaagagttccaagaaacagttcccaaatgacatgatc

SEQ ID NO: 169197 - DNA, 120 bp, Artificial Sequence
  ENSG00000108799_7 (sequence is synthesized)
ttcagtgcaattgcctcaatgttccctgagaatggtgtcccagatgacatgaaggagaggtatcgagaactaacagagatgtcagaccccaatgcacttccccctcagtgcacacccaac

SEQ ID NO: 169198 - DNA, 120 bp, Artificial Sequence
  ENSG00000108799_8 (sequence is synthesized)
atcgatggccccaatgccaagtctgtgcagcgggagcaatctctgcactccttccacacacttttttgccggcgctgctttaaatacgactgcttccttcacccttttcatgccacccct

SEQ ID NO: 169199 - DNA, 120 bp, Artificial Sequence
  ENSG00000108799_9 (sequence is synthesized)
aatgtatataaacgcaagaataaagaaatcaagattgaaccagaaccatgtggcacagactgcttccttttgctggaaggagcaaaggagtatgccatgctccacaacccccgctccaag

SEQ ID NO: 169200 - DNA, 120 bp, Artificial Sequence
  ENSG00000108799_10 (sequence is synthesized)
tgctctggtcgtcgccggagaaggcaccacatagtcagtgcttcctgctccaatgcctcagcctctgctgtggctgagactaaagaaggagacagtgacagggacacaggcaatgactgg

SEQ ID NO: 169201 - DNA, 120 bp, Artificial Sequence
  ENSG00000108799_11 (sequence is synthesized)
gcctccagttcttcagaggctaactctcgctgtcagactcccacaaaacagaaggctagtccagccccacctcaactctgcgtagtggaagcaccctcggagcctgtggaatggactggg

SEQ ID NO: 169202 - DNA, 120 bp, Artificial Sequence
  ENSG00000108799_12 (sequence is synthesized)
gctgaagaatctctttttcgagtcttccatggcacctacttcaacaacttctgttcaatagccaggcttctggggaccaagacgtgcaagcaggtctttcagtttgcagtcaaagaatca

SEQ ID NO: 169203 - DNA, 120 bp, Artificial Sequence
  ENSG00000108799_13 (sequence is synthesized)
cttatcctgaagctgccaacagatgagctcatgaacccctcacagaagaagaaaagaaagcacagattgtgggctgcacactgcaggaagattcagctgaagaaagataactcttccaca

SEQ ID NO: 169204 - DNA, 120 bp, Artificial Sequence
  ENSG00000108799_14 (sequence is synthesized)
caagtgtacaactaccaaccctgcgaccacccagaccgcccctgtgacagcacctgcccctgcatcatgactcagaatttctgtgagaagttctgccagtgcaacccagactgtcagaat

SEQ ID NO: 169205 - DNA, 120 bp, Artificial Sequence
  ENSG00000108799_15 (sequence is synthesized)
cgtttccctggctgtcgctgtaagacccagtgcaataccaagcaatgtccttgctatctggcagtgcgagaatgtgaccctgacctgtgtctcacctgtggggcctcagagcactgggac

SEQ ID NO: 169206 - DNA, 120 bp, Artificial Sequence
  ENSG00000108799_16 (sequence is synthesized)
tgcaaggtggtttcctgtaaaaactgcagcatccagcgtggacttaagaagcacctgctgctggccccctctgatgtggccggatggggcaccttcataaaggagtctgtgcagaagaac

SEQ ID NO: 169207 - DNA, 120 bp, Artificial Sequence
  ENSG00000108799_17 (sequence is synthesized)
gaattcatttctgaatactgtggtgagctcatctctcaggatgaggctgatcgacgcggaaaggtctatgacaaatacatgtccagcttcctcttcaacctcaataatgattttgtagtg

SEQ ID NO: 169208 - DNA, 120 bp, Artificial Sequence
  ENSG00000108799_18 (sequence is synthesized)
gatgctactcggaaaggaaacaaaattcgatttgcaaatcattcagtgaatcccaactgttatgccaaagtggtcatggtgaatggagaccatcggattgggatctttgccaagagggca

SEQ ID NO: 169209 - DNA, 120 bp, Artificial Sequence
  ENSG00000108799_19 (sequence is synthesized)
agagggagaccgacgtcctttagccctcccaggccccacggcagcacttatggtagcggcactgtcttggctttcgtgctcacaccactgctgctcgagtctcctgcactgtgtctccca

SEQ ID NO: 169210 - DNA, 120 bp, Artificial Sequence
  ENSG00000108799_20 (sequence is synthesized)
cactgagaaaccccccaacccactccctctgtagtgaggcctctgccatgtccagagggcacaaaactgtctcaatgagaggggagacagaggcagctagggcttggtctcccaggacag

SEQ ID NO: 169211 - DNA, 120 bp, Artificial Sequence
  ENSG00000108799_21 (sequence is synthesized)
agagttacagaaatgggagactgtttctctggcctcagaagaagcgagcacaggctggggtggatgacttatgcgtgatttcgtgtcggctccccaggctgtggcctcaggaatcaactt

SEQ ID NO: 169212 - DNA, 120 bp, Artificial Sequence
  ENSG00000108799_22 (sequence is synthesized)
aggcagttcccaacaagcgctagcctgtaattgtagctttccacatcaagagtccttatgttattgggatgcaggcaaacctctgtggtcctaagacctggagaggacaggctaagtgaa

SEQ ID NO: 169213 - DNA, 120 bp, Artificial Sequence
  ENSG00000108799_23 (sequence is synthesized)
gtgtggtccctggagcctacaagtggtctgggttagaggcgagcctggcaggcagcacagactgaactcagaggtagacaggtcaccttactacctcctccctcgtggcagggctcaaac

SEQ ID NO: 169214 - DNA, 120 bp, Artificial Sequence
  ENSG00000108799_24 (sequence is synthesized)
tgaaagagtgtgggttctaagtacaggcattcaaggctgggggaaggaaagctacgccatccttccttagccagagagggagaaccagccagatgatagtagttaaactgctaagcttgg

SEQ ID NO: 169215 - DNA, 120 bp, Artificial Sequence
  ENSG00000108799_25 (sequence is synthesized)
gcccaggaggctttgagaaagccttctctgtgtactctggagatagatggagaagtgttttcagattcctgggaacagacaccagtgctccagctcctccaaagttctggcttagcagct

SEQ ID NO: 169216 - DNA, 120 bp, Artificial Sequence
  ENSG00000108799_26 (sequence is synthesized)
gcaggcaagcattatgctgctattgaagaagcattaggggtatgcctggcaggtgtgagcatcctggctcgctggatttgtgggtgttttcaggccttccattccccatagaggcaaggc

SEQ ID NO: 169217 - DNA, 120 bp, Artificial Sequence
  ENSG00000108799_27 (sequence is synthesized)
ccaatggccagtgttgcttatcgcttcagggtaggtgggcacaggcttggactagagaggagaaagattggtgtaatctgctttcctgtctgtagtgcctgctgtttggaaagggtgagt

SEQ ID NO: 169218 - DNA, 120 bp, Artificial Sequence
  ENSG00000108799_28 (sequence is synthesized)
tagaatatgttccaaggttggtgaggggctaaattgcacgcgtttaggctggcaccccgtgtgcagggcacactggcagagggtatctgaagtgggagaagaagcaggtagaccacctgt

SEQ ID NO: 169219 - DNA, 120 bp, Artificial Sequence
  ENSG00000108799_29 (sequence is synthesized)
cccaggctgtggtgccaccctctctggcattcatgcagagcaaagcactttaaccatttcttttaaaaggtctatagattggggtagagtttggcctaaggtctctagggtccctgccta

SEQ ID NO: 169220 - DNA, 120 bp, Artificial Sequence
  ENSG00000108799_30 (sequence is synthesized)
aatcccactcctgagggagggggaagaagagagggtgggagattctcctccagtcctgtctcatctcctgggagaggcagacgagtgagtttcacacagaagaatttcatgtgaatgggg

SEQ ID NO: 169221 - DNA, 120 bp, Artificial Sequence
  ENSG00000108799_31 (sequence is synthesized)
ccagcaagagctgccctgtgtccatggtgggtgtgccgggctggctgggaacaaggagcagtatgttgagtagaaagggtgtgggcgggtatagattggcctgggagtgttacagtaggg

SEQ ID NO: 169222 - DNA, 120 bp, Artificial Sequence
  ENSG00000108799_32 (sequence is synthesized)
agcaggcttctcccttctttctgggactcagagccccgcttcttcccactccacttgttgtcccatgaaggaagaagtggggttcctcctgacccagctgcctcttacggtttggtatgg

SEQ ID NO: 169223 - DNA, 120 bp, Artificial Sequence
  ENSG00000108799_33 (sequence is synthesized)
gacatgcacacacactcacatgctctcactcaccacactggagggcacacacgtaccccgcacccagcaactcctgacagaaagctcctcccacccaaatgggccaggccccagcatgat

SEQ ID NO: 169224 - DNA, 120 bp, Artificial Sequence
  ENSG00000108799_34 (sequence is synthesized)
cctgaaatctgcatccgccgtggtttgtattcattgtgcatatcagggataccctcaagctggactgtgggttccaaattactcatagaggagaaaaccagagaaagatgaagaggagga

SEQ ID NO: 169225 - DNA, 120 bp, Artificial Sequence
  ENSG00000108799_35 (sequence is synthesized)
gttaggtctatttgaaatgccaggggctcgctgtgaggaataggtgaaaaaaaacttttcaccagcctttgagagactagactgaccccacccttccttcagtgagcagaatcactgtgg

SEQ ID NO: 169226 - DNA, 120 bp, Artificial Sequence
  ENSG00000108799_36 (sequence is synthesized)
tcagtctcctgtcccagcttcagttcatgaatactcctgttcctccagtttcccatcctttgtccctgctgtcccccacttttaaagatgggtctcaacccctccccaccacgtcatgat

SEQ ID NO: 169227 - DNA, 120 bp, Artificial Sequence
  ENSG00000108799_37 (sequence is synthesized)
ggatggggcaaggtggtggggactaggggagcctggtatacatgcggcttcattgccaataaatttcatgcactttaaagtcctgtggcttgtgacctcttaataaagtgttagaatcca

SEQ ID NO: 169228 - DNA, 120 bp, Artificial Sequence
  ENSG00000108799_38 (sequence is synthesized)
gttgaacattttccttagctgagctattttttgtccaaagataatcatgattaatatctggtatcattttaggcccctctcaatcttagttttctaatctgcttttttcagcgaatacat

SEQ ID NO: 169229 - DNA, 120 bp, Artificial Sequence
  ENSG00000108799_39 (sequence is synthesized)
gcttttttcagcgaatacattataaacactttcccacaaacatgatttaaccagcctgagcaacatagtgagacccatctcacaaaataataataggctgggtgtggtggcttacgcctg

SEQ ID NO: 169230 - DNA, 120 bp, Artificial Sequence
  ENSG00000108799_40 (sequence is synthesized)
gttcctggcttctgttctaacgttttacaaagggccagttctattttcccttgctcaattatagtgcaacatgctttgcatgatagggacagactaactagcaacttatctgtccctcag

SEQ ID NO: 169231 - DNA, 120 bp, Artificial Sequence
  ENSG00000108799_41 (sequence is synthesized)
tacctcttagctttgaaagcattgtgttgatgtcagaaatgactgaattttgtgcaccctgatggtagccgtttatatcgaattctaactcctacaatagctctctaattcacttttgtt

SEQ ID NO: 169232 - DNA, 120 bp, Artificial Sequence
  ENSG00000108799_42 (sequence is synthesized)
tctccccatcttgtcaagtggatagaccactggcaacaagacagtttttgttttccagcttttcatgccacccctaatgtatataaacgcaagaataaagaaatcaagattgaaccagaa

SEQ ID NO: 169233 - DNA, 88 bp, Artificial Sequence
  ENSG00000108799_43 (sequence is synthesized)
atgcccagccaattttggaaggaaattacatttctttcttgggttatatgcccgtctttccctctccatgtcattgcttatatttcag

SEQ ID NO: 169234 - DNA, 120 bp, Artificial Sequence
  ENSG00000108799_44 (sequence is synthesized)
cccgcggctcgggatggaggctggacacctgttctgctgttgtgtcctgccattctcctgaagaacagaggcacactgtaaaacccaacacttccccttgcattctataagagatggggt

SEQ ID NO: 169235 - DNA, 120 bp, Artificial Sequence
  ENSG00000108799_45 (sequence is synthesized)
cctcttcttgtcccccagtgctgtggaccataactgtctgtttttctatttaagcttctggccaataggacatgagctggcctcatggctccaccctgaagccatttctccttattgtgg

SEQ ID NO: 169236 - DNA, 120 bp, Artificial Sequence
  ENSG00000108799_46 (sequence is synthesized)
agcgggacccgcggctcgggatggaggctggacacctgttctgctgttgtgtcctgccattctcctgaagaacagaggcacactgtaaaacccaacacttccccttgcattctataaggc

SEQ ID NO: 169237 - DNA, 120 bp, Artificial Sequence
  ENSG00000108799_47 (sequence is synthesized)
ctttcttttatttctgtgttgtgttcttttatgttatttgcttgtttgggaggggttgtgtttaagtttaactcttgtagcacaggccagctggatttaggatggactctagcttctgtg

SEQ ID NO: 169238 - DNA, 120 bp, Artificial Sequence
  ENSG00000108799_48 (sequence is synthesized)
tagggccgtgactgagacctgtccttcctgtctttttcagattgtgggctgcacactgcaggaagattcagctgaagaaagataactcttccacacaagtgtacaactaccaaccctgcg

SEQ ID NO: 169239 - DNA, 120 bp, Artificial Sequence
  ENSG00000108799_49 (sequence is synthesized)
aaaaaccccacttataataataataaagataatttttctgccataataacagatctaaaagcatagaggcaactaccatattgactactttctaattccatttgattcatgttttcactg

SEQ ID NO: 169240 - DNA, 120 bp, Artificial Sequence
  ENSG00000108799_50 (sequence is synthesized)
ggaatttggagaaaatcaacccagaagcctactggttattgacttggagttgggtaggaacctagcctcgggtttatcctgcttgcagtggtcatggtgaatggagaccatcggattggg

SEQ ID NO: 169241 - DNA, 120 bp, Artificial Sequence
  ENSG00000108799_51 (sequence is synthesized)
gcattctctttccactggttcttttgaggctttatatgtgaaagtgcttgataaatcctaaaagacacatatttactgaattaataaaggcttcagtcccagtagggcttagaaaaatgg

SEQ ID NO: 169242 - DNA, 120 bp, Artificial Sequence
  ENSG00000108813_0 (sequence is synthesized)
gtcgggtcccgggaaccgaacccgatggagaggagggggcccccatggatttagggggggaggggaaagtcatggggggcacccccccggaacccctttcccaggcgcgcgttctccgct

SEQ ID NO: 169243 - DNA, 120 bp, Artificial Sequence
  ENSG00000108813_1 (sequence is synthesized)
gaaagaggctcagagagacactttctccgggatcttaagtgtgggggctgctggctggggggcccgtccggcccaacgccggaggcttggaaaagagagttggcagcgggagcggactac

SEQ ID NO: 169244 - DNA, 120 bp, Artificial Sequence
  ENSG00000108813_2 (sequence is synthesized)
gtgccgggccatggcccttctgcccgggccctggccacaatgacctctttgccctgccccctccccggccgggacgcctccaaagctgtcttcccagacctcgcccctgtcccgtcggta

SEQ ID NO: 169245 - DNA, 120 bp, Artificial Sequence
  ENSG00000108813_3 (sequence is synthesized)
gcggctgcctacccgcttggcttgtcccctacaaccgcagcctcccccaatttgtcctactccaggccgtatggccacctcctgtcttacccctacaccgagccagcgaaccccggagac

SEQ ID NO: 169246 - DNA, 120 bp, Artificial Sequence
  ENSG00000108813_4 (sequence is synthesized)
tcctacctgtcctgccagcaacccgcggcgctctctcagcccctctgcggacctgcagagcaccctcaggaactcgaggcagactcggagaagccgcggctgtccccggaaccctccgag

SEQ ID NO: 169247 - DNA, 120 bp, Artificial Sequence
  ENSG00000108813_5 (sequence is synthesized)
cggcgccctcaggcccccgccaaaaagctccgcaagccgaggaccatctactccagcctgcagctgcagcacctaaaccagcgtttccagcacacgcagtacctggcgctgcccgagagg

SEQ ID NO: 169248 - DNA, 120 bp, Artificial Sequence
  ENSG00000108813_6 (sequence is synthesized)
gcccagctggcagcgcagctcggcctcacccagacccaggtaaagatctggtttcagaacaaacgctccaagtataagaagctcctgaagcagaattctggggggcaggaaggggacttc

SEQ ID NO: 169249 - DNA, 120 bp, Artificial Sequence
  ENSG00000108813_7 (sequence is synthesized)
cctgggaggaccttctctgtgtctccctgctccccacccctcccctccctctgggatctacccaaggcagggaccctgcccaccagtggctatggcaacagctttggagcctggtatcag

SEQ ID NO: 169250 - DNA, 120 bp, Artificial Sequence
  ENSG00000108813_8 (sequence is synthesized)
agtccacctgcaccccttctgggctgggaggaaaccagctccagatgggttttctctggaggacaagcagttagaggagaaaaaggaatggagcagagcctgtacccctaaccctaacag

SEQ ID NO: 169251 - DNA, 120 bp, Artificial Sequence
  ENSG00000108813_9 (sequence is synthesized)
ctaaatcaaggacctcagccttatataatcattgtccccaccactaccatggactggacaccttcactccagctggacaaagactctggagagagagccattggctggagttgagactgt

SEQ ID NO: 169252 - DNA, 120 bp, Artificial Sequence
  ENSG00000108813_10 (sequence is synthesized)
ccccagaacccttggtcttgccactcccccactccttcttccctctctccctttctcctctccctgctttcttgaaaaggactgaatcgccactacagcctgggtgcaaaatcagcaaga

SEQ ID NO: 169253 - DNA, 120 bp, Artificial Sequence
  ENSG00000108813_11 (sequence is synthesized)
aacattgagtatttttttttctttgtatgcctttggccttgcacaacccatttgtgagcaaaagcagaagtggaccaccatcagctcccacccacccagcgatttttccttggaggtcag

SEQ ID NO: 169254 - DNA, 120 bp, Artificial Sequence
  ENSG00000108813_12 (sequence is synthesized)
cccgttacccccataactgatttacctacttaccatactgggaggtagaagagatgcagagaaatgtggaatttgtggacctatgggtaatttatgctttcctcctaaaaaaaaaaaaaa

SEQ ID NO: 169255 - DNA, 120 bp, Artificial Sequence
  ENSG00000108813_13 (sequence is synthesized)
agccctctttcccaccccctccccatctcccctttttgaatagataatggatccaattatccatataattcaataggtatttattgagaggctcccttctattccccatccctaatccct

SEQ ID NO: 169256 - DNA, 120 bp, Artificial Sequence
  ENSG00000108813_14 (sequence is synthesized)
aacgaacccacgggcacacacttttggaaacctggtaaagtaacacttagggggaaatggggacaaactggctctctggattagtgcgggtatagacacccccaaataggtgggtaggcc

SEQ ID NO: 169257 - DNA, 120 bp, Artificial Sequence
  ENSG00000108813_15 (sequence is synthesized)
cattgattcagctccttgcagctgtctctgttcaaaggaactgtgcagatttagaacgaattggagcttgagcttcacaccaccagcttccagagattaaagtttgtacaaaacattgca

SEQ ID NO: 169258 - DNA, 120 bp, Artificial Sequence
  ENSG00000108813_16 (sequence is synthesized)
ccgcaggcgccgcggtaccctggctgtggccctcggcgctttcttcctagggtcacaggacccatacgagtgggagctccctgggagcagaactgcgtcttgtatcacctggcgcggtga

SEQ ID NO: 169259 - DNA, 120 bp, Artificial Sequence
  ENSG00000108813_17 (sequence is synthesized)
acgtgggggttgaaacgctccacgcggaaggtagagggcaggggccaagggggcgatcctggtggctgcgctttttgctatttgctgccgacggcatgcagacgagatgcaaataagctt

SEQ ID NO: 169260 - DNA, 120 bp, Artificial Sequence
  ENSG00000108813_18 (sequence is synthesized)
agaagccgctctctctcggctcaggtcggctggacagacccgcagggaatgcggcgaacgctgccctaagcgcccgggcattgcggctgctccatccgccctactcctcccattgcctgg

SEQ ID NO: 169261 - DNA, 120 bp, Artificial Sequence
  ENSG00000108813_19 (sequence is synthesized)
gacctctgcagcgtccccgtagagccgcgcaggttagggtggctggcttggaagaacagaaacccctcggcccaaccctcccctgtccctcagcattctagggctgggctgtcccgcggc

SEQ ID NO: 169262 - DNA, 120 bp, Artificial Sequence
  ENSG00000108813_20 (sequence is synthesized)
cgagattcctggagagctaggcgggccagagctgaccagatcccccgcggcggcaccgcagcgcgatccaggagtggccccgccgggctacgctgcgcgctcttggaacccgggtcacct

SEQ ID NO: 169263 - DNA, 120 bp, Artificial Sequence
  ENSG00000108813_21 (sequence is synthesized)
tccctgccgccggaaccgctctgtgcgcgctgcccaacgaaggaaggggctgccccacgcagacccggcttctgggggtccctggaaacccaggcggccacggtgtggcgggggagacat

SEQ ID NO: 169264 - DNA, 120 bp, Artificial Sequence
  ENSG00000108813_22 (sequence is synthesized)
ggtcacttttcctgcagggtgcgcctgagcagaggggcagcccgttacagtaggcgaggccagggcaaacccggggtcactatcagcgctgcgagactggtattcaaggtcctctcagcc

SEQ ID NO: 169265 - DNA, 120 bp, Artificial Sequence
  ENSG00000108813_23 (sequence is synthesized)
gcctctcacccaccccgctggccgcagccggaggctgccacgcggacaccgtctcaagcctctgagcattgctctgagcctctgcctgcaatgtccttcctctgtcatctctaggcctcg

SEQ ID NO: 169266 - DNA, 120 bp, Artificial Sequence
  ENSG00000108813_24 (sequence is synthesized)
attataaccgaggttcctggactgcaccaatcgctctgcaaccccagcacctctcggaggagaccccgaggccgtatggccacctcctgtcttacccctacaccgagccagcgaaccccg

SEQ ID NO: 169267 - DNA, 120 bp, Artificial Sequence
  ENSG00000108813_25 (sequence is synthesized)
tcaccttccctggttctctgggaactcatcccccagccccagctgtgaatgactgatggattggtgctgtggccctgttgtcacagttctccagggaatgttcatagctggctcttagta

SEQ ID NO: 169268 - DNA, 120 bp, Artificial Sequence
  ENSG00000108813_26 (sequence is synthesized)
agccttggggggaatgtgttgaaaggtgtgcatgtatgtgcgggtggggtggagtgggtcaggaagaggagggtaggtcagacagggagacatggatactagctcagaggcaggaactca

SEQ ID NO: 169269 - DNA, 120 bp, Artificial Sequence
  ENSG00000108813_27 (sequence is synthesized)
gaaggctcctggggctgtgggggactgaagcaaatgttcccagcctagggaactgctggtctcccaggactgtgcctgcacctggatccctttcccttcctcgaaacttttcacacatat

SEQ ID NO: 169270 - DNA, 120 bp, Artificial Sequence
  ENSG00000108819_0 (sequence is synthesized)
aagcgggattaactgtttttggcagcttggttttggggggaccctaaaaaaggccttcggggtttcttttatcggggggagggggcggtggtcccgacttggccagccgcctgttgaagc

SEQ ID NO: 169271 - DNA, 120 bp, Artificial Sequence
  ENSG00000108819_1 (sequence is synthesized)
gggggagcggggagcaggggcatgcgaacccggctccccccaccatgatgaagacggagccacgggggcccgggggtcccctccggagcgcctccccgcaccgcagcgcctacgaggcgg

SEQ ID NO: 169272 - DNA, 120 bp, Artificial Sequence
  ENSG00000108819_2 (sequence is synthesized)
gcatccaggcgctgaagccgcccgacgcgcccgggcccgacgaggcacccaagggggcccaccacaagaaatatggctccaacgtccaccgcatcaaaagtatgttcctgcagatgggca

SEQ ID NO: 169273 - DNA, 120 bp, Artificial Sequence
  ENSG00000108819_3 (sequence is synthesized)
atcaaaagtatgttcctgcagatgggcacgacggcggggccctcgggcgaggcgggcggcggcgcgggcctggccgaggccccacgggcgtccgagcgcggcgtgcgcctgtcgctgccg

SEQ ID NO: 169274 - DNA, 120 bp, Artificial Sequence
  ENSG00000108819_4 (sequence is synthesized)
accacagcgccctgctgaagctgggcaccagcgtgtcggagcgcgtgagccgcttcgactccaagcccgcgccctccgcgcagcctgcgccgccgccgcacccgccgtcccggctgcagg

SEQ ID NO: 169275 - DNA, 120 bp, Artificial Sequence
  ENSG00000108819_5 (sequence is synthesized)
agacgcggaagctgttcgaacggagcgccccagcggccgcaggcggcgacaaggaggccgcggcgcggcggctgctgaggcaggagcgcgccggcctgcaggaccggaagctggacgtcg

SEQ ID NO: 169276 - DNA, 120 bp, Artificial Sequence
  ENSG00000108819_6 (sequence is synthesized)
tggtgcgcttcaacggcagcaccgaggcgctggacaagctggacgctgacgccgtgtcccccacggtcagccagctcagcgccgtcttcgagaaggccgactcgaggaccggcctccacc

SEQ ID NO: 169277 - DNA, 120 bp, Artificial Sequence
  ENSG00000108819_7 (sequence is synthesized)
tccccagggccgcaggggttccccaggtcaactcgaagctggtcagcaagcggtcccgggtgttccagcccccgccgccgccgccgcccgccccgtcgggggatgccccggccgagaaag

SEQ ID NO: 169278 - DNA, 120 bp, Artificial Sequence
  ENSG00000108819_8 (sequence is synthesized)
cggccgagaaagagcgatgccccgcagggcagcagcccccgcagcaccgagtggcccctgcccggccgccccccaagccccgggaggtgcgcaagattaagccggtggaggtggaggaga

SEQ ID NO: 169279 - DNA, 120 bp, Artificial Sequence
  ENSG00000108819_9 (sequence is synthesized)
gcggggagtcggaggccgagtcggcgcccggggaggtgatccaggccgaggttacggtccacgcggccctggagaatggcagcaccgtggcaactgcagccagccccgcgcccgaggagc

SEQ ID NO: 169280 - DNA, 120 bp, Artificial Sequence
  ENSG00000108819_10 (sequence is synthesized)
caaaggcccaagcggccccggagaaggaggcggcggcggtagcgccgccagagaggggggtgggcaatggccgggccccggacgtggcccctgaggaggtagatgaatccaagaaggagg

SEQ ID NO: 169281 - DNA, 120 bp, Artificial Sequence
  ENSG00000108819_11 (sequence is synthesized)
acttctcggaggcggacttggtggacgtgagcgcctacagtgggctcggggaggactctgcgggcagtgccctggaggaggacgacgaagacgacgaggaggatggggagcccccctacg

SEQ ID NO: 169282 - DNA, 120 bp, Artificial Sequence
  ENSG00000108819_12 (sequence is synthesized)
agcccgagtcggggtgcgtggagatcccggggctgtcggaggaggaggacccagccccgagccggaagatccatttcagcacggcgcccatccaagtgttcagcacttactccaacgagg

SEQ ID NO: 169283 - DNA, 120 bp, Artificial Sequence
  ENSG00000108819_13 (sequence is synthesized)
attacgatcgtcgcaacgaggatgtggatcccatggcagcctctgctgagtacgagctggagaagcgtgtggagaggttggagctgttccctgtggagctggagaaggactccgagggcc

SEQ ID NO: 169284 - DNA, 120 bp, Artificial Sequence
  ENSG00000108819_14 (sequence is synthesized)
tgggcatcagcatcatcggcatgggcgccggggcagacatgggcctggagaagctgggtatcttcgtcaagaccgtgacggagggtggtgcggcccatcgggatggcaggatccaggtga

SEQ ID NO: 169285 - DNA, 120 bp, Artificial Sequence
  ENSG00000108819_15 (sequence is synthesized)
atgatctcctggtggaggtggatggaacaagtctggtgggagtgacccagagcttcgcggcgtctgtgctccggaacaccaagggccgagtgcggtttatgattggccgggagcggccgg

SEQ ID NO: 169286 - DNA, 120 bp, Artificial Sequence
  ENSG00000108819_16 (sequence is synthesized)
gagagcagagcgaagtggcccagctaattcagcagactttggaacaggagcgatggcagcgggagatgatggagcagagatacgcccagtatggggaggatgacgaggagacgggagagt

SEQ ID NO: 169287 - DNA, 120 bp, Artificial Sequence
  ENSG00000108819_17 (sequence is synthesized)
aggatgaggagctgagccccacgttcccgggtggtgagatggccatcgaggtgtttgagctagcggagaacgaggatgcactgtcccctgtggacatggagcccgagaagctggtgcaca

SEQ ID NO: 169288 - DNA, 120 bp, Artificial Sequence
  ENSG00000108819_18 (sequence is synthesized)
agttcaaggagctccagatcaagcatgcggtcactgaggcagagatccagcagctgaaaagaaagctgcagagcctggagcaggagaaggggcgctggcgggtggagaaggcgcagttgg

SEQ ID NO: 169289 - DNA, 120 bp, Artificial Sequence
  ENSG00000108819_19 (sequence is synthesized)
agcagagtgtggaggagaacaaggagcgcatggagaaactggaaggctactggggtgaggcccagagcctgtgccaggctgtggacgagcacctgcgggagactcaggcgcagtaccagg

SEQ ID NO: 169290 - DNA, 120 bp, Artificial Sequence
  ENSG00000108819_20 (sequence is synthesized)
ccctggagcgcaagtacagcaaggccaagcgcctcatcaaggactaccagcagaaggagatcgagttcctgaaaaaggagactgcacagcgtcgggttctggaggagtcggagctggcca

SEQ ID NO: 169291 - DNA, 120 bp, Artificial Sequence
  ENSG00000108819_21 (sequence is synthesized)
gaaaggaggagatggacaagctcctggacaagatctcagaactggaaggaaacttgcaaacactgaggaattccaattctacttaacaggaatcattccatgactggacaataattaacc

SEQ ID NO: 169292 - DNA, 120 bp, Artificial Sequence
  ENSG00000108819_22 (sequence is synthesized)
cccctcccattgtcctccctcccctgtcctcaacaccccacccctcccccttccagcctggggacaggtgccccgactccccccacccctccaccccacctcccccagcttcagggacca

SEQ ID NO: 169293 - DNA, 120 bp, Artificial Sequence
  ENSG00000108819_23 (sequence is synthesized)
gagggctcatatcacaggcccccttaagatggcctgggcagacagaggtggctagaagggcagcctctttcttgccccatggggctgaggcacagaggccgagggctgccgagggctggc

SEQ ID NO: 169294 - DNA, 120 bp, Artificial Sequence
  ENSG00000108819_24 (sequence is synthesized)
ctggtggtcgacggacacaagcacctgcagatcaaactgccagactttacacactccagcttttgtctctggactggaacggggctggggctctcccagcatctgccaactgggggctgc

SEQ ID NO: 169295 - DNA, 120 bp, Artificial Sequence
  ENSG00000108819_25 (sequence is synthesized)
tccctgcccatggggcacctgggtggcccctgggcctcttgacttgagattctaccttctcggcccttccctctccccccatcattgtgccgtctctgttgcattctgaccctcccgcct

SEQ ID NO: 169296 - DNA, 120 bp, Artificial Sequence
  ENSG00000108819_26 (sequence is synthesized)
ggggggtgggggcgttgcctcaacacctcccccatccctgttccctgtcctgggagggatagagtccaccccagagcccggaggctgggcctggccctggccctgcactgatttctcatg

SEQ ID NO: 169297 - DNA, 120 bp, Artificial Sequence
  ENSG00000108819_27 (sequence is synthesized)
tgtccttcgggaaaagggggagtgagagtgggaaaaagggagagttcaggacacctggtccccagctccccattgcctggggcagcagccctcaatttctccttgtgcctcccctcttcc

SEQ ID NO: 169298 - DNA, 120 bp, Artificial Sequence
  ENSG00000108819_28 (sequence is synthesized)
aggtgccaaatagccataacctcgtcttggaactgttatgtggcctctctggggtccaggtttcctggtcaagcctgggaatgccagggaggaaagggggtctggctacagcgaccctgg

SEQ ID NO: 169299 - DNA, 120 bp, Artificial Sequence
  ENSG00000108819_29 (sequence is synthesized)
tcttaggcaaggggaacatttctccctggagagtcaggtcctatcctgtgctgccctgtctgcccagcccagggcgatgcctggaagcctactgacattgcagggagtcagcctcgcccc

SEQ ID NO: 169300 - DNA, 120 bp, Artificial Sequence
  ENSG00000108819_30 (sequence is synthesized)
caccccctactggttttccaatgttttgactggagggcaaaattttactactactcatctttttggagaccagggctgccctgctggcagcctgccttctaagtgaaatcgactctgttt

SEQ ID NO: 169301 - DNA, 120 bp, Artificial Sequence
  ENSG00000108819_31 (sequence is synthesized)
ccccactttaaccccaaattggggcttggaccaagggaggtgagaccacctcccccaggtcccctcccctttcaaaatccatctcattttgccacttcatgcccctgccctaactgggtt

SEQ ID NO: 169302 - DNA, 120 bp, Artificial Sequence
  ENSG00000108819_32 (sequence is synthesized)
tttgttcattttttaaaaacagaccacccatcccatccgttttggcttcttgtcccctgtaaatagaccatgacttcgatcagtatttcttgtccccaccccttcctatccccagatgtg

SEQ ID NO: 169303 - DNA, 120 bp, Artificial Sequence
  ENSG00000108819_33 (sequence is synthesized)
cccccatcccctgaaggagctggctgtctcagtcctgggctcgcgcacttcaccccggcagatggagggggcggaaccgggtgggcggggccgcttcgggctgcttgggccagcggccac

SEQ ID NO: 169304 - DNA, 120 bp, Artificial Sequence
  ENSG00000108819_34 (sequence is synthesized)
ccctgcccagccgtcgggagggccgcatctctgtatataatatatatatgtatgtattgttcccggttttgtacggaccatgccctctgtcaggtcgtccccataaaagcagcccccaga

SEQ ID NO: 169305 - DNA, 120 bp, Artificial Sequence
  ENSG00000108819_35 (sequence is synthesized)
cccctgggagggcctgagtttggagaggggagcatcagcagggaggatgatgcattacctggctgaggacagaggcagcggatgatgccggtgcccctgcaggtttatgattggccggga

SEQ ID NO: 169306 - DNA, 120 bp, Artificial Sequence
  ENSG00000108821_0 (sequence is synthesized)
agcagacgggagtttctcctcggggtcggagcaggaggcacgcggagtgtgaggccacgcatgagcggacgctaaccccctccccagccacaaagagtctacatgtctagggtctagaca

SEQ ID NO: 169307 - DNA, 120 bp, Artificial Sequence
  ENSG00000108821_1 (sequence is synthesized)
tgttcagctttgtggacctccggctcctgctcctcttagcggccaccgccctcctgacgcacggccaagaggaaggccaagtcgagggccaagacgaagacatcccaccaatcacctgcg

SEQ ID NO: 169308 - DNA, 120 bp, Artificial Sequence
  ENSG00000108821_2 (sequence is synthesized)
tacagaacggcctcaggtaccatgaccgagacgtgtggaaacccgagccctgccggatctgcgtctgcgacaacggcaaggtgttgtgcgatgacgtgatctgtgacgagaccaagaact

SEQ ID NO: 169309 - DNA, 120 bp, Artificial Sequence
  ENSG00000108821_3 (sequence is synthesized)
gccccggcgccgaagtccccgagggcgagtgctgtcccgtctgccccgacggctcagagtcacccaccgaccaagaaaccaccggcgtcgagggacccaagggagacactggcccccgag

SEQ ID NO: 169310 - DNA, 120 bp, Artificial Sequence
  ENSG00000108821_4 (sequence is synthesized)
gcccaaggggacccgcaggcccccctggccgagatggcatccctggacagcctggacttcccggaccccccggaccccccggacctcccggaccccctggcctcggaggaaactttgctc

SEQ ID NO: 169311 - DNA, 120 bp, Artificial Sequence
  ENSG00000108821_5 (sequence is synthesized)
cccagctgtcttatggctatgatgagaaatcaaccggaggaatttccgtgcctggccccatgggtccctctggtcctcgtggtctccctggcccccctggtgcacctggtccccaaggct

SEQ ID NO: 169312 - DNA, 120 bp, Artificial Sequence
  ENSG00000108821_6 (sequence is synthesized)
tccaaggtccccctggtgagcctggcgagcctggagcttcaggtcccatgggtccccgaggtcccccaggtccccctggaaagaatggagatgatggggaagctggaaaacctggtcgtc

SEQ ID NO: 169313 - DNA, 120 bp, Artificial Sequence
  ENSG00000108821_7 (sequence is synthesized)
ctggtgagcgtgggcctcctgggcctcagggtgctcgaggattgcccggaacagctggcctccctggaatgaagggacacagaggtttcagtggtttggatggtgccaagggagatgctg

SEQ ID NO: 169314 - DNA, 120 bp, Artificial Sequence
  ENSG00000108821_8 (sequence is synthesized)
gtcctgctggtcctaagggtgagcctggcagccctggtgaaaatggagctcctggtcagatgggcccccgtggcctgcctggtgagagaggtcgccctggagcccctggccctgctggtg

SEQ ID NO: 169315 - DNA, 120 bp, Artificial Sequence
  ENSG00000108821_9 (sequence is synthesized)
ctcgtggaaatgatggtgctactggtgctgccgggccccctggtcccaccggccccgctggtcctcctggcttccctggtgctgttggtgctaagggtgaagctggtccccaagggcccc

SEQ ID NO: 169316 - DNA, 120 bp, Artificial Sequence
  ENSG00000108821_10 (sequence is synthesized)
gaggctctgaaggtccccagggtgtgcgtggtgagcctggcccccctggccctgctggtgctgctggccctgctggaaaccctggtgctgatggacagcctggtgctaaaggtgccaatg

SEQ ID NO: 169317 - DNA, 120 bp, Artificial Sequence
  ENSG00000108821_11 (sequence is synthesized)
gtgctcctggtattgctggtgctcctggcttccctggtgcccgaggcccctctggaccccagggccccggcggccctcctggtcccaagggtaacagcggtgaacctggtgctcctggca

SEQ ID NO: 169318 - DNA, 120 bp, Artificial Sequence
  ENSG00000108821_12 (sequence is synthesized)
gcaaaggagacactggtgctaagggagagcctggccctgttggtgttcaaggaccccctggccctgctggagaggaaggaaagcgaggagctcgaggtgaacccggacccactggcctgc

SEQ ID NO: 169319 - DNA, 120 bp, Artificial Sequence
  ENSG00000108821_13 (sequence is synthesized)
ccggaccccctggcgagcgtggtggacctggtagccgtggtttccctggcgcagatggtgttgctggtcccaagggtcccgctggtgaacgtggttctcctggccctgctggccccaaag

SEQ ID NO: 169320 - DNA, 120 bp, Artificial Sequence
  ENSG00000108821_14 (sequence is synthesized)
gatctcctggtgaagctggtcgtcccggtgaagctggtctgcctggtgccaagggtctgactggaagccctggcagccctggtcctgatggcaaaactggcccccctggtcccgccggtc

SEQ ID NO: 169321 - DNA, 120 bp, Artificial Sequence
  ENSG00000108821_15 (sequence is synthesized)
aagatggtcgccccggacccccaggcccacctggtgcccgtggtcaggctggtgtgatgggattccctggacctaaaggtgctgctggagagcccggcaaggctggagagcgaggtgttc

SEQ ID NO: 169322 - DNA, 120 bp, Artificial Sequence
  ENSG00000108821_16 (sequence is synthesized)
ccggaccccctggcgctgtcggtcctgctggcaaagatggagaggctggagctcagggaccccctggccctgctggtcccgctggcgagagaggtgaacaaggccctgctggctcccccg

SEQ ID NO: 169323 - DNA, 120 bp, Artificial Sequence
  ENSG00000108821_17 (sequence is synthesized)
gattccagggtctccctggtcctgctggtcctccaggtgaagcaggcaaacctggtgaacagggtgttcctggagaccttggcgcccctggcccctctggagcaagaggcgagagaggtt

SEQ ID NO: 169324 - DNA, 120 bp, Artificial Sequence
  ENSG00000108821_18 (sequence is synthesized)
tccctggcgagcgtggtgtgcaaggtccccctggtcctgctggtccccgaggggccaacggtgctcccggcaacgatggtgctaagggtgatgctggtgcccctggagctcccggtagcc

SEQ ID NO: 169325 - DNA, 120 bp, Artificial Sequence
  ENSG00000108821_19 (sequence is synthesized)
agggcgcccctggccttcagggaatgcctggtgaacgtggtgcagctggtcttccagggcctaagggtgacagaggtgatgctggtcccaaaggtgctgatggctctcctggcaaagatg

SEQ ID NO: 169326 - DNA, 120 bp, Artificial Sequence
  ENSG00000108821_20 (sequence is synthesized)
gcgtccgtggtctgactggccccattggtcctcctggccctgctggtgcccctggtgacaagggtgaaagtggtcccagcggccctgctggtcccactggagctcgtggtgcccccggag

SEQ ID NO: 169327 - DNA, 120 bp, Artificial Sequence
  ENSG00000108821_21 (sequence is synthesized)
accgtggtgagcctggtccccccggccctgctggctttgctggcccccctggtgctgacggccaacctggtgctaaaggcgaacctggtgatgctggtgctaaaggcgatgctggtcccc

SEQ ID NO: 169328 - DNA, 120 bp, Artificial Sequence
  ENSG00000108821_22 (sequence is synthesized)
ctggccctgccggacccgctggaccccctggccccattggtaatgttggtgctcctggagccaaaggtgctcgcggcagcgctggtccccctggtgctactggtttccctggtgctgctg

SEQ ID NO: 169329 - DNA, 120 bp, Artificial Sequence
  ENSG00000108821_23 (sequence is synthesized)
gccgagtcggtcctcctggcccctctggaaatgctggaccccctggccctcctggtcctgctggcaaagaaggcggcaaaggtccccgtggtgagactggccctgctggacgtcctggtg

SEQ ID NO: 169330 - DNA, 120 bp, Artificial Sequence
  ENSG00000108821_24 (sequence is synthesized)
aagttggtccccctggtccccctggccctgctggcgagaaaggatcccctggtgctgatggtcctgctggtgctcctggtactcccgggcctcaaggtattgctggacagcgtggtgtgg

SEQ ID NO: 169331 - DNA, 120 bp, Artificial Sequence
  ENSG00000108821_25 (sequence is synthesized)
tcggcctgcctggtcagagaggagagagaggcttccctggtcttcctggcccctctggtgaacctggcaaacaaggtccctctggagcaagtggtgaacgtggtccccctggtcccatgg

SEQ ID NO: 169332 - DNA, 120 bp, Artificial Sequence
  ENSG00000108821_26 (sequence is synthesized)
gcccccctggattggctggaccccctggtgaatctggacgtgagggggctcctggtgccgaaggttcccctggacgagacggttctcctggcgccaagggtgaccgtggtgagaccggcc

SEQ ID NO: 169333 - DNA, 120 bp, Artificial Sequence
  ENSG00000108821_27 (sequence is synthesized)
ccgctggaccccctggtgctcctggtgctcctggtgcccctggccccgttggccctgctggcaagagtggtgatcgtggtgagactggtcctgctggtcccgccggtcctgtcggccctg

SEQ ID NO: 169334 - DNA, 120 bp, Artificial Sequence
  ENSG00000108821_28 (sequence is synthesized)
ccgtggccccgccggaccccaaggcccccgtggtgacaagggtgagacaggcgaacagggcgacagaggcataaagggtcaccgtggcttctctggcctccagggtccccctggccctcc

SEQ ID NO: 169335 - DNA, 120 bp, Artificial Sequence
  ENSG00000108821_29 (sequence is synthesized)
tggctctcctggtgaacaaggtccctctggagcctctggtcctgctggtccccgaggtccccctggctctgctggtgctcctggcaaagatggactcaacggtctccctggccccattgg

SEQ ID NO: 169336 - DNA, 120 bp, Artificial Sequence
  ENSG00000108821_30 (sequence is synthesized)
gccccctggtcctcgcggtcgcactggtgatgctggtcctgttggtccccccggccctcctggacctcctggtccccctggtcctcccagcgctggtttcgacttcagcttcctgcccca

SEQ ID NO: 169337 - DNA, 120 bp, Artificial Sequence
  ENSG00000108821_31 (sequence is synthesized)
gccacctcaagagaaggctcacgatggtggccgctactaccgggctgatgatgccaatgtggttcgtgaccgtgacctcgaggtggacaccaccctcaagagcctgagccagcagatcga

SEQ ID NO: 169338 - DNA, 120 bp, Artificial Sequence
  ENSG00000108821_32 (sequence is synthesized)
gaacatccggagcccagagggcagccgcaagaaccccgcccgcacctgccgtgacctcaagatgtgccactctgactggaagagtggagagtactggattgaccccaaccaaggctgcaa

SEQ ID NO: 169339 - DNA, 120 bp, Artificial Sequence
  ENSG00000108821_33 (sequence is synthesized)
cctggatgccatcaaagtcttctgcaacatggagactggtgagacctgcgtgtaccccactcagcccagtgtggcccagaagaactggtacatcagcaagaaccccaaggacaagaggca

SEQ ID NO: 169340 - DNA, 120 bp, Artificial Sequence
  ENSG00000108821_34 (sequence is synthesized)
tgtctggttcggcgagagcatgaccgatggattccagttcgagtatggcggccagggctccgaccctgccgatgtggccatccagctgaccttcctgcgcctgatgtccaccgaggcctc

SEQ ID NO: 169341 - DNA, 120 bp, Artificial Sequence
  ENSG00000108821_35 (sequence is synthesized)
ccagaacatcacctaccactgcaagaacagcgtggcctacatggaccagcagactggcaacctcaagaaggccctgctcctccagggctccaacgagatcgagatccgcgccgagggcaa

SEQ ID NO: 169342 - DNA, 120 bp, Artificial Sequence
  ENSG00000108821_36 (sequence is synthesized)
cagccgcttcacctacagcgtcactgtcgatggctgcacgagtcacaccggagcctggggcaagacagtgattgaatacaaaaccaccaagacctcccgcctgcccatcatcgatgtggc

SEQ ID NO: 169343 - DNA, 120 bp, Artificial Sequence
  ENSG00000108821_37 (sequence is synthesized)
ccccttggacgttggtgccccagaccaggaattcggcttcgacgttggccctgtctgcttcctgtaaactccctccatcccaacctggctccctcccacccaaccaactttccccccaac

SEQ ID NO: 169344 - DNA, 120 bp, Artificial Sequence
  ENSG00000108821_38 (sequence is synthesized)
ccggaaacagacaagcaacccaaactgaaccccctcaaaagccaaaaaatgggagacaatttcacatggactttggaaaatatttttttcctttgcattcatctctcaaacttagttttt

SEQ ID NO: 169345 - DNA, 88 bp, Artificial Sequence
  ENSG00000108821_39 (sequence is synthesized)
tatttttttcctttgcattcatctctcaaacttagtttttatctttgaccaaccgaacatgaccaaaaaccaaaagtgcattcaacct

SEQ ID NO: 169346 - DNA, 120 bp, Artificial Sequence
  ENSG00000108821_40 (sequence is synthesized)
agacccatgcgggggtaagtccctttctgcccgttgggcttatgaaaccccaatgctgccctttctgctcctttctccacaccccccttggggcctcccctccactccttcccaaatctg

SEQ ID NO: 169347 - DNA, 120 bp, Artificial Sequence
  ENSG00000108821_41 (sequence is synthesized)
tctccccagaagacacaggaaacaatgtattgtctgcccagcaatcaaaggcaatgctcaaacacccaagtggcccccaccctcagcccgctcctgcccgcccagcacccccaggccctg

SEQ ID NO: 169348 - DNA, 120 bp, Artificial Sequence
  ENSG00000108821_42 (sequence is synthesized)
ggggacctggggttctcagactgccaaagaagccttgccatctggcgctcccatggctcttgcaacatctccccttcgtttttgagggggtcatgccgggggagccaccagcccctcact

SEQ ID NO: 169349 - DNA, 120 bp, Artificial Sequence
  ENSG00000108821_43 (sequence is synthesized)
gggttcggaggagagtcaggaagggccacgacaaagcagaaacatcggatttggggaacgcgtgtcaatcccttgtgccgcagggctgggcgggagagactgttctgttccttgtgtaac

SEQ ID NO: 169350 - DNA, 120 bp, Artificial Sequence
  ENSG00000108821_44 (sequence is synthesized)
tgtgttgctgaaagactacctcgttcttgtcttgatgtgtcaccggggcaactgcctgggggcggggatgggggcagggtggaagcggctccccattttataccaaaggtgctacatcta

SEQ ID NO: 169351 - DNA, 120 bp, Artificial Sequence
  ENSG00000108821_45 (sequence is synthesized)
tgtgatgggtggggtggggagggaatcactggtgctatagaaattgagatgcccccccaggccagcaaatgttcctttttgttcaaagtctatttttattccttgatatttttctttttt

SEQ ID NO: 169352 - DNA, 120 bp, Artificial Sequence
  ENSG00000108821_46 (sequence is synthesized)
tttttttttttttgtggatggggacttgtgaatttttctaaaggtgctatttaacatgggaggagagcgtgtgcggctccagcccagcccgctgctcactttccaccctctctccacctg

SEQ ID NO: 169353 - DNA, 120 bp, Artificial Sequence
  ENSG00000108821_47 (sequence is synthesized)
cctctggcttctcaggcctctgctctccgacctctctcctctgaaaccctcctccacagctgcagcccatcctcccggctccctcctagtctgtcctgcgtcctctgtccccgggtttca

SEQ ID NO: 169354 - DNA, 120 bp, Artificial Sequence
  ENSG00000108821_48 (sequence is synthesized)
gagacaacttcccaaagcacaaagcagtttttccccctaggggtgggaggaagcaaaagactctgtacctattttgtatgtgtataataatttgagatgtttttaattattttgattgct

SEQ ID NO: 169355 - DNA, 120 bp, Artificial Sequence
  ENSG00000108821_49 (sequence is synthesized)
ggaataaagcatgtggaaatgacccaaacataatccgcagtggcctcctaatttccttctttggagttgggggaggggtagacatggggaaggggctttggggtgatgggcttgccttcc

SEQ ID NO: 169356 - DNA, 120 bp, Artificial Sequence
  ENSG00000108821_50 (sequence is synthesized)
attcctgccctttccctccccactattctcttctagatccctccataaccccactcccctttctctcacccttcttataccgcaaacctttctacttcctctttcattttctattcttgc

SEQ ID NO: 169357 - DNA, 120 bp, Artificial Sequence
  ENSG00000108821_51 (sequence is synthesized)
aatttccttgcaccttttccaaatcctcttctcccctgcaataccatacaggcaatccacgtgcacaacacacacacacactcttcacatctggggttgtccaaacctcatacccactcc

SEQ ID NO: 169358 - DNA, 120 bp, Artificial Sequence
  ENSG00000108821_52 (sequence is synthesized)
ccttcaagcccatccactctccaccccctggatgccctgcacttggtggcggtgggatgctcatggatactgggagggtgaggggagtggaacccgtgaggaggacctgggggcctctcc

SEQ ID NO: 169359 - DNA, 120 bp, Artificial Sequence
  ENSG00000108821_53 (sequence is synthesized)
ttgaactgacatgaagggtcatctggcctctgctcccttctcacccacgctgacctcctgccgaaggagcaacgcaacaggagaggggtctgctgagcctggcgagggtctgggagggac

SEQ ID NO: 169360 - DNA, 120 bp, Artificial Sequence
  ENSG00000108821_54 (sequence is synthesized)
caggaggaaggcgtgctccctgctcgctgtcctggccctgggggagtgagggagacagacacctgggagagctgtggggaaggcactcgcaccgtgctcttgggaaggaaggagacctgg

SEQ ID NO: 169361 - DNA, 120 bp, Artificial Sequence
  ENSG00000108821_55 (sequence is synthesized)
ccctgctcaccacggactgggtgcctcgacctcctgaatccccagaacacaacccccctgggctggggtggtctggggaaccatcgtgcccccgcctcccgcctactcctttttaagctt

SEQ ID NO: 169362 - DNA, 120 bp, Artificial Sequence
  ENSG00000108821_56 (sequence is synthesized)
gcagactgtccctcaatttgggattgtctcattagattagatgcagggatgcatctttgcaggaatgtcttaaaagcaatgttattcttctcagcacatcacaccaggaagtgcatgatg

SEQ ID NO: 169363 - DNA, 120 bp, Artificial Sequence
  ENSG00000108821_57 (sequence is synthesized)
tgctggcaagagtggtgatcgtggtgagactgtaagtagctgggctccagttccctgtacctggtcaggccagggactcttcaggcctccttagaggcctggggatgggtgtcggacttc

SEQ ID NO: 169364 - DNA, 120 bp, Artificial Sequence
  ENSG00000108821_58 (sequence is synthesized)
acccaggcagggggaggaaaggagatcctgcaagatgtcagggccttaatccaaaaaactgagttaaagctcagccccaagtcccctctcccagacaggaccgcctctcccatgagttgg

SEQ ID NO: 169365 - DNA, 120 bp, Artificial Sequence
  ENSG00000108821_59 (sequence is synthesized)
gcagctgaggagagagagatccagcagaggggaggcctcatcctgcagccccagcctcagccttccctggccaagagctcatgctttccttgctctccccagggtcctgctggtcccgcc

SEQ ID NO: 169366 - DNA, 120 bp, Artificial Sequence
  ENSG00000108821_60 (sequence is synthesized)
ggtcctgtcggccctgttggcgcccgtggccccgccgtaagtaccctgctgtgtcccccatgcctttagaactctacagatgcagacagtgccccactcgatgccaatggaacttccgcc

SEQ ID NO: 169367 - DNA, 120 bp, Artificial Sequence
  ENSG00000108821_61 (sequence is synthesized)
tgacagtttgtccctttctctcttctagggaccccaaggcccccgtggtgacaagggtgagacaggcgaacagggcgacagaggcataaagggtcaccgtggcttctctggcctccaggg

SEQ ID NO: 169368 - DNA, 120 bp, Artificial Sequence
  ENSG00000108821_62 (sequence is synthesized)
gcagggaatccagagggacaggcccccgctcctagctaatcagacagccatcaactagagggattgaggttagacgccggaaagaacttcctcccatgaagggagcagcacagagggaag

SEQ ID NO: 169369 - DNA, 120 bp, Artificial Sequence
  ENSG00000108821_63 (sequence is synthesized)
tgggggctgcatgattgctagtctgggtgacttcttttaagagctgctggaatatgctgtgactttccctcaacccttctattgataaatcttggtccatagtttggggaggggggaagc

SEQ ID NO: 169370 - DNA, 120 bp, Artificial Sequence
  ENSG00000108821_64 (sequence is synthesized)
tttgacacatccctaggaggaagagaggggctgtttgggataatctcaattcagtgctgagaaggggttcctctctaatcacggccagaccccaggaggaaggaccgtgctttccagcag

SEQ ID NO: 169371 - DNA, 120 bp, Artificial Sequence
  ENSG00000108821_65 (sequence is synthesized)
agtggccccaggtgggttttgctcactgtctgttcctctctccctccccctcagggtgttcctggagaccttggcgcccctggcccctctggagcaagaggcgagagaggtttccctggc

SEQ ID NO: 169372 - DNA, 120 bp, Artificial Sequence
  ENSG00000108821_66 (sequence is synthesized)
ggtccccctggctctgctggtgctcctggcaaagatggactcaacggtctccctggccccattgggccccctggtcctcgcggtcgcactggtgatgctggtcctgttgtatgtagcccc

SEQ ID NO: 169373 - DNA, 120 bp, Artificial Sequence
  ENSG00000108821_67 (sequence is synthesized)
tcatcccctctgctcatggccctccagcccccaaagcacttggatgccggtaatccccactctcttccctctctgtgcagggtccccccggccctcctggacctcctggtccccctggtc

SEQ ID NO: 169374 - DNA, 120 bp, Artificial Sequence
  ENSG00000108821_68 (sequence is synthesized)
attccaggtgcgtgagctggacctcagagccagtgttaggagatgggctagcccagtgctcagaagggacatgaagtcctggagtaggtctctgctaagggtgatggacagagctgggct

SEQ ID NO: 169375 - DNA, 120 bp, Artificial Sequence
  ENSG00000108821_69 (sequence is synthesized)
gggaggcaggggtctcaggtccctgatagtggttcagacacaggctgccgatgggcaggtggtgcctcctctcgatataacggtgcattgggcagctctctgaggaccctggacagggag

SEQ ID NO: 169376 - DNA, 120 bp, Artificial Sequence
  ENSG00000108821_70 (sequence is synthesized)
cttccctcctgtcagcgcatctctccaatctgactccttttcttctagggagaccgtggtgagcctggtccccccggccctgctggctttgctggcccccctgtgagtaccaagaccccc

SEQ ID NO: 169377 - DNA, 120 bp, Artificial Sequence
  ENSG00000108821_71 (sequence is synthesized)
ctggcctcttgtttcttctcccccaatcccacagggacccaagggagacactggcccccgaggcccaaggggacccgcaggcccccctggccgagatggcatccctggacagcctggact

SEQ ID NO: 169378 - DNA, 120 bp, Artificial Sequence
  ENSG00000108821_72 (sequence is synthesized)
ggacaaacacacctgagacttgaaggagtcctgggctctgggctcagctgtgccgctgacctgccgtgtggccactcactctcactttctggacctcagcctccctatctgtaaaatgaa

SEQ ID NO: 169379 - DNA, 120 bp, Artificial Sequence
  ENSG00000108821_73 (sequence is synthesized)
atggtcctccacatccccagagtcccaccatgaatgaatttctcactcattattctctgatctacagggtgagcctggcagccctggtgaaaatggagctcctggtcagatggtgagtgt

SEQ ID NO: 169380 - DNA, 120 bp, Artificial Sequence
  ENSG00000108821_74 (sequence is synthesized)
gatggaggcctgggggaacaaggctgtctcccatctcatctgacttctcttggtttggttgtcagggcccccgtggcctgcctggtgagagaggtcgccctggagcccctggccctgctg

SEQ ID NO: 169381 - DNA, 120 bp, Artificial Sequence
  ENSG00000108821_75 (sequence is synthesized)
gtgctcgtggaaatgatggtgctactggtgctgccgggccccctgtgagtgtggcctgtaggcctcagggcctgggagtggggaggggtctcagtatctgctcttggggctgacaatggg

SEQ ID NO: 169382 - DNA, 120 bp, Artificial Sequence
  ENSG00000108821_76 (sequence is synthesized)
gcggactaaagctttgtttaaattcctgagaactggaaagagttacagcctccctggccaggcgcctcggcgctgtcacccgcgctgatgaggagcaggcgagcttttaaggatttgagg

SEQ ID NO: 169383 - DNA, 120 bp, Artificial Sequence
  ENSG00000108821_77 (sequence is synthesized)
aaagaagaacggggggaggggcgggaagtgaaaaatccaagtgtgcctcttagacccgggggaaaggtggttaagctgggggttgcagtcactactgacaacgcccctcttccgcctgtc

SEQ ID NO: 169384 - DNA, 120 bp, Artificial Sequence
  ENSG00000108821_78 (sequence is synthesized)
catgctgtgctgtgggataggagggggagcttcgcctcagtttccccctctggatagtcattctttcccctccctagtggggactggggtctgaagatttgtgggcatgtccaagtagct

SEQ ID NO: 169385 - DNA, 120 bp, Artificial Sequence
  ENSG00000108821_79 (sequence is synthesized)
tctgagagggtgaggggtacacagagagggattatgggagaggtctctgcctatggacaccctcgggctagatttccagaataatgaaggggcatgggttgcccacactgcccttgtctc

SEQ ID NO: 169386 - DNA, 60 bp, Artificial Sequence
  ENSG00000108821_80 (sequence is synthesized)
actttgggaggccaaggcgggcagaccatgaggtcaggagtttgagaccagtcgtgtgca

SEQ ID NO: 169387 - DNA, 120 bp, Artificial Sequence
  ENSG00000108823_0 (sequence is synthesized)
ctctgtcactcaccgggcgggccaggccgggcagccatggctgagacactcttctggactcctctcctcgtggttctcctggcagggctgggggacaccgaggcccagcagaccacgcta

SEQ ID NO: 169388 - DNA, 120 bp, Artificial Sequence
  ENSG00000108823_1 (sequence is synthesized)
cacccacttgtgggccgtgtctttgtgcacaccttggaccatgagacgtttctgagccttcctgagcatgtcgctgtcccacccgctgtccacatcacctaccacgcccacctccaggga

SEQ ID NO: 169389 - DNA, 120 bp, Artificial Sequence
  ENSG00000108823_2 (sequence is synthesized)
cacccagacctgccccggtggctccgctacacccagcgcagcccccaccaccctggcttcctctacggctctgccaccccagaagatcgtgggctccaggtcattgaggtcacagcctac

SEQ ID NO: 169390 - DNA, 120 bp, Artificial Sequence
  ENSG00000108823_3 (sequence is synthesized)
aatcgggacagctttgataccactcggcagaggctggtgctggagattggggacccagaaggccccctgctgccataccaagccgagttcctggtgcgcagccacgatgcggaggaggtg

SEQ ID NO: 169391 - DNA, 120 bp, Artificial Sequence
  ENSG00000108823_4 (sequence is synthesized)
ctgccctcaacacctgccagccgcttcctctcagccttggggggactctgggagcccggagagcttcagctgctcaacgtcacctctgccttggaccgtgggggccgtgtcccccttccc

SEQ ID NO: 169392 - DNA, 120 bp, Artificial Sequence
  ENSG00000108823_5 (sequence is synthesized)
gccagcctccacttctgtcttgctacgacaccttggcaccccacttccgcgttgactggtgcaatgtgaccctggtggataagtcagtgccggagcctgcagatgaggtgcccaccccag

SEQ ID NO: 169393 - DNA, 120 bp, Artificial Sequence
  ENSG00000108823_6 (sequence is synthesized)
gtgatgggatcctggagcatgacccgttcttctgcccacccactgaggccccagaccgtgacttcttggtggatgctctggtcaccctcctggtgcccctgctggtggccctgcttctca

SEQ ID NO: 169394 - DNA, 120 bp, Artificial Sequence
  ENSG00000108823_7 (sequence is synthesized)
ccttgctgctggcctatgtcatgtgctgccggcgggagggaaggctgaagagagacctggctacctccgacatccagatggtccaccactgcaccatccacgggaacacagaggagctgc

SEQ ID NO: 169395 - DNA, 120 bp, Artificial Sequence
  ENSG00000108823_8 (sequence is synthesized)
ggcagatggcggccagccgcgaggtgccccggccactctccaccctgcccatgttcaatgtgcacacaggtgagcggctgcctccccgcgtggacagcgcccaggtgcccctcattctgg

SEQ ID NO: 169396 - DNA, 120 bp, Artificial Sequence
  ENSG00000108823_9 (sequence is synthesized)
accagcactgacagcctagccagtggttccaggtccagccctgacttcatcctcccttctctgtccacaccacgagtggcacatcccacctgctgattccagctcctggccctcctggaa

SEQ ID NO: 169397 - DNA, 120 bp, Artificial Sequence
  ENSG00000108823_10 (sequence is synthesized)
cccaggctctaaacaagcagggagagggggtggggtggggtgagagtgtgtggagtaaggacattcagaataaatatctgctgctctgctcaccaattgctgctggcagcctctcccgtc

SEQ ID NO: 169398 - DNA, 120 bp, Artificial Sequence
  ENSG00000108823_11 (sequence is synthesized)
gagggaccctgggtccgggggtggggtggggcatggcccccatcccagtcccccttccctcccatgctgcttcctatctccgtctctctgattgctccagtcaccatttctttccctgat

SEQ ID NO: 169399 - DNA, 87 bp, Artificial Sequence
  ENSG00000108823_12 (sequence is synthesized)
agttctacctttcccccacaagagggcaacagagtccgcaatccgcatgtggggtctccaactcccgcgccccagatctgcccaggt

SEQ ID NO: 169400 - DNA, 120 bp, Artificial Sequence
  ENSG00000108823_13 (sequence is synthesized)
tgtggggtctccaactcccgcgccccagatctgcccaggtcaacagctatatcacagtccagttcccaaaccctttccctaccaagggcctctgcgtgacagctctgtctgcttttctgt

SEQ ID NO: 169401 - DNA, 120 bp, Artificial Sequence
  ENSG00000108823_14 (sequence is synthesized)
aaggtgccacctagcaaacccacttacaacaaggatctgatagctcttcacactataaaccaaagatgctcacaacagctctttggatactgagctgaggttcacaggatcccacggctg

SEQ ID NO: 169402 - DNA, 120 bp, Artificial Sequence
  ENSG00000108823_15 (sequence is synthesized)
gtgtacactgttcctgtgaattgaccaacagagcagggactcattcagggtccacagccagcgactggtaattgacaacattcttgagcacttgctatgtgcttggcactgtcccatcaa

SEQ ID NO: 169403 - DNA, 120 bp, Artificial Sequence
  ENSG00000108823_16 (sequence is synthesized)
catattttatgctcaccaccactccaggagacaggtgctactattatccttctgacattacaggtgatgaaacagaggcacataatcatcctagctaagcacttgtctgagtctggattc

SEQ ID NO: 169404 - DNA, 120 bp, Artificial Sequence
  ENSG00000108823_17 (sequence is synthesized)
ctctcctccctgccccctgtctctgtcactcaccgggcgggccaggccgggcagccatggctgagacactcttctggactcctctcctcgtgggcaagttggggccttgttcagcgggga

SEQ ID NO: 169405 - DNA, 120 bp, Artificial Sequence
  ENSG00000108823_18 (sequence is synthesized)
cgcagggtggctcagaggcagttccaggctgtactccagggcagctgactcccagagctgatgactccccacctgtgcctccagcatccagatggtccaccactgcaccatccacgggaa

SEQ ID NO: 169406 - DNA, 120 bp, Artificial Sequence
  ENSG00000108826_0 (sequence is synthesized)
gagtgatcgaaagcatggcgtcggtggtgttggcgctgaggacccggacagccgttacatccttgctaagccccactccggctacagctcttgctgtcagatacgcatccaagaagtcgg

SEQ ID NO: 169407 - DNA, 120 bp, Artificial Sequence
  ENSG00000108826_1 (sequence is synthesized)
gtggtagctccaaaaacctcggtggaaagtcatcaggcagacgccaaggcattaagaaaatggaaggtcactatgttcatgctgggaacatcattgcaacacagcgccatttccgctggc

SEQ ID NO: 169408 - DNA, 120 bp, Artificial Sequence
  ENSG00000108826_2 (sequence is synthesized)
gtgcctcatcccagaaacacggaggctgtggatctgatcaccaggctgcccaagggtgctgtgctctacaagacttttgtccacgtggttcctgccaagcctgagggcaccttcaaactg

SEQ ID NO: 169409 - DNA, 120 bp, Artificial Sequence
  ENSG00000108826_3 (sequence is synthesized)
gtagctatgctttgatgtcctgttgaggccatcggacagagactggagcccaggtgacaggagatggtgataccagaagtcaagggttggggtggcgacacggcctcccgaggaagaggt

SEQ ID NO: 169410 - DNA, 120 bp, Artificial Sequence
  ENSG00000108826_4 (sequence is synthesized)
ctgcttgatggtgactctgcaggagactctgaagtgactgctgggaaaccctttgggagacctgacctggggccaaaaataaagtgagccagcgtcatgaacgcatgctatttagggaca

SEQ ID NO: 169411 - DNA, 120 bp, Artificial Sequence
  ENSG00000108826_5 (sequence is synthesized)
tccagcttgggcaacaagagtgaagctccgtctttaaaaaaaaaaaagaaagaaagtcgtgggtgagcctgaaaccgaagcctttctggatgtactgggctccccaagtctgttctggcc

SEQ ID NO: 169412 - DNA, 120 bp, Artificial Sequence
  ENSG00000108826_6 (sequence is synthesized)
gtattgagtgcttaccaaatggcaagcattgtgctgattcccatgcctacacgatctcatttcttccttaccacatccctgtaagtaaggtgaaatgccagagacctagacggggtggaa

SEQ ID NO: 169413 - DNA, 120 bp, Artificial Sequence
  ENSG00000108826_7 (sequence is synthesized)
ggagcaagtgactgctgggatttgcaccaggtctgcctaactcccagatcactatgatttgccctggtgttgcattggcctggtattcttggttctcctttctaaccctcagttcttgga

SEQ ID NO: 169414 - DNA, 120 bp, Artificial Sequence
  ENSG00000108826_8 (sequence is synthesized)
ggacaagatacctggtgatttaaaatattattttagtcttgggaaactaatttcaatttattagtttttcattattctaagacttcttcctttgtataaacttacttgcagatggttgaa

SEQ ID NO: 169415 - DNA, 120 bp, Artificial Sequence
  ENSG00000108826_9 (sequence is synthesized)
agatagcttgaatttaatgaaatagaattcagtgtgccaggagttaggttcataccaggtggggatttcagtttcagcaagttggcatcatttttatagggtaggacagttctttgttac

SEQ ID NO: 169416 - DNA, 120 bp, Artificial Sequence
  ENSG00000108826_10 (sequence is synthesized)
agagacataacgatactgtactctccacattattttaaatattagttgcctttgtaaacagtttcccctcccccacccctttttcgataattttagtaggtacaaaaaggttgatagtaa

SEQ ID NO: 169417 - DNA, 120 bp, Artificial Sequence
  ENSG00000108826_11 (sequence is synthesized)
cctgtatttatttcaaagatgctaatttgtatgtgaattgattatgtatgtagtagctttttaccttttagaacttaagacattagatgtgtggctatgtcaacaataataatcaaagct

SEQ ID NO: 169418 - DNA, 120 bp, Artificial Sequence
  ENSG00000108826_12 (sequence is synthesized)
aacacattttgagctagacagtattctaggccctttatgattgttgagcattaatcctcaaaatgaccctgtaaaatagttaatattatccccatttgacagacgaaaaaatagaggcac

SEQ ID NO: 169419 - DNA, 120 bp, Artificial Sequence
  ENSG00000108826_13 (sequence is synthesized)
gtgctggtatttgaaccaggcatcctggctccagagcccattcttttaatcagagagacagagaataatgctggactacctgggtaaaatttgccacacacccagcctgaagttctaaaa

SEQ ID NO: 169420 - DNA, 120 bp, Artificial Sequence
  ENSG00000108826_14 (sequence is synthesized)
gaaaaagctaaaaaatatggttaaaaactgtatatacaacacagtttaatctctctgcttcatatttcacatctgaaaagtggcgttggaaataatacctctttcactaggtgagaatta

SEQ ID NO: 169421 - DNA, 120 bp, Artificial Sequence
  ENSG00000108826_15 (sequence is synthesized)
aatgacttaatgtgtattaaagggcttacatgggtattagctaatgcagtagtatgattgttttattagcatatgcattatccatatagctttggtttatattttccatagagcctaaac

SEQ ID NO: 169422 - DNA, 120 bp, Artificial Sequence
  ENSG00000108826_16 (sequence is synthesized)
tttatagatcactatctaaatgaaaatttacatcaaactagtgttttaatatgacagttctagtgttgtttaagtctaagtgaagatttagggcatcttcctgggttttgggatttgtgc

SEQ ID NO: 169423 - DNA, 120 bp, Artificial Sequence
  ENSG00000108826_17 (sequence is synthesized)
agtgtggcttctgaccagctgcatagacatggctccaggtaacagtccctgggactgagcagtggcccatgttggctgttggagctttcttttccctcatttgttatgagtcaataaaga

SEQ ID NO: 169424 - DNA, 120 bp, Artificial Sequence
  ENSG00000108826_18 (sequence is synthesized)
agcagaaggtttggacgtgctagccagtgggaaagggaacctgagatggagctctctgatcaccctttcagccccagggcccggctctgtgtgagaagtctgtcccaaaattctgggacg

SEQ ID NO: 169425 - DNA, 120 bp, Artificial Sequence
  ENSG00000108826_19 (sequence is synthesized)
gaccacctcgctgaccagctgaccagctgaccaggtctgtgtgttgcaggtgggtgttgggaagaataaatgtctgtatgccctggaagaggggatagtccgctacactaaggaggtcta

SEQ ID NO: 169426 - DNA, 120 bp, Artificial Sequence
  ENSG00000108826_20 (sequence is synthesized)
aggcattaagaaaatggaaggtgaggatgtgccttggcttccccttcctagctgcaccctgtcctcatgttccttaggagagcagaagaaccctgcgtgtgcctggccctgttcttcctt

SEQ ID NO: 169427 - DNA, 120 bp, Artificial Sequence
  ENSG00000108826_21 (sequence is synthesized)
accatcataattggctccagtttaaaggaacggataagacctgaggaagggtcatcgagtgggtgggtgtgagccataaccatgcaattagagacaagagctgctgggtggcagatcctg

SEQ ID NO: 169428 - DNA, 120 bp, Artificial Sequence
  ENSG00000108826_22 (sequence is synthesized)
ggtggagccgtgagtgagggcgtttgaagagcacttgtctttctcctgcctcagcagcacggacgggttccttggcggttggggatttggttacatccttgctaagccccactccggcta

SEQ ID NO: 169429 - DNA, 120 bp, Artificial Sequence
  ENSG00000108828_0 (sequence is synthesized)
gttccgccttccccagctgtgcactctccatccagctgtgcgctctcgtcgggagtcccagccatgtccgacgagagagaggtagccgaggcagcgaccggggaagacgcctcttcgccg

SEQ ID NO: 169430 - DNA, 120 bp, Artificial Sequence
  ENSG00000108828_1 (sequence is synthesized)
cctccgaaaaccgaggcagcgagcgacccccagcatcccgcggcctccgaaggggccgccgccgccgccgcctcgccgccactgctgcgctgcctagtgctcaccggctttggaggctac

SEQ ID NO: 169431 - DNA, 120 bp, Artificial Sequence
  ENSG00000108828_2 (sequence is synthesized)
gacaaggtgaagctgcagagccggccggcagcgcccccggcccctgggcccggccagctgacgctgcgtctgcgggcctgcgggctcaacttcgcagacctcatggctaggcaggggctg

SEQ ID NO: 169432 - DNA, 120 bp, Artificial Sequence
  ENSG00000108828_3 (sequence is synthesized)
tacgaccgtctcccgcctctgcctgtcactccgggcatggagggcgcgggtgttgtgatcgcagtgggcgagggagtcagcgaccgcaaggcaggagaccgggtgatggtgttgaaccgg

SEQ ID NO: 169433 - DNA, 120 bp, Artificial Sequence
  ENSG00000108828_4 (sequence is synthesized)
tcagggatgtggcaggaagaggtgactgtgccctcggtccagaccttcctgattcctgaggccatgacctttgaggaagctgctgccttgctcgtcaattacattacagcctacatggtc

SEQ ID NO: 169434 - DNA, 120 bp, Artificial Sequence
  ENSG00000108828_5 (sequence is synthesized)
ctctttgacttcggcaacctacagcctggccacagcgtcttggtacacatggctgcagggggtgtgggtatggctgccgtgcagctgtgccgtacagtggagaatgtgacagtgttcgga

SEQ ID NO: 169435 - DNA, 120 bp, Artificial Sequence
  ENSG00000108828_6 (sequence is synthesized)
acggcctcggccagcaagcacgaggcactgaaggagaatggggtcacacatcccatcgactatcacacgactgactacgtggatgagatcaagaagatttcccctaaaggagtggacatt

SEQ ID NO: 169436 - DNA, 120 bp, Artificial Sequence
  ENSG00000108828_7 (sequence is synthesized)
gtcatggaccctctgggtgggtcagatactgccaagggctacaacctcctgaaacccatgggcaaagtcgtcacctatggaatggccaacctgctgacgggccccaaacggaacctgatg

SEQ ID NO: 169437 - DNA, 120 bp, Artificial Sequence
  ENSG00000108828_8 (sequence is synthesized)
gccctggcccggacatggtggaatcagttcagcgtgacagctctgcagctgctgcaggccaaccgggctgtgtgtggcttccacctgggctacctggatggtgaggtggagctggtcagt

SEQ ID NO: 169438 - DNA, 120 bp, Artificial Sequence
  ENSG00000108828_9 (sequence is synthesized)
ggtgtggtggcccgcctcctggctctgtacaaccagggccacatcaagccccacattgactcagtctggcccttcgagaaggtggctgatgccatgaaacagatgcaggagaagaagaat

SEQ ID NO: 169439 - DNA, 120 bp, Artificial Sequence
  ENSG00000108828_10 (sequence is synthesized)
gtgggcaaggtcctcctggttccagggccagagaaggagaactagggcaagtggctgtgagaccctagagaccagcgaagggagaagttgggaagctacgttctgttggccaccagactt

SEQ ID NO: 169440 - DNA, 120 bp, Artificial Sequence
  ENSG00000108828_11 (sequence is synthesized)
gaccgctctcccctgcccctccccgcttcctgacctctgaagaggttgggaagtgaccatttggatgtctgggccctgccaaggcgacagggagggtcagagggaggccggctgcttcct

SEQ ID NO: 169441 - DNA, 120 bp, Artificial Sequence
  ENSG00000108828_12 (sequence is synthesized)
gcccccaccctttccccgggcctgctgtgctgcttttgtgccaaggttagccagtcccccctgttgtgttccatgtgctttcacctctgcctcatctttcctcccgtccctgccccgcca

SEQ ID NO: 169442 - DNA, 120 bp, Artificial Sequence
  ENSG00000108828_13 (sequence is synthesized)
cctccccaaagaattgaaacgtcagctcaggatatggggccaatctctgtgagtccagcatgtacctgtctctccctagtgtcccttcagcctgggctgaccagtgcccgcctctgggct

SEQ ID NO: 169443 - DNA, 120 bp, Artificial Sequence
  ENSG00000108828_14 (sequence is synthesized)
tgaccagttcccaatctcgtcctctgtccccaacttcttaagcacaattgggcttcttccatctccaggttttctgccattcttaaccaaggctgcctcttccaacagggcgggaatcag

SEQ ID NO: 169444 - DNA, 120 bp, Artificial Sequence
  ENSG00000108828_15 (sequence is synthesized)
acctactcccctaggtcacaactctgggaaggatacagagcccccacccttcactgagttctctggatttgttctcagtgccttagcaacgaaaacctgtgcttgtgtgtgtgtggcggc

SEQ ID NO: 169445 - DNA, 120 bp, Artificial Sequence
  ENSG00000108828_16 (sequence is synthesized)
ggggagggaggatcctgtttcccacctccttctcctcccctgtactccccagtgccttccttgttctggtggagctggggtttctctcctccccagtcccacaacactgccaaaaatctg

SEQ ID NO: 169446 - DNA, 120 bp, Artificial Sequence
  ENSG00000108828_17 (sequence is synthesized)
tgtatgtgccattgggtggggcagccccaagcctcctggggaggcagggcaaaaacaggtgccctcatcgtggtctgtgccatgtcccgtctctatggtggttgaggagaaaggcgggga

SEQ ID NO: 169447 - DNA, 120 bp, Artificial Sequence
  ENSG00000108828_18 (sequence is synthesized)
agcttcctcagccttgcagatatgtgtggcatttactagccagagctctgaaaggcagtgctgtctgtttcttgtactgggaccaaagtaaaaatccaagcacattccccttgcagttag

SEQ ID NO: 169448 - DNA, 120 bp, Artificial Sequence
  ENSG00000108828_19 (sequence is synthesized)
gggaggccctactgccttctcaaagcagagaggcagcttatcaaactcagcccaaaactctgtttacatgggtggggagatggagcagggaagtacagagtgggatggtcaggacctggg

SEQ ID NO: 169449 - DNA, 120 bp, Artificial Sequence
  ENSG00000108828_20 (sequence is synthesized)
ccattgcaaccaaaatggggacttcctgggtagggaggtcactccctctactcactgagctaggattagggagggttattgccccaaccattgcaatgggaggtggagggacaggctcag

SEQ ID NO: 169450 - DNA, 120 bp, Artificial Sequence
  ENSG00000108828_21 (sequence is synthesized)
cctcctcattgtctaaatgaggcctaaatgtgtgaagtgcgatttctgcttttgtgtaccccaccaccccattaccacagctgcctttgtgtgtttgtgtcaataaaaagccaaaccctg

SEQ ID NO: 169451 - DNA, 120 bp, Artificial Sequence
  ENSG00000108828_22 (sequence is synthesized)
atctgatgtaagagcctggattctgcggggagggcccttccctctctctccctcctcctccttcctggtgtctgggttggggaggggtcatggccctgatttggatggcctgagggttag

SEQ ID NO: 169452 - DNA, 120 bp, Artificial Sequence
  ENSG00000108828_23 (sequence is synthesized)
gagtgaagatgttttctgggctcccagtgctggctcaaacacacttctcccgaggtgaccacaccctgctgtaagcgctcagagaactttgcctgcactttggcaggagaccgggtgatg

SEQ ID NO: 169453 - DNA, 120 bp, Artificial Sequence
  ENSG00000108828_24 (sequence is synthesized)
ttatatataaagcacttgaaatcgggctcggccctcagtcagcactcagtaaaggtgagttgttattgttgttgatgatgatgttattattattattattaccatgactattgctgcttc

SEQ ID NO: 169454 - DNA, 120 bp, Artificial Sequence
  ENSG00000108828_25 (sequence is synthesized)
tcctgctacttcatttggaagaaggtagccttgtacctagggggaaatcagtaaatagcctgtgggtgaatgaatgagtgactgaatgatactcttctgttcttcaaggcaggagaccgg

SEQ ID NO: 169455 - DNA, 120 bp, Artificial Sequence
  ENSG00000108828_26 (sequence is synthesized)
cagaagatctgggcggagccctgggaacagaggcctcagagccggggtccagcccgccggtgtggtctgaggggcccctgccggtttgggacaggccgaactgggcttatttgactttct

SEQ ID NO: 169456 - DNA, 120 bp, Artificial Sequence
  ENSG00000108828_27 (sequence is synthesized)
gtgaatgtgaggactttgcagggagggcttgggtaggactcatgaaggctggggtcccaaggggcagattcctggggaagaggagggctgcctgcatcacactggctcttgttggatgag

SEQ ID NO: 169457 - DNA, 120 bp, Artificial Sequence
  ENSG00000108828_28 (sequence is synthesized)
ggttggatagcactgggagccgcatctttccttcctccccaggtggctgatgccatgaaacagatgcaggagaagaagaatgtgggcaaggtcctcctggttccagggccagagaaggag

SEQ ID NO: 169458 - DNA, 120 bp, Artificial Sequence
  ENSG00000108829_0 (sequence is synthesized)
acggaagtggtcgtcgtcgcggcaccggtgggagctaggcgcgaggctcggagtgcggccagcgggcggaggcggtctcgcatcggcggcgacggagggctcaggcgtcgtcgtttgggt

SEQ ID NO: 169459 - DNA, 120 bp, Artificial Sequence
  ENSG00000108829_1 (sequence is synthesized)
ggggggccgctgaactgacaagcgacatttcagctcctttcacccgccggaaccccggagccggggcccgctcagccggcgttaccatgaccaaggccggtagcaagggcgggaacctcc

SEQ ID NO: 169460 - DNA, 120 bp, Artificial Sequence
  ENSG00000108829_2 (sequence is synthesized)
gcgacaagctggacggcaacgaactggacctgagcctcagcgacctgaatgaggtcccggtgaaggagctggctgcccttccaaaggccaccatcctggatctgtcttgtaataaactga

SEQ ID NO: 169461 - DNA, 120 bp, Artificial Sequence
  ENSG00000108829_3 (sequence is synthesized)
ctactctaccgtcggatttctgtggcctcacacacctggtgaagctagacctgagtaagaacaagctgcagcagctgccagcagactttggccgtctggtcaacctccagcacctggatc

SEQ ID NO: 169462 - DNA, 120 bp, Artificial Sequence
  ENSG00000108829_4 (sequence is synthesized)
tcctcaacaacaagctggtcaccttgcctgtcagctttgctcagctcaagaacctgaagtggttggacctgaaggataaccccctggatcctgtcctggccaaggtggcaggtgactgct

SEQ ID NO: 169463 - DNA, 120 bp, Artificial Sequence
  ENSG00000108829_5 (sequence is synthesized)
tggatgagaagcagtgtaagcagtgtgcaaacaaggtgttacagcacatgaaggccgtgcaggcagatcaggagcgggagaggcagcggcggctggaagtagaacgtgaggcagagaaga

SEQ ID NO: 169464 - DNA, 120 bp, Artificial Sequence
  ENSG00000108829_6 (sequence is synthesized)
agcgtgaggctaagcagcgagctaaggaagctcaggagcgggaactgcggaagcgggagaaggcggaagagaaggagcgccggagaaaggagtatgatgccctcaaagcagccaagcggg

SEQ ID NO: 169465 - DNA, 120 bp, Artificial Sequence
  ENSG00000108829_7 (sequence is synthesized)
agcaggagaagaaacctaagaaggaagcaaatcaggccccgaaatctaagtctggctcccgtccccgcaagccaccaccccggaagcacactcgttcctgggctgtgctgaagctgctgc

SEQ ID NO: 169466 - DNA, 120 bp, Artificial Sequence
  ENSG00000108829_8 (sequence is synthesized)
tgctgctgctgctatttggtgtggcgggagggctggttgcttgtcgggtgacagagctgcagcagcagcccctctgcaccagcgtgaacaccatctatgacaatgcggtccagggtctac

SEQ ID NO: 169467 - DNA, 120 bp, Artificial Sequence
  ENSG00000108829_9 (sequence is synthesized)
gccgccatgagatcctccagtgggtcctccagaccgactctcagcagtgagcttgtccccagcacctgctgcctcccagccttggagtttggattcctatggaattgggttctgctggac

SEQ ID NO: 169468 - DNA, 120 bp, Artificial Sequence
  ENSG00000108829_10 (sequence is synthesized)
acaacctctttttagcatcagacctacctgccatcatcaaatggctgcagattggtacatgagacctcctctttgtaggacttcttcattccttagtcagggttccctgaaggaatgagg

SEQ ID NO: 169469 - DNA, 120 bp, Artificial Sequence
  ENSG00000108829_11 (sequence is synthesized)
agaaatgggaggtggcgggggggcgtggggggcagttacctgcatgcctaaaggagtaggcttgggggtggggagagagaaaacatagccttttctagttgttatataaagctgtgtaaa

SEQ ID NO: 169470 - DNA, 120 bp, Artificial Sequence
  ENSG00000108829_12 (sequence is synthesized)
ggcaaggctcgtttctactaaatggtcagctgtcactacatttatacttttgtatgccacaaaccctttcattcctccctgggaatcagggtagatcaggaggaactgggggggactaga

SEQ ID NO: 169471 - DNA, 120 bp, Artificial Sequence
  ENSG00000108829_13 (sequence is synthesized)
acaccacgctcagtaaatccagtctaaactgggaggtaggggtattcctgttttctttaggacctcagagatgtaagcattttagcagccacacaaaatctctggctatgaaagggactt

SEQ ID NO: 169472 - DNA, 120 bp, Artificial Sequence
  ENSG00000108829_14 (sequence is synthesized)
catgaccatccagtccaatataacacttgcagacagagaaactgaggtcttccatgacttgcctagtctcccagctagtttgaggcaaaactggattcccactctggtattctttcttcc

SEQ ID NO: 169473 - DNA, 120 bp, Artificial Sequence
  ENSG00000108829_15 (sequence is synthesized)
ctttacatcattttccctcctttataatgtcctgagagaccagaactcacaccagaatcgattattcctcaggtgaagcatagactctttcatggtagacagatttcacgactcagagat

SEQ ID NO: 169474 - DNA, 120 bp, Artificial Sequence
  ENSG00000108829_16 (sequence is synthesized)
agaaatctcttgctatcatcaggtcacgggcagctcctgtggagtcctgcccaacttatgtggcttccataaaatggcaacagtccaggctccttgcctaattttagagcattaactccc

SEQ ID NO: 169475 - DNA, 120 bp, Artificial Sequence
  ENSG00000108829_17 (sequence is synthesized)
taattgccagtaagcaaggaggtggatctctgcaaacctacactgtctatgacagctctagttgtacttggtgtgactaaatacctcaaaggcaacctgcttctgcaggttttgaagtgt

SEQ ID NO: 169476 - DNA, 120 bp, Artificial Sequence
  ENSG00000108829_18 (sequence is synthesized)
cagcttcataagacactgaggtttagaattgtttgattctagaccataactgaagggcataaatggaaacaggatatgaagggaaacaagtagcatcatggagctgaaaagtggtgcatc

SEQ ID NO: 169477 - DNA, 120 bp, Artificial Sequence
  ENSG00000108829_19 (sequence is synthesized)
acccaatggctagcacaaacaaggatcacactgtccattctcttgtctgctaaattaagcattttcttgcctcctttgcttcatcttttcacaacagctggatagagggatcagaaatga

SEQ ID NO: 169478 - DNA, 120 bp, Artificial Sequence
  ENSG00000108829_20 (sequence is synthesized)
ctgtgtcatggtgctcattcactgcaaactcccagttgcaagctccttggctcccccggagggagcaagaatctcatagttcagagacacagagggccttttagccctaatgaccttttg

SEQ ID NO: 169479 - DNA, 120 bp, Artificial Sequence
  ENSG00000108829_21 (sequence is synthesized)
gatgggactgcaactcatgactatcctgatattggaagaaaggactttgttaatcttctcccccatagctctgctgcgtaggtctacatcttactcagaatcactacacattcctttagt

SEQ ID NO: 169480 - DNA, 120 bp, Artificial Sequence
  ENSG00000108829_22 (sequence is synthesized)
cttcctccaagctccagagccattggtacaaatgctttattgaaactaaatacataatacacacaatgagatgaagacaatatagaagtccgcatagtcatcataatcccgttccttggc

SEQ ID NO: 169481 - DNA, 120 bp, Artificial Sequence
  ENSG00000108829_23 (sequence is synthesized)
cggttgaggcagctcagtggctgagcccagtcaagccaacccgcagcttcactcacgacttcaagatttgatgctaattcttttggatttctacagttattaaataagtgtctgagtgga

SEQ ID NO: 169482 - DNA, 120 bp, Artificial Sequence
  ENSG00000108829_24 (sequence is synthesized)
ctttcctcttctctaaaagcatcagtttccttttctttaaaaagaagcggggtggtgggactaagtcccctaggaggccgcgtccagcccaaggttcttcccgggatgtacacgtgtcac

SEQ ID NO: 169483 - DNA, 120 bp, Artificial Sequence
  ENSG00000108829_25 (sequence is synthesized)
tttggcgcagttccagaacatagggaagatctgcttctctggccctaggctttttacaggctaagaagcgaatctgtcacctttgcggggctttcacagcgcccacctccgtgcccgact

SEQ ID NO: 169484 - DNA, 120 bp, Artificial Sequence
  ENSG00000108829_26 (sequence is synthesized)
ctgagtaggagcacacggagcagttactggatgtattcgagaatgaatgagtgacttgttccaggggagtaggcctcctggtagacctgggtgtggcccagaacctggctcttctaggaa

SEQ ID NO: 169485 - DNA, 120 bp, Artificial Sequence
  ENSG00000108829_27 (sequence is synthesized)
tgaattccgctgaaactggcgggagtccctttcgcccctctctcccccaacctttcccctgtaaactgaagcttacagctccagagagatagcaggcatctagttttgtcagcgtggagc

SEQ ID NO: 169486 - DNA, 120 bp, Artificial Sequence
  ENSG00000108829_28 (sequence is synthesized)
tagttcccacatccctccttttcccactccgttccccctcccacccgcgccaacgccctactagactcactttgggtgacccacactttgctttctgccgttgataaattacatttgcct

SEQ ID NO: 169487 - DNA, 120 bp, Artificial Sequence
  ENSG00000108829_29 (sequence is synthesized)
tgggcgctgggcccagtctttcttccaccgtggacgggtattacagtggttagaaccgggttcctagctcctcccagctccattgcttaatagccgagtgcccttggcaagctagttagc

SEQ ID NO: 169488 - DNA, 120 bp, Artificial Sequence
  ENSG00000108829_30 (sequence is synthesized)
ctttatgcctagatctcctcatctatacaatggtgataatagtttccatctcatacgcttattgggaggttaaataccattgtaatggaaaatgcttggaaggagcaaatactgatactt

SEQ ID NO: 169489 - DNA, 120 bp, Artificial Sequence
  ENSG00000108829_31 (sequence is synthesized)
gtagctgttgttgtgtttttcccgctgtagtatttaaaacttttttaggtggtcaaacttcacttttacgactttgtgacagaaagtgcaggttgccagaggatccttaactgaatatat

SEQ ID NO: 169490 - DNA, 120 bp, Artificial Sequence
  ENSG00000108829_32 (sequence is synthesized)
gcctccttttctaccccaggaagatagatggccagccttatttcaccctgccctaggactgctctctgaaaccatatactccaggcatctgaacagtccagcattaaccttagggagaaa

SEQ ID NO: 169491 - DNA, 120 bp, Artificial Sequence
  ENSG00000108829_33 (sequence is synthesized)
agcaaatcaggccccgaggtgctttccttctgccttgcttgtctctgctgccggcatccgtgtgagcctcttccctggaccttctgactcggcttggttttcttctggggtggaaggatg

SEQ ID NO: 169492 - DNA, 120 bp, Artificial Sequence
  ENSG00000108829_34 (sequence is synthesized)
tggttccttcttcagaaaggcaaatgttggcaactcctcagagtcactatcaccagaatccagtgagggtgatgacttctttagagccatcagtatgtgctatcaaataattccctaaaa

SEQ ID NO: 169493 - DNA, 120 bp, Artificial Sequence
  ENSG00000108829_35 (sequence is synthesized)
ggaaaagagacatatgacacagactggagcattcaattcagtccactagctgtgttccatagccaggctttatgacataaatataagatatagagaatacagaaacagagaaatatgaca

SEQ ID NO: 169494 - DNA, 120 bp, Artificial Sequence
  ENSG00000108830_0 (sequence is synthesized)
ggctgcagttgcaggggcgggggaggcggcggcggggcccgggagaggggtggcgtgggggaccggcgcgtagccgggaccatggaggggcagagcggccgctgcaagatcgtggtggtg

SEQ ID NO: 169495 - DNA, 120 bp, Artificial Sequence
  ENSG00000108830_1 (sequence is synthesized)
gaggggcagagcggccgctgcaagatcgtggtggtgggagacgcagagtgcggcaagacggcgctgctgcaggtgttcgccaaggacgcctatcccgggagttatgtccccaccgtgttt

SEQ ID NO: 169496 - DNA, 120 bp, Artificial Sequence
  ENSG00000108830_2 (sequence is synthesized)
gagaactacactgcgagctttgagatcgacaagcgccgcattgagctcaacatgtgggacacttcaggttcctcttactatgataatgtccggcctctggcctatcctgattctgatgct

SEQ ID NO: 169497 - DNA, 120 bp, Artificial Sequence
  ENSG00000108830_3 (sequence is synthesized)
gtgctcatctgcttcgacattagccgaccagaaacactggacagtgttctcaagaagtggcaaggagagactcaagagttctgccccaatgccaaggttgtgctggttggctgtaaactg

SEQ ID NO: 169498 - DNA, 120 bp, Artificial Sequence
  ENSG00000108830_4 (sequence is synthesized)
gacatgcggactgacctggccacactgagggagctgtccaagcagaggcttatccctgttacacatgagcagggcactgtgctggccaagcaggtgggggctgtgtcctatgttgagtgc

SEQ ID NO: 169499 - DNA, 120 bp, Artificial Sequence
  ENSG00000108830_5 (sequence is synthesized)
tcctcccggtcctctgagcgcagcgtcagggatgtcttccatgtggctacagtggcctcccttggccgtggccataggcagctgcgccgaactgactcacgccggggaatgcagcgatcc

SEQ ID NO: 169500 - DNA, 120 bp, Artificial Sequence
  ENSG00000108830_6 (sequence is synthesized)
gctcagctgtcaggacggccagaccgggggaatgagggcgagatacacaaggatcgagccaaaagctgcaacctcatgtgaggggctaggagagggcagagtgtgaagaggggtggtgag

SEQ ID NO: 169501 - DNA, 120 bp, Artificial Sequence
  ENSG00000108830_7 (sequence is synthesized)
ggacacaattgttcccctgcctgcgcccaggcttcctgacctcctgatcctggctgggaagttagggcaggcagagcgagcaattctgggcaggggagctggagggcagaagggtatcat

SEQ ID NO: 169502 - DNA, 120 bp, Artificial Sequence
  ENSG00000108830_8 (sequence is synthesized)
cgtttctcatctcctcctccctcctcttctccagtggatgttgagggagctaacagggctggcatctggggcatgaactgggatggggcaggtgggcgttagggaagctggtatcaaatg

SEQ ID NO: 169503 - DNA, 120 bp, Artificial Sequence
  ENSG00000108830_9 (sequence is synthesized)
gtgaccttggtggagtctcctatgtgaagagtaccctccctctccacccccagtccccatatcctggttctggcccaaggaaaatgtccattctatgaccttctcttttcctctcctctc

SEQ ID NO: 169504 - DNA, 120 bp, Artificial Sequence
  ENSG00000108830_10 (sequence is synthesized)
acttctgcagctattctcacacatctaacctctaggcaacatgcactaaattcaaaagcaaggagaagcccttgccccccatcagtccaccagccctagaacctcccttgcctcaacagt

SEQ ID NO: 169505 - DNA, 120 bp, Artificial Sequence
  ENSG00000108830_11 (sequence is synthesized)
cacctaataaagcccacctccatggaaaacggctgtggctttagttttgttgctttttaaaaaaatcaatctaccaatctttagcagtaagagggaaagttagacctcagctggggaact

SEQ ID NO: 169506 - DNA, 120 bp, Artificial Sequence
  ENSG00000108830_12 (sequence is synthesized)
ttcctgtccatgtccacagatagagcagaggacaaagccataggttggatcagaagtgtccttttaggagtcagagttgggagaaggagacatcctgggactgttcatcctagttaatga

SEQ ID NO: 169507 - DNA, 120 bp, Artificial Sequence
  ENSG00000108830_13 (sequence is synthesized)
agtgggcaattctcaggccattagggggttttagagcagaccgacatataattagtcagcatttctcagcccagccaggcctgctgctagtgtgggaggggtcctgctcaccatctgtac

SEQ ID NO: 169508 - DNA, 120 bp, Artificial Sequence
  ENSG00000108830_14 (sequence is synthesized)
ctgctgctagtgtgggaggggtcctgctcaccatctgtacccctggcttggagcctgctggtaccctgggggttgtggggataaggaggcatcaggccgggcgcgctggctcacgcctgt

SEQ ID NO: 169509 - DNA, 120 bp, Artificial Sequence
  ENSG00000108830_15 (sequence is synthesized)
tgattctggggtctccttagaggctcaggccagggacctttctctcctcccatgctgagtttcatgatggctttcaggggagcatcagctgttagagtcacccctaccctgtcccttaaa

SEQ ID NO: 169510 - DNA, 120 bp, Artificial Sequence
  ENSG00000108830_16 (sequence is synthesized)
ggaaagacggtggagaggacggctgagcgcctgttgtcaggaaagacagtactggtctgttttctcgggagtctggtttcagattgtcctgtattcccttcctggctctggtcccactgg

SEQ ID NO: 169511 - DNA, 120 bp, Artificial Sequence
  ENSG00000108830_17 (sequence is synthesized)
cctcttttcggtgacattctcccccaggaaccatccctggcccttccctcccccagccctagccagttctcccagacacactggaagagaacactgaccttacccaactatctgctggga

SEQ ID NO: 169512 - DNA, 120 bp, Artificial Sequence
  ENSG00000108830_18 (sequence is synthesized)
tcccacccaaatttatagcccattcctccctcattcattcattcagcaagtatgtactgaacaccaactgtgtggcatacactggcttgggagattgcaaggaccagtctctaagctttt

SEQ ID NO: 169513 - DNA, 120 bp, Artificial Sequence
  ENSG00000108830_19 (sequence is synthesized)
ggaggccagcccagtgtggaagagaggtacctcaggtgtgagggtgccatggctgagggatatttgtacatgtatgggatgctatgggagctccttgcagcctgagaagccagtcctgtg

SEQ ID NO: 169514 - DNA, 120 bp, Artificial Sequence
  ENSG00000108830_20 (sequence is synthesized)
agccaggtcctgagggttgaagaggagttttccgggcagggaaggggtaggaaaggcactctgggcagagggtacagcatgtgtaaacacgtggagatgagaatgagcatagcactgttg

SEQ ID NO: 169515 - DNA, 120 bp, Artificial Sequence
  ENSG00000108830_21 (sequence is synthesized)
gggctcccatggcagggagaatagaagacaaggctaggaaggtacactgaggctactgcagggtccacagaggaatcagaatttcattctgaggatgaatgaaatcatcctcagaggatg

SEQ ID NO: 169516 - DNA, 120 bp, Artificial Sequence
  ENSG00000108830_22 (sequence is synthesized)
aagccaccaggaatttcaggcagagagtgaagtgatcagagttgttttttggatagatggttatctggatgtggtgttggagctgggagatttggctctgaggtgtgtcatttaaaataa

SEQ ID NO: 169517 - DNA, 120 bp, Artificial Sequence
  ENSG00000108830_23 (sequence is synthesized)
tagcttctcggcagtggctcacacctataatcccagccaagattcctcctttgggaggccaagctgggaggatcgcttgaggccaggagttagagactgcagtgagctatgatcatgcca

SEQ ID NO: 169518 - DNA, 88 bp, Artificial Sequence
  ENSG00000108830_24 (sequence is synthesized)
gcttctcctttcccttatgccaggttccagtcttgagaggaaaggaatccctacccaccactccctggatcatcagatatccctatcc

SEQ ID NO: 169519 - DNA, 120 bp, Artificial Sequence
  ENSG00000108830_25 (sequence is synthesized)
ccctacccaccactccctggatcatcagatatccctatcccaacctctcctatgggactagttcatctcagccagtctcaaagattctaggataacttcaatggcatttgaaattatcta

SEQ ID NO: 169520 - DNA, 120 bp, Artificial Sequence
  ENSG00000108830_26 (sequence is synthesized)
agtgtgcttggataaccaccccctcaaactgagacctggttagggactgactcaaagaccctgagtcctcggctaagggtacaggagagggcaggggctccaggcccagctaggtggatc

SEQ ID NO: 169521 - DNA, 120 bp, Artificial Sequence
  ENSG00000108830_27 (sequence is synthesized)
tccatctgtctctgaggactgaccctttccccacaaggacctgccataaaaatcgacttgcgatttttagctgagtggcttctcttttccactttggacttctcagtgtatagcaggttc

SEQ ID NO: 169522 - DNA, 120 bp, Artificial Sequence
  ENSG00000108830_28 (sequence is synthesized)
aagcctgcaaccaccaaagtgcagagtgtggagtgtttgtgccccctctttcctccaacctccatatcctgccatgtgagctcagggaatgcaaatgcatttaaatatccatctaaagca

SEQ ID NO: 169523 - DNA, 120 bp, Artificial Sequence
  ENSG00000108830_29 (sequence is synthesized)
aacataattagaaaaatcaatcagctggaggaccccccaaagtttaatacattttcaataccaccaggaatggatttttggtccctttctgcaggtctgggttgccagacgttttatttc

SEQ ID NO: 169524 - DNA, 120 bp, Artificial Sequence
  ENSG00000108830_30 (sequence is synthesized)
tggggaggagggctctgggctgaggagctcagtgggtgggaggagggaatgggactgttgctgatcctcaaaggcctctgtaggatggagggaggggaccttactcccttccccacccca

SEQ ID NO: 169525 - DNA, 120 bp, Artificial Sequence
  ENSG00000108830_31 (sequence is synthesized)
gatgcaggagtcacccagcttccttctctgcgctgtttccttcacaaattagacattggtttgggaaacaatgtagcctcgttaaacatttaatgaaataaacaaataatcacactgtga

SEQ ID NO: 169526 - DNA, 120 bp, Artificial Sequence
  ENSG00000108830_32 (sequence is synthesized)
cgccgcattgagctcaacatgtgggacacttcaggtagccaagtccctgggggtcaccctgacttccaaggcggcccactctgtcccctcccttggttagacccttaggttccaggtaag

SEQ ID NO: 169527 - DNA, 120 bp, Artificial Sequence
  ENSG00000108830_33 (sequence is synthesized)
cccagcccatccatccaattccaacaggaagggaaaaatcaatattctgctaaaatccagggaaactgaggtagaacttgcagagcctgacagaaaccatgtcctgaaggagaaagccta

SEQ ID NO: 169528 - DNA, 120 bp, Artificial Sequence
  ENSG00000108839_0 (sequence is synthesized)
ggcagccctgggcggtcccgggaatcgcacaggacccggctcccctcgcctaagctgctggggggcgccatgggccgctaccgcatccgcgtggccaccggggcctggctcttctccggg

SEQ ID NO: 169529 - DNA, 120 bp, Artificial Sequence
  ENSG00000108839_1 (sequence is synthesized)
tcgtacaaccgcgtgcagctttggctggtcgggacgcgcggggaggcggagctggagctgcagctgcggcccgcgcggggcgaggaggaggagtttgatcatgacgttgcagaggacttg

SEQ ID NO: 169530 - DNA, 120 bp, Artificial Sequence
  ENSG00000108839_2 (sequence is synthesized)
gggctcctgcagttcgtgaggctgcgcaagcaccactggctggtggacgacgcgtggttctgcgaccgcatcacggtgcagggccctggagcctgcgcggaggtggccttcccgtgctac

SEQ ID NO: 169531 - DNA, 120 bp, Artificial Sequence
  ENSG00000108839_3 (sequence is synthesized)
cgctgggtgcagggcgaggacatcctgagcctgcccgagggcaccgcccgcctgccaggagacaatgctttggacatgttccagaagcatcgagagaaggaactgaaagacagacagcag

SEQ ID NO: 169532 - DNA, 120 bp, Artificial Sequence
  ENSG00000108839_4 (sequence is synthesized)
atctactgctgggccacctggaaggaagggttacccctgaccatcgctgcagaccgtaaggatgatctacctccaaatatgagattccatgaggagaagaggctggactttgaatggaca

SEQ ID NO: 169533 - DNA, 120 bp, Artificial Sequence
  ENSG00000108839_5 (sequence is synthesized)
ctgaaggcaggggctctggagatggccctcaaacgtgtttacaccctcctgagctcctggaactgcctagaagactttgatcagatcttctggggccagaagagtgccctggctgagaag

SEQ ID NO: 169534 - DNA, 120 bp, Artificial Sequence
  ENSG00000108839_6 (sequence is synthesized)
gttcgccagtgctggcaggatgatgagttgttcagctaccagttcctcaatggtgccaaccccatgctgttgagacgctcgacctctctgccctccaggctagtgctgccctcggggatg

SEQ ID NO: 169535 - DNA, 120 bp, Artificial Sequence
  ENSG00000108839_7 (sequence is synthesized)
gaagagcttcaggctcaactggagaaagaacttcagaatggttccctgtttgaagctgacttcatccttctggatggaattccagccaacgtgatccgaggagagaagcaatacctggct

SEQ ID NO: 169536 - DNA, 120 bp, Artificial Sequence
  ENSG00000108839_8 (sequence is synthesized)
gcccccctcgttatgctgaagatggagcccaatgggaagctgcagcccatggtcatccagattcagcctcccaaccccagctctccaaccccaacactgttcctgccctcagacccccca

SEQ ID NO: 169537 - DNA, 120 bp, Artificial Sequence
  ENSG00000108839_9 (sequence is synthesized)
ccatgcggtgcctcccaggactgcaccccatcttcaagttcctgatcccccatatccgctacaccatggaaatcaacacccgggcccggacccaactcatctcagatggaggaatttttg

SEQ ID NO: 169538 - DNA, 120 bp, Artificial Sequence
  ENSG00000108839_10 (sequence is synthesized)
ataaggcagtgagcacaggtggagggggccatgtacagttgctccgtcgggcggcagctcagctgacctactgctccctctgtcctcctgacgacctggctgaccggggcctgctgggac

SEQ ID NO: 169539 - DNA, 120 bp, Artificial Sequence
  ENSG00000108839_11 (sequence is synthesized)
tcccaggtgctctctatgcccatgatgctttacggctctgggagatcattgccaggtatgtggaggggatcgtccacctcttctaccaaagggatgacatagtgaagggggaccctgagc

SEQ ID NO: 169540 - DNA, 120 bp, Artificial Sequence
  ENSG00000108839_12 (sequence is synthesized)
tgcaggcctggtgtcgggagatcacggaggtggggctgtgccaggcccaggaccgaggtttccctgtctccttccagtcccagagtcaactctgccatttcctcaccatgtgcgtcttca

SEQ ID NO: 169541 - DNA, 120 bp, Artificial Sequence
  ENSG00000108839_13 (sequence is synthesized)
cgtgcactgcccagcatgccgccatcaaccagggccagctggactggtatgcctgggtccctaatgctccatgcacaatgcggatgcccccacccaccaccaaggaagatgtgacgatgg

SEQ ID NO: 169542 - DNA, 120 bp, Artificial Sequence
  ENSG00000108839_14 (sequence is synthesized)
ccacagtgatggggtcactacctgatgtccggcaggcctgtcttcaaatggccatctcatggcatctgagtcgccgccagccagacatggtgcctctggggcaccacaaagaaaaatatt

SEQ ID NO: 169543 - DNA, 120 bp, Artificial Sequence
  ENSG00000108839_15 (sequence is synthesized)
tctcaggccccaagcccaaagctgtgctaaaccaattccgaacagatttggaaaagctggaaaaggagattacagcccggaatgagcaacttgactggccctatgaatatctgaagccca

SEQ ID NO: 169544 - DNA, 120 bp, Artificial Sequence
  ENSG00000108839_16 (sequence is synthesized)
gctgcatagagaacagtgtcaccatctgagccctagagtgactctacctgcaagatttcacatcagctttaggactgacatttctatcttgaatttcatgctttcctaaagtctctgctg

SEQ ID NO: 169545 - DNA, 120 bp, Artificial Sequence
  ENSG00000108839_17 (sequence is synthesized)
ctaaggctctatttcctcccccagttaaaccccctacattagtatcccactagcccaggggagcagtaaactttctctgcaaagactagatccttttttacgctttgcagaccgcatagt

SEQ ID NO: 169546 - DNA, 120 bp, Artificial Sequence
  ENSG00000108839_18 (sequence is synthesized)
cactgtctcaactactcagctctcctgctgcagcatgaaggcagccacagacaacatggaaatgagtgtgactatgttccaataaaactttatggacactgagatatgaatgttacatca

SEQ ID NO: 169547 - DNA, 120 bp, Artificial Sequence
  ENSG00000108839_19 (sequence is synthesized)
tgatacatcatctcatttataatgtaggtatcgtccatattttacaggtgaaaaaaactgaggttcaaataggttaagctggcctatggtaactaagtgtaagtgactgagccaggactt

SEQ ID NO: 169548 - DNA, 120 bp, Artificial Sequence
  ENSG00000108839_20 (sequence is synthesized)
aaacgcatgtctgatgcaaatacgtctaaataaaataaacaaattcatcaattctaaaatatgggcatcccaaaacaacagcctttgttcctctcctcttatgctgtagcttctaactgc

SEQ ID NO: 169549 - DNA, 120 bp, Artificial Sequence
  ENSG00000108840_0 (sequence is synthesized)
gttgttggtggcggcggcgagcggagccggaggagccgccgcaaagatggaggagccgtcgaggaggtgctgccgccgctgccgccgccgctgctgccgccgccgcccgcgaagccggag

SEQ ID NO: 169550 - DNA, 120 bp, Artificial Sequence
  ENSG00000108840_1 (sequence is synthesized)
ctcgagccgcagcggggatgccgttctgagtgcctgactgcctcgccccgaaggatggcctcggatgggcattagaggcacggcggccccgggctcccgtcccgtccgtctgtctgttat

SEQ ID NO: 169551 - DNA, 120 bp, Artificial Sequence
  ENSG00000108840_2 (sequence is synthesized)
cgtctgtctctcttgacatcaccgcagctccaccccctcccgtcccagcccccaacgccagcttcctgcaggcccagagccggcatgaactctcccaacgagtcggcagatgggatgtca

SEQ ID NO: 169552 - DNA, 120 bp, Artificial Sequence
  ENSG00000108840_3 (sequence is synthesized)
ggtcgggaaccatccttggaaatcctgccgcggacttctctgcacagcatccctgtgacagtggaggtgaagccggtgctgccaagagccatgcccagttccatggggggtgggggtgga

SEQ ID NO: 169553 - DNA, 120 bp, Artificial Sequence
  ENSG00000108840_4 (sequence is synthesized)
ggcagccccagccctgtggagctacggggggctctggtgggctctgtggaccccacactgcgggagcagcaactgcagcaggagctcctggcgctcaagcagcagcagcagctgcagaag

SEQ ID NO: 169554 - DNA, 120 bp, Artificial Sequence
  ENSG00000108840_5 (sequence is synthesized)
cagctcctgttcgctgagttccagaaacagcatgaccacctgacaaggcagcatgaggtccagctgcagaagcacctcaagcagcagcaggagatgctggcagccaagcagcagcaggag

SEQ ID NO: 169555 - DNA, 120 bp, Artificial Sequence
  ENSG00000108840_6 (sequence is synthesized)
atgctggcagccaagcggcagcaggagctggagcagcagcggcagcgggagcagcagcggcaggaagagctggagaagcagcggctggagcagcagctgctcatcctgcggaacaaggag

SEQ ID NO: 169556 - DNA, 120 bp, Artificial Sequence
  ENSG00000108840_7 (sequence is synthesized)
aagagcaaagagagtgccattgccagcactgaggtaaagctgaggctccaggaattcctcttgtcgaagtcaaaggagcccacaccaggcggcctcaaccattccctcccacagcacccc

SEQ ID NO: 169557 - DNA, 120 bp, Artificial Sequence
  ENSG00000108840_8 (sequence is synthesized)
aaatgctggggagcccaccatgcttctttggaccagagttcccctccccagagcggcccccctgggacgcctccctcctacaaactgcctttgcctgggccctacgacagtcgagacgac

SEQ ID NO: 169558 - DNA, 120 bp, Artificial Sequence
  ENSG00000108840_9 (sequence is synthesized)
ttccccctccgcaaaacagcctctgaacccaacttgaaagtgcgttcaaggctaaaacagaaggtggctgagcggagaagcagtcccctcctgcgtcgcaaggatgggactgttattagc

SEQ ID NO: 169559 - DNA, 120 bp, Artificial Sequence
  ENSG00000108840_10 (sequence is synthesized)
acctttaagaagagagctgttgagatcacaggtgccgggcctggggcgtcgtccgtgtgtaacagcgcacccggctccggccccagctctcccaacagctcccacagcaccatcgctgag

SEQ ID NO: 169560 - DNA, 120 bp, Artificial Sequence
  ENSG00000108840_11 (sequence is synthesized)
aatggctttactggctcagtccccaacatccccactgagatgctccctcagcaccgagccctccctctggacagctcccccaaccagttcagcctctacacgtctccttctctgcccaac

SEQ ID NO: 169561 - DNA, 120 bp, Artificial Sequence
  ENSG00000108840_12 (sequence is synthesized)
atctccctagggctgcaggccacggtcactgtcaccaactcacacctcactgcctccccgaagctgtcgacacagcaggaggccgagaggcaggccctccagtccctgcggcagggtggc

SEQ ID NO: 169562 - DNA, 120 bp, Artificial Sequence
  ENSG00000108840_13 (sequence is synthesized)
acgctgaccggcaagttcatgagcacatcctctattcctggctgcctgctgggcgtggcactggagggcgacgggagcccccacgggcatgcctccctgctgcagcatgtgctgttgctg

SEQ ID NO: 169563 - DNA, 120 bp, Artificial Sequence
  ENSG00000108840_14 (sequence is synthesized)
gagcaggcccggcagcagagcaccctcattgctgtgccactccacgggcagtccccactagtgacgggtgaacgtgtggccaccagcatgcggacggtaggcaagctcccgcggcatcgg

SEQ ID NO: 169564 - DNA, 120 bp, Artificial Sequence
  ENSG00000108840_15 (sequence is synthesized)
cccctgagccgcactcagtcctcaccgctgccgcagagtccccaggccctgcagcagctggtcatgcaacaacagcaccagcagttcctggagaagcagaagcagcagcagctacagctg

SEQ ID NO: 169565 - DNA, 120 bp, Artificial Sequence
  ENSG00000108840_16 (sequence is synthesized)
ggcaagatcctcaccaagacaggggagctgcccaggcagcccaccacccaccctgaggagacagaggaggagctgacggagcagcaggaggtcttgctgggggagggagccctgaccatg

SEQ ID NO: 169566 - DNA, 120 bp, Artificial Sequence
  ENSG00000108840_17 (sequence is synthesized)
ccccgggagggctccacagagagtgagagcacacaggaagacctggaggaggaggacgaggaagacgatggggaggaggaggaggattgcatccaggttaaggacgaggagggcgagagt

SEQ ID NO: 169567 - DNA, 120 bp, Artificial Sequence
  ENSG00000108840_18 (sequence is synthesized)
ggtgctgaggaggggcccgacttggaggagcctggtgctggatacaaaaaactgttctcagatgcccagccgctgcagcctttgcaggtgtaccaggcgcccctcagcctggccactgtg

SEQ ID NO: 169568 - DNA, 120 bp, Artificial Sequence
  ENSG00000108840_19 (sequence is synthesized)
ccccaccaggccctgggccgtacccagtcctcccctgctgcccctgggggcatgaagagccccccagaccagcccgtcaagcacctcttcaccacaggtgtggtctacgacacgttcatg

SEQ ID NO: 169569 - DNA, 120 bp, Artificial Sequence
  ENSG00000108840_20 (sequence is synthesized)
ctaaagcaccagtgcatgtgcgggaacacacacgtgcaccctgagcatgctggccggatccagagcatctggtcccggctgcaggagacaggcctgcttagcaagtgcgagcggatccga

SEQ ID NO: 169570 - DNA, 120 bp, Artificial Sequence
  ENSG00000108840_21 (sequence is synthesized)
ggtcgcaaagccacgctagatgagatccagacagtgcactctgaataccacaccctgctctatgggaccagtcccctcaaccggcagaagctagacagcaagaagttgctcggccccatc

SEQ ID NO: 169571 - DNA, 120 bp, Artificial Sequence
  ENSG00000108840_22 (sequence is synthesized)
acagtgacaccgtgtggaatgagatgcactcctccagtgctgtgcgcatggcagtgggctgcctgctggagctggccttcaaggtggctgcaggagagctcaagaatggatttgccatca

SEQ ID NO: 169572 - DNA, 120 bp, Artificial Sequence
  ENSG00000108840_23 (sequence is synthesized)
tccggcccccaggacaccacgccgaggaatccacagccatgggattctgcttcttcaactctgtagccatcaccgcaaaactcctacagcagaagttgaacgtgggcaaggtcctcatcg

SEQ ID NO: 169573 - DNA, 120 bp, Artificial Sequence
  ENSG00000108840_24 (sequence is synthesized)
tggactgggacattcaccatggcaatggcacccagcaggcgttctacaatgacccctctgtgctctacatctctctgcatcgctatgacaacgggaacttctttccaggctctggggctc

SEQ ID NO: 169574 - DNA, 120 bp, Artificial Sequence
  ENSG00000108840_25 (sequence is synthesized)
ctgaagaggttggtggaggaccaggcgtggggtacaatgtgaacgtggcatggacaggaggtgtggacccccccattggagacgtggagtaccttacagccttcaggacagtggtgatgc

SEQ ID NO: 169575 - DNA, 120 bp, Artificial Sequence
  ENSG00000108840_26 (sequence is synthesized)
ccattgcccacgagttctcacctgatgtggtcctagtctccgccgggtttgatgctgttgaaggacatctgtctcctctgggtggctactctgtcaccgccagatgttttggccacttga

SEQ ID NO: 169576 - DNA, 120 bp, Artificial Sequence
  ENSG00000108840_27 (sequence is synthesized)
ccaggcagctgatgaccctggcagggggccgggtggtgctggccctggagggaggccatgacttgaccgccatctgtgatgcctctgaggcttgtgtctcggctctgctcagtgtagagc

SEQ ID NO: 169577 - DNA, 120 bp, Artificial Sequence
  ENSG00000108840_28 (sequence is synthesized)
tgcagcccttggatgaggcagtcttgcagcaaaagcccaacatcaacgcagtggccacgctagagaaagtcatcgagatccagagcaaacactggagctgtgtgcagaagttcgccgctg

SEQ ID NO: 169578 - DNA, 120 bp, Artificial Sequence
  ENSG00000108840_29 (sequence is synthesized)
gtctgggccggtccctgcgagaggcccaagcaggtgagaccgaggaggccgagactgtgagcgccatggccttgctgtcggtgggggccgagcaggcccaggctgcggcagcccgggaac

SEQ ID NO: 169579 - DNA, 120 bp, Artificial Sequence
  ENSG00000108840_30 (sequence is synthesized)
acagccccaggccggcagaggagcccatggagcaggagcctgccctgtgacgccccggcccccatccctctgggcttcaccattgtgattttgtttattttttctattaaaaacaaaaag

SEQ ID NO: 169580 - DNA, 120 bp, Artificial Sequence
  ENSG00000108840_31 (sequence is synthesized)
tcacacattcaacaaggtgtgccgtgtgggtctctcagccttgcccctcctgctcctctacgctgcctcaggcccccagccctgtggcttccacctcagctctagaagcctgctccctct

SEQ ID NO: 169581 - DNA, 120 bp, Artificial Sequence
  ENSG00000108840_32 (sequence is synthesized)
gcagggggtggtggtgtcttcccagccctgtcccatgtgtccctccccccattttcctgcattctgtctgtccttttcctccttggagcctgggccagctcaaggtgggcacgggggccc

SEQ ID NO: 169582 - DNA, 120 bp, Artificial Sequence
  ENSG00000108840_33 (sequence is synthesized)
agacagtactctccagttctggggccccccgagtgaggagggaacgggaagtcggtgccttggtttcagctgatttggggggaaatgccttaatttcactctcctcccttctccagcctc

SEQ ID NO: 169583 - DNA, 120 bp, Artificial Sequence
  ENSG00000108840_34 (sequence is synthesized)
aggggaggatctggaggatccactactgtctttaagatgcagagtggaggggaggtgggcacccaccctgcgattctccaccctttccccttctttcgtcctcaccatctctgcagaccc

SEQ ID NO: 169584 - DNA, 120 bp, Artificial Sequence
  ENSG00000108840_35 (sequence is synthesized)
ctctcctcctccttcctcttggtctcagcactgatgggaggctggtgcccaagctgtggcctgcagtctgtgaggagggctgtcttgcctcacactcctcacagcctacttccccttccc

SEQ ID NO: 169585 - DNA, 120 bp, Artificial Sequence
  ENSG00000108840_36 (sequence is synthesized)
cggggctgagagggtgaaagtgtgtggggaaggagaggactggtttcctgggttctcaggggccaggaggagtaacagaaccaggtctgctccccaccttactcggatggcctccctgcc

SEQ ID NO: 169586 - DNA, 120 bp, Artificial Sequence
  ENSG00000108840_37 (sequence is synthesized)
cctctgctggcacagcctgggcaaggggagaaggtggtccctgcagaggggctccaggctggtgagagcccccctgctgtcaggaccagattttcccagccatccagcatgctgcgggga

SEQ ID NO: 169587 - DNA, 120 bp, Artificial Sequence
  ENSG00000108840_38 (sequence is synthesized)
gaaggggcagaggctcacctccctcctggggccttttgttttggatcctggggatggtgagaatggaggttctagaaggggtaaggccagaacccagggatccaggagtcggctctcagc

SEQ ID NO: 169588 - DNA, 120 bp, Artificial Sequence
  ENSG00000108840_39 (sequence is synthesized)
tggagcttccataccttctgggctccctttgctgaccaccagcccaagggagctaagaccaggagggggctgggcgctgtcccttctctttcccaggagccctgccaggggctgtgggcc

SEQ ID NO: 169589 - DNA, 120 bp, Artificial Sequence
  ENSG00000108840_40 (sequence is synthesized)
tacaaggcttccaggggatgccatccagcctgtaggaaaccaaagatgggaagtggctcctagggggctgactcttccttcctcctcctccccagtaccacatatactttctctccttct

SEQ ID NO: 169590 - DNA, 120 bp, Artificial Sequence
  ENSG00000108840_41 (sequence is synthesized)
atctccagggccccaccaatctgtttacatatttattatcctatgggggcctgagcaggattgagggagccaggggaggggcaggagtcccagcaccatcggttcatagtgtgcttgtgt

SEQ ID NO: 169591 - DNA, 120 bp, Artificial Sequence
  ENSG00000108840_42 (sequence is synthesized)
gtttgttttagatcctcctgggggatggggatggggccaggctcagtgtactaggcctctctgtgctgagccccaggctcccggccccttacccactctctccctgtggctggtctggtt

SEQ ID NO: 169592 - DNA, 120 bp, Artificial Sequence
  ENSG00000108840_43 (sequence is synthesized)
ctcatgtaaacccactccttgctttgtctccctggatatggatttcagttaagtattttgtaacccgttacactgtgtgtccttgtgtaaataaacttgtttctggcagtgccttctggg

SEQ ID NO: 169593 - DNA, 120 bp, Artificial Sequence
  ENSG00000108840_44 (sequence is synthesized)
gaccctgtttcaaagaaaaaaaaaaaaaagctggagaggagagggggcaggtttgtggcagggtggctgcagtggccatggggaggtgtttggacctgggggttggagacagctccatga

SEQ ID NO: 169594 - DNA, 120 bp, Artificial Sequence
  ENSG00000108840_45 (sequence is synthesized)
ctggggctcctgccggatgactaacgtcacattccaacagggctccctcctcaactatgaaagacatttagctcctgttccatcttggccctcacgttgcagtttcaagcaacgaagggg

SEQ ID NO: 169595 - DNA, 120 bp, Artificial Sequence
  ENSG00000108840_46 (sequence is synthesized)
atttcctaccttgaacggtagtgacgctgccgccattgctagtagccgatatttcctcccaccccctacaattaggagcagactgtataccaggaacacaatgagtactttatggccacc

SEQ ID NO: 169596 - DNA, 120 bp, Artificial Sequence
  ENSG00000108840_47 (sequence is synthesized)
tcgagtagtaagaacgaggatgtccatttctgtgaacaaaggtgttgttgcgtgacttacccaaggccactcagctggggatgtcggcactgggtttcagaccaaggcttttggccccag

SEQ ID NO: 169597 - DNA, 120 bp, Artificial Sequence
  ENSG00000108840_48 (sequence is synthesized)
cactctgctcttgctaccatgggtgcttcccaaaccctgctcctaatggtggaggcagaggcacacaccactctctgtgagctggggaagtagccaggaccaagcctcaggaaggacaaa

SEQ ID NO: 169598 - DNA, 120 bp, Artificial Sequence
  ENSG00000108840_49 (sequence is synthesized)
atctcttggaagcccaattctggcttaaaaattcatgtaaatgttggatcctccttcagaatcttacgtgcttgtggttgggcacaatggctcaaagcctgtaatcccagcattttggga

SEQ ID NO: 169599 - DNA, 90 bp, Artificial Sequence
  ENSG00000108840_50 (sequence is synthesized)
ccaggagaaaattcaaaaaaattagttaggtgtggtggcgggagcctgtaatcccacctattggggaggctgaggcaggagaattccttg

SEQ ID NO: 169600 - DNA, 120 bp, Artificial Sequence
  ENSG00000108840_51 (sequence is synthesized)
ccggagctcgagccgcagcgggtgagcgcgccgccccggcccagatcccatcttccccggaccccgggacgcgaggcggcgccccctcctcctgctgtctctgtccgcgggctcccagcg

SEQ ID NO: 169601 - DNA, 120 bp, Artificial Sequence
  ENSG00000108840_52 (sequence is synthesized)
ctgggagccagccggcgccccccgggagcatcggcagcccgtgagcgggacatcggggttgctgcgcgcgcccctccctgcccctcccagacaggggcgccttccctacagcagatggga

SEQ ID NO: 169602 - DNA, 120 bp, Artificial Sequence
  ENSG00000108840_53 (sequence is synthesized)
tgggactgttcatgtgggtgtcctctgccctccctgaccccttgcctgtctctcgtccacaggcaaacactggagctgtgtgcagaagttcgccgctggtctgggccggtccctgcgaga

SEQ ID NO: 169603 - DNA, 120 bp, Artificial Sequence
  ENSG00000108840_54 (sequence is synthesized)
gggcctcctggcagcccgcccgcagctccctgagcatgctccacctatttatagacagggccctcccccaactgctatttcagtctcctgccagctgccggcggcggctcattcgggaag

SEQ ID NO: 169604 - DNA, 120 bp, Artificial Sequence
  ENSG00000108840_55 (sequence is synthesized)
gaggagcagggagccgggcccagagctgtcacccagggttgggagggaacacagagcccgcctgcccgctgagctccccttcctgtcccaagtgctcagccataccccagctcccaggaa

SEQ ID NO: 169605 - DNA, 120 bp, Artificial Sequence
  ENSG00000108840_56 (sequence is synthesized)
tgcccctcctgccgccaggagtgcccaggccggatgaggcacttccctacagtgtgggtcccgtcggcagtggcctgagggaacctgtgctgtgcgggctgcccgaccaccttcccttcg

SEQ ID NO: 169606 - DNA, 120 bp, Artificial Sequence
  ENSG00000108840_57 (sequence is synthesized)
gtctgctccccgcctctggcggccccctccctggcatgctgctggtgcccaaggctcaggggctcgtggagatgctgcagaccatctatgagacagaatcctgtttctcagcagatggga

SEQ ID NO: 169607 - DNA, 120 bp, Artificial Sequence
  ENSG00000108846_0 (sequence is synthesized)
ctgcccgccgctgggtccgaccgcgctcgccttccttgcagccgcgcctcggccccatggacgccctgtgcggttccggggagctcggctccaagttctgggactccaacctgtctgtgc

SEQ ID NO: 169608 - DNA, 120 bp, Artificial Sequence
  ENSG00000108846_1 (sequence is synthesized)
acacagaaaacccggacctcactccctgcttccagaactccctgctggcctgggtgccctgcatctacctgtgggtcgccctgccctgctacttgctctacctgcggcaccattgtcgtg

SEQ ID NO: 169609 - DNA, 120 bp, Artificial Sequence
  ENSG00000108846_2 (sequence is synthesized)
gctacatcatcctctcccacctgtccaagctcaagatggtcctgggtgtcctgctgtggtgcgtctcctgggcggaccttttttactccttccatggcctggtccatggccgggcccctg

SEQ ID NO: 169610 - DNA, 120 bp, Artificial Sequence
  ENSG00000108846_3 (sequence is synthesized)
cccctgttttctttgtcacccccttggtggtgggggtcaccatgctgctggccaccctgctgatacagtatgagcggctgcagggcgtacagtcttcgggggtcctcattatcttctggt

SEQ ID NO: 169611 - DNA, 120 bp, Artificial Sequence
  ENSG00000108846_4 (sequence is synthesized)
tcctgtgtgtggtctgcgccatcgtcccattccgctccaagatccttttagccaaggcagagggtgagatctcagaccccttccgcttcaccaccttctacatccactttgccctggtac

SEQ ID NO: 169612 - DNA, 120 bp, Artificial Sequence
  ENSG00000108846_5 (sequence is synthesized)
tctctgccctcatcttggcctgcttcagggagaaacctccatttttctccgcaaagaatgtcgaccctaacccctaccctgagaccagcgctggctttctctcccgcctgtttttctggt

SEQ ID NO: 169613 - DNA, 120 bp, Artificial Sequence
  ENSG00000108846_6 (sequence is synthesized)
ggttcacaaagatggccatctatggctaccggcatcccctggaggagaaggacctctggtccctaaaggaagaggacagatcccagatggtggtgcagcagctgctggaggcatggagga

SEQ ID NO: 169614 - DNA, 120 bp, Artificial Sequence
  ENSG00000108846_7 (sequence is synthesized)
agcaggaaaagcagacggcacgacacaaggcttcagcagcacctgggaaaaatgcctccggcgaggacgaggtgctgctgggtgcccggcccaggccccggaagccctccttcctgaagg

SEQ ID NO: 169615 - DNA, 120 bp, Artificial Sequence
  ENSG00000108846_8 (sequence is synthesized)
ccctgctggccaccttcggctccagcttcctcatcagtgcctgcttcaagcttatccaggacctgctctccttcatcaatccacagctgctcagcatcctgatcaggtttatctccaacc

SEQ ID NO: 169616 - DNA, 120 bp, Artificial Sequence
  ENSG00000108846_9 (sequence is synthesized)
ccatggccccctcctggtggggcttcctggtggctgggctgatgttcctgtgctccatgatgcagtcgctgatcttacaacactattaccactacatctttgtgactggggtgaagtttc

SEQ ID NO: 169617 - DNA, 120 bp, Artificial Sequence
  ENSG00000108846_10 (sequence is synthesized)
gtactgggatcatgggtgtcatctacaggaaggctctggttatcaccaactcagtcaaacgtgcgtccactgtgggggaaattgtcaacctcatgtcagtggatgcccagcgcttcatgg

SEQ ID NO: 169618 - DNA, 120 bp, Artificial Sequence
  ENSG00000108846_11 (sequence is synthesized)
accttgcccccttcctcaatctgctgtggtcagcacccctgcagatcatcctggcgatctacttcctctggcagaacctaggtccctctgtcctggctggagtcgctttcatggtcttgc

SEQ ID NO: 169619 - DNA, 120 bp, Artificial Sequence
  ENSG00000108846_12 (sequence is synthesized)
tgattccactcaacggagctgtggccgtgaagatgcgcgccttccaggtaaagcaaatgaaattgaaggactcgcgcatcaagctgatgagtgagatcctgaacggcatcaaggtgctga

SEQ ID NO: 169620 - DNA, 120 bp, Artificial Sequence
  ENSG00000108846_13 (sequence is synthesized)
agctgtacgcctgggagcccagcttcctgaagcaggtggagggcatcaggcagggtgagctccagctgctgcgcacggcggcctacctccacaccacaaccaccttcacctggatgtgca

SEQ ID NO: 169621 - DNA, 120 bp, Artificial Sequence
  ENSG00000108846_14 (sequence is synthesized)
gccccttcctggtgaccctgatcaccctctgggtgtacgtgtacgtggacccaaacaatgtgctggacgccgagaaggcctttgtgtctgtgtccttgtttaatatcttaagacttcccc

SEQ ID NO: 169622 - DNA, 120 bp, Artificial Sequence
  ENSG00000108846_15 (sequence is synthesized)
tcaacatgctgccccagttaatcagcaacctgactcaggccagtgtgtctctgaaacggatccagcaattcctgagccaagaggaacttgacccccagagtgtggaaagaaagaccatct

SEQ ID NO: 169623 - DNA, 120 bp, Artificial Sequence
  ENSG00000108846_16 (sequence is synthesized)
ccccaggctatgccatcaccatacacagtggcaccttcacctgggcccaggacctgccccccactctgcacagcctagacatccaggtcccgaaaggggcactggtggccgtggtggggc

SEQ ID NO: 169624 - DNA, 120 bp, Artificial Sequence
  ENSG00000108846_17 (sequence is synthesized)
ctgtgggctgtgggaagtcctccctggtgtctgccctgctgggagagatggagaagctagaaggcaaagtgcacatgaagggctccgtggcctatgtgccccagcaggcatggatccaga

SEQ ID NO: 169625 - DNA, 120 bp, Artificial Sequence
  ENSG00000108846_18 (sequence is synthesized)
actgcactcttcaggaaaacgtgcttttcggcaaagccctgaaccccaagcgctaccagcagactctggaggcctgtgccttgctagctgacctggagatgctgcctggtggggatcaga

SEQ ID NO: 169626 - DNA, 120 bp, Artificial Sequence
  ENSG00000108846_19 (sequence is synthesized)
cagagattggagagaagggcattaacctgtctgggggccagcggcagcgggtcagtctggctcgagctgtttacagtgatgccgatattttcttgctggatgacccactgtccgcggtgg

SEQ ID NO: 169627 - DNA, 120 bp, Artificial Sequence
  ENSG00000108846_20 (sequence is synthesized)
actctcatgtggccaagcacatctttgaccacgtcatcgggccagaaggcgtgctggcaggcaagacgcgagtgctggtgacgcacggcattagcttcctgccccagacagacttcatca

SEQ ID NO: 169628 - DNA, 120 bp, Artificial Sequence
  ENSG00000108846_21 (sequence is synthesized)
ttgtgctagctgatggacaggtgtctgagatgggcccgtacccagccctgctgcagcgcaacggctcctttgccaactttctctgcaactatgcccccgatgaggaccaagggcacctgg

SEQ ID NO: 169629 - DNA, 120 bp, Artificial Sequence
  ENSG00000108846_22 (sequence is synthesized)
aggacagctggaccgcgttggaaggtgcagaggataaggaggcactgctgattgaagacacactcagcaaccacacggatctgacagacaatgatccagtcacctatgtggtccagaagc

SEQ ID NO: 169630 - DNA, 120 bp, Artificial Sequence
  ENSG00000108846_23 (sequence is synthesized)
cctgtaccccggaggcacctgggtccatcagagaaggtgcaggtgacagaggcgaaggcagatggggcactgacccaggaggagaaagcagccattggcactgtggagctcagtgtgttc

SEQ ID NO: 169631 - DNA, 120 bp, Artificial Sequence
  ENSG00000108846_24 (sequence is synthesized)
tgggattatgccaaggccgtggggctctgtaccacgctggccatctgtctcctgtatgtgggtcaaagtgcggctgccattggagccaatgtgtggctcagtgcctggacaaatgatgcc

SEQ ID NO: 169632 - DNA, 120 bp, Artificial Sequence
  ENSG00000108846_25 (sequence is synthesized)
atggcagacagtagacagaacaacacttccctgaggctgggcgtctatgctgctttaggaattctgcaagggttcttggtgatgctggcagccatggccatggcagcgggtggcatccag

SEQ ID NO: 169633 - DNA, 120 bp, Artificial Sequence
  ENSG00000108846_26 (sequence is synthesized)
gctgcccgtgtgttgcaccaggcactgctgcacaacaagatacgctcgccacagtccttctttgacaccacaccatcaggccgcatcctgaactgcttctccaaggacatctatgtcgtt

SEQ ID NO: 169634 - DNA, 120 bp, Artificial Sequence
  ENSG00000108846_27 (sequence is synthesized)
gatgaggttctggcccctgtcatcctcatgctgctcaattccttcttcaacgccatctccactcttgtggtcatcatggccagcacgccgctcttcactgtggtcatcctgcccctggct

SEQ ID NO: 169635 - DNA, 120 bp, Artificial Sequence
  ENSG00000108846_28 (sequence is synthesized)
gtgctctacaccttagtgcagcgcttctatgcagccacatcacggcaactgaagcggctggaatcagtcagccgctcacctatctactcccacttttcggagacagtgactggtgccagt

SEQ ID NO: 169636 - DNA, 120 bp, Artificial Sequence
  ENSG00000108846_29 (sequence is synthesized)
gtcatccgggcctacaaccgcagccgggattttgagatcatcagtgatactaaggtggatgccaaccagagaagctgctacccctacatcatctccaaccggtggctgagcatcggagtg

SEQ ID NO: 169637 - DNA, 120 bp, Artificial Sequence
  ENSG00000108846_30 (sequence is synthesized)
gagttcgtggggaactgcgtggtgctctttgctgcactatttgccgtcatcgggaggagcagcctgaacccggggctggtgggcctttctgtgtcctactccttgcaggtgacatttgct

SEQ ID NO: 169638 - DNA, 120 bp, Artificial Sequence
  ENSG00000108846_31 (sequence is synthesized)
ctgaactggatgatacgaatgatgtcagatttggaatctaacatcgtggctgtggagagggtcaaggagtactccaagacagagacagaggcgccctgggtggtggaaggcagccgccct

SEQ ID NO: 169639 - DNA, 120 bp, Artificial Sequence
  ENSG00000108846_32 (sequence is synthesized)
cccgaaggttggcccccacgtggggaggtggagttccggaattattctgtgcgctaccggccgggcctagacctggtgctgagagacctgagtctgcatgtgcacggtggcgagaaggtg

SEQ ID NO: 169640 - DNA, 120 bp, Artificial Sequence
  ENSG00000108846_33 (sequence is synthesized)
gggatcgtgggccgcactggggctggcaagtcttccatgaccctttgcctgttccgcatcctggaggcggcaaagggtgaaatccgcattgatggcctcaatgtggcagacatcggcctc

SEQ ID NO: 169641 - DNA, 120 bp, Artificial Sequence
  ENSG00000108846_34 (sequence is synthesized)
catgacctgcgctctcagctgaccatcatcccgcaggaccccatcctgttctcggggaccctgcgcatgaacctggaccccttcggcagctactcagaggaggacatttggtgggctttg

SEQ ID NO: 169642 - DNA, 120 bp, Artificial Sequence
  ENSG00000108846_35 (sequence is synthesized)
gagctgtcccacctgcacacgtttgtgagctcccagccggcaggcctggacttccagtgctcagagggcggggagaatctcagcgtgggccagaggcagctcgtgtgcctggcccgagcc

SEQ ID NO: 169643 - DNA, 120 bp, Artificial Sequence
  ENSG00000108846_36 (sequence is synthesized)
ctgctccgcaagagccgcatcctggttttagacgaggccacagctgccatcgacctggagactgacaacctcatccaggctaccatccgcacccagtttgatacctgcactgtcctgacc

SEQ ID NO: 169644 - DNA, 120 bp, Artificial Sequence
  ENSG00000108846_37 (sequence is synthesized)
atcgcacaccggcttaacactatcatggactacaccagggtcctggtcctggacaaaggagtagtagctgaatttgattctccagccaacctcattgcagctagaggcatcttctacggg

SEQ ID NO: 169645 - DNA, 120 bp, Artificial Sequence
  ENSG00000108846_38 (sequence is synthesized)
atggccagagatgctggacttgcctaaaatatattcctgagatttcctcctggcctttcctggttttcatcaggaaggaaatgacaccaaatatgtccgcagaatggacttgatagcaaa

SEQ ID NO: 169646 - DNA, 120 bp, Artificial Sequence
  ENSG00000108846_39 (sequence is synthesized)
cactgggggcaccttaagattttgcacctgtaaagtgccttacagggtaactgtgctgaatgctttagatgaggaaatgatccccaagtggtgaatgacacgcctaaggtcacagctagt

SEQ ID NO: 169647 - DNA, 120 bp, Artificial Sequence
  ENSG00000108846_40 (sequence is synthesized)
ttgagccagttagactagtccccggtctcccgattcccaactgagtgttatttgcacactgcactgttttcaaataacgattttatgaaatgacctctgtcctccctctgatttttcata

SEQ ID NO: 169648 - DNA, 120 bp, Artificial Sequence
  ENSG00000108846_41 (sequence is synthesized)
ttttctaaagtttcgtttctgttttttaataaaaagctttttcctcctggaacagaagacagctgctgggtcaggccacccctaggaactcagtcctgtactctggggtgctgcctgaat

SEQ ID NO: 169649 - DNA, 120 bp, Artificial Sequence
  ENSG00000108846_42 (sequence is synthesized)
ccattaaaaatgggagtactgatgaaataaaactacatggtcaacagtatatacacagtagtctttttgcacttgttcacaaggtttggggattaggatctttggaggaggccaagagga

SEQ ID NO: 169650 - DNA, 120 bp, Artificial Sequence
  ENSG00000108846_43 (sequence is synthesized)
agactttctacacatgtacatggttgtagttacctgaacttcagacccaagagctcttggctgcaaatattgccttcacagccaaaattccctgggtaattgccagtagctcctgctctg

SEQ ID NO: 169651 - DNA, 120 bp, Artificial Sequence
  ENSG00000108846_44 (sequence is synthesized)
ctgtgcagatattgtaaaacggtgagaaaggccctgaaatctgacctggggcctcttgggaaagctgctgtgaacacctccacgttaatgtcatccctcagccctctatgcctgtttctc

SEQ ID NO: 169652 - DNA, 120 bp, Artificial Sequence
  ENSG00000108846_45 (sequence is synthesized)
tagggactgagaagtgcatgatgcttttacttccttgctcatttcgaagtctgttccagacagttcctataaccagtgaggcctccaagtcattcattttcctcagtctagccaaagctg

SEQ ID NO: 169653 - DNA, 120 bp, Artificial Sequence
  ENSG00000108846_46 (sequence is synthesized)
aatgtgtgagcacaaagaagccgagaggccacctcctgcccagagagaagccacccacactcccaggttggcagacaagatgtgaggggtgaattaaatttgttttcttgagcaagccaa

SEQ ID NO: 169654 - DNA, 120 bp, Artificial Sequence
  ENSG00000108846_47 (sequence is synthesized)
acatctttgaccacgtcatcgggccagaaggcgtgctggcaggcaaggtgaggcctgccagaggctaagggggctaagacgcgagtgctggtgacgcacggcattagcttcctgccccag

SEQ ID NO: 169655 - DNA, 120 bp, Artificial Sequence
  ENSG00000108846_48 (sequence is synthesized)
ggatgggcctgaagggaagagaagagaggtgaagaaggccccaagagcgggggcggattagggacctagagaaggttgctaggcagtgctgggggccactgagtttggaaaggtggattt

SEQ ID NO: 169656 - DNA, 120 bp, Artificial Sequence
  ENSG00000108846_49 (sequence is synthesized)
gagcggcaagagtctttgtggtcatgtggcggaatctagagcccccagcagcctaggagaaggagcagggaagtccagtcaatggaaacgtggcatttcttcccgccatatgtcaggagg

SEQ ID NO: 169657 - DNA, 120 bp, Artificial Sequence
  ENSG00000108846_50 (sequence is synthesized)
taagaaggcaggcaggtgaggctggtggtgagagcgtcatcgatagggcgtgcagcagggtccatggtggatagagaacgaggtgaaggcagagtggagccaggaggtcgtggtcttgag

SEQ ID NO: 169658 - DNA, 120 bp, Artificial Sequence
  ENSG00000108846_51 (sequence is synthesized)
gcagtactgggttgaccctccctggcccaagaggttggagggggtggaggtttcagaggccaggggtgcagtggagactgcgggtaaaagcaaagggcagcagaggagggagcagccatg

SEQ ID NO: 169659 - DNA, 120 bp, Artificial Sequence
  ENSG00000108846_52 (sequence is synthesized)
aaccctgacctctgcctccttcctctgacatgctgcagaagtggcaagagaggattattctggaactgggagcatggcacatgcttgtagtcccagctgctcaggcggctgaggcaagag

SEQ ID NO: 169660 - DNA, 120 bp, Artificial Sequence
  ENSG00000108846_53 (sequence is synthesized)
ctgctcaggcggctgaggcaagaggatcacttgagcccaagagttctggctgcagtgcgccacgattgtgcctgcgaatagccaccacactccagcctgggcaacatagcaagaccttgt

SEQ ID NO: 169661 - DNA, 120 bp, Artificial Sequence
  ENSG00000108846_54 (sequence is synthesized)
gcaagaccttgtctctaaaaagaaacaaagaaaacagaaaaaaagaaggagggttattctgggttagcagaggggatatagaattgacacaagagctggctgggcacggtggctcacgcc

SEQ ID NO: 169662 - DNA, 120 bp, Artificial Sequence
  ENSG00000108846_55 (sequence is synthesized)
gcccaggcatggccagggctcattggactctaccctgacaccacctccacgctgctcaggtgaccctgatcaccctctgggtgtacgtgtacgtggacccaaacaatgtgctggacgccg

SEQ ID NO: 169663 - DNA, 120 bp, Artificial Sequence
  ENSG00000108846_56 (sequence is synthesized)
cgggggcagggagaccggacccagaggcactgggccgcgcctcggccccatggacgccctgtgcggttccggggagctcggctccaagttctggcactggggagcccgggaaagtgagga

SEQ ID NO: 169664 - DNA, 120 bp, Artificial Sequence
  ENSG00000108846_57 (sequence is synthesized)
agagtgcgcggctggggcgcaaaggcacagtgcgtggctgggtgagtcggctccatcccagcccctccgtcgggtgcggaaggggcgtttcgcaatcagccgcgggttcctgatggaggg

SEQ ID NO: 169665 - DNA, 120 bp, Artificial Sequence
  ENSG00000108846_58 (sequence is synthesized)
ccactccggactcagaagggagaagcagaccccagtctggagacaggtgcagggtgtcaggattcctgtagtccaactcccttctcacagatggagaaagggaggcccagagagaggaag

SEQ ID NO: 169666 - DNA, 120 bp, Artificial Sequence
  ENSG00000108846_59 (sequence is synthesized)
agatggagaaagggaggcccagagagaggaagggacttgcccaaagttacccagttcaatgaaggcagagctgggatagaaaaacaggctacaggccaggtgcagtggttcacgcctgta

SEQ ID NO: 169667 - DNA, 120 bp, Artificial Sequence
  ENSG00000108846_60 (sequence is synthesized)
tcacttcagcccaggagttttagattactgtgagctatgatcgcaccactgcactgtggcctgggcgaaagagtgagaccctgtctctaaaaaaataaataaataagaaaagaaaatcaa

SEQ ID NO: 169668 - DNA, 120 bp, Artificial Sequence
  ENSG00000108846_61 (sequence is synthesized)
gccagtgtgtctctgaaacggatccagcaattcctgagccaagaggaacttgacccccagagtgtggaaagaaagaccatctccccagcctagacatccaggtcccgaaaggggcactgg

SEQ ID NO: 169669 - DNA, 120 bp, Artificial Sequence
  ENSG00000108846_62 (sequence is synthesized)
gggatttcacaatgccttttagcactggctcattccccaaggcccctcattatcccaatggtgtccagacctctgctccgttctggagggctgggctgtggcagaaatgggagaagtcag

SEQ ID NO: 169670 - DNA, 120 bp, Artificial Sequence
  ENSG00000108846_63 (sequence is synthesized)
acagaaaaccagtcctgggccactgaggagtgaaacaggtctgggaatgaggcccagaggcaggtgggaggcccccagctggaaatgcctgccttctccactcccagcgtgggccagagg

SEQ ID NO: 169671 - DNA, 120 bp, Artificial Sequence
  ENSG00000108846_64 (sequence is synthesized)
agatggagtccaggccaggaatgagacaagtattcaggagcaatttgggagatgggcgtgtgcgccagagagacagaggagtgccaggcaacctgggtgctggcctggcatcctgatcag

SEQ ID NO: 169672 - DNA, 120 bp, Artificial Sequence
  ENSG00000108846_65 (sequence is synthesized)
gacagagcgagactccatctcaagagagaaaaaaaaaaagtccagaggagttttcttgctttggggtgttgtagaaatgatcttggagcttagccccaaaggacaaacagaatttctctt

SEQ ID NO: 169673 - DNA, 120 bp, Artificial Sequence
  ENSG00000108846_66 (sequence is synthesized)
gtctctgggcaagttgtaggctcatgtgacaggtcaggacagtgtagggctggcataccgctcgctcacgttcacatgcttgcagagaacgtacacagacgaggtgactgaagcctggtc

SEQ ID NO: 169674 - DNA, 120 bp, Artificial Sequence
  ENSG00000108846_67 (sequence is synthesized)
tgcaggtcaggcaggtcatcctgatgccagcttgtactgtcaaagagtcacctaactgcaaacggaatttttgtaaagcagatcacattgttaatacctcaggtggctcaaaccttgaac

SEQ ID NO: 169675 - DNA, 120 bp, Artificial Sequence
  ENSG00000108846_68 (sequence is synthesized)
gcgttggcaaacaaaaaacaatccagaaaggtcaattttcacaaaggtcagtgtgcacatgaatctacttgttaaaatgtacattttgattcagtagacctaggatggggctcaggactc

SEQ ID NO: 169676 - DNA, 120 bp, Artificial Sequence
  ENSG00000108846_69 (sequence is synthesized)
tgcactttgatcaagactccttggtacgcaaagtgtggcccatgggccagttgcatcaccatcctctgggagcttgttagaaatgaagaatctcaggttccaagtcccacctcagactac

SEQ ID NO: 169677 - DNA, 120 bp, Artificial Sequence
  ENSG00000108846_70 (sequence is synthesized)
agaatccggcgttgcattttaacaagattctctgggaagtcttatacatattaaagttggagaaacagaaaccaaggcgaggtggtccttggttaagtctgcactgtcactgcccaaggg

SEQ ID NO: 169678 - DNA, 120 bp, Artificial Sequence
  ENSG00000108846_71 (sequence is synthesized)
agtcattcgtgattacagccccagctggcatgcctgtgggcttgatccaggcccacctgggtcatccatgggctaggatcccatggatgggcacatgatccaggagtctgaactcctccc

SEQ ID NO: 169679 - DNA, 120 bp, Artificial Sequence
  ENSG00000108846_72 (sequence is synthesized)
attacaggtgtgagccaccttgcccgatctcagagcctgttttccatctgttgaaagcataggagggcccaggcccagcttgtgtggcaaggctgcttcatggataaatagtttgcgttg

SEQ ID NO: 169680 - DNA, 120 bp, Artificial Sequence
  ENSG00000108848_0 (sequence is synthesized)
gtcttgtcggctcctgtgtgtaggagggatttcggcctgagagcgggccgaggagattggcgacggtgtcgcccgtgttttcgttggcgggtgcctgggctggtgggaacagccgcccga

SEQ ID NO: 169681 - DNA, 120 bp, Artificial Sequence
  ENSG00000108848_1 (sequence is synthesized)
aggaagcaccatgatttcggccgcgcagttgttggatgagttaatgggccgggaccgaaacctagccccggacgagaagcgcagcaacgtgcggtgggaccacgagagcgtttgtaaata

SEQ ID NO: 169682 - DNA, 120 bp, Artificial Sequence
  ENSG00000108848_2 (sequence is synthesized)
ttatctctgtggtttttgtcctgcggaattgttcacaaatacacgttctgatcttggtccgtgtgaaaaaattcatgatgaaaatctacgaaaacagtatgagaagagctctcgtttcat

SEQ ID NO: 169683 - DNA, 120 bp, Artificial Sequence
  ENSG00000108848_3 (sequence is synthesized)
gaaagttggctatgagagagattttttgcgatacttacagagcttacttgcagaagtagaacgtaggatcagacgaggccatgctcgtttggcattatctcaaaaccagcagtcttctgg

SEQ ID NO: 169684 - DNA, 120 bp, Artificial Sequence
  ENSG00000108848_4 (sequence is synthesized)
ggccgctggcccaacaggcaaaaatgaagaaaaaattcaggttctaacagacaaaattgatgtacttctgcaacagattgaagaattagggtctgaaggaaaagtagaagaagcccaggg

SEQ ID NO: 169685 - DNA, 120 bp, Artificial Sequence
  ENSG00000108848_5 (sequence is synthesized)
gatgatgaaattagttgagcaattaaaagaagagagagaactgctaaggtccacaacgtcgacaattgaaagctttgctgcacaagaaaaacaaatggaagtttgtgaagtatgtggagc

SEQ ID NO: 169686 - DNA, 120 bp, Artificial Sequence
  ENSG00000108848_6 (sequence is synthesized)
ctttttaatagtaggagatgcccagtcccgggtagatgaccatttgatgggaaaacaacacatgggctatgccaaaattaaagctactgtagaagaattaaaagaaaagttaaggaaaag

SEQ ID NO: 169687 - DNA, 120 bp, Artificial Sequence
  ENSG00000108848_7 (sequence is synthesized)
aaccgaagaacctgatcgtgatgagcgtctaaaaaaggagaagcaagaaagagaagaaagagaaaaagaacgggagagagaaagggaagaaagagaaaggaaaagacgaagggaagagga

SEQ ID NO: 169688 - DNA, 120 bp, Artificial Sequence
  ENSG00000108848_8 (sequence is synthesized)
tcacgaagtagacactcaagccgaacatcagacagaagatgcagcaggtctcgggaccacaaaaggtcacgaagtagagaaagaaggcggagcagaagtagagatcgacgaagaagcaga

SEQ ID NO: 169689 - DNA, 120 bp, Artificial Sequence
  ENSG00000108848_9 (sequence is synthesized)
agccatgatcgatcagaaagaaaacacagatctcgaagtcgggatcgaagaagatcaaaaagccgggatcgaaagtcatataagcacaggagcaaaagtcgggacagagaacaagataga

SEQ ID NO: 169690 - DNA, 120 bp, Artificial Sequence
  ENSG00000108848_10 (sequence is synthesized)
aaatccaaggagaaagaaaagaggggatctgatgataaaaaaagtagtgtgaagtccggtagtcgagaaaagcagagtgaagacacaaacactgaatcgaaggaaagtgatactaagaat

SEQ ID NO: 169691 - DNA, 120 bp, Artificial Sequence
  ENSG00000108848_11 (sequence is synthesized)
gaggtcaatgggaccagtgaagacattaaatctgaaggtgacactcagtccaattaaaactgatctgataagacctcagatcagacagaggactactgttcgaagatttttggaagaata

SEQ ID NO: 169692 - DNA, 120 bp, Artificial Sequence
  ENSG00000108848_12 (sequence is synthesized)
ctgagaacggcataaagtgaagatcgacatttaaaaaatgaggtgaaagaaagctatagtggcatagaaaaagtataaagctcagttagtttttttattattattattattaaaagttaa

SEQ ID NO: 169693 - DNA, 120 bp, Artificial Sequence
  ENSG00000108848_13 (sequence is synthesized)
ttcaggactgatgtgacctaccagatttcagaacatgtgttaatagtatatatgccactgaaaacttaggtcctgtatcatacttttttctttaagactttttaagaaatattacttaaa

SEQ ID NO: 169694 - DNA, 120 bp, Artificial Sequence
  ENSG00000108848_14 (sequence is synthesized)
catgtggcttgctcagtgtttaattgcaagttttcaatcttggactttgaaaacaggattaaacgttagtattcgtgtgaatcagactaagtgggatttcatttttacaactctgctcta

SEQ ID NO: 169695 - DNA, 120 bp, Artificial Sequence
  ENSG00000108848_15 (sequence is synthesized)
cttagcctttggatttagaagtaaaaataaagtatctctgactttctgttacaaagttgattgtctctgtcattgaaaagttttagtattaatctttttctaataaagttattgactctg

SEQ ID NO: 169696 - DNA, 120 bp, Artificial Sequence
  ENSG00000108848_16 (sequence is synthesized)
taagacctcagatcagacagaggtaagtgtattgtttctcactttgattagggctttttgttactgtttgacagtgcagcgtaagtatgcacagatgaagatggaactaagccgagtaag

SEQ ID NO: 169697 - DNA, 120 bp, Artificial Sequence
  ENSG00000108848_17 (sequence is synthesized)
aagacatacaaaagcctcttctgaaggaaaagacagtgtagtcctgcaaaacattttgaggtacattgttttgtctcagctattttgtagcagactcgtgcccccattagtgtgcctctt

SEQ ID NO: 169698 - DNA, 120 bp, Artificial Sequence
  ENSG00000108848_18 (sequence is synthesized)
tggaaattatcgcccacatttgtaatatagtcgccattgaaaagttaattatcctttttttagggattttgatgtcatttcttttttttttttaataaaaaggttgaactgttttttttt

SEQ ID NO: 169699 - DNA, 120 bp, Artificial Sequence
  ENSG00000108848_19 (sequence is synthesized)
ttctttttggtattaagtccatcttgtgttggtacattggcagagacatatgctttaaaaacttaaatatttcggaggcacatgttggactactttgttttaattaaactgctagtattt

SEQ ID NO: 169700 - DNA, 120 bp, Artificial Sequence
  ENSG00000108848_20 (sequence is synthesized)
ctttgtcaaggatgtttctagttttttgctttattgccttgcattctaatgcagtttgttctgtaactcgagagccagtagcattggattgatggaagtgtagggtttatgaattattgc

SEQ ID NO: 169701 - DNA, 120 bp, Artificial Sequence
  ENSG00000108848_21 (sequence is synthesized)
agctgactaccatacctcacacagcgttggtgttgtgagcggcccatgaaaagccaaattaaaaatcaaggattcagtcaaactaagcaggtactcatgccaggtactcctttctctacc

SEQ ID NO: 169702 - DNA, 120 bp, Artificial Sequence
  ENSG00000108848_22 (sequence is synthesized)
cacatccatgtttgaatgctattgcctgtgatctttacgcttaactgttgtgtatcttttttgttctttacaagaagtgcagaggggttttttgtgtattgcgtgaaaacttataaaaca

SEQ ID NO: 169703 - DNA, 120 bp, Artificial Sequence
  ENSG00000108848_23 (sequence is synthesized)
aatgttaacagaatggaattttttttcaactgtatgtagggctgcagtggtggccagaattagatatctttaaagaattttaaatacaataaacacttcatattattcgccttgttacac

SEQ ID NO: 169704 - DNA, 120 bp, Artificial Sequence
  ENSG00000108848_24 (sequence is synthesized)
tcaatgcaattctcaagtctataagaggtatgtgcttaatatttcctactgtgtaggagaatttgcagtcagccataggtatgtaggaatagtcactcactggctgatacatttaaagca

SEQ ID NO: 169705 - DNA, 120 bp, Artificial Sequence
  ENSG00000108848_25 (sequence is synthesized)
gcagtgtgaatagcaaggacagacaccttcaatttgtgaaatcaaagaactgatgcactatatagaacgaatttgggtttttaaagaaatattaaaagttaggtactgtaagtgttctta

SEQ ID NO: 169706 - DNA, 120 bp, Artificial Sequence
  ENSG00000108848_26 (sequence is synthesized)
aaacctgtaaacttcattctgtgggctagtggtgtgggacaaaatattcctaatgaaaggaagtaccaattagttgatttgttggtggcattccccttttgggaaagcaatgtaaggtta

SEQ ID NO: 169707 - DNA, 120 bp, Artificial Sequence
  ENSG00000108848_27 (sequence is synthesized)
tgtctgtgtatgtcattcacacttaggcaagcatacacaggcacatggctttaagaaccacactgatgccttgataattaaaaagaatacaagcattccatgtacacatgttaattagca

SEQ ID NO: 169708 - DNA, 120 bp, Artificial Sequence
  ENSG00000108848_28 (sequence is synthesized)
acactattactagaggtgttggtgtacagttttatctgatttgttctgtttaagactaatttttatagactttctaatgttttaaataatggtgcttcaattttaggtggttatgaataa

SEQ ID NO: 169709 - DNA, 120 bp, Artificial Sequence
  ENSG00000108848_29 (sequence is synthesized)
atttgaattttgcttttaatagcaaagatgtgcagtgaactagaatatatttttacatccctgagagattcatttagtagaaaattccaagtatcctgacaagcactctttagctggcta

SEQ ID NO: 169710 - DNA, 120 bp, Artificial Sequence
  ENSG00000108848_30 (sequence is synthesized)
gctatgggatgatgtagaaaagcattcaagagctagtttttgttaagtcctgtatcaagattaacccagctgtgtcagtttataaatgtatttgtgtatagggtgtgtagtatatatggc

SEQ ID NO: 169711 - DNA, 120 bp, Artificial Sequence
  ENSG00000108848_31 (sequence is synthesized)
aagggttttttccccccacttaagtgattatttttgtgtcacatctaggaaaaccggcagcatgtttctatctatagccagcttcttcgactgtataaaagtattctctccagctacgta

SEQ ID NO: 169712 - DNA, 120 bp, Artificial Sequence
  ENSG00000108848_32 (sequence is synthesized)
tatacacacatacatatatatcatagcaattccttgtggtttataacttgcaaatactgctatcagtttataggtaaagaaacagtgtgttaaatgacttatccagggagggtcctgtgg

SEQ ID NO: 169713 - DNA, 120 bp, Artificial Sequence
  ENSG00000108848_33 (sequence is synthesized)
cttcatgtttatggagttgctaggtctctgcctcatggtccagtgcctgttaagccactgtgttcattctaataggcataatgaattgttaaagaatttactaaaatctcttccaccaaa

SEQ ID NO: 169714 - DNA, 120 bp, Artificial Sequence
  ENSG00000108848_34 (sequence is synthesized)
ctttgaaaaataatgaagccgcccccactttagaggctctgtatgaaaaaatgctgtggagacagagccctcctggctccctagctgatcctggagatgcagcaatagatgaatgggtta

SEQ ID NO: 169715 - DNA, 120 bp, Artificial Sequence
  ENSG00000108848_35 (sequence is synthesized)
tctctgaatttgtaagagataattcacatgaggattaagataaaatgggaagtaaaatctaacaaacacaaagatagctcccaggcactgctttgtgtagtttgacagcattgtggttgt

SEQ ID NO: 169716 - DNA, 120 bp, Artificial Sequence
  ENSG00000108848_36 (sequence is synthesized)
agcagcaaaggacttaaagtgatagtttttaaaccatattctgtccctaagtaataaaaaatctaggaagttactaaaataccagatttgttctgctctgcctcatctagaatcaacgtc

SEQ ID NO: 169717 - DNA, 120 bp, Artificial Sequence
  ENSG00000108848_37 (sequence is synthesized)
taactaacttaaatgaagtataataaatgagttcatatgaaaaggcttcctctatggacacttagatatattgtaactattgaagttacctgggatgtgggggtggtgggaggaggacct

SEQ ID NO: 169718 - DNA, 120 bp, Artificial Sequence
  ENSG00000108848_38 (sequence is synthesized)
gcctccccaggacatctatgactaaggcctggctttagttatggagagagacgtagaagttgaattttacacccaaaattgatgtgactgaagaggaactgattgttgctaaccagctca

SEQ ID NO: 169719 - DNA, 120 bp, Artificial Sequence
  ENSG00000108848_39 (sequence is synthesized)
caagaatccagtattgagaccagttcactagaagaaacaaacatttctgccatgcagaccaaaaagttattagttggtgaatatgtattttctctttggaaggtctttaaggggagcaaa

SEQ ID NO: 169720 - DNA, 120 bp, Artificial Sequence
  ENSG00000108848_40 (sequence is synthesized)
ccagttttaatcaatcagattgcttggtaagtttggaatctgcaatcagttggtcttaaaaaaaaaaaaactttattttggaaatttaaagacatacacaaaagaggaacaatataatta

SEQ ID NO: 169721 - DNA, 120 bp, Artificial Sequence
  ENSG00000108848_41 (sequence is synthesized)
acctctgttaactcatcaccaacaagactcatgaccacttttatacttcatgagtgattgtatttgtatccactgttttctattattttcgagcaagtctcagacacaccatttaatctg

SEQ ID NO: 169722 - DNA, 120 bp, Artificial Sequence
  ENSG00000108848_42 (sequence is synthesized)
taaataattcagcatgtatctctaaaagacaaagacctcttaaataacagttcattagtataaaacaaattgggtaaacttttgttggtcatcaaactatattagcactggtccaatagt

SEQ ID NO: 169723 - DNA, 120 bp, Artificial Sequence
  ENSG00000108848_43 (sequence is synthesized)
ttaattttcattgagcctttcaagaggaccgaccagtctgctgctcaagacatcctctcctctggaatgtagagataatacatatcatgctcctttttgttaaaacgtttttttttcccc

SEQ ID NO: 169724 - DNA, 120 bp, Artificial Sequence
  ENSG00000108848_44 (sequence is synthesized)
ttcaaacacagtccattcatttttcagtttgggttgaaacatccttttcttgatcttgagcttataataacctagtcatattgctcagctcagatatttttactccctctccttaggcat

SEQ ID NO: 169725 - DNA, 120 bp, Artificial Sequence
  ENSG00000108848_45 (sequence is synthesized)
tctggttccttaaatatagttagtgtcacagaggataaataaccaaccttatttctaaggtctgagaacacttggaccacatattggttgagctcagccaccttctgattaaagttttca

SEQ ID NO: 169726 - DNA, 120 bp, Artificial Sequence
  ENSG00000108848_46 (sequence is synthesized)
gacttgtaagaactgaaaatttttatggtggaagttctctgagccctcatccattctgtttttaaaaatgcattgcagatgggctatgtgaatatgtttttaaacatctgatatgtgcat

SEQ ID NO: 169727 - DNA, 120 bp, Artificial Sequence
  ENSG00000108848_47 (sequence is synthesized)
gaaacaaaaaacacttgaagttattatgtatacaattctgtgggatgggacttcatgcaggattggttttcaagtttgatttcctgagggattttttagttgtttgtgaaagaaccccag

SEQ ID NO: 169728 - DNA, 120 bp, Artificial Sequence
  ENSG00000108848_48 (sequence is synthesized)
gtctacttttgaaattttgtattataattgtaatgttgcccatggttaaaaaaaaaaagtgttcagtgatctatgtctcctactactcctatttctctgtttttcctctgcaggagcttg

SEQ ID NO: 169729 - DNA, 120 bp, Artificial Sequence
  ENSG00000108848_49 (sequence is synthesized)
ctgctgttaacagttattcttccaagttgttttctttgtggggagatgggaggtgggaggaaatataaacatatatgtatagatctttcaaaatatatgacggtatacccgtatgttctg

SEQ ID NO: 169730 - DNA, 120 bp, Artificial Sequence
  ENSG00000108848_50 (sequence is synthesized)
agtcttgctgtttttacctggtaatatttagaaacatttattttgagataaaggagagcacttttaagttgaacctgtagttttaaaaagtacatttcaagtaagccaaagcagagaagt

SEQ ID NO: 169731 - DNA, 120 bp, Artificial Sequence
  ENSG00000108848_51 (sequence is synthesized)
aaatgtatttttcattgttgtatcagaattttgaatttactattttaaaaattcaagagttttgtagctgatctatttcttcccctcagccatcccaaataggtcatttgtcaacagatt

SEQ ID NO: 169732 - DNA, 120 bp, Artificial Sequence
  ENSG00000108848_52 (sequence is synthesized)
taagaatgtttagaaacaacaactttgggaaacgggaaacaatttggtataagtgggtgtgccataacctctctcgtagccattcattcccggatacataccctagagaaactcttacac

SEQ ID NO: 169733 - DNA, 120 bp, Artificial Sequence
  ENSG00000108848_53 (sequence is synthesized)
atgcgtaccaggggatggatttaagcatttgtgtgtaataggaagaaaagaagaaaaaacccgggaagatcccaagtgtccaccaacagtgtgttggataaatactgtggtatattccaa

SEQ ID NO: 169734 - DNA, 120 bp, Artificial Sequence
  ENSG00000108848_54 (sequence is synthesized)
cagtggaattccacagaagtgaaactgaactgcagctgtgtatgtgaacatggacaaaactcaacaatagaaggatcaaaaaaagcaagtcacagaagaatacatcactatggttccatt

SEQ ID NO: 169735 - DNA, 120 bp, Artificial Sequence
  ENSG00000108848_55 (sequence is synthesized)
tcaatgaaagtcaaaaacaggctgtcaaatacatgataaaaggaaacgattaagacaaaatttaatgttagccgttttgatggagggagaggtgatcatgagggcacaggggtcttcaga

SEQ ID NO: 169736 - DNA, 120 bp, Artificial Sequence
  ENSG00000108848_56 (sequence is synthesized)
agaactggtgagggtctgtttctgaagcctgtgggcatttccttttttaatctgtatgtttatgtgcttttgtatgtatgatatttcttaataaaatttaaaaagaagaatgggaaaaaa

SEQ ID NO: 169737 - DNA, 120 bp, Artificial Sequence
  ENSG00000108848_57 (sequence is synthesized)
tttttggaagatgacaagtggatggaggagtagcagcaaacgcaacagagcagagcaacctgtaccctaaaagcctgcagaaggggatactaaacagaagcgagtgtttgatcagcagaa

SEQ ID NO: 169738 - DNA, 120 bp, Artificial Sequence
  ENSG00000108848_58 (sequence is synthesized)
ccctggacaggctcaggatttggaggcaccagaaggatacagccagatgtttttccccaggcagaagaaaagaggattcttctctagagaaagtgaacagttcctgagaagtgatctctg

SEQ ID NO: 169739 - DNA, 120 bp, Artificial Sequence
  ENSG00000108848_59 (sequence is synthesized)
tcctctacgggacaacaagacgactcttcctcattgaagctacctgtgcaccggagaagcccataaggcacaaagggaggactttcccacaagtgcagcgtaagtatgcacagatgaaga

SEQ ID NO: 169740 - DNA, 120 bp, Artificial Sequence
  ENSG00000108848_60 (sequence is synthesized)
cgcagcaacgtgcggtgggaccacgagagcgtttgtaaatattatctctgtggtttttgtcctgcggaattgttcacaaatacacgttctgatcttgaagaaaagaggattcttctctag

SEQ ID NO: 169741 - DNA, 120 bp, Artificial Sequence
  ENSG00000108848_61 (sequence is synthesized)
aaggaaaagacagtgtagtcctgcaaaacattttgaggactactgttcgaagatttttggaagaatactgagaacggcataaagtgaagatcgacatttaaaaaatgaggtgaaagaaag

SEQ ID NO: 169742 - DNA, 120 bp, Artificial Sequence
  ENSG00000108848_62 (sequence is synthesized)
cgtaagagtttttaaaaatataaaaattgccctttattttgggatgtctttcccatatttgtttttgctactggggggtcagcaggtgatgattaaaaatagataaagaaaatactagta

SEQ ID NO: 169743 - DNA, 120 bp, Artificial Sequence
  ENSG00000108848_63 (sequence is synthesized)
atacgagtactgcagatttattcttttatcgaaattcaggagtctgaaaatcactaatttacctaatatgattcaacaaatgaaattcttacattggttgaaacatacatacctcaagaa

SEQ ID NO: 169744 - DNA, 120 bp, Artificial Sequence
  ENSG00000108849_0 (sequence is synthesized)
tgaggcaggtgctcgcttggtctagtgcccatttactctggactccggatggctgccgcacgcctctgcctctccctgctgctcctgtccacctgcgtggctctgttactacagccactg

SEQ ID NO: 169745 - DNA, 120 bp, Artificial Sequence
  ENSG00000108849_1 (sequence is synthesized)
acatgctgaccaggcctaggtatgggaaaagacacaaagaggacacgctggccttctcggagtgggggtccccgcatgctgctgtccccagggagctcagcccgctggacttataatgcc

SEQ ID NO: 169746 - DNA, 120 bp, Artificial Sequence
  ENSG00000108849_2 (sequence is synthesized)
accttctgtctcctacgactccatgagcagcgccagcccagctctcccctctgcacccttggctctggccaaagcttgctccctgctcccacacaggctcaataaagcaagtcaaagcca

SEQ ID NO: 169747 - DNA, 120 bp, Artificial Sequence
  ENSG00000108849_3 (sequence is synthesized)
gtcacgctagaagagccgtctgctgactgcacgtgtgtgtgcacactcgtgtgcatggctgtgaactggaatgtgtgactgtgaccttatggctgccgcacgcctctgcctctccctgct

SEQ ID NO: 169748 - DNA, 120 bp, Artificial Sequence
  ENSG00000108849_4 (sequence is synthesized)
tctcggagtgggggtccccgcatgctgctgtccccaggtgagtttgactccctgccctgtctgtccagctccctggagctgaaatgggggtggtgggactgaatcagggcttggaaaggt

SEQ ID NO: 169749 - DNA, 120 bp, Artificial Sequence
  ENSG00000108849_5 (sequence is synthesized)
gagggagaacaggagcccagggccagcctgaggcctcctgagggcacgaggcctaccccctacactgccatgttctgccctgtcctcacagggagctcagcccgctggacttataatgcc

SEQ ID NO: 169750 - DNA, 120 bp, Artificial Sequence
  ENSG00000108849_6 (sequence is synthesized)
ccagtatgcagctgatctccgtagatacatcaacatgctgaccaggcctaggtgtgtgccacagttggggagagagatcccagcccctgggaccctgggcccactccacattcctggcca

SEQ ID NO: 169751 - DNA, 120 bp, Artificial Sequence
  ENSG00000108849_7 (sequence is synthesized)
caccctatccccagccccagccccagccccttccaggcctgctcttgggaaaacagggcatctgtgctcaacaggcctagaccaatgtgccctgggcaagatggtgcctacaggcagata

SEQ ID NO: 169752 - DNA, 120 bp, Artificial Sequence
  ENSG00000108852_0 (sequence is synthesized)
cttcccagtgggactccagcagggcgtcgtggtctgtgcggtgtctcccaaaccactacctggctgcccccgtaccagctgctgggaaagactacttcctccgagttgtgccggcctccg

SEQ ID NO: 169753 - DNA, 120 bp, Artificial Sequence
  ENSG00000108852_1 (sequence is synthesized)
cgttctcctcacctcccctctcctccggacctccgccccctcgcggagaggccttgccgctttaagagccgggctagcgattgacaagcaataaacgctgagcgcccggctgcgctggag

SEQ ID NO: 169754 - DNA, 120 bp, Artificial Sequence
  ENSG00000108852_2 (sequence is synthesized)
ccgcccggagctaggggcttcccggggcgcaggagagacgtttcagagcccttgcctccttcaccatgccggttgccgccaccaactctgaaactgccatgcagcaagtcctggacaact

SEQ ID NO: 169755 - DNA, 120 bp, Artificial Sequence
  ENSG00000108852_3 (sequence is synthesized)
tgggatccctccccagtgccacgggggctgcagagctggacctgatcttccttcgaggcattatggaaagtcccatagtaagatccctggccaaggcccatgagaggctggaggagacga

SEQ ID NO: 169756 - DNA, 120 bp, Artificial Sequence
  ENSG00000108852_4 (sequence is synthesized)
agctggaggccgtgagagacaacaacctggagctggtgcaggagatcctgcgggacctggcgcagctggctgagcagagcagcacagccgccgagctggcccacatcctccaggagcccc

SEQ ID NO: 169757 - DNA, 120 bp, Artificial Sequence
  ENSG00000108852_5 (sequence is synthesized)
acttccagtccctcctggagacgcacgactctgtggcctcaaagacctatgagacaccaccccccagccctggcctggaccctacattcagcaaccagcctgtacctcccgatgctgtgc

SEQ ID NO: 169758 - DNA, 120 bp, Artificial Sequence
  ENSG00000108852_6 (sequence is synthesized)
gcatggtgggcatccgcaagacagccggagaacatctgggtgtaacgttccgcgtggagggcggcgagctggtgatcgcgcgcattctgcatgggggcatggtggctcaacaaggcctgc

SEQ ID NO: 169759 - DNA, 120 bp, Artificial Sequence
  ENSG00000108852_7 (sequence is synthesized)
tgcatgtgggtgacatcatcaaggaggtgaacgggcagccagtgggcagtgacccccgcgcactgcaggagctcctgcgcaatgccagtggcagtgtcatcctcaagatcctgcccagct

SEQ ID NO: 169760 - DNA, 120 bp, Artificial Sequence
  ENSG00000108852_8 (sequence is synthesized)
accaggagccccatctgccccgccaggtatttgtgaaatgtcactttgactatgacccggcccgagacagcctcatcccctgcaaggaagcaggcctgcgcttcaacgccggggacttgc

SEQ ID NO: 169761 - DNA, 120 bp, Artificial Sequence
  ENSG00000108852_9 (sequence is synthesized)
tccagatcgtaaaccaggatgatgccaactggtggcaggcatgccatgtcgaagggggcagtgctgggctcattcccagccagctgctggaggagaagcggaaagcatttgtcaagaggg

SEQ ID NO: 169762 - DNA, 120 bp, Artificial Sequence
  ENSG00000108852_10 (sequence is synthesized)
acctggagctgacaccaaactcagggaccctatgcggcagcctttcaggaaagaaaaagaagcgaatgatgtatttgaccaccaagaatgcagagtttgaccgtcatgagctgctcattt

SEQ ID NO: 169763 - DNA, 120 bp, Artificial Sequence
  ENSG00000108852_11 (sequence is synthesized)
atgaggaggtggcccgcatgcccccgttccgccggaaaaccctggtactgattggggctcagggcgtgggacggcgcagcctgaagaacaagctcatcatgtgggatccagatcgctatg

SEQ ID NO: 169764 - DNA, 120 bp, Artificial Sequence
  ENSG00000108852_12 (sequence is synthesized)
gcaccacggtgccctacacctcccggcggccgaaagactcagagcgggaaggtcagggttacagctttgtgtcccgtggggagatggaggctgacgtccgtgctgggcgctacctggagc

SEQ ID NO: 169765 - DNA, 120 bp, Artificial Sequence
  ENSG00000108852_13 (sequence is synthesized)
atggcgaatacgagggcaacctgtatggcacacgtattgactccatccggggcgtggtcgctgctgggaaggtgtgcgtgctggatgtcaacccccaggcggtgaaggtgctacgaacgg

SEQ ID NO: 169766 - DNA, 120 bp, Artificial Sequence
  ENSG00000108852_14 (sequence is synthesized)
ccgagtttgtcccttacgtggtgttcatcgaggccccagacttcgagaccctgcgggccatgaacagggctgcgctggagagtggaatatccaccaagcagctcacggaggcggacctga

SEQ ID NO: 169767 - DNA, 120 bp, Artificial Sequence
  ENSG00000108852_15 (sequence is synthesized)
gacggacagtggaggagagcagccgcatccagcggggctacgggcactactttgacctctgcctggtcaatagcaacctggagaggaccttccgcgagctccagacagccatggagaagc

SEQ ID NO: 169768 - DNA, 120 bp, Artificial Sequence
  ENSG00000108852_16 (sequence is synthesized)
tacggacagagccccagtgggtgcctgtcagctgggtgtactgagcctgttcacctggtctttggctcactctgtgttgaaacccagaacctgaatccatccccctcctgacctgtgacc

SEQ ID NO: 169769 - DNA, 120 bp, Artificial Sequence
  ENSG00000108852_17 (sequence is synthesized)
ccctgccacaatccttagcccccatatctggctgtccttgggtaacagctcccagcaggccctaagtctggcttcagcacagaggcgtgcactgccagggaggtgggcattcatggggta

SEQ ID NO: 169770 - DNA, 120 bp, Artificial Sequence
  ENSG00000108852_18 (sequence is synthesized)
cataatggtcagtacagagaagagaaaagctgctttgggaccacatggtcagtaggcacactgccccctgccacccctccccagtcaccagttctcctctggactggccacacccacccc

SEQ ID NO: 169771 - DNA, 120 bp, Artificial Sequence
  ENSG00000108852_19 (sequence is synthesized)
attcctggactcctcccacctctcacccctgtgtcggaggaacaggccttgggctgtttccgtgtgaccaggggaatgtgtggcccgctggcagccaggcaggcccgggtggtggtgcca

SEQ ID NO: 169772 - DNA, 120 bp, Artificial Sequence
  ENSG00000108852_20 (sequence is synthesized)
gcctggtgccatcttgaaggctggaggagtcagagtgagagctagtggccacagctgcagagcactgcagctcccagctcctttggaaagggacagggtcgcagggcagatgctgctcgg

SEQ ID NO: 169773 - DNA, 120 bp, Artificial Sequence
  ENSG00000108852_21 (sequence is synthesized)
tccttccctcatccacagcttctcactgccgaagtttctccagatttctccaatgtgtcctgacaggtcagccctgctccccacagggccaggctggcaggggccagtgggctcagccca

SEQ ID NO: 169774 - DNA, 120 bp, Artificial Sequence
  ENSG00000108852_22 (sequence is synthesized)
ggtaggggcaggatggagggctgagccctgtgacaacctgctgttaccaactgaagagccccaagctctccatggcccacagcaggcacaggtctgagctctatgtccttgaccttggtc

SEQ ID NO: 169775 - DNA, 120 bp, Artificial Sequence
  ENSG00000108852_23 (sequence is synthesized)
catttggttttctgtctagccaggtccaggtagcccacttgcatcagggctgctgggttggaggggctaaggaggagtgcagaggggaccttgggagcctgggcttgaaggacagttgcc

SEQ ID NO: 169776 - DNA, 120 bp, Artificial Sequence
  ENSG00000108852_24 (sequence is synthesized)
ctccaggaggttcctcacacacaactccagaggcgccatttacactgtagtctgtacaacctgtggttccacgtgcatgttcggcacctgtctgtgcctctggcaccaggttgtgtgtat

SEQ ID NO: 169777 - DNA, 120 bp, Artificial Sequence
  ENSG00000108852_25 (sequence is synthesized)
gtgtgtgcgtgtgcacgtgcgtgtgtgtgtgtgtgtgtcaggtttaatttggggaggaagcaaagggttttgttttggaggtcactctttggggcccctttctgggggttccccatcagc

SEQ ID NO: 169778 - DNA, 120 bp, Artificial Sequence
  ENSG00000108852_26 (sequence is synthesized)
cctcatttcttataataccctgatcccagactccaaagccctggtcctttcctgatgtctcctcccttgtcttattgtccccctaccctaaatgcccccctgccataacttggggagggc

SEQ ID NO: 169779 - DNA, 120 bp, Artificial Sequence
  ENSG00000108852_27 (sequence is synthesized)
agttttgtaaaataggagactccctttaagaaagaatgctgtcctagatgtacttgggcatctcatccttcattattctctgcattccttccggggggagcctgtcctcagaggggacaa

SEQ ID NO: 169780 - DNA, 120 bp, Artificial Sequence
  ENSG00000108852_28 (sequence is synthesized)
cctgtgacaccctgagtccaaacccttgtgcctcccagttcttccaagtgtctaactagtcttcgctgcagcgtcagccaaagctggcccctgaaccactgtgtgcccatttcctaggga

SEQ ID NO: 169781 - DNA, 120 bp, Artificial Sequence
  ENSG00000108852_29 (sequence is synthesized)
aggggaaggagaataaacagaatatttattacaaatgttagaatatatttcttatactaggaatctcatttgcatttgcatagactatacacatggggtggaaaggccaggcctgccccc

SEQ ID NO: 169782 - DNA, 120 bp, Artificial Sequence
  ENSG00000108852_30 (sequence is synthesized)
atctcgttggtgtggctctgcgtatactacacactcattctcctgctcctcttttcccttagtcagtgtcctttcatcctgattcagctctgccttgcatcaccctcagcctaagggagt

SEQ ID NO: 169783 - DNA, 120 bp, Artificial Sequence
  ENSG00000108852_31 (sequence is synthesized)
gggaaggaaatggggtgttttcttgctgacctgaggctatagggtcacttgccatttcctaccttctctgggggatttgagggtagaggcaggggaagatctgttgttgcagctgcttct

SEQ ID NO: 169784 - DNA, 120 bp, Artificial Sequence
  ENSG00000108852_32 (sequence is synthesized)
gcccccttgatccaaatgaccatcatctctgatggagatgggttgggtacctggccttcatggcaccttcactgctagggatgctcaaggggcaggcctggggcccttccctcctgtctc

SEQ ID NO: 169785 - DNA, 120 bp, Artificial Sequence
  ENSG00000108852_33 (sequence is synthesized)
ttctcggtctttcctctctgagcagcctcctacctcccctgcctgagccctcactccacagccctcccaggtacctagcagaggctgtcagtccttggctcacctggaacagggctgggg

SEQ ID NO: 169786 - DNA, 120 bp, Artificial Sequence
  ENSG00000108852_34 (sequence is synthesized)
ctgggttggaacaggtgtgtgcccccaccacagctctatgactctgttctccctccctgccattgtggactcttgtatttgagggacctcaagagagtgaggaccctaccatccactgtc

SEQ ID NO: 169787 - DNA, 120 bp, Artificial Sequence
  ENSG00000108852_35 (sequence is synthesized)
catattcagtcccagccccagtgcgcttcctctgttccctccctcagccatccaattcttgagttttctcactgattggttttctttctttttccttggattaaatgtgaaagcaaaggc

SEQ ID NO: 169788 - DNA, 120 bp, Artificial Sequence
  ENSG00000108852_36 (sequence is synthesized)
ttctttttctcaatatggaagcaggataacgaggaaaagtgaggcacgcctggaactagaacgccggtctaagccaagatgggtgggcggagtaatcaagccggtctcattaggcacttt

SEQ ID NO: 169789 - DNA, 120 bp, Artificial Sequence
  ENSG00000108852_37 (sequence is synthesized)
ccggcccccgggccagctcctatcccaagacctccgccttcttttcgtcctgacacggcacttaggaccctattcactgggtttaaactccacaggcccctttcacccaggcccgttccc

SEQ ID NO: 169790 - DNA, 120 bp, Artificial Sequence
  ENSG00000108852_38 (sequence is synthesized)
tccctgtccacccgcccccgcccctgggccctctttctggggtgctggttgggagaaccaagccccgctgcccattgacactggtccccgcccctgcggtaggggctccaaagtggcttc

SEQ ID NO: 169791 - DNA, 120 bp, Artificial Sequence
  ENSG00000108852_39 (sequence is synthesized)
ggcggcgtgtaggacgctccgggagtccccgggtctgggggccgccatggcaggcagcccaggcagcggggtctccttggagggtatatccctggagtcttctgaggaagcggagctcca

SEQ ID NO: 169792 - DNA, 120 bp, Artificial Sequence
  ENSG00000108852_40 (sequence is synthesized)
ttgttgaccgacgaatgcagtggggcagccgctaagaataatgagttgggctccacctccccaggtgggccagaatctgagatcccagactgtcctgaggatcctaaatggaatggaaga

SEQ ID NO: 169793 - DNA, 120 bp, Artificial Sequence
  ENSG00000108852_41 (sequence is synthesized)
gacctggtgccactcctcagggaatgtctgagtggaggctgcagtaccctgatggtggcctcttgggcacaagatctcagaggaatggggtcaccggagcggagctgagtccttcccttc

SEQ ID NO: 169794 - DNA, 120 bp, Artificial Sequence
  ENSG00000108852_42 (sequence is synthesized)
tgcccacacttttccctgtgtgcaaatgtgccctcatttttcctttctggggaactgagttccaagatgcctgacttgcttcctgggcatcatccccttcattaagaggaagaactcatg

SEQ ID NO: 169795 - DNA, 120 bp, Artificial Sequence
  ENSG00000108852_43 (sequence is synthesized)
ataaacgctgagcgcccggctgcgctggagccgcccggagctaggggcttcccggggcgcagggaaggaggacttctggagtcccttctctgaccctgtgagggagagcagcgccagcca

SEQ ID NO: 169796 - DNA, 120 bp, Artificial Sequence
  ENSG00000108852_44 (sequence is synthesized)
ctggggtgctggttgggagaaccaagccccgctgcccattgacactggtccccgcccctgcggtaggggctccaaagtggcttcaggcaccaaggtggagagacgtttcagagcccttgc

SEQ ID NO: 169797 - DNA, 120 bp, Artificial Sequence
  ENSG00000108852_45 (sequence is synthesized)
tgctagggctggggtgagggagcaggaggtgggtggactggggcatgctgctgttggatgggccagcaggaagttggatctgggatgggaagagacccgggacactgccccattgtccct

SEQ ID NO: 169798 - DNA, 120 bp, Artificial Sequence
  ENSG00000108852_46 (sequence is synthesized)
aaagtggcttcaggcaccaaggtggtgagctgtgaggggccccggtatctgcgcggcctccccgggggctgtgcgggttgggggtacttagaagcccggcattacgagagacgtttcaga

SEQ ID NO: 169799 - DNA, 120 bp, Artificial Sequence
  ENSG00000108852_47 (sequence is synthesized)
agcacatgcccaggaaggcaaagggaagaagggtggggggtaaccccctgccctctcctgggagaacgagggagccactcctagcctggggaggccctggaatggaaactggggctgtag

SEQ ID NO: 169800 - DNA, 120 bp, Artificial Sequence
  ENSG00000108852_48 (sequence is synthesized)
actccatgcttggttctgcccagagcacttggtctccttgtgccagctctgagctaagaaagggagagaggagagagagccagccagaggggccgtggagaggagagacgtttcagagcc

SEQ ID NO: 169801 - DNA, 120 bp, Artificial Sequence
  ENSG00000108854_0 (sequence is synthesized)
agacaagagggcgggtggaggaggaagcggccgagcccagagttctgctccggcgcccccgagcaccgcccgcttcagccgaccagccccgtcggctactgggcctcgccgagacgagag

SEQ ID NO: 169802 - DNA, 80 bp, Artificial Sequence
  ENSG00000108854_1 (sequence is synthesized)
gcgggcggaggcggcgcgggcggccgcggctgccgctttgttgtgcggcccgggccgaggaaggagaagtgggaggaggg

SEQ ID NO: 169803 - DNA, 120 bp, Artificial Sequence
  ENSG00000108854_2 (sequence is synthesized)
agaagtgggaggaggggggagctcggcgtcccgctccctccgcggctcatggcgacgactctcggcacatccgggaccctccggccgtggcggccgaggcgccggctgctcgggccccag

SEQ ID NO: 169804 - DNA, 120 bp, Artificial Sequence
  ENSG00000108854_3 (sequence is synthesized)
cgcgcctcgccgtcgcccccgtgccgcccgccgcccccgccgcccccgccgccggggacatgtctaaccccggaggccggaggaacgggcccgtcaagctgcgcctgacagtactctgtg

SEQ ID NO: 169805 - DNA, 120 bp, Artificial Sequence
  ENSG00000108854_4 (sequence is synthesized)
actctgtgcaaaaaacctggtgaaaaaggattttttccgacttcctgatccatttgctaaggtggtggttgatggatctgggcaatgccattctacagatactgtgaagaatacgcttga

SEQ ID NO: 169806 - DNA, 120 bp, Artificial Sequence
  ENSG00000108854_5 (sequence is synthesized)
tccaaagtggaatcagcattatgacctgtatattggaaagtctgattcagttacgatcagtgtatggaatcacaagaagatccataagaaacaaggtgctggatttctcggttgtgttcg

SEQ ID NO: 169807 - DNA, 120 bp, Artificial Sequence
  ENSG00000108854_6 (sequence is synthesized)
tcttctttccaatgccatcaaccgcctcaaagacactggttatcagaggttggatttatgcaaactcgggccaaatgacaatgatacagttagaggacagatagtagtaagtcttcagtc

SEQ ID NO: 169808 - DNA, 120 bp, Artificial Sequence
  ENSG00000108854_7 (sequence is synthesized)
cagagaccgaataggcacaggaggacaagttgtggactgcagtcgtttatttgataacgatttaccagacggctgggaagaaaggagaaccgcctctggaagaatccagtatctaaacca

SEQ ID NO: 169809 - DNA, 120 bp, Artificial Sequence
  ENSG00000108854_8 (sequence is synthesized)
tataacaagaactacgcaatgggagcgcccaacacgaccggcatccgaatattctagccctggcagacctcttagctgctttgttgatgagaacactccaattagtggaacaaatggtgc

SEQ ID NO: 169810 - DNA, 120 bp, Artificial Sequence
  ENSG00000108854_9 (sequence is synthesized)
aacatgtggacagtcttcagatcccaggctggcagagaggagagtcaggtcacaacgacatagaaattacatgagcagaacacatttacatactcctccagacctaccagaaggctatga

SEQ ID NO: 169811 - DNA, 120 bp, Artificial Sequence
  ENSG00000108854_10 (sequence is synthesized)
acagaggacaacgcaacaaggccaggtgtatttcttacatacacagactggtgtgagcacatggcatgatccaagagtgcccagggatcttagcaacatcaattgtgaagagcttggtcc

SEQ ID NO: 169812 - DNA, 120 bp, Artificial Sequence
  ENSG00000108854_11 (sequence is synthesized)
attgcctcctggatgggagatccgtaatacggcaacaggcagagtttatttcgttgaccataacaacagaacaacacaatttacagatcctcggctgtctgctaacttgcatttagtttt

SEQ ID NO: 169813 - DNA, 120 bp, Artificial Sequence
  ENSG00000108854_12 (sequence is synthesized)
aaatcggcagaaccaattgaaagaccaacagcaacagcaagtggtatcgttatgtcctgatgacacagaatgcctgacagtcccaaggtacaagcgagacctggttcagaaactaaaaat

SEQ ID NO: 169814 - DNA, 120 bp, Artificial Sequence
  ENSG00000108854_13 (sequence is synthesized)
tttgcggcaagaactttcccaacaacagcctcaggcaggtcattgccgcattgaggtttccagggaagagatttttgaggaatcatatcgacaggtcatgaaaatgagaccaaaagatct

SEQ ID NO: 169815 - DNA, 120 bp, Artificial Sequence
  ENSG00000108854_14 (sequence is synthesized)
ctggaagcgattaatgataaaatttcgtggagaagaaggccttgactatggaggcgttgccagggaatggttgtatctcttgtcacatgaaatgttgaatccatactatggcctcttcca

SEQ ID NO: 169816 - DNA, 120 bp, Artificial Sequence
  ENSG00000108854_15 (sequence is synthesized)
gtattcaagagatgatatttatacattgcagatcaatcctgattctgcagttaatccggaacatttatcctatttccactttgttggacgaataatgggaatggctgtgtttcatggaca

SEQ ID NO: 169817 - DNA, 120 bp, Artificial Sequence
  ENSG00000108854_16 (sequence is synthesized)
ttatattgatggtggtttcacattgcctttttataagcaattgcttgggaagtcaattaccttggatgacatggagttagtagatccggatcttcacaacagtttagtgtggatacttga

SEQ ID NO: 169818 - DNA, 120 bp, Artificial Sequence
  ENSG00000108854_17 (sequence is synthesized)
gaatgatattacaggtgttttggaccataccttctgtgttgaacataatgcatatggtgaaattattcagcatgaacttaaaccaaatggcaaaagtatccctgttaatgaagaaaataa

SEQ ID NO: 169819 - DNA, 120 bp, Artificial Sequence
  ENSG00000108854_18 (sequence is synthesized)
aaaagaatatgtcaggctctatgtgaactggagatttttacgaggcattgaggctcaattcttggctctgcagaaaggatttaatgaagtaattccacaacatctgctgaagacatttga

SEQ ID NO: 169820 - DNA, 120 bp, Artificial Sequence
  ENSG00000108854_19 (sequence is synthesized)
tgagaaggagttagagctcattatttgtggacttggaaagatagatgttaatgactggaaggtaaacacccggttaaaacactgtacaccagacagcaacattgtcaaatggttctggaa

SEQ ID NO: 169821 - DNA, 120 bp, Artificial Sequence
  ENSG00000108854_20 (sequence is synthesized)
agctgtggagttttttgatgaagagcgacgagcaagattgcttcagtttgtgacaggatcctctcgagtgcctctgcagggcttcaaagcattgcaaggtgctgcaggcccgagactctt

SEQ ID NO: 169822 - DNA, 120 bp, Artificial Sequence
  ENSG00000108854_21 (sequence is synthesized)
taccatacaccagattgatgcctgcactaacaacctgccgaaagcccacacttgcttcaatcgaatagacattccaccctatgaaagctatgaaaagctatatgaaaagctgctaacagc

SEQ ID NO: 169823 - DNA, 120 bp, Artificial Sequence
  ENSG00000108854_22 (sequence is synthesized)
cattgaagaaacatgtggatttgctgtggaatgacaagcttcaaggatttacccaggactctatttatacaaccctgactgacagcctcctttcagcagagtttcaaagaatatgctgaa

SEQ ID NO: 169824 - DNA, 120 bp, Artificial Sequence
  ENSG00000108854_23 (sequence is synthesized)
atacaggaaaacactccccccccccccctttttttttttttttttacattttaggacactgtgaggggaaaggacaattttgaaattccttttcaaggaaaaaaaaggtctttatgcttt

SEQ ID NO: 169825 - DNA, 120 bp, Artificial Sequence
  ENSG00000108854_24 (sequence is synthesized)
gccatgaggccacattcagctgctatttaaacttaatatcttgaacctaaagaatgctgacttttcctacatttccagagttaggcagtattctacacttaaagactactactattttta

SEQ ID NO: 169826 - DNA, 120 bp, Artificial Sequence
  ENSG00000108854_25 (sequence is synthesized)
taaaaggtaatctattcaaatttcttcacagatttcaagtctctcaaacatcaagacaacttcagcagtcggtacaagtcacatttcattttgattgaatacatgatcttgaacagctcc

SEQ ID NO: 169827 - DNA, 120 bp, Artificial Sequence
  ENSG00000108854_26 (sequence is synthesized)
tgtacttgctctttgtaaaaaaaaataaaattattttgaattattctacctttgtaaacaattggctaaaagaatcatctttaagaaattaagccatttacatgtttgtgtttttctata

SEQ ID NO: 169828 - DNA, 120 bp, Artificial Sequence
  ENSG00000108854_27 (sequence is synthesized)
gcagagcattatattttgcattatatgtttcaacctagtctaagtgggtcttttttacatttttcaagaacggatttcctggaatacagcgatataattttggttgtcaaattcctaatg

SEQ ID NO: 169829 - DNA, 120 bp, Artificial Sequence
  ENSG00000108854_28 (sequence is synthesized)
caaccatttagtctaaacttagtcatttatttgtgacaataagatgtgttcaggggctccctgtttttaagagactcttttaaaaaaaaaaaaacctaatgtttttatcttgagtcaata

SEQ ID NO: 169830 - DNA, 120 bp, Artificial Sequence
  ENSG00000108854_29 (sequence is synthesized)
tgattaggtattttggatttacttttaatcttaaaatactgcatttttatagcttctcagagcatgtggatgggatgggattttcgttattttgctgggtcagcttatctttaatatatg

SEQ ID NO: 169831 - DNA, 120 bp, Artificial Sequence
  ENSG00000108854_30 (sequence is synthesized)
gactattcctataaaccaaagtctctgacaagtgcacctaatttatattgtattttaactacagtgtaagtttccattaacaaaaccatcctaaagcgttaactgctcataattttaatc

SEQ ID NO: 169832 - DNA, 120 bp, Artificial Sequence
  ENSG00000108854_31 (sequence is synthesized)
agctacagttatgaaaaaggaagaattttgctctaaagattattaataagcttagaaaatcctgcttttacctaacagaatgaagtggggttgaggggcggtagtatgaacagtgattct

SEQ ID NO: 169833 - DNA, 120 bp, Artificial Sequence
  ENSG00000108854_32 (sequence is synthesized)
aactctatggcgtaaattactttgaagagttcattttggaagtaagggaatcccgcttcccttggtgttgaagatctgcatctgattttgaaacgtccagatttagctttcaaggtgcgt

SEQ ID NO: 169834 - DNA, 120 bp, Artificial Sequence
  ENSG00000108854_33 (sequence is synthesized)
gcatgttgaatgatccagaagcaacgaaaactctggggtgagggattgaaaaaatctgaaatcacagttggatttttaaattcaaccatcaaaaatatgtactatcagtttttttttaca

SEQ ID NO: 169835 - DNA, 120 bp, Artificial Sequence
  ENSG00000108854_34 (sequence is synthesized)
ttgatgtgaaataagcaaattttcatgataattaagctgcaaaatttaaagttatcaagtaaataggtcctctgtgttctgtttcatgtgatggagtgggtttcagtctgtgttcttgga

SEQ ID NO: 169836 - DNA, 120 bp, Artificial Sequence
  ENSG00000108854_35 (sequence is synthesized)
gccaaagggttcctcaggggtgcctcaggagtaatggtttaagagaagaggggcaatgagagggagcgagggggaaggcctagttggtatttgagcaggggccttaggctccatatcccc

SEQ ID NO: 169837 - DNA, 120 bp, Artificial Sequence
  ENSG00000108854_36 (sequence is synthesized)
accccctttacccagaacagcccatttttcttatgtatattggaatttcaagtaagctttcatggggtgcagtggggcggggaggaatggatgggataaaaaaagtggagattttgctgc

SEQ ID NO: 169838 - DNA, 120 bp, Artificial Sequence
  ENSG00000108854_37 (sequence is synthesized)
tttaaaaaagttgagaactacttgtgtagtttttaagtattttaatgtatttcatttggccaaattcaactgccacaagcaagctagtcatagttgtaactgtgcagtggtaatatgctt

SEQ ID NO: 169839 - DNA, 120 bp, Artificial Sequence
  ENSG00000108854_38 (sequence is synthesized)
atgcctacctttttcctctcaaacaatttgttttttttacattgcattctgagtactgaagagcatcttgaaatgtatggaagtggtttctatgctatttgataatcagtaatgttcagc

SEQ ID NO: 169840 - DNA, 120 bp, Artificial Sequence
  ENSG00000108854_39 (sequence is synthesized)
tgtcatgatagtactttactggttgcagacccatctctcttttatattaaagcactagtgcagtttataattgtgcctacttttaaaatctttcagtaaaaaagtacataatgaatacag

SEQ ID NO: 169841 - DNA, 120 bp, Artificial Sequence
  ENSG00000108854_40 (sequence is synthesized)
aaatcataactgacagggatacagtaataatgaaatgctactatcacttattttaatatacaatataaagcaggcaaataccattgctttttgagtgcctttttaactttatactaatga

SEQ ID NO: 169842 - DNA, 120 bp, Artificial Sequence
  ENSG00000108854_41 (sequence is synthesized)
gcctgggcgacaagagtgagactccgtccccgcccaaaaaaaaaaaaaaaagaaattactctccataacagtctatgttatcaccaacatatataaaaacatgatttagatttccatttc

SEQ ID NO: 169843 - DNA, 120 bp, Artificial Sequence
  ENSG00000108854_42 (sequence is synthesized)
tcaccaacatatataaaaacatgatttagatttccatttcaaagttacattacccgattacttccaaataggtgctaagcaaaaacccccaatgtattattgaaccatggacttgcacct

SEQ ID NO: 169844 - DNA, 120 bp, Artificial Sequence
  ENSG00000108854_43 (sequence is synthesized)
catgtttaatgtgaatatttatttccatgtccctcttaactggttttttcttgtcttccctctagctgtattgttatttcagatatgtgatatctgttttcatactcttgcctttccatc

SEQ ID NO: 169845 - DNA, 120 bp, Artificial Sequence
  ENSG00000108854_44 (sequence is synthesized)
atgaatgcttagttatgaacagagattcctttgtagagctcataggcagtacagagaggtaagtcttgcctcagagggccttgtatcttggtgtagtttttaaatagtgcatagtgtata

SEQ ID NO: 169846 - DNA, 120 bp, Artificial Sequence
  ENSG00000108854_45 (sequence is synthesized)
gtgtatagtgtacattttgttttgcacatagtttgttgccccgaatgggttttttaccaagcctttttttctttcatgtatttacagtccggagcacaagattctcttctttcaaataca

SEQ ID NO: 169847 - DNA, 120 bp, Artificial Sequence
  ENSG00000108854_46 (sequence is synthesized)
atgtaattcgctttactttacaacactaaatctgggctttgaatttccagtgcattggactgattggattgttgggagttagaggctgttccaaccatccttagtttgggagagtggctc

SEQ ID NO: 169848 - DNA, 120 bp, Artificial Sequence
  ENSG00000108854_47 (sequence is synthesized)
cttctgcttgttttctaagcgtacagtcaacgggtgccatttgtggtatttaacatgttaggatgattgttccaaatgctgagttgttttatttctagatgtaattagttcactttatgt

SEQ ID NO: 169849 - DNA, 120 bp, Artificial Sequence
  ENSG00000108854_48 (sequence is synthesized)
aatattcttctctcagactgactttaaaaacaaagttttatcattttcattgtatttgtatttattacagagtgttttagctttgatattctttgtattttcattcatttgttacatgag

SEQ ID NO: 169850 - DNA, 120 bp, Artificial Sequence
  ENSG00000108854_49 (sequence is synthesized)
ctttatcagtaacatctgtataaatggtttttaaaaattaactatgtatgtgcccatgccgaagtcgagcaataaaatcaatgctgtttgcactgtcacagcatcaacgtttttaaagaa

SEQ ID NO: 169851 - DNA, 120 bp, Artificial Sequence
  ENSG00000108854_50 (sequence is synthesized)
ggacatgccacccccgttttaggagaacttttatttggtttgtaaaggaattggaatcacggcgttatcctaccttcaccatttacccctgataaattgtccacgtttgtattcgggaat

SEQ ID NO: 169852 - DNA, 120 bp, Artificial Sequence
  ENSG00000108854_51 (sequence is synthesized)
gcatatacatatatacatgcactatatatgtatcctcaaatatatatttaaaaataatatatatatttgagtatgttggtagggcttcaaacacaacttcttgtgcatgtctgaaacatt

SEQ ID NO: 169853 - DNA, 120 bp, Artificial Sequence
  ENSG00000108854_52 (sequence is synthesized)
ggtaaaaattcctgatctaaatttattttgtagacttaaaaaaaaaagaaacattttaaatatgtgaaacttacagccaaatcagggctgatgcttcatttccagctaatttaaaagtat

SEQ ID NO: 169854 - DNA, 120 bp, Artificial Sequence
  ENSG00000108854_53 (sequence is synthesized)
taagaaatgattgatatccagaatggcaaaaataaaggtatcaggatgtatatgccttttaaaatttcttagtatccttttctggttttggtggatttgtggatgaaatgcttttattta

SEQ ID NO: 169855 - DNA, 120 bp, Artificial Sequence
  ENSG00000108854_54 (sequence is synthesized)
tatgacctgcagtgaagtgaaatctgcaagagtcctgctcgctcaaggcctgcatacaggaaagaagcaggggaaaagcgttacaaacagcttttgttctacagcattttaaaatataac

SEQ ID NO: 169856 - DNA, 120 bp, Artificial Sequence
  ENSG00000108854_55 (sequence is synthesized)
cagtttatgtggactatgagaaataaactttgtagctggtttattgctgccaaaaaatgtcaagccaagtatatgttctactaaggcttggaaaatgatagagctagacttgctttataa

SEQ ID NO: 169857 - DNA, 120 bp, Artificial Sequence
  ENSG00000108854_56 (sequence is synthesized)
ccgccgcccccgccgcccccgccgccggggacatgtctaaccccggaggccggaggaacgggcccgtcaagctgcgcctgacaggacttcctgatccatttgctaaggtggtggttgatg

SEQ ID NO: 169858 - DNA, 120 bp, Artificial Sequence
  ENSG00000108861_0 (sequence is synthesized)
gccgctctccgcctcgcttgctcctgccgggcgtgcagggccccgccgccgccatgtcgggctcgttcgagctctcggtgcaggatctcaacgacctgctctcggacggcagcggctgct

SEQ ID NO: 169859 - DNA, 120 bp, Artificial Sequence
  ENSG00000108861_1 (sequence is synthesized)
acagcctcccgagccagccctgcaacgaggtcaccccgcggatctacgtgggcaacgcgtctgtggctcaggacatccccaagctgcagaaactaggcatcacccatgtgctgaacgcgg

SEQ ID NO: 169860 - DNA, 120 bp, Artificial Sequence
  ENSG00000108861_2 (sequence is synthesized)
ctgagggcaggtccttcatgcacgtcaacaccaatgccaacttctacaaggactccggcatcacatacctgggcatcaaggccaacgacacacaggagttcaacctcagcgcttactttg

SEQ ID NO: 169861 - DNA, 120 bp, Artificial Sequence
  ENSG00000108861_3 (sequence is synthesized)
aaagggctgccgacttcattgaccaggctttggctcaaaagaatggccgggtgctcgtccactgccgggaaggttatagccgctccccaacgctagttatcgcctacctcatgatgcggc

SEQ ID NO: 169862 - DNA, 120 bp, Artificial Sequence
  ENSG00000108861_4 (sequence is synthesized)
agaagatggacgtcaagtctgccctgagcatcgtgaggcagaaccgtgagatcggccccaacgatggcttcctggcccagctctgccagctcaatgacagactagccaaggaggggaagt

SEQ ID NO: 169863 - DNA, 120 bp, Artificial Sequence
  ENSG00000108861_5 (sequence is synthesized)
tgaaaccctagggcacccccaccacctctgctcgagaggtccgtgggggaggccgtgggcaaaggtgtcccgagctgccatgtttaggaaacacactgtaccctgctcccagcatcacaa

SEQ ID NO: 169864 - DNA, 120 bp, Artificial Sequence
  ENSG00000108861_6 (sequence is synthesized)
ggcacttgtctacaagtgtgtcccaacacagtcctgggccactttccccaccctggggagcacataaagaagcttgccaaggggggcgtccttgctccccagttgtcctgtttctgtaac

SEQ ID NO: 169865 - DNA, 120 bp, Artificial Sequence
  ENSG00000108861_7 (sequence is synthesized)
ttatgatgtcttttccctgagatgggggctcagagggggaaggcctgtggcctgcatgcttcccgatggcccacggcaggaggtgtgtggaagtgtaaggcctaagatgctcacagaggt

SEQ ID NO: 169866 - DNA, 120 bp, Artificial Sequence
  ENSG00000108861_8 (sequence is synthesized)
ccctcatgacctcccttccccaactcccgaatcctctcttgagtgtggacctcaacaccttgagccctagtaaaggaactatgcaaatgcaggccactctccccaccacgtctgtgccct

SEQ ID NO: 169867 - DNA, 120 bp, Artificial Sequence
  ENSG00000108861_9 (sequence is synthesized)
gcactgtccccacagccttccacaccctgtgcataggcagccctctcacgtcttgaggtccgaagctggggtgggggtgtccgtcagttattagtggatggagattcccacagcaaggct

SEQ ID NO: 169868 - DNA, 120 bp, Artificial Sequence
  ENSG00000108861_10 (sequence is synthesized)
gcatttgaatgatttccttaggatgaatggtccctacacaaagaggccttgtgggcaaacctggagaaccctcctaaatccatagagttttcaaaatgtgaatctttggaagccttgagt

SEQ ID NO: 169869 - DNA, 120 bp, Artificial Sequence
  ENSG00000108861_11 (sequence is synthesized)
tcagaatctgctgctctggaatatttcccttcgatcttatctcagtcacttcgtttttgagaagagtgatgccttgggcatgcttttttttttttcttttttagaaaacagggagttgaa

SEQ ID NO: 169870 - DNA, 120 bp, Artificial Sequence
  ENSG00000108861_12 (sequence is synthesized)
gtccaacctatttaaaaaccccaccatttggagaattacaagggttttgtcctgaattgtagtgttggcaagcccaagccactcgtgctaactgctttttgtctcggttgctattccaag

SEQ ID NO: 169871 - DNA, 120 bp, Artificial Sequence
  ENSG00000108861_13 (sequence is synthesized)
aacagaaggaggaagttggccaattacagcgtgtgtgcatggatgtgtgtggggggcgtgcctctcagaaacgcggccagaagacaagcagggaagtgaaaggtcccaggcacacaccct

SEQ ID NO: 169872 - DNA, 120 bp, Artificial Sequence
  ENSG00000108861_14 (sequence is synthesized)
gcccattgcaggtggctcttacagctctctggtgccagcacgggatccctgaagtgactcagccaggcagacatgagacatggcggagtgtccaaatggatcctttattggtggtagagc

SEQ ID NO: 169873 - DNA, 120 bp, Artificial Sequence
  ENSG00000108861_15 (sequence is synthesized)
aaaaaaacccaaacacgataaacctttcaaaagactttctaaggatgatattggaatgcaccagccctcacatgtgtatgcacatttgccagaatataagagttttgttttaaatacagt

SEQ ID NO: 169874 - DNA, 120 bp, Artificial Sequence
  ENSG00000108861_16 (sequence is synthesized)
cttgttaggattttacgttattgttattatggaaagtgattgtgatgctatttatcttcagggtcactctgggcaaagagaaggtcctcagccatgcccccagcaccttgcacataggtg

SEQ ID NO: 169875 - DNA, 120 bp, Artificial Sequence
  ENSG00000108861_17 (sequence is synthesized)
agaaagtaaacactttttgagcaccaaatatatatagggcattgttctggtgggtgtgtcacgctcccagaagactgaattcatggtaggatcactcgcaaggccttgtgaaggagtctt

SEQ ID NO: 169876 - DNA, 120 bp, Artificial Sequence
  ENSG00000108861_18 (sequence is synthesized)
acctaaaacgaaagaaatatcagggacttttgttgactatttacaactcagttttacatttaaattcaggcagtgttaatatgccaaggtagggaatgtgcctttttcagagttggccag

SEQ ID NO: 169877 - DNA, 120 bp, Artificial Sequence
  ENSG00000108861_19 (sequence is synthesized)
gagctcctggctgggacacggagaggcaggtgtggcgtaaggcctcactcccggctgggaaggtctctgatcacacagaagcagccctgcccagcctggtcatttgctgtccgcttttct

SEQ ID NO: 169878 - DNA, 120 bp, Artificial Sequence
  ENSG00000108861_20 (sequence is synthesized)
ctgtgaccacagcagccctgaacaaccagtatgtgtcttcttctccagatagtgaaaaaggtgtccagataaacccacctaagtgaaatggccatcctctaaactgggtacctcactgca

SEQ ID NO: 169879 - DNA, 120 bp, Artificial Sequence
  ENSG00000108861_21 (sequence is synthesized)
cagcttctaggtagccttccaacttaatctaacttgagcctcacagtaaccctgtaaagttagtagagcttgttcttgtattgtgaccttttttaaaaaaaaggaactgaggttcagaat

SEQ ID NO: 169880 - DNA, 120 bp, Artificial Sequence
  ENSG00000108861_22 (sequence is synthesized)
gattaagggcctggcccccagggttgtccagctccataaggtggagctgggcaagattttgggtttgctgctccctgaagctggattctttcatacgatactctttctcaagaagggggc

SEQ ID NO: 169881 - DNA, 120 bp, Artificial Sequence
  ENSG00000108861_23 (sequence is synthesized)
tccctgggatctccaggtgtactgcacttaccctcaatccagccccggagaagcaagtgaaaagggtgggtccctcataggctagaatgtgcagctctttctccaggtgggatgtagcac

SEQ ID NO: 169882 - DNA, 120 bp, Artificial Sequence
  ENSG00000108861_24 (sequence is synthesized)
cccgaagtagagctttctgctctgctcctggaaaaggctagggagctggggctggggctcccctcccatgaccaggcagtggtcaccccatgggacaggcacagctacttacgcgaacac

SEQ ID NO: 169883 - DNA, 120 bp, Artificial Sequence
  ENSG00000108861_25 (sequence is synthesized)
agcaggttggtgtggctggctaactaggacctctcgaaagtctctgtgggggcatgagggagaaaaggccattgggagaattactgcctttactttgggactacttttatgctgataact

SEQ ID NO: 169884 - DNA, 120 bp, Artificial Sequence
  ENSG00000108861_26 (sequence is synthesized)
tgggatttcttgatagtccttcacccctgaaaccccgtatttacttaacaagatttagctcttagttcttcaagtaaaattaaagtctcttgtgtaagagccaacacatgcccagctgcg

SEQ ID NO: 169885 - DNA, 120 bp, Artificial Sequence
  ENSG00000108861_27 (sequence is synthesized)
gatgggagctgttcctggacagccttctactgcctgggaagtgatggaacaggaactcagggtgcccttaccccctccccagacctgttccctttctttgactgacagagcaccatccag

SEQ ID NO: 169886 - DNA, 120 bp, Artificial Sequence
  ENSG00000108861_28 (sequence is synthesized)
gcaaaattagagcgccaaatggttttcttctcaatcttaaagcagtatacctttccacaggctcgtctgtgtccctgccactctgagttatccagaaaccaccacctacaaatgagggga

SEQ ID NO: 169887 - DNA, 120 bp, Artificial Sequence
  ENSG00000108861_29 (sequence is synthesized)
ctcatctagaagacctctaaggtccccttttggctctgaggggtctctaataatccccacttggaattcagcaccgcaaggaaattatgggtatgtgagccataatatgatgggcagcag

SEQ ID NO: 169888 - DNA, 120 bp, Artificial Sequence
  ENSG00000108861_30 (sequence is synthesized)
gtggcgctgccttccacccatggtgatggatggtttggaaagggaatgttggtgccttttgtgccacaagttaagatgctactgttttaaaggaaaaaaaaaaaaaaaagtactgatctt

SEQ ID NO: 169889 - DNA, 120 bp, Artificial Sequence
  ENSG00000108861_31 (sequence is synthesized)
caatatgaagacatgagcttttctcgcaggaaattttctttttcacagaactggtgtcaggaatcactgaagggctaaccgtgatagtccttgcaagtaagtcaaggttttatcctgatt

SEQ ID NO: 169890 - DNA, 120 bp, Artificial Sequence
  ENSG00000108861_32 (sequence is synthesized)
ggaaatagaagacatttccggttgagagaacagattcgttggaagcttaacttttgttgcctcttaacgccaccaaattttagggtaatttgattatgaaagagtgaatttttctggaca

SEQ ID NO: 169891 - DNA, 120 bp, Artificial Sequence
  ENSG00000108861_33 (sequence is synthesized)
gaaaagggagagctaccaaattgtttttttctttttaaaaggaagtttaatgtccgttgtatcacaaatcagtgttaaaacaccagaactttagccaaaataaatgtcttacattacaaa

SEQ ID NO: 169892 - DNA, 120 bp, Artificial Sequence
  ENSG00000108861_34 (sequence is synthesized)
tctacgtgggcaacgctaagaatgtctaatcagcaggaaagaaccagtgttaacattctgagatgtgaaataggagcctcaagaaagaatatattagcatgcctgtacagccttggaaag

SEQ ID NO: 169893 - DNA, 120 bp, Artificial Sequence
  ENSG00000108861_35 (sequence is synthesized)
cctcaagttggattttcacgatactctgaggacccagttaccaaaatcctaagcttcatggctcagcccaaggatggcatgttgaaaactcaaaactaaccctcctcccattttacagag

SEQ ID NO: 169894 - DNA, 120 bp, Artificial Sequence
  ENSG00000108861_36 (sequence is synthesized)
tttcccggcccggcagtcccggatcagggaacctaaacaccccaaatgagcgagtccggggagctgggccgggatttccaggcccccaccttccagatgtgatttgatttacaggagatt

SEQ ID NO: 169895 - DNA, 120 bp, Artificial Sequence
  ENSG00000108861_37 (sequence is synthesized)
tgatttacaggagattctagaacggtccagtgataacccccctaaggacctgagccaccacctagaaaaggctcttgacctttcacccccaggctctgtcacccaggctggagtgcaatg

SEQ ID NO: 169896 - DNA, 120 bp, Artificial Sequence
  ENSG00000108878_0 (sequence is synthesized)
actcccagctcgacaaccactgccaccccccaagctcggcttgtcacctgccctaggagacgcagccgccggaccctgcccagggcacccacgcctcggcgaccaccatgtcccagacca

SEQ ID NO: 169897 - DNA, 120 bp, Artificial Sequence
  ENSG00000108878_1 (sequence is synthesized)
aaatgctgaaggtccgcgtgaccctcttctgcatcctggcaggcatcgtgctggccatgacagccgtggtaaccgaccactgggctgtgctgagcccccacatggagcaccacaacacta

SEQ ID NO: 169898 - DNA, 120 bp, Artificial Sequence
  ENSG00000108878_2 (sequence is synthesized)
cctgcgaggcggcccacttcggcctctggcggatttgtaccaagcgcatccccatggacgacagcaagacctgcgggcccatcaccctgcccggggagaagaactgttcctacttcaggc

SEQ ID NO: 169899 - DNA, 120 bp, Artificial Sequence
  ENSG00000108878_3 (sequence is synthesized)
attttaaccccggcgagagctcggagatcttcgaattcaccactcagaaggagtacagcatctcggcagccgccatcgccatcttcagccttggcttcatcatcctgggcagcctctgtg

SEQ ID NO: 169900 - DNA, 120 bp, Artificial Sequence
  ENSG00000108878_4 (sequence is synthesized)
tcctcctgtccctcgggaagaagagggactatctgctgcgacccgcgtccatgttctatgcctttgcaggtctctgcatcctcgtctcggtggaggtcatgcggcagtcggtgaagcgca

SEQ ID NO: 169901 - DNA, 120 bp, Artificial Sequence
  ENSG00000108878_5 (sequence is synthesized)
tcctgctgttctccctgcctcgaatgccccggaacccatgggagtcctgcatggatgctgagcccgagcactaaccctcctgcggccctagcgaccctcaggcttcttccccaggaagcg

SEQ ID NO: 169902 - DNA, 120 bp, Artificial Sequence
  ENSG00000108878_6 (sequence is synthesized)
gggtcttggcctggaaccttccagagaggaggcgggagcaattttagccccaccctgctcccatctgcccccctgcaacagtcgcaggctgcttcctctctctgagttcctctgggctgc

SEQ ID NO: 169903 - DNA, 120 bp, Artificial Sequence
  ENSG00000108878_7 (sequence is synthesized)
cgcaggctcccctgggaatagagcaagacgtgagtcctaacctggccacagttgggggaggcagagccagcaggtggacaggtgtttgcaggggcccaacttcccctggagctcagaggt

SEQ ID NO: 169904 - DNA, 120 bp, Artificial Sequence
  ENSG00000108878_8 (sequence is synthesized)
gtccccactgtaccagcctctgataagctgcctccagttgtcctttatgaacattgcagggacaacctgtgtttgccagctgggtgttccgtgtaaatagccagcctgtctctttctcgg

SEQ ID NO: 169905 - DNA, 120 bp, Artificial Sequence
  ENSG00000108878_9 (sequence is synthesized)
tgataaaacacaccctctctggtgagcccagcgtcccctccttggcttccaggagccctgggaagcatttttaactgggtagaatctgactgtggcttgaaataaaaagctctcagaaaa

SEQ ID NO: 169906 - DNA, 120 bp, Artificial Sequence
  ENSG00000108883_0 (sequence is synthesized)
gcaggcgtttcctcggcgtggggcggaagcacgatctccggcagcggcctgggaactcttagctgagcaggcgagagcatcatggataccgacttatatgatgagtttgggaattatatt

SEQ ID NO: 169907 - DNA, 120 bp, Artificial Sequence
  ENSG00000108883_1 (sequence is synthesized)
ggaccagagcttgattctgatgaagatgatgatgaattgggtagagagaccaaagatcttgatgagatggatgatgatgacgacgacgatgacgtaggagatcatgacgatgaccaccct

SEQ ID NO: 169908 - DNA, 120 bp, Artificial Sequence
  ENSG00000108883_2 (sequence is synthesized)
gggatggaggtggtgctgcatgaggacaagaagtactacccaacagccgaggaggtgtatggtcctgaggtggagaccatagttcaagaggaagacactcagcctctcacagaacccatt

SEQ ID NO: 169909 - DNA, 120 bp, Artificial Sequence
  ENSG00000108883_3 (sequence is synthesized)
attaagccagtgaaaaccaagaaattcactctgatggagcagacattacctgttacggtgtatgagatggatttcttggcggatctgatggataactcagagctcatcagaaatgtgacc

SEQ ID NO: 169910 - DNA, 120 bp, Artificial Sequence
  ENSG00000108883_4 (sequence is synthesized)
ctttgtggacatctccaccatggcaagacatgttttgtggattgtttaattgaacagactcacccggaaatcagaaagcgctatgaccaagatctgtgctatactgacatcctcttcaca

SEQ ID NO: 169911 - DNA, 120 bp, Artificial Sequence
  ENSG00000108883_5 (sequence is synthesized)
gagcaagagagaggtgtaggcatcaaaagcactcctgtgacagtggtcttgccagacaccaaaggaaaatcttatctcttcaatatcatggacactccaggacatgtgaatttctctgat

SEQ ID NO: 169912 - DNA, 120 bp, Artificial Sequence
  ENSG00000108883_6 (sequence is synthesized)
gaggtcacagctggcttgcgcatctcagatggagtggtccttttcattgatgctgctgagggggtgatgctgaacacagagcggctgatcaagcatgcggtgcaggagaggctggcagtc

SEQ ID NO: 169913 - DNA, 120 bp, Artificial Sequence
  ENSG00000108883_7 (sequence is synthesized)
actgtgtgcatcaacaagattgaccggctgatcctggagctgaagctgcctccaactgatgcttattacaagctgcgccacattgtggatgaggtcaatggattaataagcatgtattcc

SEQ ID NO: 169914 - DNA, 120 bp, Artificial Sequence
  ENSG00000108883_8 (sequence is synthesized)
actgatgagaacctgatcctttccccactcctgggtaacgtctgcttctccagctcccagtacagcatctgcttcacgctgggctcctttgccaagatctatgccgacacctttggtgac

SEQ ID NO: 169915 - DNA, 120 bp, Artificial Sequence
  ENSG00000108883_9 (sequence is synthesized)
attaattaccaagaatttgctaaaagactctggggtgacatctacttcaaccctaagacgcgaaagttcaccaaaaaggccccaactagcagctcccagagaagtttcgtggagtttatc

SEQ ID NO: 169916 - DNA, 120 bp, Artificial Sequence
  ENSG00000108883_10 (sequence is synthesized)
ttggagcctctttataagatcctcgcccaggttgtaggtgacgtggacaccagcctcccacggaccctagacgagcttggcatccacctgacgaaggaggagctgaagctgaacatccgc

SEQ ID NO: 169917 - DNA, 120 bp, Artificial Sequence
  ENSG00000108883_11 (sequence is synthesized)
cccttgctcaggctggtctgcaaaaagttctttggcgagttcacaggctttgtggacatgtgtgtgcagcatatcccttctccaaaggtgggcgccaagcccaagattgagcacacctac

SEQ ID NO: 169918 - DNA, 120 bp, Artificial Sequence
  ENSG00000108883_12 (sequence is synthesized)
accggtggtgtggactccgacctcggcgaggctatgagtgactgtgaccctgatggccccctgatgtgccacactactaagatgtacagcacagatgatggagtccagtttcacgccttt

SEQ ID NO: 169919 - DNA, 120 bp, Artificial Sequence
  ENSG00000108883_13 (sequence is synthesized)
ggccgggtgctgagtggcaccattcatgctgggcagcctgtgaaggtactgggggagaactacaccctggaggatgaggaagactcccagatatgcaccgtgggccgcctttggatctct

SEQ ID NO: 169920 - DNA, 120 bp, Artificial Sequence
  ENSG00000108883_14 (sequence is synthesized)
gtggccaggtaccacatcgaggtgaaccgtgttcctgctggcaactgggttctgattgaaggtgttgatcaaccaattgtgaagacagcaaccataaccgaaccccgaggcaatgaggag

SEQ ID NO: 169921 - DNA, 120 bp, Artificial Sequence
  ENSG00000108883_15 (sequence is synthesized)
gctcagattttccgacccttgaagttcaataccacatctgttatcaagattgctgtggagccagtcaacccctcagagctgcccaagatgcttgatggcctgcgcaaggtcaacaagagc

SEQ ID NO: 169922 - DNA, 120 bp, Artificial Sequence
  ENSG00000108883_16 (sequence is synthesized)
tatccatccctcaccaccaaggtggaggagtctggcgagcatgtgatcctgggcactggggagctctacctggactgtgtgatgcatgatttgcggaagatgtactcagagatagacatc

SEQ ID NO: 169923 - DNA, 120 bp, Artificial Sequence
  ENSG00000108883_17 (sequence is synthesized)
aaggtggctgacccagttgtcacgttttgtgagacggtggtggaaacatcctccctcaagtgctttgctgaaacgcctaataagaagaacaagatcaccatgattgctgagcctcttgag

SEQ ID NO: 169924 - DNA, 120 bp, Artificial Sequence
  ENSG00000108883_18 (sequence is synthesized)
ctggcagaggacatagagaatgaggtggtccagattacgtggaacaggaagaagctgggagagttcttccagaccaagtacgattgggatctgctggctgcccgttccatctgggctttt

SEQ ID NO: 169925 - DNA, 120 bp, Artificial Sequence
  ENSG00000108883_19 (sequence is synthesized)
ggccctgatgcgactggccccaacattctggtggatgatactctgccctctgaggtggacaaggctcttcttggttcagtgaaggacagcatcgttcaaggtttccagtggggaaccagg

SEQ ID NO: 169926 - DNA, 120 bp, Artificial Sequence
  ENSG00000108883_20 (sequence is synthesized)
gagggccccctctgtgatgaattgattcggaatgtcaagtttaagatcctggatgcggtggttgcccaggagcccctgcaccggggcgggggccagatcatccccacagccaggagagtc

SEQ ID NO: 169927 - DNA, 120 bp, Artificial Sequence
  ENSG00000108883_21 (sequence is synthesized)
gtctactctgccttcctcatggctactcctcgtctgatggagccttactactttgtagaggtccaggcccctgcagattgcgtctctgcagtttataccgtcctggccaggcgcaggggg

SEQ ID NO: 169928 - DNA, 120 bp, Artificial Sequence
  ENSG00000108883_22 (sequence is synthesized)
cacgtgactcaggatgcacccatcccaggctcccctctgtacaccatcaaagcttttatcccggccatcgactcttttggctttgagactgatctccggactcacacccagggacaagcc

SEQ ID NO: 169929 - DNA, 120 bp, Artificial Sequence
  ENSG00000108883_23 (sequence is synthesized)
ttttctctgtctgtcttccaccactggcagattgtgcctggtgatcccctggacaagagcattgtcatccgccccttggagccacagccagctcctcacctggcccgggaattcatgatc

SEQ ID NO: 169930 - DNA, 120 bp, Artificial Sequence
  ENSG00000108883_24 (sequence is synthesized)
aaaacccgccgtaggaagggcctcagtgaagatgtgagcatcagcaaattcttcgatgatcctatgttgctggaacttgccaaacaggatgttgtgctcaattaccccatgtgagtgcgt

SEQ ID NO: 169931 - DNA, 120 bp, Artificial Sequence
  ENSG00000108883_25 (sequence is synthesized)
ggactcctgggagctcctgctccctacagtgggctgcaactcctgtacttgaagctgagacctcatatgacgtggccttcgtgttgtcagagagtgtctggaagctgctgttgccatctt

SEQ ID NO: 169932 - DNA, 120 bp, Artificial Sequence
  ENSG00000108883_26 (sequence is synthesized)
gaacaactcaccaacctccaacccagagccccagtgagagaggagcatttggcctcctgcttccttctgtggcctctgccgggctccattcccaaggaaaagagaggagcttgggctcac

SEQ ID NO: 169933 - DNA, 120 bp, Artificial Sequence
  ENSG00000108883_27 (sequence is synthesized)
agaaagagaaggggatgaaaccccaaggggccctatctttgggatttacatggaattttattttctacaagtttgaccttagccatggtttgcaagtgaacagaacattctgacctctgt

SEQ ID NO: 169934 - DNA, 120 bp, Artificial Sequence
  ENSG00000108883_28 (sequence is synthesized)
cttgctctgctcctttcatcctcgtctcccctgccccgtctggtgcttacattctgaatatatgtcatctcccaagaggcttcactgcctctgcttccagctgcagcctccttcctgcct

SEQ ID NO: 169935 - DNA, 120 bp, Artificial Sequence
  ENSG00000108883_29 (sequence is synthesized)
gggtccccagggaagccgcctgccttttaattcagtgttcccatgagcgccaaggccccattattgcccccttgctcccactccatgctgcttctgggtggaacctaagatggcttggga

SEQ ID NO: 169936 - DNA, 120 bp, Artificial Sequence
  ENSG00000108883_30 (sequence is synthesized)
gttgttgggttcctgcgatcagaagtctaccccaccacctcctcaggaaactgctgcctcccctaagaatcttccttgccctggagtagggggccagagcactttgatttccagccattt

SEQ ID NO: 169937 - DNA, 120 bp, Artificial Sequence
  ENSG00000108883_31 (sequence is synthesized)
actccaagtcctctccccagctaccaccagtcccttactctgttctcccccagtgaaaaagagtctgttgattttcctcaaaactgctttattaggaatgtaccagggattgagttaggg

SEQ ID NO: 169938 - DNA, 120 bp, Artificial Sequence
  ENSG00000108883_32 (sequence is synthesized)
gagttggacagccccggctcctataggagtcctacttctctccagcatcctgtgccatcctcttgacgtaatcgctgtacattgtgtacacagcacctgtgtgagagaaaagaaataatg

SEQ ID NO: 169939 - DNA, 120 bp, Artificial Sequence
  ENSG00000108883_33 (sequence is synthesized)
ccccttggcatcaaacccttcacccgtcctctggctctcaggcgtcctaggggttcacctctagctgctcccttgagagtccagcttcccgctcatctttctgccccaggtcccaacagc

SEQ ID NO: 169940 - DNA, 120 bp, Artificial Sequence
  ENSG00000108883_34 (sequence is synthesized)
tgcttcaagcatctgaccacacaacctggggaaaccacttatctgacagttcacgaaacactttcacatgtattgtgtatctgagaaacctcacagcagcctgcaaggtaggcaggccag

SEQ ID NO: 169941 - DNA, 120 bp, Artificial Sequence
  ENSG00000108883_35 (sequence is synthesized)
gggtggttattgtcatgttacacatcaggaaactgaggctcagtgagaaagatttgtccactgtcacacagttagcaagtggctgtctgctttttaatctcaagaggaagagaaattcaa

SEQ ID NO: 169942 - DNA, 120 bp, Artificial Sequence
  ENSG00000108883_36 (sequence is synthesized)
gtaagttgaagcgggtcagcggcacggaagggttgctccaggtgggataggaaattaaaaagcgtcagatctggaaggggccttatatgctattggcccctttcgctttacggatcggta

SEQ ID NO: 169943 - DNA, 120 bp, Artificial Sequence
  ENSG00000108883_37 (sequence is synthesized)
aattgaggcctggagcgggaaaaagaatggaagaccctgtcgtcctcgtgccttcccaaggcttccgaagcgcgcacacacgcacacacctcgatttcggggctgcctctatagcctcag

SEQ ID NO: 169944 - DNA, 120 bp, Artificial Sequence
  ENSG00000108883_38 (sequence is synthesized)
tccgtaaaatcgtatcgctaggtaggagtggtgctctaactgtccagtcccctcgctcacttcctcttctatccgtgccgctttcagccgttctttgccaagttccctccgaagtcctct

SEQ ID NO: 169945 - DNA, 120 bp, Artificial Sequence
  ENSG00000108883_39 (sequence is synthesized)
tgtgtgtgcgtatttgtgttccgcagatgtctttatctagacaaaaatacatttcttaatgagtatactttgaattgattttctcgagaagagaaggaaaagtgagttgttactctgatc

SEQ ID NO: 169946 - DNA, 120 bp, Artificial Sequence
  ENSG00000108883_40 (sequence is synthesized)
cttgtacactatgagcctgccagtgtacctttccaggtagcaggccaggagggctaaagggctagcttatgtccatgggtatagggtagagtttgacctaaatcattaagatgggaatta

SEQ ID NO: 169947 - DNA, 120 bp, Artificial Sequence
  ENSG00000108883_41 (sequence is synthesized)
aatcattgacttcacacctagtatcaccatgctgagtggtcctggtgtcttgaggacccactcataggcagatgctcctcactgaaccttcttgaagaggctggaacagatgctaagtag

SEQ ID NO: 169948 - DNA, 120 bp, Artificial Sequence
  ENSG00000108883_42 (sequence is synthesized)
tagctgtttctgataggcaacttcttgtctgctctggccttgattttgtttgtgtgtgcctttgctggcataagagaatccaggctgtgactgcctgttgtgtttcaggtggaggagtct

SEQ ID NO: 169949 - DNA, 120 bp, Artificial Sequence
  ENSG00000108883_43 (sequence is synthesized)
tccaccagcactcccccaccccagtcctcgagggtccttgcagccaggcatatgagtgggatgggctcaccatctttaggattcggcaggagaagcagcttggggtacacaggaccatcc

SEQ ID NO: 169950 - DNA, 120 bp, Artificial Sequence
  ENSG00000108883_44 (sequence is synthesized)
caagtcctgggccagcttcttcccttttccttccttatcctggtggtgtagcctggaaatggaaatttaagtcatttctaaactgtcatttgctcctcatttctgagaagggtttggcgt

SEQ ID NO: 169951 - DNA, 120 bp, Artificial Sequence
  ENSG00000108883_45 (sequence is synthesized)
tcaagaggatgatgagattggaatggtttatagaccctgattgggcttcatggaccaaatgtacaattctggaatttattctacatccacaaaaatgtaaatatgtgcagaagaaggaaa

SEQ ID NO: 169952 - DNA, 120 bp, Artificial Sequence
  ENSG00000108883_46 (sequence is synthesized)
taaacttctaggaaagctctaagtctgagcatggcctgaagcaaacactaagaacatatgcttaacttctgacctctgccatgggccttgcttattcagttagaacgcccacctcccatt

SEQ ID NO: 169953 - DNA, 120 bp, Artificial Sequence
  ENSG00000108883_47 (sequence is synthesized)
tgatttctgtaccatgtctttcatgactgcaagacagctgcagtgttgcaggagactgctactctgccatggccccatgacaggcccagaacctctccccagtcactccctccacctcct

SEQ ID NO: 169954 - DNA, 120 bp, Artificial Sequence
  ENSG00000108883_48 (sequence is synthesized)
agagatgccgctgaaaccaaacttttgtccttgccaagagctttgtctccatagaagagagccttgtgaaggagttcttcagatatttctttggacttcccttgtctccctctagcacca

SEQ ID NO: 169955 - DNA, 120 bp, Artificial Sequence
  ENSG00000108883_49 (sequence is synthesized)
cctctgggaacaactgtgatttatttctaagcgtgtgttgatgagtttgttgggcaaaactagaggcacatcctgggactctgcaggggttgacttcatactttaacacatcttcatttt

SEQ ID NO: 169956 - DNA, 120 bp, Artificial Sequence
  ENSG00000108883_50 (sequence is synthesized)
actattatgatcagtacttgggctgtattaatttcttctctttttagagataggatctctgttacccaagctagagtgcagtgtcacaatcacagctcactgcagcctcgaacttctggg

SEQ ID NO: 169957 - DNA, 120 bp, Artificial Sequence
  ENSG00000108883_51 (sequence is synthesized)
tttaatctcaaagaaacccttgagctgggaggtagtgagggaaagtgattgatggttcgtttgtgggagagcagtctcaactcaggtggtaacaacagttaattttttttcagctgtgct

SEQ ID NO: 169958 - DNA, 120 bp, Artificial Sequence
  ENSG00000108883_52 (sequence is synthesized)
ctgatttctggtcacaggagtaatgcccactttcccacccttgcctccccatccccatgagcacagtcaggcctgaatgcaaagcctgatgttgccaccgctagtgctatgaccttggga

SEQ ID NO: 169959 - DNA, 120 bp, Artificial Sequence
  ENSG00000108883_53 (sequence is synthesized)
acattactcacatttcctgagcctcaaggccttggtctataacacgagcataataaaatgtgagcggttgttatgagatttaaataagattaaggaagtgttacggttgtgttcagcatg

SEQ ID NO: 169960 - DNA, 120 bp, Artificial Sequence
  ENSG00000108883_54 (sequence is synthesized)
ttgcctggcagatactaaagattcaacaaatggtagctaatcttgtcagtcctggcttttaaaaacatctttcccagccatttcttaggctgtctagtttcttatcataaatacacagcc

SEQ ID NO: 169961 - DNA, 120 bp, Artificial Sequence
  ENSG00000108883_55 (sequence is synthesized)
agttgagaattgagttacatcttaagaggaaatttgggacagtaagtaatcttgccaatagtgcctctctgctatcttaaatctgtgtctcttcctcaatgcccttatcctcccaaaaaa

SEQ ID NO: 169962 - DNA, 120 bp, Artificial Sequence
  ENSG00000108883_56 (sequence is synthesized)
aaaaaaagaggagaatatttttgctctgccatgtctcctattcatccttctcagagggatggggtagaacatggtttggagatgagactacctcatctttctctagctcctcatagagct

SEQ ID NO: 169963 - DNA, 120 bp, Artificial Sequence
  ENSG00000108883_57 (sequence is synthesized)
catgtccttgctgtcaaggaagatggcggggagtagtacttccccggagcatagatgtggttgaagctgcaccctgtcccctcttccagggccccctgatgtgccacactactaagatgt

SEQ ID NO: 169964 - DNA, 120 bp, Artificial Sequence
  ENSG00000108883_58 (sequence is synthesized)
gtcattgccatgtcctggtttcaggcttagccttctagatatgaccctgctggattctccctgtactcagttcagatgcgaggaattaggacgggtgccttttattattttcctcctctc

SEQ ID NO: 169965 - DNA, 120 bp, Artificial Sequence
  ENSG00000108883_59 (sequence is synthesized)
tttgttctgccagaatacctgggaagaaatggcccttcaggttacccccactcagcaccaggctcctggttggggaatacatagtctgatcctaagcaagtcctcttctcttctcatacc

SEQ ID NO: 169966 - DNA, 60 bp, Artificial Sequence
  ENSG00000108883_60 (sequence is synthesized)
ttaggggaaccattgtgccccgtcattcagcctattagtgacttgggtaaagatagagaa

SEQ ID NO: 169967 - DNA, 120 bp, Artificial Sequence
  ENSG00000108883_61 (sequence is synthesized)
cgtcattcagcctattagtgacttgggtaaagatagagaacagaggtttatctaatttgcacatgacataaaactaatgtattggataacagaatctaaattcaaagtgatcccaacata

SEQ ID NO: 169968 - DNA, 120 bp, Artificial Sequence
  ENSG00000108883_62 (sequence is synthesized)
ttttttgttgggagtgagggcaggtggaattgatggatgatgatgacgacgacgatgacgtaggagatcatgacgatgaccaccctgggatggaggtggtgctgcatgaggacaagaagt

SEQ ID NO: 169969 - DNA, 120 bp, Artificial Sequence
  ENSG00000108883_63 (sequence is synthesized)
ctaggaaggaggaaggattggtgtcatagaaaacactgggtttcctgggcagcagaccatgttggggcttcagggcagagcttcactcagatgctgtgggttgagaatgacatgggtgca

SEQ ID NO: 169970 - DNA, 120 bp, Artificial Sequence
  ENSG00000108883_64 (sequence is synthesized)
cgccagtgggtctcagcaccagctctgtcagacccatgggggttgttcagtgaatggtggtagatggctgaatggatgctgagagctacctttgaagactagaattaaggccctagtttg

SEQ ID NO: 169971 - DNA, 120 bp, Artificial Sequence
  ENSG00000108883_65 (sequence is synthesized)
tgctgattaaggcagttggggttttcacagaggtagtgtcaagggagcttctgaattcccttaggtaaatggttgcccttccaacaaaattagacctcgcttcagtaatttattttctgt

SEQ ID NO: 169972 - DNA, 120 bp, Artificial Sequence
  ENSG00000108883_66 (sequence is synthesized)
ttcccaggtggctgacccagttgtcacgttttgtgagacggtggtggaaacatcctccctcaagtgctttgctgaaacgcctaataagaagaacaagatcaccatgattgctgagcctct

SEQ ID NO: 169973 - DNA, 120 bp, Artificial Sequence
  ENSG00000108883_67 (sequence is synthesized)
catagatcgatgtactttaaactttttgtcagctgagttccaaggaaccatgtaccactgatacctgctgcttgctcttttctggcatcagggtgactccaaatcttctagcagcacatt

SEQ ID NO: 169974 - DNA, 120 bp, Artificial Sequence
  ENSG00000108883_68 (sequence is synthesized)
cccaggaagcaggctatcactatctatagtgccagagcttttagagctaacaatcagtccccgcactttgagctttttgaccattgtgaatggctcagtaactcctgctcgtgctccctg

SEQ ID NO: 169975 - DNA, 62 bp, Artificial Sequence
  ENSG00000108883_69 (sequence is synthesized)
tatctcactcttatttattttatttaagacaagatctcactctctttaagtgatcctcccac

SEQ ID NO: 169976 - DNA, 120 bp, Artificial Sequence
  ENSG00000108883_70 (sequence is synthesized)
gctttcagccgttctttgccaagttccctccgaagtcctctgagctcctgcattgtagcgggaagcggcagtgaggtaacatcagacaacctcaaatcaagggacatccttaaggatttc

SEQ ID NO: 169977 - DNA, 120 bp, Artificial Sequence
  ENSG00000108883_71 (sequence is synthesized)
atgacagtccttggaaggaaagactgaagattgtagatccaaagactgaagattgtagatccaaagagactagagacatgacaaccaaatgcaaacatgatcctggattggatccttagc

SEQ ID NO: 169978 - DNA, 120 bp, Artificial Sequence
  ENSG00000108883_72 (sequence is synthesized)
gtaacgtctgcttctccagctcccagtacagcatctgcttcacgctgggctcctttgccaagatctatgccgacacctttgaaggaactgcctggaccctggaaaggaaagtgctagaag

SEQ ID NO: 169979 - DNA, 120 bp, Artificial Sequence
  ENSG00000108883_73 (sequence is synthesized)
ctttgtggacatctccaccatggcaaggtaagacggaactttcagctacttggaacaggatttctcttttgtacctgctcatgttttagcccttagagtcacagcggttgaggtttgagg

SEQ ID NO: 169980 - DNA, 120 bp, Artificial Sequence
  ENSG00000108883_74 (sequence is synthesized)
gcaggcgtttcctcggcgtggggcggaagcacgatctccggcagcggcctgggaactcttagctgagcaggcgagagatggatgatgatgacgacgacgatgacgtaggagatcatgacg

SEQ ID NO: 169981 - DNA, 120 bp, Artificial Sequence
  ENSG00000108883_75 (sequence is synthesized)
gtgccagtaaggctagggttgtggatttgatccccttgtacaactcgttttcttataaatgttagtgaactcagatgctcgtggtttctgcatggcttttaagattgaaagttttaacac

SEQ ID NO: 169982 - DNA, 120 bp, Artificial Sequence
  ENSG00000108883_76 (sequence is synthesized)
tgtaaaagccaaacacaaaagaataaagagtatggcagtgagggtaaagagcagagttgcttttcttcatttcctttcttttctcttttttaaatgatgtttatgtctgcttgtatttgt

SEQ ID NO: 169983 - DNA, 120 bp, Artificial Sequence
  ENSG00000108883_77 (sequence is synthesized)
gaaattgaggtttttcgtcaaatgtatttctgtcttatcacattagattcatttcctgtgttctaaggtttttgtctctgtcctgtaggtttccccttgtctgtctggtgcagttaactt

SEQ ID NO: 169984 - DNA, 120 bp, Artificial Sequence
  ENSG00000108883_78 (sequence is synthesized)
ttccaagattgtgcagaatgttcccagctctgggaaatcaacttgttattgggaattaggggaacagctccatcatgtcactttcttggaccaggctgttggcaaaactgagtgtcttgc

SEQ ID NO: 169985 - DNA, 120 bp, Artificial Sequence
  ENSG00000108883_79 (sequence is synthesized)
acaagtcccttccgagggctggagagtggctgtgataccgagttcctgcccttccccttggcagtgcgtccgggctgctgcagcctggcactgtgttcaccactgtctctgtttcagcat

SEQ ID NO: 169986 - DNA, 80 bp, Artificial Sequence
  ENSG00000108924_0 (sequence is synthesized)
actcttgtcagggccgcggcacatgggcggccggatgcgctgagcccggcgctgcggggccgcggagcgctggggagcag

SEQ ID NO: 169987 - DNA, 120 bp, Artificial Sequence
  ENSG00000108924_1 (sequence is synthesized)
accgcctccggtgctggcactaggggctggggtcggcgcggtgtcttctgcccttctgcagccgtcgacatttttttttctttctttttttcaattttgaacattttgcaaaacgagggg

SEQ ID NO: 169988 - DNA, 120 bp, Artificial Sequence
  ENSG00000108924_2 (sequence is synthesized)
ttcgaggcaggtgagagcatcctgcacgtcgccggggagcccgcgggcacttggcgcgctctcctgggaccgtctgcactggaaacccgaaagtttttttttaatatatatttttatgca

SEQ ID NO: 169989 - DNA, 120 bp, Artificial Sequence
  ENSG00000108924_3 (sequence is synthesized)
gatgtatttataaagatataagtaatttttttcttcccttttctccaccgccttgagagcgagtacttttggcaaaggacggaggaaaagctcagcaacattttagggggcggttgtttc

SEQ ID NO: 169990 - DNA, 120 bp, Artificial Sequence
  ENSG00000108924_4 (sequence is synthesized)
tttcttatttctttttttaaggggaaaaaatttgagtgcatcgcgatggagaaaatgtcccgaccgctccccctgaatcccacctttatcccgcctccctacggcgtgctcaggtccctg

SEQ ID NO: 169991 - DNA, 120 bp, Artificial Sequence
  ENSG00000108924_5 (sequence is synthesized)
ctggagaacccgctgaagctcccccttcaccacgaagacgcatttagtaaagataaagacaaggaaaagaagctggatgatgagagtaacagcccgacggtcccccagtcggcattcctg

SEQ ID NO: 169992 - DNA, 120 bp, Artificial Sequence
  ENSG00000108924_6 (sequence is synthesized)
gggcctaccttatgggacaaaacccttccctatgacggagatactttccagttggaatacatggacctggaggagtttttgtcagaaaatggcattccccccagcccatctcagcatgac

SEQ ID NO: 169993 - DNA, 120 bp, Artificial Sequence
  ENSG00000108924_7 (sequence is synthesized)
cacagccctcaccctcctgggctgcagccagcttcctcggctgccccctcggtcatggacctcagcagccgggcctctgcaccccttcaccctggcatcccatctccgaactgtatgcag

SEQ ID NO: 169994 - DNA, 120 bp, Artificial Sequence
  ENSG00000108924_8 (sequence is synthesized)
agccccatcagaccaggtcagctgttgccagcaaaccgcaatacaccaagtcccattgatcctgacaccatccaggtcccagtgggttatgagccagacccagcagatcttgccctttcc

SEQ ID NO: 169995 - DNA, 120 bp, Artificial Sequence
  ENSG00000108924_9 (sequence is synthesized)
agcatccctggccaggaaatgtttgaccctcgcaaacgcaagttctctgaggaagaactgaagccacagcccatgatcaagaaagctcgcaaagtcttcatccctgatgacctgaaggat

SEQ ID NO: 169996 - DNA, 120 bp, Artificial Sequence
  ENSG00000108924_10 (sequence is synthesized)
gacaagtactgggcaaggcgcagaaagaacaacatggcagccaagcgctcccgcgacgcccggaggctgaaagagaaccagatcgccatccgggcctcgttcctggagaaggagaactcg

SEQ ID NO: 169997 - DNA, 120 bp, Artificial Sequence
  ENSG00000108924_11 (sequence is synthesized)
gccctccgccaggaggtggctgacttgaggaaggagctgggcaaatgcaagaacatacttgccaagtatgaggccaggcacgggcccctgtaggatggcatttttgcaggctggctttgg

SEQ ID NO: 169998 - DNA, 120 bp, Artificial Sequence
  ENSG00000108924_12 (sequence is synthesized)
aatagatggacagtttgtttcctgtctgatagcaccacacgcaaaccaacctttctgacatcagcactttaccagaggcataaacacaactgactcccattttggtgtgcatctgtgtgt

SEQ ID NO: 169999 - DNA, 120 bp, Artificial Sequence
  ENSG00000108924_13 (sequence is synthesized)
gtgtgcgtgtatatgtgcttgtgctcatgtgtgtggtcagcggtatgtgcgtgtgcgtgttcctttgctcttgccattttaaggtagccctctcatcgtcttttagttccaacaaagaaa

SEQ ID NO: 170000 - DNA, 120 bp, Artificial Sequence
  ENSG00000108924_14 (sequence is synthesized)
ggtgccatgtctttactagactgaggagccctctcgcgggtctcccatcccctccctccttcactcctgcctcctcagctttgcttcatgttcgagcttacctactcttccaggactctc

SEQ ID NO: 170001 - DNA, 120 bp, Artificial Sequence
  ENSG00000108924_15 (sequence is synthesized)
tgcttggattcactaaaaagggccctggtaaaatagtggatctcagtttttaagagtacaagctcttgtttctgtttagtccgtaagttaccatgctaatgaggtgcacacaataactta

SEQ ID NO: 170002 - DNA, 120 bp, Artificial Sequence
  ENSG00000108924_16 (sequence is synthesized)
gcactactccgcagctctagtcctttataagttgctttcctcttactttcagttttggtgataatcgtcttcaaattaaagtgctgtttagatttattagatcccatatttacttactgc

SEQ ID NO: 170003 - DNA, 120 bp, Artificial Sequence
  ENSG00000108924_17 (sequence is synthesized)
tatctactaagtttccttttaattctaccaaccccagataagtaagagtactattaatagaacacagagtgtgtttttgcactgtctgtacctaaagcaataatcctattgtacgctaga

SEQ ID NO: 170004 - DNA, 120 bp, Artificial Sequence
  ENSG00000108924_18 (sequence is synthesized)
gcatgctgcctgagtattactagtggacgtaggatattttccctacctaagaatttcactgtcttttaaaaaacaaaaagtaaagtaatgcatttgagcatggccagactattccctagg

SEQ ID NO: 170005 - DNA, 120 bp, Artificial Sequence
  ENSG00000108924_19 (sequence is synthesized)
acaaggaagcagagggaaatgggaggtctaaggatgaggggttaatttatcagtacatgagccaaaaactgcgtcttggattagcctttgacattgatgtgttcggttttgttgttcccc

SEQ ID NO: 170006 - DNA, 120 bp, Artificial Sequence
  ENSG00000108924_20 (sequence is synthesized)
ttccctcacaccctgcctcgcccccacttttctagttaactttttccatatccctcttgacattcaaaacagttacttaagattcagttttcccactttttggtaatatatatatttttg

SEQ ID NO: 170007 - DNA, 120 bp, Artificial Sequence
  ENSG00000108924_21 (sequence is synthesized)
tgaattatactttgttgtttttaaaaagaaaatcagttgattaagttaataagttgatgttttctaaggccctttttcctagtggtgtcatttttgaatgcctcataaattaatgattct

SEQ ID NO: 170008 - DNA, 120 bp, Artificial Sequence
  ENSG00000108924_22 (sequence is synthesized)
gaagcttatgtttcttattctctgtttgcttttgaacgtatgtgctcttataaagtggacttctgaaaaatgaatgtaaaagacactggtgtatctcagaaggggatggtgttgtcacaa

SEQ ID NO: 170009 - DNA, 120 bp, Artificial Sequence
  ENSG00000108924_23 (sequence is synthesized)
taattataggaagttcttttttgtacagtatttttcagatataaatactgacaatgtattttggaagacatatattatatatagaaaagaggagaggaaaactattccatgttttaaaat

SEQ ID NO: 170010 - DNA, 120 bp, Artificial Sequence
  ENSG00000108924_24 (sequence is synthesized)
tatatagcaaagatatatattcaccaatgttgtacagagaagaagtgcttgggggtttttgaagtctttaatattttaagccctatcactgacacatcagcatgttttctgctttaaatt

SEQ ID NO: 170011 - DNA, 120 bp, Artificial Sequence
  ENSG00000108924_25 (sequence is synthesized)
aaaattttatgacagtatcgaggcttgtgatgacgaatcctgctctaaaatacacaaggagctttcttgtttcttattaggcctcagaaagaagtcagttaacgtcacccaaaagcacaa

SEQ ID NO: 170012 - DNA, 120 bp, Artificial Sequence
  ENSG00000108924_26 (sequence is synthesized)
aatggattttagtcaaatatttattggatgatacagtgttttttaggaaaagcatctgccacaaaaatgttcacttcgaaattctgagttcctggaatggcacgttgctgccagtgcccc

SEQ ID NO: 170013 - DNA, 120 bp, Artificial Sequence
  ENSG00000108924_27 (sequence is synthesized)
agacagttcttttctaccctgcgggcccgcacgttttatgaggttgatatcggtgctatgtgtttggtttataatttgatagatgtttgactttaaagatgattgttcttttgtttcatt

SEQ ID NO: 170014 - DNA, 120 bp, Artificial Sequence
  ENSG00000108924_28 (sequence is synthesized)
aagttgtaaaatgtcaagaaattctgctgttacgacaaagaaacattttacgctagattaaaatatcctttcatcaatgggattttctagtttcctgccttcagagtatctaatccttta

SEQ ID NO: 170015 - DNA, 120 bp, Artificial Sequence
  ENSG00000108924_29 (sequence is synthesized)
atgatctggtggtctcctcgtcaatccatcagcaatgcttctctcatagtgtcatagacttgggaaacccaaccagtaggatatttctacaaggtgttcattttgtcacaagctgtagat

SEQ ID NO: 170016 - DNA, 120 bp, Artificial Sequence
  ENSG00000108924_30 (sequence is synthesized)
aacagcaagagatgggggtgtattggaattgcaatacattgttcaggtgaataataaaatcaaaaacttttgcaatcttaagcagagataaataaaagatagcaatatgagacacaggtg

SEQ ID NO: 170017 - DNA, 120 bp, Artificial Sequence
  ENSG00000108924_31 (sequence is synthesized)
gacgtagagttggcctttttacaggcaaagaggcgaattgtagaattgttagatggcaatagtcattaaaaacatagaaaaatgatgtctttaagtggagaattgtggaaggattgtaac

SEQ ID NO: 170018 - DNA, 120 bp, Artificial Sequence
  ENSG00000108924_32 (sequence is synthesized)
atggaccatccaaatttatggccgtatcaaatggtagctgaaaaaactatatttgagcactggtctctcttggaattagatgtttatatcaaatgagcatctcaaatgttttctgcagaa

SEQ ID NO: 170019 - DNA, 120 bp, Artificial Sequence
  ENSG00000108924_33 (sequence is synthesized)
aaaaataaaaagattctaataaaatgtattctcttgtgtgccaggagaggtttcagaaacctacctcgtcttacaaatttaaacactttggagtctgtacaggtgccttatatgtaggtc

SEQ ID NO: 170020 - DNA, 120 bp, Artificial Sequence
  ENSG00000108924_34 (sequence is synthesized)
attgtcacgatacacacacacgaacactccctctggactggctgcctctccatccagggcagttaactagcaaacaaggcagatctgcttcatggagcgggaggccatggcttgactctg

SEQ ID NO: 170021 - DNA, 120 bp, Artificial Sequence
  ENSG00000108924_35 (sequence is synthesized)
agtgatttgggtcaaccggagtcagacgcatgtctgcacgctgcagctattatgagagtccctttgtcatttttcaccttttcatcctaagcatctttcagagattaattatttggccat

SEQ ID NO: 170022 - DNA, 120 bp, Artificial Sequence
  ENSG00000108924_36 (sequence is synthesized)
taacaatgaatccaaatcatatcatactgacatcatctagacatgatttggaaggaacagcttaggacctcctgatgaggtcacattgttgtttcttttaactagacttggcaaagaaag

SEQ ID NO: 170023 - DNA, 120 bp, Artificial Sequence
  ENSG00000108924_37 (sequence is synthesized)
gcaaaaattgaccagcctatctttctgctggtgctgccttaaggaggtagtttgttgaggggagggctgtagatcattacttctttctcttcaggaagtggccactttgaaccattcaaa

SEQ ID NO: 170024 - DNA, 120 bp, Artificial Sequence
  ENSG00000108924_38 (sequence is synthesized)
taccacattaggcaagactgtgataggccttttgtcttcaaatacaacaggcctccactgacccatccctcaaagcagaaggaccctttgaggagagtacagatgggattccacagtggg

SEQ ID NO: 170025 - DNA, 120 bp, Artificial Sequence
  ENSG00000108924_39 (sequence is synthesized)
gtgggtggaatggaaacctgtactagaccacccagaggttccttctaacccactggtttggtggggaactcacagtaattccaaatgtacaatcagatgtctagggtctgttttcggaag

SEQ ID NO: 170026 - DNA, 120 bp, Artificial Sequence
  ENSG00000108924_40 (sequence is synthesized)
aagcaagaattatcagtggcaccctccccactgcccccagtgtaaaacaatagacattctgtgaaatgcaaagctattctttggtttttctagtagtttatctcattttaccctattctt

SEQ ID NO: 170027 - DNA, 120 bp, Artificial Sequence
  ENSG00000108924_41 (sequence is synthesized)
cctttaaggaaaactcaatctttatcacagtcaattagagcgatcccaaggcatgggaccaggcctgcttgcctatgtgtgatggcaattggagatctggatttagcactggggtctcag

SEQ ID NO: 170028 - DNA, 120 bp, Artificial Sequence
  ENSG00000108924_42 (sequence is synthesized)
caccctgcaggtgtctgagactaagtgatctgccctccaggtggcgatcaccttctgctcctaggtacccccactggcaaggccaaggtctcctccacgttttttctgcaattaataatg

SEQ ID NO: 170029 - DNA, 120 bp, Artificial Sequence
  ENSG00000108924_43 (sequence is synthesized)
tcatttaaaaaatgagcaaagccttatccgaatcggatatagcaactaaagtcaatacattttgcaggaggctaagtgtaagagtgtgtgtgtgtgtgtgtgcgtgcatgtgtgtgtgtg

SEQ ID NO: 170030 - DNA, 120 bp, Artificial Sequence
  ENSG00000108924_44 (sequence is synthesized)
tgtatgtgtgtgaataagtcgacataaagtctttaattttgagcaccttaccaaacataacaataatccattatccttttggcaacaccacaaagatcgcatctgttaaacaggtacaag

SEQ ID NO: 170031 - DNA, 120 bp, Artificial Sequence
  ENSG00000108924_45 (sequence is synthesized)
ttgacatgaggttagtttaattgtacaccatgatattggtggtatttatgctgttaagtccaaacctttatctgtctgttattcttaatgttgaataaactttgaattttttcctttctt

SEQ ID NO: 170032 - DNA, 120 bp, Artificial Sequence
  ENSG00000108924_46 (sequence is synthesized)
tcatgtatttttattaacagttggctagcaatggtattctgttcccacctcggtagcaaagagaccatttgtagagattattacctagataataaaatgataatactatataattagtaa

SEQ ID NO: 170033 - DNA, 120 bp, Artificial Sequence
  ENSG00000108924_47 (sequence is synthesized)
actttcccggtgcactttttctggtgggaggggagagcggagcaggctcacgtgtaaccgcgcaggagcctcctctggcttgagccctttcttgcatttagtaaagataaagacaaggaa

SEQ ID NO: 170034 - DNA, 120 bp, Artificial Sequence
  ENSG00000108924_48 (sequence is synthesized)
cagatcaaggactcaggccggtgttgcttccgatgtcctggaaaagtgttttctgagcctccagcacataatgttttactctctgaaggaggcttattctgattagcttaacagagggta

SEQ ID NO: 170035 - DNA, 120 bp, Artificial Sequence
  ENSG00000108924_49 (sequence is synthesized)
ggagggaagctgtaattccaacacctgtggaacgtgctttgcgtttttgtgctgttgatctgctttcctgagacatgattggaagtcagcagctccagcctgcatgttcccagatcacct

SEQ ID NO: 170036 - DNA, 120 bp, Artificial Sequence
  ENSG00000108924_50 (sequence is synthesized)
aaaagacagcagccagagaaggaccctgccattcgtgagaaatagtcttataacaggccaggaaaagtgataaaagagcggtattgtttttcttttctttctttttttttaagtccagct

SEQ ID NO: 170037 - DNA, 120 bp, Artificial Sequence
  ENSG00000108924_51 (sequence is synthesized)
aaagcacaggcataggtgccactgatccagcagaggcagccacaaaccacaggccctggtaagctgcctgtggccagaggtcatggctgcagattccagggaaactgcgtcctcggtagg

SEQ ID NO: 170038 - DNA, 120 bp, Artificial Sequence
  ENSG00000108924_52 (sequence is synthesized)
cagtcagccgtacactccatacttgcgattcttgatatttgaaatcaaaatcaaagtgcagccactttctttaaggaagctttggagaacttgccagtctgtttaggattgaagagacat

SEQ ID NO: 170039 - DNA, 120 bp, Artificial Sequence
  ENSG00000108932_0 (sequence is synthesized)
ttgggggtttattctcttcccttctaacttgacagggtcttgctctgtcattcaggcaagagtgcagtagtgtgatcacttcttactgccgcctcaagcttccagcctcaactcaagcaa

SEQ ID NO: 170040 - DNA, 120 bp, Artificial Sequence
  ENSG00000108932_1 (sequence is synthesized)
tcctcccacctcagccacccaagtggctgggactacagattaagaatgacccaaaataaattaaagctttgttccaaagccaatgtgtatactgaagtgcctgatggaggatggggctgg

SEQ ID NO: 170041 - DNA, 120 bp, Artificial Sequence
  ENSG00000108932_2 (sequence is synthesized)
gcggtagctgtttcatttttcttcgttgaagtcttcacctacggcatcatcaagacatttggtgtcttctttaatgacttaatggacagttttaatgaatccaatagcaggatctcatgg

SEQ ID NO: 170042 - DNA, 120 bp, Artificial Sequence
  ENSG00000108932_3 (sequence is synthesized)
ataatctcaatctgtgtgtttgtcttaacattttcagctcccctcgccacagtcctgagcaatcgtttcggacaccgtctggtagtgatgttgggggggctacttgtcagcaccgggatg

SEQ ID NO: 170043 - DNA, 120 bp, Artificial Sequence
  ENSG00000108932_4 (sequence is synthesized)
gtggccgcctccttctcacaagaggtttctcatatgtacgtcgccatcggcatcatctctggtctgggatactgctttagttttctcccaactgtaaccatcctatcacaatattttggc

SEQ ID NO: 170044 - DNA, 120 bp, Artificial Sequence
  ENSG00000108932_5 (sequence is synthesized)
aaaagacgttccatagtcactgcagttgcttccacaggagaatgtttcgctgtgtttgctttcgcaccagcaatcatggctctgaaggagcgcattggctggagatacagcctcctcttc

SEQ ID NO: 170045 - DNA, 120 bp, Artificial Sequence
  ENSG00000108932_6 (sequence is synthesized)
gtgggcctactacagttaaacattgtcatcttcggagcactgctcagacccatctttatcagaggaccagcgtcaccgaaaatagtcatccaggaaaatcggaaagaagcgcagtatatg

SEQ ID NO: 170046 - DNA, 120 bp, Artificial Sequence
  ENSG00000108932_7 (sequence is synthesized)
cttgaaaatgagaaaacacgaacctcaatagactccattgactcaggagtagaactaactacctcacctaaaaatgtgcctactcacactaacctggaactggagccgaaggccgacatg

SEQ ID NO: 170047 - DNA, 120 bp, Artificial Sequence
  ENSG00000108932_8 (sequence is synthesized)
cagcaggtcctggtgaagaccagccccaggccaagcgaaaagaaagccccgctattagacttctccattttgaaagagaaaagttttatttgttatgcattatttggtctctttgcaaca

SEQ ID NO: 170048 - DNA, 120 bp, Artificial Sequence
  ENSG00000108932_9 (sequence is synthesized)
ctgggattctttgcaccttccttgtacatcattcctctgggcattagtctgggcattgaccaggaccgcgctgcttttttattatctacgatggccattgcagaagttttcggaaggatc

SEQ ID NO: 170049 - DNA, 120 bp, Artificial Sequence
  ENSG00000108932_10 (sequence is synthesized)
ggagctggttttgtcctcaacagggagcccattcgtaagatttacattgagctcatctgcgtcatcttattgactgtgtctctgtttgcctttacttttgctactgaattctggggtcta

SEQ ID NO: 170050 - DNA, 120 bp, Artificial Sequence
  ENSG00000108932_11 (sequence is synthesized)
atgtcatgcagcatattttttgggtttatggttggaacaataggagggactcacattccactgcttgctgaggatgatgtcgtgggcattgagaagatgtcttctgcagctggggtctac

SEQ ID NO: 170051 - DNA, 120 bp, Artificial Sequence
  ENSG00000108932_12 (sequence is synthesized)
atcttcattcagagcatagcaggactggctggaccgccccttgcaggtttgttggtggaccaaagtaagatctacagcagggccttctactcctgcgcagctggcatggccctggctgct

SEQ ID NO: 170052 - DNA, 120 bp, Artificial Sequence
  ENSG00000108932_13 (sequence is synthesized)
gtgtgcctcgccctggtgagaccgtgtaagatgggactgtgccagcatcatcactcaggtgaaacaaaggtagtgagccatcgtgggaagactttacaggacatacctgaagactttctg

SEQ ID NO: 170053 - DNA, 120 bp, Artificial Sequence
  ENSG00000108932_14 (sequence is synthesized)
gaaatggatcttgcaaaaaatgagcacagagttcacgtgcaaatggagccggtatgacacactttcttacaacaacagccactgtgttggctggagagggatggggtgggcccaacgggg

SEQ ID NO: 170054 - DNA, 120 bp, Artificial Sequence
  ENSG00000108932_15 (sequence is synthesized)
atcgcttttgttttgttttgttttgttttaagctttttttttttgcttgtttttaaagccaaaacaaaaaacaaccaagcactcttccatatataaatctggctgtattcagtagcaata

SEQ ID NO: 170055 - DNA, 120 bp, Artificial Sequence
  ENSG00000108932_16 (sequence is synthesized)
caagagatatgtagaaagactctttggttcacattccgatattaaaatagtgacatgaactggcaaagtggttttaaaagctttcacgtgggataaatgattttctttttttcttttctt

SEQ ID NO: 170056 - DNA, 120 bp, Artificial Sequence
  ENSG00000108932_17 (sequence is synthesized)
tcttcctatggtcttgtctgaataaactactctcctgaataaaacaacatccaacccaggtcattgaaatgaaattggccagtcaaaaaaaaaaagacttcaatcatttttaaaattcct

SEQ ID NO: 170057 - DNA, 120 bp, Artificial Sequence
  ENSG00000108932_18 (sequence is synthesized)
aattttcagaaatatgaataaatagtttttgttaaaccctttgtaaaataccaaggttcccgttaacaaattacggcctctgcttgctggaaatgaaatatagtttaagaccaaacattt

SEQ ID NO: 170058 - DNA, 120 bp, Artificial Sequence
  ENSG00000108932_19 (sequence is synthesized)
tactaataaacaaattttaagtatatatatatatatataacttgaacttcataaatgtgaagattaccacttctttttatggccagtccttatcagaagtgtttcagtacagaatataca

SEQ ID NO: 170059 - DNA, 120 bp, Artificial Sequence
  ENSG00000108932_20 (sequence is synthesized)
aaatggcatttaaaaatgtgtttcctgttgcttttagttatacagaaatatgtgactgtagtgtctttaatttaaaccgctatttattattaagttattctaggatgattaaagtaatca

SEQ ID NO: 170060 - DNA, 120 bp, Artificial Sequence
  ENSG00000108932_21 (sequence is synthesized)
aaagaaataaaatctgagacataagcagcatttttacctcctttctgcaatcctttaaatgcctcacagaatacgtcttatcttgtaaaaatactttcataaaaggccaagttgtcatga

SEQ ID NO: 170061 - DNA, 120 bp, Artificial Sequence
  ENSG00000108932_22 (sequence is synthesized)
ttcttccatttgattaggggcaacgtgtgctattaaaggggaaaaaataatggattgcaaatcgccttagctttcaaaactaatttgttttatcatttaagaatacttgaggaacttctt

SEQ ID NO: 170062 - DNA, 120 bp, Artificial Sequence
  ENSG00000108932_23 (sequence is synthesized)
tgatcagaattatatttcagagaattgttaaagcatttctgatttaaagaaaaaaccatctaattattgaagcatttctgtatttcacatgggggtaacagagacaattatgttatagcg

SEQ ID NO: 170063 - DNA, 120 bp, Artificial Sequence
  ENSG00000108932_24 (sequence is synthesized)
agttacaagttgcaatttacatcttctataacacatgacttgattggtctaagttgccagaggtatcgggtaactggtcattgttttgttttgtttgttttattcttcctttttttttgg

SEQ ID NO: 170064 - DNA, 120 bp, Artificial Sequence
  ENSG00000108932_25 (sequence is synthesized)
agtcacactacatgtatagtattgctcacgttagcagttttctgtaaggagggcaagtgtcaggataataggtggactttttactcacctattttaccacaatctcaccctgcaggtgat

SEQ ID NO: 170065 - DNA, 120 bp, Artificial Sequence
  ENSG00000108932_26 (sequence is synthesized)
ggtcaatgcttgctgctccatctttattcatcgttaatgttaatttatgacaactcagggggaaaaacataacaagcctagtttggttacaggtacacacaagcttgaatatttctctgc

SEQ ID NO: 170066 - DNA, 120 bp, Artificial Sequence
  ENSG00000108932_27 (sequence is synthesized)
actgaaatgaaagtggcatagttcatcaccacctgctacattttgtagagcatcttatcagccatagaaataggacaatctataaaactttggggagggtgggggaggaaatgacaaagt

SEQ ID NO: 170067 - DNA, 120 bp, Artificial Sequence
  ENSG00000108932_28 (sequence is synthesized)
gtctgtcaaaaacaggcataatctaaaacaaggtggatgtagcaaatctctgtcactgcttgagaactttgagcttgtggcagttttgcagacttacatgacttcagcactttacgacat

SEQ ID NO: 170068 - DNA, 120 bp, Artificial Sequence
  ENSG00000108932_29 (sequence is synthesized)
attttttactatgaatgttcaatacaatttaatatttataactgatttctgagggatctgctccatgtctattctgttatctgcatgaaaacaaaatgtatgccaatttcagtatgtcaa

SEQ ID NO: 170069 - DNA, 120 bp, Artificial Sequence
  ENSG00000108932_30 (sequence is synthesized)
taatcaaggttttaaatgtttggaagaaaatacaaacaagattgctgatctgttctgtattagtgacattctggtacttctagatttgcaataaatttatggattttttatttaaagaga

SEQ ID NO: 170070 - DNA, 120 bp, Artificial Sequence
  ENSG00000108932_31 (sequence is synthesized)
agtgggtggagggcccgggcgctcgggcctcaccagcccgagccaacttgcgctagagtcgggcccgccccctaaggggttaatccttttctcatgttaccgagcggcttataaggaggg

SEQ ID NO: 170071 - DNA, 120 bp, Artificial Sequence
  ENSG00000108932_32 (sequence is synthesized)
cttttctcatgttaccgagcggcttataaggagggggaggccaagcctccgccttattgggagcctttgggggtttattctcttcccttctaacttggctggagcgcagcggcacaatct

SEQ ID NO: 170072 - DNA, 120 bp, Artificial Sequence
  ENSG00000108946_0 (sequence is synthesized)
ggtggacagaggagcggagggacgagagggaagcgcacgatagctgcgcggagagagagcgaagagcaggcggaggaacaaaggcgacccaagacacccagagagggacagagaaccatg

SEQ ID NO: 170073 - DNA, 120 bp, Artificial Sequence
  ENSG00000108946_1 (sequence is synthesized)
gagtctggcagtaccgccgccagtgaggaggcacgcagccttcgagaatgtgagctctacgtccagaagcataacattcaagcgctgctcaaagattctattgtgcagttgtgcactgct

SEQ ID NO: 170074 - DNA, 120 bp, Artificial Sequence
  ENSG00000108946_2 (sequence is synthesized)
cgacctgagagacccatggcattcctcagggaatactttgagaggttggagaaggaggaggcaaaacagattcagaatctgcagaaagcaggcactcgtacagactcaagggaggatgag

SEQ ID NO: 170075 - DNA, 120 bp, Artificial Sequence
  ENSG00000108946_3 (sequence is synthesized)
atttctcctcctccacccaacccagtggttaaaggtaggaggcgacgaggtgctatcagcgctgaggtctacacggaggaagatgcggcatcctatgttagaaaggttataccaaaagat

SEQ ID NO: 170076 - DNA, 120 bp, Artificial Sequence
  ENSG00000108946_4 (sequence is synthesized)
tacaagacaatggccgctttagccaaagccattgaaaagaatgtgctgttttcacatcttgatgataatgagagaagtgatatttttgatgccatgttttcggtctcctttatcgcagga

SEQ ID NO: 170077 - DNA, 120 bp, Artificial Sequence
  ENSG00000108946_5 (sequence is synthesized)
gagactgtgattcagcaaggtgatgaaggggataacttctatgtgattgatcaaggagagacggatgtctatgttaacaatgaatgggcaaccagtgttggggaaggagggagctttgga

SEQ ID NO: 170078 - DNA, 120 bp, Artificial Sequence
  ENSG00000108946_6 (sequence is synthesized)
gaacttgctttgatttatggaacaccgagagcagccactgtcaaagcaaagacaaatgtgaaattgtggggcatcgaccgagacagctatagaagaatcctcatgggaagcacactgaga

SEQ ID NO: 170079 - DNA, 120 bp, Artificial Sequence
  ENSG00000108946_7 (sequence is synthesized)
aagcggaagatgtatgaggaattccttagtaaagtctctattttagagtctctggacaagtgggaacgtcttacggtagctgatgcattggaaccagtgcagtttgaagatgggcagaag

SEQ ID NO: 170080 - DNA, 120 bp, Artificial Sequence
  ENSG00000108946_8 (sequence is synthesized)
attgtggtgcagggagaaccaggggatgagttcttcattattttagaggggtcagctgctgtgctacaacgtcggtcagaaaatgaagagtttgttgaagtgggaagattggggccttct

SEQ ID NO: 170081 - DNA, 120 bp, Artificial Sequence
  ENSG00000108946_9 (sequence is synthesized)
gattattttggtgaaattgcactactgatgaatcgtcctcgtgctgccacagttgttgctcgtggccccttgaagtgcgttaagctggaccgacctagatttgaacgtgttcttggccca

SEQ ID NO: 170082 - DNA, 120 bp, Artificial Sequence
  ENSG00000108946_10 (sequence is synthesized)
tgctcagacatcctcaaacgaaacatccagcagtacaacagttttgtgtcactgtctgtctgaaatctgcctcctgtgcctcccttttctcctctccccaatccatgcttcactcatgca

SEQ ID NO: 170083 - DNA, 120 bp, Artificial Sequence
  ENSG00000108946_11 (sequence is synthesized)
aactgctttattttccctacttgcagcgccaagtggccactggcatcgcagcttcctgtctgtttatatattgaaagttgcttttattgcaccattttcaatttggagcattaactaaat

SEQ ID NO: 170084 - DNA, 120 bp, Artificial Sequence
  ENSG00000108946_12 (sequence is synthesized)
gctcatacacagttaaataaatagaaagagttctatggagactttgctgttactgcttctctttgtgcagtgttagtattcaccctgggcagtgagtgccatgctttttggtgagggcag

SEQ ID NO: 170085 - DNA, 120 bp, Artificial Sequence
  ENSG00000108946_13 (sequence is synthesized)
atcccagcacctattgaattaccatagagtaatgatgtaacagtgcaagattttttttttaagtgacataattgtccagttataagcgtatttagactgtggccatatatgctgtatttc

SEQ ID NO: 170086 - DNA, 120 bp, Artificial Sequence
  ENSG00000108946_14 (sequence is synthesized)
actagtttaagggtggaaaaatgcccatttttgctaattatcaatgggatatgattggttcagtttttttttttccagagttgttgtttgccaagctaatctgcctggttttatttatat

SEQ ID NO: 170087 - DNA, 120 bp, Artificial Sequence
  ENSG00000108946_15 (sequence is synthesized)
cttgttattaatgtttcttctccaattctgaaatacttttgagtatggctatctatacctgccttttaagtttgaaactaactcatagattgcaaatattggttagtatttaactacatc

SEQ ID NO: 170088 - DNA, 120 bp, Artificial Sequence
  ENSG00000108946_16 (sequence is synthesized)
tgcctcggctcacaaattccgattagacctttatccagctagtgccaaataattgatcagatgctgaattgagaataagaatttgaggtctacattcttggttgttaatttagagcgttt

SEQ ID NO: 170089 - DNA, 120 bp, Artificial Sequence
  ENSG00000108946_17 (sequence is synthesized)
ggttaaagtatgtccttcagctgactccagtataatctcctctgctcattaaactgattccaggagattggatttgctgtgactagatacagatggagcaaatgtcctaacagagaaata

SEQ ID NO: 170090 - DNA, 120 bp, Artificial Sequence
  ENSG00000108946_18 (sequence is synthesized)
gaggtgatgctgctaaagggagaaatgccaggcggacaaagttcagtgtcgggaattttccccgtgacattcactggggcatgagattttggaagaagttttttactttggtttagtctt

SEQ ID NO: 170091 - DNA, 120 bp, Artificial Sequence
  ENSG00000108946_19 (sequence is synthesized)
tttttccttcctttttattcagctagaatttctggtgggttgatggtagggtataatgtgtctgtgttgcttcaaattggtctgaaaggctatcctgctgaaagtcctgctttcctatct

SEQ ID NO: 170092 - DNA, 120 bp, Artificial Sequence
  ENSG00000108946_20 (sequence is synthesized)
agcatttatttctctggcaaacttttctttcttttcttttttaaagtaaacttgtgtattgagtcttaactgtatttcagtattttccagccttatgtgttacattattccaatgatacc

SEQ ID NO: 170093 - DNA, 120 bp, Artificial Sequence
  ENSG00000108946_21 (sequence is synthesized)
caacagtttatttttattatttttttaaacaaaatttcacagttctgtaatgtaggcacttttattttcattgtgatttatatataaggtaatgtagggttatatttgggagtgactgca

SEQ ID NO: 170094 - DNA, 120 bp, Artificial Sequence
  ENSG00000108946_22 (sequence is synthesized)
agcatttttccatctgtgtgcaactaactgactctgttattgatcccttctcctgccctttcccaggtaatttaaattggtcatggtagatttttttcatagatttgaaaaacttttagg

SEQ ID NO: 170095 - DNA, 120 bp, Artificial Sequence
  ENSG00000108946_23 (sequence is synthesized)
ttgttaccaagtatgaagtataaatctggggaagaggttttatttacattttagggtgggtaagaaagccaccttgttacaaattttttaatttccaaaataatctatattaaatgaggg

SEQ ID NO: 170096 - DNA, 120 bp, Artificial Sequence
  ENSG00000108946_24 (sequence is synthesized)
tttctgatctgtactttgtgtttagctacctttttatatttaaaaaattaaaaatgaaaattacgttcttacaagcttaaagcttgatttgatctttgtttaaatgccaaaatgtactta

SEQ ID NO: 170097 - DNA, 120 bp, Artificial Sequence
  ENSG00000108946_25 (sequence is synthesized)
aatgagttacttagaatgccataaaattgcagtttcatgtatgtatataatcatgctcatgtatatttagttacgtataatgctttctgagtgagttttactcttaaatcatttggttaa

SEQ ID NO: 170098 - DNA, 120 bp, Artificial Sequence
  ENSG00000108946_26 (sequence is synthesized)
atcatttggcttgctgtttactcccttctgtagtttttaattaaaaactttaaagataagtctacattaaacaatgatcacatctaaagctttatctttgtgtaatctaagtatatgtga

SEQ ID NO: 170099 - DNA, 120 bp, Artificial Sequence
  ENSG00000108946_27 (sequence is synthesized)
gaaatcagaattggcataatttgtcttagttgatattcaaggctttaaaagtcattattcctgggcttggtaagtgaatttatgagatttactgctctagaaagtatagatggccaaagg

SEQ ID NO: 170100 - DNA, 120 bp, Artificial Sequence
  ENSG00000108946_28 (sequence is synthesized)
accgttttgtattgcttcctgattaccagtctgattataccatgtgtgctaatatactttttttgttatagattgtcttaatggtaggtcaagtaataaaaagagatgaaataatttaaa

SEQ ID NO: 170101 - DNA, 120 bp, Artificial Sequence
  ENSG00000108946_29 (sequence is synthesized)
attgacgtcagtagccgaacgctgattggctgcggccaggccgtttccggtggagctgtcgcctagccgctatcgcagagtggagcggggctgggagcaaagcgctgagggagctcggta

SEQ ID NO: 170102 - DNA, 120 bp, Artificial Sequence
  ENSG00000108946_30 (sequence is synthesized)
cccgaaagtctactcgggtgggcaaaaatgaaaagggggaaagtgaattatgggatcggtgttttgaaagagcaatgtttattttcagtgcttttcagtttgtcaaagagtggatctcaa

SEQ ID NO: 170103 - DNA, 120 bp, Artificial Sequence
  ENSG00000108946_31 (sequence is synthesized)
aatcttgcttaaagggtaattgagatgtagcagatttatttacttagtcatggaaagaaaaaaattcagtcaaaagctaaagatttccttttgattgaagacagattggttctgtggcct

SEQ ID NO: 170104 - DNA, 120 bp, Artificial Sequence
  ENSG00000108946_32 (sequence is synthesized)
tggaactttcccagacttaatggggaaacatcatttctagattagcatactctttggtttaaatttaatatatacatttaatgttacttagggatacttttatattttgcatatataaag

SEQ ID NO: 170105 - DNA, 120 bp, Artificial Sequence
  ENSG00000108946_33 (sequence is synthesized)
cctcatatataaagccttatttctgatgctcttagatttctgaggagtgagatgattaagttgtattcattagtgtattggtatttcttcacatccagtgaaattggagatatgttgtat

SEQ ID NO: 170106 - DNA, 120 bp, Artificial Sequence
  ENSG00000108946_34 (sequence is synthesized)
gttagaagagcattctttaaattgtgttgctttgaacatgtgtaccttttctagattcagtaatcccttccccccgtcctctggagtatgaaacctttagagtcacaataaaatgtaact

SEQ ID NO: 170107 - DNA, 120 bp, Artificial Sequence
  ENSG00000108946_35 (sequence is synthesized)
atcgcagagtggagcggggctgggagcaaagcgctgagggagctcggtacgccgccgcctcgcacccgcagcctcgcgcccgccgccgcccgtccccagttgacttttgtgccctggtaa

SEQ ID NO: 170108 - DNA, 120 bp, Artificial Sequence
  ENSG00000108946_36 (sequence is synthesized)
ttctgtatcctgtttaccgtttacctacttcccacgtcatcatgatttcttttgagggagaactgaatgaaattcccttaagggcctgacttcagcacccgtctctgcagagagaaccat

SEQ ID NO: 170109 - DNA, 120 bp, Artificial Sequence
  ENSG00000108946_37 (sequence is synthesized)
taattttcttgtgtgtttttaaaaattttgattatgctagtagttggctaatcagatcctcactccagtggtttgctctgtgacgttaggatactcccatgggatagaagttacgtatag

SEQ ID NO: 170110 - DNA, 120 bp, Artificial Sequence
  ENSG00000108946_38 (sequence is synthesized)
gcacagatcctgaactaaatgaaacatttacttggaataatgctaattctgtacatattttattccctagtccccacttccctgtttaaaaacaaaatctacttagaaaaaaatccctgt

SEQ ID NO: 170111 - DNA, 120 bp, Artificial Sequence
  ENSG00000108946_39 (sequence is synthesized)
cgaccgagacagctatagaagaatcctcatgggaagcacactgagaaagcggaagatgtatgaggaattccttagtaaagtctctattttagttggtataaattaacctagccactgggc

SEQ ID NO: 170112 - DNA, 80 bp, Artificial Sequence
  ENSG00000108946_40 (sequence is synthesized)
gagcgcatcccggccatccgcccgcgctcggccccgcagcgcagctgctgcagatccgcgggggccgccacctcctccgg

SEQ ID NO: 170113 - DNA, 120 bp, Artificial Sequence
  ENSG00000108946_41 (sequence is synthesized)
ccctcccttgcaggggctgcggggaggagtcgcccacctgtcatctgagacgccccacgtgggtcggccagggagggggtggaaaggagggagaaaaggcagaggcgtcaagggaggccg

SEQ ID NO: 170114 - DNA, 120 bp, Artificial Sequence
  ENSG00000108946_42 (sequence is synthesized)
gagggagagtggggtggacagaggagcggagggacgagagggaagcgcacgatagctgcgcggagagagagcgaagagcaggcggaggaacaaaggcgacccaagacacccagagaggga

SEQ ID NO: 170115 - DNA, 120 bp, Artificial Sequence
  ENSG00000108946_43 (sequence is synthesized)
gggagctcggtacgccgccgcctcgcacccgcagcctcgcgcccgccgccgcccgtccccaggacaacggctctattttactggggtccgccatcgtctcgtccgccggtcctggctctt

SEQ ID NO: 170116 - DNA, 120 bp, Artificial Sequence
  ENSG00000108946_44 (sequence is synthesized)
tttggtcacctcatcatctcaaggaggagcattcccctgggctaaggcactggggccgaactctaggagaccctaacctgtgggctgcagatcctttgggggccagaaacccaaactcac

SEQ ID NO: 170117 - DNA, 120 bp, Artificial Sequence
  ENSG00000108946_45 (sequence is synthesized)
accaagctctgtctaaggactcaatacatattatttcactcatctctatgtttcacaaaattttcaaggcatgtagttgctgttgttatgaataaaatataaattaatgtaaacatgtaa

SEQ ID NO: 170118 - DNA, 120 bp, Artificial Sequence
  ENSG00000108946_46 (sequence is synthesized)
tattttactggggtccgccatcgtctcgtccgccggtcctggctcttcttgtaagccggtagttttcctctccacttttgacgactcgtcattgctagcagtagcctttcctcttcatag

SEQ ID NO: 170119 - DNA, 120 bp, Artificial Sequence
  ENSG00000108946_47 (sequence is synthesized)
cggagtgatctttcccccaacacgacggtcttagtcgggctcctgaatttcctcttgtcccctttcacctctctccctttcccaattttgcccccctgaggcctcctcgccaccactgtg

SEQ ID NO: 170120 - DNA, 120 bp, Artificial Sequence
  ENSG00000108946_48 (sequence is synthesized)
ggtaaaaataaatgtggggagatgatgaggtgattgtgacagttgttacatttaataactggaatgttactaatttgtattttttggaagaaaaggaatctgactaaataaaaagtctaa

SEQ ID NO: 170121 - DNA, 120 bp, Artificial Sequence
  ENSG00000108946_49 (sequence is synthesized)
aacaatttcaaataagaaatacagttaaggcatttgtagtaatttaaaaattcttaattagtagaatttatcagaaaaatgaacctgtatgctaactgtacttggctaataaagggtttc

SEQ ID NO: 170122 - DNA, 120 bp, Artificial Sequence
  ENSG00000108946_50 (sequence is synthesized)
tgtcaacatactggttgcaaatgctaggaattgggcataatattggcggaaaataaaaatcacaagaatgtcatatcattcattacctgtaaaataaaaatgaattagttaaaattaaac

SEQ ID NO: 170123 - DNA, 120 bp, Artificial Sequence
  ENSG00000108946_51 (sequence is synthesized)
tttcctcattaaaagcaacaagctttgactttctggttttaaaatttatttgaaacttaatatttattattccatagcattatgtggtgataattacacgtcttggggatatcacttttg

SEQ ID NO: 170124 - DNA, 120 bp, Artificial Sequence
  ENSG00000108947_0 (sequence is synthesized)
ggtttcctcccttagcccgctgccctcaatcccagcgaggctggggctccggctcggcgcccccttcctcgctccctggtccggcgccccatgccgcccccgcccggtccccggctcccc

SEQ ID NO: 170125 - DNA, 120 bp, Artificial Sequence
  ENSG00000108947_1 (sequence is synthesized)
cagtcccccacttaggcgggctcacagatcccggggtgctggcgcgtgggccgggggcgcgtagggcgcctgcagacggcccctggaagggctctggtggggctgagcgctctgccgcgg

SEQ ID NO: 170126 - DNA, 120 bp, Artificial Sequence
  ENSG00000108947_2 (sequence is synthesized)
gggcgcgggcacagcaggaagcaggtccgcgtgggcgctgggggcatcagctaccggggtggtccgggctgaagagccaggcagccaaggcagccaccccggggggtgggcgactttggg

SEQ ID NO: 170127 - DNA, 120 bp, Artificial Sequence
  ENSG00000108947_3 (sequence is synthesized)
ggagttggtgccccgccccccaggccttggcggggtcatggggcccccccattctgggccggggggcgtgcgagtcggggccctgctgctgctgggggttttggggctggtgtctgggct

SEQ ID NO: 170128 - DNA, 120 bp, Artificial Sequence
  ENSG00000108947_4 (sequence is synthesized)
cagcctggagcctgtctactggaactcggcgaataagaggttccaggcagagggtggttatgtgctgtaccctcagatcggggaccggctagacctgctctgcccccgggcccggcctcc

SEQ ID NO: 170129 - DNA, 120 bp, Artificial Sequence
  ENSG00000108947_5 (sequence is synthesized)
tggccctcactcctctcctaattatgagttctacaagctgtacctggtagggggtgctcagggccggcgctgtgaggcaccccctgccccaaacctccttctcacttgtgatcgcccaga

SEQ ID NO: 170130 - DNA, 120 bp, Artificial Sequence
  ENSG00000108947_6 (sequence is synthesized)
cctggatctccgcttcaccatcaagttccaggagtatagccctaatctctggggccacgagttccgctcgcaccacgattactacatcattgccacatcggatgggacccgggagggcct

SEQ ID NO: 170131 - DNA, 120 bp, Artificial Sequence
  ENSG00000108947_7 (sequence is synthesized)
ggagagcctgcagggaggtgtgtgcctaaccagaggcatgaaggtgcttctccgagtgggacaaagtccccgaggaggggctgtcccccgaaaacctgtgtctgaaatgcccatggaaag

SEQ ID NO: 170132 - DNA, 120 bp, Artificial Sequence
  ENSG00000108947_8 (sequence is synthesized)
agaccgaggggcagcccacagcctggagcctgggaaggagaacctgccaggtgaccccaccagcaatgcaacctcccggggtgctgaaggccccctgccccctcccagcatgcctgcagt

SEQ ID NO: 170133 - DNA, 120 bp, Artificial Sequence
  ENSG00000108947_9 (sequence is synthesized)
ggctggggcagcaggggggctggcgctgctcttgctgggcgtggcaggggctgggggtgccatgtgttggcggagacggcgggccaagccttcggagagtcgccaccctggtcctggctc

SEQ ID NO: 170134 - DNA, 120 bp, Artificial Sequence
  ENSG00000108947_10 (sequence is synthesized)
cttcgggaggggagggtctctgggcctggggggtggaggtgggatgggacctcgggaggctgagcctggggagctagggatagctctgcggggtggcggggctgcagatccccccttctg

SEQ ID NO: 170135 - DNA, 120 bp, Artificial Sequence
  ENSG00000108947_11 (sequence is synthesized)
cccccactatgagaaggtgagtggtgactatgggcatcctgtgtatatcgtgcaggatgggcccccccagagccctccaaacatctactacaaggtatgagggctcctctcacgtggcta

SEQ ID NO: 170136 - DNA, 120 bp, Artificial Sequence
  ENSG00000108947_12 (sequence is synthesized)
tcctgaatccagcccttcttggggtgctcctccagtttaattcctggtttgagggacacctctaacatctcggccccctgtgcccccccagccccttcactcctcccggctgctgtcctc

SEQ ID NO: 170137 - DNA, 120 bp, Artificial Sequence
  ENSG00000108947_13 (sequence is synthesized)
cctttttccttggggaggggcacaggctcagcctcctctctgaccatgacccaggcatccttgtccccctcacccacccagagctaggggcgggaacagcccaccttttggttggcaccg

SEQ ID NO: 170138 - DNA, 120 bp, Artificial Sequence
  ENSG00000108947_14 (sequence is synthesized)
ccttctttctgcctctcactggttttctcttctctatctcttattctttccctctcttccgtctctaggtctgttcttcttccctagcatcctcctccccacatctcctttcaccctctt

SEQ ID NO: 170139 - DNA, 120 bp, Artificial Sequence
  ENSG00000108947_15 (sequence is synthesized)
ggcttcttatcctgtgcctctcccatctcctgggtgggggcatcaaagcatttctccccttagctttcagccccccttctgacctctcataccaaccactcccctcagtctgccaaaaat

SEQ ID NO: 170140 - DNA, 120 bp, Artificial Sequence
  ENSG00000108947_16 (sequence is synthesized)
gggggccttatggggaaggctctgacactccaccccagctcaggccatgggcagcagggctccattctctggcctggcccaggcctctacatacttactccagccatttggggtggttgg

SEQ ID NO: 170141 - DNA, 120 bp, Artificial Sequence
  ENSG00000108947_17 (sequence is synthesized)
gtcatgacagctaccatgagaagaagtgtcccgttttgtccagtggccaatagcaagatatgaaccggtcgggacatgtatggacttggtctgatgctgaatgggccacttgggaccgga

SEQ ID NO: 170142 - DNA, 120 bp, Artificial Sequence
  ENSG00000108947_18 (sequence is synthesized)
agtgacttgctccagacaagaggtgaccaggcccggacagaaatggcctgggaagtagcagaagcagtgcagcaggaactggaagtgccttcatccaggacaggaagtagcacttctgaa

SEQ ID NO: 170143 - DNA, 120 bp, Artificial Sequence
  ENSG00000108947_19 (sequence is synthesized)
acaggaagtggtctggctggaactccaagtggcttagtctgggggatcaggaggtgggaggtggatggttcttattctgtggagaagaagggcgggaagaacttcctttcaggaggaagc

SEQ ID NO: 170144 - DNA, 120 bp, Artificial Sequence
  ENSG00000108947_20 (sequence is synthesized)
tggaacttactgactgtaagaggttagaggtggaccgagaaggacttttcccagtcttcagtggcacttcccaagatctcccttcccttgtgctctgtgctgattttaggacagctaaga

SEQ ID NO: 170145 - DNA, 120 bp, Artificial Sequence
  ENSG00000108947_21 (sequence is synthesized)
tgactgccatgtgctgtggcaggcctaatttgtcttgttctttcctttccatatcccagtataatctctgttaatcaacaggactaccccaagaacccatgtgctctcccgagtaaccca

SEQ ID NO: 170146 - DNA, 120 bp, Artificial Sequence
  ENSG00000108947_22 (sequence is synthesized)
gatggctgtcttgttcattccatcctacatttctgactcctttcagactcaacacagttcccttcttagtgaccaaaatggtggcctactggctggtctagctgacagtggtacttagca

SEQ ID NO: 170147 - DNA, 120 bp, Artificial Sequence
  ENSG00000108947_23 (sequence is synthesized)
aaggccactgtttccatagtgaccagctgatacctcttcctgccctctagtgtgcaattgggtgttgcctcagtttcctcccagctcagttttattagatcaaagctgttgttgggcacc

SEQ ID NO: 170148 - DNA, 120 bp, Artificial Sequence
  ENSG00000108947_24 (sequence is synthesized)
aggttggccacctcaatcaccagccaagatggttgctttgtccaccagaggtcaagttcacctctctggtgctgtagttcccagctccttcctgatttttctaatcgctccttctgggga

SEQ ID NO: 170149 - DNA, 120 bp, Artificial Sequence
  ENSG00000108947_25 (sequence is synthesized)
tcgctccttctggggaacaggaagttgatattgccatggtggcggggtatgccgtcacctcagtagttttactgtaaaagggaaatttgaacaacaaaaaccaaaaaaaataaaaataaa

SEQ ID NO: 170150 - DNA, 120 bp, Artificial Sequence
  ENSG00000108950_0 (sequence is synthesized)
agttggccgtcagctgcgccagaggcaggtgccagcggagagtgggtgggggtgccggcgccaggccaggctcggggaggccccgcgctacctctgcctctaggagtccaggcgcacaga

SEQ ID NO: 170151 - DNA, 120 bp, Artificial Sequence
  ENSG00000108950_1 (sequence is synthesized)
caagctccccggagccgctcctgcttcgccaactccccactcgcgccgcccgtgccagccgccggcactggcgtctccgccgcccgcaggaggagtcgcgggagcactagcagccgccgc

SEQ ID NO: 170152 - DNA, 120 bp, Artificial Sequence
  ENSG00000108950_2 (sequence is synthesized)
gagtcgcgggagcactagcagccgccgccgagcgacagcatcctcaggagagacgccccgggctttgcagccggcggcctccgtccgccctccgcggtcgccccccgccccgtcgcccgt

SEQ ID NO: 170153 - DNA, 120 bp, Artificial Sequence
  ENSG00000108950_3 (sequence is synthesized)
ccccggggcccttcacctgccgcgagcgtccgggcgggcgggcgcacgggagaaaaggcgcaagaagcgggcaccccgggaaccccattccctcggctcactcggcgcggagaagcgacg

SEQ ID NO: 170154 - DNA, 120 bp, Artificial Sequence
  ENSG00000108950_4 (sequence is synthesized)
cccgctgactccgagagccccggtgctccgtgcacctggtccccaagttgaggagcgacacccctccacaggggactagcccgcgcggggagcattccggtctcactgaccccggcccac

SEQ ID NO: 170155 - DNA, 120 bp, Artificial Sequence
  ENSG00000108950_5 (sequence is synthesized)
cttctgcccgcaccccgcgacccctcccgggaccccggagacagccggcctgcccccggcgtcccccttggccagcacgccatgccggggctgcgccgggaccgcctactgactctgctg

SEQ ID NO: 170156 - DNA, 120 bp, Artificial Sequence
  ENSG00000108950_6 (sequence is synthesized)
accgcctactgactctgctgctgctgggcgcgctgctctccgccgacctctacttccacctctggccccaagtacagcgccagctgcggcctcgggagcgcccgcgggggtgcccgtgca

SEQ ID NO: 170157 - DNA, 120 bp, Artificial Sequence
  ENSG00000108950_7 (sequence is synthesized)
ccggccgcgcctcctccctggcgcgggactcggccgcagctgcctcggaccccggcacgatcgtgcacaacttttcccgaaccgagccccggactgaaccggctggcggcagccacagcg

SEQ ID NO: 170158 - DNA, 120 bp, Artificial Sequence
  ENSG00000108950_8 (sequence is synthesized)
ggtcgagctccaagttgcaggccctcttcgcccacccgctgtacaacgtcccggaggagccgcctctcctgggagccgaggactcgctcctggccagccaggaggcgctgcggtattacc

SEQ ID NO: 170159 - DNA, 120 bp, Artificial Sequence
  ENSG00000108950_9 (sequence is synthesized)
ggaggaaggtggcccgctggaacaggcgacacaagatgtacagagagcagatgaaccttacctccctggaccccccactgcagctccgactcgaggccagctgggtccagttccacctgg

SEQ ID NO: 170160 - DNA, 120 bp, Artificial Sequence
  ENSG00000108950_10 (sequence is synthesized)
gtattaaccgccatgggctctactcccggtccagccctgttgtcagcaaacttctgcaagacatgaggcactttcccaccatcagtgctgattacagtcaagatgagaaagccttgctgg

SEQ ID NO: 170161 - DNA, 120 bp, Artificial Sequence
  ENSG00000108950_11 (sequence is synthesized)
gggcatgtgactgcacccagattgtgaaacccagtggggtccacctcaagctggtgctgaggttctcggatttcgggaaggccatgttcaaacccatgagacagcagcgagatgaggaga

SEQ ID NO: 170162 - DNA, 120 bp, Artificial Sequence
  ENSG00000108950_12 (sequence is synthesized)
caccagtggacttcttctacttcattgactttcagagacacaatgctgagatcgcagctttccatctggacaggattctggacttccgacgggtgccgccaacagtggggaggatagtaa

SEQ ID NO: 170163 - DNA, 120 bp, Artificial Sequence
  ENSG00000108950_13 (sequence is synthesized)
atgtcaccaaggaaatcctagaggtcaccaagaatgaaatcctgcagagtgttttctttgtctctccagcgagcaacgtgtgcttcttcgccaagtgtccatacatgtgcaagacggagt

SEQ ID NO: 170164 - DNA, 120 bp, Artificial Sequence
  ENSG00000108950_14 (sequence is synthesized)
atgctgtctgtggcaacccacacctgctggagggttccctctctgccttcctgccgtccctcaacctggcccccaggctgtctgtgcccaacccctggatccgctcctacacactggcag

SEQ ID NO: 170165 - DNA, 120 bp, Artificial Sequence
  ENSG00000108950_15 (sequence is synthesized)
gaaaagaggagtgggaggtcaatcccctttactgtgacacagtgaaacagatctacccgtacaacaacagccagcggctcctcaatgtcatcgacatggccatcttcgacttcttgatag

SEQ ID NO: 170166 - DNA, 120 bp, Artificial Sequence
  ENSG00000108950_16 (sequence is synthesized)
ggaatatggaccggcaccattatgagatgttcaccaagttcggggatgatgggttccttattcaccttgacaacgccagagggttcggacgacactcccatgatgaaatctccatcctct

SEQ ID NO: 170167 - DNA, 120 bp, Artificial Sequence
  ENSG00000108950_17 (sequence is synthesized)
cgcctctctcccagtgctgcatgataaaaaagaaaacacttttgcacctgcagctgctggcccaagctgactacagactcagcgatgtgatgcgagaatcactgctggaagaccagctca

SEQ ID NO: 170168 - DNA, 120 bp, Artificial Sequence
  ENSG00000108950_18 (sequence is synthesized)
gccctgtcctcactgaaccccacctccttgccctggatcgaaggctccaaaccatcctaaggacagtggaggggtgcatagtggcccatggacagcagagtgtcatagtcgacggcccag

SEQ ID NO: 170169 - DNA, 120 bp, Artificial Sequence
  ENSG00000108950_19 (sequence is synthesized)
ttggccccagactctggccaggctaacttgacaagctaagggctggcagagtccagtttcagaaaatacgcctggagccagagcagtcgactcgagtgccgaccctgcgtcctcactccc

SEQ ID NO: 170170 - DNA, 120 bp, Artificial Sequence
  ENSG00000108950_20 (sequence is synthesized)
acctgttactgctgggagtcaagtcagctaggaaggaagcaggacattttctcaaacagcaagtggggcccatggaactgaatctttactccttggtgcaccgcttctgtcgtgcgttgc

SEQ ID NO: 170171 - DNA, 120 bp, Artificial Sequence
  ENSG00000108950_21 (sequence is synthesized)
cttgctccgtttttcccaaaaagcactggcttcatcaaggccaccgacgatctcctgagtgcactgggaaatctgggtataggtcaggcttggcagccttgatcccaggagagtactaat

SEQ ID NO: 170172 - DNA, 120 bp, Artificial Sequence
  ENSG00000108950_22 (sequence is synthesized)
ggtaacaagtcaaataaaaggacatcaagtggatacctgacttctcaggatccttattctagctacaagtcaaagataactcctggtccagacaaaacacctggcctatcacaagctgac

SEQ ID NO: 170173 - DNA, 120 bp, Artificial Sequence
  ENSG00000108950_23 (sequence is synthesized)
taaaaatctgcactttgggccagcgcaggcaacagtaactctgacaggttcaaattagacctcacactttctactcatattctagtcactggacccatctgaatcagtaatccctactgc

SEQ ID NO: 170174 - DNA, 120 bp, Artificial Sequence
  ENSG00000108950_24 (sequence is synthesized)
ccggtcctggagtaacttcttagagatattataacaagtggcaaaaataaaagagggatttgctaagaatatcagaaaaggagtgttccaatttgaagagtattacaattgaaataacat

SEQ ID NO: 170175 - DNA, 120 bp, Artificial Sequence
  ENSG00000108950_25 (sequence is synthesized)
caaatatgtcacactaagcagccagtaacagaataaataattacaacgaaggaaaaaaaaaggaaagtcctccaaggtcaggatggcatgggaacaggcctagcagggacacaagcctgg

SEQ ID NO: 170176 - DNA, 120 bp, Artificial Sequence
  ENSG00000108950_26 (sequence is synthesized)
agtaaggcaggaaaagagccaaggctgactacagcccaccaaccacaatcttcttccctaagaccccaggattgtccccggcccatccccaaaagaagaaaggggctatgtggaaaggtg

SEQ ID NO: 170177 - DNA, 120 bp, Artificial Sequence
  ENSG00000108950_27 (sequence is synthesized)
aggccctctagatgcccctccctgtgacggctggctcaaaaaagactaagtcaggttttttattgaagcctcccttagaagaaagtgtagtagggattccttgtctcctctaccttctcc

SEQ ID NO: 170178 - DNA, 120 bp, Artificial Sequence
  ENSG00000108950_28 (sequence is synthesized)
ctgacttgttgatatctgaaactccttttaataggaggctttgtttcttattccataattaatgaccgaaaacacaaaggacagtaaggtcttcattccatggagtgactagtcagtcaa

SEQ ID NO: 170179 - DNA, 120 bp, Artificial Sequence
  ENSG00000108950_29 (sequence is synthesized)
caaaagtaaaaatgcctcatttcatcaaatcaacttttccagtaaaggccagagttcaaatactgtaagcatgagaatagaatggagctgtcactaaagagagtacaaggtcaagaacca

SEQ ID NO: 170180 - DNA, 120 bp, Artificial Sequence
  ENSG00000108950_30 (sequence is synthesized)
gaaatgtctccaagctttctgcagtgtgagcaaagatagcctcgactggacaaataacacttctgaccccgtggtacccccacatgactggtatgctgcccctggactttgtgtctctct

SEQ ID NO: 170181 - DNA, 120 bp, Artificial Sequence
  ENSG00000108950_31 (sequence is synthesized)
aaaatcactaccattcactgagatctgaccaggtgaggcactcaccaacgctacagaagcaacacacaggtttccaatcctctcaaacacagatacaacccccatcctccaatgtgcatg

SEQ ID NO: 170182 - DNA, 120 bp, Artificial Sequence
  ENSG00000108950_32 (sequence is synthesized)
gaagaactttaaatctcagagagagtaagcaaaatcacacaatttagtggtttagacctattccaaagtcttcttttcactgtaacacaaaacccaacagtatcccacccaatttatgaa

SEQ ID NO: 170183 - DNA, 87 bp, Artificial Sequence
  ENSG00000108950_33 (sequence is synthesized)
tgtaacacaaaacccaacagtatcccacccaatttatgaagtcaaatttgtttgcttaaaaaaaaaatcagctgggcactaaacagg

SEQ ID NO: 170184 - DNA, 120 bp, Artificial Sequence
  ENSG00000108950_34 (sequence is synthesized)
cctgtctctacaaaaaaatacaaaaaaaaaaaaatttttttttaaatcaactctttaacagagaaaccttaatcccaaagatttccttaactgttgtggccctactgcagcatagggctc

SEQ ID NO: 170185 - DNA, 120 bp, Artificial Sequence
  ENSG00000108950_35 (sequence is synthesized)
agcatagggctccccacttcattcactgtctctcctgcttcaagatgtttcttccctgtggatgaagaaccaggagatcacacacagaaatgggaaaatatctgggtaaaaacattcaaa

SEQ ID NO: 170186 - DNA, 120 bp, Artificial Sequence
  ENSG00000108950_36 (sequence is synthesized)
gaatagcacaaaatggtttgggacttccaaataagactctcaggaaagcaggctacagctctacctcaaaacccgccacctcctataacgaaggactggttttccaatggcctatataca

SEQ ID NO: 170187 - DNA, 120 bp, Artificial Sequence
  ENSG00000108950_37 (sequence is synthesized)
cattttgctgcactctacaaacagaaagcaataggcttgaatttcaccatgatatgtggtacacctaccttattattcacttatctttcaaccttccattactttttgattagtaacaaa

SEQ ID NO: 170188 - DNA, 120 bp, Artificial Sequence
  ENSG00000108950_38 (sequence is synthesized)
attaagactcatttctcaaaaatatcagaaaaccaaccgtttcattcttactcgagttcttccagcatgttcattttgaactgtttacctcccatgaaataaaaagtctcttgactctga

SEQ ID NO: 170189 - DNA, 120 bp, Artificial Sequence
  ENSG00000108950_39 (sequence is synthesized)
gagggggagtctgtgacccctgaggcctccttgcaactctgttttccaagctttgcacatcttccgaatttcttcttcaaagtctaccctaatgaaatatcagacaattttccaagtgtg

SEQ ID NO: 170190 - DNA, 120 bp, Artificial Sequence
  ENSG00000108950_40 (sequence is synthesized)
aagaggagtgagttggtccccaggccacacagcccagtccttgacagtagccacagaccctgtaccagggacttgttgctagcttggcttttgaatctgaaaagctgcctcaatactcct

SEQ ID NO: 170191 - DNA, 120 bp, Artificial Sequence
  ENSG00000108950_41 (sequence is synthesized)
ttgccccatttcatattgatcctgggatcagcaggcctgggtctgttctcccctttagttcatttattcagttctaaagaaccttccatatacccaacactaggtgttatgggatacaga

SEQ ID NO: 170192 - DNA, 120 bp, Artificial Sequence
  ENSG00000108950_42 (sequence is synthesized)
aatggaagactcagactctctccttgagaagctccttggtctagtggggagaacagacatgtagccagatcacgaaaacacagcacagcacttgctataaccagggagcacacgagaatc

SEQ ID NO: 170193 - DNA, 120 bp, Artificial Sequence
  ENSG00000108950_43 (sequence is synthesized)
ccatgggagggacacctggttcccgagcaagccctgggagaccaaggacctcactgctgtatccccaggacctagcaccctccctggcacatagcaggtactccacactagctgactgag

SEQ ID NO: 170194 - DNA, 120 bp, Artificial Sequence
  ENSG00000108950_44 (sequence is synthesized)
tgaatcgatccatcagtcaagccgtcatgatcatcgtgggaaaagaagtaaccaggcagaatttctggaggacatgacagatcctaagggactctgtgaaggctgagaagagccctcgga

SEQ ID NO: 170195 - DNA, 120 bp, Artificial Sequence
  ENSG00000108950_45 (sequence is synthesized)
tgaaaatgggcatcggagcattgtaggcagaaaaccatgtgtgagagagaaagggcaggaacagcccatggaggtgctatgagtggcgcagggtccaagaggcttggtgagagggactgt

SEQ ID NO: 170196 - DNA, 120 bp, Artificial Sequence
  ENSG00000108950_46 (sequence is synthesized)
ggagggacgaggaagcaggtgagggtcactacctcctcctttcctgcctgccccggcctctcccctctggcacacagtatcccaaccatgggtttagtgtccaccagacttaaaggaccc

SEQ ID NO: 170197 - DNA, 120 bp, Artificial Sequence
  ENSG00000108950_47 (sequence is synthesized)
aggaccttctcaccacacggaatatgcagccttacgcgtccttgcccagggcctttctgaattttagaagctgccaccagcccagggcaggatcagggaggcagggattgggggggcagg

SEQ ID NO: 170198 - DNA, 120 bp, Artificial Sequence
  ENSG00000108953_0 (sequence is synthesized)
ggattgaggcgccgccatttttgctgcccggacgcggagcgagaggctgagagagtcggagacactatccgcttccatccgtcgcgcagaccctgccggagccgctgccgctatggatga

SEQ ID NO: 170199 - DNA, 120 bp, Artificial Sequence
  ENSG00000108953_1 (sequence is synthesized)
tcgagaggatctggtgtaccaggcgaagctggccgagcaggctgagcgatacgacgaaatggtggagtcaatgaagaaagtagcagggatggatgtggagctgacagttgaagaaagaaa

SEQ ID NO: 170200 - DNA, 120 bp, Artificial Sequence
  ENSG00000108953_2 (sequence is synthesized)
cctcctatctgttgcatataagaatgtgattggagctagaagagcctcctggagaataatcagcagcattgaacagaaagaagaaaacaagggaggagaagacaagctaaaaatgattcg

SEQ ID NO: 170201 - DNA, 120 bp, Artificial Sequence
  ENSG00000108953_3 (sequence is synthesized)
ggaatatcggcaaatggttgagactgagctaaagttaatctgttgtgacattctggatgtactggacaaacacctcattccagcagctaacactggcgagtccaaggttttctattataa

SEQ ID NO: 170202 - DNA, 120 bp, Artificial Sequence
  ENSG00000108953_4 (sequence is synthesized)
aatgaaaggggactaccacaggtatctggcagaatttgccacaggaaacgacaggaaggaggctgcggagaacagcctagtggcttataaagctgctagtgatattgcaatgacagaact

SEQ ID NO: 170203 - DNA, 120 bp, Artificial Sequence
  ENSG00000108953_5 (sequence is synthesized)
tccaccaacgcatcctattcgcttaggtcttgctctcaatttttccgtattctactacgaaattcttaattcccctgaccgtgcctgcaggttggcaaaagcagcttttgatgatgcaat

SEQ ID NO: 170204 - DNA, 120 bp, Artificial Sequence
  ENSG00000108953_6 (sequence is synthesized)
tgcagaactggatacgctgagtgaagaaagctataaggactctacacttatcatgcagttgttacgtgataatctgacactatggacttcagacatgcagggtgacggtgaagagcagaa

SEQ ID NO: 170205 - DNA, 120 bp, Artificial Sequence
  ENSG00000108953_7 (sequence is synthesized)
taaagaagcgctgcaggacgtggaagacgaaaatcagtgagacataagccaacaagagaaaccatctctgaccaccccctcctccccatcccaccctttggaaactccccattgtcactg

SEQ ID NO: 170206 - DNA, 120 bp, Artificial Sequence
  ENSG00000108953_8 (sequence is synthesized)
tctgacttttacatttggtctcagaatttaggttcctgccctgttggttttttttttttttttttaaacagttttcaaaagttcttaaaggcaagagtgaatttctgtggattttactgg

SEQ ID NO: 170207 - DNA, 120 bp, Artificial Sequence
  ENSG00000108953_9 (sequence is synthesized)
tcccagcttttaggttctttaagacactaacaggactacatagaggctttttcagcattactgtgtcgtctccgtgccagatgtggcaagatcaccattagcaaatggaaattacatttg

SEQ ID NO: 170208 - DNA, 120 bp, Artificial Sequence
  ENSG00000108953_10 (sequence is synthesized)
aaagccattagacttataggtgatgcaagcatctaagagagaggttaatcacactatagaggcataagtggtatcagttttcatttttctaattgtttaaactgtgttttataccagtgt

SEQ ID NO: 170209 - DNA, 120 bp, Artificial Sequence
  ENSG00000108953_11 (sequence is synthesized)
ttgcaagtaattgggtgttagcttgagatggttaaaggtggtttggggagggacttcgttgtaatggttttgctgtaaaaaatgtttccaactccgctgaaatgttgctgaaaagcatgg

SEQ ID NO: 170210 - DNA, 120 bp, Artificial Sequence
  ENSG00000108953_12 (sequence is synthesized)
tgctggtaacagttcaacaatccgtggctgctcattcttgcctactttactctcccactgaagcaggttagcgttgaaggtggtatggaaaagcctgcatgcctgttcaattcttttgtt

SEQ ID NO: 170211 - DNA, 120 bp, Artificial Sequence
  ENSG00000108953_13 (sequence is synthesized)
tcttctccttccccctccccctacctccttcccctcactcctcccctccttcgctcgctcaacctcttttgttcagtatgtgtaacttgaagctaatttgtactactggatatctgactg

SEQ ID NO: 170212 - DNA, 120 bp, Artificial Sequence
  ENSG00000108953_14 (sequence is synthesized)
gagccacagatacagaatctgtattgttcttactgaaacacagcatggaattaacattaaacttaaataaaacaaacctaaattaaaaatgccaaatatcgcgcctccatcctttatact

SEQ ID NO: 170213 - DNA, 120 bp, Artificial Sequence
  ENSG00000108953_15 (sequence is synthesized)
tctaaaataaaatctctagtccaaacacactgacagtattatgtttgcctgaatgtgaaacattcctccttttttcttccataaataatttgtttgcttcccaaagatgtatgttttgga

SEQ ID NO: 170214 - DNA, 120 bp, Artificial Sequence
  ENSG00000108953_16 (sequence is synthesized)
aaaaaattgcctgtagtctggttgtgaagaacactgagtcagttgatggtgtgtcttgtcctccagaccaggcagcaacatggtatttattttaatcattaaagtacaacatgagtagta

SEQ ID NO: 170215 - DNA, 120 bp, Artificial Sequence
  ENSG00000108953_17 (sequence is synthesized)
tagaaggatagttaatattgtaatgaaaaggtggttgggctattatgaaaatgtattagcttttgcttatttatattcttttgtttttgtgagacctatcccattcccctcccccaaacg

SEQ ID NO: 170216 - DNA, 120 bp, Artificial Sequence
  ENSG00000108953_18 (sequence is synthesized)
taccaggcgaagctggccgagcaggctgagcgatacgacggtgagttgggggggcaacggggggctggaattctcggaccctctgccgccgcccacagaggccgggaacaggagacaaaa

SEQ ID NO: 170217 - DNA, 120 bp, Artificial Sequence
  ENSG00000108953_19 (sequence is synthesized)
tggcggcatcgtctgcgagcctggcccgggggcttgggttcgggaagcaggaaatggcctgggagctcccggggcgatgggaggctctatgccctggaatgtgaccccttcgccgtcctt

SEQ ID NO: 170218 - DNA, 120 bp, Artificial Sequence
  ENSG00000108953_20 (sequence is synthesized)
aactgcaaacaactcgcgggccgggaggccggggcgacggggtggaggagttggttgtaaaatggcggctggggggagggcgagtcccggggcgggggagggggaggagatggcgggtgc

SEQ ID NO: 170219 - DNA, 120 bp, Artificial Sequence
  ENSG00000108953_21 (sequence is synthesized)
tgtctccgaacgagccaccctcatgggagcttctgggacggccttgggatgtggagaacaattgggtggggtgacgggggaagcagcacccgccacatgggagagagcgaagaccgggag

SEQ ID NO: 170220 - DNA, 120 bp, Artificial Sequence
  ENSG00000108953_22 (sequence is synthesized)
cccggaggccccgtgtggggcggcggccgtggagtctcacaaaggaggacctttgagagcgatgggcttcctcaggcctgaggtgggggacagtcgtggatgatggtggggggagagggg

SEQ ID NO: 170221 - DNA, 120 bp, Artificial Sequence
  ENSG00000108953_23 (sequence is synthesized)
tgagtgggaatcactgcagttcgtcttcgggcggtggcaggctcccatgctgcgatcgggtttctttcccgtaggccggcacctcgtagtgaggggtttcggggcttttcctcctcgtcg

SEQ ID NO: 170222 - DNA, 120 bp, Artificial Sequence
  ENSG00000108953_24 (sequence is synthesized)
tcttctggggaggcccagaaaatcctcactccctccctttcctcagacttaaaacaggagatctcgaagttcctgtaacctttctctggctccatcacccgtgggttctgatggatagaa

SEQ ID NO: 170223 - DNA, 120 bp, Artificial Sequence
  ENSG00000108953_25 (sequence is synthesized)
ccaggaggccacgactctgagagttcgagcctttgtagagcccgagcctccgtccccccgtttgtaaaaacgatgactttacagtttgtgcgcaccgtgatgacaaatgggaagacctgt

SEQ ID NO: 170224 - DNA, 120 bp, Artificial Sequence
  ENSG00000108953_26 (sequence is synthesized)
tgaaataaagttatttccaatagtgttcagtaactgtattttggttgactctgcaggctcggaatgctggtctgtacttcgtgggggatcttaacctattccaggcgctcggctgaggct

SEQ ID NO: 170225 - DNA, 120 bp, Artificial Sequence
  ENSG00000108953_27 (sequence is synthesized)
gggttttttgagttatgaaggttgaagatcctgttgctttctttttttccgttttaaataaatgggtttatgtagaaatattagtaggtcctctttgttcgttgttcttttgcccctaat

SEQ ID NO: 170226 - DNA, 120 bp, Artificial Sequence
  ENSG00000108953_28 (sequence is synthesized)
gagaggatctggtgtaccaggcgaagctggccgagcaggctgagcgatacgacgtgctctggaactgaacccgcagtatcttccaagaaatggtggagtcaatgaagaaagtagcaggga

SEQ ID NO: 170227 - DNA, 120 bp, Artificial Sequence
  ENSG00000108953_29 (sequence is synthesized)
agaccctgccggagccgctgccgctatggatgatcgagaggatctggtgtaccaggcgaagctggccgagcaggctgagcgatacgacgacttaaaacaggagatctcgaagttcctgta

SEQ ID NO: 170228 - DNA, 120 bp, Artificial Sequence
  ENSG00000108953_30 (sequence is synthesized)
cggcaaatggtgagattgttgtgccatcatccccccttatccacagtttgagttacctgtaggacggtacacttaagattttgagagaaaaggagactacattcatataacttgtattac

SEQ ID NO: 170229 - DNA, 120 bp, Artificial Sequence
  ENSG00000108960_0 (sequence is synthesized)
actccgaccctacccggccgaagggttccgctggacacgcaggcggcctccggagcagcccaagcccatgagggccgcgcgcccggccgccggtgctgacgagacggagctcctggcccc

SEQ ID NO: 170230 - DNA, 120 bp, Artificial Sequence
  ENSG00000108960_1 (sequence is synthesized)
cgaggaggagcagaggatcaatgcggttcaagaatcgattccagcggttcatgaaccatcgagctccagccaatggccgctacaagccaacttgctatgaacatgctgctaactgttaca

SEQ ID NO: 170231 - DNA, 120 bp, Artificial Sequence
  ENSG00000108960_2 (sequence is synthesized)
cacacgcattcctcattgttccggccatcgtgggcagtgccctcctccatcggctgtctgatgactgctgggaaaagataacagcatggatttatggaatgggactctgtgccctcttca

SEQ ID NO: 170232 - DNA, 120 bp, Artificial Sequence
  ENSG00000108960_3 (sequence is synthesized)
tcgtttctacagtatttcacattgtatcatggaaaaagagccacttaaggacagtggagcattgttttcacatgtgtgatagaatggttatctatttcttcattgctgcttcttatgctc

SEQ ID NO: 170233 - DNA, 120 bp, Artificial Sequence
  ENSG00000108960_4 (sequence is synthesized)
catggttaaatcttcgtgaacttggacccctggcatctcatatgcgttggtttatctggctcatggcagctggaggaaccatttatgtatttctctaccatgaaaaatataaggtggttg

SEQ ID NO: 170234 - DNA, 120 bp, Artificial Sequence
  ENSG00000108960_5 (sequence is synthesized)
aactctttttctatctcacaatgggattctctccagccttggtggtgacatcaatgaacaacaccgatggacttcaggaacttgcctgtgggggcttaatttattgcttgggagttgtgt

SEQ ID NO: 170235 - DNA, 120 bp, Artificial Sequence
  ENSG00000108960_6 (sequence is synthesized)
tcttcaagagtgatggcatcattccatttgcccacgccatctggcacctgtttgtggccacggcagctgcagtgcattactacgccatttggaaatacctttaccgaagtcctacggact

SEQ ID NO: 170236 - DNA, 120 bp, Artificial Sequence
  ENSG00000108960_7 (sequence is synthesized)
ttatgcggcatttatgaccaatctgtactaattctccaaaccagtattatttcaattatggcacttgggagtggggtgagagctaaacattgcacagggaaagaaaaaaaataactgcac

SEQ ID NO: 170237 - DNA, 120 bp, Artificial Sequence
  ENSG00000108960_8 (sequence is synthesized)
tgactttatatcttttgaatataattactgtgaaagtataaaggctgtgttctggaattttctgcctcacagcaaataaataaggtagtgaattaattattcattccattccactatcat

SEQ ID NO: 170238 - DNA, 120 bp, Artificial Sequence
  ENSG00000108960_9 (sequence is synthesized)
gaaggactctgaatagacttggccaactgatgtttacaaaccagacttttatattttaattttacagattttactacatgatttttctaaattactatgtcaggttgtaaaagtcagtgc

SEQ ID NO: 170239 - DNA, 120 bp, Artificial Sequence
  ENSG00000108960_10 (sequence is synthesized)
attcactaggtaaagaatcatggacagaacttacactactttttaccatgtttcatcttggcataacatggttcttttttaaatagaaactttagttttttgtaaatttttaaaaaaata

SEQ ID NO: 170240 - DNA, 120 bp, Artificial Sequence
  ENSG00000108960_11 (sequence is synthesized)
tttcattgatatgcatctctgcaggtcctcattcatgttgtaaatttttgcagcaagcagtcaacattccacaaacgaacaaacattatacctcttctgatagttttattaagcatggag

SEQ ID NO: 170241 - DNA, 120 bp, Artificial Sequence
  ENSG00000108960_12 (sequence is synthesized)
aaattgccaatttttaaaaactgcagttttccaaacttttctgccaacctcttactctgaattcagtgctgctttgggacatatacttgacctagcttggtttaccagtgatggaaaagt

SEQ ID NO: 170242 - DNA, 120 bp, Artificial Sequence
  ENSG00000108960_13 (sequence is synthesized)
attttgatatcattaactttttcaaaagatccaactttttctctatgcctttgccacattctcttcagggtctctttccacagtggataaatgttttttctgtattatgacagtattgtt

SEQ ID NO: 170243 - DNA, 120 bp, Artificial Sequence
  ENSG00000108960_14 (sequence is synthesized)
gtgatggccatctgctggaaactcctgaagagcattatgtattacagtgagcagttgtattgcctgtttggtgcccaatggttaagtcattgtcacttagctttatattgtcagtttgat

SEQ ID NO: 170244 - DNA, 120 bp, Artificial Sequence
  ENSG00000108960_15 (sequence is synthesized)
atttattttaaattgtggaactagatgcataaattcacatttctgcctttcctttgcatcttctcatatattgtgtttttttttttttttcctagaaaaaatatttaaagcattgtttga

SEQ ID NO: 170245 - DNA, 120 bp, Artificial Sequence
  ENSG00000108960_16 (sequence is synthesized)
caggtagaaactcatgtatctgtagtccatgagttatatcctggctcagtggagtgatatttatgtattatttttacttttctctcagtgtcttatattaagattaacatgttgttaata

SEQ ID NO: 170246 - DNA, 120 bp, Artificial Sequence
  ENSG00000108960_17 (sequence is synthesized)
gttgctttgttgattaatctctcttgttggtgttttaataaatgaaataggcttgcctttagatcgggtgctgatattgcctgtttcctagtaatgggctgatcaaatgatcagtggaat

SEQ ID NO: 170247 - DNA, 120 bp, Artificial Sequence
  ENSG00000108960_18 (sequence is synthesized)
tcttggtttgatgataaccttattaattgaaattttttactgatgtggctttaaaagaggtttattttgtatatgtttagaactctctgattttgatgaattatatgggaatgagaaaca

SEQ ID NO: 170248 - DNA, 120 bp, Artificial Sequence
  ENSG00000108960_19 (sequence is synthesized)
gaagaagtggtatttgctggcgagttaaataggcaaggtacccagtgataacaccaaccaaaccactcctatctgcatgattctgaacatctggatgcctgttgttttactgtgtatatt

SEQ ID NO: 170249 - DNA, 120 bp, Artificial Sequence
  ENSG00000108960_20 (sequence is synthesized)
ttatttttaatatattaactttgtggattcatttaaggtctactcaaaagtaacactgtcaaaaccactaatatgtatgtaaaaattgtgctgtatactacaataaagttgttacttgga

SEQ ID NO: 170250 - DNA, 120 bp, Artificial Sequence
  ENSG00000108960_21 (sequence is synthesized)
ttccagcgtcccaaagggtaaaggaggcaacaaatgcacagaagagttgccatggtctgggccaccaggaaggggatcagcttgaagacttggattgacttctgaatatattgcttatca

SEQ ID NO: 170251 - DNA, 120 bp, Artificial Sequence
  ENSG00000108960_22 (sequence is synthesized)
tagaacctgatgtcagaaatgaagaccggaggggcttttagagagaatgtaacatgcactccagtcatgatcagtgaagccctgtgcatgcggtttgatttggttttacttctctacacg

SEQ ID NO: 170252 - DNA, 120 bp, Artificial Sequence
  ENSG00000108960_23 (sequence is synthesized)
tctgtgctcttcctgttttcagagaacagtggcaatattctgtgaaattgccccttccttgtttgattaagagtttgtcattcttacctatacctttggatcctctaaaaagaaaaaaaa

SEQ ID NO: 170253 - DNA, 120 bp, Artificial Sequence
  ENSG00000108961_0 (sequence is synthesized)
gggagctaagccagacccgggtggcggtggcagctgcgaaacccagggagccgatgccacgtgacccaatgtggacttcttttaaacctttctaatgcccataacccagcctcagaccca

SEQ ID NO: 170254 - DNA, 120 bp, Artificial Sequence
  ENSG00000108961_1 (sequence is synthesized)
tggagcccacgagagactgcccgctgttcgggggcgccttttccgccatcctccccatgggggccattgacgtaagcgacctccgaccggtcccggacaatcaagaagttttctgccatc

SEQ ID NO: 170255 - DNA, 120 bp, Artificial Sequence
  ENSG00000108961_2 (sequence is synthesized)
ccgtgacggaccagagcctgatagtggaacttctcgagctgcaggcccacgtacggggcgaagcggctgcgcggtaccactttgaggatgttggtggcgtgcagggggctagggctgtcc

SEQ ID NO: 170256 - DNA, 120 bp, Artificial Sequence
  ENSG00000108961_3 (sequence is synthesized)
tagcaaaggacgtgacacttcatcaggccttgctgaggctgccccagtaccagactgatctcttgcttaccttcaatcagcccccccctgacaacaggtcatctcttggccccgaaaatc

SEQ ID NO: 170257 - DNA, 120 bp, Artificial Sequence
  ENSG00000108961_4 (sequence is synthesized)
tgtcacctgcaccctggagcctgggtgactttgaacagctggtgaccagtctgacccttcacgatcctaacatctttggtccccagtaaaggcgctgaagcactgcatgatgttgctgag

SEQ ID NO: 170258 - DNA, 120 bp, Artificial Sequence
  ENSG00000108961_5 (sequence is synthesized)
aacttggggactcggttctgtgagggggaaaagaggttgaaaagagggtttcctcttatttcttccctgtgcgtaaacataagacaatccctcttcagaataaacttgctttataatcaa

SEQ ID NO: 170259 - DNA, 120 bp, Artificial Sequence
  ENSG00000108961_6 (sequence is synthesized)
gtatctcatgactgggttcccaggagaatcgggctgggagggacagaacagggagactcactggtgggatcctccaaggaagcaggagtgggccagaggtttggggtaactgatacccag

SEQ ID NO: 170260 - DNA, 120 bp, Artificial Sequence
  ENSG00000108961_7 (sequence is synthesized)
agctgcaggcccacgtacggggcgaagcggctgcgcggtgagggaatggcccccggctggccaatggcaggggcggggtcggaccagtgggcggggcccgcggccgacggttaatccggg

SEQ ID NO: 170261 - DNA, 120 bp, Artificial Sequence
  ENSG00000108961_8 (sequence is synthesized)
cggtgagaccacgcacgggccgggagccaggcctgcaacttaaagatgctcccggggaggcgaccagagatgtcccttcctgaccccgcttccctactccaggtaccactttgaggatgt

SEQ ID NO: 170262 - DNA, 120 bp, Artificial Sequence
  ENSG00000108961_9 (sequence is synthesized)
tctgttcagcctctcagtttggagaacctggccctgaggggccgctgtcaagaagcctgggtcctctctggcaagcagcagatagctaaggaaaaccagcaggtgagggcccgagagtgt

SEQ ID NO: 170263 - DNA, 120 bp, Artificial Sequence
  ENSG00000108963_0 (sequence is synthesized)
gtctgcgctctccgcgttcttccagcgctgtctttttagtaccacatgcgcaggcaggtgatggcggcgctggtcgtatccggggcagcggagcagggcggccgagacggccctggcaga

SEQ ID NO: 170264 - DNA, 120 bp, Artificial Sequence
  ENSG00000108963_1 (sequence is synthesized)
ggtcgggcccctcggggccgcgtggccaatcagatcccccctgagatcctgaagaaccctcagctgcaggcagcaatccgggtcctgccttccaactacaactttgagatccccaagacc

SEQ ID NO: 170265 - DNA, 120 bp, Artificial Sequence
  ENSG00000108963_2 (sequence is synthesized)
atctggaggatccaacaagcccaggccaagaaggtggccttgcaaatgccggaaggcctcctcctctttgcctgtaccattgtggatatcttggaaaggttcacggaggccgaagtgatg

SEQ ID NO: 170266 - DNA, 120 bp, Artificial Sequence
  ENSG00000108963_3 (sequence is synthesized)
gtgatgggtgacgtgacctacggggcttgctgtgtggatgacttcacagcgagggccctgggagctgacttcttggtgcactacggccacagttgcctgattcccatggacacctcggcc

SEQ ID NO: 170267 - DNA, 120 bp, Artificial Sequence
  ENSG00000108963_4 (sequence is synthesized)
caagacttccgggtgctgtacgtctttgtggacatccggatagacactacacacctcctggactctctccgcctcacctttcccccagccactgcccttgccctggtcagcaccattcag

SEQ ID NO: 170268 - DNA, 120 bp, Artificial Sequence
  ENSG00000108963_5 (sequence is synthesized)
tttgtgtcgaccttgcaggcagccgcccaggagctgaaagccgagtatcgtgtgagtgtcccacagtgcaagcccctgtcccctggagagatcctgggctgcacatccccccgactgtcc

SEQ ID NO: 170269 - DNA, 120 bp, Artificial Sequence
  ENSG00000108963_6 (sequence is synthesized)
aaagaggtggaggccgttgtgtatcttggagatggccgcttccatctggagtctgtcatgattgccaaccccaatgtccccgcttaccggtatgacccatatagcaaagtcctatccaga

SEQ ID NO: 170270 - DNA, 120 bp, Artificial Sequence
  ENSG00000108963_7 (sequence is synthesized)
gaacactatgaccaccagcgcatgcaggctgctcgccaagaagccatagccactgcccgctcagctaagtcctggggccttattctgggcactttgggccgccagggcagtcctaagatc

SEQ ID NO: 170271 - DNA, 120 bp, Artificial Sequence
  ENSG00000108963_8 (sequence is synthesized)
ctggagcacctggaatctcgactccgagccttgggcctttcctttgtgaggctgctgctctctgagatcttccccagcaagcttagcctacttcctgaggtggatgtgtgggtgcaggtg

SEQ ID NO: 170272 - DNA, 120 bp, Artificial Sequence
  ENSG00000108963_9 (sequence is synthesized)
atgaggcggccgtggctctgagggacatttcctggcagcagccctacccgatggacttctacgctggcagctccttggggccctggacggtgaaccacggccaggaccgccgtccccacg

SEQ ID NO: 170273 - DNA, 120 bp, Artificial Sequence
  ENSG00000108963_10 (sequence is synthesized)
ccccgggccggcccgcgcgggggaaggtgcaggaggggtccgcgcgtcccccttcggccgtggcttgcgaggactgcagctgcagggacgagaaggtggcgccgctggctccttgacgcg

SEQ ID NO: 170274 - DNA, 120 bp, Artificial Sequence
  ENSG00000108963_11 (sequence is synthesized)
ctcccgggcctcagggtcctgccctccggaggagcagcctcgaggctggtggttttcagagcaggaggccgacgttttctccgcattggaagagcccgccgtctgcaggggcctggagga

SEQ ID NO: 170275 - DNA, 120 bp, Artificial Sequence
  ENSG00000108963_12 (sequence is synthesized)
atcactggggatggtggcacaggcactgaacaggctggggccttttgacggccttcttggtttcagccaaggggctgcgctagcagcccttgtgtgtgccctgggccaggcaggcgatcc

SEQ ID NO: 170276 - DNA, 120 bp, Artificial Sequence
  ENSG00000108963_13 (sequence is synthesized)
ccgcttccccttgccacggtttatcctcttggtgtctggtttctgtccccggggcattgggttcaaggaatccatcctgcaaaggcccttgtcattgccttcgctccatgtttttgggga

SEQ ID NO: 170277 - DNA, 120 bp, Artificial Sequence
  ENSG00000108963_14 (sequence is synthesized)
cactgacaaagtcatcccctctcaggagagtgtgcaactggccagccaatttcccggagccatcaccctcacccactctggtggccacttcattccagcagctgcaccccagcgtcaggc

SEQ ID NO: 170278 - DNA, 120 bp, Artificial Sequence
  ENSG00000108963_15 (sequence is synthesized)
ctacctcaagttcttggaccagtttgcagagtgaaagatcaagaaatgtctctgctcctacatccagctcctctaggggcagcctccgtcatccatgccctcccaggaccctccactcac

SEQ ID NO: 170279 - DNA, 120 bp, Artificial Sequence
  ENSG00000108963_16 (sequence is synthesized)
tgctgtgagtgcgcctcaccagaaccagttaagagacaactatcaattcttgagacccaaattataagggccctgccctgtactgaagaaaaggggagcacaaggccttaatggacattg

SEQ ID NO: 170280 - DNA, 120 bp, Artificial Sequence
  ENSG00000108963_17 (sequence is synthesized)
acttgtgaaaacgcaaacatgaatatggttggagagccctggattaggagggtgacatggggaaggcagaggctggcaccatggtgactgccacataataaagtggtgatttggattttg

SEQ ID NO: 170281 - DNA, 120 bp, Artificial Sequence
  ENSG00000108963_18 (sequence is synthesized)
gtgccttcttgtcctgcttggagacacaaggtccctcctggtttctggggtggcctctgccttcccgctctgcaggtagatctttcctttggatttggttgccttggcaacggtgctctg

SEQ ID NO: 170282 - DNA, 120 bp, Artificial Sequence
  ENSG00000108963_19 (sequence is synthesized)
tgttggttgtagagcaggctgggccccggccgggtgacagagaagtctgattgagaaggagcttctaggggatctgtgacccccctcttctcctaccctgtccttttacccccaggctga

SEQ ID NO: 170283 - DNA, 120 bp, Artificial Sequence
  ENSG00000108963_20 (sequence is synthesized)
ggtggaggccgttgtgtaagttaaaaatgggggccaagtaagtcctagagacatgcgtgtaccctgggagggagcctgaggttcatcatccaggaaagaaaccaaatctaatgctcctta

SEQ ID NO: 170284 - DNA, 120 bp, Artificial Sequence
  ENSG00000108963_21 (sequence is synthesized)
cctgtgagcccgaggtcacactgcaaggtagggaccaaacagggagcagacctcaggtttactgtcgctttctccactgcccagtccatcatccagaaggctgtgcagggtgggggcagg

SEQ ID NO: 170285 - DNA, 120 bp, Artificial Sequence
  ENSG00000108963_22 (sequence is synthesized)
ctacgctggcagctccttggggccctggacggtgaaccacggccaggaccgccgtccccacgccccgggccggcccgcgcgggggaaggtaggcgggggcttccaggagggaggagagac

SEQ ID NO: 170286 - DNA, 120 bp, Artificial Sequence
  ENSG00000108963_23 (sequence is synthesized)
cgcgcctgggcactggccgccgccctgcgaccgcgacgggaaacgcacaggagcggagcggagggaaacgcagggtcgcaggagcgagaccctaaccaaagtctgcgacctcaggtgcag

SEQ ID NO: 170287 - DNA, 120 bp, Artificial Sequence
  ENSG00000108963_24 (sequence is synthesized)
tccggtgcttccgtcgctccttgccgggcataatggccgcgcagcgacccctgcgggtcctgtgcctggcgggcttccggcagagcgagcggggcttccgtgagaagaccggggcgctga

SEQ ID NO: 170288 - DNA, 120 bp, Artificial Sequence
  ENSG00000108963_25 (sequence is synthesized)
ggaaggcgctgcggggtcgcgccgagctcgtgtgcctcagcggcccgcacccggtccccgaccccccgggccccgagggcgccagatcagacttcgggtcctgccctccggaggagcagc

SEQ ID NO: 170289 - DNA, 120 bp, Artificial Sequence
  ENSG00000108963_26 (sequence is synthesized)
tagattccggagtctgtctcgatttctccagcggagtcacttcctagctgtgtagccttaggcaaggccctgaaccacacagttcccttctgtggcaggggacagtgtgcccttcacagg

SEQ ID NO: 170290 - DNA, 120 bp, Artificial Sequence
  ENSG00000108963_27 (sequence is synthesized)
agactcacttccctgctcccaccgtcttgccccttggggatgctctctggggctcaggccaatttgcatacattttaatctataaaaaattaagtgctgtggctgacttagacgcctggg

SEQ ID NO: 170291 - DNA, 120 bp, Artificial Sequence
  ENSG00000108963_28 (sequence is synthesized)
tgggtgcgccccgccttttgccgttgtcatgggaacgccttggcgctccgaggcccgccctcggggcggtgctgacgttcggttccgccccgtgcattgtgcttccgctcggggaaagac

SEQ ID NO: 170292 - DNA, 120 bp, Artificial Sequence
  ENSG00000108963_29 (sequence is synthesized)
gaaacgcactcagtttcctccatcttgtttcgtccccctcgacacccttcagcatcccccaccctgcgtccacccgcattcctcccacccagtccacacccttcatttctcgcgacccat

SEQ ID NO: 170293 - DNA, 120 bp, Artificial Sequence
  ENSG00000108963_30 (sequence is synthesized)
ccccctctcatttcccccagacttttgcctcgattccctttttctctctgtcatctcgaaccctcctgccctttctcatttctttccttcctggagcctcccatgccctaatcccatcct

SEQ ID NO: 170294 - DNA, 120 bp, Artificial Sequence
  ENSG00000108963_31 (sequence is synthesized)
ttcacacgtgagaaaaccaaggctccaagaggtgaagtgaaggcttgtcccagtttacacagaggcacagcacagccagctgtgaactcagtcctctggacttttttttttttttgagac

SEQ ID NO: 170295 - DNA, 120 bp, Artificial Sequence
  ENSG00000108963_32 (sequence is synthesized)
gaaggctggagccaacaggaattgcttccatggtcatggaattttactgtttacagagacctccctgggagggctaactgggtcatacctgctttgggactttggggctcagaggcaatg

SEQ ID NO: 170296 - DNA, 120 bp, Artificial Sequence
  ENSG00000108963_33 (sequence is synthesized)
gcaacatcacatttgtccttgtgagatgagtttgagcggtggctgacacctgccctgtaccaggtactaaatgtggttctggggatactatcaccagtgagctgccctggaaagctcatt

SEQ ID NO: 170297 - DNA, 120 bp, Artificial Sequence
  ENSG00000108963_34 (sequence is synthesized)
gtcggcagaggaaacaggagaaaacacgcaacaatacagtattccaaacagcagtgggtcactgtctttactttaggattcataaagcctgttaatgaatgggtgtgctgggggcactgt

SEQ ID NO: 170298 - DNA, 120 bp, Artificial Sequence
  ENSG00000108963_35 (sequence is synthesized)
catgttcttcagcatgctgcctgggcgacgaggaggcccttcctagggtctgacctggcttcccttcccaggtgggtgcaggtggcatgtccacgtctctccattgactggggcacagcc

SEQ ID NO: 170299 - DNA, 120 bp, Artificial Sequence
  ENSG00000108963_36 (sequence is synthesized)
ttccccaagccgctgctgacaccctatgaggtaacaccaagctctgggagagagtgggctttggacgtggttctcaaaggtgaggtctggagtggagtggggtgggtgggcagcacttcg

SEQ ID NO: 170300 - DNA, 120 bp, Artificial Sequence
  ENSG00000108984_0 (sequence is synthesized)
agttccaagtttggagcttttagctgccagccctggcccatcatgtagctgcagcacagccttccctaacgttgcaactgggggaaaaatcactttccagtctgttttgcaaggtgtgca

SEQ ID NO: 170301 - DNA, 120 bp, Artificial Sequence
  ENSG00000108984_1 (sequence is synthesized)
tttccatcttgattccctgaaagtccatctgctgcatcggtcaagagaaactccacttgcatgaagattgcacgcctgcagcttgcatctttgttgcaaaactagctacagaagagaagc

SEQ ID NO: 170302 - DNA, 120 bp, Artificial Sequence
  ENSG00000108984_2 (sequence is synthesized)
aaggcaaagtcttttgtgctcccctcccccatcaaaggaaaggggaaaatgtctcagtcgaaaggcaagaagcgaaaccctggccttaaaattccaaaagaagcatttgaacaacctcag

SEQ ID NO: 170303 - DNA, 120 bp, Artificial Sequence
  ENSG00000108984_3 (sequence is synthesized)
accagttccacaccacctcgagatttagactccaaggcttgcatttctattggaaatcagaactttgaggtgaaggcagatgacctggagcctataatggaactgggacgaggtgcgtac

SEQ ID NO: 170304 - DNA, 120 bp, Artificial Sequence
  ENSG00000108984_4 (sequence is synthesized)
ggggtggtggagaagatgcggcacgtgcccagcgggcagatcatggcagtgaagcggatccgagccacagtaaatagccaggaacagaaacggctactgatggatttggatatttccatg

SEQ ID NO: 170305 - DNA, 120 bp, Artificial Sequence
  ENSG00000108984_5 (sequence is synthesized)
aggacggtggactgtccattcactgtcaccttttatggcgcactgtttcgggagggtgatgtgtggatctgcatggagctcatggatacatcactagataaattctacaaacaagttatt

SEQ ID NO: 170306 - DNA, 120 bp, Artificial Sequence
  ENSG00000108984_6 (sequence is synthesized)
gataaaggccagacaattccagaggacatcttagggaaaatagcagtttctattgtaaaagcattagaacatttacatagtaagctgtctgtcattcacagagacgtcaagccttctaat

SEQ ID NO: 170307 - DNA, 120 bp, Artificial Sequence
  ENSG00000108984_7 (sequence is synthesized)
gtactcatcaatgctctcggtcaagtgaagatgtgcgattttggaatcagtggctacttggtggactctgttgctaaaacaattgatgcaggttgcaaaccatacatggcccctgaaaga

SEQ ID NO: 170308 - DNA, 120 bp, Artificial Sequence
  ENSG00000108984_8 (sequence is synthesized)
ataaacccagagctcaaccagaagggatacagtgtgaagtctgacatttggagtctgggcatcacgatgattgagttggccatccttcgatttccctatgattcatggggaactccattt

SEQ ID NO: 170309 - DNA, 120 bp, Artificial Sequence
  ENSG00000108984_9 (sequence is synthesized)
cagcagctcaaacaggtggtagaggagccatcgccacaactcccagcagacaagttctctgcagagtttgttgactttacctcacagtgcttaaagaagaattccaaagaacggcctaca

SEQ ID NO: 170310 - DNA, 120 bp, Artificial Sequence
  ENSG00000108984_10 (sequence is synthesized)
tacccagagctaatgcaacatccatttttcaccctacatgaatccaaaggaacagatgtggcatcttttgtaaaactgattcttggagactaaaaagcagtggacttaatcggttgaccc

SEQ ID NO: 170311 - DNA, 120 bp, Artificial Sequence
  ENSG00000108984_11 (sequence is synthesized)
tactgtggattggtgggtttcggggtgaagcaagttcactacagcatcaatagaaagtcatctttgagataatttaaccctgcctctcagagggttttctctcccaattttctttttact

SEQ ID NO: 170312 - DNA, 120 bp, Artificial Sequence
  ENSG00000108984_12 (sequence is synthesized)
ccccctcttaagggggccttggaatctatagtatagaatgaactgtctagatggatgaattatgataaaggcttaggacttcaaaaggtgattaaatatttaatgatgtgtcatatgagt

SEQ ID NO: 170313 - DNA, 120 bp, Artificial Sequence
  ENSG00000108984_13 (sequence is synthesized)
cctcaagcttctcagacttctcttattctttacaaaatgaatgcattggccctgacaaaaaggtgctacggtagtgatgaaattataagtagatttgtagtttgtcccatttattatttt

SEQ ID NO: 170314 - DNA, 120 bp, Artificial Sequence
  ENSG00000108984_14 (sequence is synthesized)
aatatttatgtttaagtgcttggttgaaaagattccattttatacaagaagggagattcaaaaaaaaaatataaggttgggttagcaatatttatagggcttttattttttaagttcaat

SEQ ID NO: 170315 - DNA, 120 bp, Artificial Sequence
  ENSG00000108984_15 (sequence is synthesized)
tgtgtctgtggtccagaagaaattatttaatatgcatctttgagaatattataaaaatatcaaaaaggagctcttcttgtgaaatgtctgttccagctgttgtgactgctgccatttttg

SEQ ID NO: 170316 - DNA, 120 bp, Artificial Sequence
  ENSG00000108984_16 (sequence is synthesized)
caaacatctgcccaatcctgggtgatcaccacatcttttaggggaagtgacaagatgctctggtcatactctttttcccaactttggaaaacataaaaatcactcatataacagctcaaa

SEQ ID NO: 170317 - DNA, 120 bp, Artificial Sequence
  ENSG00000108984_17 (sequence is synthesized)
gagtaaaacatttggttcttctgacacttgtggtatagtattagtggaaagtgatttgtaatatgattttatatccacctacctattcatctacctgtgtgtatgtgtgtgtttgtgtgt

SEQ ID NO: 170318 - DNA, 120 bp, Artificial Sequence
  ENSG00000108984_18 (sequence is synthesized)
ctatttggcaattcacaagtcctgccaagtggtttctatgagcatctctgtttggtaaggaggacaattgtcagttttgagggggacatgtgttaaatcacagaaaaaaatggtgccttc

SEQ ID NO: 170319 - DNA, 120 bp, Artificial Sequence
  ENSG00000108984_19 (sequence is synthesized)
ttctgcgtttgtccctcctgccatgtgtaagttgtaaggattgcctttgtagttaatgtactctttggctttgtttgtttgttttcttcttcagtgaagcagccttactattcatagaag

SEQ ID NO: 170320 - DNA, 120 bp, Artificial Sequence
  ENSG00000108984_20 (sequence is synthesized)
ggctagaataggagaaaatgaaaggtagtgagtaattctttgataagatgaggaaataatgggaaaggttgaattaattcctgggcatggactaccagatgaccacaagttgcgttgagg

SEQ ID NO: 170321 - DNA, 120 bp, Artificial Sequence
  ENSG00000108984_21 (sequence is synthesized)
ccgcatctttcttcagcagcgtgcaatagctggctcctctataggagatgagcttcattgggagttcctagcaagttgactaaacagcaaaagttctttctcgtgggtaaatatacccac

SEQ ID NO: 170322 - DNA, 120 bp, Artificial Sequence
  ENSG00000108984_22 (sequence is synthesized)
aggttctatgatttgtagctctaggtttcttgatgatcaaggagtgaagtaattgacagggaaaatatagacctatgataaataaccaggaagcattgcttttggacaaggaaggacaga

SEQ ID NO: 170323 - DNA, 120 bp, Artificial Sequence
  ENSG00000108984_23 (sequence is synthesized)
gggttttgattttaaaaagaagaaaaaaaaaccttattttttctttcttggcctcaagttcaatatggagaggattgcttccctgaatcctctcttccttccccttttagattttgaagt

SEQ ID NO: 170324 - DNA, 120 bp, Artificial Sequence
  ENSG00000108984_24 (sequence is synthesized)
gcaatcatatgtttttctctgtttgcattttttcctccttgttcttgacaaggaggagttgctcctgcccagaatgagcgtgacacttccgaacacttcttcatattcagttccaagata

SEQ ID NO: 170325 - DNA, 120 bp, Artificial Sequence
  ENSG00000108984_25 (sequence is synthesized)
tatctgcttgattaaacatgagcttcctctgctctgaagctacctctgtcctcattttattctagccagaaaaggagtatcaccctagtgattatggctgttcactttcccatctatctt

SEQ ID NO: 170326 - DNA, 120 bp, Artificial Sequence
  ENSG00000108984_26 (sequence is synthesized)
cctaaatctggaagttcttctcttggagatcaagagaaaaattacaattgtattccttactttattcacccacctatgaaaacaggaagcaataggaaaaaaaatccggttactccattt

SEQ ID NO: 170327 - DNA, 120 bp, Artificial Sequence
  ENSG00000108984_27 (sequence is synthesized)
tagcttttggtgaacgatgtagagcaaattgtctctctggtctaggtccgattactcttacctgtttttccactttgagacattctaaacagaatgtgtaacttctcatatgtatgcctc

SEQ ID NO: 170328 - DNA, 120 bp, Artificial Sequence
  ENSG00000108984_28 (sequence is synthesized)
tcccatctgtgaacctaggccaaagttgcaaaaacaatcatattaatagtagagtagagaaaaagttagtctatggttctcaaccctcgtgtacattggaaccatctgggagctgtgaac

SEQ ID NO: 170329 - DNA, 120 bp, Artificial Sequence
  ENSG00000108984_29 (sequence is synthesized)
actgtcgctgccaatgttccagccaccagagatttggatttaactggtggggcctaggaattggtgtttttttgttttgttttgttttttacacaccttcatgtgattctgatgtgaagc

SEQ ID NO: 170330 - DNA, 120 bp, Artificial Sequence
  ENSG00000108984_30 (sequence is synthesized)
tgggttcagaacacttatctagtaccttctaaagagaactgacttaaatttactttcttttgaacatttgcagggagtaacatgccattgcagaaagtaacaaaaacaggtcctatttct

SEQ ID NO: 170331 - DNA, 120 bp, Artificial Sequence
  ENSG00000108984_31 (sequence is synthesized)
ttccctgtcctcatcagtggaaatctctttgtcactctgagagaaggcatgtacctgggatactgataggaagtgtagaacaccttttccccagagaagcaatattttgcactgttatta

SEQ ID NO: 170332 - DNA, 120 bp, Artificial Sequence
  ENSG00000108984_32 (sequence is synthesized)
aatatcttacacggtaaagtcaaaagaatgacctgatagcctcacaagactaaattttagagcatggttttgtttttggaaaactgtgttgtaagtgccaatcaaccaacttttgaaaaa

SEQ ID NO: 170333 - DNA, 120 bp, Artificial Sequence
  ENSG00000108984_33 (sequence is synthesized)
atcaagatacctaaactatatataaatggggagtattctgtacatatagacttatatataaagacatctgtgttcacggatgaccctcaaaatagttaatgccccaccagcatagaccat

SEQ ID NO: 170334 - DNA, 120 bp, Artificial Sequence
  ENSG00000108984_34 (sequence is synthesized)
ctgaatatcagccctgtctacacctatcaatgtattacaaaatcagtatagctctacaaaagagatcatgcttatttccccagatgtatttgattttgtatcatataattgtccatgtta

SEQ ID NO: 170335 - DNA, 120 bp, Artificial Sequence
  ENSG00000108984_35 (sequence is synthesized)
taatttttgaaaatgtttattaaaatagccatcttttttgatattattggtttaagaggtgtgccaaaaaaagtaatatgcataacttttaagactattaccctatgtttgtacgtatga

SEQ ID NO: 170336 - DNA, 120 bp, Artificial Sequence
  ENSG00000108984_36 (sequence is synthesized)
gtgaatattgcccaccagagtagccatcttgagagactacatatttatattcataatgctattaaattatttttgccactcctctttcagaaaaggctttagaatccactccctcctctg

SEQ ID NO: 170337 - DNA, 120 bp, Artificial Sequence
  ENSG00000108984_37 (sequence is synthesized)
agatgtgtgtcatcatttgagaattcttacttaggttttgttgttgtttgttttgctttttacaaaaatccttagcagatgtttccctctttgatttacctgccttgtttatcagatttt

SEQ ID NO: 170338 - DNA, 120 bp, Artificial Sequence
  ENSG00000108984_38 (sequence is synthesized)
gcacaaagttgtgtttgacaatttctagaagttaaatcttccctcagagctggagttttagcatcattgactctttgtaaaacgccatgtcatgggctctgaagataatttcaaatgaag

SEQ ID NO: 170339 - DNA, 120 bp, Artificial Sequence
  ENSG00000108984_39 (sequence is synthesized)
atttccacaccccgcccccaccacccctgcccaaagtgcatgattatttttaaccagagtcattcttccaccagaataagtgtaatctcccaaaatgactactttgaaggagatagaacc

SEQ ID NO: 170340 - DNA, 120 bp, Artificial Sequence
  ENSG00000108984_40 (sequence is synthesized)
cccataaaggtatatgtttgttgataaaatatcaggtcatcacggattttgcaagtgaaagtcacctatcttctatgattgaaggtcctgatgtgggggaataatctattttttctaaag

SEQ ID NO: 170341 - DNA, 120 bp, Artificial Sequence
  ENSG00000108984_41 (sequence is synthesized)
actgtgtttggtcacactgatttaatcagaacaaatgggttaaataagcagcttttatcacagttaagccatctgaaatggaaacgagtatgtatgggcatggcttgaaattgtttgtat

SEQ ID NO: 170342 - DNA, 120 bp, Artificial Sequence
  ENSG00000108984_42 (sequence is synthesized)
tttacagttcttgtatatccttcaagcctaacaaaaaattgtatgtgccagagattcctaaactttctgtgttcagggtgccattagttgtcttggtacttttttcatggtgccccaggt

SEQ ID NO: 170343 - DNA, 120 bp, Artificial Sequence
  ENSG00000108984_43 (sequence is synthesized)
caaaatatatacttaatagttcagtgttttaagtaattaggtcccaacagcttaataatagcagtttgcacagtgtcctgcatatatcactatatttcccttaaaaatttccagcattgg

SEQ ID NO: 170344 - DNA, 120 bp, Artificial Sequence
  ENSG00000108984_44 (sequence is synthesized)
ttcatctcaaaaaaaaaaaaaaaaaatgtacaacatcttgcttagcctgtgtgtgttctgtggtaccttggaatagctcagtacataatttggggaccacagatatctattatgccaatg

SEQ ID NO: 170345 - DNA, 120 bp, Artificial Sequence
  ENSG00000108984_45 (sequence is synthesized)
tttggggaccacagatatctattatgccaatgtttgcactgtctgctgttggtgaccctcaaaatgaaattcttggccactcaactctccacattatttcactctttgttttgttattat

SEQ ID NO: 170346 - DNA, 120 bp, Artificial Sequence
  ENSG00000108984_46 (sequence is synthesized)
tagtattcttcttgcttgccattggctaattcattttttaactgcaaccctactcttctttgctgttcatcagccctgcaatgccgtagtgtcttagtctagaaaaatgcaatactcaaa

SEQ ID NO: 170347 - DNA, 120 bp, Artificial Sequence
  ENSG00000108984_47 (sequence is synthesized)
agccccagcattggaggaggctggtgctaagatggacagggttcctgatttctctcattgaacttgatttagtgtcttgggaattataatctcaaaggaggcagagaggggttaatgttg

SEQ ID NO: 170348 - DNA, 120 bp, Artificial Sequence
  ENSG00000108984_48 (sequence is synthesized)
cataatttatcactaaaatgtctttgttgaccaaggggctttattaattatgctcagagaaacaattctgtttctcttaaaagtgtctaacaaaacacttttttctttggcctgaaagga

SEQ ID NO: 170349 - DNA, 120 bp, Artificial Sequence
  ENSG00000108984_49 (sequence is synthesized)
caatggatacctagttcctaatttcctacccaaatgctgttttggctgtgttactccctctgccctcgaagctaagatttatatatttacaaaatttattggagctggtagtcagatcta

SEQ ID NO: 170350 - DNA, 120 bp, Artificial Sequence
  ENSG00000108984_50 (sequence is synthesized)
gtaaaatggattaaatgtcaattgtgctgggattttgccttaacatctatctatgacttgaagagggatttgttggctcaaaggatcttctgcttttaatgaattagcaagtgaaaaggt

SEQ ID NO: 170351 - DNA, 120 bp, Artificial Sequence
  ENSG00000108984_51 (sequence is synthesized)
atttgaataaatgtcaacttcataggactttttttttttttaacttttcaaatggaaggtgcagttttcaattaggcctctgaaaatttacatagtcagatggaaaaatgccagagtaaa

SEQ ID NO: 170352 - DNA, 120 bp, Artificial Sequence
  ENSG00000108984_52 (sequence is synthesized)
atctaggaagaaggagctaccagacccgatagaatagaaagaaagctattttattctcggaggtctatgttcctcttgtgtttgagtgcctctagcactgttaaatgtgctgacagctaa

SEQ ID NO: 170353 - DNA, 120 bp, Artificial Sequence
  ENSG00000108984_53 (sequence is synthesized)
caggaaaatttacattgtatatgaagcacataattttgcaaactttttttggttgttgttgggagggggttgcagtttatatactccacggggttagtagctctgttctgtagaatattg

SEQ ID NO: 170354 - DNA, 120 bp, Artificial Sequence
  ENSG00000108984_54 (sequence is synthesized)
actgtgacatcctagaccacggttggcaaactttttctgtataggaccagatagtaaatatttttggctttgtgtgttataccatctctgtcacagttactcagctctgctgttgtatca

SEQ ID NO: 170355 - DNA, 88 bp, Artificial Sequence
  ENSG00000108984_55 (sequence is synthesized)
ccaagcaatgggccaaatttggcccacaggccatggtttgccaacaccagtcttagagcattaaatataaaactctgattaactagat

SEQ ID NO: 170356 - DNA, 120 bp, Artificial Sequence
  ENSG00000108984_56 (sequence is synthesized)
agtcttagagcattaaatataaaactctgattaactagatatgtagagttcttccattttagtgactattgagctcagctgctgttgaggcagattaggaagatggacataggaaactgg

SEQ ID NO: 170357 - DNA, 120 bp, Artificial Sequence
  ENSG00000108984_57 (sequence is synthesized)
attcagaaaggatgaggactgtttagtcccatgaaagttgcttgttaatgtcctcaggtaagtatgaattgttctggaagctgatagaacaattttcttcagatcaaactgaagtactta

SEQ ID NO: 170358 - DNA, 120 bp, Artificial Sequence
  ENSG00000108984_58 (sequence is synthesized)
ctttttccatttctatgcaatcaccaacataatttacttcaatttggaaataaatgtcacagttctcttagttgttaactgtatccttggcttaggttatttgcattttctttctttctt

SEQ ID NO: 170359 - DNA, 120 bp, Artificial Sequence
  ENSG00000108984_59 (sequence is synthesized)
tctgtagtgtggtttatacacaaggagaatcacgaacccagacactagtcaatctctctattccctgacttgtactgagattggggaatttgggaggtcagacttacctcaaacgtagaa

SEQ ID NO: 170360 - DNA, 120 bp, Artificial Sequence
  ENSG00000108984_60 (sequence is synthesized)
gaaggcagatagagttcttaacctttttcaacttagccacctcaattatttgttcacattttaaggaagtaggaaagagtagtttgaagtcacaaaatttgttctcaggtgttcttaaag

SEQ ID NO: 170361 - DNA, 120 bp, Artificial Sequence
  ENSG00000108984_61 (sequence is synthesized)
ctccctgttctcactgcgacagaagactcaggcctactcattttgtgctgtcccacaaaagtgagaggagtacttctctttttttaaatcatcagtaaatttcaattttaaggggcctat

SEQ ID NO: 170362 - DNA, 120 bp, Artificial Sequence
  ENSG00000108984_62 (sequence is synthesized)
gcaaaatgcctcctttctgatgtgattttcttgggttgctggccctagttgaatttatgggccctgaagcctctagtggaaatcttgtcttccctatagaacgagaacagctatgtaatt

SEQ ID NO: 170363 - DNA, 120 bp, Artificial Sequence
  ENSG00000108984_63 (sequence is synthesized)
tgcttcaccttctgttaggacttgcaccctctttgccatacagaatgctataaaaaggacagtctgccagtgaccgaagctttctcatttttttttcttccagaacaatagcacacatct

SEQ ID NO: 170364 - DNA, 120 bp, Artificial Sequence
  ENSG00000108984_64 (sequence is synthesized)
tggttaaagctatagtctccttattattcagaaatattctttttcctgctgcaccattaggcaaacatacattatgcttagaatgatacttggaaactccttaacagggcatattgaagt

SEQ ID NO: 170365 - DNA, 120 bp, Artificial Sequence
  ENSG00000108984_65 (sequence is synthesized)
atttgatccagcaacttacctaaaagaatgtttgctcttcacctagggaaataaaacctgaatttcagagccttcaaaatgaaattatccttccaggggaagcacattgccaccaaatac

SEQ ID NO: 170366 - DNA, 120 bp, Artificial Sequence
  ENSG00000108984_66 (sequence is synthesized)
atcactcactacctgttcctggtgactacatagaagatgtgttatttttctgaggtttagaaagtcactgtttacagctatgcaaatattgtactattacagatttttctaatgaagtag

SEQ ID NO: 170367 - DNA, 120 bp, Artificial Sequence
  ENSG00000108984_67 (sequence is synthesized)
tttgaaatcaaggctttagtggaaggtaatcttttcagtttctgacccagatttctttttcaagcaaaactcctctgaaagcctctttgctatagaggtgatgaaggcacttgctagcct

SEQ ID NO: 170368 - DNA, 120 bp, Artificial Sequence
  ENSG00000108984_68 (sequence is synthesized)
aagcagaaacataaagtaaaaaattttgtagtagggaatttttgttggtaagaaatcagtatcatcttgtaacacaaacacgtgttaatagaacttaaaaatactcagcctaattccttg

SEQ ID NO: 170369 - DNA, 120 bp, Artificial Sequence
  ENSG00000108984_69 (sequence is synthesized)
ggactttcagtatcttgacatcacttgtattatcatttgaacttggacattgagccctttatttttgggagtttacagttaaattttggaagaattgtgttgtatttctttcttagatgt

SEQ ID NO: 170370 - DNA, 120 bp, Artificial Sequence
  ENSG00000108984_70 (sequence is synthesized)
tgtcagtatgaacagaatttttttgtgaacagttaatcttgatgtgctccatagctttctccagtttacacttttgcatttctgagattcagggtctttttcaaggaaggaggctaatgt

SEQ ID NO: 170371 - DNA, 120 bp, Artificial Sequence
  ENSG00000108984_71 (sequence is synthesized)
ttaaggcctggaggctgaattcagggagcgtattggcaagtttaggcacttacttgtgtcttaatgtgggaaacagaactttctaagtaatctctggagtttgtagcttagaccaggcct

SEQ ID NO: 170372 - DNA, 120 bp, Artificial Sequence
  ENSG00000108984_72 (sequence is synthesized)
tcaaaagtcttttctgttttcctttgctacaatttgcttgttatttctctgccggtcacagatgacctggactgactgaatgcttttgtggtaaggaactgatctggccattttcatata

SEQ ID NO: 170373 - DNA, 120 bp, Artificial Sequence
  ENSG00000108984_73 (sequence is synthesized)
acaaaaatcaaagtcaacaattttgtatcaggctgcctaaatgaaccctattgtttccagttcttaaaaatttaagggctatctaagaaaagtttaagcaaaaccctcattccaaacatg

SEQ ID NO: 170374 - DNA, 120 bp, Artificial Sequence
  ENSG00000108984_74 (sequence is synthesized)
cgaccttataataagaacttcctttaaagatgagcagcaaggttgggtatctgatttcactaagtaatattctattgtggtcagaaatgggtaatttgcatcatttggtcactatcaata

SEQ ID NO: 170375 - DNA, 120 bp, Artificial Sequence
  ENSG00000108984_75 (sequence is synthesized)
tttgtgttggagtctgcaagatatttcaacaaagtaagccaaaccactatcttaggggattgttgctggactttggaatataaggctgaacagtgatgtgaagtcatgtttgggggctgg

SEQ ID NO: 170376 - DNA, 120 bp, Artificial Sequence
  ENSG00000108984_76 (sequence is synthesized)
aagaagtgataaatgcaaaggttggtgctaaattaggaaccccttgaaggagcaagctgattaaaaaaaaaagctggcagacaagtatatcttttaatttatttgcagtgttgctatatt

SEQ ID NO: 170377 - DNA, 120 bp, Artificial Sequence
  ENSG00000108984_77 (sequence is synthesized)
atagagatgatttcctatgggaaaacccatcaaaaagccaaacctttattgttatttttccttaaaaatactgagctataagaagattcagagagtggcattaatttgggcatcagaaca

SEQ ID NO: 170378 - DNA, 120 bp, Artificial Sequence
  ENSG00000108984_78 (sequence is synthesized)
ttttcttttgtatccctagtgttattgatttgaaagagttaccttttcagacagatggctgaacaaaagtaaatgattaacgggaaatttgatggttgagaaaaaggaacgatatgccta

SEQ ID NO: 170379 - DNA, 120 bp, Artificial Sequence
  ENSG00000108984_79 (sequence is synthesized)
aagcattttgagaatatacccctcatccatcagccacctctgggtaaagaaacacaaataccaaagcctgagctccttaaccttttgttccagagggcagacatttttaagaaaggtgaa

SEQ ID NO: 170380 - DNA, 120 bp, Artificial Sequence
  ENSG00000108984_80 (sequence is synthesized)
tgttagagaaggttacctgatgagcaagcttctttcccataattcagagaactgtgaatgtacttagaaatacactacaggtcttcaccagatgaactagattttataattttaaaatat

SEQ ID NO: 170381 - DNA, 120 bp, Artificial Sequence
  ENSG00000108984_81 (sequence is synthesized)
aatactgaaagctagtttgaagtttcagaagccatgaattatggggaaggagtagttttttattttattttatttttctgatctcaagttgtttgtcctgttgtatgttcaatacttggg

SEQ ID NO: 170382 - DNA, 120 bp, Artificial Sequence
  ENSG00000108984_82 (sequence is synthesized)
gagataagagcgaggtacagctgtggttttcagaccatattcagtggtgcccctgagggtctcttgtgaacagaagggaaaaagagtgtgatgaaggtgaactctgcctatctgaacctc

SEQ ID NO: 170383 - DNA, 120 bp, Artificial Sequence
  ENSG00000108984_83 (sequence is synthesized)
tgtcaacctccagtcagaatatctggcttctagtattgttccttttaactggaagtctctgtggccattaaaaacttgggaacgttggattaaatgaccactttaggactttaaacagtc

SEQ ID NO: 170384 - DNA, 120 bp, Artificial Sequence
  ENSG00000108984_84 (sequence is synthesized)
tcaaatatgggaaattttatagccaaccacggctgtgagtccctggcttttgccgtactgagtatgctcacagagatagggagataggtggccagaagacagggtcatttaattttaatt

SEQ ID NO: 170385 - DNA, 120 bp, Artificial Sequence
  ENSG00000108984_85 (sequence is synthesized)
gagcataaatcattttgaaagaaaaatgcaaggaattgttgtatgacagccatgcattatagatccttacatgcgacattttcctaaagtggttgagaatgacctgatctttgttcaccg

SEQ ID NO: 170386 - DNA, 120 bp, Artificial Sequence
  ENSG00000108984_86 (sequence is synthesized)
tctcagtgacaaggcgtggagtgactgggctcttcatatgcagtggaatttttgcatctctaggtttgcagaggcaggagttaccgtttttgttcattgacctatcagaaaaaagcaaat

SEQ ID NO: 170387 - DNA, 120 bp, Artificial Sequence
  ENSG00000108984_87 (sequence is synthesized)
cctttggacaatgttgacacagacaggggtacggtctgagactcaagctaacagagctaccccttgctgccttttgcaaaggtgttgtaggtggagaagggtaatggaaacctggtacag

SEQ ID NO: 170388 - DNA, 120 bp, Artificial Sequence
  ENSG00000108984_88 (sequence is synthesized)
cctttagaagttggaagctatggtggtgtatctgtcatgaactgcacacaagggaatgcttaaacaccagctgagtcatatcaggtgccttgtacacacacataaagagtctggtgaatt

SEQ ID NO: 170389 - DNA, 120 bp, Artificial Sequence
  ENSG00000108984_89 (sequence is synthesized)
ctgacagtgttctgtttgccactagagcaaatttaatagctggggtttcacagcaactgttttagaaaactatatgtgccaaaaatttacattgggcagcagtttatagtgttcttggcc

SEQ ID NO: 170390 - DNA, 120 bp, Artificial Sequence
  ENSG00000108984_90 (sequence is synthesized)
aatctgcataaaagccacttgaggaggtttgattaagaaaattgtgtttatctcctgtattacctctgtgtttgatttattctttagtctcaaatttattttctgagtggactgattttc

SEQ ID NO: 170391 - DNA, 120 bp, Artificial Sequence
  ENSG00000108984_91 (sequence is synthesized)
tatatgaactgaaatgatgttttaatagaataataggtatttttagaggaaaagtatttttttgtgtaatttgcttacacaactaggacatacttcctatgatactgaatcatcaaattg

SEQ ID NO: 170392 - DNA, 120 bp, Artificial Sequence
  ENSG00000108984_92 (sequence is synthesized)
agtcatttaaagctgaaagaggtgttaggaatgtagtttcacattatttaaatacatgaacagttttctatatattttgtgaaaatcttgatgagacactagaatttctttatggaattg

SEQ ID NO: 170393 - DNA, 120 bp, Artificial Sequence
  ENSG00000108984_93 (sequence is synthesized)
aactttacaagaattttaataaaagaggtggatttcttcagctttctttgtgcttcagtttcatagctgaaaatgctgcttccgtttattaatatggactttgtaaggaaacacaacaac

SEQ ID NO: 170394 - DNA, 120 bp, Artificial Sequence
  ENSG00000108984_94 (sequence is synthesized)
acgttttcttaccttctgtaaattttgtgatagacacatgttatttgtatatatgattgattgtttgcctgttgcaccctaaagttattttcaaaccatgtttattgcaaagagagcctt

SEQ ID NO: 170395 - DNA, 120 bp, Artificial Sequence
  ENSG00000108984_95 (sequence is synthesized)
tgggcaagtggaaaatgccctgatgctagaatgaggtagttccataagctagttaggagcttgctacctcttcttggtacctgaaatattctgaaaggatatcggagaggtcctatgcac

SEQ ID NO: 170396 - DNA, 120 bp, Artificial Sequence
  ENSG00000108984_96 (sequence is synthesized)
ccctgtctttcaaaacccacctccagcacttcaaagtagtgtctctggagagtttaaaataaaagaatgaatgctattcagtggattccctcattgaggctcccatctttcctgccaggt

SEQ ID NO: 170397 - DNA, 120 bp, Artificial Sequence
  ENSG00000108984_97 (sequence is synthesized)
gcagctttttctggttggaatcatctcttctttacggattgccgcattgtctctttgtgaatgaggcaggctgaactgtagagcatgaaactcattagaagtttataaagtaaagacctg

SEQ ID NO: 170398 - DNA, 120 bp, Artificial Sequence
  ENSG00000108984_98 (sequence is synthesized)
taaagcatgtgggtggaatgtttccatgctcttgaggtgaatattaaatttaaattctggcctttgggaactctttgcttgtgagctgaagaaggaaagaaggagttgggggtgtatatc

SEQ ID NO: 170399 - DNA, 120 bp, Artificial Sequence
  ENSG00000108984_99 (sequence is synthesized)
taactgtgtttttctatatggaaatatatgagcatcaagtgataacttcaataaggcctcaggattgtatttaaaatacctgttttgtgggacagcatgcctttgttttctttgcctgtt

SEQ ID NO: 170400 - DNA, 120 bp, Artificial Sequence
  ENSG00000108984_100 (sequence is synthesized)
ggctttggtggctccaaacattttcattttaggctagctttcctgtcacccaggttgtgtgcattttttttttcatttgaactattgtttatcattattaatgatgttatctccaaatcc

SEQ ID NO: 170401 - DNA, 120 bp, Artificial Sequence
  ENSG00000108984_101 (sequence is synthesized)
caaagccaaggaaatagccagtatgcaggacttgcagtagatataagcattggtgttaacataggttaagttttgttagtgttcccagaaatatactgaattgagggataatgtagcttt

SEQ ID NO: 170402 - DNA, 120 bp, Artificial Sequence
  ENSG00000108984_102 (sequence is synthesized)
aaagaaattatgtttctttttaacatttggagaagccacctgtcctgggtccctattcttgagaaattcatcttttcatgcaaataacattgatgggggacaagactggatgattgactt

SEQ ID NO: 170403 - DNA, 120 bp, Artificial Sequence
  ENSG00000108984_103 (sequence is synthesized)
ctatcagtcagtagacaaggaagtataataattgccaaaggtgagggtaattttgccttacaagtatgtaggtcattctgtggtgggatttcccatcacatctagtaaaaaacaaccttt

SEQ ID NO: 170404 - DNA, 120 bp, Artificial Sequence
  ENSG00000108984_104 (sequence is synthesized)
tcatttccctcctttctaatccaagatcatatttttaaaaagtaggtttctgatgtgccatgaaatatttctgtgaatctgtgtttttgaccaaggaaacagctgagatattaaaccatg

SEQ ID NO: 170405 - DNA, 120 bp, Artificial Sequence
  ENSG00000108984_105 (sequence is synthesized)
tggttgttccacggttcatctggctaccgttctgggtcccctctgaccacctcaaaaagaaaatgaaattgggagattaaatcaagcttgacctcctcttttaatgaggaactttcacgt

SEQ ID NO: 170406 - DNA, 120 bp, Artificial Sequence
  ENSG00000108984_106 (sequence is synthesized)
tgacttcctatctcaggatattcttcagtttcatactgctgaggagaaaggaacaagctgcagacactgtaactggtctccagatgtgtgtatatgcgtgtaaaacttcacaccgtgtgt

SEQ ID NO: 170407 - DNA, 120 bp, Artificial Sequence
  ENSG00000108984_107 (sequence is synthesized)
gttgtgttcaatgttgtgtcaatctacaaactgactcaaacaacagtttaacgatagagaagacagtgataatggcaaaaaaaacacccaaccacctttttccgtcaaagtgcttgctat

SEQ ID NO: 170408 - DNA, 120 bp, Artificial Sequence
  ENSG00000108984_108 (sequence is synthesized)
ggctttcatagctgggacaagtaacattaagtattcaggagcaaagtgttcttgaaagaaaatggtgtgttgatctcataagaaaatgtacaaccaataaaagacattttaaaaagcgta

SEQ ID NO: 170409 - DNA, 120 bp, Artificial Sequence
  ENSG00000108984_109 (sequence is synthesized)
gcagagtgttgctgtgtgtgcttgtgatttgtattttatttgatgtaaacgtgaaggcagagtattttctaacactgtaattcaactaggttttgtgtctcctggatctatttttttttc

SEQ ID NO: 170410 - DNA, 120 bp, Artificial Sequence
  ENSG00000108984_110 (sequence is synthesized)
ttgttgttctgaggagctgatatacttggaaatattaggtttaagatatgcagatgtccaacttatatacatagtcaagggtttagagtctggagacaggaggctggcaatttcaactag

SEQ ID NO: 170411 - DNA, 120 bp, Artificial Sequence
  ENSG00000108984_111 (sequence is synthesized)
agctgccttggctgttcctttgataaagttcatctctttcacctggagtccgtctctacccccagtcccccatgggtggaagtagaattgactcaggcaagagaactaaggggctttcct

SEQ ID NO: 170412 - DNA, 120 bp, Artificial Sequence
  ENSG00000108984_112 (sequence is synthesized)
ttgagattggatagcaaaccatataagtagtattccttatcatggctgaggacataagaagaagacgtgatctttgtcttacatccaaattgaatataaacacttgttagcaagcagagc

SEQ ID NO: 170413 - DNA, 120 bp, Artificial Sequence
  ENSG00000108984_113 (sequence is synthesized)
tatgagatcatatcattgagaattttagagaatatgataaaaattgatcttgtattggccatcacatgagagcttgttggaaaagaatcatgggtctcaagatcaaatgaattggaattt

SEQ ID NO: 170414 - DNA, 120 bp, Artificial Sequence
  ENSG00000108984_114 (sequence is synthesized)
gcattttaacaagatttccgggtgattcttgtgcacatgaaagtgtgaaaaactctggtataaagtagagccctttcagacaacaggaggcaggatataatgatttatctcttcctcttt

SEQ ID NO: 170415 - DNA, 120 bp, Artificial Sequence
  ENSG00000108984_115 (sequence is synthesized)
ccttttcttccttcttattggcctgttatctcttcaaccagccattcatccatccatccattcattcattttctatccccccattcatccatttattcatcttttaaaatcacttttaaa

SEQ ID NO: 170416 - DNA, 120 bp, Artificial Sequence
  ENSG00000108984_116 (sequence is synthesized)
cttttaaaatgtaatagatcccctgagaggtatctgagaagaaaatatattctgattaaattatgcatcaggattcttatagggaagtaagataaatgtacaaaaaaaaaaaaaaaaaaa

SEQ ID NO: 170417 - DNA, 120 bp, Artificial Sequence
  ENSG00000108984_117 (sequence is synthesized)
aaaaaaaaaaaaaaaaagttgcaatgacaaattctcagtggggagaaagggcagatcttcctaggaaaagagagttggcattctcatcctgatgtttgccccctggactaatgaaaaacc

SEQ ID NO: 170418 - DNA, 120 bp, Artificial Sequence
  ENSG00000108984_118 (sequence is synthesized)
tcattcatgaccacagtctgtatttgagaagctctgtcctacctggtgcttgggttcttaacactcacagacttcctgggtaggaagtggcgctttgaatggagacatgagagctgcctg

SEQ ID NO: 170419 - DNA, 120 bp, Artificial Sequence
  ENSG00000108984_119 (sequence is synthesized)
tgcaggtcagctctttcctttgccgcagtctctttctctgctatcttgctatgatttagtccttaactttttccttttgtctttccccataggcaagaagcgaaaccctggccttaaaat

SEQ ID NO: 170420 - DNA, 120 bp, Artificial Sequence
  ENSG00000108984_120 (sequence is synthesized)
aacttaaaaagaagtttctttgatcacgtaaatgccttcacaatcatggagctctttcttgtttgacacatcttgtatacgggggtttacgtgtgtgcaatgatgacatgccctggagca

SEQ ID NO: 170421 - DNA, 120 bp, Artificial Sequence
  ENSG00000108984_121 (sequence is synthesized)
aggttggattgaaattatggtattttcaaatgtggttagcctttttaagatgtggagtttctcgtctcctttcttttttgttttgtttatcttggcagaactttctatatcgcctataga

SEQ ID NO: 170422 - DNA, 120 bp, Artificial Sequence
  ENSG00000108984_122 (sequence is synthesized)
ctgatttgcttagatctcttataatttgaaatattctggtcttttgactgctttaggagcttcatctagcctacttgtgtactatatagacttactttgatctcttttctctacctctgt

SEQ ID NO: 170423 - DNA, 120 bp, Artificial Sequence
  ENSG00000108984_123 (sequence is synthesized)
tttccactttagcgttatatggattatgaggcttcacctcattaaaaccagctttttgactgactgttgctggtatttagtgtgagagatacgacatggaggaggcatctagacctaact

SEQ ID NO: 170424 - DNA, 120 bp, Artificial Sequence
  ENSG00000108984_124 (sequence is synthesized)
cctagacagtggtatcagtaaaggcctggatatctggggttgtattgcttatgtctgttagtaattagattccatttttcattaaggggtaggagagcacatgcaggttctgcttggcta

SEQ ID NO: 170425 - DNA, 120 bp, Artificial Sequence
  ENSG00000108984_125 (sequence is synthesized)
cctactggtttgctctttgtagataaccttgcttatttgtaaattcctttatgatcttgacagaagacactgtatttccccccaaaattcaagaaagaaatagttaattcttcaggatag

SEQ ID NO: 170426 - DNA, 120 bp, Artificial Sequence
  ENSG00000108984_126 (sequence is synthesized)
cagggtgatgtgtggatctgcatggagctcatggatacatcactagataaattctacaaacaagttattgataaaggccagacaattccagaggacatcttagggaaaatagcagtttct

SEQ ID NO: 170427 - DNA, 120 bp, Artificial Sequence
  ENSG00000108984_127 (sequence is synthesized)
gtgagtacattttgatccctactgcaaggataatgtgagaaataaagtccctatgtgtctttggacctcagtatgaagaaatactacctgggccacagctactattcgtacatgtctgtt

SEQ ID NO: 170428 - DNA, 120 bp, Artificial Sequence
  ENSG00000108984_128 (sequence is synthesized)
gacatttattggtggatggataaatacatgctttcctttctgagcactgtgtagaagattctagcactgctttggtttggcagactctaggttaaatgactctaagtgctgcattcatca

SEQ ID NO: 170429 - DNA, 120 bp, Artificial Sequence
  ENSG00000108984_129 (sequence is synthesized)
gctatgaccacattcctggtgtctatattctgacattagtttattttgattttcatttatggatttttaaaatgttctcttgagactagtaggcatagaagaaagcagaaggaaaataaa

SEQ ID NO: 170430 - DNA, 120 bp, Artificial Sequence
  ENSG00000108984_130 (sequence is synthesized)
tagaaagaaggtcttctaccttcatggctattcaggctcaggagggtggagagaaaaagaaggaggacaaatgaacaagacagatgagggagacatcctctctgatataagatacagtcc

SEQ ID NO: 170431 - DNA, 120 bp, Artificial Sequence
  ENSG00000108984_131 (sequence is synthesized)
tctctggtggatggagtccaatttgtgtaacttcctatgtattttcctagataggaccaccactatttgagaaaatatctcactggtaacctaaagccaaggataataaaccttgatata

SEQ ID NO: 170432 - DNA, 120 bp, Artificial Sequence
  ENSG00000108984_132 (sequence is synthesized)
cttaacattcaatttctttccagcaatgtgataaataaatctatcttgtgtttctcttgcagattgtaaaagcattagaacatttacatagtaagctgtctgtcattcacagaggtaagc

SEQ ID NO: 170433 - DNA, 120 bp, Artificial Sequence
  ENSG00000108984_133 (sequence is synthesized)
acatagacccacttcccttctcccttcctgaagctgcaatttcctcggaacaatgagcttgcagaggtttgctgcaatccgaacttgaggagggggtggagtctgttcagttctgtttct

SEQ ID NO: 170434 - DNA, 120 bp, Artificial Sequence
  ENSG00000108984_134 (sequence is synthesized)
ccttgccgaagtgtggtctttggagctaagtgaagaatgacttctgttaggttttcctctgctggtcttccttgcagcctcgaaaacctcaccagagtcgcctctgctggtctcttactg

SEQ ID NO: 170435 - DNA, 120 bp, Artificial Sequence
  ENSG00000109016_0 (sequence is synthesized)
acctttgtgccagttatcacactgttctgattactgtggcattataatcatcttgataactgtatcgtgaattctccaactgtgttcttcgccggaagtccacggaacaccaaccacgac

SEQ ID NO: 170436 - DNA, 120 bp, Artificial Sequence
  ENSG00000109016_1 (sequence is synthesized)
cttcggaatttccctccggaagatgaaggcactgtagttatgcgggtggaccctatcagatctcgggtccatcgggtcctgtgtacaccttgagggacgcccacccaacgcgcatgcgca

SEQ ID NO: 170437 - DNA, 120 bp, Artificial Sequence
  ENSG00000109016_2 (sequence is synthesized)
gcctcaatgctgggattggacggagcctcgccggctgcgtacacgtcacttccgaggcgggaggatgaagttgattgactatggtctctccggctaccaggaagagtctgccgaaggtga

SEQ ID NO: 170438 - DNA, 120 bp, Artificial Sequence
  ENSG00000109016_3 (sequence is synthesized)
aggccatggacttcatcacctccacagccatcctgcccctgctgttcggctgcctgggcgtcttcggcctcttccggctgctgcagtgggtgcgcgggaaggcctacctgcggaatgctg

SEQ ID NO: 170439 - DNA, 120 bp, Artificial Sequence
  ENSG00000109016_4 (sequence is synthesized)
tggtggtgatcacaggcgccacctcagggctgggcaaagaatgtgcaaaagtcttctatgctgcgggtgctaaactggtgctctgtggccggaatggtggggccctagaagagctcatca

SEQ ID NO: 170440 - DNA, 120 bp, Artificial Sequence
  ENSG00000109016_5 (sequence is synthesized)
gagaactcaccgcttctcatgccaccaaggtgcagacacacaagccttacttggtgaccttcgacctcacagactctggggccatagttgcagcagcagctgagatcctgcagtgctttg

SEQ ID NO: 170441 - DNA, 120 bp, Artificial Sequence
  ENSG00000109016_6 (sequence is synthesized)
gctatgtcgacatacttgtcaacaatgctgggatcagctaccgtggtaccatcatggacaccacagtggatgtggacaagagggtcatggagacaaactactttggcccagttgctctaa

SEQ ID NO: 170442 - DNA, 120 bp, Artificial Sequence
  ENSG00000109016_7 (sequence is synthesized)
cgaaagcactcctgccctccatgatcaagaggaggcaaggccacattgtcgccatcagcagcatccagggcaagatgagcattccttttcgatcagcatatgcagcctccaagcacgcaa

SEQ ID NO: 170443 - DNA, 120 bp, Artificial Sequence
  ENSG00000109016_8 (sequence is synthesized)
cccaggctttctttgactgtctgcgtgccgagatggaacagtatgaaattgaggtgaccgtcatcagccccggctacatccacaccaacctctctgtaaatgccatcaccgcggatggat

SEQ ID NO: 170444 - DNA, 120 bp, Artificial Sequence
  ENSG00000109016_9 (sequence is synthesized)
tggacaccaccacagcccagggccgaagccctgtggaggtggcccaggatgttcttgctgctgtggggaagaagaagaaagatgtgatcctggctgacttactgccttccttggctgttt

SEQ ID NO: 170445 - DNA, 120 bp, Artificial Sequence
  ENSG00000109016_10 (sequence is synthesized)
atcttcgaactctggctcctgggctcttcttcagcctcatggcctccagggccagaaaagagcggaaatccaagaactcctagtactctgaccagccagggccagggcagagaagcagca

SEQ ID NO: 170446 - DNA, 120 bp, Artificial Sequence
  ENSG00000109016_11 (sequence is synthesized)
ctcttaggcttgcttactctacaagggacagttgcatttgttgagactttaatggagatttgtctcacaagtgggaaagactgaagaaacacatctcgtgcagatctgctggcagaggac

SEQ ID NO: 170447 - DNA, 120 bp, Artificial Sequence
  ENSG00000109016_12 (sequence is synthesized)
aatcaaaaacgacaacaagcttcttcccagggtgaggggaaacacttaaggaataaatatggagctggggtttaacactaaaaactagaaataaacatctcaaacagtaagagttgtagt

SEQ ID NO: 170448 - DNA, 120 bp, Artificial Sequence
  ENSG00000109016_13 (sequence is synthesized)
cttccaggactagaaccttgtgtcctttgaattctcgccctgccagctcctagaaatagtttcaatcttggaatcagatgttatgtcacctgacccagttgtttctgtatttgacttaaa

SEQ ID NO: 170449 - DNA, 120 bp, Artificial Sequence
  ENSG00000109016_14 (sequence is synthesized)
cctcattgttgtggcagaaagaccacctccagtactgaggggagaaagttgtagtttcaagaagtcagcagtcacgcccatttccaggtccctatgatatctcatccaacttaaaacgtg

SEQ ID NO: 170450 - DNA, 120 bp, Artificial Sequence
  ENSG00000109016_15 (sequence is synthesized)
ggccagtatgtaatggcttatttggtgtatcccaagggatgcctgctttagcacctcataggaattcctgtttctctcttaactctcaccacatccctgtaggatgccaggcaccactcc

SEQ ID NO: 170451 - DNA, 120 bp, Artificial Sequence
  ENSG00000109016_16 (sequence is synthesized)
aagcagaaggtgaacttactaaagagagagcagccaaaagggagaggaggaccctgcgtggccccgtgcatcctctagaagtgaaaccattaaattggccagctgggcagactctacagc

SEQ ID NO: 170452 - DNA, 120 bp, Artificial Sequence
  ENSG00000109016_17 (sequence is synthesized)
agcccctggtctggtggaagtgagccatttgttagctctaactagttggatcatagccagaaagaatgcctgtttctgcctttctgatttattaaaaatacattgttgaggctcactgaa

SEQ ID NO: 170453 - DNA, 120 bp, Artificial Sequence
  ENSG00000109016_18 (sequence is synthesized)
gattgactatggtctctccggctaccaggtaggggctggggaagaaggaacctccgagatgaggcgatagggtctggccttgagctgaggcgacgccccggcttgggtgaggggaagcgg

SEQ ID NO: 170454 - DNA, 120 bp, Artificial Sequence
  ENSG00000109016_19 (sequence is synthesized)
tgtagtggtcgagctaaggccgcgggccctgggcggcttccggatccccgcgacgccgaactctgaaggaagactcagcccaggcgctgggaccagagccctggctccggcgaagtctgc

SEQ ID NO: 170455 - DNA, 120 bp, Artificial Sequence
  ENSG00000109016_20 (sequence is synthesized)
tcaacctccctcctgacatggaagagaagggtctccttagtgttcacactggagacagtagacccaggcaagagctggaactgagacagcagcagcacctgtctaaagctcagcccgagt

SEQ ID NO: 170456 - DNA, 120 bp, Artificial Sequence
  ENSG00000109016_21 (sequence is synthesized)
aatgaaagtgccgagcacacagcaggtttccaggaaatggcagcaatgaagggcgctctccctttagatggaaatgagaggacatttctccttggatgctgttggctgccacactcagag

SEQ ID NO: 170457 - DNA, 120 bp, Artificial Sequence
  ENSG00000109016_22 (sequence is synthesized)
acacctggtgtccaggtgctgtcctttcctctccattatataacatggttagcaactggaggttgatgtgataggctgccctcaaaggaatgcaggtttaccaactgtgtactccgtcat

SEQ ID NO: 170458 - DNA, 120 bp, Artificial Sequence
  ENSG00000109016_23 (sequence is synthesized)
cagaagatgggaacatcacatatgttgctgaggtttttggttttggggccgttgtgttctgactcacagctggggtgcatggagcttgggctagcattaaagagtgcttaacctacatac

SEQ ID NO: 170459 - DNA, 120 bp, Artificial Sequence
  ENSG00000109016_24 (sequence is synthesized)
atgtgcttggcatcttactggagagcagagctcacttcaatgtggctgctcttcccaggattgaacactcaggagcctggtctgaaatctccagccttccttcaggttttatttttacta

SEQ ID NO: 170460 - DNA, 120 bp, Artificial Sequence
  ENSG00000109016_25 (sequence is synthesized)
aagccagcctgtactcttttaaaccagggagctgaaggctggcttctgaaaatacaccccacaggccactctgccgtggcttgttcaggcattccagggagggcttgctgacctgaaggt

SEQ ID NO: 170461 - DNA, 120 bp, Artificial Sequence
  ENSG00000109016_26 (sequence is synthesized)
ctggaggcagtgctgccagggggcgggggtaagtcagccagggatgaggagcggcccagctgcacagggaccaccagcgcaaatgcccgaagcggcagcagaaggccagataagggaagt

SEQ ID NO: 170462 - DNA, 120 bp, Artificial Sequence
  ENSG00000109016_27 (sequence is synthesized)
gggccggatggcactgtccttggtacaagtggaaaaagcaggagccaaggcacagtgagaaatgactcagcgtcagggtgggaggcaagtgtgagagaagcagcctggccccgggggtgg

SEQ ID NO: 170463 - DNA, 120 bp, Artificial Sequence
  ENSG00000109016_28 (sequence is synthesized)
gcggggaaacccgcctgtcgccgaggtgtcttgagtccagtttccgctgctgggaatgggtgtcgcgccgggcgctgtgtgtgaaaggcctcgcgcccacagggctcctggcttcaacct

SEQ ID NO: 170464 - DNA, 120 bp, Artificial Sequence
  ENSG00000109016_29 (sequence is synthesized)
gtttattcccacatttctgcgcgacgtaggggaggctccgcagcgtctgcgagtggcaggaccgagggttgagcgctgggggccagtggcaccttagccagtgacggcgagttaggacta

SEQ ID NO: 170465 - DNA, 120 bp, Artificial Sequence
  ENSG00000109016_30 (sequence is synthesized)
gcaaaggaagtccggtttttcagaaggcaggaggagggtgctgactcgagcgtccacgggaatggctggttgagatatcttgctcttccaatacttactctgcggcttcctggctgtgcg

SEQ ID NO: 170466 - DNA, 120 bp, Artificial Sequence
  ENSG00000109016_31 (sequence is synthesized)
gctttgggcaaatgttttaaactctgagtgtttcttcagctgtaactttgggagtaacaagcccactcataaggttgttgtgaagcgtaaatgagactgcgcgtgcaaggtgctcagctg

SEQ ID NO: 170467 - DNA, 120 bp, Artificial Sequence
  ENSG00000109016_32 (sequence is synthesized)
gtgtctggcacatagtaggtattcaacaaatggtagccacataatgctctttttttcagtttccaaaccttccatgtagtgattggagaatcgtgaagttacttttgaagtaacgtttgg

SEQ ID NO: 170468 - DNA, 120 bp, Artificial Sequence
  ENSG00000109016_33 (sequence is synthesized)
gaatatgccttccctaccatgtacatgtccccttttctccattccttaataatagttgatattttttgagtgtttgctatgttacaggcactgtactaatccctttactgaattattcaa

SEQ ID NO: 170469 - DNA, 120 bp, Artificial Sequence
  ENSG00000109016_34 (sequence is synthesized)
tcctgtaataaccctaatcataggaactataatttttatttatggagggagaaatgggcttagagatgttaagaagtttatccaaaggcatagagctattagccaggcaaggtagcacac

SEQ ID NO: 170470 - DNA, 120 bp, Artificial Sequence
  ENSG00000109016_35 (sequence is synthesized)
catagagctattagccaggcaaggtagcacacgcctgtagtcccagctatttgttggggctgaggcaagtggattgcttgaacctgggagacaggctgcagtgagccgagatcacgccat

SEQ ID NO: 170471 - DNA, 62 bp, Artificial Sequence
  ENSG00000109016_36 (sequence is synthesized)
ggtgaaaccccgtctctactaaaaaaattcaaaaaaattggctgggctctccggatggcgga

SEQ ID NO: 170472 - DNA, 89 bp, Artificial Sequence
  ENSG00000109016_37 (sequence is synthesized)
ggaggctgaggcaggagaatggcgtgctccggatgctgcactccagcctgggcgacatagtgagactctgtctcaaaacaaacaaacaa

SEQ ID NO: 170473 - DNA, 67 bp, Artificial Sequence
  ENSG00000109016_38 (sequence is synthesized)
cagctactcgggaggcttccgccactgcattccagcctgggcgacaagagcgaggagactccgtctt

SEQ ID NO: 170474 - DNA, 120 bp, Artificial Sequence
  ENSG00000109016_39 (sequence is synthesized)
caggtttccgaaggagaggcaggtgagtactgacacaccacctcttcctgtaacactgtgggtgactatgtcctaggctgaatggcaatctccgcttgttccctgaggggcagcatgagg

SEQ ID NO: 170475 - DNA, 120 bp, Artificial Sequence
  ENSG00000109016_40 (sequence is synthesized)
cctgtggcttttctgtccgctcatgtcagtactgagaggaagaaagttctacaatgctgaacagtcggccgagggtgcagggcctgggtcaatgcttgctagggcttagagctggagtcc

SEQ ID NO: 170476 - DNA, 120 bp, Artificial Sequence
  ENSG00000109016_41 (sequence is synthesized)
acagagggagatctgggattcatatcagatgagaggaagagcctaggaaagtcccctgaactctgctactttgtcactggtgtgtttggttttggttcttccaggaagagtctgccgaag

SEQ ID NO: 170477 - DNA, 120 bp, Artificial Sequence
  ENSG00000109046_0 (sequence is synthesized)
agtgtctcgtttgcagtcggcgctttaggggaactgtcttcctccgcaggcgcgaggctgggtacagggtctattgtctgtggttgactccgtactttggtctgaggccttcgggagctt

SEQ ID NO: 170478 - DNA, 120 bp, Artificial Sequence
  ENSG00000109046_1 (sequence is synthesized)
tcccgaggcagttagcagaagccgcagcggccgcccccgcccgtctcctctgtccctgggcccgggagggaccaacttggcgtcacgcccctcagcggtcgccactctcttctctgttgt

SEQ ID NO: 170479 - DNA, 120 bp, Artificial Sequence
  ENSG00000109046_2 (sequence is synthesized)
tgggtccgcatcgtattcccggaatcagacggtgccccatagatggccagctttcccccgagggtcaacgagaaagagatcgtgagattacgtactataggtgaacttttagctcctgca

SEQ ID NO: 170480 - DNA, 120 bp, Artificial Sequence
  ENSG00000109046_3 (sequence is synthesized)
gctccttttgacaagaaatgtggtcgtgaaaattggactgttgcttttgctccagatggttcatactttgcttggtcacaaggacatcgcacagtaaagcttgttccgtggtcccagtgc

SEQ ID NO: 170481 - DNA, 120 bp, Artificial Sequence
  ENSG00000109046_4 (sequence is synthesized)
cttcagaactttctcttgcatggcaccaagaatgttaccaattcaagcagtttaagattgccaagacaaaatagtgatggtggtcagaaaaataagcctcgtgaacatattatagactgt

SEQ ID NO: 170482 - DNA, 120 bp, Artificial Sequence
  ENSG00000109046_5 (sequence is synthesized)
ggagatatagtctggagtcttgcttttgggtcatcagttccagaaaaacagagtcgctgtgtaaatatagaatggcatcgcttcagatttggacaagatcagctacttcttgctacaggg

SEQ ID NO: 170483 - DNA, 120 bp, Artificial Sequence
  ENSG00000109046_6 (sequence is synthesized)
ttgaacaatgggcgtatcaaaatatgggatgtatatacaggaaaactcctccttaacttggtagatcatactgaagtggtcagagatttaacttttgctccagatggaagcttgatcctg

SEQ ID NO: 170484 - DNA, 120 bp, Artificial Sequence
  ENSG00000109046_7 (sequence is synthesized)
gtgtcagcttcaagagacaaaactctcagagtatgggacctgaaagatgatggaaacatgatgaaagtattgagggggcatcagaattgggtgtacagctgtgcattctctcctgactct

SEQ ID NO: 170485 - DNA, 120 bp, Artificial Sequence
  ENSG00000109046_8 (sequence is synthesized)
tctatgctgtgttcagtcggagccagtaaagcagttttcctttggaatatggataaatacaccatgatacggaaactagaaggacatcaccatgatgtggtagcttgtgacttttctcct

SEQ ID NO: 170486 - DNA, 120 bp, Artificial Sequence
  ENSG00000109046_9 (sequence is synthesized)
gatggagcattactggctactgcatcttatgatactcgagtatatatctgggatccacataatggagacattctgatggaatttgggcacctgtttcccccacctactccaatatttgct

SEQ ID NO: 170487 - DNA, 120 bp, Artificial Sequence
  ENSG00000109046_10 (sequence is synthesized)
ggaggagcaaatgaccggtgggtacgatctgtatcttttagccatgatggactgcatgttgcaagccttgctgatgataaaatggtgaggttctggagaattgatgaggattatccagtg

SEQ ID NO: 170488 - DNA, 120 bp, Artificial Sequence
  ENSG00000109046_11 (sequence is synthesized)
caagttgcacctttgagcaatggtctttgctgtgccttctctactgatggcagtgttttagctgctgggacacatgacggaagtgtgtatttttgggccactccacggcaggtccctagc

SEQ ID NO: 170489 - DNA, 120 bp, Artificial Sequence
  ENSG00000109046_12 (sequence is synthesized)
ctgcaacatttatgtcgcatgtcaatccgaagagtgatgcccacccaagaagttcaggagctgccgattccttccaagcttttggagtttctctcgtatcgtatttagaagattctgcct

SEQ ID NO: 170490 - DNA, 120 bp, Artificial Sequence
  ENSG00000109046_13 (sequence is synthesized)
tccctagtagtagggactgacagaatacacttaacacaaacctcaagctttactgacttcaattatctgtttttaaagacgtagaagatttatttaatttgatatgttcttgtactgcat

SEQ ID NO: 170491 - DNA, 120 bp, Artificial Sequence
  ENSG00000109046_14 (sequence is synthesized)
gcattttgatcagttgagcttttaaaatattatttatagacaatagaagtatttctgaacatatcaaatataaatttttttaaagatctaactgtgaaaacatacatacctgtacatatt

SEQ ID NO: 170492 - DNA, 120 bp, Artificial Sequence
  ENSG00000109046_15 (sequence is synthesized)
tataagctgctatatgttgaatggacccttttgcttttctgatttttagttctgacatgtatatattgcttcagtagagccacaatatgtatctttgctgtaaagtgcaaggaaatttta

SEQ ID NO: 170493 - DNA, 120 bp, Artificial Sequence
  ENSG00000109046_16 (sequence is synthesized)
aattctgggacactgagttagatggtaaatactgacttacgaaagttgaattgggtgaggcgggcaaatcacctgaggtcagcagtttgagactagcctggcaaacatgatgaaaccctg

SEQ ID NO: 170494 - DNA, 84 bp, Artificial Sequence
  ENSG00000109046_17 (sequence is synthesized)
gtgttgcctcatacgaaatgtatttggttttgttggagagtgtcagactgatctggaagtgaaacacagtttatgtacagggaa

SEQ ID NO: 170495 - DNA, 120 bp, Artificial Sequence
  ENSG00000109046_18 (sequence is synthesized)
agactgatctggaagtgaaacacagtttatgtacagggaaaaggattttattatccttaggaatgtcatccaagacgtagagcttgaatgtgacgttatttaaaaacaacaacaaagaag

SEQ ID NO: 170496 - DNA, 120 bp, Artificial Sequence
  ENSG00000109046_19 (sequence is synthesized)
gcagagccaggatataactagaaaaaggatgtctttttttttttttttactccccctctaaacactgctgctgccttaattttagaaagcagcttactagtttacccttgtggtataaag

SEQ ID NO: 170497 - DNA, 120 bp, Artificial Sequence
  ENSG00000109046_20 (sequence is synthesized)
ctaagggacaattattttaagaccatggatttaaaaaaaaaaaaaaaaactctgtttctgcaggggatgatattggtgagttgccaaagaagcaatacagcatatctgcttttgccttct

SEQ ID NO: 170498 - DNA, 120 bp, Artificial Sequence
  ENSG00000109046_21 (sequence is synthesized)
gttgtttatcttacctgcagatattaagaatgtatgcattatgtaaaatgctcaattatatatttttgttgagttttttaattaaagacttgtaaaaaaaaaaaacagtatattgcaaat

SEQ ID NO: 170499 - DNA, 120 bp, Artificial Sequence
  ENSG00000109046_22 (sequence is synthesized)
gtttcttaaataggttaggtggagtactttctctctgtctccattgtaaggttgatggtacaccacaggcaaattaagcaaaaaggacaatgaagaaagaatgcaggactcaggcgctgc

SEQ ID NO: 170500 - DNA, 120 bp, Artificial Sequence
  ENSG00000109046_23 (sequence is synthesized)
tctagaattcattcagggctccccgagtgcagcagctcttatggtggttttgtttttaggagaactgttgtaataatgcatattttaaaagcatagggaagctctagaacacaggaaggt

SEQ ID NO: 170501 - DNA, 120 bp, Artificial Sequence
  ENSG00000109046_24 (sequence is synthesized)
gactactaagcaagagaaaagtatcttttagtggggaactaccagcctatagtaagtctatctggttaaagtagttattatgaaaatctagcagtctgggtcctttgagaaggcattaaa

SEQ ID NO: 170502 - DNA, 120 bp, Artificial Sequence
  ENSG00000109046_25 (sequence is synthesized)
aaagcaaaactcttatgagccatgtgtgattttgaagactcatttccactgagaaattatttggaagttcctatggttagctctgttaaggaatgtaaaaatttatagggggtgtagggt

SEQ ID NO: 170503 - DNA, 120 bp, Artificial Sequence
  ENSG00000109046_26 (sequence is synthesized)
tatcaatttgaaagccagtagaaaatctgctcaagttacttcttgaggatcatctgtattttacaaaaagaagcacaagaagcatctaatctttatacttcttgtgactttttttcccct

SEQ ID NO: 170504 - DNA, 120 bp, Artificial Sequence
  ENSG00000109046_27 (sequence is synthesized)
tctaatctttatacttcttgtgactttttttcccctgcattttactttgtaatatatcggctttataattttaaaatacactggccgggcgcagtggcccacacctataatcccagcact

SEQ ID NO: 170505 - DNA, 69 bp, Artificial Sequence
  ENSG00000109046_28 (sequence is synthesized)
ttgggaggccaaggcaggtgggtcacttaaggccgggagttcatgacaagcctgaccaacatagtgaaa

SEQ ID NO: 170506 - DNA, 81 bp, Artificial Sequence
  ENSG00000109046_29 (sequence is synthesized)
gatcacaataaataagataccattacttttcatatcattgcattatttttgctttccacaccaacatatccagtcaagtaa

SEQ ID NO: 170507 - DNA, 85 bp, Artificial Sequence
  ENSG00000109046_30 (sequence is synthesized)
ctctaaataaataagataccattacttttcatatcattgcattatttttgctttccacaccaacatatccagtcaagtaaaaaca

SEQ ID NO: 170508 - DNA, 74 bp, Artificial Sequence
  ENSG00000109046_31 (sequence is synthesized)
tcccccaccacgcccagctaatttttgttgtatttttaggacagacggcgtttcactgttggccagactggtct

SEQ ID NO: 170509 - DNA, 61 bp, Artificial Sequence
  ENSG00000109046_32 (sequence is synthesized)
aggcgctcccccaccacgcccagctaatttttgttgtatttttaggacagacggcgtttca

SEQ ID NO: 170510 - DNA, 120 bp, Artificial Sequence
  ENSG00000109046_33 (sequence is synthesized)
aaaacagcatttttggaagctacattctgtgagatgttcacctgtttgccacctcttctcgtgaaaaccatagtgagtgccagtgtgaaaggaagattgcagcgtatatgtcaagtagaa

SEQ ID NO: 170511 - DNA, 120 bp, Artificial Sequence
  ENSG00000109046_34 (sequence is synthesized)
acatgtttgaattttccatttgtctgtggggaagaaggtaataacagtaataacagactgaaggaccaaaggaaaatagggaagacgttgattatggacttggatcagattctagctaca

SEQ ID NO: 170512 - DNA, 120 bp, Artificial Sequence
  ENSG00000109046_35 (sequence is synthesized)
tgatttgaaaatgacactgcctctcctattttgccacaagcctgtcatttggagaactggcagatcatttatgttcagatttaattttctgttttagaatcccatggagtacatgtgaac

SEQ ID NO: 170513 - DNA, 120 bp, Artificial Sequence
  ENSG00000109046_36 (sequence is synthesized)
ataggaaaatcacactcagcagccaagctatccttttgcgataatgaaatcactttaaaacctataacttgatcttaggttggcaaatcttaaacttaacgatccttgaaatttcctgcc

SEQ ID NO: 170514 - DNA, 120 bp, Artificial Sequence
  ENSG00000109046_37 (sequence is synthesized)
tgctgtgactgtgatgcagttggattcaactggtttacactgctcttgggtcggcaagaccaaaaaaggttggactgcactgtagcatgcttatgggttgaggcagtggcagaggcagag

SEQ ID NO: 170515 - DNA, 120 bp, Artificial Sequence
  ENSG00000109046_38 (sequence is synthesized)
gacttggccgtcagccagccagcacaggcgtaagaaaatagcatgagaagtttcacgagcctgaaaccattgagacagtgattacaacctccatattaatcagatgagggtttgtaggtg

SEQ ID NO: 170516 - DNA, 120 bp, Artificial Sequence
  ENSG00000109046_39 (sequence is synthesized)
acatagcattttacccaagtaattctgaacagactgtggcttatgataatacattttaactagcaagtgtgtggactataaaacaaatatctagagttatatatggatgtactatcattt

SEQ ID NO: 170517 - DNA, 120 bp, Artificial Sequence
  ENSG00000109046_40 (sequence is synthesized)
ggtgataaaagcatagaaaaagcataagttggagtatactgggtttttttgttgttgttaaattcttttccatcagaagtaagagctgttggcagcaactaataaaatgcaacctagtga

SEQ ID NO: 170518 - DNA, 120 bp, Artificial Sequence
  ENSG00000109046_41 (sequence is synthesized)
cagcaatattggtgtgattgaggttatgctggcaccactcgcacacaggcgcacaatggtgttagctgggcagaaagagtggcatctctggctaccgggctgggggcgacctttaccata

SEQ ID NO: 170519 - DNA, 120 bp, Artificial Sequence
  ENSG00000109046_42 (sequence is synthesized)
tgagtaaattgattttccagttttatggaattgggagtctgacaagtgaaaccaatttaatgtaaagtatttggctttcaaatggtttctctgtgctattttttggaattctttcagatt

SEQ ID NO: 170520 - DNA, 120 bp, Artificial Sequence
  ENSG00000109046_43 (sequence is synthesized)
ccagagatatcttacgtctttgattcaatttaaaatttgtacttattttcttttagaaataatgtattgtgtctgtgcagaaaaaaaaaaaaccaaaaaggattgctttactccaagagg

SEQ ID NO: 170521 - DNA, 120 bp, Artificial Sequence
  ENSG00000109046_44 (sequence is synthesized)
agagattgtcttaggataaacctccaagctcacatttaatataacagactgaagtaaacattagaatcctgtttagagctattctgcacagttaactactgatctttagaatctaaaatt

SEQ ID NO: 170522 - DNA, 120 bp, Artificial Sequence
  ENSG00000109046_45 (sequence is synthesized)
gtatatgaacttattcttaaataattgaaccgttttatattcaaatgacttatgatcgtggttagtttgggaaaaataagatggttaaattttgatttattgaaatgtaattgtattatt

SEQ ID NO: 170523 - DNA, 120 bp, Artificial Sequence
  ENSG00000109046_46 (sequence is synthesized)
ttcataaaatagcattttcattttgtaatgtggtttaacatccttgttgtttgccaaagaaatttcatttggctgtgaatattctatttgcttgcagtatctgtttctcttcctaggctc

SEQ ID NO: 170524 - DNA, 120 bp, Artificial Sequence
  ENSG00000109046_47 (sequence is synthesized)
aagttggtgacccaagcctattgtaaacaagtgattatctcaaagggagatgccaatggagtaacaatttgttaaccttacgttttctgtctgtatatttttttaaaaatctggtagttt

SEQ ID NO: 170525 - DNA, 120 bp, Artificial Sequence
  ENSG00000109046_48 (sequence is synthesized)
ctggaaaaaaaagagaagggggtttgtagtacttaaccctatttatttccgtatattttagttaattagtttttggaataaatggatttcagtatagctttgtggttaaattgcattgcc

SEQ ID NO: 170526 - DNA, 120 bp, Artificial Sequence
  ENSG00000109046_49 (sequence is synthesized)
atacaggtatggattcatagtttttaaagcaaatgtattattttatgatgcagggcactgcttataggcactggaattgggatttgaggatttcagcttactgaaaagcaagaattgatg

SEQ ID NO: 170527 - DNA, 120 bp, Artificial Sequence
  ENSG00000109046_50 (sequence is synthesized)
gtctggtgttatttatacattaagtttttctgtatgttaaaagtcagattgtgtctaacaagtgtatatatatatatagtgttgtgccagagtaggtgacttctgtgatgtgaagctttt

SEQ ID NO: 170528 - DNA, 120 bp, Artificial Sequence
  ENSG00000109046_51 (sequence is synthesized)
agagtaggtgacttctgtgatgtgaagctttttggattcactttggattttacattttgttggataaccctggtgcatagtagtagagacaggggtttcaccgtgttggccaggctggtc

SEQ ID NO: 170529 - DNA, 120 bp, Artificial Sequence
  ENSG00000109046_52 (sequence is synthesized)
acaggcgtgagccaccgagcctggccctttgttgttgttgttgttgtttttgtttttaatggacttatagtccctctgtttggggtaaattgagtttggatgtttgttgaaagtttttct

SEQ ID NO: 170530 - DNA, 120 bp, Artificial Sequence
  ENSG00000109046_53 (sequence is synthesized)
tggatgtttgttgaaagtttttctaaaatgtatcatgtgctatattggatctttccctgttttttttgtgtctagcagaccttcatggttatagtcactaatgttctcattacatataac

SEQ ID NO: 170531 - DNA, 120 bp, Artificial Sequence
  ENSG00000109046_54 (sequence is synthesized)
ttgaggtctggaacctatgggaaactgatcattatggtttgaggatttttttccccctttaaggcaattttctgatatcagcttgaccatatcttaagttactgggtttttttgtttgtt

SEQ ID NO: 170532 - DNA, 120 bp, Artificial Sequence
  ENSG00000109046_55 (sequence is synthesized)
tgtttgttttttgcttatttatacttgtgtttttaggttgaaggagcaccagttgattcggtggttttgaggaaaatttgggaggcaaataagttataatataaattgctttattgttga

SEQ ID NO: 170533 - DNA, 120 bp, Artificial Sequence
  ENSG00000109046_56 (sequence is synthesized)
acttactactcagtcactgagaatttctattaatgtccttctctcgtagttcaaatatcaacctttcccttcctatctataggattctattgttatttggtgtcattataataatattga

SEQ ID NO: 170534 - DNA, 120 bp, Artificial Sequence
  ENSG00000109046_57 (sequence is synthesized)
cgagggtcaacgagaaagagatcgactgagtctcgctccgtcgtccaggctggagtgcagtagcgcagtctcagcttactgcaacctccacctctcgggatcaagcagttctcctgcctc

SEQ ID NO: 170535 - DNA, 120 bp, Artificial Sequence
  ENSG00000109046_58 (sequence is synthesized)
atgaagtaaccttgcattcggctgcaaggtgtactgtacgtacacaggtgctggtcgatgtccactttctgcttttctttctttctttttttcttttttaaagtaatttcccccacagta

SEQ ID NO: 170536 - DNA, 120 bp, Artificial Sequence
  ENSG00000109046_59 (sequence is synthesized)
aatctaagtaacctatgaagtctgtgctcggtgtcatgaatattttaaatgttttatttcatgatgggggagaatttgcatgaaggaaattaaatatagttattgattgccaagtgagaa

SEQ ID NO: 170537 - DNA, 120 bp, Artificial Sequence
  ENSG00000109046_60 (sequence is synthesized)
gttggattgtttttagagataatagataataatgggcatatcagggttttttttttttgtaagtctagaaaagtttatgtgctgtagaagagatctagtctatatgttaagacattccct

SEQ ID NO: 170538 - DNA, 120 bp, Artificial Sequence
  ENSG00000109046_61 (sequence is synthesized)
tgctaattattttcttctctgttgttctatttttttggtccagtttgctgtttttaaagttttgagtcccagctggtcctgtacatttaactgaaaaaaaagtaacttaaaataatataa

SEQ ID NO: 170539 - DNA, 120 bp, Artificial Sequence
  ENSG00000109046_62 (sequence is synthesized)
aaatagcactcatgtatgtcctacagttataggtgaaatttgatattgtttgtcttacatagcatacctatagacagcttaagtaaagtgactgttaagagggttatgcttattgatgaa

SEQ ID NO: 170540 - DNA, 120 bp, Artificial Sequence
  ENSG00000109046_63 (sequence is synthesized)
ctcttgtagttgtttaccagctctgttagtatagttaaattgatctcagtagcttcaagtatttataaaatggttgaagtccaaatacatgtgataattacaatacactttgaattaatg

SEQ ID NO: 170541 - DNA, 120 bp, Artificial Sequence
  ENSG00000109046_64 (sequence is synthesized)
gagggtgggaggctagttgaaatgcattttatttacccaaggagtatgttaaaatgatagttataaatgttggaagtttaaagcaagatactcagtttagttctttacaaatcataagaa

SEQ ID NO: 170542 - DNA, 120 bp, Artificial Sequence
  ENSG00000109046_65 (sequence is synthesized)
gaacaaaattagatgttgacattgctattttaggctgtgtgttttccatatgcttcttgctttccctgtcacaggtggtggcagcaatattggtgtgattgaggttatgctggcaccact

SEQ ID NO: 170543 - DNA, 120 bp, Artificial Sequence
  ENSG00000109046_66 (sequence is synthesized)
ttaacatttaacagaaacatttgaaatagaatttgcatgtctgccttaattaacttaaagactgattttaatctgactatgacactgagcatattctttaaattactcataatttataat

SEQ ID NO: 170544 - DNA, 120 bp, Artificial Sequence
  ENSG00000109046_67 (sequence is synthesized)
gcttaatataatcttaattaaatttagcagttttagtataagatgtgccattttgtcctctgtatgtctgaatgaagctataacatttgcctttttattgcaggttttcctttggaatat

SEQ ID NO: 170545 - DNA, 120 bp, Artificial Sequence
  ENSG00000109047_0 (sequence is synthesized)
acaccagccttgagcccagcctgcggccaggggaccacgcacgtcccacccacccagcgactccccagccgctgcccactcttcctcactcatggggaacagcaaaagtggggccctgtc

SEQ ID NO: 170546 - DNA, 120 bp, Artificial Sequence
  ENSG00000109047_1 (sequence is synthesized)
caaggagatcctggaggagctgcagctgaacaccaagttctcggaggaggagctgtgctcctggtaccagtccttcctgaaggactgtcccaccggccgcatcacccagcagcagttcca

SEQ ID NO: 170547 - DNA, 120 bp, Artificial Sequence
  ENSG00000109047_2 (sequence is synthesized)
gagcatctacgccaagttcttccccgacaccgaccccaaggcctacgcccagcatgtgttccgcagcttcgattccaacctcgacggcaccctggacttcaaggagtacgtcatcgccct

SEQ ID NO: 170548 - DNA, 120 bp, Artificial Sequence
  ENSG00000109047_3 (sequence is synthesized)
gcacatgaccaccgcgggcaagaccaaccagaagctggagtgggccttctccctctacgacgtggacggtaacgggaccatcagcaagaatgaagtgctggagatcgtcatggctatttt

SEQ ID NO: 170549 - DNA, 120 bp, Artificial Sequence
  ENSG00000109047_4 (sequence is synthesized)
caaaatgatcactcccgaggacgtgaagctccttccagacgatgaaaacacgccggaaaagcgagccgagaagatctggaagtactttggaaagaatgatgatgataaacttacagagaa

SEQ ID NO: 170550 - DNA, 120 bp, Artificial Sequence
  ENSG00000109047_5 (sequence is synthesized)
agaattcattgaggggacactggccaataaggaaattctgcgactgatccagtttgagcctcaaaaagtgaaggaaaagatgaagaacgcctgatgccaactgttcagctgtcctccctc

SEQ ID NO: 170551 - DNA, 120 bp, Artificial Sequence
  ENSG00000109047_6 (sequence is synthesized)
cacctaccactcacatgacacccgtgagcgcctgtgcacacacacacacatgcacacacacgcgcgcgcacacacacacacacacatccaccccagggccaagagaaaggcctgcacaca

SEQ ID NO: 170552 - DNA, 120 bp, Artificial Sequence
  ENSG00000109047_7 (sequence is synthesized)
agcccacagcacagctccctgccaaactgaagcatctgtagtgacccactggttccttcttcctgggtcttcagcattccctcccatcatgcccggtcccacccctccctctgtccacca

SEQ ID NO: 170553 - DNA, 120 bp, Artificial Sequence
  ENSG00000109047_8 (sequence is synthesized)
gcccatggccctgtgctaatcccaggattaggccataggagtcctaagtgtcaccccgctgtaagctcctttgtggagtgctgggtaagcagtttccaataaacgcaagctgagctgggc

SEQ ID NO: 170554 - DNA, 120 bp, Artificial Sequence
  ENSG00000109047_9 (sequence is synthesized)
acgtggctgctggtcatccttcaactggaaaaggaaatgatttctatcagtcacacctcaaagacaaggctgtgttgcgatggcagccctaggctgggctgctttggtgcggaatgagtc

SEQ ID NO: 170555 - DNA, 120 bp, Artificial Sequence
  ENSG00000109047_10 (sequence is synthesized)
gtggcccaggttaccatggaaacgtgcagagcaccaggggaggacacagtggaaggggctgacttgtcaggggggatcagggaccacatccctgacgaagggagatttaaattcagaacc

SEQ ID NO: 170556 - DNA, 120 bp, Artificial Sequence
  ENSG00000109047_11 (sequence is synthesized)
actgcacacgaggcgggggacggggtcggggtggggaagtctcaaacagaaggcggccaacacagagccgctgaggcatgaatgaccatctcgagttccaggagaaggtcggggtggctg

SEQ ID NO: 170557 - DNA, 120 bp, Artificial Sequence
  ENSG00000109047_12 (sequence is synthesized)
gagggtagaaggaggagggagagcaaagtgtgagctgaatctaaaaggtaggcgggggctggaccacgcaaagccctccctgcagcctgtggtaagcacttgggggctcaccatggggac

SEQ ID NO: 170558 - DNA, 120 bp, Artificial Sequence
  ENSG00000109047_13 (sequence is synthesized)
agcggtgccactgtggagttggaagtaggaggggtttatgtttgtaagagaagtccccagcaggctaaaataagtcagagaggagcaactgggggctccctggagtcagggagcccgatg

SEQ ID NO: 170559 - DNA, 120 bp, Artificial Sequence
  ENSG00000109047_14 (sequence is synthesized)
aataagcttttgcagccactcagatggcctgggccaggggaaaggcaatgggatggagaggaccagatccagtgaggacacatttaggaggtagcatccacctggctggctgagggggca

SEQ ID NO: 170560 - DNA, 120 bp, Artificial Sequence
  ENSG00000109047_15 (sequence is synthesized)
ggaggagagagggcaggaatggcagccaggcctgtagcttgggcagtgggtgaatagcaatgccatctatggagatgagaaatacagagagtctttggggtttcagggaacaatgatgaa

SEQ ID NO: 170561 - DNA, 120 bp, Artificial Sequence
  ENSG00000109047_16 (sequence is synthesized)
ttcagcttcaatatagtatgaggtgaaggcagagccatagatggccctaaagccccttgttttagagacaaggaaaaggagtcccaatgacaggaagcagcttgcccaagggcagccagc

SEQ ID NO: 170562 - DNA, 120 bp, Artificial Sequence
  ENSG00000109047_17 (sequence is synthesized)
tgatgagcagaggtcaggcaagggctacccaccggcccccaactgcctcctcaaagctccagggcctgggatacccaggaactccatcagtgcattctccaagatccctggatttgttgc

SEQ ID NO: 170563 - DNA, 120 bp, Artificial Sequence
  ENSG00000109047_18 (sequence is synthesized)
tttgaaggcccatttattctccagcctcaagttccaagatgaggtcagaaaaatgcatggataccctggattcttgactgacctgtctgcaacctcttgaggctgaggagtctctagttg

SEQ ID NO: 170564 - DNA, 120 bp, Artificial Sequence
  ENSG00000109047_19 (sequence is synthesized)
ctggtattgtggtgatgcctccagaccccactttagccacagagatgacacaatcaccactgccaaagagcactcctctgtgtggagagcaaacgtgagaataaacacttatgaaccgtg

SEQ ID NO: 170565 - DNA, 120 bp, Artificial Sequence
  ENSG00000109061_0 (sequence is synthesized)
gtctctcctcataaagcttcaagttctgatccactttaaggtcgcatctctacgccagggtccttaactgggctaccatcaataacctgcagccatgagttccgactctgagatggccat

SEQ ID NO: 170566 - DNA, 120 bp, Artificial Sequence
  ENSG00000109061_1 (sequence is synthesized)
ttttggggaggctgctcctttcctccgaaagtctgaaagggagcgaattgaagcccagaacaagccttttgatgccaagacatcagtctttgtggtggaccctaaggagtcctttgtgaa

SEQ ID NO: 170567 - DNA, 120 bp, Artificial Sequence
  ENSG00000109061_2 (sequence is synthesized)
agcaacagtgcagagcagggaaggggggaaggtgacagctaagaccgaagctggagctactgtaacagtgaaagatgaccaagtcttccccatgaaccctcccaaatatgacaagatcga

SEQ ID NO: 170568 - DNA, 120 bp, Artificial Sequence
  ENSG00000109061_3 (sequence is synthesized)
ggacatggccatgatgactcatctacacgagcctgctgtgctgtacaacctcaaagagcgctacgcagcctggatgatctacacctactcaggcttgttctgtgtcactgtcaaccccta

SEQ ID NO: 170569 - DNA, 120 bp, Artificial Sequence
  ENSG00000109061_4 (sequence is synthesized)
caagtggttgccagtgtataatgcagaggtggtgacagcctaccgaggcaaaaagcgccaggaggccccaccccacatcttctccatctctgacaatgcctatcagttcatgctgactga

SEQ ID NO: 170570 - DNA, 120 bp, Artificial Sequence
  ENSG00000109061_5 (sequence is synthesized)
tcgggagaatcagtctatcttgatcaccggagaatctggcgcagggaagactgtgaacaccaagcgtgtcatccagtactttgcaacaattgcagttactggggagaagaagaaggaaga

SEQ ID NO: 170571 - DNA, 120 bp, Artificial Sequence
  ENSG00000109061_6 (sequence is synthesized)
agttacttctggcaaaatgcaggggactctggaagatcaaatcatcagtgccaaccccctactggaggcctttggcaacgccaagaccgtgaggaatgacaactcctctcgctttggtaa

SEQ ID NO: 170572 - DNA, 120 bp, Artificial Sequence
  ENSG00000109061_7 (sequence is synthesized)
attcatcaggatccacttcggtaccacagggaaactggcttctgctgatattgaaacatatcttctggagaagtctagagttactttccagctaaaggctgaaagaagctatcatatttt

SEQ ID NO: 170573 - DNA, 120 bp, Artificial Sequence
  ENSG00000109061_8 (sequence is synthesized)
ttatcagatcatgtctaacaagaagccagatctaattgaaatgctcctgatcaccaccaacccatacgattatgccttcgtcagtcaaggggagatcacagtgcccagcattgatgacca

SEQ ID NO: 170574 - DNA, 120 bp, Artificial Sequence
  ENSG00000109061_9 (sequence is synthesized)
agaagagttgatggctacagatagtgccattgaaattctgggctttacttcagatgaaagagtgtccatctataagctcacaggggctgtgatgcattatgggaacatgaaattcaagca

SEQ ID NO: 170575 - DNA, 120 bp, Artificial Sequence
  ENSG00000109061_10 (sequence is synthesized)
aaagcagcgtgaggagcaagctgagccagatggcactgaagttgctgacaaggcagcctatctccaaaatctgaactctgcagatctgctcaaagccctctgctaccctagggtcaaggt

SEQ ID NO: 170576 - DNA, 120 bp, Artificial Sequence
  ENSG00000109061_11 (sequence is synthesized)
cggcaatgagtatgtcaccaaaggtcaaactgtgcagcaggtgtacaatgcagtgggtgctctggccaaagctgtctacgataagatgttcttgtggatggtcacccgcatcaaccagca

SEQ ID NO: 170577 - DNA, 120 bp, Artificial Sequence
  ENSG00000109061_12 (sequence is synthesized)
gctggacaccaagcagcccaggcagtacttcattggggtcttggacattgctggctttgagatctttgatttcaacagcctggagcagctgtgcatcaacttcaccaatgagaaactgca

SEQ ID NO: 170578 - DNA, 120 bp, Artificial Sequence
  ENSG00000109061_13 (sequence is synthesized)
acagtttttcaaccaccacatgttcgtgctggagcaggaggagtacaagaaggaaggcattgagtggacgttcattgactttgggatggacctggctgcctgcatcgagctcatcgagaa

SEQ ID NO: 170579 - DNA, 120 bp, Artificial Sequence
  ENSG00000109061_14 (sequence is synthesized)
gcctatgggcatcttctccatcctggaagaggagtgcatgttccccaaggcgacagacacctccttcaagaacaagctgtatgaacaacatcttggaaaatccaataacttccagaagcc

SEQ ID NO: 170580 - DNA, 120 bp, Artificial Sequence
  ENSG00000109061_15 (sequence is synthesized)
caagcctgccaaaggcaagcctgaggcccacttctctttgattcactatgctggcaccgtggactacaacattgccggctggcttgacaagaacaaggaccccctgaatgagactgtggt

SEQ ID NO: 170581 - DNA, 120 bp, Artificial Sequence
  ENSG00000109061_16 (sequence is synthesized)
ggggctgtaccagaagtctgcaatgaagactctggctctcctctttgttggggcaacgggagcggaagcagaggctggcggtggaaagaaaggtggtaagaagaagggttcttctttcca

SEQ ID NO: 170582 - DNA, 120 bp, Artificial Sequence
  ENSG00000109061_17 (sequence is synthesized)
gactgtgtctgctctcttcagggagaatttgaataagctgatgaccaacttgaggagcactcacccccactttgtgcggtgcatcatccccaatgaaactaaaactcctggtgccatgga

SEQ ID NO: 170583 - DNA, 120 bp, Artificial Sequence
  ENSG00000109061_18 (sequence is synthesized)
gcatgagcttgtcctgcatcagctgaggtgtaacggtgtgctggaaggcatccgcatctgcaggaaaggcttcccaagcagaatcctttatgcagacttcaaacagagatacaaggtgtt

SEQ ID NO: 170584 - DNA, 120 bp, Artificial Sequence
  ENSG00000109061_19 (sequence is synthesized)
aaatgcaagtgctatccctgaaggacaattcatcgatagcaagaaggcttcagagaagctcctggggtccattgacattgaccacacccagtataaatttggtcacaccaaggtcttttt

SEQ ID NO: 170585 - DNA, 120 bp, Artificial Sequence
  ENSG00000109061_20 (sequence is synthesized)
caaagctggtcttctggggctcctagaggagatgcgagatgagaagctggcccagctgattacccgaacccaggccatgtgcagagggttcttggcaagagtggagtaccagaaaatggt

SEQ ID NO: 170586 - DNA, 120 bp, Artificial Sequence
  ENSG00000109061_21 (sequence is synthesized)
ggaaagaagagagtccatcttctgcatccagtacaatgtccgtgccttcatgaatgtgaagcactggccctggatgaagctgtatttcaagatcaaacccctcctcaaaagtgcagagac

SEQ ID NO: 170587 - DNA, 120 bp, Artificial Sequence
  ENSG00000109061_22 (sequence is synthesized)
agagaaggagatggccaacatgaaggaagaatttgagaaaaccaaagaagagctggctaagaccgaggcaaaaaggaaagagctggaagaaaaaatggttactctgatgcaagaaaaaaa

SEQ ID NO: 170588 - DNA, 120 bp, Artificial Sequence
  ENSG00000109061_23 (sequence is synthesized)
tgacttgcaactccaggttcaagctgaagctgacagcttggctgatgcagaggaaaggtgtgaccagctaatcaaaaccaaaatccagctagaagccaaaatcaaagaggtgactgagag

SEQ ID NO: 170589 - DNA, 120 bp, Artificial Sequence
  ENSG00000109061_24 (sequence is synthesized)
agctgaggatgaggaagagatcaatgctgagctgacagccaagaagaggaaactggaggatgaatgttcagaactcaagaaagacattgatgaccttgagctgacactggccaaggttga

SEQ ID NO: 170590 - DNA, 120 bp, Artificial Sequence
  ENSG00000109061_25 (sequence is synthesized)
acaaggtgaaaaacctcacagaagagatggcgggtctggatgaaaccattgctaagctgaccaaggagaagaaggctctccaggaggcccaccagcagaccctggatgacctgcaggcag

SEQ ID NO: 170591 - DNA, 120 bp, Artificial Sequence
  ENSG00000109061_26 (sequence is synthesized)
aggaggacaaagtcaacaccctgaccaaagctaaaatcaaacttgaacaacaagtggatgatcttgaaggatctttggaacaagaaaagaaaatccggatggatctagaaagagcaaaga

SEQ ID NO: 170592 - DNA, 120 bp, Artificial Sequence
  ENSG00000109061_27 (sequence is synthesized)
gaaaactagagggagacctaaaattggctcaagaatccacaatggatatagaaaatgacaaacaacaacttgatgaaaagcttaaaaagaaagagtttgaaatgagcggtctgcaaagca

SEQ ID NO: 170593 - DNA, 120 bp, Artificial Sequence
  ENSG00000109061_28 (sequence is synthesized)
agattgaagatgaacaagcccttggtatgcagctgcagaagaaaatcaaggagttacaagcccgcattgaggagctggaggaggaaatcgaggcagagcgggcctcccgggccaaagcag

SEQ ID NO: 170594 - DNA, 120 bp, Artificial Sequence
  ENSG00000109061_29 (sequence is synthesized)
agaagcagcgctctgatctctcccgggagctggaggagatcagcgagaggctggaagaagccggtggggccacctcagcccagattgagatgaacaagaagcgggaggctgagttccaga

SEQ ID NO: 170595 - DNA, 120 bp, Artificial Sequence
  ENSG00000109061_30 (sequence is synthesized)
aaatgcgcagggacctggaggaggccaccctacagcatgaagccacggcggccaccctgaggaagaagcatgcagatagtgtggccgagcttggggagcagattgacaacctgcagcgag

SEQ ID NO: 170596 - DNA, 120 bp, Artificial Sequence
  ENSG00000109061_31 (sequence is synthesized)
tgaagcagaagctggagaaggagaagagtgagatgaagatggagatcgatgaccttgctagtaacatggagactgtctccaaagccaagggaaaccttgaaaagatgtgccgcgctctag

SEQ ID NO: 170597 - DNA, 120 bp, Artificial Sequence
  ENSG00000109061_32 (sequence is synthesized)
aagatcaactgagtgaaattaagaccaaggaagaggagcagcagcggctgatcaatgacctcacagcacagagagcgcgcctgcaaacagaatcaggtgaatattcacgccagctagatg

SEQ ID NO: 170598 - DNA, 120 bp, Artificial Sequence
  ENSG00000109061_33 (sequence is synthesized)
aaaaggacacactagtttcacagctctcgaggggcaaacaagcctttacacaacagattgaggaactgaaaaggcaacttgaagaggagataaaggccaagagtgccctggcacatgccc

SEQ ID NO: 170599 - DNA, 120 bp, Artificial Sequence
  ENSG00000109061_34 (sequence is synthesized)
tgcagtcctcccgccatgactgtgacctgctgcgggaacagtatgaggaggagcaggaagccaaggccgagctacagagagcaatgtccaaggccaacagtgaggttgcccagtggagga

SEQ ID NO: 170600 - DNA, 120 bp, Artificial Sequence
  ENSG00000109061_35 (sequence is synthesized)
ccaaatatgagacagatgccatccagcgcacagaggagctggaggaggccaagaagaagctggctcagcgtctgcaggatgctgaggaacatgtagaagctgtgaatgccaaatgtgctt

SEQ ID NO: 170601 - DNA, 120 bp, Artificial Sequence
  ENSG00000109061_36 (sequence is synthesized)
cccttgagaagacgaagcagaggctccagaatgaagttgaggacctcatgattgatgttgagaggacaaatgctgcctgtgccgccctggacaaaaagcaaaggaactttgataagatcc

SEQ ID NO: 170602 - DNA, 120 bp, Artificial Sequence
  ENSG00000109061_37 (sequence is synthesized)
tggcagaatggaaacagaagtgtgaagaaactcatgctgaacttgaagcttctcaaaaggaatcccgctcactcagcacagaactatttaagattaagaatgcttatgaggaatctttag

SEQ ID NO: 170603 - DNA, 120 bp, Artificial Sequence
  ENSG00000109061_38 (sequence is synthesized)
accaacttgaaaccttgaaacgggaaaataagaatttgcaacaggagatttctgatctcactgaacagattgcagaaggaggaaagcgcatccatgaactggaaaaaataaagaagcaag

SEQ ID NO: 170604 - DNA, 120 bp, Artificial Sequence
  ENSG00000109061_39 (sequence is synthesized)
ttgagcaagaaaagtctgaacttcaggctgccttagaggaggcagaggcatctcttgaacatgaagagggaaagatcctgcgcatccagcttgagttgaaccaagtcaagtctgaggttg

SEQ ID NO: 170605 - DNA, 120 bp, Artificial Sequence
  ENSG00000109061_40 (sequence is synthesized)
ataggaaaattgctgaaaaagatgaggaaattgaccagatgaagagaaaccacattagaatcgtggagtccatgcagagcacactggatgctgagatcaggagcaggaatgatgccatta

SEQ ID NO: 170606 - DNA, 120 bp, Artificial Sequence
  ENSG00000109061_41 (sequence is synthesized)
ggctcaagaagaagatggagggagacctcaatgaaatggaaatccagctgaaccatgccaaccgcatggctgctgaggccctgaggaactataggaacacccaagccatcctcaaggata

SEQ ID NO: 170607 - DNA, 120 bp, Artificial Sequence
  ENSG00000109061_42 (sequence is synthesized)
cccagctccacctggatgatgctctccggagccaggaggacctgaaggaacagctggctatggtggagcgcagagccaacctgctgcaggctgagatcgaggagctgcgggccactctgg

SEQ ID NO: 170608 - DNA, 120 bp, Artificial Sequence
  ENSG00000109061_43 (sequence is synthesized)
aacagacagagaggagcaggaaaatcgcagaacaggagctcctggatgccagtgagcgtgttcagctcctgcacacccagaacaccagcctgatcaacaccaagaagaagctggagacag

SEQ ID NO: 170609 - DNA, 120 bp, Artificial Sequence
  ENSG00000109061_44 (sequence is synthesized)
acatttcccaaatccagggagagatggaagacatcatccaggaagcccgcaatgcagaagagaaggccaagaaggccatcactgatgctgccatgatggctgaggagctgaagaaggaac

SEQ ID NO: 170610 - DNA, 120 bp, Artificial Sequence
  ENSG00000109061_45 (sequence is synthesized)
aggacaccagcgcccatctggagcggatgaagaagaacctggaacagacggtgaaggacctgcagcatcgtctggatgaggctgagcagctggccctgaagggtgggaagaagcagatcc

SEQ ID NO: 170611 - DNA, 120 bp, Artificial Sequence
  ENSG00000109061_46 (sequence is synthesized)
agaaactggaggccagggttcgtgaacttgaaggtgaagttgaaagtgaacagaagcgcaatgttgaagctgtcaagggtctacgcaaacatgagagaaaagtgaaggaactcacttacc

SEQ ID NO: 170612 - DNA, 120 bp, Artificial Sequence
  ENSG00000109061_47 (sequence is synthesized)
aaactgaggaagaccgcaagaatattctcaggctccaggacctggtggacaaactgcaagcaaaggtgaaatcctacaagagacaagctgaagaagcggaggaacaatccaacgtcaacc

SEQ ID NO: 170613 - DNA, 120 bp, Artificial Sequence
  ENSG00000109061_48 (sequence is synthesized)
tctccaaattccgcaggatccagcacgagctggaggaggccgaggaacgggctgacattgctgagtcccaggtcaacaagctgagggtgaagagcagggaggttcacacaaaaatcataa

SEQ ID NO: 170614 - DNA, 120 bp, Artificial Sequence
  ENSG00000109061_49 (sequence is synthesized)
gtgaagagtaatttatctaactgctgaaaggtgaccaaagaaatgcacaaaatgtgaaaatctttgtcactccattttgtacttatgacttttggagataaaaaatttatctgccaaaaa

SEQ ID NO: 170615 - DNA, 120 bp, Artificial Sequence
  ENSG00000109062_0 (sequence is synthesized)
agacgccgcgcggggcggggattggtctgtggtcctctctcggctcctcgcggctcgcggcggccgacggttcctgggacacctgcttgcttggcccgtccggcggctcagggcttctct

SEQ ID NO: 170616 - DNA, 120 bp, Artificial Sequence
  ENSG00000109062_1 (sequence is synthesized)
gctgcgctcccggttcgctggacgggaagaagggctgggccgtcccgtcccgtccccatcggaaccccaagtcgcgccgctgacccgtcgcagggcgagatgagcgcggacgcagcggcc

SEQ ID NO: 170617 - DNA, 120 bp, Artificial Sequence
  ENSG00000109062_2 (sequence is synthesized)
ggggcgcccctgccccggctctgctgcctggagaagggtccgaacggctacggcttccacctgcacggggagaagggcaagttgggccagtacatccggctggtggagcccggctcgccg

SEQ ID NO: 170618 - DNA, 120 bp, Artificial Sequence
  ENSG00000109062_3 (sequence is synthesized)
gccgagaaggcggggctgctggcgggggaccggctggtggaggtgaacggcgaaaacgtggagaaggagacccaccagcaggtggtgagccgcatccgcgccgcactcaacgccgtgcgc

SEQ ID NO: 170619 - DNA, 120 bp, Artificial Sequence
  ENSG00000109062_4 (sequence is synthesized)
ctgctggtggtcgaccccgagacggacgagcagctgcagaagctcggcgtccaggtccgagaggagctgctgcgcgcccaggaagcgccggggcaggccgagccgccggccgccgccgag

SEQ ID NO: 170620 - DNA, 120 bp, Artificial Sequence
  ENSG00000109062_5 (sequence is synthesized)
gtgcagggggctggcaacgaaaatgagcctcgcgaggccgacaagagccacccggagcagcgcgagcttcggcctcggctctgtaccatgaagaagggccccagtggctatggcttcaac

SEQ ID NO: 170621 - DNA, 120 bp, Artificial Sequence
  ENSG00000109062_6 (sequence is synthesized)
ctgcacagcgacaagtccaagccaggccagttcatccggtcagtggacccagactccccggctgaggcttcagggctccgggcccaggatcgcattgtggaggtgaacggggtctgcatg

SEQ ID NO: 170622 - DNA, 120 bp, Artificial Sequence
  ENSG00000109062_7 (sequence is synthesized)
gaggggaagcagcatggggacgtggtgtccgccatcagggctggcggggacgagaccaagctgctggtggtggacagggaaactgacgagttcttcaagaaatgcagagtgatcccatct

SEQ ID NO: 170623 - DNA, 120 bp, Artificial Sequence
  ENSG00000109062_8 (sequence is synthesized)
ccctggcagaggcagccttggagagccccaggccagccctggtgagatccgcctccagtgacaccagcgaggagctgaattcccaagacagccccccaaaacaggactccacagcgccct

SEQ ID NO: 170624 - DNA, 120 bp, Artificial Sequence
  ENSG00000109062_9 (sequence is synthesized)
cgtctacctcctcctccgaccccatcctagacttcaacatctccctggccatggccaaagagagggcccaccagaaacgcagcagcaaacgggccccgcagatggactggagcaagaaaa

SEQ ID NO: 170625 - DNA, 120 bp, Artificial Sequence
  ENSG00000109062_10 (sequence is synthesized)
acgaactcttcagcaacctctgagcgccctgctgccacccagtgactggcagggccgagccagcattccaccccacctttttccttctccccaattactcccctgaatcaatgtacaaat

SEQ ID NO: 170626 - DNA, 120 bp, Artificial Sequence
  ENSG00000109062_11 (sequence is synthesized)
cagcacccacatcccctttcttgacaaatgatttttctagagaactatgttcttccctgactttagggaaggtgaatgtgttcccgtcctcccgcagtcagaaaggagactctgcctccc

SEQ ID NO: 170627 - DNA, 120 bp, Artificial Sequence
  ENSG00000109062_12 (sequence is synthesized)
tcctcctcactgagtgcctcatcctaccgggtgtccctttgccaccctgcctgggacatcgctggaacctgcaccatgccaggatcatgggaccaggcgagagggcaccctcccttcctc

SEQ ID NO: 170628 - DNA, 120 bp, Artificial Sequence
  ENSG00000109062_13 (sequence is synthesized)
ccccatgtgataaatgggtccagggctgatcaaagaactctgactgcagaactgccgctctcagtggacagggcatctgttaccctgagacctgtggcagacacgtcttgttttcatttg

SEQ ID NO: 170629 - DNA, 120 bp, Artificial Sequence
  ENSG00000109062_14 (sequence is synthesized)
atttttgttaagagtgcagtattgcagagtctagaggaatttttgtttccttgattaacatgattttcctggttgttacatccagggcatggcagtggcctcagccttaaacttttgttc

SEQ ID NO: 170630 - DNA, 120 bp, Artificial Sequence
  ENSG00000109062_15 (sequence is synthesized)
ctactcccaccctcagcgaactgggcagcacggggagggtttggctacccctgcccatccctgagccaggtaccaccattgtaaggaaacactttcagaaattcagctggttcctccaaa

SEQ ID NO: 170631 - DNA, 120 bp, Artificial Sequence
  ENSG00000109062_16 (sequence is synthesized)
agaaggaagtcggacagcaagtccttacccaggctgggccccaccccggcctcccagctcgctcccatcccatctctcccagctgtgtttgtttagtctcgtctggatattttcgttggc

SEQ ID NO: 170632 - DNA, 120 bp, Artificial Sequence
  ENSG00000109062_17 (sequence is synthesized)
ccttcccatgtatcctgcctccccagctgactgtcaatgggaggacccccagcctagttcaggactctgcagaaatggcgggggtcagtatccccaggttgtgaactgcaaactggctga

SEQ ID NO: 170633 - DNA, 120 bp, Artificial Sequence
  ENSG00000109063_0 (sequence is synthesized)
gtggctcgcttgtgggcggaggtctgggatctcctggctgttgctgtcttctgctctcatcctgcaggtgggactctcagctgacaccatgagtagtgacactgaaatggaagtgttcgg

SEQ ID NO: 170634 - DNA, 120 bp, Artificial Sequence
  ENSG00000109063_1 (sequence is synthesized)
catagctgctcctttcctccggaagtcagaaaaggagaggatcgaggctcagaaccagccctttgatgccaagacgtattgcttcgtggtggactcaaaggaagaatatgccaaggggaa

SEQ ID NO: 170635 - DNA, 120 bp, Artificial Sequence
  ENSG00000109063_2 (sequence is synthesized)
aatcaagagttctcaggatgggaaggtcactgtggaaactgaggacaacaggaccctggtggtcaaaccagaggatgtgtacgccatgaacccccccaagttcgacaggatcgaagacat

SEQ ID NO: 170636 - DNA, 120 bp, Artificial Sequence
  ENSG00000109063_3 (sequence is synthesized)
ggccatgctgacgcacctgaatgagccagccgtgctgtacaacctgaaggaccgttacacatcttggatgatctatacctactcaggcctcttctgtgtcactgtcaacccctacaagtg

SEQ ID NO: 170637 - DNA, 120 bp, Artificial Sequence
  ENSG00000109063_4 (sequence is synthesized)
gctgccggtgtacaaccccgaggtggtggaaggctaccgaggcaaaaagcgccaggaggccccaccccacatcttctccatctctgacaacgcctatcagttcatgctgactgatcgtga

SEQ ID NO: 170638 - DNA, 120 bp, Artificial Sequence
  ENSG00000109063_5 (sequence is synthesized)
aaaccagtccattctgatcaccggagaatccggggcaggaaagactgtgaacaccaaacgggtcatccagtactttgcaacaattgcagctactggggacctggccaagaagaaggactc

SEQ ID NO: 170639 - DNA, 120 bp, Artificial Sequence
  ENSG00000109063_6 (sequence is synthesized)
caaaatgaaggggactctggaagatcaaatcatcagtgccaatcccctgctggaggcctttgggaacgccaagactgtgaggaatgacaactcctcccgttttggcaagttcatccgaat

SEQ ID NO: 170640 - DNA, 120 bp, Artificial Sequence
  ENSG00000109063_7 (sequence is synthesized)
ccattttggaaccactgggaagctggcctctgcagatattgaaacttatcttctggaaaaatcaagagtcactttccagctgaaggctgaaagaagctaccacatcttctaccagattct

SEQ ID NO: 170641 - DNA, 120 bp, Artificial Sequence
  ENSG00000109063_8 (sequence is synthesized)
ttctaacaagaagcctgagctcatagagctgctgcttattacgaccaacccttacgactacccgttcattagccagggggagatcctggtggccagcatagatgatgcagaggagctgct

SEQ ID NO: 170642 - DNA, 120 bp, Artificial Sequence
  ENSG00000109063_9 (sequence is synthesized)
ggctacagacagcgccattgacatcctgggcttcaccccagaagagaaatctgggctctacaagctgacgggagccgtgatgcactacgggaacatgaagttcaagcagaagcagcgaga

SEQ ID NO: 170643 - DNA, 120 bp, Artificial Sequence
  ENSG00000109063_10 (sequence is synthesized)
ggagcaggccgagccggatggcacagaagtggctgacaaaacagcctatctgatgggcctgaactcttcggacctcctaaaagctttgtgctttcctagagtgaaagttgggaatgagta

SEQ ID NO: 170644 - DNA, 120 bp, Artificial Sequence
  ENSG00000109063_11 (sequence is synthesized)
cgttaccaaaggtcaaactgtggatcaggttcaccatgctgtgaatgctctttcaaaatcagtttatgaaaagttgttcttgtggatggtcactcgcattaaccagcaactggatacgaa

SEQ ID NO: 170645 - DNA, 120 bp, Artificial Sequence
  ENSG00000109063_12 (sequence is synthesized)
gcttccaagacaacacttcattggtgttttggacattgcaggctttgaaatctttgagtataacagcctggagcagctgtgcatcaacttcaccaatgagaaactgcaacagtttttcaa

SEQ ID NO: 170646 - DNA, 120 bp, Artificial Sequence
  ENSG00000109063_13 (sequence is synthesized)
ccaccacatgttcgtgctggagcaggaggagtacaagaaggaaggcatcgagtggacgttcattgacttcgggatggacctggctgcctgcatcgagctcatcgagaagcctatgggcat

SEQ ID NO: 170647 - DNA, 120 bp, Artificial Sequence
  ENSG00000109063_14 (sequence is synthesized)
cttctccatcctggaagaggagtgcatgttccccaaggcaacagacacctccttcaagaacaagctgtatgaccagcatcttggaaagtccaacaacttccagaagcccaaggtggtcaa

SEQ ID NO: 170648 - DNA, 120 bp, Artificial Sequence
  ENSG00000109063_15 (sequence is synthesized)
aggcagggccgaggctcacttctcactgatccactatgcgggcaccgtggactacagtgtctcaggttggctggagaagaacaaggaccctctgaacgagactgtggttgggctgtacca

SEQ ID NO: 170649 - DNA, 120 bp, Artificial Sequence
  ENSG00000109063_16 (sequence is synthesized)
gaagtcttccaacaggctcctggcacacctctatgccacgtttgccacggcggatgctgacagtggaaagaagaaagttgccaagaagaagggttcttccttccaaactgtctctgccct

SEQ ID NO: 170650 - DNA, 120 bp, Artificial Sequence
  ENSG00000109063_17 (sequence is synthesized)
tttcagggaaaacctgaacaagctgatgtcaaatttaagaactactcaccctcattttgtgcgttgtataattcccaatgaaaccaaaactccaggggctatggaacacagccttgttct

SEQ ID NO: 170651 - DNA, 120 bp, Artificial Sequence
  ENSG00000109063_18 (sequence is synthesized)
gcaccagctgcggtgtaacggtgtcctggagggcatccgcatctgcaggaaagggttcccaaacaggattctctatggcgattttaaacaaagataccgagtgctgaatgccagtgcaat

SEQ ID NO: 170652 - DNA, 120 bp, Artificial Sequence
  ENSG00000109063_19 (sequence is synthesized)
ccctgagggacaattcattgacagcaagaaagcctgtgaaaagcttctggcatccattgatattgaccacactcagtacaaatttggacataccaaggtgttcttcaaggctggcttgct

SEQ ID NO: 170653 - DNA, 120 bp, Artificial Sequence
  ENSG00000109063_20 (sequence is synthesized)
gggaaccctggaagagatgcgggatgaccgcctggccaaactaatcacccggacacaagctgtgtgcagagggttcctcatgcgtgtggaattccagaagatggtgcagaggagggagtc

SEQ ID NO: 170654 - DNA, 120 bp, Artificial Sequence
  ENSG00000109063_21 (sequence is synthesized)
catcttctgcatccagtacaacattcgctcattcatgaacgtcaagcactggccctggatgaaactcttcttcaagatcaagcccctcctcaagagtgcagagactgagaaagagatggc

SEQ ID NO: 170655 - DNA, 120 bp, Artificial Sequence
  ENSG00000109063_22 (sequence is synthesized)
caccatgaaggaagaattccagaaaaccaaagatgaactcgccaagtcggaggcaaaaaggaaggagctagaggaaaaactggtgactctggtccaagagaagaatgacctgcagctcca

SEQ ID NO: 170656 - DNA, 120 bp, Artificial Sequence
  ENSG00000109063_23 (sequence is synthesized)
agtacaagctgaaagcgaaaatttgttggatgctgaggaaagatgcgatcagctgatcaaagccaaattccagctcgaggccaagatcaaggaggtgacagagagagctgaagatgagga

SEQ ID NO: 170657 - DNA, 120 bp, Artificial Sequence
  ENSG00000109063_24 (sequence is synthesized)
ggagatcaatgctgagctgacggccaagaagaggaaactggaggatgaatgctcagagctcaagaaagacattgatgaccttgagttgaccctggccaaggttgagaaggagaagcatgc

SEQ ID NO: 170658 - DNA, 120 bp, Artificial Sequence
  ENSG00000109063_25 (sequence is synthesized)
aactctctgggttagatgaaacaattgcaaagttaaccagagagaagaaggccctccaagaggcgcaccagcaggccttggatgacctccaagctgaagaagacaaagtcaattctttga

SEQ ID NO: 170659 - DNA, 120 bp, Artificial Sequence
  ENSG00000109063_26 (sequence is synthesized)
acaaaaccaagagcaaactggaacagcaagtggaagacctggaaagctccctagaacaagaaaagaagctccgagtagacctggaaaggaacaaaaggaaattggaaggagacttgaagc

SEQ ID NO: 170660 - DNA, 120 bp, Artificial Sequence
  ENSG00000109063_27 (sequence is synthesized)
ttgctcaagagtccatattagatctggagaatgacaagcaacagctggacgaaaggctcaagaagaaagattttgaatattgtcaacttcaaagcaaagtggaagatgagcagacactgg

SEQ ID NO: 170661 - DNA, 120 bp, Artificial Sequence
  ENSG00000109063_28 (sequence is synthesized)
gcctccagtttcagaagaaaatcaaagagttgcaggctcgaattgaggagctggaagaggagatagaggcggagagggccacccgcgcgaagacagagaaacagcgcagcgactatgccc

SEQ ID NO: 170662 - DNA, 120 bp, Artificial Sequence
  ENSG00000109063_29 (sequence is synthesized)
gggagctggaggagctgagcgagcggctggaggaggcgggaggcgtcacctccacgcagatagagctcaacaagaagcgggaggcggagttcctgaagctgcgcagggacctggaggagg

SEQ ID NO: 170663 - DNA, 120 bp, Artificial Sequence
  ENSG00000109063_30 (sequence is synthesized)
ccacactgcagcacgaagccatggtggccgcgctgaggaagaagcatgcggatagtgtggccgagcttggggagcagattgacaacctgcagcgggtcaagcagaagctggagaaggaga

SEQ ID NO: 170664 - DNA, 120 bp, Artificial Sequence
  ENSG00000109063_31 (sequence is synthesized)
agagcgagttcaagctggagatcgatgacctctccagcagcatggagagtgtgtcgaaatctaaggcaaatctggaaaaaatctgccgaaccctggaggatcagttaagtgaggccaggg

SEQ ID NO: 170665 - DNA, 120 bp, Artificial Sequence
  ENSG00000109063_32 (sequence is synthesized)
gcaagaatgaggaaattcagaggagcctgagcgagctgaccacacagaagtctcgtttgcagaccgaggctggtgagctgagtcgtcagctggaagaaaaagaaagcatagtatcccaac

SEQ ID NO: 170666 - DNA, 120 bp, Artificial Sequence
  ENSG00000109063_33 (sequence is synthesized)
tttccaggagcaagcaagcctttacccagcaaacagaagagctcaagaggcagctggaggaagagaacaaggccaagaacgccctggcgcacgccctgcagtcctcccgccacgactgtg

SEQ ID NO: 170667 - DNA, 120 bp, Artificial Sequence
  ENSG00000109063_34 (sequence is synthesized)
acctgctgcgggaacagtatgaggaggagcaggaaggcaaagctgagctgcagagggcgctgtccaaggccaatagtgaggttgcccagtggagaaccaaatacgagacggacgccatcc

SEQ ID NO: 170668 - DNA, 120 bp, Artificial Sequence
  ENSG00000109063_35 (sequence is synthesized)
agcgcacagaagagctggaggaggccaagaaaaaacttgctcagcgccttcaagattccgaggaacaggttgaggcagtgaatgctaaatgtgcttcactggagaagaccaagcagaggc

SEQ ID NO: 170669 - DNA, 120 bp, Artificial Sequence
  ENSG00000109063_36 (sequence is synthesized)
tgcaaggagaggtggaggatctgatggttgatgttgaaagagccaattccttggccgccgctctggacaagaagcagaggaactttgacaaggtgttggcagagtggaagacaaagtgtg

SEQ ID NO: 170670 - DNA, 120 bp, Artificial Sequence
  ENSG00000109063_37 (sequence is synthesized)
aggagagccaagcagagctggaggcatccctgaaggagtcccgctccttgagcactgagctcttcaaactgaaaaatgcctacgaggaagccttagatcaacttgaaactgtgaaacggg

SEQ ID NO: 170671 - DNA, 120 bp, Artificial Sequence
  ENSG00000109063_38 (sequence is synthesized)
aaaataagaacttagagcaggagatagcagatctcacagaacaaattgctgaaaatggcaaaaccatccatgaactggagaaatcaagaaagcagattgagctggaaaaggctgatatcc

SEQ ID NO: 170672 - DNA, 120 bp, Artificial Sequence
  ENSG00000109063_39 (sequence is synthesized)
agctggctctcgaggaagcagaggctgctcttgagcatgaagaagccaagatcctccgaatccagcttgaattgacacaagtgaaatcagaaattgatagaaagatcgccgagaaggatg

SEQ ID NO: 170673 - DNA, 120 bp, Artificial Sequence
  ENSG00000109063_40 (sequence is synthesized)
aagagatcgagcagctgaagaggaactaccagagaacagtggaaaccatgcagagcgccctggacgccgaggtgcggagcaggaatgaagccatccggctcaagaagaagatggaggggg

SEQ ID NO: 170674 - DNA, 120 bp, Artificial Sequence
  ENSG00000109063_41 (sequence is synthesized)
acctgaatgaaatcgagatccagctgagccacgccaaccgccaggcggcggagaccctcaaacacctcaggagtgtccagggacagctgaaggatacgcagctccacctggatgatgccc

SEQ ID NO: 170675 - DNA, 120 bp, Artificial Sequence
  ENSG00000109063_42 (sequence is synthesized)
tccggggccaggaggacctgaaggagcagctggcgattgtggagcgcagagccaacctgctgcaggccgaggtggaggagctgcgggctactctggagcagacggagagggcccggaaac

SEQ ID NO: 170676 - DNA, 120 bp, Artificial Sequence
  ENSG00000109063_43 (sequence is synthesized)
tggcggaacaggagctcctggactccaacgagagggtgcagctgctgcatacccagaacaccagcctcatccacaccaagaagaagctggagacagacctcatgcagctccagagtgagg

SEQ ID NO: 170677 - DNA, 120 bp, Artificial Sequence
  ENSG00000109063_44 (sequence is synthesized)
tagaagatgccagcagggatgcaaggaacgctgaggagaaggccaagaaggccatcacggacgctgccatgatggcggaggagctgaagaaggagcaggacaccagcgcccaccttgagc

SEQ ID NO: 170678 - DNA, 120 bp, Artificial Sequence
  ENSG00000109063_45 (sequence is synthesized)
ggatgaagaagaacctggaacagacggtgaaggacctgcagcatcgtctagatgaggccgagcagctggcgctgaagggcgggaagaagcagatccagaaactggagaccaggatccgag

SEQ ID NO: 170679 - DNA, 120 bp, Artificial Sequence
  ENSG00000109063_46 (sequence is synthesized)
agctggagtttgaacttgagggagagcagaagaagaacacagagtctgttaagggcctgaggaagtatgagcggagggtcaaggagctgacgtaccagagtgaagaggacaggaagaatg

SEQ ID NO: 170680 - DNA, 120 bp, Artificial Sequence
  ENSG00000109063_47 (sequence is synthesized)
tgctgagattgcaggatctggtggataaactgcaagtgaaagtcaagtcctacaagaggcaggcggaggaggctgatgaacaagccaatgctcatctcaccaaattccgaaaggctcagc

SEQ ID NO: 170681 - DNA, 120 bp, Artificial Sequence
  ENSG00000109063_48 (sequence is synthesized)
atgagctggaggaggccgaggaacgtgcggatatcgcagaatctcaagtcaacaagctccgcgctaagactcgagacttcacctccagcaggatggtggtccacgagagtgaagagtgag

SEQ ID NO: 170682 - DNA, 120 bp, Artificial Sequence
  ENSG00000109063_49 (sequence is synthesized)
ccagcccttctggagcaggacagaagatatgcaaaatgtatattttcttgattcctgaccattgatacttaatgtccatgtgactctttttcacatgcaataaactttgctttgtttcaa

SEQ ID NO: 170683 - DNA, 120 bp, Artificial Sequence
  ENSG00000109063_50 (sequence is synthesized)
cctggggcattagatatgcgggcaggggagggaggcagaggtatgtgtgtgggccgtgggattctggaagatgagtgcttgcctagctgatgaacaaaacacaaagacggaggagaaaga

SEQ ID NO: 170684 - DNA, 120 bp, Artificial Sequence
  ENSG00000109063_51 (sequence is synthesized)
gaagaggacaggaagaatgtgctgagattgcaggatctggtggataaactgcaagtgaaagtcaagtcctacaagaggcaggcggaggaggctgtaagtgagataggtgctgactgcggc

SEQ ID NO: 170685 - DNA, 120 bp, Artificial Sequence
  ENSG00000109063_52 (sequence is synthesized)
aggcagaccgtgctgtttcccgtggtgagttctgagagaggcgcgtgctgatataacctgcctgggctctttggttttaggatgaacaagccaatgctcatctcaccaaattccgaaagg

SEQ ID NO: 170686 - DNA, 120 bp, Artificial Sequence
  ENSG00000109065_0 (sequence is synthesized)
agccggccgggcctgggaacgtggctggttggaggaggtagatcaccctttctgcgggggacgatttcgtcggtggtaggctgctaccatgaggttgaatcagaacaccttgctgctggg

SEQ ID NO: 170687 - DNA, 120 bp, Artificial Sequence
  ENSG00000109065_1 (sequence is synthesized)
gaagaaggtggtccttgtaccctacacctcggagcatgtgcccagcaggtaccacgagtggatgaaatcagaggagctgcagcgtttgacagcctcggagccgctgaccctggagcagga

SEQ ID NO: 170688 - DNA, 120 bp, Artificial Sequence
  ENSG00000109065_2 (sequence is synthesized)
gtatgccatgcagtgcagctggcaggaagatgcagacaagtgtaccttcattgtgctggatgccgagaagtggcaggcccagccaggcgccaccgaagagagctgcatggtgggagatgt

SEQ ID NO: 170689 - DNA, 120 bp, Artificial Sequence
  ENSG00000109065_3 (sequence is synthesized)
gaacctcttcctcacagatctagaagacctcaccttgggggagatcgaggtcatgattgcagagcccagctgcaggggtaagggccttggcactgaggccgttctcgcgatgctgtctta

SEQ ID NO: 170690 - DNA, 120 bp, Artificial Sequence
  ENSG00000109065_4 (sequence is synthesized)
cggagtgaccacgctaggtctgaccaagtttgaggctaaaattgggcaaggaaatgaaccaagcatccggatgttccagaaacttcactttgagcaggtggctacgagcagtgtttttca

SEQ ID NO: 170691 - DNA, 120 bp, Artificial Sequence
  ENSG00000109065_5 (sequence is synthesized)
ggaggtgaccctcagactgacagtgagtgagtccgagcatcagtggcttctggagcagaccagccacgtggaagagaagccttacagagatgggtcggcagagccctgctgatggctggg

SEQ ID NO: 170692 - DNA, 120 bp, Artificial Sequence
  ENSG00000109065_6 (sequence is synthesized)
ccttgtgggcagccactctgtgtgagcagggtgttgggcccatacacttcaaagaccagagccctgcactgggagagtgctcctggcccaggctgggaatcacctttcgaggcccttcag

SEQ ID NO: 170693 - DNA, 120 bp, Artificial Sequence
  ENSG00000109065_7 (sequence is synthesized)
actctaggaagctggaatggagggcagggatccatgggagatgtcgggatgaaggtgggagctggaggtgcagggggacctggaacatggatgggagtggacaggcctttctccttagag

SEQ ID NO: 170694 - DNA, 120 bp, Artificial Sequence
  ENSG00000109065_8 (sequence is synthesized)
gccagaggtgctgccctggctgggagtgaagctccaggcactaccagctttcctgattttcccgtttggtccatgtgaagagctaccacgagccccagcctcacagtgtccactcaaggg

SEQ ID NO: 170695 - DNA, 120 bp, Artificial Sequence
  ENSG00000109065_9 (sequence is synthesized)
cagcttggtcctcttgtcctgcagaggcaggctggtgtgaccctgggaacttgacccgggaacaacaggtggtccagagtgagtgtggcctggcccctcaacctagtgtccgtcctcctc

SEQ ID NO: 170696 - DNA, 120 bp, Artificial Sequence
  ENSG00000109065_10 (sequence is synthesized)
tctcctggagccagtcttgagtttaaaggcattagtgttagatacagctccttgtggctggaaaacacccctctgctgataaagctcagggggcactgaggaagcagaggccccttgggg

SEQ ID NO: 170697 - DNA, 120 bp, Artificial Sequence
  ENSG00000109065_11 (sequence is synthesized)
gtgccctcctgaagagagcgtcaggccatcagctctgtccctctggtgctcccacgtctgttcctcaccctccatctctgggagcagctgcacctgactggccacgcgggggcagtggag

SEQ ID NO: 170698 - DNA, 120 bp, Artificial Sequence
  ENSG00000109065_12 (sequence is synthesized)
gcacaggctcagggtggccgggctacctggcaccctatggcttacaaagtagagttggcccagtttccttccacctgaggggagcactctgactcctaacagtcttccttgccctgccat

SEQ ID NO: 170699 - DNA, 120 bp, Artificial Sequence
  ENSG00000109065_13 (sequence is synthesized)
catctggggtggctggctgtcaagaaaggccgggcatgctttctaaacacagccacaggaggcttgtagggcatcttccaggtggggaaacagtcttagataagtaaggtgacttgccta

SEQ ID NO: 170700 - DNA, 120 bp, Artificial Sequence
  ENSG00000109065_14 (sequence is synthesized)
aggcctcccagcacccttgatcttggagtctcacagcagactgcatgtgaacaactggaaccgaaaacatgcctcagtataaaacaaacattataaaacgaacgcgttgcttgccgtggc

SEQ ID NO: 170701 - DNA, 120 bp, Artificial Sequence
  ENSG00000109065_15 (sequence is synthesized)
gcgggaagtgggcaggccccaggtgaactttgttcaggtgtgagggttgggggcaggtgaaggttcctcctctgcagcttgggacaggagggtgggggcaggcgcctccttacttgcccc

SEQ ID NO: 170702 - DNA, 120 bp, Artificial Sequence
  ENSG00000109065_16 (sequence is synthesized)
tacacctcggagcatgtgcccagactgctcctccgcactgacccgagacaggataggaaattggacagatagaactgactcgtcctgctgttcttgtgtaccacgagtggatgaaatcag

SEQ ID NO: 170703 - DNA, 120 bp, Artificial Sequence
  ENSG00000109065_17 (sequence is synthesized)
cgaggtcatgattgcaggtttgtttcacctagccctgccttccgctgactcccggctctcagatctgctgactgagcctgccgaggctgcaaagggtgggcactcacagggttcactggg

SEQ ID NO: 170704 - DNA, 120 bp, Artificial Sequence
  ENSG00000109065_18 (sequence is synthesized)
aggctccatgtggtgagtccagggcctggctgggcagcctgcccacctagccccctcagcctggtggtacaccctcagcctcatcactttagtccttatgcttaggcgtgaacttaaccc

SEQ ID NO: 170705 - DNA, 120 bp, Artificial Sequence
  ENSG00000109065_19 (sequence is synthesized)
atcgaggtcatgattgcagaatggtaatgatagtagcaacttcagagttgttgagaattaaatgagatggtgtctgccaagtgcccgcactggagcctggcacacggcgtcagcgccgct

SEQ ID NO: 170706 - DNA, 120 bp, Artificial Sequence
  ENSG00000109065_20 (sequence is synthesized)
agccggccgggcctgggaacgtggctggttggaggaggtagatcaccctttctgcgggggacgatttcgtcggtggtaggtaccacgagtggatgaaatcagaggagctgcagcgtttga

SEQ ID NO: 170707 - DNA, 120 bp, Artificial Sequence
  ENSG00000109065_21 (sequence is synthesized)
gaagaaggtggtccttgtaccctacacctcggagcatgtgcccagttttccgtttgagggttcctggtgccctaacttcgtgggatctgtccagccgcctttgttgaggtaccacgagtg

SEQ ID NO: 170708 - DNA, 120 bp, Artificial Sequence
  ENSG00000109065_22 (sequence is synthesized)
ggcaggaagatgcagacagtgaggagtgcccccccacttcccctagccctggtactgggagggctgactccacagtcagtctccaggttccttccctttcccagccccggccatagaagc

SEQ ID NO: 170709 - DNA, 120 bp, Artificial Sequence
  ENSG00000109065_23 (sequence is synthesized)
tttgtgaaaagcctggaaggtgctggaactcctgtattctcatggccctgaagccagtccctgtggctgacccttctgtcctcttccccacccactgcatcgggcttggaaggatttgga

SEQ ID NO: 170710 - DNA, 120 bp, Artificial Sequence
  ENSG00000109065_24 (sequence is synthesized)
gggaacgtggctggttggaggaggctgctaccatgaggttgaatcagaacaccttgctgctggggaagaaggtggtccttgtaccctacacctcggagcatgtgcccaggtaccacgagt

SEQ ID NO: 170711 - DNA, 120 bp, Artificial Sequence
  ENSG00000109065_25 (sequence is synthesized)
tttctgctccttcatggtcctcagtttcccccaagtggctactgactatccccatgaggcagcatactgactccatgaggtaaagaggtcagctttgaagtcaggttgctgggttgcaag

SEQ ID NO: 170712 - DNA, 120 bp, Artificial Sequence
  ENSG00000109065_26 (sequence is synthesized)
ctttctgcgggggacgatttcgtcggtggtagaattttggagtctgtattctttgaagtgtctagacggaactaatgacggaagtcaacttagccccagcaggaaagctggagcgcctac

SEQ ID NO: 170713 - DNA, 120 bp, Artificial Sequence
  ENSG00000109065_27 (sequence is synthesized)
gaaagtagagcatttggggctctggctgtaaattgaggccctgcccctcatgtccctcaccacagcctagtgtggtgactgccctcctctgtgttccctgctctctgagaatttggttgc

SEQ ID NO: 170714 - DNA, 120 bp, Artificial Sequence
  ENSG00000109065_28 (sequence is synthesized)
tggttggagaggctttttctgtatgaggcagatttggaattttgtaatgagctgaaggaagctctgggaccccctcttctcctggcagactcagagatgctggtgttctgcagtgctctg

SEQ ID NO: 170715 - DNA, 120 bp, Artificial Sequence
  ENSG00000109065_29 (sequence is synthesized)
gcttgggtaggagtaccatcctctcttctctcctctggggagtgtgtgtgatagccctgtcacctcctcctcagagtgtaccttcattgtgctggatgccgagaagtggcaggcccagcc

SEQ ID NO: 170716 - DNA, 120 bp, Artificial Sequence
  ENSG00000109065_30 (sequence is synthesized)
atgcggaaggggcggtagccggccgggcctgggaacgtggctggttggaggaggtagatcaccctttctgcgggggacgatttcgtcggtggctgctaccatgaggttgaatcagaacac

SEQ ID NO: 170717 - DNA, 120 bp, Artificial Sequence
  ENSG00000109065_31 (sequence is synthesized)
agagccccgtggggtggtcgccggggtaagaggttggaagtaggtttaaggcagggctgaaagttgattctgggttggaatccctggactggggcaagtaatgggagctctggggatact

SEQ ID NO: 170718 - DNA, 120 bp, Artificial Sequence
  ENSG00000109065_32 (sequence is synthesized)
ttggtacttggtacttggtgcttgggtttgaggaatcgaagttctggggagtggacggaaggaaccggcagaaacggagcccaggcttggcctcttggagtgggagtcaaggattgttta

SEQ ID NO: 170719 - DNA, 120 bp, Artificial Sequence
  ENSG00000109065_33 (sequence is synthesized)
atacatccccttctggaatttgaagaatgtttggtttcagactgctcctccgcactgacccgagacaggataggaaattggacagatagaactgactcgtcctgctgttcttgtcaggta

SEQ ID NO: 170720 - DNA, 120 bp, Artificial Sequence
  ENSG00000109065_34 (sequence is synthesized)
ggtgcgtatcagcacccagagctgtgtaaggtacagccccagtctcagggctatttcccctaagaagaaacattggttgtgagaaataattatatatgaggggggaaaaaaggctgggtg

SEQ ID NO: 170721 - DNA, 120 bp, Artificial Sequence
  ENSG00000109065_35 (sequence is synthesized)
ccgtggctcacgcctgtaattccaggactttgggaggctgtggcaggaggattgcttgagcccagcagttcgagaccagcttgggtaacgtagcgagaccttgtctctacaaaaaaatac

SEQ ID NO: 170722 - DNA, 120 bp, Artificial Sequence
  ENSG00000109066_0 (sequence is synthesized)
ggcgcatgcgcgctgcggaagctggtgctggacagctggcgccggcagcagcggaccggcgggagacggcggcttgggagctggctgtgctgcaggagctgcggcagccgccgtccttgc

SEQ ID NO: 170723 - DNA, 120 bp, Artificial Sequence
  ENSG00000109066_1 (sequence is synthesized)
acctaaggaacctctgctgccagcccttcctcacttttggaaatggcgggtgaaattacagagaccggggaactctactcttcctacgttgggctggtgtacatgtttaacctcatcgtg

SEQ ID NO: 170724 - DNA, 120 bp, Artificial Sequence
  ENSG00000109066_2 (sequence is synthesized)
ggcacgggcgcactcaccatgcccaaggcattcgccactgccgggtggcttgtcagcctcgtcctgctggtgttcctgggcttcatgagcttcgtgaccaccacctttgtgatagaggcc

SEQ ID NO: 170725 - DNA, 120 bp, Artificial Sequence
  ENSG00000109066_3 (sequence is synthesized)
atggctgcagccaacgcgcagctccactggaagaggatggagaacctcaaggaggaggaagatgacgactcctccacagcctcagacagcgatgttctcatccgggacaactacgagcgg

SEQ ID NO: 170726 - DNA, 120 bp, Artificial Sequence
  ENSG00000109066_4 (sequence is synthesized)
gcagagaagcggcccatcctgtctgtgcagagacgtggatctcccaacccgtttgaaatcacagaccgggtggaaatgggacaaatggcctccatgttcttcaataaagtgggggtcaac

SEQ ID NO: 170727 - DNA, 120 bp, Artificial Sequence
  ENSG00000109066_5 (sequence is synthesized)
ttgttctatttctgcatcatcgtttacctgtatggagacctcgccatctatgctgctgccgtgcccttctccctcatgcaggtgacctgcagcgccactggcaatgactcctgcggtgtg

SEQ ID NO: 170728 - DNA, 120 bp, Artificial Sequence
  ENSG00000109066_6 (sequence is synthesized)
gaagcagacaccaaatacaatgacactgaccggtgctgggggcccctgcgccgagtggacgcctaccgcatctacttggcgatcttcactctcctcctcggaccgttcaccttctttgac

SEQ ID NO: 170729 - DNA, 120 bp, Artificial Sequence
  ENSG00000109066_7 (sequence is synthesized)
gtccagaagaccaagtacctgcagatcctgacctctctgatgagatggatcgctttcgccgtcatgattgtgctggccctgatccgcatcgggcacggacaaggggaggggcacccgccc

SEQ ID NO: 170730 - DNA, 120 bp, Artificial Sequence
  ENSG00000109066_8 (sequence is synthesized)
ctggctgacttctcgggggtccggaacctgtttggggtgtgcgtctactccttcatgtgccagcactctctgccatccctcattacccccgtctcctccaagcgccacctcacaaggctg

SEQ ID NO: 170731 - DNA, 120 bp, Artificial Sequence
  ENSG00000109066_9 (sequence is synthesized)
gtgttcctggactacgtgctgatcctggccttctacggcctcctctccttcaccgccatcttctgcttccgcggcgacagcctcatggacatgtacaccctcaacttcgcgcgctgtgac

SEQ ID NO: 170732 - DNA, 120 bp, Artificial Sequence
  ENSG00000109066_10 (sequence is synthesized)
gtcgtgggcctggccgctgtgcgctttttcctgggcctcttccccgtcttcaccatcagcaccaacttccccatcattgccgtgaccctgcgcaacaactggaagacactcttccaccgc

SEQ ID NO: 170733 - DNA, 120 bp, Artificial Sequence
  ENSG00000109066_11 (sequence is synthesized)
gagggcggcacgtacccgtgggtggtggaccgcgtcgtgtttcccaccatcaccctggtgccgcctgtgctggtggccttctgcacccacgacctggagtccctggtgggcatcacaggg

SEQ ID NO: 170734 - DNA, 120 bp, Artificial Sequence
  ENSG00000109066_12 (sequence is synthesized)
gcctacgcgggcaccggcatccagtacgtcatccccgccttcctggtgtaccactgccgcagggacacccagctggcctttggctgtggggtcagcaacaagcacaggtcccctttccgc

SEQ ID NO: 170735 - DNA, 120 bp, Artificial Sequence
  ENSG00000109066_13 (sequence is synthesized)
cacaccttctgggtgggcttcgtgctgctctgggctttctcctgcttcattttcgtcacggccaatatcatcctcagcgagaccaagctctgatggcaggacaggcaggtctagtgacag

SEQ ID NO: 170736 - DNA, 120 bp, Artificial Sequence
  ENSG00000109066_14 (sequence is synthesized)
gaggcataggggccccagccccacccctcgcccgcagagcccagatttagttgctcccaggtcttcatggggcaggtgggactgtggctctaggggaaaccccctgtccagctggggttg

SEQ ID NO: 170737 - DNA, 120 bp, Artificial Sequence
  ENSG00000109066_15 (sequence is synthesized)
ttctccccacccaccttccacccagtctgcacctgtcctcactcccccgggcagctctcccaccaggtccttctgcctgggtgacgcgtggctgctcccaagttctaagactcattactg

SEQ ID NO: 170738 - DNA, 120 bp, Artificial Sequence
  ENSG00000109066_16 (sequence is synthesized)
gaatcacacctctcccacatcttccaacacgcttcacccccaaccctacttccagggcgggctactccctgcacaatgggagatgcagtgctggcactgccatcatttgtcccagaccca

SEQ ID NO: 170739 - DNA, 120 bp, Artificial Sequence
  ENSG00000109066_17 (sequence is synthesized)
tgcccctcccctctcctgccccatcctgcgtccttgtctaagaaacctccactagcagctgctgcctcttcagaggcgaatcccaggctggaagtatcctagccaggtctgcctgtgacg

SEQ ID NO: 170740 - DNA, 120 bp, Artificial Sequence
  ENSG00000109066_18 (sequence is synthesized)
gcagggcccaccctcccaccaggcctgggaggcggtaggtgccacctcagagagggcctggctggccccatgacaagaacaagaagtgctaactggtaccagagtccccagatagagctg

SEQ ID NO: 170741 - DNA, 120 bp, Artificial Sequence
  ENSG00000109066_19 (sequence is synthesized)
gacacagccgcctgccagctgggcctaaagtctggagcttgtctctgaaagggaccgtctgctgccctcgctgccccactggagccctcagggcctcctacagtgcaggtggtcctacta

SEQ ID NO: 170742 - DNA, 120 bp, Artificial Sequence
  ENSG00000109066_20 (sequence is synthesized)
gagggaagccatccccacctggcacctcagcggcttggcagtgacatggcagtgggagggctctgaggttcccaccctgacaatggtcaggctgcccgtgctcccactccaacactaaaa

SEQ ID NO: 170743 - DNA, 120 bp, Artificial Sequence
  ENSG00000109066_21 (sequence is synthesized)
gcggctcccttaggggctgagcgtgggtgctcagtgttcacgctatatcccttgggcaatgtggggttggatggggcccccacttccattcccatggaaggaggccaggtccccagccac

SEQ ID NO: 170744 - DNA, 120 bp, Artificial Sequence
  ENSG00000109066_22 (sequence is synthesized)
ctcccactcagccatgcacgcacttgctgggctggcctcctgggaaacacaggtgactcgaatgaactctgcattttcaacgtgccttctactgcttcaggacctgggggtccccctgac

SEQ ID NO: 170745 - DNA, 120 bp, Artificial Sequence
  ENSG00000109066_23 (sequence is synthesized)
cctcactggcttgcccccagccctgggcctggccccacctgtcctggagcccagagcccctggcctggagctacctctctggggtgggtctcaggccccacccctccctcttttgagttc

SEQ ID NO: 170746 - DNA, 120 bp, Artificial Sequence
  ENSG00000109066_24 (sequence is synthesized)
agtgccttgctcagcccctcccctgtatctcagcgtcttcagacctctgacagagcgacgatgtagggtctcccggggcccaaggtggtctcagggtcaggggtgggatttgcagggaac

SEQ ID NO: 170747 - DNA, 120 bp, Artificial Sequence
  ENSG00000109066_25 (sequence is synthesized)
tcggggagcccacgggctgcgccacctctgccctggcagctgaagcctgggagagtccctgcgtggtgtaattggcctcagcccgctttctctgtgccgtcgcacctcagtgtttctcat

SEQ ID NO: 170748 - DNA, 120 bp, Artificial Sequence
  ENSG00000109066_26 (sequence is synthesized)
agcttgtccccacgtgtcactttccatccacgggaaaaacaaatgccccttctccatctatcattgcgacttcctcccaggaggcctctcaggttgggtagagcaggggcctgcagtggt

SEQ ID NO: 170749 - DNA, 120 bp, Artificial Sequence
  ENSG00000109066_27 (sequence is synthesized)
caggccaagagcaaggaagacctggctgccccactgtggctgaaaactcaaaacatctggaactacccttctccaattacgttccctcttgcttaaagacaaagctaattaaatcatcct

SEQ ID NO: 170750 - DNA, 120 bp, Artificial Sequence
  ENSG00000109066_28 (sequence is synthesized)
gccacccgaggctccaaaccaaatcttggacgcaaattcattagcttcataaagcccaggttgatttatgtgacagtctggaaccgcccagccatggagtcggtggccgtgttccctgcc

SEQ ID NO: 170751 - DNA, 120 bp, Artificial Sequence
  ENSG00000109066_29 (sequence is synthesized)
ctggagggaactggccagcagtgaccacatcgctgatgccaagtggggaccctcaccactgccgttgtctagctgctttgctcctcagtgtcctcctgctgtaagtcagatgaggtcacc

SEQ ID NO: 170752 - DNA, 120 bp, Artificial Sequence
  ENSG00000109066_30 (sequence is synthesized)
ttcctctccatcgatgccaggcttctgccgctgacggccaatggggcttggggccaggggcagagaaccccaacagcaagagagccccaggtgatgctggctctccacgtgcatccggca

SEQ ID NO: 170753 - DNA, 120 bp, Artificial Sequence
  ENSG00000109066_31 (sequence is synthesized)
cgtttcactgcagccatcatcaacttggcaaagtaggcaagctcagcttgtggtttccattttgcagatgggcccccggggtcagtgatgggaagagcagaagaggatgccagcccagcc

SEQ ID NO: 170754 - DNA, 120 bp, Artificial Sequence
  ENSG00000109066_32 (sequence is synthesized)
tggcccaggagcaggtgtcgttgtggaggaaagcttaaactcaacagcctctacccaacatctgccacctgcatggccccagatgcccccggtgcaggccaggtcaaggtgggagtaaac

SEQ ID NO: 170755 - DNA, 120 bp, Artificial Sequence
  ENSG00000109066_33 (sequence is synthesized)
tttctttgcctccctccccacagaagcaccagacccacctgagccccagagcctcatgccagcagctcctggctgttcctcacctgaggctagagcagcagctgccagcttatagatggg

SEQ ID NO: 170756 - DNA, 120 bp, Artificial Sequence
  ENSG00000109066_34 (sequence is synthesized)
gcggatggcaggtgatagactgggaagcactgctgggtggtggaggtgggcagtggcaccatgacgggcccctagccacacagctgtcctcactacggggcagggagcagcctcggcaac

SEQ ID NO: 170757 - DNA, 120 bp, Artificial Sequence
  ENSG00000109066_35 (sequence is synthesized)
aggcaaaggccagagtcagagtggtggggaggacaggggctgctgccccgctcctggaaagccactgcagaggggcagtggctggcagtgccaggcctgggggaagtggaagcgtcctgt

SEQ ID NO: 170758 - DNA, 120 bp, Artificial Sequence
  ENSG00000109066_36 (sequence is synthesized)
ctgggggcagattcccaagcaagggtgacccatggttaagggccactggaaagctggagagagcttgggatcccttccacctggggccaatggtgttgattgcagactggaggggtaacc

SEQ ID NO: 170759 - DNA, 120 bp, Artificial Sequence
  ENSG00000109066_37 (sequence is synthesized)
tccgctgagggtcattatgtgccaggcatggcattgggtactttctgcattgggaccaggcagccgggcctgccatttgaggcagcgagcctccgtgacctgtcctccctcatttgtaaa

SEQ ID NO: 170760 - DNA, 120 bp, Artificial Sequence
  ENSG00000109066_38 (sequence is synthesized)
gtggggtaacagctatgtcactggccagttgtggggattaaagtgctgagcttagtgcccagcccaaaatgctcaataaagctattcagtgatacctgtttcccacatcactcaccagcc

SEQ ID NO: 170761 - DNA, 120 bp, Artificial Sequence
  ENSG00000109072_0 (sequence is synthesized)
ctccttccctgtctctgcctctccctcccttcctcaggcatcagagcggagacttcagggagaccagagcccagcttgccaggcactgagctagaagccctgccatggcacccctgagac

SEQ ID NO: 170762 - DNA, 120 bp, Artificial Sequence
  ENSG00000109072_1 (sequence is synthesized)
cccttctcatactggccctgctggcatgggttgctctggctgaccaagagtcatgcaagggccgctgcactgagggcttcaacgtggacaagaagtgccagtgtgacgagctctgctctt

SEQ ID NO: 170763 - DNA, 120 bp, Artificial Sequence
  ENSG00000109072_2 (sequence is synthesized)
actaccagagctgctgcacagactatacggctgagtgcaagccccaagtgactcgcggggatgtgttcactatgccggaggatgagtacacggtctatgacgatggcgaggagaaaaaca

SEQ ID NO: 170764 - DNA, 120 bp, Artificial Sequence
  ENSG00000109072_3 (sequence is synthesized)
atgccactgtccatgaacaggtggggggcccctccctgacctctgacctccaggcccagtccaaagggaatcctgagcagacacctgttctgaaacctgaggaagaggcccctgcgcctg

SEQ ID NO: 170765 - DNA, 120 bp, Artificial Sequence
  ENSG00000109072_4 (sequence is synthesized)
aggtgggcgcctctaagcctgaggggatagactcaaggcctgagacccttcatccagggagacctcagcccccagcagaggaggagctgtgcagtgggaagcccttcgacgccttcaccg

SEQ ID NO: 170766 - DNA, 120 bp, Artificial Sequence
  ENSG00000109072_5 (sequence is synthesized)
acctcaagaacggttccctctttgccttccgagggcagtactgctatgaactggacgaaaaggcagtgaggcctgggtaccccaagctcatccgagatgtctggggcatcgagggcccca

SEQ ID NO: 170767 - DNA, 120 bp, Artificial Sequence
  ENSG00000109072_6 (sequence is synthesized)
ggcgctttgaggatggtgtcctggaccctgattacccccgaaatatctctgacggcttcgatggcatcccggacaacgtggatgcagccttggccctccctgcccatagctacagtggcc

SEQ ID NO: 170768 - DNA, 120 bp, Artificial Sequence
  ENSG00000109072_7 (sequence is synthesized)
gggagcgggtctacttcttcaaggggaaacagtactgggagtaccagttccagcaccagcccagtcaggaggagtgtgaaggcagctccctgtcggctgtgtttgaacactttgccatga

SEQ ID NO: 170769 - DNA, 120 bp, Artificial Sequence
  ENSG00000109072_8 (sequence is synthesized)
tgcagcgggacagctgggaggacatcttcgagcttctcttctggggcagaacctctgctggtaccagacagccccagttcattagccgggactggcacggtgtgccagggcaagtggacg

SEQ ID NO: 170770 - DNA, 120 bp, Artificial Sequence
  ENSG00000109072_9 (sequence is synthesized)
cagccatggctggccgcatctacatctcaggcatggcaccccgcccctccttggccaagaaacaaaggtttaggcatcgcaaccgcaaaggctaccgttcacaacgaggccacagccgtg

SEQ ID NO: 170771 - DNA, 120 bp, Artificial Sequence
  ENSG00000109072_10 (sequence is synthesized)
gccgcaaccagaactcccgccggccatcccgcgccacgtggctgtccttgttctccagtgaggagagcaacttgggagccaacaactatgatgactacaggatggactggcttgtgcctg

SEQ ID NO: 170772 - DNA, 120 bp, Artificial Sequence
  ENSG00000109072_11 (sequence is synthesized)
ccacctgtgaacccatccagagtgtcttcttcttctctggagacaagtactaccgagtcaatcttcgcacacggcgagtggacactgtggaccctccctacccacgctccatcgctcagt

SEQ ID NO: 170773 - DNA, 120 bp, Artificial Sequence
  ENSG00000109072_12 (sequence is synthesized)
actggctgggctgcccagctcctggccatctgtaggagtcagagcccacatggccgggccctctgtagctccctcctcccatctccttcccccagcccaataaaggtcccttagccccga

SEQ ID NO: 170774 - DNA, 120 bp, Artificial Sequence
  ENSG00000109072_13 (sequence is synthesized)
tggatgcagccttggccctccctgcccatagctacagtggccgggagcgggtctacttcttcaagggtactcagggggtggtgggagactgagcaggcagtggagcagtcttggattcct

SEQ ID NO: 170775 - DNA, 120 bp, Artificial Sequence
  ENSG00000109072_14 (sequence is synthesized)
ttcacatttcactggggacaggcctcagcatgtgcccacccctgacccccacctcatgctgggagatcctaacttcaacagcctctgggatctccagtcttgccctggcccagccctcct

SEQ ID NO: 170776 - DNA, 120 bp, Artificial Sequence
  ENSG00000109079_0 (sequence is synthesized)
acagcttgggactgctgaggggcaggcggctgcaggctaggggcggctcggagtccgctggccacccagctgagaggagaggcgcccccggggacgcactgagattatgaggctctggcc

SEQ ID NO: 170777 - DNA, 120 bp, Artificial Sequence
  ENSG00000109079_1 (sequence is synthesized)
tccactggccactcactcgtgaccctttccaccacggcggagccttccaagcctacctcctgccgtgtggtgatctacctgcagcgggagatgtcgggggacacctgcctgtgcccagcc

SEQ ID NO: 170778 - DNA, 120 bp, Artificial Sequence
  ENSG00000109079_2 (sequence is synthesized)
tcaggggccaagcccaagctcagtggcttcaagggaggagggttgggcaacaagtatgtccagctcaacgtgggcggctctctgtactacaccactgtgcgggccctgacccgccacgac

SEQ ID NO: 170779 - DNA, 120 bp, Artificial Sequence
  ENSG00000109079_3 (sequence is synthesized)
accatgctcaaggccatgttcagtgggcgcatggaggtgctgaccgacaaagaaggctggatcctcatagaccgttgtggaaagcactttggcaccattttgaattacctccgagatgac

SEQ ID NO: 170780 - DNA, 120 bp, Artificial Sequence
  ENSG00000109079_4 (sequence is synthesized)
accatcaccctccctcagaaccggcaagaaatcaaggaattgatggctgaagcaaagtattacctcatccaggggctggtgaatatgtgccagagtgccctgcaggacaagaaggactcc

SEQ ID NO: 170781 - DNA, 120 bp, Artificial Sequence
  ENSG00000109079_5 (sequence is synthesized)
taccagcctgtgtgcaacatccccatcatcacatccctaaaggaggaggagcggctcatcgaatcctccaccaagcccgtggtgaagctgctgtacaacagaagcaacaacaagtattcc

SEQ ID NO: 170782 - DNA, 120 bp, Artificial Sequence
  ENSG00000109079_6 (sequence is synthesized)
tacaccagcaactctgacgaccacctgctgaaaaacatcgagctgtttgacaagctctccctgcgcttcaacggccgcgtgctcttcatcaaggatgtcattggtgacgagatctgctgc

SEQ ID NO: 170783 - DNA, 120 bp, Artificial Sequence
  ENSG00000109079_7 (sequence is synthesized)
tggtccttttatggccagggccgtaagctggcagaggtgtgctgtacctccatcgtgtatgccacggagaagaagcagaccaaggtggaattcccagaggcccgaatctatgaggagaca

SEQ ID NO: 170784 - DNA, 120 bp, Artificial Sequence
  ENSG00000109079_8 (sequence is synthesized)
ctcaacgtcctactctatgagactccccgcgtccccgacaactccttgttggaggccacaagccgtagccgcagccaggcttcccccagtgaagatgaggagacctttgaactgcgggac

SEQ ID NO: 170785 - DNA, 120 bp, Artificial Sequence
  ENSG00000109079_9 (sequence is synthesized)
cgtgtccgccgcatccacgtcaagcgctacagcacttacgatgaccggcagctcggccaccagtctacccatcgcgactgaccagaccctcagggagtcagggcacgggaggccctatct

SEQ ID NO: 170786 - DNA, 120 bp, Artificial Sequence
  ENSG00000109079_10 (sequence is synthesized)
cccatcctgtggaacccgccccattggccaccccatgctgctgctgcctgggtctctgctctagcacccagaggcatgacaggccctgctcagaggtcagagggtctgggcagaggaggg

SEQ ID NO: 170787 - DNA, 120 bp, Artificial Sequence
  ENSG00000109079_11 (sequence is synthesized)
accacattcccctgccttgcccctgagcacttctggagactgcgtcctgtcctatctgctcaccatcacccttcctgcccgacggagctgcttctgctccctggggcatatggactgacc

SEQ ID NO: 170788 - DNA, 120 bp, Artificial Sequence
  ENSG00000109079_12 (sequence is synthesized)
cacctcctgctgagaaccttcccctaggccctgtgcagaaggctactgccccttaggcctcagctgggggaaaggcagttctggtgctgtagaggccctggtgcagaaagtgggacgtct

SEQ ID NO: 170789 - DNA, 120 bp, Artificial Sequence
  ENSG00000109079_13 (sequence is synthesized)
tttttcctaaggtgtttaagcacaggcttgataagtttggtttttaaaaaataatctaggaaatgaataattctaaatctagtaatgaggaaactgagcatttcttttgccctccagggt

SEQ ID NO: 170790 - DNA, 120 bp, Artificial Sequence
  ENSG00000109079_14 (sequence is synthesized)
gttgataatctccttgacccatgtctttctaccctaatccccacttccctgcagaatcaatctgagggaggggataaagaggaagcaataaaaaaaaaacatccgacagagcagctctgg

SEQ ID NO: 170791 - DNA, 120 bp, Artificial Sequence
  ENSG00000109079_15 (sequence is synthesized)
ctttgcagcctggccagcagctcagagtgcaccgaggagggaaggatggctaagctgggaccggcagtcctcacagggtgcctgtgagaaaggacattttacccccacatcatagtcaca

SEQ ID NO: 170792 - DNA, 120 bp, Artificial Sequence
  ENSG00000109079_16 (sequence is synthesized)
tcactgactcctaggtctagcacgactgctctttgtgattctcttgagtacccttggcttccagccatgctgtcctcacatacggtaaagccaaagagctgtcacatgggccagaaacat

SEQ ID NO: 170793 - DNA, 120 bp, Artificial Sequence
  ENSG00000109079_17 (sequence is synthesized)
gagccacggcaggaagaccgtggagcccgtgggcactgcatggtgttggctggcatgcccatcagctgaggacagcaaactcccagcagcccctacagaggtggcacatgcttggccaca

SEQ ID NO: 170794 - DNA, 120 bp, Artificial Sequence
  ENSG00000109079_18 (sequence is synthesized)
catctactccctgcccacaccatctatgctcttggttggtgctggctgggatggcggttctgcccagtggtgtctctgagcgcgggatgacaggagcaaccgaagcaccctgaaggcctt

SEQ ID NO: 170795 - DNA, 120 bp, Artificial Sequence
  ENSG00000109079_19 (sequence is synthesized)
cactccttgttgggtaactcagccatggagatgccaagcactagccaggaggtgagttcctctttagggctttggttttcattcctttttgtttggcttggccaaaccagaattcagctt

SEQ ID NO: 170796 - DNA, 120 bp, Artificial Sequence
  ENSG00000109079_20 (sequence is synthesized)
atctgaattattttccaaaggaatgctgtcagggagggactgttctgccagcctaacaaagcaacgtagccacgtatagtacccactttctgctctttggagagaacacaggttatcaag

SEQ ID NO: 170797 - DNA, 120 bp, Artificial Sequence
  ENSG00000109079_21 (sequence is synthesized)
ttcatctctcttgactactcttatgatagctgatgccacagagcctatgggcaaatgccagacccagggttagacacaaggacctgaagtgacatgacggcgggacaggggaaatgtgac

SEQ ID NO: 170798 - DNA, 120 bp, Artificial Sequence
  ENSG00000109079_22 (sequence is synthesized)
tttctaattaggcattttatgttagtcacagtcttgaatgtataaacagcactaagactctcaggtcaggtaccttggtgatcagctactagttcttccagccctcattgaggtaacaag

SEQ ID NO: 170799 - DNA, 120 bp, Artificial Sequence
  ENSG00000109079_23 (sequence is synthesized)
ataaagacaaatccacttctttggccaaattcaggctttggctttatgactttcccacagagactggaatgcgtcagcctgagaccactggcctattttctcagctgccctcttgaggtc

SEQ ID NO: 170800 - DNA, 120 bp, Artificial Sequence
  ENSG00000109079_24 (sequence is synthesized)
ctttaacactcaaattcccagctccccactgaggtgttgtgatgcttgccttttgacctccccatcccctttagtccctgcttactactttgacattcacatcctcagtgtctcagtctt

SEQ ID NO: 170801 - DNA, 120 bp, Artificial Sequence
  ENSG00000109079_25 (sequence is synthesized)
ttttgccgagaaagcacagtagtctgggactgggcatttatcttctctgactgaaaatctctccttggtcttaaggaaaatactaacattgaactcactgacatgatcttagcttcttta

SEQ ID NO: 170802 - DNA, 120 bp, Artificial Sequence
  ENSG00000109079_26 (sequence is synthesized)
atcagactttgtgacttaaaagtttgggggttttctttgaaagtttccagccctattcagaaagcaactcttggctgtgtgcatttttcaactccaagcagcccaggggtaagtaaacaa

SEQ ID NO: 170803 - DNA, 120 bp, Artificial Sequence
  ENSG00000109079_27 (sequence is synthesized)
agtatggatgaaggtcagattttcttgtcagtttctgagaaacctggcagcctgctgttaacaacacaggccagtattgggttttattgaatttggtatgtgaccaaggtcggcctaaag

SEQ ID NO: 170804 - DNA, 120 bp, Artificial Sequence
  ENSG00000109079_28 (sequence is synthesized)
gatggcgcaggtcctgggcaggaaagaatttttcctttatcacataactgtaatatttggttgctcagcataagtgatggaagcaaacactaatttctaataaaattgtgttaaactcaa

SEQ ID NO: 170805 - DNA, 120 bp, Artificial Sequence
  ENSG00000109079_29 (sequence is synthesized)
tttcccggatagagcgctatgcatgcagggacttgtagtctcaggctccccagccggctgggctgggcagcactccgggcggagtcgacgagcgcaggatcactgagattatgaggctct

SEQ ID NO: 170806 - DNA, 120 bp, Artificial Sequence
  ENSG00000109079_30 (sequence is synthesized)
aagtagctctgctctctccgcgaagaccctcgggggattccgcctccaccctttcccggatagagcgctatgcatgcagggacttgtagtctcaggctccccagccggctgggctgggca

SEQ ID NO: 170807 - DNA, 120 bp, Artificial Sequence
  ENSG00000109079_31 (sequence is synthesized)
gcactccgggcggagtcgacgagcgcaggatgtgagctcacagcttgggactgctgaggggcaggcggctgcaggctaggggcggctcggagtccgctggccacccagctgagaggagag

SEQ ID NO: 170808 - DNA, 120 bp, Artificial Sequence
  ENSG00000109083_0 (sequence is synthesized)
gccgtggcaggctggctgggtaccggctgtcgctgacccaggagaagctgcctgtctacatcagcctgggctgcagcgcgctgccgccgcggggccggcagccatggccaaggacatcct

SEQ ID NO: 170809 - DNA, 120 bp, Artificial Sequence
  ENSG00000109083_1 (sequence is synthesized)
gggtgaagcagggctacactttgatgaactgaacaagctgagggtgttggacccagaggttacccagcagaccatagagctgaaggaagagtgcaaagactttgtggacaaaattggcca

SEQ ID NO: 170810 - DNA, 120 bp, Artificial Sequence
  ENSG00000109083_2 (sequence is synthesized)
gtttcagaaaatagttggtggtttaattgagcttgttgatcaacttgcaaaagaagcagaaaatgaaaagatgaaggccatcggtgctcggaacttgctcaaatctatagcaaagcagag

SEQ ID NO: 170811 - DNA, 120 bp, Artificial Sequence
  ENSG00000109083_3 (sequence is synthesized)
aaatgaatttattgaccaatttatttttcagaaatgaactgaaaatttcgcttttatagtaggaaggcaaaacaaaaaaaagcctctcaaaaccaaaaaaacctctgtagcattccagcg

SEQ ID NO: 170812 - DNA, 120 bp, Artificial Sequence
  ENSG00000109083_4 (sequence is synthesized)
gcttgaccaatgacctatgtcacaagaggtggcgtgtaaggaatgcagccccctgaagacagcactacaagtctgggggagccagttttaacatcagtgcacagctgctgctggtggccc

SEQ ID NO: 170813 - DNA, 120 bp, Artificial Sequence
  ENSG00000109083_5 (sequence is synthesized)
tgcagtgtacgttctcacctcttatgcttagttggaactaagcagtttgtaaactttcatccttttttttgtaaattcacaaagctttggaaggagaagcaataaatttttgttttcaaa

SEQ ID NO: 170814 - DNA, 120 bp, Artificial Sequence
  ENSG00000109083_6 (sequence is synthesized)
tacagtgccactcagctttgagctgccatttcaactgtaccccaggctcatcttggccctgccacagtggagctgctggctccctggaggttgaatctggcgtctgtgagttcccacgtg

SEQ ID NO: 170815 - DNA, 120 bp, Artificial Sequence
  ENSG00000109083_7 (sequence is synthesized)
ccacccttttctgtctgccctcttgtgctctcatgtgtccccaacagggcaccagtcaaaccaaacaccgggatggggaggggagggtgtctttagatatgccatctttcatttcttgct

SEQ ID NO: 170816 - DNA, 120 bp, Artificial Sequence
  ENSG00000109083_8 (sequence is synthesized)
agcggccgtggcaggctggctgggtaccggctgtcgctgacccaggagaagctgcctgtctacatcagcctgggctgcagcgcgctgccgccgcggggccggcaggaagagaatgaccca

SEQ ID NO: 170817 - DNA, 120 bp, Artificial Sequence
  ENSG00000109083_9 (sequence is synthesized)
actttgattcccaattcagctgaactatgtgctcttcagggcgggcaccgtgttgcattcatctttgtacccccagcatctagcagtgttggcatgtagtaggcactcaagaaatgtgtg

SEQ ID NO: 170818 - DNA, 120 bp, Artificial Sequence
  ENSG00000109083_10 (sequence is synthesized)
tgcaggtgtgagccaccacacctggcctcgtttcatcttcatatcagcactgatgtagatggtcttatcctcattttataaatgaagaaatgaaggcttacatagtatgattggtgaaag

SEQ ID NO: 170819 - DNA, 120 bp, Artificial Sequence
  ENSG00000109083_11 (sequence is synthesized)
catagtatgattggtgaaaggcacaaggctgaatggcaccaccaaatgtgctattgtgcctgtgtccctggctctaggaatactcctagacctgcctcaaagctgccgtctagttcttga

SEQ ID NO: 170820 - DNA, 120 bp, Artificial Sequence
  ENSG00000109083_12 (sequence is synthesized)
ggcactttgtgatcagtaggttaatccttctgacttaacccaaaagctttggggctccactttcttttcctctctgaagactgacacagctcccagataacccctccccactttgaggac

SEQ ID NO: 170821 - DNA, 120 bp, Artificial Sequence
  ENSG00000109083_13 (sequence is synthesized)
ttgatgctgtagatggttttaatgaagccatggccttctctggcaatactgtaggccatcggtgctcggaacttgctcaaatctatagcaaagcagagagaagctcaacagcagcaactt

SEQ ID NO: 170822 - DNA, 120 bp, Artificial Sequence
  ENSG00000109083_14 (sequence is synthesized)
caagccctaatagcagaaaagaaaatgcagctagaaaggtaagaagtcatgatgtaaagcaagttctttacacagctgaatttccactcttccttctggaatgatcacttcttgtcctta

SEQ ID NO: 170823 - DNA, 120 bp, Artificial Sequence
  ENSG00000109083_15 (sequence is synthesized)
tgatttgaagattttaaaaaataaaattacatttgatgggaaggaaatagaaaacttgttaatatcaaaccacctctagtagtttgagcatgaaagggtccacgaagttggctggctctc

SEQ ID NO: 170824 - DNA, 120 bp, Artificial Sequence
  ENSG00000109083_16 (sequence is synthesized)
tgaaagaagactttcctagggctggagatttctcatgggtggctctgggtagggctttgcctctttctttcttcattctgaactcacaccatttcttgaaatcatttaaacctctatatc

SEQ ID NO: 170825 - DNA, 120 bp, Artificial Sequence
  ENSG00000109083_17 (sequence is synthesized)
cggactttattctttcctgacccttgctcctatgacacacctcctcctgactgccactgtcactccttcagagcagaactcctctagggaacctggatgggaaacagccatggccaagga

SEQ ID NO: 170826 - DNA, 120 bp, Artificial Sequence
  ENSG00000109083_18 (sequence is synthesized)
tcttccgcctacatcttggcctgggaccctagttcactaccctctcatccctcttccctcttgatttatttagaggggtagagggctgggtgggtgaatttttatttaagattttaataa

SEQ ID NO: 170827 - DNA, 71 bp, Artificial Sequence
  ENSG00000109083_19 (sequence is synthesized)
tttaagattttaataacttctggtccacttaacctactgaacttttgccaatctttatttcctttaatctt

SEQ ID NO: 170828 - DNA, 87 bp, Artificial Sequence
  ENSG00000109083_20 (sequence is synthesized)
tctcggctcactgcaagctctgcctctcagattcaagcgattctcccacctcaccctcccgagtagggaggtttttgtatttttttt

SEQ ID NO: 170829 - DNA, 120 bp, Artificial Sequence
  ENSG00000109083_21 (sequence is synthesized)
caggggcaggttctctgttatttggagttagaagtgataggtgaagtttctagaagcagctcaacagacttactgaagtcatcttttggctggaaatcttcaggaagcctcctgtcccag

SEQ ID NO: 170830 - DNA, 120 bp, Artificial Sequence
  ENSG00000109084_0 (sequence is synthesized)
ctcttctcacatcagcgggtccaggcccaaccgacagactatgggggctccggcaaccaggcgctgcgtggagtggctgctgggcctctacttcctcagccacatccccatcaccctgtt

SEQ ID NO: 170831 - DNA, 120 bp, Artificial Sequence
  ENSG00000109084_1 (sequence is synthesized)
catggacctgcaggcggtgctgccgcgcgagctctacccagtcgagtttagaaacctgctgaagtggtatgctaaggagttcaaagacccactgctacaggagcccccagcctggtttaa

SEQ ID NO: 170832 - DNA, 120 bp, Artificial Sequence
  ENSG00000109084_2 (sequence is synthesized)
gtcctttctgttttgcgagcttgtgtttcagctgcctttctttcccattgcaacgtatgccttcctcaaaggaagctgcaagtggattcgaactcctgcaatcatctactctgttcacac

SEQ ID NO: 170833 - DNA, 120 bp, Artificial Sequence
  ENSG00000109084_3 (sequence is synthesized)
catgacaaccttaattccgatactctccacatttctgtttgaggatttctccaaagccagtggtttcaagggacaaagacctgagactttgcatgaacggttaacccttgtgtctgtcta

SEQ ID NO: 170834 - DNA, 120 bp, Artificial Sequence
  ENSG00000109084_4 (sequence is synthesized)
tgccccctacttactcatcccattcatacttttaattttcatgttgcggagcccctactacaagtatgaagagaaaagaaaaaaaaaatgaaggaaacaaccactggcccagggtagaga

SEQ ID NO: 170835 - DNA, 120 bp, Artificial Sequence
  ENSG00000109084_5 (sequence is synthesized)
tgcctacagggtggttgcttgttggatacaatacaaggaacactgctcagaacccacgtcttcagcagcatttgaaacactggcagcaatgcacaagagcaagatggtgtcaggaaccat

SEQ ID NO: 170836 - DNA, 71 bp, Artificial Sequence
  ENSG00000109084_6 (sequence is synthesized)
tggcagcaatgcacaagagcaagatggtgtcaggaaccatgtcaaaccctcaccttcttccataagggcag

SEQ ID NO: 170837 - DNA, 120 bp, Artificial Sequence
  ENSG00000109084_7 (sequence is synthesized)
tcaagccatcttccttagcctcccaagtagctagaactacaggtgtgtaccaacacgtatggctaatttgttttgttttttttgtgtgtgtggagacagggttttgccatgttgcccagg

SEQ ID NO: 170838 - DNA, 120 bp, Artificial Sequence
  ENSG00000109084_8 (sequence is synthesized)
ttggtctcgaacgcctaggctcaagtgatctgcccacctcagtctccctaagtgctgggattacagacgtgaaccactgggcccagcccaaaccttcaccttctaagggcactgggatga

SEQ ID NO: 170839 - DNA, 120 bp, Artificial Sequence
  ENSG00000109084_9 (sequence is synthesized)
acagaccgatcggcttgagggtgggcaaaggggtgtgggctaggttataaggaagtggtaccaaataactgtgtgcctgagttccaccgcaagattactaaaagcaggaccagaccagaa

SEQ ID NO: 170840 - DNA, 120 bp, Artificial Sequence
  ENSG00000109084_10 (sequence is synthesized)
tatgactaaaccctccactcctgattctcaagagtgtatcacctgtcagcaaaatgaatagtgggatattttgggccattttaaatgtgaaattttgcctctttaatgttaattcaaaac

SEQ ID NO: 170841 - DNA, 120 bp, Artificial Sequence
  ENSG00000109084_11 (sequence is synthesized)
tatatcaatgttttcttgttcccacctctaacccaaggaaaaaagagaaaacatactatgcaaaggaagtttaaacttaagttttccttaagggtcagcccaacaatgactttcagtcaa

SEQ ID NO: 170842 - DNA, 120 bp, Artificial Sequence
  ENSG00000109084_12 (sequence is synthesized)
atggattaaactggaaaatgtttttgtttctgttgtaaacagatcatcctaggcgaaagttttttttgtttgtttgcttttaaattagtttatttctaaatcttagtcttccacatttct

SEQ ID NO: 170843 - DNA, 120 bp, Artificial Sequence
  ENSG00000109084_13 (sequence is synthesized)
agaggccacctgacacaagtccctgtatctgaagtctagcatctcaaggctgatctggaagtgtgctagtatgctccctagtggataacttaatcttttaatacagttccgtcattccca

SEQ ID NO: 170844 - DNA, 120 bp, Artificial Sequence
  ENSG00000109084_14 (sequence is synthesized)
tcttgttttcagaagagaaggtggctacagccaggcataacatatccactgtgtgcatagagggtctcttcacgttgatgcttggcattccatcagctttctctaagtctttgctcaagt

SEQ ID NO: 170845 - DNA, 120 bp, Artificial Sequence
  ENSG00000109084_15 (sequence is synthesized)
tcaaccttaaaatgatgttagacaacaggtcccagtcagttccctctattttcacccattttgctcacaagccatattggcccgattagtggtactgtctgactcacgtgtgtgatccaa

SEQ ID NO: 170846 - DNA, 120 bp, Artificial Sequence
  ENSG00000109084_16 (sequence is synthesized)
ataaaggtagctgctgaccactgcctggtttgttttgtggactaggggatagagaatccagggttctctcatgaggagttaaacatatttcaagagcaacaggaaaaaaggtacatcaag

SEQ ID NO: 170847 - DNA, 120 bp, Artificial Sequence
  ENSG00000109084_17 (sequence is synthesized)
ccatttgaaaacaaaaatttattgcttctccttccaaagctttgtgaatttacaaaaaaaaggatgaaagtttacaaactgcttagttccaactaagcataagaggtgagaacgtacact

SEQ ID NO: 170848 - DNA, 120 bp, Artificial Sequence
  ENSG00000109084_18 (sequence is synthesized)
gcagggccaccagcagcagctgtgcactgatgttaaaactggctcccccagacttgtagtgctgtcttcagggggctgcattccttacacgccacctcttgtgacataggtcattggtca

SEQ ID NO: 170849 - DNA, 120 bp, Artificial Sequence
  ENSG00000109084_19 (sequence is synthesized)
agccgctggaatgctacagaggtttttttggttttgagaggcttttttttgttttgccttcctactataaaagcgaaattttcagttcatttctgaaaaataaattggtcaataaattca

SEQ ID NO: 170850 - DNA, 120 bp, Artificial Sequence
  ENSG00000109084_20 (sequence is synthesized)
ggagtggctgctgggcctctacttcctcagccacatccccatcaccctgttcatggacctgcaggcggtgctgccgcgcgagctctacccagtcgaggaagctgcaagtggattcgaact

SEQ ID NO: 170851 - DNA, 120 bp, Artificial Sequence
  ENSG00000109084_21 (sequence is synthesized)
gggttccagttgcctctctcgggtcctgcccatgcctcccccgctcctaacccaactttagttcggtgttttcctcgggctttgtctctatcccagccccttctcccaagcggcgggggc

SEQ ID NO: 170852 - DNA, 120 bp, Artificial Sequence
  ENSG00000109084_22 (sequence is synthesized)
gaacgctttgtttcctttaaagtcacttcttccctgggtttaaggtttcccgcgattccacctctggccggttgtcagtgtctgagggaagtagtctggatgaagtggtgtccaaagtca

SEQ ID NO: 170853 - DNA, 120 bp, Artificial Sequence
  ENSG00000109084_23 (sequence is synthesized)
tctccaaagggaaggggatggtccccatagtttgtgggagaatgctacaggatctggggtaaatagccagggtagatcttgtaaagggacattagtgtggctcaggctcatgtctgtggt

SEQ ID NO: 170854 - DNA, 80 bp, Artificial Sequence
  ENSG00000109089_0 (sequence is synthesized)
aagatgcagcggcggctccggttgtcgccgggcgggccaggagcagcgcggacccgagccgggcagggggcgcccgccac

SEQ ID NO: 170855 - DNA, 120 bp, Artificial Sequence
  ENSG00000109089_1 (sequence is synthesized)
cccggatcctccttgccactgtcccacccgccgtccctgccactccaccctttgtgtcgccgcagcccggtgcccccggctctgcgggaccccggccgggccggaccctggcaaagcgcc

SEQ ID NO: 170856 - DNA, 120 bp, Artificial Sequence
  ENSG00000109089_2 (sequence is synthesized)
aaagcgccaggccccgcgtgggctcccggcgagcggttgatggcgagggggcgcggcgcgggctctgtagcccgagttcccgacgctggaggcccggcccgcctcagccgcattgtcccg

SEQ ID NO: 170857 - DNA, 120 bp, Artificial Sequence
  ENSG00000109089_3 (sequence is synthesized)
gcaccggccctgagctgcgccgccgcagcacccgcccgccgcccgcggggccatgcggagagccgccgggatggaggacttctccgcggaggaagaggagtcctggtacgaccagcagga

SEQ ID NO: 170858 - DNA, 120 bp, Artificial Sequence
  ENSG00000109089_4 (sequence is synthesized)
cctggagcaggacttgcacctagctgcggagctggggaagactctgctggagaggaacaaggagctggaggggtccctgcagcagatgtactccaccaatgaggaacaggtgcaggagat

SEQ ID NO: 170859 - DNA, 120 bp, Artificial Sequence
  ENSG00000109089_5 (sequence is synthesized)
cgagtacctaaccaagcagctggacacgctgcggcacgtgaacgagcagcacgccaaagtctatgagcagctggacctgacagcccgggacctggagctgaccaaccacaggctggtgct

SEQ ID NO: 170860 - DNA, 120 bp, Artificial Sequence
  ENSG00000109089_6 (sequence is synthesized)
ggagagtaaggctgcccagcagaagatccatgggctgacggagaccattgagcgcctccaggctcaggtggaggagctgcaggcccaggtggagcaactgagaggcctggaacagctgcg

SEQ ID NO: 170861 - DNA, 120 bp, Artificial Sequence
  ENSG00000109089_7 (sequence is synthesized)
agtgctccgggagaagcgggaacgcaggcgtaccatccacaccttcccctgcctcaaggagctgtgcaccagcccccggtgcaaggatgctttccgcctacacagttcctccctggagct

SEQ ID NO: 170862 - DNA, 120 bp, Artificial Sequence
  ENSG00000109089_8 (sequence is synthesized)
gggcccgcggcccctggagcaggagaacgagcggctgcagaccctggtgggggcgctgcgctcccaggtgagccaggagcggcagcgcaaggagcgggcggagcgcgagtacaccgcggt

SEQ ID NO: 170863 - DNA, 120 bp, Artificial Sequence
  ENSG00000109089_9 (sequence is synthesized)
gctgcaggagtactcggagctggagcgccagctgtgcgagatggaggcctgtcgcctgcgtgtgcaggagctggaggccgagctgctggagctgcagcagatgaagcaggccaagaccta

SEQ ID NO: 170864 - DNA, 120 bp, Artificial Sequence
  ENSG00000109089_10 (sequence is synthesized)
cctactgggtccggacgaccacctggccgaggccctgctcgcacccctcacgcaggcccctgaggccgacgatccccagcccggccgcggggacgacttgggcgcccaggacggggtctc

SEQ ID NO: 170865 - DNA, 120 bp, Artificial Sequence
  ENSG00000109089_11 (sequence is synthesized)
ctcaccggcagcctctccaggccacgtggtgcgcaagagctgcagcgacactgcgctcaacgccatcgtggccaaagacccagccagccggcacgcgggcaacctcacactgcacgccaa

SEQ ID NO: 170866 - DNA, 120 bp, Artificial Sequence
  ENSG00000109089_12 (sequence is synthesized)
cagcgtgcgcaagcggggcatgtccatcctgcgggaggtggacgagcagtaccacgcgctgctggagaagtacgaggagctgctgagcaagtgccggcagcacggggccggagtgcggca

SEQ ID NO: 170867 - DNA, 120 bp, Artificial Sequence
  ENSG00000109089_13 (sequence is synthesized)
cgccggcgtgcagacctcgcgccccatctcccgggacagctcgtggagggacctgcgcgggggtgaggagggccagggtgaggtcaaggcaggagagaagagcctgagccagcacgtgga

SEQ ID NO: 170868 - DNA, 120 bp, Artificial Sequence
  ENSG00000109089_14 (sequence is synthesized)
agatcttctccaggatccagaagaccaaggctgacatcaacgccaccaaagtcaagacgcacagcagcaagtgacccttctccggcctgcagcctcccccagggtggaagccgtggggtc

SEQ ID NO: 170869 - DNA, 120 bp, Artificial Sequence
  ENSG00000109089_15 (sequence is synthesized)
cctcaggcctgggcggtgcagcttccagagagcgagcgccctttagcggcctgccaccacagcacgcggcctcctgatccggaagcacgcagcatgttccctgctgagcggaggcagccc

SEQ ID NO: 170870 - DNA, 120 bp, Artificial Sequence
  ENSG00000109089_16 (sequence is synthesized)
acctgtcctgcctcccaggagcccttggccacctcgcgccagcccaaaggcgcagctctgagttcaaagccaaatgtccccactaccccagggatcccccagctcccccagcccctggct

SEQ ID NO: 170871 - DNA, 120 bp, Artificial Sequence
  ENSG00000109089_17 (sequence is synthesized)
tcctgaccctgcgcctcaccctcagactggtgaccaggcttctgaaagccattctggatcagttggctttttttttttttttggttaagtttgttttttctaagagatttgcaatgcaag

SEQ ID NO: 170872 - DNA, 120 bp, Artificial Sequence
  ENSG00000109089_18 (sequence is synthesized)
gtctccttgaccccttgccacaactggaaacacttgaaaggggaccccagggccagctgtttcaggggtttcctggaccacccactgcttctccccaaccctgatgcgctgacattccct

SEQ ID NO: 170873 - DNA, 120 bp, Artificial Sequence
  ENSG00000109089_19 (sequence is synthesized)
tagcaccagctgtcccacctccagggtcctgaccaggtcagagatgtcccctgccatgcagagcaggaagcctcagctgggcctggagtgtccctgctccagccctgccagggacaggtt

SEQ ID NO: 170874 - DNA, 120 bp, Artificial Sequence
  ENSG00000109089_20 (sequence is synthesized)
tctccctggatactcttggcccaccgcagatctgtagccagtcagaggaggaggagaaggagcccctcagcagagtggtgcagtttcgctcagagcttgtctccttggcttccaacccca

SEQ ID NO: 170875 - DNA, 120 bp, Artificial Sequence
  ENSG00000109089_21 (sequence is synthesized)
gaaatgcctgctgggccttaagctttccaggggccggggcagtggggagcccccatcccttcacaccgccaccaactaaccaagcttggcctctgactcccgtctctgtgcttgccccca

SEQ ID NO: 170876 - DNA, 120 bp, Artificial Sequence
  ENSG00000109089_22 (sequence is synthesized)
tctcagggaccatgatgtctcagtcactccacgctccccacaggccaaccctggcacaggtcatgtctgcagcccccagaatgttctggacatgcaccaccagccggtggtcccaatgtc

SEQ ID NO: 170877 - DNA, 120 bp, Artificial Sequence
  ENSG00000109089_23 (sequence is synthesized)
cacccctgcctccccttcactggggactggggttttcgccccatgctgcatcgtgttgtattgggatggggctgaggaacatgctccctccctccctcccataaaatgcctgctcttcac

SEQ ID NO: 170878 - DNA, 120 bp, Artificial Sequence
  ENSG00000109089_24 (sequence is synthesized)
ctcccacctttgtggggggcttttgaggacccagctgcgtcaggagttttgcttcaagatgtcagaaagtcaagttcagctaagagacacccaggtccccagcttgccctgagcagccct

SEQ ID NO: 170879 - DNA, 120 bp, Artificial Sequence
  ENSG00000109089_25 (sequence is synthesized)
tcagggcttctggttccttctgccgcccttcctgagaccttagaaaccagaagagccatacagtcagtggaaggcgggggggccctggcctctgcaccgggatcccagtgggaaccttca

SEQ ID NO: 170880 - DNA, 120 bp, Artificial Sequence
  ENSG00000109089_26 (sequence is synthesized)
tgccttatttatttctaatgggtaaaggggttttcttaccaagcatccctgacctcctggagacaccacctgctttccgggcggcactgtgatgggagctggtggcgactgagtccttct

SEQ ID NO: 170881 - DNA, 120 bp, Artificial Sequence
  ENSG00000109089_27 (sequence is synthesized)
gtacgtgcaactgggaaacttttgtcctttgaggctaggcagctccctgccctccgtgtgtgtctgttatctgggggagaggagtgtggaagggttgggggaagagctccagcctgtctg

SEQ ID NO: 170882 - DNA, 120 bp, Artificial Sequence
  ENSG00000109089_28 (sequence is synthesized)
ctccccagctctgtagtggcagaccagcgtcacctttgaagtatacgtgagagaaatatatttacaaatgctttattctcttctttaataaaaaatgcaccagtattctaaaagcaaaaa

SEQ ID NO: 170883 - DNA, 120 bp, Artificial Sequence
  ENSG00000109099_0 (sequence is synthesized)
agttacagggagcaccaccagggaacatctcggggagcctggttggaagctgcaggcttagtctgtcggctgcgggtctctgactgccctgtggggagggtcttgccttaacatcccttg

SEQ ID NO: 170884 - DNA, 120 bp, Artificial Sequence
  ENSG00000109099_1 (sequence is synthesized)
catttggctgcaaagaaatctgcttggaagaaggggttacgctgtttggccgggcagaaactccgctgagcagaacttgccgccagaatgctcctcctgttgctgagtatcatcgtcctc

SEQ ID NO: 170885 - DNA, 120 bp, Artificial Sequence
  ENSG00000109099_2 (sequence is synthesized)
cacgtcgcggtgctggtgctgctgttcgtctccacgatcgtcagccaatggatcgtgggcaatggacacgcaactgatctctggcagaactgtagcacctcttcctcaggaaatgtccac

SEQ ID NO: 170886 - DNA, 120 bp, Artificial Sequence
  ENSG00000109099_3 (sequence is synthesized)
cactgtttctcatcatcaccaaacgaatggctgcagtctgtccaggccaccatgatcctgtcgatcatcttcagcattctgtctctgttcctgttcttctgccaactcttcaccctcacc

SEQ ID NO: 170887 - DNA, 120 bp, Artificial Sequence
  ENSG00000109099_4 (sequence is synthesized)
aaggggggcaggttttacatcactggaatcttccaaattcttgctggtctgtgcgtgatgagtgctgcggccatctacacggtgaggcacccggagtggcatctcaactcggattactcc

SEQ ID NO: 170888 - DNA, 120 bp, Artificial Sequence
  ENSG00000109099_5 (sequence is synthesized)
tacggtttcgcctacatcctggcctgggtggccttccccctggcccttctcagcggtgtcatctatgtgatcttgcggaaacgcgaatgaggcgcccagacggtctgtctgaggctctga

SEQ ID NO: 170889 - DNA, 120 bp, Artificial Sequence
  ENSG00000109099_6 (sequence is synthesized)
gcgtacatagggaagggaggaagggaaaacagaaagcagacaaagaaaaaagagctagcccaaaatcccaaactcaaaccaaaccaaacagaaagcagtggaggtgggggttgctgttga

SEQ ID NO: 170890 - DNA, 120 bp, Artificial Sequence
  ENSG00000109099_7 (sequence is synthesized)
ataaaacctatttataacactttttacatatatgtacatagtattgtttgctttttatgttgaccatcagcctcgtgttgagccttaaagaagtagctaaggaactttacatcctaacag

SEQ ID NO: 170891 - DNA, 120 bp, Artificial Sequence
  ENSG00000109099_8 (sequence is synthesized)
ttgttttgttttttgtttgtttgttttgttttacccagaaataagataactccatctcgccccttccctttcatctgaaagaagatacctccctcccagtccacctcatttagaaaacca

SEQ ID NO: 170892 - DNA, 120 bp, Artificial Sequence
  ENSG00000109099_9 (sequence is synthesized)
ccacctcatttagaaaaccaaagtgtgggtagaaaccccaaatgtccaaaagcccttttctggtgggtgacccagtgcatccaacagaaacagccgctgcccgaacctctgtgtgaagct

SEQ ID NO: 170893 - DNA, 120 bp, Artificial Sequence
  ENSG00000109099_10 (sequence is synthesized)
ttacgcgcacacggacaaaatgcccaaactggagcccttgcaaaaacacggcttgtggcattggcatacttgcccttacaggtggagtatcttcgtcacacatctaaatgagaaatcagt

SEQ ID NO: 170894 - DNA, 120 bp, Artificial Sequence
  ENSG00000109099_11 (sequence is synthesized)
gacaacaagtctttgaaatggtgctatggatttaccattccttattatcactaatcatctaaacaactcactggaaatccaattaacaattttacaacataagatagaatggagacctga

SEQ ID NO: 170895 - DNA, 120 bp, Artificial Sequence
  ENSG00000109099_12 (sequence is synthesized)
ataattctgtgtaatataaatggtttataactgcttttgtacctagctaggctgctattattactataatgagtaaatcataaagccttcatcactcccacatttttcttacggtcggag

SEQ ID NO: 170896 - DNA, 120 bp, Artificial Sequence
  ENSG00000109099_13 (sequence is synthesized)
catcagaacaagcgtctagactccttgggaccgtgagttcctagagcttggctgggtctaggctgttctgtgcctccaaggactgtctggcaatgacttgtattggccaccaactgtaga

SEQ ID NO: 170897 - DNA, 120 bp, Artificial Sequence
  ENSG00000109099_14 (sequence is synthesized)
tgtatatatggtgcccttctgatgctaagactccagaccttttgtttttgctttgcattttctgattttataccaactgtgtggactaagatgcattaaaataaacatcagagtaactca

SEQ ID NO: 170898 - DNA, 120 bp, Artificial Sequence
  ENSG00000109099_15 (sequence is synthesized)
tgttcccgttaaaggggaacgccaggagcctcccactgcccccttgcttcgcgcgcgcgcagccccgcagcgcagctttggcggcgccagcagcggagccaacgcacccgagtttgtgtt

SEQ ID NO: 170899 - DNA, 120 bp, Artificial Sequence
  ENSG00000109099_16 (sequence is synthesized)
ggcggggaggctccctgcgcggcccgcccttccccatctgggttcccagcccgtgctcctgctggttcaggactgtgttatttgcagacagttggaagtctcagacgtcccagggaagtt

SEQ ID NO: 170900 - DNA, 120 bp, Artificial Sequence
  ENSG00000109099_17 (sequence is synthesized)
tctggcaatctgcccccttccagttgctttgagaaaacgagagcagattcagtgataggaaccaagcgagcgctgggctgggttagctgcgcaggtctctatttaagccaagtaacttca

SEQ ID NO: 170901 - DNA, 120 bp, Artificial Sequence
  ENSG00000109099_18 (sequence is synthesized)
gagccgatctagggtccccgaccttcatttgacaagattgtttaacttttttttttcttgatgcagcctcgttgaagaagaggagtatttatgatttttttttctccaaaccatagtcag

SEQ ID NO: 170902 - DNA, 120 bp, Artificial Sequence
  ENSG00000109099_19 (sequence is synthesized)
gtgggatgtgacagggagccatgagtccagggaaaatgggaggggtggtgatctcgctggggaagctgagatcctgggcatcattgtgattcactctacctagagacatgcccttagtgc

SEQ ID NO: 170903 - DNA, 120 bp, Artificial Sequence
  ENSG00000109099_20 (sequence is synthesized)
cctcctgatcacttaggataatgctttttgtgattgaaaaaaatatcgacctgggagctgtgaaggtggtatgatagctaagcctttggcagacccccttgggacattggatcaaacgtg

SEQ ID NO: 170904 - DNA, 120 bp, Artificial Sequence
  ENSG00000109099_21 (sequence is synthesized)
gaatcttccaaattcttgctgaatcaaactcaagtcaaatgtgtggttaccgggattaagaacagaaagaatagaggggactcctgagtctgtgcgtgatgagtgctgcggccatctaca

SEQ ID NO: 170905 - DNA, 120 bp, Artificial Sequence
  ENSG00000109099_22 (sequence is synthesized)
tcactggaatcttccaaattcttgctgccctgccttcattagataagtcagacagagcccaagagacaacttcagtatttcttaaagacaagagttagcactttggagatgcaagccgtg

SEQ ID NO: 170906 - DNA, 120 bp, Artificial Sequence
  ENSG00000109099_23 (sequence is synthesized)
gaagagtggggcaagataattaaggatcctggacctcaaggcaaataaagtgtgtccccagcagatcaaaactgctgttttctgcaatcaacaattaacccgcaatgatttcgctcctga

SEQ ID NO: 170907 - DNA, 120 bp, Artificial Sequence
  ENSG00000109099_24 (sequence is synthesized)
catggccatctttgctgtcttctgaacttcctgtctgtgcgtgatgagtgctgcggccatctacacggtgaggcacccggagtggcatctcaactcggattactcctacggtttcgccta

SEQ ID NO: 170908 - DNA, 120 bp, Artificial Sequence
  ENSG00000109099_25 (sequence is synthesized)
gatggtaaagtccatgtggaagcggggtgcatccaagtctgcggaatgattagtttagtagaaggatgtggcctcagaatgactgatgttcatgagtctccccactggatgctttccata

SEQ ID NO: 170909 - DNA, 120 bp, Artificial Sequence
  ENSG00000109101_0 (sequence is synthesized)
acggctttctttgaggccaggactgggtgatggtgtcgctacccccgccgcagtctgacgtcacgctgccgggccccaccagactggagggcgagcgccaaggggacctcatgcaggcac

SEQ ID NO: 170910 - DNA, 120 bp, Artificial Sequence
  ENSG00000109101_1 (sequence is synthesized)
cgggcctcccaggctcccctgccccacagagtaagcatgccggcttcagctgctcgtcatttgtgtccgacggccctccagagaggacaccctcactgcccccacacagcccccgcattg

SEQ ID NO: 170911 - DNA, 120 bp, Artificial Sequence
  ENSG00000109101_2 (sequence is synthesized)
cgtcaccagggcccgagcaagtccagggccactgcccagccggccccggccctgggcccttcaggctctcaccctcagacaagtatcctggctttggctttgaggaggccgcagcaagca

SEQ ID NO: 170912 - DNA, 120 bp, Artificial Sequence
  ENSG00000109101_3 (sequence is synthesized)
gccctgggcgattcctcaagggcagccacgcgcccttccacccgtacaagcggcctttccatgaggacgtcttcccagaggccgagaccaccctggccctcaaaggacactcctttaaga

SEQ ID NO: 170913 - DNA, 120 bp, Artificial Sequence
  ENSG00000109101_4 (sequence is synthesized)
ccccagggccgctggaggccttcgaggagatcccagtggacgtggcggaggccgaggccttcctgcctggcttctcagcagaggcctggtgtaacgggctcccctaccccagccaggagc

SEQ ID NO: 170914 - DNA, 120 bp, Artificial Sequence
  ENSG00000109101_5 (sequence is synthesized)
atggcccccaagtcctgggttcagaggtcaaagtcaagcccccagttctggagagtggtgctgggatgttctgctaccagcctcccttgcagcatatgtactgctcctcccagcccccct

SEQ ID NO: 170915 - DNA, 120 bp, Artificial Sequence
  ENSG00000109101_6 (sequence is synthesized)
tccaccagtactcgccaggtggtggcagctaccccataccctacctgggctcctcacactatcagtaccagcgaatggcaccccaggccagcaccgatgggcaccagcctctcttcccaa

SEQ ID NO: 170916 - DNA, 120 bp, Artificial Sequence
  ENSG00000109101_7 (sequence is synthesized)
aacccatctattcctacagcatcctcatcttcatggcccttaagaacagtaaaactgggagccttcccgtcagcgagatctacaattttatgacggagcactttccttacttcaagacag

SEQ ID NO: 170917 - DNA, 120 bp, Artificial Sequence
  ENSG00000109101_8 (sequence is synthesized)
cacccgatggctggaagaattctgtccggcacaacctatccctcaacaagtgcttcgagaaggtggagaacaaatcaggaagttcctcccgcaagggctgcctgtgggccctcaatccgg

SEQ ID NO: 170918 - DNA, 120 bp, Artificial Sequence
  ENSG00000109101_9 (sequence is synthesized)
ccaagatcgacaagatgcaagaggagctgcaaaaatggaagaggaaagatcccattgctgtgcgcaaaagcatggccaagccagaagagctggacagcctcattggagacaagagagaaa

SEQ ID NO: 170919 - DNA, 120 bp, Artificial Sequence
  ENSG00000109101_10 (sequence is synthesized)
agctgggctccccactcctgggctgtccgccccctgggctgtccggctcaggccccatccggcccctggcacccccagctggcctctccccaccactgcactcactccacccagctccag

SEQ ID NO: 170920 - DNA, 120 bp, Artificial Sequence
  ENSG00000109101_11 (sequence is synthesized)
gccccattcctggcaagaaccccctgcaggacctacttatggggcacacaccctcctgctatgggcagacatacttgcacctctcaccaggcctggcccctcctggacccccgcagccat

SEQ ID NO: 170921 - DNA, 120 bp, Artificial Sequence
  ENSG00000109101_12 (sequence is synthesized)
tgttcccacagccggacgggcaccttgagctgcgggcccagccaggcaccccccaggactcgcctctgcctgcccacaccccacccagccacagtgccaagctactggccgagccttccc

SEQ ID NO: 170922 - DNA, 120 bp, Artificial Sequence
  ENSG00000109101_13 (sequence is synthesized)
cagccaggactatgcacgacaccctgctgccagatggagaccttggcactgacctggatgccatcaatccctcactcactgacttcgacttccagggaaacctgtgggaacagttgaagg

SEQ ID NO: 170923 - DNA, 120 bp, Artificial Sequence
  ENSG00000109101_14 (sequence is synthesized)
accacctcactgcttcccccctgggccctgtctgacagagacaggcagtggggcaggtgacttggcagccccgggcagtggtggctccggggcactgggtgacctgcacctcaccaccct

SEQ ID NO: 170924 - DNA, 120 bp, Artificial Sequence
  ENSG00000109101_15 (sequence is synthesized)
ctactctgcctttatggagctggagcccacgccccccacggcccctgcaggcccctctgtgtacctcagccccagctccaagcccgtggccctggcatgagctgtgcccagcttcgtcag

SEQ ID NO: 170925 - DNA, 120 bp, Artificial Sequence
  ENSG00000109101_16 (sequence is synthesized)
ctccagcgtttgcctggtctggaagtcctggccggccgcccacatcgggctcaccttaaaggtcaaggaaggaaaatactacctgtcccctatgccactaagccaacgtgtgtgtcagct

SEQ ID NO: 170926 - DNA, 120 bp, Artificial Sequence
  ENSG00000109101_17 (sequence is synthesized)
ggtagctgggggcgcagaggacatcacctggggtgctgcctctcacacatttctgccacgtggtggcccagctcctcacccagggcccccaaagagcaagcgtctgggcaagaggaaaat

SEQ ID NO: 170927 - DNA, 120 bp, Artificial Sequence
  ENSG00000109101_18 (sequence is synthesized)
gccctgtccctagctcacactcatccacacttaagccctcgtgcacacacacaaattattcagatgtacacccacccacatatcttacagccagaggaaccagcactccatcactgagag

SEQ ID NO: 170928 - DNA, 120 bp, Artificial Sequence
  ENSG00000109101_19 (sequence is synthesized)
cccgacttcgtttctggggcaactgagagctgagcgctttgcttaccaaaagctcagggccctgtgccaggccaaagatccccccagacccccattctgacatccacatgctctgcagtc

SEQ ID NO: 170929 - DNA, 120 bp, Artificial Sequence
  ENSG00000109101_20 (sequence is synthesized)
ctggccccctcgtcattttctttcccagaagcgccctgtatttattcccccatcttcatcccaacagcccagcaagaaggaggagacagagagctcctccctgggttgtctgtggacccc

SEQ ID NO: 170930 - DNA, 120 bp, Artificial Sequence
  ENSG00000109101_21 (sequence is synthesized)
cccaggagctgctaattggcagcacccactcagccattctctacccatccttagtacatgctctgtccagctttccccagggtgacatacagaaggggcaacatctacccgggcaccaaa

SEQ ID NO: 170931 - DNA, 120 bp, Artificial Sequence
  ENSG00000109101_22 (sequence is synthesized)
ctgagcccaattccgaagcagtgtttggaaaagcccttgccctcggaaacttgaacatgtcctttttccccagtcccgggtgcaggaagggccccctccaggtcaccacaatctcactcc

SEQ ID NO: 170932 - DNA, 120 bp, Artificial Sequence
  ENSG00000109101_23 (sequence is synthesized)
tcctccagaaagaaaagttcacatagtttaggtcctggcttaactctacttatgatggttcaacttacactttttcaactttaagatggtgcaaaagcaatacacattcagtatgttcct

SEQ ID NO: 170933 - DNA, 120 bp, Artificial Sequence
  ENSG00000109101_24 (sequence is synthesized)
cgacttaggatgcggttatgtccgataaacccattgtaaattgaaaccaccgaaagtcaaaaaccactttcgacttacgatgtttcccactcacgatgggtttctccggatgtagcccca

SEQ ID NO: 170934 - DNA, 120 bp, Artificial Sequence
  ENSG00000109101_25 (sequence is synthesized)
tcataagttgaggagcacctgttagttacttccaactgtctcaggcaacctgggcattcaggagaaaagcctggcacagggtgacagggaagcacccatgcaaagcacccccgctttgac

SEQ ID NO: 170935 - DNA, 120 bp, Artificial Sequence
  ENSG00000109101_26 (sequence is synthesized)
tgcttggcagacctagggtgcccgggaagcacaagggatacccttggccctgcggggtgtggcccaggtgcctgccatgagcctgaccccatcgagggggaacctcagcccaccctgggc

SEQ ID NO: 170936 - DNA, 120 bp, Artificial Sequence
  ENSG00000109101_27 (sequence is synthesized)
ctgggggtgacaagaacttccacaggttggccccaggcttataggaggcataagcagatcccgcgatggcttgtcattgtcccctgtcctggaacaataaagcaagtgccttgtggtctc

SEQ ID NO: 170937 - DNA, 120 bp, Artificial Sequence
  ENSG00000109101_28 (sequence is synthesized)
gttttggcgcagcccctccgggcaaggggaagctgatatcataattattggctcacctggcagctgcctcccctcacctgatgtcagcacagacacaggacggccgagctgacggactga

SEQ ID NO: 170938 - DNA, 120 bp, Artificial Sequence
  ENSG00000109103_0 (sequence is synthesized)
gccgggggcggggctgcggatgctcccacttcccccggctccagccggcgcaggcagcggcggcagcagcaggcgagcctcggccccgcaaggccatgaaggtgaagaagggcggcggtg

SEQ ID NO: 170939 - DNA, 120 bp, Artificial Sequence
  ENSG00000109103_1 (sequence is synthesized)
aagaagggcggcggtggggccgggacggcgacggagtccgctccggggccctcgggccagagcgtggcccccataccacagccgcctgcggaatccgaatctgggtccgagtcggagccg

SEQ ID NO: 170940 - DNA, 120 bp, Artificial Sequence
  ENSG00000109103_2 (sequence is synthesized)
gacgcaggcccagggcccaggccggggccgctgcagaggaagcagccgatcgggccggaggacgtgctggggctgcagcggatcaccggtgactacctctgctcccctgaggagaatatc

SEQ ID NO: 170941 - DNA, 120 bp, Artificial Sequence
  ENSG00000109103_3 (sequence is synthesized)
tacaagatcgactttgtcaggtttaagattcgggacatggactcaggcactgtcctctttgaaatcaagaagcccccagtctcagaacggttgcccatcaaccggcgggacctggacccc

SEQ ID NO: 170942 - DNA, 120 bp, Artificial Sequence
  ENSG00000109103_4 (sequence is synthesized)
aatgctgggcgctttgtccgctaccagttcacgcctgccttcctccgcctgaggcaggtgggagccacggtggagttcacagtgggagacaagcctgtcaacaacttccgcatgatcgag

SEQ ID NO: 170943 - DNA, 120 bp, Artificial Sequence
  ENSG00000109103_5 (sequence is synthesized)
tctctccgaggagctgatcagcgagatgatccgccacccgtatgagacccagtctgacagcttctacttcgtggatgaccggctggtgatgcacaataaagcagactattcctacagcgg

SEQ ID NO: 170944 - DNA, 120 bp, Artificial Sequence
  ENSG00000109103_6 (sequence is synthesized)
gacaccctgaccccacggctgccctgaccccaggaggctccagttctgggctgggagctgtgacctccccaacgctcacccctcaaccccaagtcctctgcttggggagttctccaggag

SEQ ID NO: 170945 - DNA, 120 bp, Artificial Sequence
  ENSG00000109103_7 (sequence is synthesized)
ctccggaccctgagtcaatgttgggaggaagggtacctggtgtccccagtcaagcccatgaagcccatgcggcctgctacatggggtggggtcgtagggaggctgtttgcctccacgtct

SEQ ID NO: 170946 - DNA, 120 bp, Artificial Sequence
  ENSG00000109103_8 (sequence is synthesized)
aggaaggcctgtgagaggagcagtcaggacttccggacaacttagctgggccctacttgggcccaagtttcagaatagtgttcccctatcaaggctgtgactagatcaggcagggatcca

SEQ ID NO: 170947 - DNA, 120 bp, Artificial Sequence
  ENSG00000109103_9 (sequence is synthesized)
ttccctgtcccctgcccactaccttcaggccatttagagttgtaaatttacaaagatccacggtgggctccagctgccaagccacccaagggagtctgggccctaggcctagccccatcc

SEQ ID NO: 170948 - DNA, 120 bp, Artificial Sequence
  ENSG00000109103_10 (sequence is synthesized)
ctccccatgaggggccaagacactgcctaaggtgtgggagggactggctgagattgcagcccatggtaggagctggaccaactgtatatagttttcaataaactttttccttttctgttc

SEQ ID NO: 170949 - DNA, 120 bp, Artificial Sequence
  ENSG00000109103_11 (sequence is synthesized)
gtgtgttggctgtggttcctctcatggggagtggcataatgtccctccaagcctggactagcacctgtcctcttctgggggctctgtcatcaagggaggcttggtctccactgtggttaa

SEQ ID NO: 170950 - DNA, 120 bp, Artificial Sequence
  ENSG00000109103_12 (sequence is synthesized)
gagtttctgagctggactgcctgggttggagttccaactctgccatataattgtctgtgtgaccttgggcaagtaacctcacctctctgagcatgtcttttcatctgtaaaatggggata

SEQ ID NO: 170951 - DNA, 120 bp, Artificial Sequence
  ENSG00000109103_13 (sequence is synthesized)
atgatacctttctcgtaagattattgtgaagataagtcctctgattctgtacagtgcctggcatctatgcatgctgtgtacattgggctctttgatcagtagtatttttgggccctacag

SEQ ID NO: 170952 - DNA, 120 bp, Artificial Sequence
  ENSG00000109103_14 (sequence is synthesized)
ggctgctcatagctgctgcctggagtcaaacaacttggctttcagggcaggggagggggtcatcataggcagggaacgagggctaggaaacctcatagcagaggctttggatgagcctca

SEQ ID NO: 170953 - DNA, 120 bp, Artificial Sequence
  ENSG00000109103_15 (sequence is synthesized)
aaggatgaaaggtgcatggagagacagtggctctccaccttggccacattcaccagcaacctgccctggccccctttgtgagaataactgttggggggggcctctctgtgggtatggggg

SEQ ID NO: 170954 - DNA, 120 bp, Artificial Sequence
  ENSG00000109103_16 (sequence is synthesized)
gcatgtattggagtggacctgagccctagagcttccaaagcagcagaacaccggactcccagacagagctgtggaggggagacagccttgagcctgtgctcctgggtccctgggggccaa

SEQ ID NO: 170955 - DNA, 120 bp, Artificial Sequence
  ENSG00000109103_17 (sequence is synthesized)
ttcctctctccttactgagctaggcagcagccattcttagctgggcccccagagtactgagctcccttgcccaagcaggcatcaatggagagagggaggctggaccaggctgatgttgaa

SEQ ID NO: 170956 - DNA, 120 bp, Artificial Sequence
  ENSG00000109103_18 (sequence is synthesized)
gccagttgggctacaatttgcaatagcagcatttaggattcagcttagctctggggcagaactttctcagactgactgagtcctgagtaactttgggggtttattttgcaactagaggga

SEQ ID NO: 170957 - DNA, 120 bp, Artificial Sequence
  ENSG00000109103_19 (sequence is synthesized)
gcttccagctcatgtaccaccatttgtctcctaatttggaggaaattcatagcccttagagatggggcatctgtgaagggtaagtagaggaaagggcttcatgagaaccccttcctgtgc

SEQ ID NO: 170958 - DNA, 120 bp, Artificial Sequence
  ENSG00000109103_20 (sequence is synthesized)
aggaattgagaacagagttccagggatttccaccctggcaccccttgcctggtctcttctgaccctaatcatgcaggtctgaggtttgctgttcccagattactgggccctgaatccagc

SEQ ID NO: 170959 - DNA, 120 bp, Artificial Sequence
  ENSG00000109103_21 (sequence is synthesized)
ttaggaagctatttgtggctgagaggaatagagcagttgtgttctgagcccttggccactctgccccttattctgacctgaccctgggtcccaggcctcatcctttctagaagagaagga

SEQ ID NO: 170960 - DNA, 120 bp, Artificial Sequence
  ENSG00000109103_22 (sequence is synthesized)
gtggccgtggtgttctgagccatagatatccgtgttcctcacttcttctaaggacagagaggttgatagattgagtttgcagtagaagagactgaggttagactgcaggaagttgttccc

SEQ ID NO: 170961 - DNA, 120 bp, Artificial Sequence
  ENSG00000109103_23 (sequence is synthesized)
aaatgagagaggctccaaaagttggagaatgggagaagagaaggccttacagggatctgggagttgggcactgggatcctgctccccactctgccacctccgttccctatgctctgtacc

SEQ ID NO: 170962 - DNA, 120 bp, Artificial Sequence
  ENSG00000109103_24 (sequence is synthesized)
ttctttctatgtctttatactggtgcttactttctgtgaaaatagggtgaatggggtgagataggggttgcccacttccattctctccccaccccacatgtgggctgtagtagactcagg

SEQ ID NO: 170963 - DNA, 120 bp, Artificial Sequence
  ENSG00000109103_25 (sequence is synthesized)
gccctgcctcttccccaagctgtataaagtccatgctgggccccagggtaccagatggctgccaggagggcttcctggaggggacagcgtcaggcttggggaagaagcagacctggggaa

SEQ ID NO: 170964 - DNA, 120 bp, Artificial Sequence
  ENSG00000109103_26 (sequence is synthesized)
gagaaaatgactttatattcacttcctgttcctgccccagaggaataggaggtggcccaggggcctggagggtgatttccaggcctctgtgggccaccaggggaggatgtgatgctgtgc

SEQ ID NO: 170965 - DNA, 120 bp, Artificial Sequence
  ENSG00000109103_27 (sequence is synthesized)
aggctgacagcacgagtccctccctgcacctctcagctctttttgttgccagggcctccctgagcacttgaagttgctgctgcaagagctgtgagggttagatcaggccctgtagctccc

SEQ ID NO: 170966 - DNA, 120 bp, Artificial Sequence
  ENSG00000109103_28 (sequence is synthesized)
gcctagcctgtgttcttctctatgggggtccaggactactttctccatggtggtggctcatagccagggctgcgtaaatgacctctaagggggttctctctgcttgctaagacttcctcc

SEQ ID NO: 170967 - DNA, 120 bp, Artificial Sequence
  ENSG00000109103_29 (sequence is synthesized)
catttggagatcaacaaaggatgagagcaaagttggcctcctcccacctgccatatcccaggctctgggcttgagtcagcagagctttggttaagctgcttaagggagctgggctggtgt

SEQ ID NO: 170968 - DNA, 120 bp, Artificial Sequence
  ENSG00000109103_30 (sequence is synthesized)
aagcttcttactgagaggagggggtttggaggagaggaggaatagggaaggggttgttcacctgccccagccccacccatatcagggaaagtccccttaacatcagcctcacctgataca

SEQ ID NO: 170969 - DNA, 120 bp, Artificial Sequence
  ENSG00000109103_31 (sequence is synthesized)
tctagatgtcatgccaggggcagctgtggggtgagggtaggagtatcctccagagaaggacagtgactctcccaagacagagctgtgtggccccctttacaggtggttctcaaaggcagg

SEQ ID NO: 170970 - DNA, 120 bp, Artificial Sequence
  ENSG00000109103_32 (sequence is synthesized)
gtaccagagaagttgatacactgagttgcagtagaagagacaggtcagactgcaggaagttgttcccatatgagaagagaggctcccaccaggctggatacctaattctcccaaagtcat

SEQ ID NO: 170971 - DNA, 120 bp, Artificial Sequence
  ENSG00000109103_33 (sequence is synthesized)
ctagccagccttggcagagcggaggccagaatgaggaccctcaactccagagtgggagagagagtgttcaggaggtggccttgtcctctacccttctctgccctgcccttccctggcccc

SEQ ID NO: 170972 - DNA, 120 bp, Artificial Sequence
  ENSG00000109103_34 (sequence is synthesized)
cagagaccagtaggatggcactccttatcccctgttagatccccatggcggagttatgtctcttccacactgggggtgtaccccaagggcagggactgaggtccctctttccagagggca

SEQ ID NO: 170973 - DNA, 120 bp, Artificial Sequence
  ENSG00000109103_35 (sequence is synthesized)
gtgatcccagggatgagaagatggtagctactctggggtcccacacaagctgacctggcagcaggggctttgcggccccttccttgctcagctgcctgtttcccctagactacctctgct

SEQ ID NO: 170974 - DNA, 120 bp, Artificial Sequence
  ENSG00000109103_36 (sequence is synthesized)
tcgacttccactttggcttctgcatccccagcagcaagaacacctgcgagcacatttacgacttcccccctctctccgaggagctgagtgcgcgggcagggtcttctgggagtggggaag

SEQ ID NO: 170975 - DNA, 120 bp, Artificial Sequence
  ENSG00000109103_37 (sequence is synthesized)
tgggggcgtctagagactgagctgcgggagggagagggacttgtgggtctgatcccatttctccccaccctggggctcttctgtgtctgccaccattcccatatcatccgtagagaaaga

SEQ ID NO: 170976 - DNA, 120 bp, Artificial Sequence
  ENSG00000109103_38 (sequence is synthesized)
gtacgtgcggcagcagctgcaaccatagccctgtagctgtggagtctccagagcgctttgaggcccgtccctgcactaatgaagagaggggctgagtgcagcctgtcctcagcccccacg

SEQ ID NO: 170977 - DNA, 120 bp, Artificial Sequence
  ENSG00000109103_39 (sequence is synthesized)
ctggaggctaggtggaggctgagttacttgggaggcattcagactcttcatgtctccccaaccattaataccctcaccctgatcctccaggaagacttgggccattttcttccccgggaa

SEQ ID NO: 170978 - DNA, 120 bp, Artificial Sequence
  ENSG00000109107_0 (sequence is synthesized)
atttaccagagggagccagggctgcagcctcatctgtttgcggatcagaacccgagctgtgcttgtggctgcggctgctaactggctgcgcacagggagctgtcaccatgcctcactcgt

SEQ ID NO: 170979 - DNA, 120 bp, Artificial Sequence
  ENSG00000109107_1 (sequence is synthesized)
acccagccctttctgctgagcagaagaaggagttgtctgacattgccctgcggattgtagccccgggcaaaggcattctggctgcggatgagtctgtaggcagcatggccaagcggctga

SEQ ID NO: 170980 - DNA, 120 bp, Artificial Sequence
  ENSG00000109107_2 (sequence is synthesized)
gccaaattggggtggaaaacacagaggagaaccgccggctgtaccgccaggtcctgttcagtgctgatgaccgtgtgaaaaagtgcattggaggcgtcattttcttccatgagaccctct

SEQ ID NO: 170981 - DNA, 120 bp, Artificial Sequence
  ENSG00000109107_3 (sequence is synthesized)
accagaaagatgataatggtgttcccttcgtccgaaccatccaggataagggcatcgtcgtgggcatcaaggttgacaagggtgtggtgcctctagctgggactgatggagaaaccacca

SEQ ID NO: 170982 - DNA, 120 bp, Artificial Sequence
  ENSG00000109107_4 (sequence is synthesized)
ctcaagggctggatgggctctcagaacgctgtgcccaatacaagaaggatggtgctgactttgccaagtggcgctgtgtgctgaaaatcagtgagcgtacaccctctgcacttgccattc

SEQ ID NO: 170983 - DNA, 120 bp, Artificial Sequence
  ENSG00000109107_5 (sequence is synthesized)
tggagaacgccaacgtgctggcccgttatgccagtatctgccagcagaatggcattgtgcctattgtggaacctgaaatattgcctgatggagaccacgacctcaaacgttgtcagtatg

SEQ ID NO: 170984 - DNA, 120 bp, Artificial Sequence
  ENSG00000109107_6 (sequence is synthesized)
atgtatacctggaggggaccctgctcaagcccaacatggtgaccccgggccatgcctgtcccatcaagtataccccagaggagattgccatggcaactgtcactgccctgcgtcgcactg

SEQ ID NO: 170985 - DNA, 120 bp, Artificial Sequence
  ENSG00000109107_7 (sequence is synthesized)
tgcccccagctgtcccaggagtgaccttcctgtctgggggtcagagcgaagaagaggcatcattcaacctcaatgccatcaaccgctgcccccttccccgaccctgggcgcttaccttct

SEQ ID NO: 170986 - DNA, 120 bp, Artificial Sequence
  ENSG00000109107_8 (sequence is synthesized)
cctatgggcgtgccctgcaagcctctgcactcaatgcctggcgagggcaacgggacaatgctggggctgccactgaggagttcatcaagcgggctgaggtgaatgggcttgcagcccagg

SEQ ID NO: 170987 - DNA, 120 bp, Artificial Sequence
  ENSG00000109107_9 (sequence is synthesized)
gcaagtatgaaggcagtggagaagatggtggagcagcagcacagtcactctacattgccaaccatgcctactgagtatccactccataccacagcccttggcccagccatctgcacccac

SEQ ID NO: 170988 - DNA, 120 bp, Artificial Sequence
  ENSG00000109107_10 (sequence is synthesized)
ttttgcttgtagtcatggccagggccaaatagctatgcagagcagagatgccttcacctggcaccaacttgtcttcctttctctcttcccttcccctctctcattgctgcacctgggacc

SEQ ID NO: 170989 - DNA, 120 bp, Artificial Sequence
  ENSG00000109107_11 (sequence is synthesized)
ataggatgggaggatagggagcccctcatgactgagggcagaagaaattgctagaagtcagaacaggatggctgggtctccccctacctcttccagctcccacaattttcccatgatgag

SEQ ID NO: 170990 - DNA, 120 bp, Artificial Sequence
  ENSG00000109107_12 (sequence is synthesized)
gtagcttctccctgggctctccttcttgcctgccctgtctcctgggatcagagggtagtacagaagccctgactcatgccttgagtacataccatacagcaaataaatggtagcaaaaca

SEQ ID NO: 170991 - DNA, 120 bp, Artificial Sequence
  ENSG00000109107_13 (sequence is synthesized)
atgcaggccacgcccccggaggagtcacgtagctctgcgacatccgcagcctcatttaccagagggagccagggctgcagcctcatctgtttgcggatcagaacccgagctgtgcttgtg

SEQ ID NO: 170992 - DNA, 120 bp, Artificial Sequence
  ENSG00000109107_14 (sequence is synthesized)
agcctgcatcaccactagctcccctcagtctcatctctctctcaggctctctactcctttcagccttggtcctctgccctcccgtctgggtgtctgagttgtggggaattgaagtgcttc

SEQ ID NO: 170993 - DNA, 120 bp, Artificial Sequence
  ENSG00000109107_15 (sequence is synthesized)
ctattgctatcctcctgccaaacaggtgaagtgcttcctgggcacagagatgacccggaggtgtcactagccctagtctccacacactaacacagctgacccgctgggccctctttccta

SEQ ID NO: 170994 - DNA, 120 bp, Artificial Sequence
  ENSG00000109107_16 (sequence is synthesized)
catcactgcagccccactggggccaacctctggtactgggtgggaataggcaataggcataggcaggcaggtttggagtacagaaaaggagaagctgcaggagcctgtgactggtatttg

SEQ ID NO: 170995 - DNA, 120 bp, Artificial Sequence
  ENSG00000109107_17 (sequence is synthesized)
ggaaaggccaggacttttgcctacctcaacaagggaccaagttcagtgaaagaagggttggcatccttgattgggcagcagatttatcagaagagctgtggcttcagggctgctcacctc

SEQ ID NO: 170996 - DNA, 120 bp, Artificial Sequence
  ENSG00000109107_18 (sequence is synthesized)
cccacccccaccctgcatctttccccagggctgggaaggatgcctaccagggacaaaaggagatgtgggaactggagccctaagcttgctagctgtcagaaggactggtgccacttgatg

SEQ ID NO: 170997 - DNA, 120 bp, Artificial Sequence
  ENSG00000109107_19 (sequence is synthesized)
cccaggactcatgccaaggactgctgccctgttcccagccccttgcttgatggggaggccatttggcccatctggccaggagaggcagcagagggtgaggtctggcttttttatcttgtc

SEQ ID NO: 170998 - DNA, 120 bp, Artificial Sequence
  ENSG00000109107_20 (sequence is synthesized)
atttaccagagggagccagggctgcagcctcatctgtttgcggatcagaacccgagctgtgcttgtggctgcggctgctaactggctgcgcacagctgagagaagagggtggcaataagt

SEQ ID NO: 170999 - DNA, 120 bp, Artificial Sequence
  ENSG00000109107_21 (sequence is synthesized)
atggaagctgggtgtgaaaataagcttgtgtaggaggggtagcaaggagaatcctgcctggattcaaccctctgcttgtacttcctctacaggttgacaagggtgtggtgcctctagctg

SEQ ID NO: 171000 - DNA, 120 bp, Artificial Sequence
  ENSG00000109111_0 (sequence is synthesized)
gttgacgcagcagcggcggcggtggcggcggaggggccgtgcggtgggtccgtactatcttttcccagtctcggttcgacgactccattttcctcggtgggggcttagcgcactggagga

SEQ ID NO: 171001 - DNA, 120 bp, Artificial Sequence
  ENSG00000109111_1 (sequence is synthesized)
gcggcgggcttcagacagttatcttcaggcagagtgagaagctgcagcaatgtctgattttgtggaaagcgaggctgaggagtcagaggaagaatacaatgatgaaggcgaggtggtacc

SEQ ID NO: 171002 - DNA, 120 bp, Artificial Sequence
  ENSG00000109111_2 (sequence is synthesized)
ccgagtcaccaagaaatttgtggaagaggaggatgatgatgaggaggaggaggaggagaacctagatgatcaggatgagcaaggcaacttgaaaggctttatcaatgacgatgatgatga

SEQ ID NO: 171003 - DNA, 120 bp, Artificial Sequence
  ENSG00000109111_3 (sequence is synthesized)
agatgaaggggaggaggatgagggcagtgactctggtgattcagaagatgatgttggccacaagaagagaaaacgcacctcttttgatgaccgcctggaggatgatgattttgacctcat

SEQ ID NO: 171004 - DNA, 120 bp, Artificial Sequence
  ENSG00000109111_4 (sequence is synthesized)
tgaggagaatttgggtgtcaaagtcaaaagaggacaaaagtaccggcgtgtcaaaaaaatgtcagatgacgaggacgatgacgaggaggaatatggcaaggaggaacatgaaaaagaagc

SEQ ID NO: 171005 - DNA, 120 bp, Artificial Sequence
  ENSG00000109111_5 (sequence is synthesized)
tattgcggaagaaatcttccaggatggggaaggggaagaagggcaggaggccatggaggcccccatggctcctccagaggaggaggaagaagatgatgaggagtcagatattgacgactt

SEQ ID NO: 171006 - DNA, 120 bp, Artificial Sequence
  ENSG00000109111_6 (sequence is synthesized)
cattgtggatgatgatggacagcctctgaaaaaacctaagtggcggaaaaagcttcctggatacacagacgcggccctgcaagaagcccaggaaatcttcggtgtggactttgactatga

SEQ ID NO: 171007 - DNA, 120 bp, Artificial Sequence
  ENSG00000109111_7 (sequence is synthesized)
tgaatttgagaaatacaatgagtatgatgaagaactggaggaagagtatgagtatgaggatgatgaggctgagggtgaaatccgagtgcgccccaagaagaccaccaagaagcgtgtgag

SEQ ID NO: 171008 - DNA, 120 bp, Artificial Sequence
  ENSG00000109111_8 (sequence is synthesized)
ccgtaggagcatctttgaaatgtatgagcccagtgagctagaaagcagccacctcacagatcaggacaatgaaatccgagccactgacctgcctgagaggttccagctccgctccatccc

SEQ ID NO: 171009 - DNA, 120 bp, Artificial Sequence
  ENSG00000109111_9 (sequence is synthesized)
agtcaagggggctgaagatgatgaactagaagaagaagctgactggatctacaggaatgcttttgccacaccaaccatttctctccaggaaagctgtgattacctagaccgagggcagcc

SEQ ID NO: 171010 - DNA, 120 bp, Artificial Sequence
  ENSG00000109111_10 (sequence is synthesized)
agccagcagcttcagtcggaaagggcccagcacaattcagaagatcaaagaggccctgggcttcatgcgaaatcagcattttgaggtgccttttattgccttctatcgaaaggagtatgt

SEQ ID NO: 171011 - DNA, 120 bp, Artificial Sequence
  ENSG00000109111_11 (sequence is synthesized)
ggagcctgagttgcacatcaatgacctatggagagtctggcagtgggatgaaaagtggacccagctgcggatccgtaaagagaacctaacacggctgtttgagaagatgcaggcttatca

SEQ ID NO: 171012 - DNA, 120 bp, Artificial Sequence
  ENSG00000109111_12 (sequence is synthesized)
gtatgaacagatctctgctgaccctgacaaacctcttgctgatggcatccgggctctggacaccactgacatggagaggctcaaggatgtccaatcaatggatgagctgaaagatgtcta

SEQ ID NO: 171013 - DNA, 120 bp, Artificial Sequence
  ENSG00000109111_13 (sequence is synthesized)
caaccattttcttctttattatggccgagacatccctaagatgcagaacgccgccaaagctagccgcaagaagctgaagcgtgtcagggaagagggagatgaagaaggtgaaggtgacga

SEQ ID NO: 171014 - DNA, 120 bp, Artificial Sequence
  ENSG00000109111_14 (sequence is synthesized)
ggcagaagatgaggagcagagggggcctgagctcaagcaagcctctcgccgagacatgtacaccatctgccagagtgctgggctagatggcctggccaaaaagtttgggcttactcccga

SEQ ID NO: 171015 - DNA, 120 bp, Artificial Sequence
  ENSG00000109111_15 (sequence is synthesized)
gcagtttggggagaacctgcgggatagctaccagcggcacgagacagagcagtttcccgcggagcccttggagctggccaaggattacgtttgcagccagttccctactccagaagctgt

SEQ ID NO: 171016 - DNA, 120 bp, Artificial Sequence
  ENSG00000109111_16 (sequence is synthesized)
gctagaaggcgcccgctacatggtagccctgcagattgcccgtgagccccttgtccggcaggtgctgaggcaaaccttccaagagagagccaagttaaatataacccccaccaagaaagg

SEQ ID NO: 171017 - DNA, 120 bp, Artificial Sequence
  ENSG00000109111_17 (sequence is synthesized)
tagaaaggatgtggatgaggcccactatgcctattccttcaagtatttaaagaacaagcctgttaaggaactgagagatgaccagtttctcaagatatgcctggctgaagacgaagggct

SEQ ID NO: 171018 - DNA, 120 bp, Artificial Sequence
  ENSG00000109111_18 (sequence is synthesized)
cctcaccactgacatcagcatagatttgaagggagtggaaggctatggcaacgaccagacatattttgaggagataaaacagttttactaccgagatgagttcagccaccaggtgcagga

SEQ ID NO: 171019 - DNA, 120 bp, Artificial Sequence
  ENSG00000109111_19 (sequence is synthesized)
gtggaaccggcagcgcaccatggccatcgaacgggctttacagcagttcctctatgtgcagatggccaaagaactcaagaacaagctgctggctgaagccaaggaatatgtcataaaggc

SEQ ID NO: 171020 - DNA, 120 bp, Artificial Sequence
  ENSG00000109111_20 (sequence is synthesized)
ctgtagtcgaaagctctacaattggttgagagtggcaccctaccgaccagatcagcaggtggaagaagatgacgactttatggacgagaaccaagggaagggcattcgagtcctcggcat

SEQ ID NO: 171021 - DNA, 120 bp, Artificial Sequence
  ENSG00000109111_21 (sequence is synthesized)
tgctttctcctctgccagagatcaccctgtgttctgcgccctggtcaatggtgaaggagaagtgacagacttccttcgactgccccattttaccaaacggcgaactgcatggagagagga

SEQ ID NO: 171022 - DNA, 120 bp, Artificial Sequence
  ENSG00000109111_22 (sequence is synthesized)
agagcgggaaaagaaggctcaagacattgaaacgctaaagaaatttctcctgaataagaagcctcatgtagtgacagttgcaggagagaacagggacgcccagatgttgattgaagatgt

SEQ ID NO: 171023 - DNA, 120 bp, Artificial Sequence
  ENSG00000109111_23 (sequence is synthesized)
gaagcgcattgtacatgagctggaccagggccagcagctgtcatctattggggtagagctggttgacaacgagttggccattctctatatgaacagcaagaagtcagaggcagagttccg

SEQ ID NO: 171024 - DNA, 120 bp, Artificial Sequence
  ENSG00000109111_24 (sequence is synthesized)
ggattatcctccagtgctgagacaggccgtctccctggcccggcgcatccaggaccctctgattgaatttgcccaggtgtgcagttccgatgaagacatcctgtgtctcaagtttcaccc

SEQ ID NO: 171025 - DNA, 120 bp, Artificial Sequence
  ENSG00000109111_25 (sequence is synthesized)
cttgcaggagcatgtggtgaaagaggagctgctcaacgccttgtactgtgaatttatcaaccgagtcaatgaggtcggggtcgatgtcaaccgtgccattgcccacccttacagccaggc

SEQ ID NO: 171026 - DNA, 120 bp, Artificial Sequence
  ENSG00000109111_26 (sequence is synthesized)
acctcctgaagatcctgaagcagaacaacacccggctcgagagccggacccagctggtcaccatgtgccacatgggtcccaaagtcttcatgaattgtgctggcttcctcaagatcgaca

SEQ ID NO: 171027 - DNA, 120 bp, Artificial Sequence
  ENSG00000109111_27 (sequence is synthesized)
cggcctccctgggggacagcactgactcatatattgaagtccttgatggttcccgtgtccaccctgagacttatgagtgggctaggaagatggcagtggatgccctggaatacgatgaat

SEQ ID NO: 171028 - DNA, 120 bp, Artificial Sequence
  ENSG00000109111_28 (sequence is synthesized)
cagccgaggatgccaatcctgcaggagcccttgaagaaatcttggaaaacccagagcgactgaaagacctggaccttgatgcctttgcagaagagctggagaggcagggctatggtgaca

SEQ ID NO: 171029 - DNA, 120 bp, Artificial Sequence
  ENSG00000109111_29 (sequence is synthesized)
aacacatcacactctatgacatccgggcagagctgagctgtcgatataaggacctccggacagcctaccgctctcccaacacagaggagatcttcaatatgttaaccaaagaaacaccag

SEQ ID NO: 171030 - DNA, 120 bp, Artificial Sequence
  ENSG00000109111_30 (sequence is synthesized)
agaccttctacattggaaagctcatcatctgcaatgtcactggcattgcccacaggcgtccccagggtgagagctatgaccaggcgatccgcaatgatgagacagggctgtggcagtgcc

SEQ ID NO: 171031 - DNA, 120 bp, Artificial Sequence
  ENSG00000109111_31 (sequence is synthesized)
ccttctgtcagcaggacaatttccctgaactaagcgaggtgtggaaccactttgacagcggttcgtgcccaggccaggccatcggtgtcaaaacacggctagacaatggtgtcaccggct

SEQ ID NO: 171032 - DNA, 120 bp, Artificial Sequence
  ENSG00000109111_32 (sequence is synthesized)
tcatccccaccaaattcctcagtgacaaagtggtaaagcggccagaagaacgagtgaaggtgggaatgactgttcactgccgcatcatgaagattgacattgagaagttcagtgcagacc

SEQ ID NO: 171033 - DNA, 120 bp, Artificial Sequence
  ENSG00000109111_33 (sequence is synthesized)
tgacctgccgcacctcagacctcatggacaggaacaatgagtggaagctgcccaaagacacctactatgactttgatgctgaagctgcagaccacaagcaggaggaggacatgaagcgga

SEQ ID NO: 171034 - DNA, 120 bp, Artificial Sequence
  ENSG00000109111_34 (sequence is synthesized)
agcagcagcggaccacatacatcaagagagtgatcgcacacccatccttccataatatcaatttcaagcaagcagaaaagatgatggagaccatggaccagggtgatgtgattatccgac

SEQ ID NO: 171035 - DNA, 120 bp, Artificial Sequence
  ENSG00000109111_35 (sequence is synthesized)
caagcagcaagggcgagaaccacctgacagtgacctggaaagtcagtgatggcatctaccagcatgtggatgtgcgggaggagggcaaggaaaatgccttcagcctgggagccactctgt

SEQ ID NO: 171036 - DNA, 120 bp, Artificial Sequence
  ENSG00000109111_36 (sequence is synthesized)
ggatcaacagtgaggaattcgaagatttggatgagattgttgctcgctatgtccagcccatggcatcctttgcccgggaccttctgaatcacaagtattatcaggactgcagcggtgggg

SEQ ID NO: 171037 - DNA, 120 bp, Artificial Sequence
  ENSG00000109111_37 (sequence is synthesized)
accgcaagaaattagaggagctgctcatcaaaactaagaaggagaagcccaccttcatcccttatttcatctgtgcctgcaaggaactgcccggcaagttcctactgggataccagcccc

SEQ ID NO: 171038 - DNA, 120 bp, Artificial Sequence
  ENSG00000109111_38 (sequence is synthesized)
ggggtaaacccaggatagaatatgtaacggtgactccagagggattccggtaccggggccagatcttcccaaccgtgaatggactgtttagatggtttaaggatcactaccaggatcctg

SEQ ID NO: 171039 - DNA, 120 bp, Artificial Sequence
  ENSG00000109111_39 (sequence is synthesized)
taccaggcatcacccctagcagcagcagcaggacccggacacctgcctctatcaatgctaccccagccaacatcaaccttgcagatctgacacgggctgtgaatgccctgcctcagaaca

SEQ ID NO: 171040 - DNA, 120 bp, Artificial Sequence
  ENSG00000109111_40 (sequence is synthesized)
tgacttcacagatgttcagtgccattgctgcggtgacaggccaaggacagaaccctaatgccaccccagcccagtgggcctccagccagtacggctatggcggcagtggaggcggcagca

SEQ ID NO: 171041 - DNA, 120 bp, Artificial Sequence
  ENSG00000109111_41 (sequence is synthesized)
gtgcttaccacgtattcccaacgccagcccagcagccagtggccacaccactaatgacccctagctactcctacacgaccccaagccagcccatcaccacccctcagtaccaccagctcc

SEQ ID NO: 171042 - DNA, 120 bp, Artificial Sequence
  ENSG00000109111_42 (sequence is synthesized)
aggccagcaccaccccacagtcggcccaggcccagccccagccctcttccagctcccggcaacggcagcagcagccaaagtccaacagccatgcagccatcgactggggaaaaatggcgg

SEQ ID NO: 171043 - DNA, 120 bp, Artificial Sequence
  ENSG00000109111_43 (sequence is synthesized)
agcagtggctgcaggaaaaggaggcagaacggcggaaacagaagcagcggctgacacctcggccctcccccagccccatgatcgaaagcacccccatgtccattgctggcgatgccaccc

SEQ ID NO: 171044 - DNA, 120 bp, Artificial Sequence
  ENSG00000109111_44 (sequence is synthesized)
cactcctggacgagatggatcggtagggggcctgctcctcggactctggttacctctgaggctgggaaaggcctggctgcccactgcctccctccctgcccctccttttatgtccataaa

SEQ ID NO: 171045 - DNA, 120 bp, Artificial Sequence
  ENSG00000109111_45 (sequence is synthesized)
gtggcgtgaagtgagacgttctctttggtggtcaacccggatgggtgacaggctggatggccttgtgaacttgagctcagtgtatgctaggcaacaattctcccgctccagaccctcacc

SEQ ID NO: 171046 - DNA, 120 bp, Artificial Sequence
  ENSG00000109111_46 (sequence is synthesized)
gaccacctgtcctgggaccaggctgggaggggagtgtggcagggaggaggaagaggaaggtgagaatgagtagaacagttttgtattctactccctacaagccattttgaacttctgccc

SEQ ID NO: 171047 - DNA, 120 bp, Artificial Sequence
  ENSG00000109111_47 (sequence is synthesized)
tcaccggactctgggctgtgactggggcaccaaactcagcacatgagtctcccctagctctcgtggggagagggatgctatttattcagtttggggcaggagggagaggagggaaagtat

SEQ ID NO: 171048 - DNA, 120 bp, Artificial Sequence
  ENSG00000109111_48 (sequence is synthesized)
ttctgaccctgatgccaacagccgggtggctgtccaagcaggattgcaggggacacagggaagcactgcccagcccctgcctggctgccctttcccccctgctgctgccaccgcttcctg

SEQ ID NO: 171049 - DNA, 120 bp, Artificial Sequence
  ENSG00000109111_49 (sequence is synthesized)
cctgtcatttgaataaacagtgtttctattgagctcttgccaaagcctctctctccaactctccagctctttgaggggtggctttcaaagcagtgtttggagctccaaggactcccctga

SEQ ID NO: 171050 - DNA, 120 bp, Artificial Sequence
  ENSG00000109111_50 (sequence is synthesized)
ctccctcttctgatccatcagaggcaaagattcatagactagaggcagcttctacatcagactgcctggggcacatccctgctctacttcccagccgggtgaccctgtgccagttcctgc

SEQ ID NO: 171051 - DNA, 120 bp, Artificial Sequence
  ENSG00000109111_51 (sequence is synthesized)
tgcctttcagctggctttcttacctgtaacatggagatagtgatacctgcctcatcagctgctgtgaggaccaaggcagcgtgtgcaagctccttggcccaacgcctggtacgtcgcaaa

SEQ ID NO: 171052 - DNA, 120 bp, Artificial Sequence
  ENSG00000109111_52 (sequence is synthesized)
tgttacccggtattattacacccactcactcacccacagcacagctgccccatccgcccatgcctgctggtcttctctggcaccctggagaaaggccacaagtaaatctggatttctcaa

SEQ ID NO: 171053 - DNA, 120 bp, Artificial Sequence
  ENSG00000109111_53 (sequence is synthesized)
ttgacctcttcctctccagaagttatcaactcagtctttggaggatcttttccacgggcacatagctcctcattcagtaatggaaatcagtggggaaataggcttcaagttctaaaactt

SEQ ID NO: 171054 - DNA, 120 bp, Artificial Sequence
  ENSG00000109111_54 (sequence is synthesized)
cattttccactcagctttgctgtaacactccacgaataacataggtccatgtgagtgcacgggcaagaccagcctgggaaggctttatgggggaaaatagctatcagcaaattttcaaag

SEQ ID NO: 171055 - DNA, 120 bp, Artificial Sequence
  ENSG00000109111_55 (sequence is synthesized)
gtttttttcccctttcttgatttatcttattatgagactcatataagttcatcatataaaattcaacatatagaaatattatgcagaaagtggaagtcccccataatcccaccccccaga

SEQ ID NO: 171056 - DNA, 120 bp, Artificial Sequence
  ENSG00000109111_56 (sequence is synthesized)
gataactaccataacaattttatgtatactacagtttttctaaattttatttttgctatgcatttactaactacccatttactacaaaaatgggatcatatggttcatagtgtttttgca

SEQ ID NO: 171057 - DNA, 120 bp, Artificial Sequence
  ENSG00000109111_57 (sequence is synthesized)
gtgcatttttcacgtatcaatatattgtggccatctttccatgtcagcacacatagatctacctcattcttgttaatggctgtatagtattccattgtatggaggtgccctaatttattt

SEQ ID NO: 171058 - DNA, 120 bp, Artificial Sequence
  ENSG00000109111_58 (sequence is synthesized)
gaatcagaaatgagggtgttctagatcattctctcaccaaacaagtacacaaagaaggaagacggacgggaaacacacaggtttagcatgaagtcccttctgagaaggctgacatagctg

SEQ ID NO: 171059 - DNA, 77 bp, Artificial Sequence
  ENSG00000109111_59 (sequence is synthesized)
cttctgagaaggctgacatggccaaggtgggcggttcatctgagatcaggggttcgagaccagcctggccaagatgg

SEQ ID NO: 171060 - DNA, 120 bp, Artificial Sequence
  ENSG00000109111_60 (sequence is synthesized)
cgagatcataccactgcactgcagcctgggtgacagaatgagacttcatctcagaaaaggaaaaaaaaaggctgacttagaaacttcttatggtcggccgggcgcagtagctcacgcctg

SEQ ID NO: 171061 - DNA, 120 bp, Artificial Sequence
  ENSG00000109111_61 (sequence is synthesized)
caaagggccacaagccattttaacttaggaaatgttttaaagaaaaggtaaggaactttattcagtcaagagcccctgacctatggaaaagatcggttcaatcatgtgaaacatttttcg

SEQ ID NO: 171062 - DNA, 120 bp, Artificial Sequence
  ENSG00000109111_62 (sequence is synthesized)
tgtgagagaaacataaaaagtaccagcttagcttataaattaagcatggaaaacacaagattttgttcagtaaacacaaacttgcttttttattattatggtttgttgtggccagataag

SEQ ID NO: 171063 - DNA, 120 bp, Artificial Sequence
  ENSG00000109111_63 (sequence is synthesized)
gaacaattctcttcaaatccccagctcttagcagagtatatgtacattgtaggcattcagttaggtttgtggaaagaatggcatctgaaacctcaaccgaaaattgaacattccccctcc

SEQ ID NO: 171064 - DNA, 120 bp, Artificial Sequence
  ENSG00000109111_64 (sequence is synthesized)
ctcctataccttcagttttgttttcttgagtttagttaatctcaagttcattggttatagtattgattgagctccgtaagggcaattttgaggagaattagagccacagaacttaaggca

SEQ ID NO: 171065 - DNA, 120 bp, Artificial Sequence
  ENSG00000109111_65 (sequence is synthesized)
ctccgttttgcagttacggttcagattgggagtcccagaaattaaatcggtctcaggaaaaaagatcccagagaagcagagaaaatgatttaaaccagaatggtttggatttcctcttga

SEQ ID NO: 171066 - DNA, 120 bp, Artificial Sequence
  ENSG00000109111_66 (sequence is synthesized)
ggaaaaaactggttgggatcccattttagttgggatactgccttttgggaattggacctcttgtagccaaattgggatataccctttctgcagtgatgactgaaaccttatgtctcttct

SEQ ID NO: 171067 - DNA, 120 bp, Artificial Sequence
  ENSG00000109111_67 (sequence is synthesized)
catgtacaccatctgccagagtgctgggctaggtaaaagctagctgctttgggatttaggcattctagcctgagcaaggggagttacccagaaaaaagactggtaggtaggaaaaagaaa

SEQ ID NO: 171068 - DNA, 120 bp, Artificial Sequence
  ENSG00000109111_68 (sequence is synthesized)
ggctatctgggtcaatcaccaatccaatcctgaactagcctattagctggtctttaaaaatactccctctccaaacccattcccgcccgacatgatggttcagcctctccctaatttcct

SEQ ID NO: 171069 - DNA, 120 bp, Artificial Sequence
  ENSG00000109111_69 (sequence is synthesized)
ggagggggggtgttgggggagtcaacctttgatggcaccttgggagcagtaactaggcaacttcatgggagaagagaagagtgccagggacagggtagatccagcaggcttcagctggtt

SEQ ID NO: 171070 - DNA, 120 bp, Artificial Sequence
  ENSG00000109111_70 (sequence is synthesized)
ttcctgcccagagtggaggcattagtgcagggcttggcctgtagtctacagacaagattccaccccaaactcccagtctgccattcagcagctggctggctttgggcaagtcactttaca

SEQ ID NO: 171071 - DNA, 120 bp, Artificial Sequence
  ENSG00000109111_71 (sequence is synthesized)
atgtctgattttgtggaaagcgaggctgaggagtcagaggaagaatacaatgatgaaggcgaggtggtaccccgagtcaccaagaaatttgtggaagaggaggatgatggtgaggaggcc

SEQ ID NO: 171072 - DNA, 120 bp, Artificial Sequence
  ENSG00000109111_72 (sequence is synthesized)
ccagcctcaagcttctccccactattgctaagctttggatagttggattcttgctgatgaaaagctcaggctcagcacagaagttatcacacatgagatgaggaggaggaggaggagaac

SEQ ID NO: 171073 - DNA, 120 bp, Artificial Sequence
  ENSG00000109111_73 (sequence is synthesized)
ctccaacagatatttcttgtccttaggcccatttgaaggggaagagggtaagagagggcataacctttccacgggcctttgggatctttggaacccgcaagccaccagaaagttgacatg

SEQ ID NO: 171074 - DNA, 120 bp, Artificial Sequence
  ENSG00000109111_74 (sequence is synthesized)
gtcaggaccagtgggcaccactgtgtgctcggtgctgacctgcaggcttcccactgctggtcagaagcacatactcagtggaagatcatctggaaagctttgctgagcccacccttgcgc

SEQ ID NO: 171075 - DNA, 120 bp, Artificial Sequence
  ENSG00000109111_75 (sequence is synthesized)
cggagcctagatttgcatcccagatctgggtgcctgttagagaaagtcttgtccaagtttcaaggatgggctttgaggctacaagagcatcactcggcatgttctttcccatctctcttg

SEQ ID NO: 171076 - DNA, 120 bp, Artificial Sequence
  ENSG00000109111_76 (sequence is synthesized)
atgtaacggtgactccagagggattccggtaccggggccagatcttcccaaccgtgaatggactgtttagatggtttaaggatcactaccaggatcctgtaccaggtgagttctgctctt

SEQ ID NO: 171077 - DNA, 120 bp, Artificial Sequence
  ENSG00000109111_77 (sequence is synthesized)
cctgacttcagggacgtggctggaggaacacctaggacctgactcagagtagtcccagcctaggggaccaggtgaggagtaggctgtcactgcagctgtcttactcctcctgcagcctcc

SEQ ID NO: 171078 - DNA, 120 bp, Artificial Sequence
  ENSG00000109113_0 (sequence is synthesized)
cagccttgaaggaaaagacgccagacttcagacgtctctctcctcggtgggcacctcattctaaccctggcacccccttcgcacgcttcccctccaccatcctcacccccgacctcccag

SEQ ID NO: 171079 - DNA, 120 bp, Artificial Sequence
  ENSG00000109113_1 (sequence is synthesized)
ggcagaagggcgagagggggcagactctatgagtcacctcccaggcctggagttgaggagggaagcgccgcctctccttgggccccttctctccccctttcccctccctgctggttcctg

SEQ ID NO: 171080 - DNA, 120 bp, Artificial Sequence
  ENSG00000109113_2 (sequence is synthesized)
gcatcgccagatgctgcgcagcagtctccgattccccatcaccaattcggctggcgtctccgagaccgcggactcccgtagggtccccgtggccccgagttgtagtcgggacaccccggc

SEQ ID NO: 171081 - DNA, 120 bp, Artificial Sequence
  ENSG00000109113_3 (sequence is synthesized)
cgcgggtgatcgtcgggtctccacgcgcccgggtcgctgacgcggatccggcctcggcgccttctcagggcgccctgcaaggccgcaggcaggatgaacattctggcacccgtgcggagg

SEQ ID NO: 171082 - DNA, 120 bp, Artificial Sequence
  ENSG00000109113_4 (sequence is synthesized)
gatcgcgtcctggcggagctgccccagtgcctgaggaaggaggccgctttgcacgggcacaaagacttccacccccgcgtcacctgcgcctgccaggagcaccggacaggcaccgtggga

SEQ ID NO: 171083 - DNA, 120 bp, Artificial Sequence
  ENSG00000109113_5 (sequence is synthesized)
tttaagatctccaaggtcattgtggtgggggacctgtcggtggggaagacttgcctcattaataggttctgcaaagacacctttgataagaattacaaggccaccattggagtggacttc

SEQ ID NO: 171084 - DNA, 120 bp, Artificial Sequence
  ENSG00000109113_6 (sequence is synthesized)
cttcagtttgcagctttgggataccgctgggcaggagaggttcaaatgcattgcatcaacctactatagaggagctcaagccatcatcattgtcttcaacctgaatgatgtggcatctct

SEQ ID NO: 171085 - DNA, 120 bp, Artificial Sequence
  ENSG00000109113_7 (sequence is synthesized)
ggaacataccaagcagtggctggccgatgccctgaaggagaatgacccttccagtgtgcttctcttccttgtaggttccaagaaggatctgagtacccctgctcagtatgcgctgatgga

SEQ ID NO: 171086 - DNA, 120 bp, Artificial Sequence
  ENSG00000109113_8 (sequence is synthesized)
gaaagacgccctccaggtggcccaggagatgaaggctgagtactgggcagtctcatctctcactggtgagaatgtccgagaattcttcttccgtgtggcagcactgacctttgaggccaa

SEQ ID NO: 171087 - DNA, 120 bp, Artificial Sequence
  ENSG00000109113_9 (sequence is synthesized)
tgtgctggctgagctggagaaatcgggggctcgacgcattggggatgttgtccgcatcaacagtgatgacagcaacctctacctaactgccagcaagaagaagcccacatgttgcccatg

SEQ ID NO: 171088 - DNA, 120 bp, Artificial Sequence
  ENSG00000109113_10 (sequence is synthesized)
agggctgaggagactgttcagagactgcccagccctagggcactgtgccaccctcattcctccagagcttgacccctggacatttgcactgactttatccagaccaaagagctgcctctt

SEQ ID NO: 171089 - DNA, 120 bp, Artificial Sequence
  ENSG00000109113_11 (sequence is synthesized)
ggtggcagtattcccacagaggggtagctgggatcatgctagtcacttcctgcccccaggcaccgtgccaaagactggatgccccctactcctcaggggactgtccagggcgcccagtgg

SEQ ID NO: 171090 - DNA, 120 bp, Artificial Sequence
  ENSG00000109113_12 (sequence is synthesized)
tagtgagggagagtgtctctgttcttttgctcagcctgctgggccctttgtgtttgaggatgcttaatgattccagcctctcactgtgccttatgcattaaaatttctttgttacgagca

SEQ ID NO: 171091 - DNA, 120 bp, Artificial Sequence
  ENSG00000109113_13 (sequence is synthesized)
acagcgttggcggagcccgagcggagtgggactcgaggccctgtagccggactgggcccctcgccccctcctccagcggcctgcgggccttggcagcgccgcccctgcccacactgaccc

SEQ ID NO: 171092 - DNA, 120 bp, Artificial Sequence
  ENSG00000109113_14 (sequence is synthesized)
cgtgtggcggggccgctccgcgcccccgggccgctctgtaatggtagggcagcctcagccccgagatgacgtcgggtctccgcggccccgggttattgtaggaaccatccggccccgcgt

SEQ ID NO: 171093 - DNA, 120 bp, Artificial Sequence
  ENSG00000109113_15 (sequence is synthesized)
aatcgtaggaactatccggccccgcgtaatcgtagggtctgcgcgggcccggcccccaccagacgggactccccgcccccaattggcggccgaagagtctcctcgccccagagtcatctt

SEQ ID NO: 171094 - DNA, 120 bp, Artificial Sequence
  ENSG00000109113_16 (sequence is synthesized)
cgggacgcccagggcccgggtgattttgggctcgccgcggccccgggtgattgtttcatctccgtggcccgcggtggtcgtagcgtctccgagaccgcggactcccgtagggtccccgtg

SEQ ID NO: 171095 - DNA, 120 bp, Artificial Sequence
  ENSG00000109113_17 (sequence is synthesized)
aacaaccacccccttggggcttcatttcagcccctaccagctatatggttatttccccctctttaagcccctgtatcccctccttttctcccaacaaggttgttgtgagttctatgagat

SEQ ID NO: 171096 - DNA, 120 bp, Artificial Sequence
  ENSG00000109113_18 (sequence is synthesized)
ggggttgggtagaagggtggcagctggatttctgagtagagactaaggtgtctgaaatgggaaggtggtcacctgctcagatccccacatagcatccatggagccccagggcaggggtct

SEQ ID NO: 171097 - DNA, 120 bp, Artificial Sequence
  ENSG00000109113_19 (sequence is synthesized)
ggctgtgcttacagggatgagtcttattgtgggttttaaaggtaatactgataacagttggcaccattaattaagcatttgctgtgtgccaggcagtgttgggtactatcatctttattg

SEQ ID NO: 171098 - DNA, 120 bp, Artificial Sequence
  ENSG00000109113_20 (sequence is synthesized)
aatggaaaagtccatcacttaagatatatcctgatttcagacattaaaatgcgggggggagggtgtcttagaatataggacatttatctcattttaaccttcacaacgacccagtaaaat

SEQ ID NO: 171099 - DNA, 120 bp, Artificial Sequence
  ENSG00000109113_21 (sequence is synthesized)
atatactaactttacttaaatgtttaaactgaggcttagagaggctaaataacgtgtccaaagtcacacagctaatcagtgtgagagctgggattcaaattcatgtctctctgcttctgg

SEQ ID NO: 171100 - DNA, 120 bp, Artificial Sequence
  ENSG00000109113_22 (sequence is synthesized)
ggagaaagacgccctccaggtggcccaggagatgaaggctgagtactgggcagtctcatctctcactggtgagtgagaatgtccgagaattcttcttccgtgtggcagcactgacctttg

SEQ ID NO: 171101 - DNA, 120 bp, Artificial Sequence
  ENSG00000109113_23 (sequence is synthesized)
gaatgatgtggcatctctggaacataccaagttccaagaaggatctgagtgtgagtgtgccagtggggggacttcccagcttggtgagggaatgcccccctctgactctggccttccctc

SEQ ID NO: 171102 - DNA, 120 bp, Artificial Sequence
  ENSG00000109113_24 (sequence is synthesized)
ctccttgggccccttctctccccctttcccctccctgctggttcctggcatcgccagatgctgcgcagcagtctccgattccccatcaccaattcggctggggtctgcgcgggcccggcc

SEQ ID NO: 171103 - DNA, 120 bp, Artificial Sequence
  ENSG00000109113_25 (sequence is synthesized)
tctcatctctcactggtgagttggaggctttagggctctgctgtgacactcttgcctggctctcctctcactgctacacctccagctgtgccctgtgtccccagacccagcactgcccct

SEQ ID NO: 171104 - DNA, 120 bp, Artificial Sequence
  ENSG00000109113_26 (sequence is synthesized)
gagaatgtccgagaattcttcttccgtgtggcagcactgacctttgaggccaatgtgctggctgagctggagaaatcgggggctcgacgcattggggatgttgtccgtgagtgcttgcct

SEQ ID NO: 171105 - DNA, 120 bp, Artificial Sequence
  ENSG00000109113_27 (sequence is synthesized)
ggttgagggtggcagagggcacagtgagcctccaatccctgcttcacatattttccacccttctttaggcatcaacagtgatgacagcaacctctacctaactgccagcaagaagaagcc

SEQ ID NO: 171106 - DNA, 120 bp, Artificial Sequence
  ENSG00000109113_28 (sequence is synthesized)
cagtttgcagctgtgagtgcttccacaccccttccagctatcccttctccccagcacccacaccccccaagatacatacctgtgcttcactcttccttccttccagttgggataccgctg

SEQ ID NO: 171107 - DNA, 120 bp, Artificial Sequence
  ENSG00000109118_0 (sequence is synthesized)
ggggcgcctgcgcgggtggctttgcgggcgctcgcggtaagtttgcgccaagtgcgcggcagccgggacgcagacggcggcggcggcgagaggcggagcccggggaccaccccccatcac

SEQ ID NO: 171108 - DNA, 120 bp, Artificial Sequence
  ENSG00000109118_1 (sequence is synthesized)
gaccaccccccatcaccctccccccagtcacctcacgtaccacaacctcacgtaacctctcaccccccctccgatacccccagccccgggatggcagcgcccgccagccttcccggccgg

SEQ ID NO: 171109 - DNA, 120 bp, Artificial Sequence
  ENSG00000109118_2 (sequence is synthesized)
accggctgtcgccagtgccggctttagcctgtgggactaggccccgccgaggcctgacccccggagccgggacccactgtgcagccagcagccgggccgggactgaggggccgctccccc

SEQ ID NO: 171110 - DNA, 120 bp, Artificial Sequence
  ENSG00000109118_3 (sequence is synthesized)
ctcgcggcccgtcgggaggacgctgtcgtcccggggactgggggccggggggtgggggggagccagggcgaggaagtcgggacccgtattgggaaaaaagcggggccggggtcaggagcg

SEQ ID NO: 171111 - DNA, 120 bp, Artificial Sequence
  ENSG00000109118_4 (sequence is synthesized)
ccccctcccctcacctcccccctccccccggggttgggggggccggagcagagagcacccagcccgggaggtggatgaatgtgggagaaaatggagaccaagacgatcgtgtacgacttg

SEQ ID NO: 171112 - DNA, 120 bp, Artificial Sequence
  ENSG00000109118_5 (sequence is synthesized)
gacacatcaggggggctgatggagcaaatccaagctctgctggctccccccaagacggacgaggcagaaaagcgcagtcggaagcctgagaaggagccccggagaagcggcagggccacc

SEQ ID NO: 171113 - DNA, 120 bp, Artificial Sequence
  ENSG00000109118_6 (sequence is synthesized)
aaccacgacagctgcgatagctgcaaggaaggtggagatctcctgtgctgcgaccactgcccggctgccttccacctccagtgctgtaaccctccactgagtgaagaaatgttgcctcct

SEQ ID NO: 171114 - DNA, 120 bp, Artificial Sequence
  ENSG00000109118_7 (sequence is synthesized)
ggagagtggatgtgtcaccggtgcactgttcgccgaaagaaacgagagcagaaaaaggagctgggtcatgtcaatggactggtggacaaatctggcaaacggactacatcccccagcagt

SEQ ID NO: 171115 - DNA, 120 bp, Artificial Sequence
  ENSG00000109118_8 (sequence is synthesized)
gacactgacttgttggacagatcggccagcaaaactgaactaaaggccattgcccatgcccggatcctggaaaggagagccagcaggcctggcacacccacatccagcgccagcacagag

SEQ ID NO: 171116 - DNA, 120 bp, Artificial Sequence
  ENSG00000109118_9 (sequence is synthesized)
actcccacctctgagcagaatgatgtcgacgaagacatcattgacgtggatgaggaaccagtagcagcggagccagactatgtgcagccccagctgaggcggccctttgagctgctgatt

SEQ ID NO: 171117 - DNA, 120 bp, Artificial Sequence
  ENSG00000109118_10 (sequence is synthesized)
gctgccgccatggagcggaaccccacccaatttcagttgcccaatgaactgacttgtaccactgcactaccaggttctagcaagaggagaagaaaggaggaaaccacagggaaaaatgtt

SEQ ID NO: 171118 - DNA, 120 bp, Artificial Sequence
  ENSG00000109118_11 (sequence is synthesized)
aagaagacacagcatgaattagatcacaatggtctcgttcccttacccgtcaaagtctgcttcacgtgtaacaggagttgccgtgtggctcctctcatccagtgtgactattgccctctc

SEQ ID NO: 171119 - DNA, 120 bp, Artificial Sequence
  ENSG00000109118_12 (sequence is synthesized)
ctgtttcacatggattgcctcgagccgccgctcactgccatgcccctgggcagatggatgtgtccgaatcacatcgaacatgtggtgctgaaccagaagaatatgacactgagcaatcgg

SEQ ID NO: 171120 - DNA, 120 bp, Artificial Sequence
  ENSG00000109118_13 (sequence is synthesized)
tgccaggtgtttgatcgtttccaggacaccgtttcgcagcatgtcgtcaaagtggacttcctgaaccgaatccacaagaagcacccccctaaccggcgtgtgctccagtcggtcaaaaga

SEQ ID NO: 171121 - DNA, 120 bp, Artificial Sequence
  ENSG00000109118_14 (sequence is synthesized)
agaagcttgaaggttcctgatgctataaaatctcagtaccagtttccaccccctctcattgcacccgcggccattcgggacggggagctgatctgcaatgggatccctgaggaatcacag

SEQ ID NO: 171122 - DNA, 120 bp, Artificial Sequence
  ENSG00000109118_15 (sequence is synthesized)
atgcaccttttgaactctgagcacttagccacccaagcagagcagcaagagtggctctgtagtgttgttgcgctccagtgcagcatattgaaacatttatctgctaagcagatgccttcg

SEQ ID NO: 171123 - DNA, 120 bp, Artificial Sequence
  ENSG00000109118_16 (sequence is synthesized)
cattgggactctgaacagacagagaaggctgatattaagcctgttattgtgactgacagctcagtcaccacctccctgcaaacagctgacaagacacctacaccttcccactaccccttg

SEQ ID NO: 171124 - DNA, 120 bp, Artificial Sequence
  ENSG00000109118_17 (sequence is synthesized)
tcctgcccctcagggattagcacccagaattccctgagctgctctccaccccaccagtccccagccctagaggacatcggctgcagttcttgtgcggaaaaatccaagaaaaccccttgt

SEQ ID NO: 171125 - DNA, 120 bp, Artificial Sequence
  ENSG00000109118_18 (sequence is synthesized)
actgattccacggacccccggcgacttccaggcgctaacaccccactaccaggcctctcacaccggcaaggctggccccggcccctcacgccaccagcggctgggggccttcagaaccac

SEQ ID NO: 171126 - DNA, 120 bp, Artificial Sequence
  ENSG00000109118_19 (sequence is synthesized)
accgtcggcatcattgtgaagacagagaatgccactggccccagctcttgcccccagaggagtttggttcctgtcccaagcctgcccccttccattcccagctcttgtgccagcatcgag

SEQ ID NO: 171127 - DNA, 120 bp, Artificial Sequence
  ENSG00000109118_20 (sequence is synthesized)
aacaccagcactttgcaaagaaagactgtccaatcacagataggacctccgttgacagattcaaggccactgggctcacccccaaacgccacccgggtgctcactcccccgcaagcagca

SEQ ID NO: 171128 - DNA, 120 bp, Artificial Sequence
  ENSG00000109118_21 (sequence is synthesized)
ggagatggtatcttggccacaacagccaaccaacgattcagctcaccagcgccatcgtcagatggcaaggtcagccccggcacgttatccataggaagcgctttaaccgtaccctctttc

SEQ ID NO: 171129 - DNA, 120 bp, Artificial Sequence
  ENSG00000109118_22 (sequence is synthesized)
ccagccaactctactgccatggtggacctcaccaactcacttcgagcatttatggatgtcaatggagaaatcgagataaatatgctggacgagaagctgatcaagtttctggccttgcag

SEQ ID NO: 171130 - DNA, 120 bp, Artificial Sequence
  ENSG00000109118_23 (sequence is synthesized)
agaatacatcagcttttcccctcccgggtccaaccttcaccgggcagtgtcgggacacatcagctggcttctggagggcaccacatagaagtgcaaagaaaggaggtacaggcccgagct

SEQ ID NO: 171131 - DNA, 120 bp, Artificial Sequence
  ENSG00000109118_24 (sequence is synthesized)
gtgttctaccccctcttagggttgggaggagctgtgaacatgtgctatcgaaccctctacatcgggacaggagctgacatggatgtgtgccttacaaactatggtcactgtaactacgtg

SEQ ID NO: 171132 - DNA, 120 bp, Artificial Sequence
  ENSG00000109118_25 (sequence is synthesized)
tccgggaaacatgcctgcatattctacgatgagaataccaaacattatgagctgttaaactacagtgagcatgggacaacggtggacaatgtgctgtattcatgtgacttctcggagaag

SEQ ID NO: 171133 - DNA, 120 bp, Artificial Sequence
  ENSG00000109118_26 (sequence is synthesized)
accccgccaacccccccaagcagtattgttgccaaagtgcagagtgtcatcaggcgccgccggcaccagaaacaggacgaagagccaagtgaggaggcagccatgatgagttcccaggcc

SEQ ID NO: 171134 - DNA, 120 bp, Artificial Sequence
  ENSG00000109118_27 (sequence is synthesized)
caggggccgcagcggagaccctgcaattgcaaagccagcagctcgagcttgattgggggcagtggggccggctgggagggcacagccttactgcaccatggcagctacatcaagctgggc

SEQ ID NO: 171135 - DNA, 120 bp, Artificial Sequence
  ENSG00000109118_28 (sequence is synthesized)
tgcctgcagtttgtcttcagcatcactgagtttgcgaccaaacagcccaaaggcgatgccagcctgctgcaggatggggtcttggccgagaagctctctctcaagccccaccagggccct

SEQ ID NO: 171136 - DNA, 120 bp, Artificial Sequence
  ENSG00000109118_29 (sequence is synthesized)
gtgctgcgctccaactctgttccttaggactggcggctaccccgccactggcctgtacacccacccaagactcctgcaatgcaaaaatgtacacaaaccaagcccgggtgttttctatac

SEQ ID NO: 171137 - DNA, 120 bp, Artificial Sequence
  ENSG00000109118_30 (sequence is synthesized)
tctaccagaaacccttcaactacaatctttgcatgaaatgaagaaaaccttttgactgttttttaaaaatcctttttcttttctcaagttctagggggcatttgcacatatatttgtact

SEQ ID NO: 171138 - DNA, 120 bp, Artificial Sequence
  ENSG00000109118_31 (sequence is synthesized)
caacatttcatgggaaagcggcagacctgagctgaggaacagcgtgggcagggagggaaagacccagggtctggacacttcctccaacacaaaacccttccccacccacctcctgctccc

SEQ ID NO: 171139 - DNA, 120 bp, Artificial Sequence
  ENSG00000109118_32 (sequence is synthesized)
tccccctcgcccaccattgtaaaataatcagaaacttgttctattttgtggcagtgacaatagttttatattaaaagaaaaaatacagttttcatacagcaaaatctatacaatatcatt

SEQ ID NO: 171140 - DNA, 120 bp, Artificial Sequence
  ENSG00000109118_33 (sequence is synthesized)
gttttatttaatataaagatcgctacccaccttccttccatggttcccaccctccacgttattttccctttctgcagcggttgcactacaggtagctactgtgtattatggacaaatgag

SEQ ID NO: 171141 - DNA, 120 bp, Artificial Sequence
  ENSG00000109118_34 (sequence is synthesized)
aaatgaattctttttctggctgtccatctattttatttcaaataaggaaaagtgtatttggattttgtgtaaatacatctagtgatgacattttttcaatgtttttaaaaaccgtgtaca

SEQ ID NO: 171142 - DNA, 120 bp, Artificial Sequence
  ENSG00000109118_35 (sequence is synthesized)
gtactacatgtggtagagcgttttctcaaattgtctattgtagcaaaaatgtttttgtcgtaaacctgttttgtctcctttttttgttctcttgccacttctctcctcttcctcctgccc

SEQ ID NO: 171143 - DNA, 120 bp, Artificial Sequence
  ENSG00000109118_36 (sequence is synthesized)
ctggttccctcctctcctcccacccccacaaccagtaccaatgtacatagtaattgtaatgttttagactttacagaaactttcctgtattctgtatataaaaaacaaaaatacttcaaa

SEQ ID NO: 171144 - DNA, 120 bp, Artificial Sequence
  ENSG00000109118_37 (sequence is synthesized)
attaagattgtggtttatgtgtgtaacagtttcagcctttaagaaagaaagtaaacaagcagacattatttttcaaatacgtgcataagggttcatatttaaaagcaagccaaagccagg

SEQ ID NO: 171145 - DNA, 120 bp, Artificial Sequence
  ENSG00000109118_38 (sequence is synthesized)
tcaaccacctaaccacagctgtagttaaatttctccataaaccaggctgtcttccagcctctccaccttccaagatcctttcctgtgcatccctaattagaaacgagagcagaaaaagga

SEQ ID NO: 171146 - DNA, 120 bp, Artificial Sequence
  ENSG00000109118_39 (sequence is synthesized)
gacctcaccaactcacttcgagcatttatggatgtcaatggaggcagatcacctggatttgcagaataaaactaagatcctcactcccaaaggagggacctcatctgtgggaaaccccca

SEQ ID NO: 171147 - DNA, 120 bp, Artificial Sequence
  ENSG00000109118_40 (sequence is synthesized)
gcgaatggtcaccttgcctccatggagaatctgagcttccagtatctcaaacctccttgtgtgcttttcatgggcttaataaagcaccatggtttttttctgaagagagcaggaacaaga

SEQ ID NO: 171148 - DNA, 120 bp, Artificial Sequence
  ENSG00000109118_41 (sequence is synthesized)
agctcaccagcgccatcgtcaggtgagtgctgctcagccttgggttgatttggaataattttatgctctttctggcaaataagattctaaaagcacttatatccctgtgaatacttcaga

SEQ ID NO: 171149 - DNA, 120 bp, Artificial Sequence
  ENSG00000109118_42 (sequence is synthesized)
ggactttggcctttgtattgtttgtcttactctcatttccgtaatagaagaggaagcacatgttaacttgtcccgtttataaatgggactgcttaggctctgaaagcttcagtgatttcc

SEQ ID NO: 171150 - DNA, 120 bp, Artificial Sequence
  ENSG00000109118_43 (sequence is synthesized)
ttaaaatgacctactgagtcagtggcaggattggaaccacagcccaggtctcctgactccatcccataccttccaggcctaggcctctgcctgttttgttctgtcaccttaaaagaaggc

SEQ ID NO: 171151 - DNA, 120 bp, Artificial Sequence
  ENSG00000109118_44 (sequence is synthesized)
tcaccggtgcactgttcgccgaaagccctggaatcaccccactcttcccatggtgactgtttggaatccagtagggcctaaaaatccaaacatgggctgctgaaatgggcagaagagaaa

SEQ ID NO: 171152 - DNA, 120 bp, Artificial Sequence
  ENSG00000109118_45 (sequence is synthesized)
agcccactccatctcgttgcaccggcaggcctccccacccccttcttgttggcccctttgtgcttcccccagcacgtccgggtaccgggctttgggcctctcccgagcgggtctttggag

SEQ ID NO: 171153 - DNA, 120 bp, Artificial Sequence
  ENSG00000109118_46 (sequence is synthesized)
tcccccactgtccatacaaggaagtggcaagaagggaaccgcgcaccctcttcccatccccctacccttgatcctccccatttggaagaagctgttctcgttgttgtgctgcaggaacgc

SEQ ID NO: 171154 - DNA, 120 bp, Artificial Sequence
  ENSG00000109118_47 (sequence is synthesized)
cagcctggatgggaggaagaaggacaaaaggggggagaggggtgggtgacggagaaaccgcgccgggggggcgacggaccgcccgggagctccgagtgtgcacacacgccgtttgtatgt

SEQ ID NO: 171155 - DNA, 120 bp, Artificial Sequence
  ENSG00000109118_48 (sequence is synthesized)
gaggtgggggttgggacgagtgaagagaaccccatatgggattggaagtcgctggggagccgggacagagccggccggggacagccggcagtggcgggggaggaaggggaggagctccgg

SEQ ID NO: 171156 - DNA, 120 bp, Artificial Sequence
  ENSG00000109118_49 (sequence is synthesized)
gcccagtgccgcttgcctgcccgcgcgcccgctgccctcggggctcctgcccggccgggatctcctcggggttcaagtgattctcctgccttacgtgtcatgttgtcttactggtccacc

SEQ ID NO: 171157 - DNA, 120 bp, Artificial Sequence
  ENSG00000109118_50 (sequence is synthesized)
caaccacagctttctgatcagacttggggaagtctgctgtaactttctttcatatataagtccacttcgagacacagcaaagcagctaccagtacctttgggtatatgtagtgtactttc

SEQ ID NO: 171158 - DNA, 82 bp, Artificial Sequence
  ENSG00000109118_51 (sequence is synthesized)
agcagctaccagtacctttgggtatatgtagtgtactttctgcttacttgctttcaaatatttgaattagaagggcttcccg

SEQ ID NO: 171159 - DNA, 89 bp, Artificial Sequence
  ENSG00000109118_52 (sequence is synthesized)
ccctatctctacaaataattttaaacttacccagcttggaaggctaagatgggaggatcgcttgagtctgggaggtcaaggctgcagtg

SEQ ID NO: 171160 - DNA, 120 bp, Artificial Sequence
  ENSG00000109118_53 (sequence is synthesized)
agaatggcttcccaagagggaacttttcaagttcaagttgagaaatagaataacactaggccaaccttctggaaattttccccaagtggttaactctgtttcagatatgtctgagcattg

SEQ ID NO: 171161 - DNA, 120 bp, Artificial Sequence
  ENSG00000109118_54 (sequence is synthesized)
gccattaagagccttgctgcttcaaagtgtggttcgcagaccagcagcatcagcagcccctgagagcttgttagaaatgcagagctcaatgcattggttttttgcctatttttaaagaaa

SEQ ID NO: 171162 - DNA, 120 bp, Artificial Sequence
  ENSG00000109118_55 (sequence is synthesized)
acagcaaaagaaatgcagagctaaggcccctcctcagacctattgaatcagaatctgcatttcaacaagatctgtaggcgattcttatgcacattaaagtttgagaaacactggtccatg

SEQ ID NO: 171163 - DNA, 120 bp, Artificial Sequence
  ENSG00000109118_56 (sequence is synthesized)
tggtcctctgtaccctgtgttggaaatgctgtgggtggggagagaaagccttaccctgccgcagctcagtgttggatgtgagtttggaaagatgagtcatccagcgggattttctccagg

SEQ ID NO: 171164 - DNA, 120 bp, Artificial Sequence
  ENSG00000109118_57 (sequence is synthesized)
ccatgagccaaaggtccagattttgttggtttatgtttggatcacaggatctgagtttctgaatgatcctattcctatgtttgtcttgtagtgcaaagaaaggaggtacaggcccgagct

SEQ ID NO: 171165 - DNA, 120 bp, Artificial Sequence
  ENSG00000109118_58 (sequence is synthesized)
gtgttctaccccctcttagggttgggaggagctgtgaacatgtgctatcgaaccctctacatcgggacaggtgagccagccaggaagctgggagagacactgaatctgttcagccctaaa

SEQ ID NO: 171166 - DNA, 120 bp, Artificial Sequence
  ENSG00000109118_59 (sequence is synthesized)
gactgacacccttacccacagaagttagaaaggggtgagggaagccctttccagagttgactgctttaaatcagtggatagctagacaagagaaactaagaatagagacaatcagccagt

SEQ ID NO: 171167 - DNA, 80 bp, Artificial Sequence
  ENSG00000109118_60 (sequence is synthesized)
taagaatagagacaatcagccagacaaggcaggaggaacacttgagcccaggacttcgagaccagcctgggcaacatggt

SEQ ID NO: 171168 - DNA, 76 bp, Artificial Sequence
  ENSG00000109118_61 (sequence is synthesized)
gctgggaggtccaggcagtgatcctttttgtgcctctgcactccagcccaggcaacagagtgagaccctgtctcaa

SEQ ID NO: 171169 - DNA, 120 bp, Artificial Sequence
  ENSG00000109118_62 (sequence is synthesized)
agagtgagaccctgtctcaaaaataaaagagacaatcagttccttgtcttcccttgttcaggcccttttgctttgtctttgcccagtgttgcaacagcagagatgaaagtcagctctgac

SEQ ID NO: 171170 - DNA, 120 bp, Artificial Sequence
  ENSG00000109118_63 (sequence is synthesized)
gtcagctctgactactgcccagggaggcactttaaacactgcagggaagaacctaaggagaaggcagatgctttgtccctggtggtctttgaaagagtgatagactcacacatacccaat

SEQ ID NO: 171171 - DNA, 120 bp, Artificial Sequence
  ENSG00000109118_64 (sequence is synthesized)
cttcagttagccctgtatctgttttttgttttgttttgttttccctaaaagtcctagagaccgatagctctgtatctggtacagaaggacagacagattagcccttaccctagaaacttc

SEQ ID NO: 171172 - DNA, 120 bp, Artificial Sequence
  ENSG00000109118_65 (sequence is synthesized)
cctttctttaaggtgataagattttctaggctctgcaccccgatgttgtattttcatagaaatatcccatcctcttcagtagctcactcttcccttctgggtagcagccacatgttctaa

SEQ ID NO: 171173 - DNA, 120 bp, Artificial Sequence
  ENSG00000109118_66 (sequence is synthesized)
agcagatcagctggcagggacagctgttctttatcaggagcttggaaaagacaacagtttttgttcaaaaataaaaggggagggccctgagctactcacccttgaagtctctgctagtgc

SEQ ID NO: 171174 - DNA, 120 bp, Artificial Sequence
  ENSG00000109118_67 (sequence is synthesized)
caacccagaagctaactctctccctgtcttacctccccgacacatgcaccttacaatctgttctctgccttccttttcctctactcctgccaccttgcaggagctgacatggatgtgtgc

SEQ ID NO: 171175 - DNA, 120 bp, Artificial Sequence
  ENSG00000109118_68 (sequence is synthesized)
cttacaaactatggtcactgtaactacgtgtccgggaaacatgcctgcatattctacgatgaggtgagggccggagatgcggtgggagggagctttcccaacctgaggcctctcccaggc

SEQ ID NO: 171176 - DNA, 120 bp, Artificial Sequence
  ENSG00000109118_69 (sequence is synthesized)
agtaggtttttgttcagtgccctgaggggagggaagagggattgggggtcctctctttttcttccctccctgtcattcctggaggaggagagtcttgatgtgaaatagcatcctacctgg

SEQ ID NO: 171177 - DNA, 120 bp, Artificial Sequence
  ENSG00000109118_70 (sequence is synthesized)
gaagctacctgcttcccaggagcagggctaccatttttcctgaggttagtcacaggcacaacagagggagcctaccctaaagcaagggaggggaccagcatagaaggaagccaagccttg

SEQ ID NO: 171178 - DNA, 120 bp, Artificial Sequence
  ENSG00000109118_71 (sequence is synthesized)
tgggtgtgtccctgtgaatttcattatcatcacgggccagtgagtatcataccaagaggagcggtgctgagagggcagagtgaaggagtgggagagtagggagtgtgggacaccagaagg

SEQ ID NO: 171179 - DNA, 120 bp, Artificial Sequence
  ENSG00000109118_72 (sequence is synthesized)
aaagcttccctgaggaggtgtctccagcccccttctgaaaggacaggggccatgactggggaggcaagtaaggactctctaggtagagtagcacggccttctccatatgtcctctctccc

SEQ ID NO: 171180 - DNA, 120 bp, Artificial Sequence
  ENSG00000109118_73 (sequence is synthesized)
gtcagggtggttctgacttgctgcccatggtctgtctcttgccttcccagtcctattggccaagctctacttcctcgtgggcccagggcaggccacagagaagcaagtgctgagtacccc

SEQ ID NO: 171181 - DNA, 120 bp, Artificial Sequence
  ENSG00000109118_74 (sequence is synthesized)
catgtgtgtacacacctgtggggacttcagactccaccaaccctttctgagcatccttcctccctagtcatgcagcagttggaatggggagatgcaggagcccaaccttggcaaacagcc

SEQ ID NO: 171182 - DNA, 120 bp, Artificial Sequence
  ENSG00000109118_75 (sequence is synthesized)
agttctgagggttgcctgggctctgctgggtggtttttctgtttcacatgatgttggctgggactgcagtcatttggaggcttcactgaactgtaaccctccactgagtgaagaaatgtt

SEQ ID NO: 171183 - DNA, 120 bp, Artificial Sequence
  ENSG00000109118_76 (sequence is synthesized)
cagagcctatgggttgagaatcaagaagggaacatcaccttgggtccgaaatccagacctgtctcagcagtgggggattggacggtgggtttccctcaggcgacgtaagtaacagtcttc

SEQ ID NO: 171184 - DNA, 120 bp, Artificial Sequence
  ENSG00000109118_77 (sequence is synthesized)
ctgctccgtccccagatggcaaggtcagccccggcacgttatccataggaagcgctttaaccgtaccctctttcccagccaactctactgccatggtggacctcaccaactcacttcgag

SEQ ID NO: 171185 - DNA, 120 bp, Artificial Sequence
  ENSG00000109118_78 (sequence is synthesized)
agcactgatatgctagagctaagacggcctagccctgaaggcattcttgtcccttcttcttgtctcttccagccctggaatcaccccactcttcccatggtgactgtttggaatccagta

SEQ ID NO: 171186 - DNA, 120 bp, Artificial Sequence
  ENSG00000109118_79 (sequence is synthesized)
gggcctaaaaatccaaacatgggctgctgaaatgggcagaagaggtgtgttaacttactgagccatgtttagtcactagtgacaggagtagtcttaccttcttgttgtcctcctaataag

SEQ ID NO: 171187 - DNA, 120 bp, Artificial Sequence
  ENSG00000109118_80 (sequence is synthesized)
tggccttatccatggctgaaaaacaaaggctgcttctccagcttgatggaaaatggagttttctctcaccccagggcaaataagtcactggtatccagagacttggcatactgacggaga

SEQ ID NO: 171188 - DNA, 120 bp, Artificial Sequence
  ENSG00000109118_81 (sequence is synthesized)
ggattttgaacgcatttgtaccccaagttgcctaatctttctttagcttcccttccttcagctttgataattcagtactggcttcaagaacatggtttattattttctactttgagaact

SEQ ID NO: 171189 - DNA, 120 bp, Artificial Sequence
  ENSG00000109118_82 (sequence is synthesized)
cttgtgggtaacaagagctaaattctcccttattaaaaaaggaagtaggtgtgcttgcacccaaattatgattgacccaaccctcaaattacaggctatggattagaatttgtctgtgca

SEQ ID NO: 171190 - DNA, 120 bp, Artificial Sequence
  ENSG00000109118_83 (sequence is synthesized)
ttgtaatccacccccctgtgctccccacactaattatacaccaagcaactttcctatgttgtgacctcacctctatttgcctggtccccgaacatgatgtcacaatgaatgatgacttcc

SEQ ID NO: 171191 - DNA, 120 bp, Artificial Sequence
  ENSG00000109118_84 (sequence is synthesized)
attaggttagagcagggcctgttagaggcacctgccagccaggagccctctcaaacttgccactcaaaaaagctggacctgaaaaggtttaggggagctgaaggaaaaggggtaaagacg

SEQ ID NO: 171192 - DNA, 120 bp, Artificial Sequence
  ENSG00000109118_85 (sequence is synthesized)
gtggagaaaaggaaatattatgttagtgcccatcgtgtgccaggtgttttaattacgttatcccattatctatccatccagccatagatggataccgaatgctggccgtaggtttccatt

SEQ ID NO: 171193 - DNA, 120 bp, Artificial Sequence
  ENSG00000109118_86 (sequence is synthesized)
ttagaaaggaagaaacggaggctcaaaaatgtagattaactttcccaaggactcaaaggtattgacagaaccaatgtttgaaccaaattctctcattccaaacctctgttacctcttcat

SEQ ID NO: 171194 - DNA, 120 bp, Artificial Sequence
  ENSG00000109118_87 (sequence is synthesized)
cagttttctagaaggagagctacttgttggggattacagtatgcccttttctaacatggcacttctcctgagatgcctctcttacctttcacatggacctctgcctaccagtgccaagtc

SEQ ID NO: 171195 - DNA, 120 bp, Artificial Sequence
  ENSG00000109118_88 (sequence is synthesized)
tgccttttccaccatcaccagcactactcccctttggcctcttgtatttacactgaagtggattgaaataatacatcctctggccttcatcagctcctgacattcaggccctatcatgat

SEQ ID NO: 171196 - DNA, 120 bp, Artificial Sequence
  ENSG00000109118_89 (sequence is synthesized)
tcgtagtggaagactaggtcctactccaactccaaattatccctttcgtatatatgaccctttttatctccctccaccatatccctgagaggaggaggagaaagatttttctgtctcatt

SEQ ID NO: 171197 - DNA, 120 bp, Artificial Sequence
  ENSG00000109118_90 (sequence is synthesized)
ttacagatgaagaaattcctgcccaccagcctgagtcaccacaaggtcagaggggatccgtggcagaaataggacaagatcacaggtctcctacctggagatcagtgttaaaccttcatt

SEQ ID NO: 171198 - DNA, 120 bp, Artificial Sequence
  ENSG00000109118_91 (sequence is synthesized)
tgaccactctatttggagtcctggaggaaaatgtactatcagatatccagtcctactgagtacacttaatctttttccatttccccactttctaagaagtgtcacttattttgagcaaag

SEQ ID NO: 171199 - DNA, 120 bp, Artificial Sequence
  ENSG00000109118_92 (sequence is synthesized)
ttccccactttctaagaagtgtcacttattttgagcaaagtttttatttttaaaaccattcaggaggtcagaaggctctatagtgatctcactgattttttttttttttttttttgagat

SEQ ID NO: 171200 - DNA, 120 bp, Artificial Sequence
  ENSG00000109118_93 (sequence is synthesized)
tgatttttactattggtctcactaaatttattctcactgtgttacctttttagccctttaccctatactttatagatgttgtatgtcatacaatgagttaatgttaatgatatatatttt

SEQ ID NO: 171201 - DNA, 120 bp, Artificial Sequence
  ENSG00000109118_94 (sequence is synthesized)
tcagctttagttcagttagagttgtgtcaactttaacagaccagtgttccaagtgaccaggtagatgagtctgtgatatgtgaaggccttttacagttttgattagtggtctaccaggac

SEQ ID NO: 171202 - DNA, 120 bp, Artificial Sequence
  ENSG00000109118_95 (sequence is synthesized)
cttagtttgcacacaaacaccaatggatgaacagtccctagcttcctgcggctgcgccttgacccctacaagctttctcaagcgcctgcgcgagacctcaggtcccgcccttttgtctca

SEQ ID NO: 171203 - DNA, 120 bp, Artificial Sequence
  ENSG00000109118_96 (sequence is synthesized)
gtgcgctggcgcagggcagaaaggtggggcttcggtcctccagacgaatgccagcgcggctgcgcgctggggggtactccctcaccgcggctgcgcgggagccaggccgccggctgtcac

SEQ ID NO: 171204 - DNA, 120 bp, Artificial Sequence
  ENSG00000109118_97 (sequence is synthesized)
gtttgatcgtttccaggacaccgtttcgcagcatgtcgtcaaagtggacttcctgaaccgaatccacaagaagcacccccctaaccggcgttgtcgggacacatcagctggcttctggag

SEQ ID NO: 171205 - DNA, 120 bp, Artificial Sequence
  ENSG00000109132_0 (sequence is synthesized)
ttaaattctaattagagatgcaggaatcaatgatagggaggttggacagctcagttccccagtgccagcccaatagacggatgagttattgtcatgtaaaaagcgccagcaataagacca

SEQ ID NO: 171206 - DNA, 120 bp, Artificial Sequence
  ENSG00000109132_1 (sequence is synthesized)
accgctttgctattgtccaagtggaaagagccaagtttattatgaggactatatgctctagagacctcagacaaggcatctcataggaggctttttcataaaactaggctctgctggtag

SEQ ID NO: 171207 - DNA, 120 bp, Artificial Sequence
  ENSG00000109132_2 (sequence is synthesized)
taaggaggccagtttggaggcaggcgttgagctgtgcacatctccccactccagccaccttctccatatccatcttttatttcatttttccacttggctgagccatccagaaccttttca

SEQ ID NO: 171208 - DNA, 120 bp, Artificial Sequence
  ENSG00000109132_3 (sequence is synthesized)
atgtataaaatggaatattcttacctcaattcctctgcctacgagtcctgtatggctgggatggacacctcgagcctggcttcagcctatgctgacttcagttcctgcagccaggccagt

SEQ ID NO: 171209 - DNA, 120 bp, Artificial Sequence
  ENSG00000109132_4 (sequence is synthesized)
ggcttccagtataacccgataaggaccacttttggggccacgtccggctgcccttccctcacgccgggatcctgcagcctgggcaccctcagggaccaccagagcagtccgtacgccgca

SEQ ID NO: 171210 - DNA, 120 bp, Artificial Sequence
  ENSG00000109132_5 (sequence is synthesized)
gttccttacaaactcttcacggaccacggcggcctcaacgagaagcgcaagcagcggcgcatccgcaccactttcaccagtgcccagctcaaagagctggaaagggtcttcgcggagact

SEQ ID NO: 171211 - DNA, 120 bp, Artificial Sequence
  ENSG00000109132_6 (sequence is synthesized)
cactaccccgacatctacactcgggaggagctggccctgaagatcgacctcacagaggcgcgagtccaggtgtggttccagaaccgccgcgccaagtttcgcaagcaggagcgcgcagcg

SEQ ID NO: 171212 - DNA, 120 bp, Artificial Sequence
  ENSG00000109132_7 (sequence is synthesized)
gcagccgcagcggccgcggccaagaacggctcctcgggcaaaaagtctgactcttccagggacgacgagagcaaagaggccaagagcactgacccggacagcactgggggcccaggtccc

SEQ ID NO: 171213 - DNA, 120 bp, Artificial Sequence
  ENSG00000109132_8 (sequence is synthesized)
caagagcactgacccggacagcactgggggcccaggtcccaatcccaaccccacccccagctgcggggcgaatggaggcggcggcggcgggcccagcccggctggagctccgggggcggc

SEQ ID NO: 171214 - DNA, 120 bp, Artificial Sequence
  ENSG00000109132_9 (sequence is synthesized)
gcggcagcggcagcggcggcagctggaggcctggctgcggctgggggccctggacaaggctgggctcccggccccggccccatcacctccatcccggattcgcttgggggtcccttcgcc

SEQ ID NO: 171215 - DNA, 120 bp, Artificial Sequence
  ENSG00000109132_10 (sequence is synthesized)
acctccatcccggattcgcttgggggtcccttcgccagcgtcctatcttcgctccaaagacccaacggtgccaaagccgccttagtgaagagcagtatgttctgatctggaatcctgcgg

SEQ ID NO: 171216 - DNA, 120 bp, Artificial Sequence
  ENSG00000109132_11 (sequence is synthesized)
cggcggcggcggcggcgacagcgggcgagccagggcccgggcgggcgagtgggcgagcgggtaggcccaaggctattgtcgtcgctgctgccatggctttttcattgagggcctaaagta

SEQ ID NO: 171217 - DNA, 120 bp, Artificial Sequence
  ENSG00000109132_12 (sequence is synthesized)
cgccctcatttcaaccccactcctacccccttcctcaacccccaaacaaaacaaacaaacttccctggcttcgcacctgcctggggcctcgcagcggggccagggctccgcctgctgatc

SEQ ID NO: 171218 - DNA, 120 bp, Artificial Sequence
  ENSG00000109132_13 (sequence is synthesized)
gggggttgtgagcagcgcggcctggacgcggggcactctcagggggctgtgtctgcgtgtcagtttgtgtctgtctcggggaatgtgtgtctgtggcccaagcaggtgacaggaagagat

SEQ ID NO: 171219 - DNA, 120 bp, Artificial Sequence
  ENSG00000109132_14 (sequence is synthesized)
aaaaagacaaaaaagtaaaaataaaaacaaaaaagttggaaggcagaaaccattaaaaaacaaaaagccaacaacccagaaaggtttaaaaaacataaggaaaaaaaagacaaattaaag

SEQ ID NO: 171220 - DNA, 120 bp, Artificial Sequence
  ENSG00000109132_15 (sequence is synthesized)
tttaaaaaacataaggaaaaaaaagacaaattaaaggaggggctaggggagaagctgcagctggagctgaaggctcgatcttgtgaacccctaaatccgctccctcctaacagcacggat

SEQ ID NO: 171221 - DNA, 120 bp, Artificial Sequence
  ENSG00000109132_16 (sequence is synthesized)
tctcttggggctcttcttcagggaagagtagggacgccgttccagccccccttcctatcgtgtccttgggttcgggtcactgcggcgacgacttgctcagactgtcccggcggccggagt

SEQ ID NO: 171222 - DNA, 120 bp, Artificial Sequence
  ENSG00000109132_17 (sequence is synthesized)
gactttctcgcacccccttgcctgtcccacctcgctgaacaccatcccgccattagcgcatcggaaccccacacagttgcaactcccaaccccgaatctttgcagccgttcggccctgaa

SEQ ID NO: 171223 - DNA, 120 bp, Artificial Sequence
  ENSG00000109132_18 (sequence is synthesized)
agatgccctatccatgagatgccttttcatctgcaaactctgcaaaatgtgtctcatgtttcgcaactctttttttccccctcgctcccgcctaccccgtcggcattttcttcttccacc

SEQ ID NO: 171224 - DNA, 120 bp, Artificial Sequence
  ENSG00000109132_19 (sequence is synthesized)
agcttttactgaactttttggcactgctttggattggggtcaattgcagtccacgtaactggctgcagagaaatctaccgagcaaggaaaaggcacacacacacgtttgcaggggtgtct

SEQ ID NO: 171225 - DNA, 120 bp, Artificial Sequence
  ENSG00000109132_20 (sequence is synthesized)
cggtttgcatttctgttggaatgatccgaactggactcacatcctgtatggtggatggactgtatattgagggttccattcttcgcgcagtttagacatctctgttttgattctttgttg

SEQ ID NO: 171226 - DNA, 120 bp, Artificial Sequence
  ENSG00000109132_21 (sequence is synthesized)
ttgtttttattttaaaaggcacaaactctagatattagttgaatgttgaggctttaactttttcggtgtctttctacaactgtgttctgtgactcaattgtatcgtgttaatatcagtgc

SEQ ID NO: 171227 - DNA, 120 bp, Artificial Sequence
  ENSG00000109132_22 (sequence is synthesized)
agactgtctcctctacgtgaccgtataatgtttttctcttcttgtagtctctatggcgtgtctttatggtgtaataaggttctcacgggttcaatcttttgtgtttagagaggccacggt

SEQ ID NO: 171228 - DNA, 120 bp, Artificial Sequence
  ENSG00000109132_23 (sequence is synthesized)
tcagacaatggtatatatttttgttatcaggtgcatgtctgtctgatttctttttttttcctgttggactatgtttgtgaacataattgtcataagttatgtttcagatttttgaattta

SEQ ID NO: 171229 - DNA, 120 bp, Artificial Sequence
  ENSG00000109132_24 (sequence is synthesized)
tttatatgtgttataatgaatgcttctatttaaaagggaaatatttctacatgtgcatatagttttccaagagtgtaccattaacttgattgttgataataaaaacaaaaagcaagtcta

SEQ ID NO: 171230 - DNA, 120 bp, Artificial Sequence
  ENSG00000109133_0 (sequence is synthesized)
aataacctggagccggcggcgtaggttggctctttagggcttcaccccgaagctccaccttcgctcccgtctttctggaaacaccgctttgatctcggcggtgcgggacaggtacctccc

SEQ ID NO: 171231 - DNA, 120 bp, Artificial Sequence
  ENSG00000109133_1 (sequence is synthesized)
ggctgctgcgggtgccctggatccagtcggctgcaccaggcgagcgagacccttccctggtggaggctcagagttccggcagggtgcatccggcctgtgtgtggcgcgaggcagggaagc

SEQ ID NO: 171232 - DNA, 120 bp, Artificial Sequence
  ENSG00000109133_2 (sequence is synthesized)
cggtacccgggtcctggccccagcgctgacgttttctctcccctttcttctctcttcgcggttgcggcgtcgcagacgctagtgtgagcccccatggcagatacgaccccgaacggcccc

SEQ ID NO: 171233 - DNA, 120 bp, Artificial Sequence
  ENSG00000109133_3 (sequence is synthesized)
caaggggcgggcgctgtgcaattcatgatgaccaataaactggacacggcaatgtggctttctcgcttgttcacagtttactgctctgctctgtttgttctgcctcttcttgggttgcat

SEQ ID NO: 171234 - DNA, 120 bp, Artificial Sequence
  ENSG00000109133_4 (sequence is synthesized)
gaagcagcaagcttttaccaacgtgctttgctggcaaatgctcttaccagtgctctgaggctgcatcaaagattaccacacttccagttaagcagagcattcctggcccaggctttgtta

SEQ ID NO: 171235 - DNA, 120 bp, Artificial Sequence
  ENSG00000109133_5 (sequence is synthesized)
gaggacagctgccactacctgttgtattcactcatctttgtaaattcctatccagttacaatgagtatcttcccagtcttgttattctctttgcttcatgctgccacatatacgaaaaag

SEQ ID NO: 171236 - DNA, 120 bp, Artificial Sequence
  ENSG00000109133_6 (sequence is synthesized)
gtccttgacgcaaggggctcaaatagtttacctctgctgagatctgtcttggacaaattaagtgctaatcaacaaaatattctgaaattcattgcttgcaatgaaatattcctgatgcct

SEQ ID NO: 171237 - DNA, 120 bp, Artificial Sequence
  ENSG00000109133_7 (sequence is synthesized)
gcgacagtttttatgctttttagtggtcaaggaagtttgctccaaccttttatatactatagatttcttacccttcgatattcgtctcgaagaaacccatattgtcggaccttatttaat

SEQ ID NO: 171238 - DNA, 120 bp, Artificial Sequence
  ENSG00000109133_8 (sequence is synthesized)
gaactgaggattgttgttgaacacataataatgaaacctgcttgcccactgtttgtgagaagactttgtctccagagcattgcctttataagcagattggcaccaacagttccatagttt

SEQ ID NO: 171239 - DNA, 120 bp, Artificial Sequence
  ENSG00000109133_9 (sequence is synthesized)
aacatctagttaagctacaaatatagtataagcattattagcagctggtacttctgctaggggttgtaaattccaggtgttacactgacctcaatccaatttacataatttacataaatg

SEQ ID NO: 171240 - DNA, 120 bp, Artificial Sequence
  ENSG00000109133_10 (sequence is synthesized)
catctcggtggaaaaataatcattttcttggcatgttaaatcaagcttaaaaagttttgagaaaattttactgcgctgtgttgctaatggttaaagaagtctgtatctagtgataaatat

SEQ ID NO: 171241 - DNA, 120 bp, Artificial Sequence
  ENSG00000109133_11 (sequence is synthesized)
accagtttttttaaaaagatgctgttgtgcctatatcatgaagtacattaatttctcatgtaaaaaaaatagctctaaaatttgtttcaacctaattggtaacctgagtttatatctggc

SEQ ID NO: 171242 - DNA, 120 bp, Artificial Sequence
  ENSG00000109133_12 (sequence is synthesized)
atgaattcattatggtgatacacatatgtgaattcagtacattttgagacagtattctaccattcagtaattttggttaatgattttaacacttctcagtgtatttaatttcaaattgtt

SEQ ID NO: 171243 - DNA, 120 bp, Artificial Sequence
  ENSG00000109133_13 (sequence is synthesized)
tttttaattggttttatgctgctttgttaggacagatgtgttttgaatgtaccattataagaagaattctatgtatcttaaactatgatcttctaaaattttatttccgtaagtacttct

SEQ ID NO: 171244 - DNA, 120 bp, Artificial Sequence
  ENSG00000109133_14 (sequence is synthesized)
gtggccttgagtattttttaaaaggctcaactgtaagcctcttagccagttggataaatatttggggtcacctagccattgaaagcagaaagcagtagtgacacagctttcccttcaaag

SEQ ID NO: 171245 - DNA, 120 bp, Artificial Sequence
  ENSG00000109133_15 (sequence is synthesized)
agccattgagaaacatttctcaaacaggaaatccttcttttactaatgtggacatatagattattcgtattatagtttgtagaactacctagttcagaatcttgactgccagttttcttg

SEQ ID NO: 171246 - DNA, 120 bp, Artificial Sequence
  ENSG00000109133_16 (sequence is synthesized)
gtttcttaggcttgaattttcatagacaattgcaacagtttagatgccttttgaaaggaatgtaatgaagattcagcatctgactatatgtgtgtctatcctgaaataataatggagagt

SEQ ID NO: 171247 - DNA, 120 bp, Artificial Sequence
  ENSG00000109133_17 (sequence is synthesized)
atactgtagattacatgtttacccatcaaatctgacttaaaaggttaaatggaaggttttataggtaaggtaattgattgggaatggggtagggggaggagttgtgggggaataatgtgc

SEQ ID NO: 171248 - DNA, 120 bp, Artificial Sequence
  ENSG00000109133_18 (sequence is synthesized)
atttcagtctcaacgcatagataaatttaggggaattggatgtattattcaactttgatttgggttgtaaaatgtgttaaatcctgttcattgaactcccatcaactcttataaaattca

SEQ ID NO: 171249 - DNA, 120 bp, Artificial Sequence
  ENSG00000109133_19 (sequence is synthesized)
tgctgatcttcattaccgttgcatgattggaaatgtttaaaacattgtacagttttagtatagagaaatgtaatggtttttgtgaccagtttctgtctgcatgtaatttggatttctcaa

SEQ ID NO: 171250 - DNA, 120 bp, Artificial Sequence
  ENSG00000109133_20 (sequence is synthesized)
tcaaatacattcattagtaatttatcagtaacattagttttatttttgttcatctccttatctataaaaaggggatattcttaggataaatacatgaaaaattatacttgatagcttaac

SEQ ID NO: 171251 - DNA, 120 bp, Artificial Sequence
  ENSG00000109133_21 (sequence is synthesized)
atcagctatttttgtatttttgtaatatttgtccactaagctggagaagcagcctcatacagttgattttgtgtatgtggctagtcttattgtcactatgtaagtaatccaatggtttta

SEQ ID NO: 171252 - DNA, 120 bp, Artificial Sequence
  ENSG00000109133_22 (sequence is synthesized)
gaaactaaactttctagagcaataaaatgactataatgttaagtaaacataatgttgatttctaattatgttttaaaaaatgaagtcttgaattatatcaagaaattttggcagctgaag

SEQ ID NO: 171253 - DNA, 120 bp, Artificial Sequence
  ENSG00000109133_23 (sequence is synthesized)
tcatgtttattttgaagctgttagttttttcctataatttaaaaagatcttttagatttatagaagagtcagaaatgtacaagagagtttttttgttgttgtttttgttttttgagacag

SEQ ID NO: 171254 - DNA, 83 bp, Artificial Sequence
  ENSG00000109133_24 (sequence is synthesized)
aagaagagttcttttgcataccctttactcaggtcctctcatgttaacgttttacataactgtagaacatttatctaaagtaa

SEQ ID NO: 171255 - DNA, 120 bp, Artificial Sequence
  ENSG00000109133_25 (sequence is synthesized)
ttaacgttttacataactgtagaacatttatctaaagtaagatattagcccagaacaatactactaactgaagtataaaacttatttgaatttcaacagtttttttttcatttcttattt

SEQ ID NO: 171256 - DNA, 120 bp, Artificial Sequence
  ENSG00000109133_26 (sequence is synthesized)
tccttttgtgtgctctgtttataccatgatccatgatttttttaaaatcatgattgtcttttaaagatctgtgtgtctctgttttgagtttttcctgtttattttgaaaagtactgttgg

SEQ ID NO: 171257 - DNA, 120 bp, Artificial Sequence
  ENSG00000109133_27 (sequence is synthesized)
tcaagataattggtcaataatccatgttggttttaacaaaaagcattttaacattaaaaatattacagtataaaataacactctgtgctttaaattgaggttttatgtcattttagcaga

SEQ ID NO: 171258 - DNA, 120 bp, Artificial Sequence
  ENSG00000109133_28 (sequence is synthesized)
attataatatttctgatatactcatgtttgacaagttgaaacagatttgtttcttaaaggaaggtttaatatacaaaaaaaggtaatcttaaacttacgaaaaagtaaattttacaattt

SEQ ID NO: 171259 - DNA, 120 bp, Artificial Sequence
  ENSG00000109133_29 (sequence is synthesized)
gagcattactagatgtttagtttgcatgaactcatagttagaaattctgcaataggaatatctacaaccggctgatttggaatttgaaattatagtgttacatgtatacctatcaaatta

SEQ ID NO: 171260 - DNA, 120 bp, Artificial Sequence
  ENSG00000109133_30 (sequence is synthesized)
aaattaaggaaatacaatagcaatatatagaatgaatgtagtaacagaaattaactctttactgcatcattgaacttattgttagttacaggtttaaaagaagttcatttaacatccagt

SEQ ID NO: 171261 - DNA, 120 bp, Artificial Sequence
  ENSG00000109133_31 (sequence is synthesized)
gtgtctaattcttctggaagtggtgtagtaccattgttcttctggcatttttaaatattaaacctttttggatagatggaagccttatacaaaatctactttattttagcaaggattctc

SEQ ID NO: 171262 - DNA, 120 bp, Artificial Sequence
  ENSG00000109133_32 (sequence is synthesized)
tgtccttttgtatagttggtaccttactaatttaaactctaatatcaatctaaagagaaatttattatgcaatttgtatttaggtttttttttttttttttggaatgaagttcagaggta

SEQ ID NO: 171263 - DNA, 120 bp, Artificial Sequence
  ENSG00000109133_33 (sequence is synthesized)
gatcctcctggaagaaagaaagcaagcgaactttttaaagaaaattagacttgaatatttaagaatgtcccttacagagaaaaggccaactataatactaagctaaaagttatgaaaaat

SEQ ID NO: 171264 - DNA, 120 bp, Artificial Sequence
  ENSG00000109133_34 (sequence is synthesized)
taataggttcttttatagagctaagaatgatgaaaccatcaatacttccttcttcctaaaaatccagatcaaaacttcaggttaggtttctaagtttaggacatgaatattatttttttc

SEQ ID NO: 171265 - DNA, 120 bp, Artificial Sequence
  ENSG00000109133_35 (sequence is synthesized)
tggaaaagaagatgagtatatgtgtaataagacaagtagaactgagagatttagttttttttttttttaagttttagttcagaataacattaattttgagagattgaggtaaagaacctt

SEQ ID NO: 171266 - DNA, 120 bp, Artificial Sequence
  ENSG00000109133_36 (sequence is synthesized)
aactaatgctaaggagtttattttgattaacataggttattctgaccaccacctcttccttccttaatctccttagaatctgacagtctcaaagctgtcacacaaattagactaattttg

SEQ ID NO: 171267 - DNA, 120 bp, Artificial Sequence
  ENSG00000109133_37 (sequence is synthesized)
acactttgaaatgaaaacttcaaggaagaagtagccacggacagttatgtttataatcagtaggtggcactctttcctcaggtagccccccattttcacatgatgtgtttgaaggttaaa

SEQ ID NO: 171268 - DNA, 120 bp, Artificial Sequence
  ENSG00000109133_38 (sequence is synthesized)
tgccaccaaaagtgctgagtcagctataaaactaagtccctgaattccatggcccttttaaatatgtaatcattcaagattgaaaaaaaaaattaagcattttttgtttgtttgcttgtt

SEQ ID NO: 171269 - DNA, 120 bp, Artificial Sequence
  ENSG00000109133_39 (sequence is synthesized)
tgctgggattataggtgtgagccactaagcctggctgagacaactagtttcccttaactcattggaattctctaggattaggagaattccacagagcctatatgatattatagctcaaca

SEQ ID NO: 171270 - DNA, 120 bp, Artificial Sequence
  ENSG00000109133_40 (sequence is synthesized)
tatgatattatagctcaacatttagtataccaaaggcatacccgtgtaaatctaggagttatttccagagattgttttaaggagcagtcttatattcagggtagaaagttatgattggat

SEQ ID NO: 171271 - DNA, 120 bp, Artificial Sequence
  ENSG00000109133_41 (sequence is synthesized)
ctgctgttaaggagaacaaaggagcttctaaaggtttgggaggtttactggtagtaactattctaggaaatatttatgttttaaggtgatgttcacatgggttctttagaaggaacatag

SEQ ID NO: 171272 - DNA, 120 bp, Artificial Sequence
  ENSG00000109133_42 (sequence is synthesized)
tcaagtgtgatggattaactctatatagtctttctcctcttgtgcgtgtaggaaatctgacctgcagtgtcagttgatgtgacaagagataaagaaagcacagtattttaaaatctaaag

SEQ ID NO: 171273 - DNA, 120 bp, Artificial Sequence
  ENSG00000109133_43 (sequence is synthesized)
cagattcctttcttagaaaacaataggaaaaaattatagatggatgtctttgctgaaatctaacaattagctcatattccatgagaaagagtggcctaagaattatttcatgttacctag

SEQ ID NO: 171274 - DNA, 120 bp, Artificial Sequence
  ENSG00000109133_44 (sequence is synthesized)
ccttctgaagctactcacttgatgtgcctagcactttgaaactaaccttttctttctttgttcatgacagtttaattccaaatatttactattttctcttgtaactgttagaacagttcc

SEQ ID NO: 171275 - DNA, 120 bp, Artificial Sequence
  ENSG00000109133_45 (sequence is synthesized)
ttttgacattaatttttgcctacatatatatttttaagttgagaccaaatcggtgaagtgttgagcaagtaacatttatgatgtgtgtatattggaacaaatgtaaaagggttacaaaga

SEQ ID NO: 171276 - DNA, 120 bp, Artificial Sequence
  ENSG00000109133_46 (sequence is synthesized)
ttagaaacagagtcataaaaaatggcttgatttataaaggcattacttttggtgctttatataatggcatatattgaactaaaaatttgtatatacagtatgtcagcatttcttagtaac

SEQ ID NO: 171277 - DNA, 120 bp, Artificial Sequence
  ENSG00000109133_47 (sequence is synthesized)
ttctcttgaatccatttttaatatctaatattgtacaggttggggagttacattcttcaggccaatactatccagactatataaatttataaaataaattgaaaaattcattcccctgta

SEQ ID NO: 171278 - DNA, 120 bp, Artificial Sequence
  ENSG00000109133_48 (sequence is synthesized)
aggcgtgagccactgtgcctggcttgcatttttaaaatactgaattattcaaaagaagtaccctgtcaatatgtgctttctaggaaaacagtaaaataggccacaatttggagtgacacc

SEQ ID NO: 171279 - DNA, 120 bp, Artificial Sequence
  ENSG00000109133_49 (sequence is synthesized)
attcagatcaaggtctatccagttttttcttttcatgctaagtgcctacatcaccgaaacacactaatataaaattatcctttctccttcattttcagatgtgtaaaaaatggtacttaa

SEQ ID NO: 171280 - DNA, 120 bp, Artificial Sequence
  ENSG00000109133_50 (sequence is synthesized)
agtgttttcatgatcattttgtaggtagactagatatagcccgttgaacctcttttaaaatttagacttttgatagtaatataaaagcatattgaaatttgtagatattatatgaggaat

SEQ ID NO: 171281 - DNA, 89 bp, Artificial Sequence
  ENSG00000109133_51 (sequence is synthesized)
ataaaagcatattgaaatttgtagatattatatgaggaatggcacctagatttgaaaattatgcttggcttgtagagacaactagtttc

SEQ ID NO: 171282 - DNA, 120 bp, Artificial Sequence
  ENSG00000109133_52 (sequence is synthesized)
ggaaatacagttctcctgcatatttgagaaaatgtgaagtcctttcaagaaaatctaataaacataataatcatagcctgctgacactaaggaaaaaggacctcattcactctttctttt

SEQ ID NO: 171283 - DNA, 120 bp, Artificial Sequence
  ENSG00000109133_53 (sequence is synthesized)
atgcagtgatttactggtccctactgatttccaaattggatcacgatagtaaattatccatgctggtacctgtgaaagtaagccctgggatccatatttgttttgtgttctgcttaaatc

SEQ ID NO: 171284 - DNA, 120 bp, Artificial Sequence
  ENSG00000109133_54 (sequence is synthesized)
agcaagaatgataaatttgatggtgtgaaattggaagtatcaagggctttctttggtgattgagggaaataatgtctctacttgtaatttattgtgaccctttttcactgtatatgcttt

SEQ ID NO: 171285 - DNA, 120 bp, Artificial Sequence
  ENSG00000109133_55 (sequence is synthesized)
gtatgtctaatatttatttcaatgcaaattcaattgttccttcatctgtattgttatatctaagattttattgatgttaaaatctaattgtggaataaaaatctctctggaatttagcag

SEQ ID NO: 171286 - DNA, 120 bp, Artificial Sequence
  ENSG00000109133_56 (sequence is synthesized)
atacaaaaatgttatcttgcaaaagaactaagaacatttgtagttagaaatcagctttcctttgagcttaattgcctttttgttagaataaggtgaatttgaacacactcctcttatcct

SEQ ID NO: 171287 - DNA, 120 bp, Artificial Sequence
  ENSG00000109133_57 (sequence is synthesized)
cagcccatcacaaataatagagatgccatgattttgaggtctgatgtgaaactggtaaaaatgtgatctaaggtgtaactggaaaaaaaaaggaaagaaaaattacattgatgcctcagc

SEQ ID NO: 171288 - DNA, 120 bp, Artificial Sequence
  ENSG00000109133_58 (sequence is synthesized)
acaatagtaacaccaaagagatcaccgtaacagaacagatcacagatcaccataatagattaataatgaaaacatttgaaatagtggaagaattggcaaagtgtgacgcagagacatgaa

SEQ ID NO: 171289 - DNA, 120 bp, Artificial Sequence
  ENSG00000109133_59 (sequence is synthesized)
gtgagcacatgctgttggaaagtggcactgatagtcttgctgtatgcggtgttgcaacaaaccttcaatttgtaaaaaatgaaatatctatggagtacaataaaatgaggtaagcctgtg

SEQ ID NO: 171290 - DNA, 120 bp, Artificial Sequence
  ENSG00000109133_60 (sequence is synthesized)
ctgaattacagatcattgacatgaatttgagttctaagacattttggtatttgtcacaaaaagtccctctataccttacaaacttgttatgaattatttagtgatttgaaagttttaagt

SEQ ID NO: 171291 - DNA, 120 bp, Artificial Sequence
  ENSG00000109133_61 (sequence is synthesized)
ttaaaagtgtttattgttgaagtttcacaaactagaacattttatagataaaggattgcacttaaaatcaccccccagtctccaggggaatttttcaagtttgaaatagatcagtttttt

SEQ ID NO: 171292 - DNA, 120 bp, Artificial Sequence
  ENSG00000109133_62 (sequence is synthesized)
tgaaacctgtgtctctaaagtttgttgagttgtcagatctcttgttctgtcagtgtttaattctggcatacctgataagttgagtgtactgaatgaatctcttgtacactaattttcaga

SEQ ID NO: 171293 - DNA, 120 bp, Artificial Sequence
  ENSG00000109158_0 (sequence is synthesized)
acacgcccaccgcggctcgggctggctgagcgcgggcgagtgtgagcgcgagtgtgcgcacgccgcgggagcctctctgccctctcctcgcaccctgctcagggcatctgaagagcctgg

SEQ ID NO: 171294 - DNA, 120 bp, Artificial Sequence
  ENSG00000109158_1 (sequence is synthesized)
aaacgtgaacaggcttgaagtatggcatgttgcaaagatggtttctgccaagaaggtacccgcgatcgctctgtccgccggggtcagtttcgccctcctgcgcttcctgtgcctggcggt

SEQ ID NO: 171295 - DNA, 120 bp, Artificial Sequence
  ENSG00000109158_2 (sequence is synthesized)
ttgtttaaacgaatccccaggacagaaccaaaaggaggagaaattgtgcacagaaaatttcacccgcatcctggacagtttgctcgatggttatgacaacaggctgcgtcctggatttgg

SEQ ID NO: 171296 - DNA, 120 bp, Artificial Sequence
  ENSG00000109158_3 (sequence is synthesized)
gggtcctgttacagaagtgaaaactgacatatatgtcaccagctttggacctgtttctgatgttgaaatggaatacacaatggatgtgttcttcaggcagacatggattgacaaaagatt

SEQ ID NO: 171297 - DNA, 120 bp, Artificial Sequence
  ENSG00000109158_4 (sequence is synthesized)
aaaatatgacggccccattgaaattttgagattgaacaatatgatggtaacgaaagtgtggacccctgatactttcttcaggaatggaaagaaatctgtctcacataatatgacagctcc

SEQ ID NO: 171298 - DNA, 120 bp, Artificial Sequence
  ENSG00000109158_5 (sequence is synthesized)
aaataagctttttagaattatgagaaatggtactattttatacacaatgagactcaccataagtgcggagtgtcccatgagattggtggattttcccatggatggtcatgcatgcccttt

SEQ ID NO: 171299 - DNA, 120 bp, Artificial Sequence
  ENSG00000109158_6 (sequence is synthesized)
gaaattcgggagttatgcctatccaaagagtgagatgatctatacctggacaaaaggtcctgagaaatcagttgaagttccgaaggagtcttccagcttagttcaatatgatttgattgg

SEQ ID NO: 171300 - DNA, 120 bp, Artificial Sequence
  ENSG00000109158_7 (sequence is synthesized)
gcaaaccgtatcaagtgaaaccatcaaatcaattacgggtgaatatattgttatgacggtttacttccacctcagacggaagatgggttattttatgattcagacctatattccgtgcat

SEQ ID NO: 171301 - DNA, 120 bp, Artificial Sequence
  ENSG00000109158_8 (sequence is synthesized)
tatgacagtgattctttctcaagtttcattttggataaataaagaatcagttcccgctaggactgtatttggaataacaactgtcctcaccatgaccacactaagcatcagtgcacgaca

SEQ ID NO: 171302 - DNA, 120 bp, Artificial Sequence
  ENSG00000109158_9 (sequence is synthesized)
ttctttgcccaaagtgtcctatgctaccgccatggactggttcatagctgtctgctttgcttttgtattttcggcccttatcgagtttgctgctgtcaactatttcaccaatattcaaat

SEQ ID NO: 171303 - DNA, 120 bp, Artificial Sequence
  ENSG00000109158_10 (sequence is synthesized)
ggaaaaagccaaaaggaagacatcaaagccccctcaggaagttcccgctgctccagtgcagagagagaagcatcctgaagcccctctgcagaatacaaatgccaatttgaacatgagaaa

SEQ ID NO: 171304 - DNA, 120 bp, Artificial Sequence
  ENSG00000109158_11 (sequence is synthesized)
aagaacaaatgctttggttcactctgaatctgatgttggcaacagaactgaggtgggaaaccattcaagcaaatcttccacagttgttcaagaatcttctaaaggcacacctcggtctta

SEQ ID NO: 171305 - DNA, 120 bp, Artificial Sequence
  ENSG00000109158_12 (sequence is synthesized)
cttagcttccagtccaaacccattcagccgtgcaaatgcagctgaaaccatatctgcagcaagagcacttccatctgcttctcctacttctatccgaactggatatatgcctcgaaaggc

SEQ ID NO: 171306 - DNA, 120 bp, Artificial Sequence
  ENSG00000109158_13 (sequence is synthesized)
ttcagttggatctgcttctactcgtcacgtgtttggatcaagactgcagaggataaagaccacagttaataccataggggctactgggaagttgtcagctactcctcctccatcggctcc

SEQ ID NO: 171307 - DNA, 120 bp, Artificial Sequence
  ENSG00000109158_14 (sequence is synthesized)
accaccttctggatctggcacaagtaaaatagacaaatatgcccgtattctctttccagtcacatttggggcatttaacatggtttattgggttgtttatttatctaaggacactatgga

SEQ ID NO: 171308 - DNA, 120 bp, Artificial Sequence
  ENSG00000109158_15 (sequence is synthesized)
gaaatcagaaagtctaatgtaatttcgttgctatagtagtttgctaaaagatgatgaaaatgcagaatgtctttttaaatgtttttaaatataaacaaatattctttactaaaataaaaa

SEQ ID NO: 171309 - DNA, 120 bp, Artificial Sequence
  ENSG00000109158_16 (sequence is synthesized)
ctctgtgtaatttttccatttaaagatataagccagttattgggagagttaattaattcctgagtgaaaaagtgaactatgttttttttcagaaaaattattttaaaagaactcagcatt

SEQ ID NO: 171310 - DNA, 120 bp, Artificial Sequence
  ENSG00000109158_17 (sequence is synthesized)
cagttagatagaatacacaccatcctggaaagttgggataagagaaatagagctattagagacaagtggcgcatattttttcattgatatttgaaaacagactatgacattttaaaaatc

SEQ ID NO: 171311 - DNA, 120 bp, Artificial Sequence
  ENSG00000109158_18 (sequence is synthesized)
tgccctatgagtatcaacctgccaccctaaatttcccagtggcactacccttaaccagaattgtttattagatgtcatatgcagtgacctttggtgatcttcttaggaacttcaagaaaa

SEQ ID NO: 171312 - DNA, 120 bp, Artificial Sequence
  ENSG00000109158_19 (sequence is synthesized)
ggaattttcctgttaaattaaacattggcaaaaggaaatggaatagtataaacactgatcaatagagtaaaatatctgctgcataaaaaactaagacaaagaccagaggaaatatcttcc

SEQ ID NO: 171313 - DNA, 120 bp, Artificial Sequence
  ENSG00000109158_20 (sequence is synthesized)
ctttcttatgttggctaaacagtacttaacagttgacttgaaattttgttctctgagccaaagtttaactcattgtatgaattctttttcatggtagttcattcagttatgtgtttattt

SEQ ID NO: 171314 - DNA, 120 bp, Artificial Sequence
  ENSG00000109158_21 (sequence is synthesized)
actacatagttattcagagcctactgtgttccaggaactatgctagaaactgtctctctaggaaagctcttgcacctttatctacaatattacttaaaaagtagaacagtcaatgcatgc

SEQ ID NO: 171315 - DNA, 120 bp, Artificial Sequence
  ENSG00000109158_22 (sequence is synthesized)
caaagaaccataaactagcagaggacattgcattctttagtgaaggacatttatttagagtctgacaacatattcaaaatatttttcagcctctactgatagtggataacaaatatattt

SEQ ID NO: 171316 - DNA, 120 bp, Artificial Sequence
  ENSG00000109158_23 (sequence is synthesized)
gttcacataaccactttgatgtcagtacaacttcagcaattggttttcaaaatagatgagaatatggtacagattgttctataagtgaaaagcattatgtacttgaaagtaaaaatcagg

SEQ ID NO: 171317 - DNA, 120 bp, Artificial Sequence
  ENSG00000109158_24 (sequence is synthesized)
gcaatataagacttaatagattaactgtcgcaaatttgatcagagtcacagagtagaatttgatcagaatcacagaatcatcagacataggaactgagcacaggctttttcaggtgcttt

SEQ ID NO: 171318 - DNA, 120 bp, Artificial Sequence
  ENSG00000109158_25 (sequence is synthesized)
ccccaagatagatctagatattagctagtgaaatgctaaattttgaagagttttgtgtccgtagttctgtaattctgggcagtcatcatgttggtttttttgggagtttttttaaggttt

SEQ ID NO: 171319 - DNA, 120 bp, Artificial Sequence
  ENSG00000109158_26 (sequence is synthesized)
aataactaaggggaatattttaaaattaagagagcagcaaatgaaaggagtaaagaaaaaaatagctgtcgggtaggatgccactgactctgctatgtgatttatcagggttttcatcta

SEQ ID NO: 171320 - DNA, 120 bp, Artificial Sequence
  ENSG00000109158_27 (sequence is synthesized)
ctgacttctttctcattaggtaggcttaacaacttacttgagaattttgcaactgtctatgcagctgaatctaagtatggttttttgtcatattgcctctagattttcttctgtgcttct

SEQ ID NO: 171321 - DNA, 120 bp, Artificial Sequence
  ENSG00000109158_28 (sequence is synthesized)
ctctatctgctctggaatggatgagtgaatgtgttctgggtgttttagggaacatattgatagaaatgaccaccttgcagacaaaatctctctctctctttttgtttttatagaaaagaa

SEQ ID NO: 171322 - DNA, 120 bp, Artificial Sequence
  ENSG00000109158_29 (sequence is synthesized)
gtgatagtagttaattggcatcgatttttcagatattgcactaccttataatggttgtttttgatacctgaaaattgtgcaaatgccaaatattaattgtaagtcatatctgagaaatca

SEQ ID NO: 171323 - DNA, 120 bp, Artificial Sequence
  ENSG00000109158_30 (sequence is synthesized)
ttcttggctgtctttctaggtattccatagaatcaacacattttaaggctgaaagatactgtcgaaatcacccagtcccaaccccccaatttaaaattgattctagtaaaattaggtcca

SEQ ID NO: 171324 - DNA, 120 bp, Artificial Sequence
  ENSG00000109158_31 (sequence is synthesized)
gtaacacctgtatatatgtatatatttaataaagagtacttgtacaaaaaagcttatcataaattatttcatgaatgtgaatagatttctggccttgaggacgatgtttggaaatatggt

SEQ ID NO: 171325 - DNA, 120 bp, Artificial Sequence
  ENSG00000109158_32 (sequence is synthesized)
tggaagcacaattcattcgctactagttattcagagcgtactttgttccaggaactatgctggaaactgatagttcactattctgatgaaaaggctggttttgttgttgttgttgttgtt

SEQ ID NO: 171326 - DNA, 120 bp, Artificial Sequence
  ENSG00000109158_33 (sequence is synthesized)
gttgttgttgtttttggtgaggaactcttactctttgctaatctattggcctatcttaagaaataattatttggttattcattggcttcctttaaaaaaaagtgttcttctacaaatctt

SEQ ID NO: 171327 - DNA, 120 bp, Artificial Sequence
  ENSG00000109158_34 (sequence is synthesized)
acagagtgtaaagagataaaaagaaatgattttttttcttacctttacatatgaaggtttaaaaatacatcatgtggccaaagaatgagaaaggacagaattaaccaaggattcttaatt

SEQ ID NO: 171328 - DNA, 120 bp, Artificial Sequence
  ENSG00000109158_35 (sequence is synthesized)
agaattaaccaaggattcttaattgttaatttgaagaacacattaaccagaaagcttaaacattattattaaaataaattatttcatttgcacacaatgataataatgatgataataata

SEQ ID NO: 171329 - DNA, 120 bp, Artificial Sequence
  ENSG00000109158_36 (sequence is synthesized)
ataataataatatgttgtttgctttccttaactgaatttcatcaaattcattcagtgatttttattttggtcattatttctatcttcccaataacccagaggtacatcaagtaaaaacac

SEQ ID NO: 171330 - DNA, 120 bp, Artificial Sequence
  ENSG00000109158_37 (sequence is synthesized)
ttttgcaaagagccagtcacttttccctcttagaaaatctcagaagaatgattaggggcacccaaagttctggttatctatgaataataatgaataattttggctgagaatggtaccttt

SEQ ID NO: 171331 - DNA, 120 bp, Artificial Sequence
  ENSG00000109158_38 (sequence is synthesized)
atataactcttttaaagatgaaattcagaataattttattcaggacctagtatctgcagtccatgttggccactaactgctacataattactttcaatttcctccaggcatgactaggta

SEQ ID NO: 171332 - DNA, 120 bp, Artificial Sequence
  ENSG00000109158_39 (sequence is synthesized)
taaacatatatttacatgattaatccacattttaaaatgacttgcacttgtgcatatacatagtactttgaataatgtatattttaaattggacctcacaaatcttgtattaaagtaggt

SEQ ID NO: 171333 - DNA, 120 bp, Artificial Sequence
  ENSG00000109158_40 (sequence is synthesized)
agagagtagagtcacactttttttgatgaaatgagtcacagagaagttacatgacaaagataaaatcacagggttggaaagaactttgaaaggtcatttttcaataatctcaccttaaaa

SEQ ID NO: 171334 - DNA, 120 bp, Artificial Sequence
  ENSG00000109158_41 (sequence is synthesized)
gtgaccccttttcaaacaaagcataaacaatttatttgtggcttattttacccatgagctggccaatacttcctggcctagaaaaatatctccactctccccattcctgttcttaatggt

SEQ ID NO: 171335 - DNA, 120 bp, Artificial Sequence
  ENSG00000109158_42 (sequence is synthesized)
cttctcttctcaatttgtaaatattctccagtaaaagacaccaggtgtggagatgggtcacttaatttcaagttctgagtgtcttgtggttttaaacaagtctcttaacctctctaagac

SEQ ID NO: 171336 - DNA, 120 bp, Artificial Sequence
  ENSG00000109158_43 (sequence is synthesized)
tgattcctcatttataacagggaggaggtggattatgtaatatctaagagcttttcagttttaatactctctgattctcatagtaaatacaagcatactcttgtaagaaaaacactgaat

SEQ ID NO: 171337 - DNA, 120 bp, Artificial Sequence
  ENSG00000109158_44 (sequence is synthesized)
actttgaaccacaaataagtgtttatggacaaaaatttagttctactgcttgattactttaagttcattgcttgcttcaaactaaggtttccctaccttcaaaaatatatataacatctc

SEQ ID NO: 171338 - DNA, 120 bp, Artificial Sequence
  ENSG00000109158_45 (sequence is synthesized)
tccatttagataaagtatattcttccccagggaagactgtattctttaaagacagtagaatattggctatttctcttttctgggatttcctgggcttttattcactaaatgggctcctgc

SEQ ID NO: 171339 - DNA, 120 bp, Artificial Sequence
  ENSG00000109158_46 (sequence is synthesized)
tatgggatgtaactaatgcttcagtagaatacagcagggccaaaactagagtgatactcatctcaggcacaaatatatatggggacatcaaaacttcaataatcaagatacctaatattt

SEQ ID NO: 171340 - DNA, 120 bp, Artificial Sequence
  ENSG00000109158_47 (sequence is synthesized)
aagtgaatatttttaaaactcaaaattaatgcaaaagatttatgatgaacagaatatacaaattttaaataaattaatagaatcagtagtaataatattttcttctgcctcaggctccaa

SEQ ID NO: 171341 - DNA, 120 bp, Artificial Sequence
  ENSG00000109158_48 (sequence is synthesized)
aattgctcagcatagcactgatctagatagaggtggataaaagatccacataacttaattacattgttgaaggagaggaacaagagtgatagcagagaaggtttcacagatataatctta

SEQ ID NO: 171342 - DNA, 120 bp, Artificial Sequence
  ENSG00000109158_49 (sequence is synthesized)
agctaaattttatagaatgatttggagttcttatagcctccattcccacttccacaaacaaacaaaaaaatgaaagcgcaattttatcagcacctgaggcaggagaagagatgaggatgt

SEQ ID NO: 171343 - DNA, 120 bp, Artificial Sequence
  ENSG00000109158_50 (sequence is synthesized)
ggaaagtcaaggggaactcttactacaaattcttagttctgtgtttggaggtaagggtgaatgcagggaagtgagagttgttgatgttggaaagacctaaagagcctggattaggaagag

SEQ ID NO: 171344 - DNA, 120 bp, Artificial Sequence
  ENSG00000109158_51 (sequence is synthesized)
ttttgtgtaaattactgaaggaatggaatttgatcaggattagtggcaatttattaaaaatcttgaagaataatacgatgaaaactaacatccttatttttctgttttagagaaagcacc

SEQ ID NO: 171345 - DNA, 120 bp, Artificial Sequence
  ENSG00000109158_52 (sequence is synthesized)
tgattattgtgtgaactatggtttggagggccacaaatctagaggtagtggaacagttgagatctcttattttttctttcctgtcttaaactttgccttctattccttttttcttttttt

SEQ ID NO: 171346 - DNA, 120 bp, Artificial Sequence
  ENSG00000109158_53 (sequence is synthesized)
gaccgcaatgacttcattgtcatttgtaaaagtgatacatgactgttaaagatagacattgtagaaacttaaaaacaatctcaaaattctaccacccagaaatcagaaatattttgtatt

SEQ ID NO: 171347 - DNA, 120 bp, Artificial Sequence
  ENSG00000109158_54 (sequence is synthesized)
tggatatgtttgtctagaagagtagattgcttgattaaaagacagagttttataaatgtagaagccaatatgacatacatgctgccattaaataataaaaaattaaattgacttttatct

SEQ ID NO: 171348 - DNA, 120 bp, Artificial Sequence
  ENSG00000109158_55 (sequence is synthesized)
caagataagattaaaattggagggtaaaactgaagaaattgttgaaatttggatggtgcttctttaaagcaagagatttagagagtcagagctttttatcccaggtttcaatctttattt

SEQ ID NO: 171349 - DNA, 120 bp, Artificial Sequence
  ENSG00000109158_56 (sequence is synthesized)
caggaaaattttctgcaattttgtctaagttaattttttttttttaagaaatgccaattatgtcaaatcccttttgtctctatacaatagtccccaactgttttggcaacaggcacgggt

SEQ ID NO: 171350 - DNA, 120 bp, Artificial Sequence
  ENSG00000109158_57 (sequence is synthesized)
gagggtgggggaatggttttcagatgaaattgttccatctcagatcatcaggcattagtcgattctcataaggagcggacaaccttgcatgccctcctatgagaatctaatgccgccgct

SEQ ID NO: 171351 - DNA, 120 bp, Artificial Sequence
  ENSG00000109158_58 (sequence is synthesized)
aatctgacaggaggcagagctcaggcgataatgctcaatgggtgccactcacctcctgttgtgctgcccaattcctaacaggtcatggataagtactggtcagtggcccaggggttgggg

SEQ ID NO: 171352 - DNA, 120 bp, Artificial Sequence
  ENSG00000109158_59 (sequence is synthesized)
accactgctctgtaactatttacagtattctttgtaactactttggtatctttaaaattttctttaacttttgtcaaccataaccctagtgagttttcagttgtgattattctattttgt

SEQ ID NO: 171353 - DNA, 120 bp, Artificial Sequence
  ENSG00000109158_60 (sequence is synthesized)
aacttccaatgtacttttcaacttcataatggttaattttgttttccattgctttcttggtcactgtcatttcatttttcttctctttctctatttttaccattgctttattgaaatatc

SEQ ID NO: 171354 - DNA, 120 bp, Artificial Sequence
  ENSG00000109158_61 (sequence is synthesized)
ttctttgagcttctcatgtttctctattaatgagatcatgtctataatattttttgagactacagagacctatttatataaactcttcctctatttcttgaaaaagtttttatctggcgt

SEQ ID NO: 171355 - DNA, 120 bp, Artificial Sequence
  ENSG00000109158_62 (sequence is synthesized)
gagcttcatctgctttttcattgaggttttatctcccttgcctatttttggggctggtttctttctattaatcactgagcagagccagctatttactgaactacagtgtgggaagtggtg

SEQ ID NO: 171356 - DNA, 120 bp, Artificial Sequence
  ENSG00000109158_63 (sequence is synthesized)
ggagggtgagtcagatcagcccacagaagctatttaaatttcaggtttcaagcccacctccccaaaaccgttttatgtgttttttcttctgcccaggcaccatatttttatatctatttt

SEQ ID NO: 171357 - DNA, 120 bp, Artificial Sequence
  ENSG00000109158_64 (sequence is synthesized)
tgacatttgggcggcctatgtagttcacagtgtaaaactctctgttttactttctttatgttattgctagtgattattgcttgtagtcccacccccttccccacattagccttagtattc

SEQ ID NO: 171358 - DNA, 120 bp, Artificial Sequence
  ENSG00000109158_65 (sequence is synthesized)
tatattattcagcaagcttgttcacaactctcaaatatagtctatcagaatttttatctttacctctacattccactattcggaagtatatagtaaaatcgtatgaagacagattttgtc

SEQ ID NO: 171359 - DNA, 120 bp, Artificial Sequence
  ENSG00000109158_66 (sequence is synthesized)
tttttcttgcctgtttacactctatcttacagaggtttcaaacaaaccatctttgtttgaaacatcgcaggataatgatacttattgaaatctacatcctgcccaagatatatgccagtc

SEQ ID NO: 171360 - DNA, 120 bp, Artificial Sequence
  ENSG00000109158_67 (sequence is synthesized)
aatttcctttctcctattagtgcaaatggctacctacttaaaagctgctgactatagtttgtcatcaattacttgttaattacagatatggttttcatttttttttctcaatttttcatt

SEQ ID NO: 171361 - DNA, 120 bp, Artificial Sequence
  ENSG00000109158_68 (sequence is synthesized)
atgttatttttggagactgtcttaggtggggagtgaattataaatatttttatttcaccacctttaactgagtcaccatatgttatttgcacttccaatagaccagggattgaccagagt

SEQ ID NO: 171362 - DNA, 120 bp, Artificial Sequence
  ENSG00000109158_69 (sequence is synthesized)
atcttttactgatatgaccaccagagctacatggcttttaccttctgtatatcagatgtcactggaatcaagcattaaacctagattaaatctggattaaaccagctgtatggcacctta

SEQ ID NO: 171363 - DNA, 120 bp, Artificial Sequence
  ENSG00000109158_70 (sequence is synthesized)
gaaaattgagaaggactaggaagctgatagaaagaactcctgtataaaaaataaattctttttacattttccttggtagtatttctgcaagcttctttagtttctataggggaatcccag

SEQ ID NO: 171364 - DNA, 120 bp, Artificial Sequence
  ENSG00000109158_71 (sequence is synthesized)
agttttcctctgagattgcttccctttcctttgtattttcatttttccctcttgggctttacttttcagtcgtgtatttctatcccaatgttaatttattacactgtttatattttcctg

SEQ ID NO: 171365 - DNA, 120 bp, Artificial Sequence
  ENSG00000109158_72 (sequence is synthesized)
tccttcaattcatcagtagattagtgaagtacttattcctttaattataagtataaacgtttttaatttctttttggataacgatacatttaatggaaaatttttaaatgctatggtttc

SEQ ID NO: 171366 - DNA, 120 bp, Artificial Sequence
  ENSG00000109158_73 (sequence is synthesized)
ttaatagcttttctctaccactaattacttccgttaaaaaaaaaaagaaatacccatgcgtaatataaaagaaattttgaataaaatgttatcctttccttttactagagacaaacatct

SEQ ID NO: 171367 - DNA, 120 bp, Artificial Sequence
  ENSG00000109158_74 (sequence is synthesized)
ccacttcaaaatggaaaaatggaactatgcaaaggaaatttacgatattcaagagtatgatattatcactgaaccgattaatttaattgaaaatactaacctgcaaaaaagaattacaca

SEQ ID NO: 171368 - DNA, 120 bp, Artificial Sequence
  ENSG00000109158_75 (sequence is synthesized)
aatgtatttgaaatgtcatcagatacctcaagctatgacagagttgattatgttacacaagtagtaaaggataaattaaatatattctatattaacactaagatttaaaactaattatag

SEQ ID NO: 171369 - DNA, 120 bp, Artificial Sequence
  ENSG00000109158_76 (sequence is synthesized)
tcttctttaatttttctactgtatacatttcatctagttttcagtaaaacaaacttttcattacttttacttatcccatgcaaatctagttgctataagatataacctaatttggaaata

SEQ ID NO: 171370 - DNA, 120 bp, Artificial Sequence
  ENSG00000109158_77 (sequence is synthesized)
cctccctgtaatacattggaattttggtgtgagtgtgtgtgatcagagaggataaacaaatggtgtcagcaaaatagaatgtaaaatatggagataatgtggatttacacaatttgataa

SEQ ID NO: 171371 - DNA, 120 bp, Artificial Sequence
  ENSG00000109158_78 (sequence is synthesized)
aaattctcccttgaattttgcagatcatatatgaatatcatcatgtgaagtgcaattaggattttttcatatattaatacatatacatcatctctttaataaaatattttgctgaactcg

SEQ ID NO: 171372 - DNA, 120 bp, Artificial Sequence
  ENSG00000109158_79 (sequence is synthesized)
tttaatatttctcatgtctcatatttcatattttctcatatgtctcatattttatattttctcatatgtgtctcatttttattattactatagtatccattaaaggagactggcaaatac

SEQ ID NO: 171373 - DNA, 120 bp, Artificial Sequence
  ENSG00000109158_80 (sequence is synthesized)
ctgaacaaagttatgttgttggcaatataagatattaccaattgcataatattatttccaaaggcaaattaatatgcaaactatagatttccatgggtatctatacaaattattacttga

SEQ ID NO: 171374 - DNA, 120 bp, Artificial Sequence
  ENSG00000109158_81 (sequence is synthesized)
agtccatagaaaacagcttccttagagggaagtaaaagaagctctgataacagacaatgtatagcatttcagttaaagtttgattgacatatttttttctcagtcttttatacttgtgaa

SEQ ID NO: 171375 - DNA, 120 bp, Artificial Sequence
  ENSG00000109158_82 (sequence is synthesized)
ttatagtctacattttgtctttacagatgttgctaacacagtgcagcatgttggcttgtcattttactgattatgtatattgtctcctagttcaagtatacagtaaatcagagctttcat

SEQ ID NO: 171376 - DNA, 120 bp, Artificial Sequence
  ENSG00000109158_83 (sequence is synthesized)
ttttcaaggggcagaaaaataattgttggttgataaggtaaggttatatgattttgagggagcttcattgtaaattgaatgagaatccggttttcatgcaaaggtgtatctatgcgataa

SEQ ID NO: 171377 - DNA, 120 bp, Artificial Sequence
  ENSG00000109158_84 (sequence is synthesized)
tactttgaatgtctgtagtttgaaatagaaggttaattttttccactggcttatccttaatgaaggaaatcccctgataattactttgattctgaaaatgttgaaaactccagaagaaat

SEQ ID NO: 171378 - DNA, 120 bp, Artificial Sequence
  ENSG00000109158_85 (sequence is synthesized)
aaagcttttctttgatttctcagctgaagtgttgtacaaactgaggaatatgaagtccattcccttctttcttctcttgaataattttaaaattgtttgtttagttgtacaattgaaaat

SEQ ID NO: 171379 - DNA, 120 bp, Artificial Sequence
  ENSG00000109158_86 (sequence is synthesized)
attccttattatagaagtaaaaaaacaataatgcatatttcctcatatcataaaaactaaatttgttatcatctgagcttcaatattcttgctcaattagaatagtaaatataaagtgtg

SEQ ID NO: 171380 - DNA, 120 bp, Artificial Sequence
  ENSG00000109158_87 (sequence is synthesized)
atatttataacagttcaaggtttgataggagatagaggtgttttgattttatgggaaaattacttcctcaagaacacatttcttgaggttttagtaatcacatttgactccctgaaattg

SEQ ID NO: 171381 - DNA, 120 bp, Artificial Sequence
  ENSG00000109158_88 (sequence is synthesized)
gcaattttattcaatgtaggaatattatcatggtatattatagtgaggagcacatagtcattattattttgtttttgcaaatttattttgaaaaaaaggagcattatcaaatattggttt

SEQ ID NO: 171382 - DNA, 120 bp, Artificial Sequence
  ENSG00000109158_89 (sequence is synthesized)
actattttaaagtaattcatcaggaaatgattttttaaacactgtccctttaagtaaatgtcccttgcttttcaaagctcaacttattacttatggtaatagagttactttgcttcttaa

SEQ ID NO: 171383 - DNA, 120 bp, Artificial Sequence
  ENSG00000109158_90 (sequence is synthesized)
aacaaagtttatactagagcatagcattgtagaattattcaggtctcaatttctcactggaaaatgagtctttaaaatagtaaggatttaaatttctataaaatttaatcacagatactt

SEQ ID NO: 171384 - DNA, 120 bp, Artificial Sequence
  ENSG00000109158_91 (sequence is synthesized)
tccctctcttggtcttcctgtctgtctgtctgtgggaatatcattaggtatgcctcacgtgcaaaaataaatctctctctctttctatctctcctctcttggtgagacctatgacaagaa

SEQ ID NO: 171385 - DNA, 120 bp, Artificial Sequence
  ENSG00000109163_0 (sequence is synthesized)
gcttgaagctctgtcctgggaaaatatggcaaacagtgcctctcctgaacagaatcaaaatcactgttcagccatcaacaacagcatcccactgatgcagggcaacctccccactctgac

SEQ ID NO: 171386 - DNA, 120 bp, Artificial Sequence
  ENSG00000109163_1 (sequence is synthesized)
cttgtctggaaagatccgagtgacggttactttcttcctttttctgctctctgcgacctttaatgcttctttcttgttgaaacttcagaagtggacacagaagaaagagaaagggaaaaa

SEQ ID NO: 171387 - DNA, 120 bp, Artificial Sequence
  ENSG00000109163_2 (sequence is synthesized)
gctctcaagaatgaagctgctcttaaaacatctgaccttagccaacctgttggagactctgattgtcatgccactggatgggatgtggaacattacagtccaatggtatgctggagagtt

SEQ ID NO: 171388 - DNA, 120 bp, Artificial Sequence
  ENSG00000109163_3 (sequence is synthesized)
actctgcaaagttctcagttatctaaagcttttctccatgtatgccccagccttcatgatggtggtgatcagcctggaccgctccctggctatcacgaggcccctagctttgaaaagcaa

SEQ ID NO: 171389 - DNA, 120 bp, Artificial Sequence
  ENSG00000109163_4 (sequence is synthesized)
cagcaaagtcggacagtccatggttggcctggcctggatcctcagtagtgtctttgcaggaccacagttatacatcttcaggatgattcatctagcagacagctctggacagacaaaagt

SEQ ID NO: 171390 - DNA, 120 bp, Artificial Sequence
  ENSG00000109163_5 (sequence is synthesized)
tttctctcaatgtgtaacacactgcagtttttcacaatggtggcatcaagcattttataactttttcaccttcagctgcctcttcatcatccctcttttcatcatgctgatctgcaatgc

SEQ ID NO: 171391 - DNA, 120 bp, Artificial Sequence
  ENSG00000109163_6 (sequence is synthesized)
aaaaatcatcttcaccctgacacgggtccttcatcaggacccccacgaactacaactgaatcagtccaagaacaatataccaagagcacggctgaagactctaaaaatgacggttgcatt

SEQ ID NO: 171392 - DNA, 120 bp, Artificial Sequence
  ENSG00000109163_7 (sequence is synthesized)
tgccacttcatttactgtctgctggactccctactatgtcctaggaatttggtattggtttgatcctgaaatgttaaacaggttgtcagacccagtaaatcacttcttctttctctttgc

SEQ ID NO: 171393 - DNA, 120 bp, Artificial Sequence
  ENSG00000109163_8 (sequence is synthesized)
ctttttaaacccatgctttgatccacttatctatggatatttttctctgtgattgatagactacacaagaagtcatatgaagaagggtaaggtaatgaatctctccatctgggaatgatt

SEQ ID NO: 171394 - DNA, 120 bp, Artificial Sequence
  ENSG00000109163_9 (sequence is synthesized)
caaatgttggagcatgtttacatacaaacaaagtaggatttacacttaagttatcattcttttagaaactcagtcttcagagcctcaattattaaggaaaagtcttcaggaaaaatacta

SEQ ID NO: 171395 - DNA, 120 bp, Artificial Sequence
  ENSG00000109163_10 (sequence is synthesized)
aaatattttctcttcctcataagcttctaaattaatctctgccttttctgacctcatataacacattatgtaggtttcttatcactttctctttgcataataatgtactaatatttaaaa

SEQ ID NO: 171396 - DNA, 120 bp, Artificial Sequence
  ENSG00000109163_11 (sequence is synthesized)
taccttcagcctaaggcacaaggatgccaaaaaaacaaaggtgagaaaccacaacacaggtctaaactcagcatgctttggtgagtttttctccaaaaggggcatattagcaattagagt

SEQ ID NO: 171397 - DNA, 120 bp, Artificial Sequence
  ENSG00000109163_12 (sequence is synthesized)
tgtatgctatataatacatagagcacagagccctttgcccataatatcaactttccctcctatagttaaaaagaaaaaaaatgaatctatttttctctttggcttcaaaagcattctgac

SEQ ID NO: 171398 - DNA, 120 bp, Artificial Sequence
  ENSG00000109163_13 (sequence is synthesized)
atttggaggagtcagtaaccaatcccaccaaccactccagcaacctgacaagactatgagtagttctccttcatcctatttatgtggtacaggttgtgaagtatctctatataaagggaa

SEQ ID NO: 171399 - DNA, 120 bp, Artificial Sequence
  ENSG00000109163_14 (sequence is synthesized)
attttagaggggttaggatttggacaggggtttagaacattcctctaagctatctagtctgtggagtttgtggcaattaattgccataaaataacaatgtttccaaatgcaactaagaaa

SEQ ID NO: 171400 - DNA, 120 bp, Artificial Sequence
  ENSG00000109163_15 (sequence is synthesized)
atactcatagtgagtacgctctatgcatagtatgacttctattttaatgtgaagaattttttgtctctctcctgatcttactaaatccatatttcataaataactgagaataattaaaac

SEQ ID NO: 171401 - DNA, 120 bp, Artificial Sequence
  ENSG00000109163_16 (sequence is synthesized)
aaaattaagcaaatgcacaagcaaaaagatgcttgatacacaaaaggaactctggagagaaaactacagcttcagtctgtacagatcaaagaagacagaacatgtcaggggaaggaggga

SEQ ID NO: 171402 - DNA, 120 bp, Artificial Sequence
  ENSG00000109163_17 (sequence is synthesized)
aagatcttgatgcagggtttcttaacctgcagtctatgcacaacactatatttccatgtaatgtttttatttcagccctatttgtattattttgtgcatttaaaaaacacaatcttaagg

SEQ ID NO: 171403 - DNA, 120 bp, Artificial Sequence
  ENSG00000109171_0 (sequence is synthesized)
aatcccggagccggcgcagatgaggcagttcggctggggccagcggcgctttggaacccgaggtggggggaccctggcggtggggcctggtcctgctatatgccggcgcctcggctagag

SEQ ID NO: 171404 - DNA, 120 bp, Artificial Sequence
  ENSG00000109171_1 (sequence is synthesized)
tgagcggcggcgacgcctctttcctccgtctctttccctgtcgctgcgagagcgagcgggcggcggaggcggcggcggcggcggggccgggatggaggacgttaactccaacgtgaacgc

SEQ ID NO: 171405 - DNA, 120 bp, Artificial Sequence
  ENSG00000109171_2 (sequence is synthesized)
ggaccaggaggtgcggaagctgcaggagctggtgaagaagctggagaagcagaacgaacagctgaggagccgctcgggggccgtgcagggcgccggctcccttgggcccggcagcccggt

SEQ ID NO: 171406 - DNA, 120 bp, Artificial Sequence
  ENSG00000109171_3 (sequence is synthesized)
tcgggccggcgcgtccattccctcctccggcgcggcgtctcctcggggcttccccttgggcctcagcgccaagtcgggcggcgggcccgggtcgggcccgaggcggacgagtagcgaaga

SEQ ID NO: 171407 - DNA, 120 bp, Artificial Sequence
  ENSG00000109171_4 (sequence is synthesized)
gctgcgggacgccacctccttgctagcggcgggcgagggcggcttgctggacgaggtggagccgctgcggcccgacgagctggagcgcctgtcaggctgggaggaggaggaggagagctg

SEQ ID NO: 171408 - DNA, 120 bp, Artificial Sequence
  ENSG00000109171_5 (sequence is synthesized)
gctgtattcatcaccaaagaaaaaacttacaccaatgcagaaatcggttagtccattagtttggtgcaggcaagttttggattacccaagtcctgatgttgagtgtgctaaaaaatctct

SEQ ID NO: 171409 - DNA, 120 bp, Artificial Sequence
  ENSG00000109171_6 (sequence is synthesized)
tatccacaaacttgatcaaactatgtcagctctcaagaggcagaatttatataataatcctttcaactctatgagttacaccagtccttacagtccaaatgccagtagcccatacagcag

SEQ ID NO: 171410 - DNA, 120 bp, Artificial Sequence
  ENSG00000109171_7 (sequence is synthesized)
tggcttcaattctccatcctcaaccccagtgcgacctcctatagtcaaacagcttatacttcctggaaattcaggtaacttgaaaagctcagacagaaatcctccactcagtcctcagtc

SEQ ID NO: 171411 - DNA, 120 bp, Artificial Sequence
  ENSG00000109171_8 (sequence is synthesized)
ctctatagatagtgagttaagtgcttcagaattagatgaagattcaattggatccaattataagctaaatgatgtaactgatgtacagattctagcccggatgcaggaagaaagtctccg

SEQ ID NO: 171412 - DNA, 120 bp, Artificial Sequence
  ENSG00000109171_9 (sequence is synthesized)
gcaagaatatgcagccaccacgtctcggcgcagttctggttcatcttgcaattctacaagacggggtacttttagtgatcaggaacttgatgcacaaagtttagatgatgaagatgacaa

SEQ ID NO: 171413 - DNA, 120 bp, Artificial Sequence
  ENSG00000109171_10 (sequence is synthesized)
tatgcatcatgcagtataccctgctgttaacaggttttcaccatcaccacgcaattcacctcgaccgtcacctaagcagtcacccagaaattcacctcgttcacgatctcctgctcgggg

SEQ ID NO: 171414 - DNA, 120 bp, Artificial Sequence
  ENSG00000109171_11 (sequence is synthesized)
aatagaatatagtagagtgtccccacagcctatgattagccgcttacagcaacctcgcctttcacttcaaggccatcccacagatttacagacaagcaatgttaaaaatgaagaaaaact

SEQ ID NO: 171415 - DNA, 120 bp, Artificial Sequence
  ENSG00000109171_12 (sequence is synthesized)
aagacgcagtcttccaaacctgtcccgaacatctaatacacaagttgactcagtgaaaagcagcagaagtgactcaaattttcaagtgccaaacggaggaatacctcgtatgcaacctca

SEQ ID NO: 171416 - DNA, 120 bp, Artificial Sequence
  ENSG00000109171_13 (sequence is synthesized)
ggcttcagccataccttctccaggcaaattccgttcccctgcagcaccatctcctttggctcttcggcaaccagtgaaagcatttagtaaccatggctctggttctcctggtagccaaga

SEQ ID NO: 171417 - DNA, 120 bp, Artificial Sequence
  ENSG00000109171_14 (sequence is synthesized)
aataacacagctcacacaaaccacctcctcacctgggcctcctatggttcagagcacagtctcagcaaatcctcccagcaatatcaacagcgctactctaaccagacctgcagggacaac

SEQ ID NO: 171418 - DNA, 120 bp, Artificial Sequence
  ENSG00000109171_15 (sequence is synthesized)
tgcaatgagaagtggcttgcccagacccagtgccccttctgctgggggcataccagtgcctcgcagcaaacttgcacagcctgttcgcagatccttgccagctcctaaaacctatggtag

SEQ ID NO: 171419 - DNA, 120 bp, Artificial Sequence
  ENSG00000109171_16 (sequence is synthesized)
catgaaagatgacagttggaaagatggctgttactgaccagcaaagacaagaatgcagaagtccacggcttcatggatacccttcaccaggctaaaaaacaacttttatatgcagactgt

SEQ ID NO: 171420 - DNA, 120 bp, Artificial Sequence
  ENSG00000109171_17 (sequence is synthesized)
tcagataagactcttgggatttataaaatcccagccctctctgtcttaattagcacaaaccgacagagatcatcaaacagcactttaatgacatttaacatcagatgtgtttggtaatca

SEQ ID NO: 171421 - DNA, 120 bp, Artificial Sequence
  ENSG00000109171_18 (sequence is synthesized)
tacaatcactctccatagaatcacttttagttttgtttaatagaaactaggttgatttttaaaaaatatttgacagaggccaatatctgggcaaatacctaatggatgccaaagagaaat

SEQ ID NO: 171422 - DNA, 120 bp, Artificial Sequence
  ENSG00000109171_19 (sequence is synthesized)
gcccatttgtaaatgagaaaaatgcccatttgtgcacaagaaaatggtgaattcaggctatccaaaacttcacattcaacctaatttactgtataaatagtatcaataaatatttgtgtt

SEQ ID NO: 171423 - DNA, 120 bp, Artificial Sequence
  ENSG00000109171_20 (sequence is synthesized)
aatgagaactaatattctgactaattatctaaagtgtttcactagtacaccaggaaactacagattgagattagggggtgggaggaaagaaacctgggctagagattaaaacattcctaa

SEQ ID NO: 171424 - DNA, 120 bp, Artificial Sequence
  ENSG00000109171_21 (sequence is synthesized)
atttagcagaatttcagaaatgatttttgcagattcattagaaaagaaaaattgtcatttaatcttaagttttggatgtagctcacatgtcaccaccaccagatagtgttacagcatgta

SEQ ID NO: 171425 - DNA, 120 bp, Artificial Sequence
  ENSG00000109171_22 (sequence is synthesized)
tccatcatgttgcattgacacatcaaacttgtgtgtgtttgttttgattgccaaaagggcttaatatcagttgtacaatctttctgaactttatagttcctggctcaggaaagatggcct

SEQ ID NO: 171426 - DNA, 120 bp, Artificial Sequence
  ENSG00000109171_23 (sequence is synthesized)
ttgctattgaagccaacttcttcacatgctgttatctttacagaactaagagatcttgtttctattagcaggttttcatgataggaaagaacaagtagtgtgtgtctttattcttgatac

SEQ ID NO: 171427 - DNA, 120 bp, Artificial Sequence
  ENSG00000109171_24 (sequence is synthesized)
aacaccacctcggtgcttgcaacctggaacaaaaccataccatgagagagagggggaaaaaaatctatgcacttaacctacaaaatctctggtgatgacagttgtattgttgctattaca

SEQ ID NO: 171428 - DNA, 120 bp, Artificial Sequence
  ENSG00000109171_25 (sequence is synthesized)
gtataaaacatctattgaaaattcttttccttttgacttagattctgccttacatcaatttttgcatttttggtaaaaaaaaaaccctactacgtatgactctaacctgatacttgctct

SEQ ID NO: 171429 - DNA, 120 bp, Artificial Sequence
  ENSG00000109171_26 (sequence is synthesized)
ctaatggctcttaatatatccttgaaatcggctatttcaattttatcagacttttaccagagtaaaacttgcttctgtagcaggcctctcattttttattatgaggtctgtttttaaata

SEQ ID NO: 171430 - DNA, 120 bp, Artificial Sequence
  ENSG00000109171_27 (sequence is synthesized)
cttaatttgaacagctctaagatattgtcacttaggtcatctaaaagcttttagagatttgaacataagttcatttcctgttaatcaaagacattccgtaagttggcaaaagaaattggg

SEQ ID NO: 171431 - DNA, 120 bp, Artificial Sequence
  ENSG00000109171_28 (sequence is synthesized)
agagagaaatagaaggcttgatattctggacagcattaaggttgataggttgatgataaaaacttaaaaccaggacctccattctgtcatgactgacaccatggtagtctgtcagcttga

SEQ ID NO: 171432 - DNA, 120 bp, Artificial Sequence
  ENSG00000109171_29 (sequence is synthesized)
ccagtggagagtcattcatttagcacaagcagctggagatttaaactgccagtactatgtatttggtgtataatgcaaggaagaaactttatccttgaatttgagggtgatggggtgggt

SEQ ID NO: 171433 - DNA, 120 bp, Artificial Sequence
  ENSG00000109171_30 (sequence is synthesized)
caggaaaggatggcgccagaattctacatgataatgaactaaaaaatgttgcttttcagaggaagataaagcatcttcttttgggaggggggtatctcatgtctaagtaagtaaaagaaa

SEQ ID NO: 171434 - DNA, 120 bp, Artificial Sequence
  ENSG00000109171_31 (sequence is synthesized)
gaagtagctactgtctcttttaaaaaccacgtacaaaacagaacaagtctcagttttcagtgcaacatttcaaaaaatatatatgctgcaatctaataattaaaaggaattttacctatt

SEQ ID NO: 171435 - DNA, 120 bp, Artificial Sequence
  ENSG00000109171_32 (sequence is synthesized)
atgaaacatattacattttttaagttagataatcagtttcaaaaggagtattcaggttatttaactttgtttttaaatggctgcatcagaaaaaaatgtctatttttttttattaaaata

SEQ ID NO: 171436 - DNA, 120 bp, Artificial Sequence
  ENSG00000109171_33 (sequence is synthesized)
tttcatcacttgttaaaacatatttttgatctgagtttggtaaagtattattttacctgctgttgtactaccacagactgttgacttttagtttcttaaagagaaaaattgcctttttac

SEQ ID NO: 171437 - DNA, 120 bp, Artificial Sequence
  ENSG00000109171_34 (sequence is synthesized)
tagaaagcctttgtatattgcaatttttctgtttgggaaaatctaaggatttactgtggttagtcttacagaagaaatgtggatttgataaactagtgcctatgattttaacttatgttt

SEQ ID NO: 171438 - DNA, 120 bp, Artificial Sequence
  ENSG00000109171_35 (sequence is synthesized)
gatatatagtagtaagggttttatgaatgttgattattttgtgccaacagcccagaattgtcacttatatgtaagcagaaaacaatgagctctgcttccaaagttatttaattttctcag

SEQ ID NO: 171439 - DNA, 120 bp, Artificial Sequence
  ENSG00000109171_36 (sequence is synthesized)
tgtttgaatgttattttttgtaagtgtgttaataaaagtgtaaagaattggaaaaaatataaatattcttaactcaagcatttgctggatcatttttctacaaaacttgtttgtacaata

SEQ ID NO: 171440 - DNA, 120 bp, Artificial Sequence
  ENSG00000109171_37 (sequence is synthesized)
taaaacactctctgaagagttgactttttttcagtttcgtatcctggaaatcacattttgtaaaactggggaccattcataattgtcagatactttttaaaattatctcaatacatcact

SEQ ID NO: 171441 - DNA, 120 bp, Artificial Sequence
  ENSG00000109171_38 (sequence is synthesized)
tttataaaaaaaaaaagtttttttgaaagaaaattagatacatatgtggccccagatgtttgtataactctagaatgatctagactatgtatgtttaaattaactttttattgaatgtac

SEQ ID NO: 171442 - DNA, 120 bp, Artificial Sequence
  ENSG00000109171_39 (sequence is synthesized)
aggtgtccatttttgacgttaagcatggtcctttaaggtcacatgacgtttgatttgcaaacatttctatagccgaacttgtatatgtggttgcctccttaataaacagcctgaccataa

SEQ ID NO: 171443 - DNA, 120 bp, Artificial Sequence
  ENSG00000109171_40 (sequence is synthesized)
tgtttattattaaatttatattctttaagtgtttaattaatctctggatatggtaagattccttttttcctctcagttgcctacacttggttttaataaattactcagttgagtttttct

SEQ ID NO: 171444 - DNA, 120 bp, Artificial Sequence
  ENSG00000109171_41 (sequence is synthesized)
ttaaccacagaaacccaaatcatattgccctttcagatttagtcttcatggggttggattatgtcttatattttctctgtcagagttatttcatatatggattttacttgaaggaaattt

SEQ ID NO: 171445 - DNA, 120 bp, Artificial Sequence
  ENSG00000109171_42 (sequence is synthesized)
acagtttactctaaattgatttgttcttggaacttttttacctgctgtgaattgatacctagttataaaaagctagcatttgcctagatcataactatgtatggtatctagttagaaaaa

SEQ ID NO: 171446 - DNA, 120 bp, Artificial Sequence
  ENSG00000109171_43 (sequence is synthesized)
aacaagcaaaaagctattatgagtttccaagagggacaattaatgcattttcataccaaatgcgaatatttaggtgatcacgtgcatcttttcttgtatggatggaaaaatcaagaattg

SEQ ID NO: 171447 - DNA, 120 bp, Artificial Sequence
  ENSG00000109171_44 (sequence is synthesized)
tacactgtttaatgagttctccatattcctttaggagatatttgctttgcaattacatgttacaattagaataattacaattaaaataatattacatgttacaattagattaatagtgat

SEQ ID NO: 171448 - DNA, 120 bp, Artificial Sequence
  ENSG00000109171_45 (sequence is synthesized)
gagagggaaaaaagacacccttctgtttttttctctcaagccagtctaaaaacttgaagagccatttaaaattaaatgtcactatacttgtattataaatcaatacataagtttaaacct

SEQ ID NO: 171449 - DNA, 120 bp, Artificial Sequence
  ENSG00000109171_46 (sequence is synthesized)
gttatatactcagtgcaacagaaaaacccatatggaggttcaaccactgatgtattttgaatgatcctaaatataagtcttgggtggctaaatggccctctgcttaccagtctgaaaatg

SEQ ID NO: 171450 - DNA, 120 bp, Artificial Sequence
  ENSG00000109171_47 (sequence is synthesized)
aaaccgattatactcatcggccttatttactgtaatacaaactggttaaaactatgttaactgaatgctagtttgaaacaaattatctacattaagtcatcttaatgttttctctttaaa

SEQ ID NO: 171451 - DNA, 120 bp, Artificial Sequence
  ENSG00000109171_48 (sequence is synthesized)
agaaataaaaaaatctgtttcttctgatttcgaaagtaatagaaactctgctgtagaacataaactaaaaatattaaaaagtataaaggtaaaaaatgatagttgtctgcaatcccataa

SEQ ID NO: 171452 - DNA, 120 bp, Artificial Sequence
  ENSG00000109171_49 (sequence is synthesized)
tccggaaatattgaagtactgtccgtaacatggttatgacatgttaagtggaagggtagaaggtctttttttttttaaggagaaaatgtttcttttaaataaatgtttcttatgtaaaaa

SEQ ID NO: 171453 - DNA, 120 bp, Artificial Sequence
  ENSG00000109171_50 (sequence is synthesized)
ctagcccggatgcaggaagaaagtctccggcaagaatatgcagccaccacgtctcggcgcagttctggttcatcttgcaattctacaagacggggttttcaccatcaccacgcaattcac

SEQ ID NO: 171454 - DNA, 120 bp, Artificial Sequence
  ENSG00000109171_51 (sequence is synthesized)
attaaggaatatatatagggaaaacacaatgggattccaatcattgatttacttttaagtggaaacttcgcaaaggctgaaaaatttgcctcgcacttccctcaaagccaaacagttgct

SEQ ID NO: 171455 - DNA, 120 bp, Artificial Sequence
  ENSG00000109180_0 (sequence is synthesized)
tgcctccgggtcgcggtcattttgagcccctgtctggatgacttcttgcggctgttctacccctccccctccccgcggtaccttgcacttttctccctccctgccccctctcgagtccac

SEQ ID NO: 171456 - DNA, 120 bp, Artificial Sequence
  ENSG00000109180_1 (sequence is synthesized)
cctccgggccttctgcccctgatcgcttggttttccttgcagtcgcctgctgctgtcgtcgggaggaaagatgaatgggagggctgattttcgagagccgaatgcagaggttccaagacc

SEQ ID NO: 171457 - DNA, 120 bp, Artificial Sequence
  ENSG00000109180_2 (sequence is synthesized)
aattccccacatagggcctgattacattccaacagaggaagaaaggagagtcttcgcagaatgcaatgatgaaagcttctggttcagatctgtgcctttggctgcaacaagtatgttgat

SEQ ID NO: 171458 - DNA, 120 bp, Artificial Sequence
  ENSG00000109180_3 (sequence is synthesized)
tactcaaggattaattagtaaaggaatactttcaagtcatcccaaatatggttccatccctaaacttatacttgcttgtatcatgggatactttgctggaaaactttcttatgtgaaaac

SEQ ID NO: 171459 - DNA, 120 bp, Artificial Sequence
  ENSG00000109180_4 (sequence is synthesized)
ttgccaagagaaattcaagaaacttgaaaattccccccttggagaagctttacgatcaggacaagcacgacgatcttcaccacctgggcactattatcaaaagtcaaaatatgactcaag

SEQ ID NO: 171460 - DNA, 120 bp, Artificial Sequence
  ENSG00000109180_5 (sequence is synthesized)
aatgaatctgctcccactggtattactgatcatattgtccaaggacctgatcccaaccttgaagaaagtcctaaaagaaaaaatattacatatgaggaattaaggaataagaacagagag

SEQ ID NO: 171461 - DNA, 120 bp, Artificial Sequence
  ENSG00000109180_6 (sequence is synthesized)
tcatatgaagtatctttaacacaaaagactgacccctcagtcaggcctatgcatgaaagagtgccaaaaaaagaagtcaaagtaaacaagtatggagatacttgggatgagtgaaaaatt

SEQ ID NO: 171462 - DNA, 120 bp, Artificial Sequence
  ENSG00000109180_7 (sequence is synthesized)
acatcattggacatgaaggagtttcaacatccagcttcatctaggtggtcatgattacctgcatgctttgagctcagcagcagtcttcataaacacatttaaaacaagatcctgggtttt

SEQ ID NO: 171463 - DNA, 120 bp, Artificial Sequence
  ENSG00000109180_8 (sequence is synthesized)
tgtggtttgacttctatggtgttttaaaaaaacacagatttttagtgttaatattgtgtaaatgtactcaccttagggattcatttgaatgatggtattataccatgattgtatacagtt

SEQ ID NO: 171464 - DNA, 120 bp, Artificial Sequence
  ENSG00000109180_9 (sequence is synthesized)
tgtgaaattgttgcaagggcaaagataactcttaaaaaaccgtcgagattacaatgctctagaatcagcatataagaaaataaatgatatctgcatgttgaattggggtggatgggggga

SEQ ID NO: 171465 - DNA, 120 bp, Artificial Sequence
  ENSG00000109180_10 (sequence is synthesized)
gcaagcataatttttaagtgtgaagctttgcatcaagaaattattaaaaagctttttttctccagtattttctgtattatcttaatgtttatggcaaataaaatgtaaaggaacatgcaa

SEQ ID NO: 171466 - DNA, 120 bp, Artificial Sequence
  ENSG00000109180_11 (sequence is synthesized)
tgatcgcttggttttccttgcagtcgcctgctgctgtcgtcgggaggtgggtgaggtgacgcaaacagccccgttgttgccctccgcgtatcccctcaccacctttgcggccatccacga

SEQ ID NO: 171467 - DNA, 120 bp, Artificial Sequence
  ENSG00000109180_12 (sequence is synthesized)
ctttcgcaccttccgccattttcctgcctgtgagggtggacagatcgcgctcgggtctcggcctcctgagtgccggtgactgcgggaggcgacggagtgcttctgggggtgtgagctggg

SEQ ID NO: 171468 - DNA, 120 bp, Artificial Sequence
  ENSG00000109180_13 (sequence is synthesized)
cccactggtattactgatcatattgtccaaggtagaaacttctcttgaaatgaatttcaacattttatggtccaactcaaagtaaacaagtatggagatacttgggatgagtgaaaaatt

SEQ ID NO: 171469 - DNA, 120 bp, Artificial Sequence
  ENSG00000109180_14 (sequence is synthesized)
taatcatgtaggtataggaaataaagtcatctataatatttctataatatggctataatatggctataaatctataatatggctggaggcagtgggcagtggttcatgcctgtaatccca

SEQ ID NO: 171470 - DNA, 120 bp, Artificial Sequence
  ENSG00000109180_15 (sequence is synthesized)
ctgggcaacaaagcgagaccctgtctttacaaaaaaataaaaattagctggcgatggtgtcgtgtgcctgtagtcctagttacttaagaggctgagttgggaggatcagttgaacccagt

SEQ ID NO: 171471 - DNA, 120 bp, Artificial Sequence
  ENSG00000109180_16 (sequence is synthesized)
taagaggctgagttgggaggatcagttgaacccagtggttctgggttgcagtgagctgtggtcacaccactgaactccagcctgtgcgactgagtgagaccctgtgtctaaaaaaataaa

SEQ ID NO: 171472 - DNA, 120 bp, Artificial Sequence
  ENSG00000109180_17 (sequence is synthesized)
agtgagaccctgtgtctaaaaaaataaaaatataatgaatgtgatttatgtagataaattgataatatagtaaataggtaaatgccttaaaaagcatttttaaagaatttgtaaattcta

SEQ ID NO: 171473 - DNA, 120 bp, Artificial Sequence
  ENSG00000109180_18 (sequence is synthesized)
aatttgtatgtcttattgaaaacatctttgaaaaacagtacttttggtgtggtatgtggtaggtaagactttgtaagttaagtagttgttcactgaatgttagcatcttttttttttaat

SEQ ID NO: 171474 - DNA, 120 bp, Artificial Sequence
  ENSG00000109180_19 (sequence is synthesized)
gttcatatggccttttttgctgtttataaattgtataaactatgttcactatttgatcctgtcaaccaatattaggagtaaccactgcattatatttacatttgactctatgataatatg

SEQ ID NO: 171475 - DNA, 120 bp, Artificial Sequence
  ENSG00000109180_20 (sequence is synthesized)
taatattcacattttgactctctttgggagaaataaagaataaatgttagttcccaggccaaaataacagttgatactttcttctgcatcaacattgcatctgttagactggaatgaaaa

SEQ ID NO: 171476 - DNA, 120 bp, Artificial Sequence
  ENSG00000109180_21 (sequence is synthesized)
cattgcatctgttagactggaatgaaaacaacacatattctgattaaaggctatgttttatacttttcaagtaattattttcaactttttttcctttttttttgagacagagttttgctc

SEQ ID NO: 171477 - DNA, 120 bp, Artificial Sequence
  ENSG00000109180_22 (sequence is synthesized)
ctccgcctcctgggttcaagcgattctgcctcagcctccttagtagttaggattacaggtgtgtgccaccacgcccaactaattttgtgtttttagtagagatgaggtttcttgttggcc

SEQ ID NO: 171478 - DNA, 71 bp, Artificial Sequence
  ENSG00000109180_23 (sequence is synthesized)
ttgtgagccattgtgcctggcctattttcagtatttttgtttaaattttgtaaaaaggtaaaataaatgat

SEQ ID NO: 171479 - DNA, 120 bp, Artificial Sequence
  ENSG00000109180_24 (sequence is synthesized)
tatttttgtttaaattttgtaaaaaggtaaaataaatgatttttgaaaatagctggagttgttttcatagagtctgtggttataggactatttaactatatattgagtaaaatctatgct

SEQ ID NO: 171480 - DNA, 120 bp, Artificial Sequence
  ENSG00000109180_25 (sequence is synthesized)
tatatattatgatacatatttttcttctggctgtggtttagtttttaaaatttttgatgtccattttaatttttagaaataaaagcttaaaaatatgggtggaagtagatttcagtttga

SEQ ID NO: 171481 - DNA, 120 bp, Artificial Sequence
  ENSG00000109180_26 (sequence is synthesized)
tgattatcttggtgaaagtatagtacctgtgaaatggtggtaataatttgattctttattctattttgattgtagctccttttgtaaggagcatttgtaaaatttagttgctttagagtt

SEQ ID NO: 171482 - DNA, 120 bp, Artificial Sequence
  ENSG00000109180_27 (sequence is synthesized)
ttttctccctccctgccccctctcgagtccaccctccgggccttctgcccctgatcgcttggttttccttgcagtcgcctgctgctgtcgtcgggagctgtgcctttggctgcaacaagt

SEQ ID NO: 171483 - DNA, 120 bp, Artificial Sequence
  ENSG00000109180_28 (sequence is synthesized)
attcctaggctgctggctctcagacccgcagtgaggtctgacgtcatttcctgccgaaagatgaatgggagggctgattttcgagagccgaatgcagaggttccaagaccaattccccct

SEQ ID NO: 171484 - DNA, 63 bp, Artificial Sequence
  ENSG00000109180_29 (sequence is synthesized)
tgcctttggctgcaacaagtatgttgattactcaaggattaattagtaaaggaatactttcaa

SEQ ID NO: 171485 - DNA, 120 bp, Artificial Sequence
  ENSG00000109180_30 (sequence is synthesized)
catccctaaacttatacgtaagtatgaacaacattgtagttttcatagctttttaaaacttaaataaaattatttttatcaaatgttttatcatgtcttactcatattagttatgtggtt

SEQ ID NO: 171486 - DNA, 120 bp, Artificial Sequence
  ENSG00000109180_31 (sequence is synthesized)
acatgctctgataaatcagtttgttaaagcatttcattaagtggattacttggatattttattgttagcataaaaaatcatcagttgaaataggcatttttttgtgtctttataatgtaa

SEQ ID NO: 171487 - DNA, 120 bp, Artificial Sequence
  ENSG00000109180_32 (sequence is synthesized)
gtataaactttatttgatgaccttttctgctggatatcacctgtgtgttctaccatcaatcatcaacctaaactcagcatgtttgttcatttgtttcttcattcattcaacttttcttga

SEQ ID NO: 171488 - DNA, 120 bp, Artificial Sequence
  ENSG00000109180_33 (sequence is synthesized)
ggaccagtaggtgtcaaggactctgctagacgtggaagaagatgaataacacttggttcttgtccctgaaaaactttcagtctgttagaagatatagaaatacaaggatgaattactagt

SEQ ID NO: 171489 - DNA, 120 bp, Artificial Sequence
  ENSG00000109180_34 (sequence is synthesized)
atgtcccagtaattgaaaatactaaggcaagcttagtggaatagtgaagaagaaatgataaatcgtgtctcaggaagtagagctccaggaaaggtataaaaaggttacatttgataggct

SEQ ID NO: 171490 - DNA, 120 bp, Artificial Sequence
  ENSG00000109180_35 (sequence is synthesized)
gggttttaaaggctttcagcttccctgtctgtaatacaagaaagaactgttgtcaagtgagaaaatccatgtgaaaatgctttgtgaagtttgtaaatactagctttgaagatcacacat

SEQ ID NO: 171491 - DNA, 120 bp, Artificial Sequence
  ENSG00000109180_36 (sequence is synthesized)
gcagtcgcctgctgctgtcgtcgggaggaaagatgaatgggagggctgattttcgagagccgaatgcagaggttccaagaccaattccccgtaactatctattaagtatttataattaga

SEQ ID NO: 171492 - DNA, 120 bp, Artificial Sequence
  ENSG00000109180_37 (sequence is synthesized)
gcctccgggtcgcggtcattttgagcccctgtctggatgacttcttgcggctgttctacccctccccctccccgcggaaagatgaatgggagggctgattttcgagagccgaatgcagag

SEQ ID NO: 171493 - DNA, 120 bp, Artificial Sequence
  ENSG00000109180_38 (sequence is synthesized)
agatgaactgaggcctctgctagcaatcatgtcagtaagctgccttggaagtggatactgcagccccaagagagccttcagatgactgtaaccccagcctacctcttaatcacagcctgg

SEQ ID NO: 171494 - DNA, 120 bp, Artificial Sequence
  ENSG00000109180_39 (sequence is synthesized)
tgagaaaaaccgtagcctcagagagatcacggtaccctgccagaggttgtagaacttgttggaaacttggatcaagagggtgtgacaaataaccaggaaagatgaatgggagggctgatt

SEQ ID NO: 171495 - DNA, 120 bp, Artificial Sequence
  ENSG00000109181_0 (sequence is synthesized)
gaaaagaattatcacattgcacaaggatggctctgaaatggactacagttctgctgatacaactcagtttttactttagctctgggagttgtggaaaggtgctggtatgggccgcagaat

SEQ ID NO: 171496 - DNA, 120 bp, Artificial Sequence
  ENSG00000109181_1 (sequence is synthesized)
acagcctttggatgaatatgaagacaatcctgaaagaacttgttcagagaggtcatgaggtgactgtactggcatcttcagcttccattctttttgatcccaacgactcatccactctta

SEQ ID NO: 171497 - DNA, 120 bp, Artificial Sequence
  ENSG00000109181_2 (sequence is synthesized)
aacttgaagtttatcctacatctttaactaaaactgaatttgagaatatcatcatgcaattggttaagagattgtcagaaattcaaaaagatacattttggttacctttttcacaagaac

SEQ ID NO: 171498 - DNA, 120 bp, Artificial Sequence
  ENSG00000109181_3 (sequence is synthesized)
aagaaatcctgtgggcaattaatgacataattagaaacttctgtaaagatgtagtttcaaataagaaacttatgaaaaaactacaagagtcaagatttgacatcgtttttgcagatgctt

SEQ ID NO: 171499 - DNA, 120 bp, Artificial Sequence
  ENSG00000109181_4 (sequence is synthesized)
atttaccctgtggtgagctgctggctgagctatttaacataccctttgtgtacagtcacagcttcagtcctggctactcatttgaaaggcacagtggaggatttattttccctccttcct

SEQ ID NO: 171500 - DNA, 120 bp, Artificial Sequence
  ENSG00000109181_5 (sequence is synthesized)
acgtacctgttgttatgtcaaaattaagtgatcaaatgactttcatggagagggtaaaaaatatgctctatgtgctttattttgacttttggttccaaatatttaatatgaagaagtggg

SEQ ID NO: 171501 - DNA, 120 bp, Artificial Sequence
  ENSG00000109181_6 (sequence is synthesized)
atcagttttacagtgaagttttaggaagacccactacattatctgagacaatgaggaaagctgacatatggcttatgcgaaactcctggaattttaaatttcctcatccattcttaccaa

SEQ ID NO: 171502 - DNA, 120 bp, Artificial Sequence
  ENSG00000109181_7 (sequence is synthesized)
atgttgattttgttggaggactccactgcaaacctgccaaacccctacctaaggaaatggaggagtttgtacagagctctggagaaaatggtgttgtggtgttttctctggggtcaatgg

SEQ ID NO: 171503 - DNA, 120 bp, Artificial Sequence
  ENSG00000109181_8 (sequence is synthesized)
tcagtaacatgacagaagaaagggccaacgtaattgcaacagcccttgccaagatcccacaaaaggttctttggagatttgatgggaataaaccagatgccttaggtctcaatactcgac

SEQ ID NO: 171504 - DNA, 120 bp, Artificial Sequence
  ENSG00000109181_9 (sequence is synthesized)
tgtacaagtggataccccagaatgaccttctaggtcatccaaaaaccagagcttttataactcatggtggagccaatggcatctatgaggcaatctaccatgggatccctatggtgggca

SEQ ID NO: 171505 - DNA, 120 bp, Artificial Sequence
  ENSG00000109181_10 (sequence is synthesized)
ttccattgttttttgatcaacctgataatattgctcacatgaaggccaagggagcagctgttagagtggacttcaacacaatgtcgagtacagacctgctgaatgcactgaagacagtaa

SEQ ID NO: 171506 - DNA, 120 bp, Artificial Sequence
  ENSG00000109181_11 (sequence is synthesized)
gagccaaacatcttcgagttgcagcccacaacctcacctggttccagtaccactctttggatgtgattgggttcctgctggcttgtgtggcaaccgtgctatttatcatcacaaagtgtt

SEQ ID NO: 171507 - DNA, 120 bp, Artificial Sequence
  ENSG00000109181_12 (sequence is synthesized)
gtctgttttgtttctggaagtttgctagaaaaggaaagaagggaaaaagggattagttatatctgagatttgaagctggaaaacctgatagataggaatacttcagttgattccagcaat

SEQ ID NO: 171508 - DNA, 120 bp, Artificial Sequence
  ENSG00000109181_13 (sequence is synthesized)
aaatattgtgatgcaagatttctttcttcctgtgacaaaaaaaaatcctttcgaagtctaccttgtcaagtaaaaatttgtttttcagagatttaccacccagttaatggttagaaatat

SEQ ID NO: 171509 - DNA, 120 bp, Artificial Sequence
  ENSG00000109181_14 (sequence is synthesized)
tctgtggcaatgaagaaaacactaggggaaataaaaaataatataaagccatatgagcttgtattgaaatttgttgcacttatattgaaatgtgatcatggctcacttcagcctcaactt

SEQ ID NO: 171510 - DNA, 120 bp, Artificial Sequence
  ENSG00000109181_15 (sequence is synthesized)
actaagctcaagaggttctctcacctcagccccccaagtagctgggaccataggtgcatgtcaccatgtccaactaattttttattttttgtagtgatgagatctcattgtgttctccat

SEQ ID NO: 171511 - DNA, 120 bp, Artificial Sequence
  ENSG00000109181_16 (sequence is synthesized)
caaactcctgggctcaaacaatcctcccattttagcatcccaaagggatgagattacaggtatgtaccaccataactttacaaaatgagatttttatataagaatgattcaaatgttcag

SEQ ID NO: 171512 - DNA, 120 bp, Artificial Sequence
  ENSG00000109181_17 (sequence is synthesized)
atgttcagggatgaaagagtcactaacataaaagaagaatgggatgaggtgagaaggatgaatacaaaaataattagatattcttgaaatcagaaatgtgctccctaattatatgaaatg

SEQ ID NO: 171513 - DNA, 120 bp, Artificial Sequence
  ENSG00000109181_18 (sequence is synthesized)
ttgtttgattacataaaataaagtggaaatgaatgattgactgaacagcccacaagaagaatcacttaatgctctgaaaattaccagtaaactgattaaaatctaaaattgctttctgtt

SEQ ID NO: 171514 - DNA, 120 bp, Artificial Sequence
  ENSG00000109181_19 (sequence is synthesized)
aaagctttactgattagtttttcttccaaagctctcttgtttctagttgttttcttggtcttaactacccattatatgctttgttaaagtgtttatgccctgattcaatgtgattatctc

SEQ ID NO: 171515 - DNA, 120 bp, Artificial Sequence
  ENSG00000109181_20 (sequence is synthesized)
aatttttatttcattctgtcctaactcttgcaacctgcatgtcctctttattattgatcaatccaactgcaaagttcaccttacctgactaaggattattcattaagttttacttgttta

SEQ ID NO: 171516 - DNA, 120 bp, Artificial Sequence
  ENSG00000109181_21 (sequence is synthesized)
tctgacatttattattttgtctctttgctagtcactctgagccatggtcatgatgacttaggattctggatctcttatgaataacaaatttatccttaataaagtctctatactaaagaa

SEQ ID NO: 171517 - DNA, 120 bp, Artificial Sequence
  ENSG00000109182_0 (sequence is synthesized)
ctcacttggcaacgggacgcgggaacgaggggcgcggacgcaggcccgggaggacgcggcggcgggaacctgggggcgcagggctagggcagcgggcccgacccgcacggctttcctgga

SEQ ID NO: 171518 - DNA, 120 bp, Artificial Sequence
  ENSG00000109182_1 (sequence is synthesized)
ggctttcctggaaagcgctgcccctcgccgcggcgatgccctcgctgtggagagaaatcctcttggagtcgctgctgggatgtgtttcttggtctctctaccatgacctgggaccgatga

SEQ ID NO: 171519 - DNA, 120 bp, Artificial Sequence
  ENSG00000109182_2 (sequence is synthesized)
tctattactttcctttgcaaacactagaactcactgggcttgaaggttttagtatagcatttctttctccaatattcctaacaattactcctttctggaaattggttaacaagaagtgga

SEQ ID NO: 171520 - DNA, 120 bp, Artificial Sequence
  ENSG00000109182_3 (sequence is synthesized)
tgctaaccctgctgaggataatcactattggcagcatagcctccttccaggctccaaatgccaaacttcgactgatggttcttgcgcttggggtgtcttcctcactgatagtgcaagctg

SEQ ID NO: 171521 - DNA, 120 bp, Artificial Sequence
  ENSG00000109182_4 (sequence is synthesized)
tgacttggtggtcaggaagtcatttgcaaaggtacctcagaatttggggattcattttaggacagattgttcttgttgttctacgcatatggtatacttcactaaacccaatctggagtt

SEQ ID NO: 171522 - DNA, 120 bp, Artificial Sequence
  ENSG00000109182_5 (sequence is synthesized)
atcagatgtccaacaaagtgatactgacattaagtgccatagccacacttgatcgtattggcacagatggtgactgcagtaaacctgaagaaaagaagactggtgaggtagccacgggga

SEQ ID NO: 171523 - DNA, 120 bp, Artificial Sequence
  ENSG00000109182_6 (sequence is synthesized)
tggcctctagacccaactggctgctggcaggggctgcttttggtagccttgtgttcctcacccactgggtttttggagaagtctctcttgtttccagatgggcagtgagtgggcatccac

SEQ ID NO: 171524 - DNA, 120 bp, Artificial Sequence
  ENSG00000109182_7 (sequence is synthesized)
atccagggccagatcctaacccatttggaggtgcagtactgctgtgcttggcaagtggattgatgcttccatcttgtttgtggtttcgtggtactggtttgatctggtgggttacaggaa

SEQ ID NO: 171525 - DNA, 120 bp, Artificial Sequence
  ENSG00000109182_8 (sequence is synthesized)
cagcttcagctgcggggctcctttacctgcacacatgggcagctgctgtgtctggctgtgtcttcgccatctttactgcatccatgtggccccaaacacttggacaccttattaactcag

SEQ ID NO: 171526 - DNA, 120 bp, Artificial Sequence
  ENSG00000109182_9 (sequence is synthesized)
ggacaaaccctgggaaaaccatgaccattgccatgatattttatcttctagaaatatttttctgtgcctggtgcacagcttttaagtttgtcccaggaggtgtctacgctagagaaagat

SEQ ID NO: 171527 - DNA, 120 bp, Artificial Sequence
  ENSG00000109182_10 (sequence is synthesized)
atgctatttggtcctaagaaaaaccttgacttgcttcttcaaacaaaaaacagttctaaagtgcttttcagaaagagtgaaaaatacatgaaactttttctgtggctgcttgttggtgtg

SEQ ID NO: 171528 - DNA, 120 bp, Artificial Sequence
  ENSG00000109182_11 (sequence is synthesized)
ggattgttgggattaggactacggcataaagcctatgagagaaaactgggcaaagtggcaccaaccaaagaggtctctgctgccatctggcctttcaggtttggatatgacaatgaaggg

SEQ ID NO: 171529 - DNA, 120 bp, Artificial Sequence
  ENSG00000109182_12 (sequence is synthesized)
tggtctagtctagaaagatcagctcacctgctcaatgaaacaggtgcagatttcataacaattttggagagtgatgcttctaagccctatatggggaacaatgacttaaccatgtggcta

SEQ ID NO: 171530 - DNA, 120 bp, Artificial Sequence
  ENSG00000109182_13 (sequence is synthesized)
ggggaaaagttgggtttctatacagactttggtccaagcacaaggtatcacacttgggggattatggctttgtcaagatacccaattgtgaaatctgagcatcaccttcttccgtcacca

SEQ ID NO: 171531 - DNA, 120 bp, Artificial Sequence
  ENSG00000109182_14 (sequence is synthesized)
gagggcgagatcgcaccagccatcacattgaccgttaacatttcgggcaagctggtggattttgtcgtgacacactttgggaaccacgaagatgacctcgacaggaaactgcaggctatt

SEQ ID NO: 171532 - DNA, 120 bp, Artificial Sequence
  ENSG00000109182_15 (sequence is synthesized)
gctgtttcaaaactactgaaaagtagctctaatcaagtgatatttctgggatatatcacttcagcacctggctccagagattatctacagctcactgaacatggcaatgtgaaggatatc

SEQ ID NO: 171533 - DNA, 120 bp, Artificial Sequence
  ENSG00000109182_16 (sequence is synthesized)
gacagcactgatcatgacagatggtgtgaatacattatgtatcgagggctgatcaggttgggttatgcaagaatctcccatgctgaactgagtgattcagaaattcagatggcaaaattt

SEQ ID NO: 171534 - DNA, 120 bp, Artificial Sequence
  ENSG00000109182_17 (sequence is synthesized)
aggatccctgatgaccccactaattatagagacaaccagaaagtggtcatagaccacagagaagtttctgagaaaattcattttaatcccagatttggatcctacaaagaaggacacaat

SEQ ID NO: 171535 - DNA, 120 bp, Artificial Sequence
  ENSG00000109182_18 (sequence is synthesized)
tatgaaaacaaccatcattttcatatgaatactcccaaatactttttatgaaacatttaaaacaagaagttattggctgggaaaatctaagaaaaaaagtatgtaagataaaaagaagag

SEQ ID NO: 171536 - DNA, 120 bp, Artificial Sequence
  ENSG00000109182_19 (sequence is synthesized)
attaatgaaagtgggaaaatacacatgaagaacctcaacttaaaaaacacatggtatctatgcagtgggaaattacctccatttgtaaactatgttgcttaataaaaacatttctctaaa

SEQ ID NO: 171537 - DNA, 120 bp, Artificial Sequence
  ENSG00000109182_20 (sequence is synthesized)
ggggaaaagttgggtttctatacagactttggtccaagcacaaggtatcacacttgggggtgagtataccttgggagttaatcccgaagatagtcatgaaaggctaggctgcataggctt

SEQ ID NO: 171538 - DNA, 120 bp, Artificial Sequence
  ENSG00000109182_21 (sequence is synthesized)
tattgtaatatctttggtgaatgtgccccagtgatgcttcttgggggatgaggaggtgctggagatatgcacattctgtaatttttcaaatggtttttctgtggctggatatttccagtt

SEQ ID NO: 171539 - DNA, 120 bp, Artificial Sequence
  ENSG00000109182_22 (sequence is synthesized)
cttcagcattataaaccaatcaatctaggagctgaggttgcagcaccaagcatgtctggcctggatgctgtcctcatggagcttaccttccagtgtaagacagaaaatcaacatgtacac

SEQ ID NO: 171540 - DNA, 120 bp, Artificial Sequence
  ENSG00000109182_23 (sequence is synthesized)
tttctcatctgtctggagattggatcagtatacccctaaggtctgttctggtcctaaaggctataaattggtcatcctctaagctcgactgctttcctgtctgattcttttctctctcac

SEQ ID NO: 171541 - DNA, 120 bp, Artificial Sequence
  ENSG00000109182_24 (sequence is synthesized)
aataaaggaaaagacctagattgaagtcttcaagctgagtctgcgaggcgcccgcgagagaccccgtcgcccgagttcccagcagccctgggattgtgcccaaggagcgcgaattctcct

SEQ ID NO: 171542 - DNA, 120 bp, Artificial Sequence
  ENSG00000109184_0 (sequence is synthesized)
agcttcgagccgaggtgcagtgagctggtggggggaccgcgaggcgagcgcgggagcctgggcggcgagccgggtgtgagctgcctgaaaatgcactcggatgccgccgctgtcaatttt

SEQ ID NO: 171543 - DNA, 120 bp, Artificial Sequence
  ENSG00000109184_1 (sequence is synthesized)
cagctgaactctcatctctcaacactggcaaatattcataagatctaccacacccttaataagctgaacctaacagaagacattggccaagacgatcaccaaacaggaagtctgcggtct

SEQ ID NO: 171544 - DNA, 120 bp, Artificial Sequence
  ENSG00000109184_2 (sequence is synthesized)
tgcagttcttcagactgctttaataaagtgatgccaccaaggaaaaagagaagacctgcctctggagatgatttatctgccaagaaaagtagacatgatagcatgtatagaaaatatgat

SEQ ID NO: 171545 - DNA, 120 bp, Artificial Sequence
  ENSG00000109184_3 (sequence is synthesized)
tcgactagaataaagactgaagaagaagccttttcaagtaaaaggtgcttggaatggttctatgaatatgcaggaactgatgatgttgtaggccctgaaggcatggagaaattttgtgaa

SEQ ID NO: 171546 - DNA, 120 bp, Artificial Sequence
  ENSG00000109184_4 (sequence is synthesized)
gacattggtgttgaaccagaaaacgtagttatgcttgtcctagcttggaaattggatgcacaaaacatgggttattttactctacaggagtggttaaaaggaatgacttctctccaatgt

SEQ ID NO: 171547 - DNA, 120 bp, Artificial Sequence
  ENSG00000109184_5 (sequence is synthesized)
gatacaacagaaaaactcagaaatactttggattacttaagatcattcttaaatgattctacaaactttaaacttatttacagatatgcgtttgactttgcacgggaaaaggaccagcgc

SEQ ID NO: 171548 - DNA, 120 bp, Artificial Sequence
  ENSG00000109184_6 (sequence is synthesized)
agcctagacataaacactgccaagtgcatgttgggactgttattaggaaaaatctggcccctttttccagtttttcaccaattcttagagcaatcaaaatacaaagttattaataaagac

SEQ ID NO: 171549 - DNA, 120 bp, Artificial Sequence
  ENSG00000109184_7 (sequence is synthesized)
cagtggtgcaatgtcctagagtttagcagaacaattaatcttgacctcagcaactatgatgaagatggagcatggccagttttgttggacgagtttgtggagtggtataaagacaaacag

SEQ ID NO: 171550 - DNA, 120 bp, Artificial Sequence
  ENSG00000109184_8 (sequence is synthesized)
atgtcctaggactttatgcatagcagcgagagagtcactgttaccacagttttgtcacccattagccataaattgctgtttgtatcaaagcgcatgctgcttctcttgcactgtttccct

SEQ ID NO: 171551 - DNA, 120 bp, Artificial Sequence
  ENSG00000109184_9 (sequence is synthesized)
ttcgcagggacatgttggtgtttgctattgaattggccagctctgcttgctgtgtggcattgttctcttggaaggctgctttgcagtttgtatttacactacagattggtgaatttgcca

SEQ ID NO: 171552 - DNA, 120 bp, Artificial Sequence
  ENSG00000109184_10 (sequence is synthesized)
acgtcctcactgtgattatgtgtatattgctgtttaaattttgtatatgtgtataaaaggaaaaaggttcacctagagattatttctgaaaaatgtattgtaaaaataattttgtggcat

SEQ ID NO: 171553 - DNA, 120 bp, Artificial Sequence
  ENSG00000109184_11 (sequence is synthesized)
ttctagtccctttttttgaatgaaccaattatactttatttggtctcctatgtagcatttcagaaaacaagagaaaactgttaccatgaacaaacattgccagaattaaccttactgttt

SEQ ID NO: 171554 - DNA, 120 bp, Artificial Sequence
  ENSG00000109184_12 (sequence is synthesized)
aagaggccaacttctggaaggaggtaggagtcataactttttagaggcatatgccaaatatcatttggtatacttaacaatattagtgttttaaaatgatgagttataattatttgaaca

SEQ ID NO: 171555 - DNA, 120 bp, Artificial Sequence
  ENSG00000109184_13 (sequence is synthesized)
tatagatatgtaacatgccacaaatcatttctaccatgcaaggtgtataagttgtttattttttagtgttaaaactataatagcttgaatataggtaccaatgaacaaattcaaattgca

SEQ ID NO: 171556 - DNA, 120 bp, Artificial Sequence
  ENSG00000109184_14 (sequence is synthesized)
cctcttttcttaaaagaatgggatttaaactcttataaacattctttaacttttttgtttgtttgttctctttttttccttttgcattcttctagccagtgattgatctgctaatgcttt

SEQ ID NO: 171557 - DNA, 120 bp, Artificial Sequence
  ENSG00000109184_15 (sequence is synthesized)
ctttgccactctaagtaaaatttatttcacctcctcaatgaaaacctcatggttttgctggctgtttataactgcatcgcacttctagttgtggcttgaattttcagttaagctttcatg

SEQ ID NO: 171558 - DNA, 120 bp, Artificial Sequence
  ENSG00000109184_16 (sequence is synthesized)
gtatgtaattttccagccttttgagaaaacaagcatactataagtgagagctgttttgttttccttgtttgtttgtttcatgctaggcttttcctggcagcatgtccattgcaggcagtg

SEQ ID NO: 171559 - DNA, 120 bp, Artificial Sequence
  ENSG00000109184_17 (sequence is synthesized)
gctaacccagtacatgctaggacctgtcctagaggggccacttttcattacctgagttatttgtacagaagggcaatagccattatttttgtggatgaggaaacaagaataaacagaatg

SEQ ID NO: 171560 - DNA, 120 bp, Artificial Sequence
  ENSG00000109184_18 (sequence is synthesized)
tatgtctttttttttttttttttttgccattcttgaggaaatatagagatgacatgttttcaccccaactatctggtgctattgaatgactaattcagtccctaaagttctgtgaaaaca

SEQ ID NO: 171561 - DNA, 120 bp, Artificial Sequence
  ENSG00000109184_19 (sequence is synthesized)
cctaaagttctgtgaaaacacaaaagtctaatgatttgagtgagtaaaaggtaatggtgcatttgaacaagtaaatgctgtcgtggtcagcaagatccgtgatttgaacatgtgatgact

SEQ ID NO: 171562 - DNA, 120 bp, Artificial Sequence
  ENSG00000109184_20 (sequence is synthesized)
ggaaaaaggtttgggttatttggaactctggctaaaacttctttcgggtgacatgtgatcgtttaaatggcattaagtgaataaagcacacagacagtgctactcttgaccactatttta

SEQ ID NO: 171563 - DNA, 120 bp, Artificial Sequence
  ENSG00000109184_21 (sequence is synthesized)
ccatttctttgcaaacagtgttcacattttcatattttttccctaactaaaccaccaaagaaagaaattttgtatgtatatacagtgtgtgtgtatacaaaatcatgatatagtagaatg

SEQ ID NO: 171564 - DNA, 120 bp, Artificial Sequence
  ENSG00000109184_22 (sequence is synthesized)
caactactttctttttctaccaaacgaaaggttttatttgctgtgaaataaaccagaagtttaaaaaaccctgtagtgattaagcatacttaaccactccttatttgtagattcactttc

SEQ ID NO: 171565 - DNA, 120 bp, Artificial Sequence
  ENSG00000109184_23 (sequence is synthesized)
aaccttaaaaattaataccagtttgcataaaccaatatctgaaaagaacaggaaatgttaatggcaagcaacagctattaatactgatgtgatggatgcatttgttttgcagtggtgact

SEQ ID NO: 171566 - DNA, 120 bp, Artificial Sequence
  ENSG00000109184_24 (sequence is synthesized)
ggcctaggcaggtttggatctgtgaagaattgattcattttcaaaattattccataaagttaaaaagttacactttaaaggcaacaggtcatacagttctttaaatctgatcaactgtag

SEQ ID NO: 171567 - DNA, 120 bp, Artificial Sequence
  ENSG00000109184_25 (sequence is synthesized)
ctttatttaaagcaaatataaatcatagatgaagttattttaaacactatgttagaatatagagatttttaaaaaatgctgataagcacagttaattctaaaatgagaggattgttacag

SEQ ID NO: 171568 - DNA, 120 bp, Artificial Sequence
  ENSG00000109184_26 (sequence is synthesized)
gagggagatgttacagttaatccacaatcaacattttgatggtagggaaaaaactgcgtaaaaactattgcattatgtatgataagaaagtaagtattccaaagggataatcttgcatat

SEQ ID NO: 171569 - DNA, 120 bp, Artificial Sequence
  ENSG00000109184_27 (sequence is synthesized)
taagaaaactccaaataatctttaaactgccttgaaaaataaacctctttgactgctgagcggcagagtgcttacccttgattgtcttgattttatatatttatttctaaggggagaaaa

SEQ ID NO: 171570 - DNA, 120 bp, Artificial Sequence
  ENSG00000109184_28 (sequence is synthesized)
aggggtcagacagagtaatatgatacattttcttaaaaacttctctaagttgcacaaaactgaacaatcatcaagcacttatttactggctaatgttgaataaattagggtgccttcatc

SEQ ID NO: 171571 - DNA, 120 bp, Artificial Sequence
  ENSG00000109184_29 (sequence is synthesized)
tgggttttctttagtacctaagtctacaaccctttctctttttctattgtgtttcgaactccacattgcaatactctgttgtcatggaatacaacctttagatgtttactgctgaagtag

SEQ ID NO: 171572 - DNA, 120 bp, Artificial Sequence
  ENSG00000109184_30 (sequence is synthesized)
gtcagaaattgtattatttgatttgcctcaaacatccactgtaatgttacatgcaccttttttgaagcatgaactctgaattatgtttttataaatctgactaggcaaacctagattctg

SEQ ID NO: 171573 - DNA, 120 bp, Artificial Sequence
  ENSG00000109184_31 (sequence is synthesized)
gtttcacaatggatttattttctctctcagtctccattttaacagtgcttttgaagtttatacagaaagctttaaaagttagtttgtgcccttggtttttattcttaaaactgctaaaat

SEQ ID NO: 171574 - DNA, 120 bp, Artificial Sequence
  ENSG00000109184_32 (sequence is synthesized)
acctctgtaagccttatcctttattctttcatatgttgtataataaatgtatagatttcattgaccaactaaaatgttgggtgtctgtaaatgagaccaaaacgtgggttgcttttttca

SEQ ID NO: 171575 - DNA, 120 bp, Artificial Sequence
  ENSG00000109184_33 (sequence is synthesized)
taaaataatttctattgggggttactgttcaatgacagcaggtaacctataactgtgaatgcttcgtgtcgtcagtatttgcattacattcataaaagtgtgcaagtcctgtgactccca

SEQ ID NO: 171576 - DNA, 120 bp, Artificial Sequence
  ENSG00000109184_34 (sequence is synthesized)
gcttaactgaaatactgttatgccacctaacttgagtacagcaaactggttttaggtttcaatgacattgatgtaaaatgatatcccatgaataaaaagtatttgtgtttggtttcagaa

SEQ ID NO: 171577 - DNA, 120 bp, Artificial Sequence
  ENSG00000109184_35 (sequence is synthesized)
tttgtagttctggctggtgaggtagaagggagtatatcaaatacctgttctgttcagttcttactgattatttgttaatcagagaaaaacttgtattaagtgcttaccagttctatatta

SEQ ID NO: 171578 - DNA, 120 bp, Artificial Sequence
  ENSG00000109184_36 (sequence is synthesized)
ggagtgactgtgtttaaacactgtagttaaaagctgaagcctgcaaatgcaggaaataaaacgtttaaaatatacttaaaatactgattgaatagatgtctggtttgggtaaaagaatat

SEQ ID NO: 171579 - DNA, 120 bp, Artificial Sequence
  ENSG00000109184_37 (sequence is synthesized)
ggctggacgtgcgatgaagggccgagatcggagtgtccggggtgcatggaggtggaggcagcgttgggctgtagcgggcagggccggggatgtgggggggtggcaccggcggggagaggg

SEQ ID NO: 171580 - DNA, 120 bp, Artificial Sequence
  ENSG00000109184_38 (sequence is synthesized)
aatactgtgctgggtgtgtgttcggtggtggtgcagagtgaagccacaggaactgatgatgttgtaggccctgaaggcatggagaaattttgtgaagacattggtgttgaaccagaaaac

SEQ ID NO: 171581 - DNA, 120 bp, Artificial Sequence
  ENSG00000109184_39 (sequence is synthesized)
aggtaggtattcatttgtatcatctaagactgatccttatgacaataaggagtaccttagagatgattaaagaatttaaaaatgtgtacatttcaaatttgggtgtgtgtgtgtgtgtgt

SEQ ID NO: 171582 - DNA, 120 bp, Artificial Sequence
  ENSG00000109184_40 (sequence is synthesized)
ggccaactcgtgctttattccccggccagctcctgcgcgctctcgggaggcggttgagttcccagggacggagcgactccccagcccttctcccttgggagagggagagcccacgccagg

SEQ ID NO: 171583 - DNA, 120 bp, Artificial Sequence
  ENSG00000109184_41 (sequence is synthesized)
cgcagccctcttcacgcttaggttcttggtccccaagtgaatttccccctgcattttgtggccttacttgtggaataaatgcttggtcttgtaccatcatgcgcacgggttgtgggaaaa

SEQ ID NO: 171584 - DNA, 120 bp, Artificial Sequence
  ENSG00000109184_42 (sequence is synthesized)
agtggggggcggggcctcgttgccagctccagaccggcgctatgggcactccttttgtcaaatgagagacgcagcagggcggcccctgagccgcggtttagccaatggagaaggcgagat

SEQ ID NO: 171585 - DNA, 120 bp, Artificial Sequence
  ENSG00000109184_43 (sequence is synthesized)
gtgttgaaccagaaaacgtgagtcaaacttactgagttgggtgaatcagttggttgtttttcatacttaaatctttgttctttagcaaataaataaataattaaaaagtagtggtatgtt

SEQ ID NO: 171586 - DNA, 120 bp, Artificial Sequence
  ENSG00000109184_44 (sequence is synthesized)
agtttttatgaagcagtctaagaaataagttctaattctagtttgacttataagcagattctccattcttgtaagtgatatggtgtaactacagttattttttctctcatttaatttctt

SEQ ID NO: 171587 - DNA, 120 bp, Artificial Sequence
  ENSG00000109184_45 (sequence is synthesized)
gtatgtaaaaggtacagtaagccagatgcttacaaaatggtgtggccacatgtgcctacaatgacggatcaactggaggccacattgtacgctgtgtaccttcgtgcccctcagtagttg

SEQ ID NO: 171588 - DNA, 120 bp, Artificial Sequence
  ENSG00000109184_46 (sequence is synthesized)
ttttagcctaatgtagagtcaatctaggacttataattattcatcatgattttgagtagattgtaatcatcaagaatttttcatagatcgtttacttccaattgaatttagctcagaagt

SEQ ID NO: 171589 - DNA, 74 bp, Artificial Sequence
  ENSG00000109184_47 (sequence is synthesized)
tttttgagatggagtctcgcactgtcgccaggctggagtgcaatggttcccctgcctcagcctcctgagtagct

SEQ ID NO: 171590 - DNA, 120 bp, Artificial Sequence
  ENSG00000109184_48 (sequence is synthesized)
tgagttacaagtttttattaatcccatgaaaagcctgtagaaactgctacgacataactaattgattttgcattagggtgatcattcagttgacataaatctttctcacagtaaatttat

SEQ ID NO: 171591 - DNA, 120 bp, Artificial Sequence
  ENSG00000109184_49 (sequence is synthesized)
ataatatcgtaatgcccaagccttccattgtgtttgactacctcccctccctaaccttagtctggatgcagggtctttaaggtgtatgataaatgagctgtttactaatttcctgttgaa

SEQ ID NO: 171592 - DNA, 120 bp, Artificial Sequence
  ENSG00000109184_50 (sequence is synthesized)
aaacaaggctctttaaatcgcttctctttcagataagtgaacttgttaattttggtaactccaagggcctgttagattcgtttatttcaaacatctttattgtttcaccctgagtttagt

SEQ ID NO: 171593 - DNA, 120 bp, Artificial Sequence
  ENSG00000109184_51 (sequence is synthesized)
aagtagttttttcttccttgtttcagaaacaacaaacgaacatcattgtctagtcttttctacctttctccatctttccccattctggctttgtgggtcatatcactaatgggccagaat

SEQ ID NO: 171594 - DNA, 120 bp, Artificial Sequence
  ENSG00000109184_52 (sequence is synthesized)
ttccacatgtattaatccagggaatttaagtgagatttttctgtttctttcttgctgtgactcagaggaataagaaagactctgaaaatgtaaaaataatgtcattgtttatatctcaaa

SEQ ID NO: 171595 - DNA, 120 bp, Artificial Sequence
  ENSG00000109184_53 (sequence is synthesized)
tgaatagaaaatattatctgaaagaagatagtagtgatttagaaaataatcaccagcaatctttaggccagtgatttttcaactttacaaaggcaggctactttgatacttttttggtgg

SEQ ID NO: 171596 - DNA, 120 bp, Artificial Sequence
  ENSG00000109184_54 (sequence is synthesized)
agcttcgagccgaggtgcagtgagctggtggggggaccgcgaggcgagcgcgggagcctgggcggcgagccgggtgtgagctgcctgaaaatgcactcggatgccgccgctgtcaatatc

SEQ ID NO: 171597 - DNA, 120 bp, Artificial Sequence
  ENSG00000109184_55 (sequence is synthesized)
agttttagagaatgtggcgtggagaaattctcaaggaaagagtaaaatgctggtgatgtgctgagggaacagaaggagtgtttgtgaatgtgcacacgtccgtttctggtctctcgtgtc

SEQ ID NO: 171598 - DNA, 120 bp, Artificial Sequence
  ENSG00000109184_56 (sequence is synthesized)
aactttaaacttatttacagatatgcgtttgactttgcacggttctatatgatgcttgagagctgaaaggatcctcagaagtcatctggtccaggcctgtcaatgtaggatgatgagatt

SEQ ID NO: 171599 - DNA, 120 bp, Artificial Sequence
  ENSG00000109184_57 (sequence is synthesized)
gaaagtcttgttgttactttgtattgaggttactcctgtactttgtctcccttcatggagggcagggactgtttgcaccctaggcaactactgcagtgcatagctccaggatgtgtctaa

SEQ ID NO: 171600 - DNA, 120 bp, Artificial Sequence
  ENSG00000109189_0 (sequence is synthesized)
ctcctcccggcctccctctcccagccaaactgaaagccggaccccaggccgccgcgctgccgcccggcctccccgccagcgcgccaccatgggcagtcccggtttccccttgtaaagatg

SEQ ID NO: 171601 - DNA, 120 bp, Artificial Sequence
  ENSG00000109189_1 (sequence is synthesized)
gcggtgagggatcgctgcaacctttagactaatgactgtccgaaacatcgcctccatctgtaatatgggcaccaatgcctctgctctggaaaaagacattggtccagagcagtttccaat

SEQ ID NO: 171602 - DNA, 120 bp, Artificial Sequence
  ENSG00000109189_2 (sequence is synthesized)
caatgaacactatttcggattggtcaattttggaaacacatgctactgtaactccgtgcttcaggcattgtacttctgccgtccattccgggagaatgtgttggcatacaaggcccagca

SEQ ID NO: 171603 - DNA, 120 bp, Artificial Sequence
  ENSG00000109189_3 (sequence is synthesized)
aaagaagaaggaaaacttgctgacgtgcctggcggaccttttccacagcattgccacacagaagaagaaggttggcgtcatcccaccaaagaagttcatttcaaggctgagaaaagagaa

SEQ ID NO: 171604 - DNA, 120 bp, Artificial Sequence
  ENSG00000109189_4 (sequence is synthesized)
tgatctctttgataactacatgcagcaggatgctcatgaatttttaaattatttgctaaacactattgcggacatccttcaggaggagaagaaacaggaaaaacaaaatggaaaattaaa

SEQ ID NO: 171605 - DNA, 120 bp, Artificial Sequence
  ENSG00000109189_5 (sequence is synthesized)
aaatggcaacatgaacgaacctgcggaaaataataaaccagaactcacctgggtccatgagatttttcagggaacgcttaccaatgaaactcgatgcttgaactgtgaaactgttagtag

SEQ ID NO: 171606 - DNA, 120 bp, Artificial Sequence
  ENSG00000109189_6 (sequence is synthesized)
caaagatgaagattttcttgacctttctgttgatgtggagcagaatacatccattacccactgtctaagagacttcagcaacacagaaacactgtgtagtgaacaaaaatattattgtga

SEQ ID NO: 171607 - DNA, 120 bp, Artificial Sequence
  ENSG00000109189_7 (sequence is synthesized)
aacatgctgcagcaaacaagaagcccagaaaaggatgagggtaaaaaagctgcccatgatcttggccctgcacctaaagcggttcaagtacatggagcagctgcacagatacaccaagct

SEQ ID NO: 171608 - DNA, 120 bp, Artificial Sequence
  ENSG00000109189_8 (sequence is synthesized)
gtcttaccgtgtggtcttccctctggaactccggctcttcaacacctccagtgatgcagtgaacctggaccgcatgtatgacttggttgcggtggtcgttcactgtggcagtggtcctaa

SEQ ID NO: 171609 - DNA, 120 bp, Artificial Sequence
  ENSG00000109189_9 (sequence is synthesized)
tcgtgggcattatatcactattgtgaaaagtcacggcttctggcttttgtttgatgatgacattgtagagaaaatagatgctcaagctattgaagaattctatggcctgacgtcagatat

SEQ ID NO: 171610 - DNA, 120 bp, Artificial Sequence
  ENSG00000109189_10 (sequence is synthesized)
atcaaaaaattcagaatctggatatattttattctatcagtcaagagagtaactgaaagacctgcgggactgattcacgtggggagaatgttcacagcactgtcacccggcttctccgca

SEQ ID NO: 171611 - DNA, 120 bp, Artificial Sequence
  ENSG00000109189_11 (sequence is synthesized)
ggctttcctcttccccagtggcccactaatggtatcactccgagtctcaatggtctggctgtgttagactctctccttttgtgtttttacatgcagcactactcttggttttatttcagt

SEQ ID NO: 171612 - DNA, 120 bp, Artificial Sequence
  ENSG00000109189_12 (sequence is synthesized)
ctgacatagagttaactgcaatcagattgtagtctgatttatatgaataacggttgctaattttaggactgggtgaaagctatgccattcattatgtctggctgtattagaatgacattt

SEQ ID NO: 171613 - DNA, 120 bp, Artificial Sequence
  ENSG00000109189_13 (sequence is synthesized)
cctatgaatgtctacggtctgttttaggtgtttgctaaacttctatggcttccagggtcttcttacaatgcattcctttaacttgtccctggaagcattgctacccattttcagcttctc

SEQ ID NO: 171614 - DNA, 120 bp, Artificial Sequence
  ENSG00000109189_14 (sequence is synthesized)
tgcctctcttctgatacaaggacagaagaattgggtagatattcaccttttaggggtgcaagtatagctttaagtttgtgcaagtgaaaatgttgaaaagtgagtaacctcgatattaaa

SEQ ID NO: 171615 - DNA, 120 bp, Artificial Sequence
  ENSG00000109189_15 (sequence is synthesized)
atcatccttgacatgaaacagggtgaagagaagctgtccgtggcggctggtgttggctggcattggcactgggctgtgctgacctagccattacaattccaggggctaagaaggctcagg

SEQ ID NO: 171616 - DNA, 120 bp, Artificial Sequence
  ENSG00000109189_16 (sequence is synthesized)
gcagacaaagtcaagaggaggaagtttttgtggacaatgaaaagttattttcgtacctttctaccaaaaccaagtttcaggaaaataactctatgttgtttattttcagtgacacttatg

SEQ ID NO: 171617 - DNA, 120 bp, Artificial Sequence
  ENSG00000109189_17 (sequence is synthesized)
taaggccctgtgagttgtatttatcctgtatccggcactgctaagcttttcaaggtatctttccaatcctgctgatgtggcagtcaatggctgcagggctggcaaacctccccttagcca

SEQ ID NO: 171618 - DNA, 120 bp, Artificial Sequence
  ENSG00000109189_18 (sequence is synthesized)
gtcagcacggcattgttccttatcaggaataacaaaggtactacatctttccagccatcagcacgttgtacaacttaactttttaacatagtccgtctgtttactgaggcactggcgagt

SEQ ID NO: 171619 - DNA, 120 bp, Artificial Sequence
  ENSG00000109189_19 (sequence is synthesized)
cccagggctgatacagaaccttccctagagggaataccagagttagctgggtatagaggtggctcaaaggaagtgtccgtgggcagggggaggaatgaacaaaatggcgctgtttctttg

SEQ ID NO: 171620 - DNA, 120 bp, Artificial Sequence
  ENSG00000109189_20 (sequence is synthesized)
gctcagactcctagaatgcttgacaagacagaatttttttggaagaacctcatctcactatagttacttttttcacttttgttatatatgtatttattagagcatttgaatattggtacc

SEQ ID NO: 171621 - DNA, 120 bp, Artificial Sequence
  ENSG00000109189_21 (sequence is synthesized)
tttaaaagggtcatttggtgttttgctgttgagctggtttttgagtcatagatcttggcttcctttagaagccacttaacttccatacactataataaactgtgaacatatttttgttac

SEQ ID NO: 171622 - DNA, 120 bp, Artificial Sequence
  ENSG00000109189_22 (sequence is synthesized)
ctaatgcatccactgatgaacatgcaaactttgggcataatgtgaactaaaattgaaatggaaaatgttagtggccattttgcaacaatgaagaggatagcactttatctagatgaaaac

SEQ ID NO: 171623 - DNA, 120 bp, Artificial Sequence
  ENSG00000109189_23 (sequence is synthesized)
tggatttcttatctttgaaatatcttgaactgtttattgctcagaacttaagtaagcatgccaacatttcgtttgtttatgcttgaagtgaaatgttttacttttcactggagaagacaa

SEQ ID NO: 171624 - DNA, 120 bp, Artificial Sequence
  ENSG00000109189_24 (sequence is synthesized)
aacagggtgatcttcatgttattgttttatacaagtgatggaaatgtaccttgccttgtttagaggcaatttcacatttataaatatttttttttcctccatgaaacttacgcagtaatc

SEQ ID NO: 171625 - DNA, 120 bp, Artificial Sequence
  ENSG00000109189_25 (sequence is synthesized)
actacctggaaggtgagttttgatctctttttaaggagaggcactttccaactgaaggtgattgatgtagggaaatgtttgtactatatagaatccatatatttgactgcaagttacaaa

SEQ ID NO: 171626 - DNA, 120 bp, Artificial Sequence
  ENSG00000109189_26 (sequence is synthesized)
gttttaagaacatgatggttggtctctaatatatttggaactgattcataagaaaagttattaaaattatctttgaaacacctcttgaagctaatttattagaaaaaatatttcagttgg

SEQ ID NO: 171627 - DNA, 120 bp, Artificial Sequence
  ENSG00000109189_27 (sequence is synthesized)
aaggctgtagaagtaatgtttaaatgctaagtcataagttcaggatatttcttttctatttggttgtgcaaaatgtttttcccagttatttaatcgaagtaattccttttaatagaaaga

SEQ ID NO: 171628 - DNA, 120 bp, Artificial Sequence
  ENSG00000109189_28 (sequence is synthesized)
gtcagttaaaattcagcattcatggatagatttttggaacgaaaaagggtaagtataagaaaatattgcaaacacattaaaacagttgtatggtgcaggaaaagaagattggaaaaagac

SEQ ID NO: 171629 - DNA, 120 bp, Artificial Sequence
  ENSG00000109189_29 (sequence is synthesized)
caaaacacacttctccagcaacactccatcagctttttaaaatttagagctatctgctaattttttccctcttccttctcaataaatgaaacaaacactgggcagctgcaggtttctccc

SEQ ID NO: 171630 - DNA, 120 bp, Artificial Sequence
  ENSG00000109189_30 (sequence is synthesized)
aatcatgtctctttatgtaaagacagtaacatgcaaacacttttagtttacatccctcattcacagtgtaaagcaggaaatggtgtgggagatgtgagaccattctgaggtcagcgatag

SEQ ID NO: 171631 - DNA, 120 bp, Artificial Sequence
  ENSG00000109189_31 (sequence is synthesized)
cccaaaggctctgcagtattccctccaatggccaaggattccgtgtgtcatctgcaggagtgagtaggcctgctgtatttcttgtaactgctgggtgttacaaaataagttacaatgttt

SEQ ID NO: 171632 - DNA, 120 bp, Artificial Sequence
  ENSG00000109189_32 (sequence is synthesized)
tacactttaaaaaaaaaacagaaggaacatttgctttattggttacttactagtttagcctctaggttatggcacagcatgctaaaaaatcatgtgtttaaaagtaaatgttggtaaaat

SEQ ID NO: 171633 - DNA, 120 bp, Artificial Sequence
  ENSG00000109189_33 (sequence is synthesized)
tcctattgtgttgatgcattttcacttctgtggtcataggaaatggactggtctaaagagagtgaggcacaacacaagcagggcattagtttgaataggaagtcaatcatatttggtttt

SEQ ID NO: 171634 - DNA, 120 bp, Artificial Sequence
  ENSG00000109189_34 (sequence is synthesized)
atggcctggtgtattttgggtttaagataaaatagggaaaaatgtcagaaatgatccctatgcatttattttcatggatacccttaatttcatgggcatgcctaataatgatctatgttc

SEQ ID NO: 171635 - DNA, 120 bp, Artificial Sequence
  ENSG00000109189_35 (sequence is synthesized)
taactggagcttagggcttattttagatattggagtgtagctttattacagatggattttatctttcaacattgcattttgatcaactttgtatattcacgtgtattaaaatattgtgca

SEQ ID NO: 171636 - DNA, 120 bp, Artificial Sequence
  ENSG00000109189_36 (sequence is synthesized)
ctaaatgttttgcccttgtttgctattatatggtcaaggcatttatcagcactattgtaatgaactcatgtaagtggcatgggtcagggaaaattatttcctacttttctgcctaattaa

SEQ ID NO: 171637 - DNA, 120 bp, Artificial Sequence
  ENSG00000109189_37 (sequence is synthesized)
atttctgttttccagtattacattaatttatttttggcttccatttctgtataaccaaaatagttactgtatttgtgtggcattcctattattttgttgctaaaaatattgtagttttta

SEQ ID NO: 171638 - DNA, 120 bp, Artificial Sequence
  ENSG00000109189_38 (sequence is synthesized)
tttaaaataatctgtaccttaattttttaaaatgtaaccaattcaagcactttaagcaataatgtcaatcttgtgaaattttaatcagtttaacaccctgcctctaaaattgtttgcaaa

SEQ ID NO: 171639 - DNA, 120 bp, Artificial Sequence
  ENSG00000109189_39 (sequence is synthesized)
aaataaataaatgaataaaatgggaattctctttctagagaattatatccgggtaatgctacacacatggacttaaaatcctttttataaagtgtgagtcagtggcaggtcttatgtcca

SEQ ID NO: 171640 - DNA, 120 bp, Artificial Sequence
  ENSG00000109189_40 (sequence is synthesized)
agtaattattacaaacaattttgaagcagtggaaatgtacagaacattctgatcattataatatataaaggcagtattactctcaaggttgataaaaatcaatgttctggagataactca

SEQ ID NO: 171641 - DNA, 120 bp, Artificial Sequence
  ENSG00000109189_41 (sequence is synthesized)
tcactttttttgagtgaaaaagatcaacagaatttaattcaggaaatggtatctggagaatagcaaattgagaatatcagtgaaaagaatttagggatagttaactaggcatcacagtga

SEQ ID NO: 171642 - DNA, 120 bp, Artificial Sequence
  ENSG00000109189_42 (sequence is synthesized)
atttatttttggggactttgcatataaaatccttttaaccagttatgaaatgaaagatccattccccaaataagaaggcagcttccagtatctggtttctaggaaggagtaggactgtga

SEQ ID NO: 171643 - DNA, 120 bp, Artificial Sequence
  ENSG00000109189_43 (sequence is synthesized)
ttggtccctggtgccctgacttctgggcctgtttctgagccatgggggaccccccagcttcagaaatactcacgtgggttcacaccactccctgccccagaaggagggcaggcacaggtc

SEQ ID NO: 171644 - DNA, 120 bp, Artificial Sequence
  ENSG00000109189_44 (sequence is synthesized)
catgccatgtggcctcagtgaagcctacagtaactatgggtagggctgcttttccctgtcaatcacccagggcacctgtgggtggacagaagattgtcatcggaatacatgcttgggccc

SEQ ID NO: 171645 - DNA, 120 bp, Artificial Sequence
  ENSG00000109189_45 (sequence is synthesized)
aattatgggaataaaacctcatagaccaagagcagggaatgtgccagtaagtgttgagtctcccagctgctgtccatcttctcggggcagtgcagttgaacctgactgagctggaacaga

SEQ ID NO: 171646 - DNA, 120 bp, Artificial Sequence
  ENSG00000109189_46 (sequence is synthesized)
gactgttgggaaggtcacttctgtctgccacgaaggccaaaggcagagaagaccttcttgggactgtgtttttctttcctaggcctcactttgtcctgggatttataggacaggcctgtc

SEQ ID NO: 171647 - DNA, 120 bp, Artificial Sequence
  ENSG00000109189_47 (sequence is synthesized)
actaccaaggtgacacaaattctagagaatgtattttcccatttcttcaaatttcctttcctctctttttattgatacttaaaatacctttactaaaaaaatgaagccttccatttccat

SEQ ID NO: 171648 - DNA, 120 bp, Artificial Sequence
  ENSG00000109189_48 (sequence is synthesized)
tcccttatatttacatgaagataaaaatacttactaagtcgttgtatttgtccattctggcagtgctataaagacatacctgagcgtgggtcatttctgaagaaaagaggtttaattggc

SEQ ID NO: 171649 - DNA, 120 bp, Artificial Sequence
  ENSG00000109189_49 (sequence is synthesized)
tcatggttttatgggctgtacaggcttctgttctgggggaggcctcaggaaacttacaatcagcagaaggcaaagggaaagcaagcccatcttacatggcaggagcaagaggaagagagc

SEQ ID NO: 171650 - DNA, 84 bp, Artificial Sequence
  ENSG00000109189_50 (sequence is synthesized)
gcaagcccatcttacatggcaggagcaagaggaagagagcaaagggggaggggttacacacttttctttcctttttttttttta

SEQ ID NO: 171651 - DNA, 120 bp, Artificial Sequence
  ENSG00000109189_51 (sequence is synthesized)
agctgggactacaggcatgtgccactatacccgggtaatttttgtattttcagtagatacaaagttttctcatattggccaagctggtctggaactcctgacttcaggtgcctcagcctc

SEQ ID NO: 171652 - DNA, 75 bp, Artificial Sequence
  ENSG00000109189_52 (sequence is synthesized)
ttcagtagatacaaagttttctcatattggccaagctggtctggaactcctgacttcagttgctcggctggggtt

SEQ ID NO: 171653 - DNA, 72 bp, Artificial Sequence
  ENSG00000109189_53 (sequence is synthesized)
ttaaacaaccagatctcgtgagaactcagtcatgaggcagtactagggggatggtgcttaaccacctatgat

SEQ ID NO: 171654 - DNA, 120 bp, Artificial Sequence
  ENSG00000109189_54 (sequence is synthesized)
aaccgtatcagtcatttttcttttactgaaggaaaattttggttgtggggttagtactaaagatagcccatgtagactttttctgaagataccccaagtggagagatttttaattaggca

SEQ ID NO: 171655 - DNA, 120 bp, Artificial Sequence
  ENSG00000109189_55 (sequence is synthesized)
tttatttggcacctattgcattctaggcattgtgataggagctgggggataaaaaggtgacacagattgggtccctcttatggactcgttttttgtctcagaagacaagtctgggtgaga

SEQ ID NO: 171656 - DNA, 120 bp, Artificial Sequence
  ENSG00000109189_56 (sequence is synthesized)
aagaaatttaaaatttaagttgtggaaataacacgtgtgggggaaactccttgcaattcagcacagtttggtattcagccccagcctcaacatgcagatggcactgttggatgaagccac

SEQ ID NO: 171657 - DNA, 120 bp, Artificial Sequence
  ENSG00000109189_57 (sequence is synthesized)
accatcttttttcctgggagccccacactcttcccagcctgccttctagctcagggacaacacattttgaaaaacaaagtataaatcgattatgttgcaacaatgaacttcacgttttgc

SEQ ID NO: 171658 - DNA, 120 bp, Artificial Sequence
  ENSG00000109189_58 (sequence is synthesized)
ctcttctcatgttaaaagagccagtatcatgaaagcctcaacagtgagctttatgaatcaaatatctgttatttctaaacaatctgtttacattatgaccaaataattagagcctatcta

SEQ ID NO: 171659 - DNA, 120 bp, Artificial Sequence
  ENSG00000109189_59 (sequence is synthesized)
gacttaccaaaataagatagggcataagcgatttattggtgcatcagcctttgtttgctttttaaggttcctttatgttttaaagggatttgaacaaaagacatcaggagcttacaaagg

SEQ ID NO: 171660 - DNA, 120 bp, Artificial Sequence
  ENSG00000109189_60 (sequence is synthesized)
aaaaatagcttcattttggttatgagataccagagtcagaaatgacattagattgtatagaaaagacttctaattgtgtgcttacttcccacatgattataataaactatatattaacaa

SEQ ID NO: 171661 - DNA, 120 bp, Artificial Sequence
  ENSG00000109189_61 (sequence is synthesized)
ccttgggatcgtactcaggttgtcaattacacggatgcatctttcacttttttctttcccaagagtgagagaaagagtgaggttgtgcttaaggcagtgtggaattctacagaagctctt

SEQ ID NO: 171662 - DNA, 120 bp, Artificial Sequence
  ENSG00000109189_62 (sequence is synthesized)
cttggaaaaggagttcaggcacttgtgttgtagactgcagtctgattctgttcttacttcctctcagcataagggagctttgaaaagaaaactcagacttgtatccgacttgaccagaag

SEQ ID NO: 171663 - DNA, 120 bp, Artificial Sequence
  ENSG00000109189_63 (sequence is synthesized)
caaaataacttgatcattgaagccactatttctgtgtatttgatcaagtcctcctctggaatccaatgcagccatattcatatttcggtctctcttaatggaccttgctggaaagaacat

SEQ ID NO: 171664 - DNA, 120 bp, Artificial Sequence
  ENSG00000109189_64 (sequence is synthesized)
tctgtgctaagaaaatggaaaataaacgtgagaaaactttaagaatgagccttcacacctcctgcagcaggtgatagctctgtacttcagagcttgtctccaggttgagaattacctgtt

SEQ ID NO: 171665 - DNA, 120 bp, Artificial Sequence
  ENSG00000109189_65 (sequence is synthesized)
ttccactctgaggggattagaaagatactgttttaatgggttataaaacttgtgtgaagaagattggccttctccacctctcctgtgaaataaattgtttgaaaactctttgaagagaaa

SEQ ID NO: 171666 - DNA, 120 bp, Artificial Sequence
  ENSG00000109189_66 (sequence is synthesized)
tgttatgtcatctaccaggtgtttaagggacagtggagatcatgccatttcagacctggtggaagcaaccactaatataaacacctcccatgtataggaaggctggagtgggaatcctta

SEQ ID NO: 171667 - DNA, 120 bp, Artificial Sequence
  ENSG00000109189_67 (sequence is synthesized)
accccgccccctgctcaggtcaatcccccacccaccgcccccactgtccctcccagtcttccttcccagaggagaaggctgggtatgaggaaactgctgtcttttcactggatcagacgt

SEQ ID NO: 171668 - DNA, 120 bp, Artificial Sequence
  ENSG00000109189_68 (sequence is synthesized)
atgattacgagttttgttccgataaatggccatctgttgaggacctgctatgttggtgttggcacagactatactcaagtgcttaataaatgaatgagatggagtctcactctgttgcca

SEQ ID NO: 171669 - DNA, 120 bp, Artificial Sequence
  ENSG00000109189_69 (sequence is synthesized)
ttttgtttgatgatgacattgtagaggttggtttgcagattattctccagtagtcatagagcatcagtagtatttcggagaatgtaaaatagatgctcaagctattgaagaattctatgg

SEQ ID NO: 171670 - DNA, 120 bp, Artificial Sequence
  ENSG00000109189_70 (sequence is synthesized)
tcagggcaccaatgcctctgctctggaaaaagacattggtccagagcagtttccaatcaatgaacactatttcggattggtcaatgagttgtccactgaattggggccaagcgttactga

SEQ ID NO: 171671 - DNA, 120 bp, Artificial Sequence
  ENSG00000109189_71 (sequence is synthesized)
agggtgtctggggaaagtttggaaacacatgctactgtaactccgtgcttcaggcattgtacttctgccgtccattccgggagaatgtgttggcatacaaggcccagcaaaagaagaagg

SEQ ID NO: 171672 - DNA, 120 bp, Artificial Sequence
  ENSG00000109189_72 (sequence is synthesized)
gactaatgactgtccgaaacatcgcctccatctgtaatatggaagaacctccagcccttgggtccccaggctggaccctgctggcgcctccacttgtcagagcctttggggagctcagat

SEQ ID NO: 171673 - DNA, 120 bp, Artificial Sequence
  ENSG00000109189_73 (sequence is synthesized)
gcatttttcttcatttctctgtggatcagatggtcactggtgtttagagtagttaactagttttctaatatggtgagctggactccaatacagggacatccaggccagttcacggagcag

SEQ ID NO: 171674 - DNA, 120 bp, Artificial Sequence
  ENSG00000109193_0 (sequence is synthesized)
agaagtggttctcatctttttttgcagcttaagatctgccttggtatttgaagagatataaactagatcaatttctttcacaggatcaactaaacagtgtaccacaatgaattctgaact

SEQ ID NO: 171675 - DNA, 120 bp, Artificial Sequence
  ENSG00000109193_1 (sequence is synthesized)
tgactattatgaaaagtttgaagaagtccatgggattctaatgtataaagattttgtcaaatattgggataatgtggaagcgttccaggcaagaccagatgatcttgtcattgccaccta

SEQ ID NO: 171676 - DNA, 120 bp, Artificial Sequence
  ENSG00000109193_2 (sequence is synthesized)
ccctaaatctggtacaacctgggttagtgaaattgtgtatatgatctataaagagggtgatgtggaaaagtgcaaagaagatgtaatttttaatcgaatacctttcctggaatgcagaaa

SEQ ID NO: 171677 - DNA, 120 bp, Artificial Sequence
  ENSG00000109193_3 (sequence is synthesized)
agaaaacctcatgaatggagtaaaacaattagatgagatgaattctcctagaattgtgaagactcatttgccacctgaacttcttcctgcctcattttgggaaaaggattgtaagataat

SEQ ID NO: 171678 - DNA, 120 bp, Artificial Sequence
  ENSG00000109193_4 (sequence is synthesized)
ctatctttgccggaatgcaaaggatgtggctgtttccttttattatttctttctaatggtggctggtcatccaaatcctggatcctttccagagtttgtggagaaattcatgcaaggaca

SEQ ID NO: 171679 - DNA, 120 bp, Artificial Sequence
  ENSG00000109193_5 (sequence is synthesized)
ggttccttatggttcctggtataaacatgtaaaatcttggtgggaaaagggaaagagtccacgtgtactatttcttttctacgaagacctgaaagaggatatcagaaaagaggtgataaa

SEQ ID NO: 171680 - DNA, 120 bp, Artificial Sequence
  ENSG00000109193_6 (sequence is synthesized)
attgatacatttcctggaaaggaagccatcagaggagcttgtggacaggattatacatcatacttcgttccaagagatgaagaacaatccatccacaaattacacaacactgccagacga

SEQ ID NO: 171681 - DNA, 120 bp, Artificial Sequence
  ENSG00000109193_7 (sequence is synthesized)
taaacattatgagcagcaaatgaaggaatctacactgaagtttcgaactgagatctaagaaggtctttctttacttaacatatctgatattaaagatttcttttcattattctccacttt

SEQ ID NO: 171682 - DNA, 120 bp, Artificial Sequence
  ENSG00000109193_8 (sequence is synthesized)
attaaagatttcttttcattattctccactttttcttattttagattgctagaaaagacataatcatggattatgttgacattttctttttaaatttttgtttaactttttttttttttt

SEQ ID NO: 171683 - DNA, 78 bp, Artificial Sequence
  ENSG00000109193_9 (sequence is synthesized)
agagtctcactctgttgcctaggctggaggacagtggcacaatcatggctgattgcagccttgacctccttgactcaa

SEQ ID NO: 171684 - DNA, 89 bp, Artificial Sequence
  ENSG00000109193_10 (sequence is synthesized)
ttgtttcccaagtagctgcaacaacaggcacacaccaccatgctcaactaattttatttctattttttgtatagacaggggcttgctat

SEQ ID NO: 171685 - DNA, 120 bp, Artificial Sequence
  ENSG00000109193_11 (sequence is synthesized)
aattttatttctattttttgtatagacaggggcttgctatagtgtccaggctggtctgaaacccttgagctcaagtgatcttcccacaccagcctcccaaaatactgggattacaggctt

SEQ ID NO: 171686 - DNA, 120 bp, Artificial Sequence
  ENSG00000109193_12 (sequence is synthesized)
gagcctccatgcctggcccaggtaacatgtttattgagctgtacatgcatatgagaaataagaaacttttttttcctactatcatctcttaaattttgttttctttttcttttgcttcct

SEQ ID NO: 171687 - DNA, 120 bp, Artificial Sequence
  ENSG00000109193_13 (sequence is synthesized)
cttcttcttttctattttttataaatatcatgcacaactataacctatgggaatgatgtagtaacacagattattcatcttgttagagttgtattaaaaataaacaagcatttcaaatta

SEQ ID NO: 171688 - DNA, 120 bp, Artificial Sequence
  ENSG00000109193_14 (sequence is synthesized)
tttttaactgttctggtacgttttcttccctgattcatagttaaaacacagaaatctaaaggcgcctggaggtttagagcaagcatactgtgtccagatgtagaaggcaaattgcagaat

SEQ ID NO: 171689 - DNA, 120 bp, Artificial Sequence
  ENSG00000109193_15 (sequence is synthesized)
ctgagcactctggtccaacacctaaaaataaatatatagaattatgtttgggagctgggggtagcaattttattctccaagattgagactcagtgtctgattttctgccttgtctctttt

SEQ ID NO: 171690 - DNA, 120 bp, Artificial Sequence
  ENSG00000109205_0 (sequence is synthesized)
ttataaagctaaagatcacaacttattttctagatatatcatacgaaaatgaaaattataattcttcttggattcctgggagccacattgtcagccccacttatcccacagcgtctcatg

SEQ ID NO: 171691 - DNA, 120 bp, Artificial Sequence
  ENSG00000109205_1 (sequence is synthesized)
tctgccagcaatagcaatgagttacttcttaatcttaataatggtcaacttttgccactacaacttcagggcccacttaattcatggattccacctttctctggaattttacaacagcag

SEQ ID NO: 171692 - DNA, 120 bp, Artificial Sequence
  ENSG00000109205_2 (sequence is synthesized)
cagcaggctcaaattccaggactctcccagttctctttatcagctctagaccagtttgctggactgctcccaaatcagatacccttaacaggagaggccagttttgcccaaggagcccag

SEQ ID NO: 171693 - DNA, 120 bp, Artificial Sequence
  ENSG00000109205_3 (sequence is synthesized)
gcaggccaagttgatcccttacagcttcaaacaccgcctcagacacaaccaggccccagtcacgtgatgccctatgtattctccttcaaaatgcctcaagagcaaggacagatgtttcaa

SEQ ID NO: 171694 - DNA, 120 bp, Artificial Sequence
  ENSG00000109205_4 (sequence is synthesized)
tactatccagtttacatggtcctaccctgggaacaacctcagcaaacagttccaaggtcacctcaacaaacaagacagcaacagtatgaggagcagataccattctatgctcaatttgga

SEQ ID NO: 171695 - DNA, 120 bp, Artificial Sequence
  ENSG00000109205_5 (sequence is synthesized)
tttacaaaaagaagcgatcaactttagacatgacagtgcaggagttttcatgccctcaacttcaccaaaacccagcacaaccaatgttttcacttctgctgtagaccaaactattacccc

SEQ ID NO: 171696 - DNA, 120 bp, Artificial Sequence
  ENSG00000109205_6 (sequence is synthesized)
agagctcccagaagagaaggacaagactgacagcctaagggaaccataagaagttgccctgatcattcagacattttgggaaaaagatgtggccatgccttggatataattttaggctat

SEQ ID NO: 171697 - DNA, 120 bp, Artificial Sequence
  ENSG00000109205_7 (sequence is synthesized)
tagcttcctcaatactagtatcagttctttggaatacatgaaatatcttgactcttctcctaaatttgtttttacttatacatgttattaaactctttaaatatgtcatagaaaataata

SEQ ID NO: 171698 - DNA, 120 bp, Artificial Sequence
  ENSG00000109205_8 (sequence is synthesized)
caatcatgtaatgagtcttgtcttacaaaattatatgtctcttcaaatatcctatcattgtataatatggaatataataacacagaataaagctagtatcattaaatcaattggataatt

SEQ ID NO: 171699 - DNA, 120 bp, Artificial Sequence
  ENSG00000109205_9 (sequence is synthesized)
gcattagtaaatgatgcctctgcaaaatggtagtacccatgaagatatgtatattgtcattggatgtatgatgagtgttgtgattggaactgatgaagtaaaataagtatctagatttga

SEQ ID NO: 171700 - DNA, 120 bp, Artificial Sequence
  ENSG00000109205_10 (sequence is synthesized)
atggccatcgggaatttagcatttgcttcgtattatttgcttggttcaaaatgaatcaagatgctgtccttttttatgttgcaacattggaactatagaaattgtttgtattttgcctct

SEQ ID NO: 171701 - DNA, 120 bp, Artificial Sequence
  ENSG00000109205_11 (sequence is synthesized)
ttcttgctcaggactaatttttaaattctttttggcatgaagggaacatgctttctttcctttgtgtctttttagggcccacttaattcatggattccacctttctctggaattttacaa

SEQ ID NO: 171702 - DNA, 120 bp, Artificial Sequence
  ENSG00000109205_12 (sequence is synthesized)
caaacaccgcctcagacacaaccaggccccagtcacgtgatgccctatgtattctccttcaaaatgcctcaagagcaaggacagaacatctaataccacattctgcagaatgatgattct

SEQ ID NO: 171703 - DNA, 120 bp, Artificial Sequence
  ENSG00000109208_0 (sequence is synthesized)
cacctttattttctgtctttcaactggcaagagtcattttgaccagcaggttaatcaactctaagacagatcctcacgcaaagaggcaactgaaaggatgaaatcactgacttggatctt

SEQ ID NO: 171704 - DNA, 120 bp, Artificial Sequence
  ENSG00000109208_1 (sequence is synthesized)
gggcctttgggctcttgcagcgtgtttcacacctggtgagagtcaaagaggccccaggggaccatatccacctggaccactggctcctcctcctccaccatgttttccttttggaacagg

SEQ ID NO: 171705 - DNA, 120 bp, Artificial Sequence
  ENSG00000109208_2 (sequence is synthesized)
ctatggtccagggagaatcccaccatcccctcctccaccctatggtccagggagaattcaatcacactctcttcctcctccttatggcccaggttatccacagccaccttcccaaccaag

SEQ ID NO: 171706 - DNA, 120 bp, Artificial Sequence
  ENSG00000109208_3 (sequence is synthesized)
accctatccacctggacctccatttttccctgtaaattctccaactgatcctgccctccctactcctgcaccctaaatacagacaactgcaacaggtgccaccacccacaaaagacaaca

SEQ ID NO: 171707 - DNA, 120 bp, Artificial Sequence
  ENSG00000109208_4 (sequence is synthesized)
ctaccctcgtaactactgcttctactacccaaaaataagaatttcaacactacttccaagagacttttagataaaatcacttccatttttggatgagaataaagatttccaaagcactga

SEQ ID NO: 171708 - DNA, 120 bp, Artificial Sequence
  ENSG00000109220_0 (sequence is synthesized)
ggtttcctgagttgctgctgctgcggcggcggcagcggcgtctgtgcttgtggaggtgtcggcctctgggcggatgttgacattgtgttgttgttattgctgatggtaatggcggcggcg

SEQ ID NO: 171709 - DNA, 120 bp, Artificial Sequence
  ENSG00000109220_1 (sequence is synthesized)
gtggcggcgacggtccagaccccatcccctctgtagccggagccgagacagccgacagcgaactccgcggcctcggagccggcggcagcggcgactcccctcagcctccgccgcctcgcc

SEQ ID NO: 171710 - DNA, 120 bp, Artificial Sequence
  ENSG00000109220_2 (sequence is synthesized)
cgccggtaccccggcgccaaccccgggagtcaggccctttgggcaggggagctcggaggctcaggatggcggatttcgacgaaatctatgaggaagaggaggacgaggagcgggccctgg

SEQ ID NO: 171711 - DNA, 120 bp, Artificial Sequence
  ENSG00000109220_3 (sequence is synthesized)
aggagcagctgctcaagtactcgccggacccggtggtcgtccgcggctccggtcacgtcaccgtatttggactgagcaacaaatttgaatctgaattcccttcttcattaactggaaaag

SEQ ID NO: 171712 - DNA, 120 bp, Artificial Sequence
  ENSG00000109220_4 (sequence is synthesized)
aacagagttaacagttgtcttaagaagaaccttcctgttaatgtacgttggctactttgtggctgcctttgttgctgctgcacattaggttgcagtatgtggccagttatttgcctcagt

SEQ ID NO: 171713 - DNA, 120 bp, Artificial Sequence
  ENSG00000109220_5 (sequence is synthesized)
aaaagaacacgaagatcgattgagaagttattagaatgggaaaacaataggttataccacaagctgtgcttgcattggagactgagcaaaaggaaatgtgaaacgaataacatgatggaa

SEQ ID NO: 171714 - DNA, 120 bp, Artificial Sequence
  ENSG00000109220_6 (sequence is synthesized)
tatgtcatcctcatagaatttttaccaaagacaccgatttttcgaccagattagcatttactttatttatagagactttccaagtatgttgtctttccaatggtgccttgcttggtgctc

SEQ ID NO: 171715 - DNA, 84 bp, Artificial Sequence
  ENSG00000109220_7 (sequence is synthesized)
ataaccgcatgttctaagtgtgcatttttgtcaatctttgcaacagttatttcatacagatgtttaatacttaagttattgtgc

SEQ ID NO: 171716 - DNA, 120 bp, Artificial Sequence
  ENSG00000109220_8 (sequence is synthesized)
agttatttcatacagatgtttaatacttaagttattgtgctcttttctgttatgtattctgattttcaaggattacttttttgtattatcaaaaaaatacatttgaacttagcataaaaa

SEQ ID NO: 171717 - DNA, 120 bp, Artificial Sequence
  ENSG00000109220_9 (sequence is synthesized)
gttgaattatatattttaatttaaatttagaagtggacaagcaagtcttgcatttatctagtttttattttttgtattgaatgaatcacactatcctgaataaaatatgaaaataatctg

SEQ ID NO: 171718 - DNA, 120 bp, Artificial Sequence
  ENSG00000109255_0 (sequence is synthesized)
agtcctgtgtccgggccccgaggcacagccagggcaccaggtggagcaccagctacgcgtggcgcagcgcagcgtccctagcaccgagcctcccgcagccgccgagatgctgcgaacaga

SEQ ID NO: 171719 - DNA, 120 bp, Artificial Sequence
  ENSG00000109255_1 (sequence is synthesized)
gagctgccgccccaggtcgcccgccggacaggtggccgcggcgtccccgctcctgctgctgctgctgctgctcgcctggtgcgcgggcgcctgccgaggtgctccaatattacctcaagg

SEQ ID NO: 171720 - DNA, 120 bp, Artificial Sequence
  ENSG00000109255_2 (sequence is synthesized)
attacagcctgaacaacagctacagttgtggaatgagatagatgatacttgttcgtcttttctgtccattgattctcagcctcaggcatccaacgcactggaggagctttgctttatgat

SEQ ID NO: 171721 - DNA, 120 bp, Artificial Sequence
  ENSG00000109255_3 (sequence is synthesized)
aaatgttgtgtcgtcagttgtgcatccgttgctgcagctcgttcctcacctgcatgagagaagaatgaagagattcagagtggacgaagaattccaaagtccctttgcaagtcaaagtcg

SEQ ID NO: 171722 - DNA, 120 bp, Artificial Sequence
  ENSG00000109255_4 (sequence is synthesized)
aggatattttttattcaggccacggaatggaagaaggtcagcagggttcatttaaaatggatgccagctaattttccacagagcaatgctatggaatacaaaatgtactgacattttgtt

SEQ ID NO: 171723 - DNA, 120 bp, Artificial Sequence
  ENSG00000109255_5 (sequence is synthesized)
ttcttctgaaaaaaatccttgctaaatgtactctgttgaaaatccctgtgttgtcaatgttctcagttgtaacaatgttgtaaatgttcaatttgttgaaaattaaaaaatctaaaaata

SEQ ID NO: 171724 - DNA, 120 bp, Artificial Sequence
  ENSG00000109255_6 (sequence is synthesized)
cgtactagtgactgccggagctctggaagaggtgaaggagaaagggtgtcccacgtagacccaggacaccagagagcgtcgccactaccaagtttaaaaactcagacggcctggtttgcc

SEQ ID NO: 171725 - DNA, 120 bp, Artificial Sequence
  ENSG00000109255_7 (sequence is synthesized)
cctcaggaacaagatgaaaaagataatactaaaagggaagaattccaaagtccctttgcaagtcaaagtcgaggatattttttattcaggccacggaatggaagaaggtcagcagggttc

SEQ ID NO: 171726 - DNA, 120 bp, Artificial Sequence
  ENSG00000109265_0 (sequence is synthesized)
acatgccttctggtttgactggagtaatcctggtagaatccacgtagctctgaagacttacaagagcagtgattcccaggctttctcagcaatgtaccccatttcctgacatttacagct

SEQ ID NO: 171727 - DNA, 120 bp, Artificial Sequence
  ENSG00000109265_1 (sequence is synthesized)
gaaggtgaagtttcccttttgcaaggagaaaattttggtggagaattatccaacaagaaaaagacctgtggctattaagatagacaagaagaagggaggcaaattccagccttttaaaaa

SEQ ID NO: 171728 - DNA, 120 bp, Artificial Sequence
  ENSG00000109265_2 (sequence is synthesized)
gttgtttggcaaaaggaaaaagaaagacccttcgttgttccgggtgccgtcgttggggaagaagagttactctcaccagagtgtcagcaatgggaccttctcttcggatgaggagaccct

SEQ ID NO: 171729 - DNA, 120 bp, Artificial Sequence
  ENSG00000109265_3 (sequence is synthesized)
ggaagacaatctaaggtccttcaactattctatgggaacccgggcattttcccatgacagtatttttatccctgatgggggagcagaaagtgagcagacagttcaagcaatgtcacagga

SEQ ID NO: 171730 - DNA, 120 bp, Artificial Sequence
  ENSG00000109265_4 (sequence is synthesized)
caacatcctgggcaaagtcaaaactcttcagcaacagttgggcaagaatatcaagtttgggcagcggtcacccaatgccattcccatgaataaggcaaacagtggagaggctagcttaga

SEQ ID NO: 171731 - DNA, 120 bp, Artificial Sequence
  ENSG00000109265_5 (sequence is synthesized)
agaggatctgttcctgaccagtcccatggaaattgtgactcagcaggacatcgtcctctcagacgcagagaacaagtccagtgatacgccaagttctctaagtcctctgaatctccctgg

SEQ ID NO: 171732 - DNA, 120 bp, Artificial Sequence
  ENSG00000109265_6 (sequence is synthesized)
agctggaagtgagatggaagagaaggttgctcccgttaaaccgtctcggccaaaaaggcacttctcttctgctggcaccatcgaaagtgtcaacttagatgccatccccctggccatcgc

SEQ ID NO: 171733 - DNA, 120 bp, Artificial Sequence
  ENSG00000109265_7 (sequence is synthesized)
tcgcctggacaacagtgccgccaagcacaagctggctgttaagccaaaaaaacagagggtgtcaaagaagcacaggcgccttgcccaggatccacaacatgagcaaggcggccttgagag

SEQ ID NO: 171734 - DNA, 120 bp, Artificial Sequence
  ENSG00000109265_8 (sequence is synthesized)
tcggccctgcctggaccagaacggacacccaggcgaggacaagccaacgtggcacgaagaggaacccaatccgctggattccgaggaagagagaagacgccaagaagactactggcgaga

SEQ ID NO: 171735 - DNA, 120 bp, Artificial Sequence
  ENSG00000109265_9 (sequence is synthesized)
actggaggccaagtgcaagcggcaaaaggcggaagcagccgagaagagacgcctagaggagcagaggctgcaggcgctggagaggaggctttgggaagagaacagaaggcaggagctctt

SEQ ID NO: 171736 - DNA, 120 bp, Artificial Sequence
  ENSG00000109265_10 (sequence is synthesized)
ggaggaggagggcgaggggcaggagccgcctctagaggcggaaagggcgccgcgggaagagcagcagcggagcctggaagcgccaggttgggaggacgcggagcggagggagcgtgagga

SEQ ID NO: 171737 - DNA, 120 bp, Artificial Sequence
  ENSG00000109265_11 (sequence is synthesized)
gcgcgagcgcctggaggcggaggaggagcgaaggcgtctgcaggcccaggcccaagcggaggagaggcggcggctggaggaggacgccaggctggaggagcggaggcggcaggaggagga

SEQ ID NO: 171738 - DNA, 120 bp, Artificial Sequence
  ENSG00000109265_12 (sequence is synthesized)
ggaaggaagatgcgcggaggagctcaaaaggcaggaggaggaggaggctgagggatgggaagagctggaacagcaggaggcggaggtgcaggggccgcccgaggcgttggaggagactgg

SEQ ID NO: 171739 - DNA, 120 bp, Artificial Sequence
  ENSG00000109265_13 (sequence is synthesized)
ggagggccggcggggcgcggaggaggaggatctgggggaagaggaggaggagggccaggcgcacctggaggactggagggggcagctcagtgagcttctgaacgactttgaggagaggct

SEQ ID NO: 171740 - DNA, 120 bp, Artificial Sequence
  ENSG00000109265_14 (sequence is synthesized)
cgaagaccaggaacgcctgaaacccgaaggacaaagagaacactccgaggagccaggtatttgcgaggagcagaacccagaggccgagcggcgaagagagcagcagggaaggagcgggga

SEQ ID NO: 171741 - DNA, 120 bp, Artificial Sequence
  ENSG00000109265_15 (sequence is synthesized)
tttccagggggccgatcgtcctgggcccgaggaaaagagagaagaaggggacacggagcctctcctgaaacaagaggggccggtggaagccgcgcagcctccggtggagaggaaagaagc

SEQ ID NO: 171742 - DNA, 120 bp, Artificial Sequence
  ENSG00000109265_16 (sequence is synthesized)
cgccgcccttgaacaaggccgcaaggtggaggagctgcggtggcaggaggtggacgagagacagaccatgccccggccctacacgttccaggtgtcctccggagggaagcagattctctt

SEQ ID NO: 171743 - DNA, 120 bp, Artificial Sequence
  ENSG00000109265_17 (sequence is synthesized)
tcccaaagtcaacctgagccccgtgacgcccgcaaaggacacggggctcaccgctgctccccaggaaccaaaggcccccaaagccagcccagtccagcacgccctaccgtcgtccctgag

SEQ ID NO: 171744 - DNA, 120 bp, Artificial Sequence
  ENSG00000109265_18 (sequence is synthesized)
cgttccccacaccgccattctggtcacgggcgcgcagctctgtggcccggcagtcaacctgagccagatcaaggacaccgcgtgcaagtccctcctgggcttggaggagaagaagcacgc

SEQ ID NO: 171745 - DNA, 120 bp, Artificial Sequence
  ENSG00000109265_19 (sequence is synthesized)
ggaagccccagctggggagaaccctccccgaggccccggcgacgcgagggcgggcagcgggaaggctaagccccgccaggagtctcccagcagcgcgtccgcactcgcagaatgggcttc

SEQ ID NO: 171746 - DNA, 120 bp, Artificial Sequence
  ENSG00000109265_20 (sequence is synthesized)
ccaacggaagactccgccagtcaatgcaaagttctctattatgcctgcctggcagaaattttccgatggtggcacggagacctccaaacagagcacggaagctgaaagcatacgaaaaag

SEQ ID NO: 171747 - DNA, 120 bp, Artificial Sequence
  ENSG00000109265_21 (sequence is synthesized)
acccatgctgggacccagcgaagagacagccccccagcctcctcctgctggtgttcgcgagctcgggaagggtccggagaagtcggagatgcaccgggagcccgcagacaccaccgaggg

SEQ ID NO: 171748 - DNA, 120 bp, Artificial Sequence
  ENSG00000109265_22 (sequence is synthesized)
atgcaaatttgccaaagacctcccgtctttccttgtcccaagccttccttaccctccgcagaaagtggtggcccacacagagttcacgacctcgtcggacagcgagactgcaaacgggat

SEQ ID NO: 171749 - DNA, 120 bp, Artificial Sequence
  ENSG00000109265_23 (sequence is synthesized)
agcaaagccagaccctgtgatgccaggtggagaggaaaaagcctcaccgtttggaataaaattgagaaggaccaactattccttgcgcttcaactgcgaccaacaggcagaacagaagaa

SEQ ID NO: 171750 - DNA, 120 bp, Artificial Sequence
  ENSG00000109265_24 (sequence is synthesized)
gaagaagaggcacagcagcaccggagacagcgcggatgcagggccgcctgcagcggggagcgctcgtggagagaaagagatggagggtgtggccctcaagcatggtccatccctccccca

SEQ ID NO: 171751 - DNA, 120 bp, Artificial Sequence
  ENSG00000109265_25 (sequence is synthesized)
agagcggaagcaagccccttccacccggagggactccgctgaaccttccagcagccgctctgttcctgtggcccaccctgggcctccaccggccagcagccagaccccggctccggagca

SEQ ID NO: 171752 - DNA, 120 bp, Artificial Sequence
  ENSG00000109265_26 (sequence is synthesized)
cgacaaggcagcaaacaaaatgccactggcacaaaagccagcactggctcccaagcccaccagtcagaccccaccagcatccccactttccaaactgagcaggccctacttggtagagct

SEQ ID NO: 171753 - DNA, 120 bp, Artificial Sequence
  ENSG00000109265_27 (sequence is synthesized)
gctgtctcgccgagcggggaggccggacccagagccaagtgagccgtccaaggaggaccaggagagcagtgaccgccggccaccctcgcccccaggccccgaggaaaggaagggacagaa

SEQ ID NO: 171754 - DNA, 120 bp, Artificial Sequence
  ENSG00000109265_28 (sequence is synthesized)
gagggacgaggaggaagaggcgacagagaggaaacctgcttccccacctctgcctgccactcagcaagagaaaccttctcaaacacccgaggccgggaggaaagagaagccgatgcttca

SEQ ID NO: 171755 - DNA, 120 bp, Artificial Sequence
  ENSG00000109265_29 (sequence is synthesized)
gagcagacactccttagatggctccaaacttacagagaaagtggaaactgctcagccgctgtggataacgttagcactgcaaaagcaaaaggggtttcgggagcagcaggcgacgcggga

SEQ ID NO: 171756 - DNA, 120 bp, Artificial Sequence
  ENSG00000109265_30 (sequence is synthesized)
ggagagaaagcaagccagagaggccaaacaggcagaaaagctctccaaagaaaatgtcagtgtcagcgtgcagcctggaagcagcagtgtcagcagagcaggttccctgcacaagtccac

SEQ ID NO: 171757 - DNA, 120 bp, Artificial Sequence
  ENSG00000109265_31 (sequence is synthesized)
tgctctgccagaagagaagaggcccgagactgcagtgtccaggcttgagcgcagagaacagctgaaaaaggccaatactcttcctacgtctgtgacagtggagatctccgactcggctcc

SEQ ID NO: 171758 - DNA, 120 bp, Artificial Sequence
  ENSG00000109265_32 (sequence is synthesized)
cccagcgccgctggtaaaagaagtcaccaagaggttttccaccccggatgctgcccccgtgtcaacagaaccagcctggctggctttggccaaaaggaaagcaaaggcttggagcgactg

SEQ ID NO: 171759 - DNA, 120 bp, Artificial Sequence
  ENSG00000109265_33 (sequence is synthesized)
tccacagattattaagtaaagagtgactctcacccatccctactgccagttattggctcctctcttgccctttttatttatttattttttatatggggtaaagaaatcaagctagggaaa

SEQ ID NO: 171760 - DNA, 120 bp, Artificial Sequence
  ENSG00000109265_34 (sequence is synthesized)
agaagcatgttttataggctccaaaataatgtttagaaactgaactggtggtgttcattgtaaagagtggatttgcacaaccctaggtcctggtgcctcgagctcctcctagttctcaag

SEQ ID NO: 171761 - DNA, 120 bp, Artificial Sequence
  ENSG00000109265_35 (sequence is synthesized)
agaaaattccgtccacaggaccacatgaagcaaaatctctaagctaagaactcgtgagagcctgccatgcccatttcatggccttgcacacacacccacccacacaccattcagaacatg

SEQ ID NO: 171762 - DNA, 120 bp, Artificial Sequence
  ENSG00000109265_36 (sequence is synthesized)
tacttttgccaacctttggtaatggttttttgattctatgcactaattttctttgtccaaaacatttactctaccatatgtctgggaatgtttatcctttctacagtaatggtgaaagga

SEQ ID NO: 171763 - DNA, 120 bp, Artificial Sequence
  ENSG00000109265_37 (sequence is synthesized)
tcatatctagctaaaagcaagaacacccattctcctgaatgcagtgagtaattgggaatcacaaggaacattctggcacccaactgtgcccatcttagttttcatgagttttccccactc

SEQ ID NO: 171764 - DNA, 120 bp, Artificial Sequence
  ENSG00000109265_38 (sequence is synthesized)
tgaagctgtaacccagaaggcacatccattcacatttttaccgcactgtggattcatagtgtggggccctgttattccaataccctccttaaggacatgtgaagcatttggcccagttgg

SEQ ID NO: 171765 - DNA, 120 bp, Artificial Sequence
  ENSG00000109265_39 (sequence is synthesized)
ctcccagggaacattttaatttaatgtagtgaagaaagacaattctagatcagagctacaagttcactttctgtctctgagaatctccatctagggcagtagttcttatgatgtgtaggc

SEQ ID NO: 171766 - DNA, 120 bp, Artificial Sequence
  ENSG00000109265_40 (sequence is synthesized)
tttccaattgtaaaagagaaatgcgttgccaccagatgatgtcttaaagcgcctccaacttctggaatggaagaccctctggaaacacagagctgtgtggttgcaggaaatgggctcttt

SEQ ID NO: 171767 - DNA, 120 bp, Artificial Sequence
  ENSG00000109265_41 (sequence is synthesized)
gtttaccaagggccggggccaggagactgcgcgctgcccgtggtgtaaaatctgttttctttatcttcgcccggggcttgttgcgatggttttcctggcactataaccgtcctttcttgc

SEQ ID NO: 171768 - DNA, 120 bp, Artificial Sequence
  ENSG00000109265_42 (sequence is synthesized)
agaactatgtccaaagccaatctaacagtacctgcactcacctgactcatactgtaggagctttttgtcataacataccaagtgccctactgagcttctacatggggcatgcacactccc

SEQ ID NO: 171769 - DNA, 120 bp, Artificial Sequence
  ENSG00000109265_43 (sequence is synthesized)
atggcatggtgtttctgaggggggataatttaccaggtggaagaatctcatgtttgatcgggaaactgtaggcttcaggcagcccagaagacaagaagaagggaggcaaattccagcctt

SEQ ID NO: 171770 - DNA, 120 bp, Artificial Sequence
  ENSG00000109265_44 (sequence is synthesized)
gtctcagatatgggtattacagaggtgagcaagattctacaaggggccccccatctctgtagtttacaccctaatgagagggtgtaacaaacaacaaacaagtcaaccagtatataaata

SEQ ID NO: 171771 - DNA, 120 bp, Artificial Sequence
  ENSG00000109265_45 (sequence is synthesized)
gaatcatttcagatcaagaaaaatgctggctgcacagaaaataaaacagggtaatggaaaatccagtgatacgccaagttctctaagtcctctgaatctccctggagctggaagtgagat

SEQ ID NO: 171772 - DNA, 120 bp, Artificial Sequence
  ENSG00000109265_46 (sequence is synthesized)
ggaagagaagaatgccactagtgacagatgttggagcatctgtttccatggcaaggcaactgctggaactgaactctgctctgaaaactagccatactcccagcatgcctgtgtttgggg

SEQ ID NO: 171773 - DNA, 120 bp, Artificial Sequence
  ENSG00000109265_47 (sequence is synthesized)
tcaaaggatcatgtacttcaagatcctgttaattgattgaaaaaggcattccagaatatccagtctgagtgtaagaaccctgtggactcttctccccgggcacctcttctgtaggagccg

SEQ ID NO: 171774 - DNA, 120 bp, Artificial Sequence
  ENSG00000109265_48 (sequence is synthesized)
atctgccccattgaggacctttcatctgcacaaggggccaggcattctcccaaggcctggcagacagtataggaagcaggatctgctcctgaagaaggggatggctcaagacagtgctgc

SEQ ID NO: 171775 - DNA, 120 bp, Artificial Sequence
  ENSG00000109265_49 (sequence is synthesized)
cgcccagacaatgaggaagccagctgggatagctagaaacaaagcacagcacttaaatctcagcatcaagtgcttatctatgtcttcaatctgtcacatttggctccgactcctttttct

SEQ ID NO: 171776 - DNA, 120 bp, Artificial Sequence
  ENSG00000109265_50 (sequence is synthesized)
catgcatctattaggggatggaaacaaatgtttcattcagcaatagcttagaatctcatgcccattataaagataaccataaataaatgaaagctagaaggccaaaacttgatttttctg

SEQ ID NO: 171777 - DNA, 120 bp, Artificial Sequence
  ENSG00000109265_51 (sequence is synthesized)
cggggccgggcgcgcagtgccgcgcggtggcggcagtggggagagcaatggaggccacggccgactgagaggcgggtgcgctgctggtgctgctgccgcggcggctgctgatgcggaggc

SEQ ID NO: 171778 - DNA, 120 bp, Artificial Sequence
  ENSG00000109265_52 (sequence is synthesized)
tgatgcggaggctgccgcgcgcagtgccgccgagtccgccgcccgcccgggaccgccggtcgccggccagccgctctgccagccggagcgccaggcggggacctcagcttacaagagcag

SEQ ID NO: 171779 - DNA, 120 bp, Artificial Sequence
  ENSG00000109265_53 (sequence is synthesized)
gacaaaactgatagtgacagctcagctggagaaaggctcttccaattaaaagttctgcagtgccttctgtcttggatcctatacaaataagtaactgtctttgtgttctcacggtccttc

SEQ ID NO: 171780 - DNA, 120 bp, Artificial Sequence
  ENSG00000109270_0 (sequence is synthesized)
atgaatcatgtgacggtggcttgaggaggaacctgtctttaaagctgtccctgaagtgacagcggagagaaccaggcagcccagaaaccccaggcgtggagattgatcctgcgagagaag

SEQ ID NO: 171781 - DNA, 120 bp, Artificial Sequence
  ENSG00000109270_1 (sequence is synthesized)
ggggttcatcatggcggatgacctaaagcgattcttgtataaaaagttaccaagtgttgaagggctccatgccattgttgtgtcagatagagatggagtacctgttattaaagtggcaaa

SEQ ID NO: 171782 - DNA, 120 bp, Artificial Sequence
  ENSG00000109270_2 (sequence is synthesized)
tgacaatgctccagagcatgctttgcgacctggtttcttatccacttttgcccttgcaacagaccaaggaagcaaacttggactttccaaaaataaaagtatcatctgttactataacac

SEQ ID NO: 171783 - DNA, 120 bp, Artificial Sequence
  ENSG00000109270_3 (sequence is synthesized)
ctaccaggtggttcaatttaatcgtttacctttggtggtgagtttcatagccagcagcagtgccaatacaggactaattgtcagcctagaaaaggaacttgctccattgtttgaagaact

SEQ ID NO: 171784 - DNA, 120 bp, Artificial Sequence
  ENSG00000109270_4 (sequence is synthesized)
gagacaagttgtggaagtttcttaatctgacagtggtttcagtgtgtaccttatcttcattataacaacacaatatcaatccagcaatctttagactacaataatacttttatccatgtg

SEQ ID NO: 171785 - DNA, 120 bp, Artificial Sequence
  ENSG00000109270_5 (sequence is synthesized)
ctcaagaaagggcccctttttccaacttatactaaagagctagcatatagatgtaatttatagatagatcagttgctatattttctggtgtagggtctttcttatttagtgagatctagg

SEQ ID NO: 171786 - DNA, 120 bp, Artificial Sequence
  ENSG00000109270_6 (sequence is synthesized)
gataccacagaaatggttcagtctatcacagctcccatggagttagtctggtcaccagatatggatgagagattctattcagtggatcagaatcaaactggtacattgatccacttgagc

SEQ ID NO: 171787 - DNA, 120 bp, Artificial Sequence
  ENSG00000109270_7 (sequence is synthesized)
cgttaagtgctgccaattgtacaatatgcccaggcttgcagaataaagccaactttttattgtgaataataataaggacatatttttcttcagattatgttttatttctttgcattgagt

SEQ ID NO: 171788 - DNA, 120 bp, Artificial Sequence
  ENSG00000109270_8 (sequence is synthesized)
gaggaacataaaatggcttggtaaaagtaataaaatcagtacaatcactaactttcctttgtacatattattttgcagtatagatgaatattactaatcagtttgattattctcagaggg

SEQ ID NO: 171789 - DNA, 120 bp, Artificial Sequence
  ENSG00000109270_9 (sequence is synthesized)
tgctgctctttaatgaaaatgaaaattatagctaatgttttttcctcaaactctgctttctgtaaccaatcagtgttttaatgtttgtgtgttcttcataaaatttaaatacaattcgtt

SEQ ID NO: 171790 - DNA, 120 bp, Artificial Sequence
  ENSG00000109270_10 (sequence is synthesized)
attctgtttccaatgttagtatgtatgtaaacatgatagtacagccatttttttcatatgtgagtaaaaataaaatagtatttttaaaaatatagtttgagcactgtataggtccttttt

SEQ ID NO: 171791 - DNA, 120 bp, Artificial Sequence
  ENSG00000109270_11 (sequence is synthesized)
ttgttcagactttttccaaaaatctaaacataattaatatactctttcagccacatgaataaataatgagtgtttcttgtaggtattggtttggagattgttttacggtagtatgaactg

SEQ ID NO: 171792 - DNA, 79 bp, Artificial Sequence
  ENSG00000109270_12 (sequence is synthesized)
aggtattggtttggagattgttttacggtagtatgaactgttaactggaaaagaaacctgagattgcagtcactccgtc

SEQ ID NO: 171793 - DNA, 120 bp, Artificial Sequence
  ENSG00000109270_13 (sequence is synthesized)
tgaacctaatttaatctccatgaaagaggtactacagttctagaatataccctttatgttcaggaatgcagtctatcattcagagttaatttctttctaggctctttgacaatcagtttt

SEQ ID NO: 171794 - DNA, 120 bp, Artificial Sequence
  ENSG00000109270_14 (sequence is synthesized)
tccctggatcagttcagtacatatgcattgagcacctgtgtgccagtcagccgagctatcacattgcacaattctaagaagcaccattcatgtctcatcatatttctatgctctgggagt

SEQ ID NO: 171795 - DNA, 120 bp, Artificial Sequence
  ENSG00000109270_15 (sequence is synthesized)
tgcctttcacatagaatatgtgtgattgttatccctagaattgtgcagtgaggcaattggctaggtgctgtgctgctttttctttctttctttttttttttaagagacagagtcttgctg

SEQ ID NO: 171796 - DNA, 82 bp, Artificial Sequence
  ENSG00000109270_16 (sequence is synthesized)
atgccccattctcccttgtagctgggattacaggcttacaccatcgcacttggcaaatttgtgtatttttagtagagacagg

SEQ ID NO: 171797 - DNA, 120 bp, Artificial Sequence
  ENSG00000109270_17 (sequence is synthesized)
atccacctgctttggcctcccaaaatgctaggattataggtgtgagccactgcaccgggccatgtgctactttttcttccttccatccttcctcccttcttcagtgtaaatatgagatta

SEQ ID NO: 171798 - DNA, 120 bp, Artificial Sequence
  ENSG00000109270_18 (sequence is synthesized)
attaatttgtgataccttactttaaagaacttagagttcagtaaaggaagcaggtatagaaagtgctatgataaagctatacataggatggtatagaaccacagactaggggcacttaaa

SEQ ID NO: 171799 - DNA, 120 bp, Artificial Sequence
  ENSG00000109270_19 (sequence is synthesized)
atgggcaagaaaatagcctttgtaaataaaatagaggcaagagatataatgctttacctgcaaagagctataaatacagccatgtaccatataatgatgtttcagttagtgaaggaccac

SEQ ID NO: 171800 - DNA, 61 bp, Artificial Sequence
  ENSG00000109270_20 (sequence is synthesized)
catgtaccatataatgatgtttcagttagtgaaggaccacatacgagggtggtcagaacag

SEQ ID NO: 171801 - DNA, 120 bp, Artificial Sequence
  ENSG00000109270_21 (sequence is synthesized)
ctataccatatagcctaggtgtgtagtagtaggcgataccatatagcctaggtgtgtagtagtaggctataccatatagcctaggtgtatagtagtaggctataccatatagcctaggtg

SEQ ID NO: 171802 - DNA, 120 bp, Artificial Sequence
  ENSG00000109270_22 (sequence is synthesized)
ataccatatagcctaggtgtgtagtagtaggctataccatctggggttcctgtcagtacagtatgatgttcacataatgatgaaatcacctaacaaagcatgtctcgaaatgtatccaca

SEQ ID NO: 171803 - DNA, 120 bp, Artificial Sequence
  ENSG00000109270_23 (sequence is synthesized)
aatgtatccacattgttacgtaacacatgactgtagttaattgttacaattgaaatactagatgtactcattgaaatccagaattcccattatctggattatttaatatcgttcaggaaa

SEQ ID NO: 171804 - DNA, 120 bp, Artificial Sequence
  ENSG00000109270_24 (sequence is synthesized)
tttttgccagtgcaatggtgcatgaaacaatgtcttttagaaatgaggtggccagatttctatttgcagataataattgtatatctaaaaatcctagaaaaagaaatgataacaaatgga

SEQ ID NO: 171805 - DNA, 120 bp, Artificial Sequence
  ENSG00000109270_25 (sequence is synthesized)
gctacttaacctttacatgttgaatgctgccactgttaaaatttctgagggggtataatagataaactatcccatagttcatctggaaaaataaggtggtgaaaattgctaagaaatttt

SEQ ID NO: 171806 - DNA, 120 bp, Artificial Sequence
  ENSG00000109270_26 (sequence is synthesized)
tgaaagggtaatgtaaacctagattaactgtttttgaaaggtagtacagaactgaatgcacaactagatatcaatggtatgtactcacccagaaaaaagacttcagtacatacatgtgag

SEQ ID NO: 171807 - DNA, 120 bp, Artificial Sequence
  ENSG00000109270_27 (sequence is synthesized)
ggcttaaaacattgttataaagacgggatcacaatgggaaaaggattattcaataagtagggcaggcattctctatgcctgctagggaagtgtgacttgttatactctttatgtacagca

SEQ ID NO: 171808 - DNA, 120 bp, Artificial Sequence
  ENSG00000109270_28 (sequence is synthesized)
attggcagtctgtgaaacttttaaattcatatacataaccttttgccctgcaattccacttctagaaatttatcctaccaaacaaagcacatagatgtgcaaaagtatgtatttacaagt

SEQ ID NO: 171809 - DNA, 120 bp, Artificial Sequence
  ENSG00000109270_29 (sequence is synthesized)
atattctttgcaacttggtaatgtcaaagaattggaagcaacctaaatatctgccataggtaggataaccatatgctttggctttttgaacactaccagtttatacctgctgttcttgga

SEQ ID NO: 171810 - DNA, 120 bp, Artificial Sequence
  ENSG00000109270_30 (sequence is synthesized)
taattattaatagtgctttcattctcaatgtctcactttagataataaattacagaggattggtgaaactaatttgcccaatggaaaaaggaatgaagaagtgctttaggtactgagatg

SEQ ID NO: 171811 - DNA, 120 bp, Artificial Sequence
  ENSG00000109270_31 (sequence is synthesized)
aaaagatctctaaggcataataatgtttattgagaaaagcatggtgtcaaactgtatggcatgctacaattgatgtataagaagaaaaaatgtgtatgtattcctatttgtttgtatatg

SEQ ID NO: 171812 - DNA, 120 bp, Artificial Sequence
  ENSG00000109270_32 (sequence is synthesized)
gtagactgtctctgaagacatatatggaagaacctgatcacattggtagtctccaaggagcagaactagatacctgggggataaggatcccaggagtgagccttttcattgtaaacttca

SEQ ID NO: 171813 - DNA, 120 bp, Artificial Sequence
  ENSG00000109270_33 (sequence is synthesized)
ttgtactttgagtttttaactgttcaaaaataataaaattagaaataaaatatttcaacaaacaataaaatgggatatttggggaagaaagttgtctcagggctctccaaagaagcagaa

SEQ ID NO: 171814 - DNA, 120 bp, Artificial Sequence
  ENSG00000109272_0 (sequence is synthesized)
actgcctgcagaaccccagcccgactttccctgcgcactgggatcctgctggaacctcagctgcaacatgagctccgcagccaggtcccgcctcacccgcgccacccgccaggagatgct

SEQ ID NO: 171815 - DNA, 120 bp, Artificial Sequence
  ENSG00000109272_1 (sequence is synthesized)
gttcttggcgttgctgctcctgccagttgtggtcgccttcgccagagctgaagctgaagaagatggggacctgcagtgcctgtgtgtgaagaccacctcccaggtccgtcccaggcacat

SEQ ID NO: 171816 - DNA, 120 bp, Artificial Sequence
  ENSG00000109272_2 (sequence is synthesized)
caccagcctggaggtgatcaaggccggaccccactgccccactgcccaactcatagccacgctgaagaatgggaggaaaatttgcttggatctgcaagccctgctgtacaagaaaatcat

SEQ ID NO: 171817 - DNA, 120 bp, Artificial Sequence
  ENSG00000109272_3 (sequence is synthesized)
tactagctgcctaagtgtgcactttcaatctaactgtgaaagaatcttctgatgtttgtattatccttcttatattatattaacgaaataaatcaagttgtggtatagtcaatctatttc

SEQ ID NO: 171818 - DNA, 120 bp, Artificial Sequence
  ENSG00000109272_4 (sequence is synthesized)
ttaataatactgcaaaaataatgctgacacatcacaatttcatattttaaaatttccagaattttaagcaaaaagcattatgaaggaaggcttggtttaataaagactgattttgttcag

SEQ ID NO: 171819 - DNA, 120 bp, Artificial Sequence
  ENSG00000109272_5 (sequence is synthesized)
tgttatatgttagctgatacatatttgttcatttatgtgattgcagtactttatagctacatatttaccttgaatgttacaattagcttgccaataaatattagtagctcttaagcatta

SEQ ID NO: 171820 - DNA, 120 bp, Artificial Sequence
  ENSG00000109320_0 (sequence is synthesized)
gaagtgcaccagcgagccggggcaggaagaggaggtttcgccaccggagcggcccggcgacgcgctgacagcttcccctgcccttcccgtcggtcgggccgccagccgccgcagccctcg

SEQ ID NO: 171821 - DNA, 80 bp, Artificial Sequence
  ENSG00000109320_1 (sequence is synthesized)
ctcccgctcgccccgacccgcactcgggcccgcccgggctccggcctgccgccgcctcttccttctccagccggcaggcc

SEQ ID NO: 171822 - DNA, 120 bp, Artificial Sequence
  ENSG00000109320_2 (sequence is synthesized)
ggcaggcccgcgccgcttaggagggagagcccacccgcgccaggaggccgaacgcggactcgccacccggcttcagaatggcagaagatgatccatatttgggaaggcctgaacaaatgt

SEQ ID NO: 171823 - DNA, 120 bp, Artificial Sequence
  ENSG00000109320_3 (sequence is synthesized)
ttcatttggatccttctttgactcatacaatatttaatccagaagtatttcaaccacagatggcactgccaacagcagatggcccataccttcaaatattagagcaacctaaacagagag

SEQ ID NO: 171824 - DNA, 120 bp, Artificial Sequence
  ENSG00000109320_4 (sequence is synthesized)
gatttcgtttccgttatgtatgtgaaggcccatcccatggtggactacctggtgcctctagtgaaaagaacaagaagtcttaccctcaggtcaaaatctgcaactatgtgggaccagcaa

SEQ ID NO: 171825 - DNA, 120 bp, Artificial Sequence
  ENSG00000109320_5 (sequence is synthesized)
aggttattgttcagttggtcacaaatggaaaaaatatccacctgcatgcccacagcctggtgggaaaacactgtgaggatgggatctgcactgtaactgctggacccaaggacatggtgg

SEQ ID NO: 171826 - DNA, 120 bp, Artificial Sequence
  ENSG00000109320_6 (sequence is synthesized)
tcggcttcgcaaacctgggtatacttcatgtgacaaagaaaaaagtatttgaaacactggaagcacgaatgacagaggcgtgtataaggggctataatcctggactcttggtgcaccctg

SEQ ID NO: 171827 - DNA, 120 bp, Artificial Sequence
  ENSG00000109320_7 (sequence is synthesized)
accttgcctatttgcaagcagaaggtggaggggaccggcagctgggagatcgggaaaaagagctaatccgccaagcagctctgcagcagaccaaggagatggacctcagcgtggtgcggc

SEQ ID NO: 171828 - DNA, 120 bp, Artificial Sequence
  ENSG00000109320_8 (sequence is synthesized)
tcatgtttacagcttttcttccggatagcactggcagcttcacaaggcgcctggaacccgtggtatcagacgccatctatgacagtaaagcccccaatgcatccaacttgaaaattgtaa

SEQ ID NO: 171829 - DNA, 120 bp, Artificial Sequence
  ENSG00000109320_9 (sequence is synthesized)
gaatggacaggacagctggatgtgtgactggaggggaggaaatttatcttctttgtgacaaagttcagaaagatgacatccagattcgattttatgaagaggaagaaaatggtggagtct

SEQ ID NO: 171830 - DNA, 120 bp, Artificial Sequence
  ENSG00000109320_10 (sequence is synthesized)
gggaaggatttggagatttttcccccacagatgttcatagacaatttgccattgtcttcaaaactccaaagtataaagatattaatattacaaaaccagcctctgtgtttgtccagcttc

SEQ ID NO: 171831 - DNA, 120 bp, Artificial Sequence
  ENSG00000109320_11 (sequence is synthesized)
ggaggaaatctgacttggaaactagtgaaccaaaacctttcctctactatcctgaaatcaaagataaagaagaagtgcagaggaaacgtcagaagctcatgcccaatttttcggatagtt

SEQ ID NO: 171832 - DNA, 120 bp, Artificial Sequence
  ENSG00000109320_12 (sequence is synthesized)
tcggcggtggtagtggtgctggagctggaggcggaggcatgtttggtagtggcggtggaggagggggcactggaagtacaggtccagggtatagcttcccacactatggatttcctactt

SEQ ID NO: 171833 - DNA, 120 bp, Artificial Sequence
  ENSG00000109320_13 (sequence is synthesized)
atggtgggattactttccatcctggaactactaaatctaatgctgggatgaagcatggaaccatggacactgaatctaaaaaggaccctgaaggttgtgacaaaagtgatgacaaaaaca

SEQ ID NO: 171834 - DNA, 120 bp, Artificial Sequence
  ENSG00000109320_14 (sequence is synthesized)
ctgtaaacctctttgggaaagttattgaaaccacagagcaagatcaggagcccagcgaggccaccgttgggaatggtgaggtcactctaacgtatgcaacaggaacaaaagaagagagtg

SEQ ID NO: 171835 - DNA, 120 bp, Artificial Sequence
  ENSG00000109320_15 (sequence is synthesized)
aagatgctgctggccgtccagcgccatctcactgctgtgcaggatgagaatggggacagtgtcttacacttagcaatcatccaccttcattctcaacttgtgagggatctactagaagtc

SEQ ID NO: 171836 - DNA, 120 bp, Artificial Sequence
  ENSG00000109320_16 (sequence is synthesized)
acatctggtttgatttctgatgacattatcaacatgagaaatgatctgtaccagacgcccttgcacttggcagtgatcactaagcaggaagatgtggtggaggatttgctgagggctggg

SEQ ID NO: 171837 - DNA, 120 bp, Artificial Sequence
  ENSG00000109320_17 (sequence is synthesized)
gccgacctgagccttctggaccgcttgggtaactctgttttgcacctagctgccaaagaaggacatgataaagttctcagtatcttactcaagcacaaaaaggcagcactacttcttgac

SEQ ID NO: 171838 - DNA, 120 bp, Artificial Sequence
  ENSG00000109320_18 (sequence is synthesized)
caccccaacggggacggtctgaatgccattcatctagccatgatgagcaatagcctgccatgtttgctgctgctggtggccgctggggctgacgtcaatgctcaggagcagaagtccggg

SEQ ID NO: 171839 - DNA, 120 bp, Artificial Sequence
  ENSG00000109320_19 (sequence is synthesized)
cgcacagcactgcacctggctgtggagcacgacaacatctcattggcaggctgcctgctcctggagggtgatgcccatgtggacagtactacctacgatggaaccacacccctgcatata

SEQ ID NO: 171840 - DNA, 120 bp, Artificial Sequence
  ENSG00000109320_20 (sequence is synthesized)
gcagctgggagagggtccaccaggctggcagctcttctcaaagcagcaggagcagatcccctggtggagaactttgagcctctctatgacctggatgactcttgggaaaatgcaggagag

SEQ ID NO: 171841 - DNA, 120 bp, Artificial Sequence
  ENSG00000109320_21 (sequence is synthesized)
gatgaaggagttgtgcctggaaccacgcctctagatatggccaccagctggcaggtatttgacatattaaatgggaaaccatatgagccagagtttacatctgatgatttactagcacaa

SEQ ID NO: 171842 - DNA, 120 bp, Artificial Sequence
  ENSG00000109320_22 (sequence is synthesized)
ggagacatgaaacagctggctgaagatgtgaagctgcagctgtataagttactagaaattcctgatccagacaaaaactgggctactctggcgcagaaattaggtctggggatacttaat

SEQ ID NO: 171843 - DNA, 120 bp, Artificial Sequence
  ENSG00000109320_23 (sequence is synthesized)
aatgccttccggctgagtcctgctccttccaaaacacttatggacaactatgaggtctctgggggtacagtcagagagctggtggaggccctgagacaaatgggctacaccgaagcaatt

SEQ ID NO: 171844 - DNA, 120 bp, Artificial Sequence
  ENSG00000109320_24 (sequence is synthesized)
gaagtgatccaggcagcctccagcccagtgaagaccacctctcaggcccactcgctgcctctctcgcctgcctccacaaggcagcaaatagacgagctccgagacagtgacagtgtctgc

SEQ ID NO: 171845 - DNA, 120 bp, Artificial Sequence
  ENSG00000109320_25 (sequence is synthesized)
gacagcggcgtggagacatccttccgcaaactcagctttaccgagtctctgaccagtggtgcctcactgctaactctcaacaaaatgccccatgattatgggcaggaaggacctctagaa

SEQ ID NO: 171846 - DNA, 120 bp, Artificial Sequence
  ENSG00000109320_26 (sequence is synthesized)
ggcaaaatttagcctgctgacaatttcccacaccgtgtaaaccaaagccctaaaattccactgcgttgtccacaagacagaagctgaagtgcatccaaaggtgctcagagagccggcccg

SEQ ID NO: 171847 - DNA, 120 bp, Artificial Sequence
  ENSG00000109320_27 (sequence is synthesized)
cctgaatcattctcgatttaactcgagaccttttcaacttggcttcctttcttggttcataaatgaattttagtttggttcacttacagatagtatctagcaatcacaacactggctgag

SEQ ID NO: 171848 - DNA, 120 bp, Artificial Sequence
  ENSG00000109320_28 (sequence is synthesized)
cggatgcatctggggatgaggttgcttactaagctttgccagctgctgctggatcacagctgctttctgttgtcattgctgttgtccctctgctacgttcctattgtcattaaaggtatc

SEQ ID NO: 171849 - DNA, 120 bp, Artificial Sequence
  ENSG00000109320_29 (sequence is synthesized)
acggtcgccacctggcattccttctgaccacagcatcattttgcattcaaattaagggttaagaaaagagatattttaaaatgagagtcacttgatgtgccattttaaaaaaaaaggcat

SEQ ID NO: 171850 - DNA, 120 bp, Artificial Sequence
  ENSG00000109320_30 (sequence is synthesized)
attgctttttctaatgtggttatttctctgatttgcaaaaaaaaaaaaaaaaaaaatacttgtcaatatttaaacatggttacaatcattgctgaaaatggtattttcccccttttctgc

SEQ ID NO: 171851 - DNA, 120 bp, Artificial Sequence
  ENSG00000109320_31 (sequence is synthesized)
attttgctattgtaaatatgttttttagatcaaatactttaaaggaaaaaatgttggatttataaatgctattttttattttacttttataataaaaggaaaagcaaattgatgacctca

SEQ ID NO: 171852 - DNA, 120 bp, Artificial Sequence
  ENSG00000109320_32 (sequence is synthesized)
gctaaccgctgggctagaccgtgggaggaggttgacagtagctgagaggcacatgggattagcgacagcggggaaagacacatccggacctcgcaggggctagtcggccgaagggccgcg

SEQ ID NO: 171853 - DNA, 120 bp, Artificial Sequence
  ENSG00000109320_33 (sequence is synthesized)
gccgcccggcggtcatttctcttcacgtccctccgcggggcgggaacgcgaaccggaggggaactcttacaaacttttaaaatccccaaccccagccccacctgggggatggtgagaagg

SEQ ID NO: 171854 - DNA, 120 bp, Artificial Sequence
  ENSG00000109320_34 (sequence is synthesized)
agtgacagtaaggagaagagagagtgaaggaacttgcacgcagtgacttctaccttctcattaaagtcaagagagaatctcaactgcagatatctgcttaagatctgcaactatgtggga

SEQ ID NO: 171855 - DNA, 120 bp, Artificial Sequence
  ENSG00000109320_35 (sequence is synthesized)
catacccattggaataaatataacgcttcttgaaatttaccatctcttcctctttgagtgctttctatttccctttaagatgtttaaaaataccattagaatcagtggtctttctgtggc

SEQ ID NO: 171856 - DNA, 120 bp, Artificial Sequence
  ENSG00000109320_36 (sequence is synthesized)
gccgaacgcggactcgccacccggaaggaacacaacgtcctacatcaagaaaaaagacagaagcatatcttggagatatgaaaagaaccaccagcttcagaatggcagaagatgatccat

SEQ ID NO: 171857 - DNA, 120 bp, Artificial Sequence
  ENSG00000109320_37 (sequence is synthesized)
atacccagactcaaaaccttcccatcctcactgactccccctcctcgcctgtgctgcgaggctgtggtccagccattccgtgctctctggcattccacactacattccattttcattgtt

SEQ ID NO: 171858 - DNA, 120 bp, Artificial Sequence
  ENSG00000109320_38 (sequence is synthesized)
ccacttatagtagtcttctccctggtctctgtccctccccacttctaatcaagtttacatcttgtagccagatagatattactgaagttctgtatcttgttgctgctccgtgtctccgtt

SEQ ID NO: 171859 - DNA, 120 bp, Artificial Sequence
  ENSG00000109320_39 (sequence is synthesized)
ttgcctacaaaatccaaattctgtaagttggctttttggatctcccaagagctggcctcaggctgcatttccaatctatttcccgttttgccccttcaggtcaaagtctactacttggta

SEQ ID NO: 171860 - DNA, 120 bp, Artificial Sequence
  ENSG00000109320_40 (sequence is synthesized)
ggagcaccatgatttctcactttcctgccttggcacattctttctatttttgctctctcctcttcctggaatgcctttatccactctcttatatgaatgtgttcaaattctgccaccttt

SEQ ID NO: 171861 - DNA, 120 bp, Artificial Sequence
  ENSG00000109320_41 (sequence is synthesized)
tcaatattcagagcaaatacctcttctgctccaaagccctctgaactctctccttctttgaaatcccacatcacttcatttgtagctctcttgtagtacttgtctcttgaatcactacct

SEQ ID NO: 171862 - DNA, 120 bp, Artificial Sequence
  ENSG00000109320_42 (sequence is synthesized)
tttatgatattatagcttaattatgactatatccatcagcgtgaaaactccagcaggagggaaggaaacagatgtccctgagtcattcagttccttcagaagttgtttttgagtacctac

SEQ ID NO: 171863 - DNA, 120 bp, Artificial Sequence
  ENSG00000109320_43 (sequence is synthesized)
tatgtgccaggctgtctgcttggcactgtggaatgagctcactccctgtgcccaagcagctcttggaataatttgcacacttctcaatacagctggtgcctagtagggttattcaattcc

SEQ ID NO: 171864 - DNA, 120 bp, Artificial Sequence
  ENSG00000109320_44 (sequence is synthesized)
attccatcacatcctgtgtgcctttaactcttactgtagagaggaaagggaaaggtgggggaaggacaggagaggagggaggcgatctgatacacggaagagagtttttactgtaatccg

SEQ ID NO: 171865 - DNA, 120 bp, Artificial Sequence
  ENSG00000109320_45 (sequence is synthesized)
gagaaaatgcaggtcttctttgatgcctttcatattggatgacataaatgagactgtttttaacactttattagcaatatgaagagtttcaaaagaggaaaaatgggtttttattgtaag

SEQ ID NO: 171866 - DNA, 120 bp, Artificial Sequence
  ENSG00000109320_46 (sequence is synthesized)
tttacattatttgggctttataaaagcatggtcttttaaatgttcacacttccctgggcatgaatggactgtgctgtatggccctagatcgggaaaaagagctaatccgccaagcagctc

SEQ ID NO: 171867 - DNA, 120 bp, Artificial Sequence
  ENSG00000109320_47 (sequence is synthesized)
ttatcttctttgtgacaaagttcagaaaggattggcttaaggatggagaagcagtaaggtcaaagattaaaagaaaattcaagttaactagatgacatccagattcgattttatgaagag

SEQ ID NO: 171868 - DNA, 120 bp, Artificial Sequence
  ENSG00000109320_48 (sequence is synthesized)
gtccctccccacttctaatcaagtttacatcttgtagccagatagatattactgaagttctgtatcttgttgctgctccgtgtctccgttttgcctacaaaatccaaattctatcgggaa

SEQ ID NO: 171869 - DNA, 120 bp, Artificial Sequence
  ENSG00000109320_49 (sequence is synthesized)
tgcatagcatgagaggttccatgggcttaggtacctggctttttagccatatcttagtgtacaaatatcaattaataccatttttcgtagtaagattacgggaaaagtgattcttgttta

SEQ ID NO: 171870 - DNA, 120 bp, Artificial Sequence
  ENSG00000109320_50 (sequence is synthesized)
ggacaaacttgaacacaaaggaacacacgttatatgtacatttaatactggaaccgaaaagctgcttgcagtgaaaagcaaaccacttctaaactctttgagactttttaaagaagcttc

SEQ ID NO: 171871 - DNA, 120 bp, Artificial Sequence
  ENSG00000109321_0 (sequence is synthesized)
agacgttcgcacacctgggtgccagcgccccagaggtcccgggacagcccgaggcgccgcgcccgccgccccgagctccccaagccttcgagagcggcgcacactcccggtctccactcg

SEQ ID NO: 171872 - DNA, 120 bp, Artificial Sequence
  ENSG00000109321_1 (sequence is synthesized)
ctcttccaacacccgctcgttttggcggcagctcgtgtcccagagaccgagttgccccagagaccgagacgccgccgctgcgaaggaccaatgagagccccgctgctaccgccggcgccg

SEQ ID NO: 171873 - DNA, 120 bp, Artificial Sequence
  ENSG00000109321_2 (sequence is synthesized)
gtggtgctgtcgctcttgatactcggctcaggccattatgctgctggattggacctcaatgacacctactctgggaagcgtgaaccattttctggggaccacagtgctgatggatttgag

SEQ ID NO: 171874 - DNA, 120 bp, Artificial Sequence
  ENSG00000109321_3 (sequence is synthesized)
gttacctcaagaagtgagatgtcttcagggagtgagatttcccctgtgagtgaaatgccttctagtagtgaaccgtcctcgggagccgactatgactactcagaagagtatgataacgaa

SEQ ID NO: 171875 - DNA, 120 bp, Artificial Sequence
  ENSG00000109321_4 (sequence is synthesized)
ccacaaatacctggctatattgtcgatgattcagtcagagttgaacaggtagttaagcccccccaaaacaagacggaaagtgaaaatacttcagataaacccaaaagaaagaaaaaggga

SEQ ID NO: 171876 - DNA, 120 bp, Artificial Sequence
  ENSG00000109321_5 (sequence is synthesized)
agaaaaatccatgtaatgcagaatttcaaaatttctgcattcacggagaatgcaaatatatagagcacctggaagcagtaacatgcaaatgtcagcaagaatatttcggtgaacggtgtg

SEQ ID NO: 171877 - DNA, 120 bp, Artificial Sequence
  ENSG00000109321_6 (sequence is synthesized)
gggaaaagtccatgaaaactcacagcatgattgacagtagtttatcaaaaattgcattagcagccatagctgcctttatgtctgctgtgatcctcacagctgttgctgttattacagtcc

SEQ ID NO: 171878 - DNA, 120 bp, Artificial Sequence
  ENSG00000109321_7 (sequence is synthesized)
agcttagaagacaatacgtcaggaaatatgaaggagaagctgaggaacgaaagaaacttcgacaagagaatggaaatgtacatgctatagcataactgaagataaaattacaggatatca

SEQ ID NO: 171879 - DNA, 120 bp, Artificial Sequence
  ENSG00000109321_8 (sequence is synthesized)
cattggagtcactgccaagtcatagccataaatgatgagtcggtcctctttccagtggatcataagacaatggaccctttttgttatgatggttttaaactttcaattgtcactttttat

SEQ ID NO: 171880 - DNA, 120 bp, Artificial Sequence
  ENSG00000109321_9 (sequence is synthesized)
gctatttctgtatataaaggtgcacgaaggtaaaaagtattttttcaagttgtaaataatttatttaatatttaatggaagtgtatttattttacagctcattaaacttttttaaccaaa

SEQ ID NO: 171881 - DNA, 120 bp, Artificial Sequence
  ENSG00000109321_10 (sequence is synthesized)
ctgaagcactgaatacaaatattcctgggctcctgttttcaaatagattgaccacgaaaatgagctccatggaaattatcaatttgattataatctgttgtaatctgggtgttggagcat

SEQ ID NO: 171882 - DNA, 120 bp, Artificial Sequence
  ENSG00000109321_11 (sequence is synthesized)
tgtaacatagagtaactctaatttataattctcagttttttccacctgcaagtagtactcactaattcccaactataatcatgagtggacactactttcaggtagaaaaaactgaaaatt

SEQ ID NO: 171883 - DNA, 120 bp, Artificial Sequence
  ENSG00000109321_12 (sequence is synthesized)
ataaattagggttatgcagtcctctctaacttttatattgtgttaggtaatgaggcacgcatggctgttacccctgtgagcgctcactgctatgacatctttctctcatgtctctaaaat

SEQ ID NO: 171884 - DNA, 120 bp, Artificial Sequence
  ENSG00000109323_0 (sequence is synthesized)
gagtggcttcaccgccggtcccttgcagcgctgcctttcgatctctccacatctcggtggcgcgggatctcaagatgcgcctccacctgctcctgctgctcgcgctgtgcggtgcaggca

SEQ ID NO: 171885 - DNA, 120 bp, Artificial Sequence
  ENSG00000109323_1 (sequence is synthesized)
ccaccgccgcggagctcagttacagcttgcgtggcaactggagcatctgcaatgggaacggctcgctggagctgcccggggcggtccctggctgcgtgcacagcgccttgttccagcagg

SEQ ID NO: 171886 - DNA, 120 bp, Artificial Sequence
  ENSG00000109323_2 (sequence is synthesized)
gcctgatccaggattcttactacagatttaatgaccttaactacagatgggtctctttggataactggacctatagcaaagaatttaaaatcccctttgaaattagcaaatggcaaaaag

SEQ ID NO: 171887 - DNA, 120 bp, Artificial Sequence
  ENSG00000109323_3 (sequence is synthesized)
taaatttgattcttgagggagtggatacggtttcaaaaatcctgttcaatgaagtcactattggggaaacagacaatatgttcaatagatatagctttgatattaccaacgtggtcaggg

SEQ ID NO: 171888 - DNA, 120 bp, Artificial Sequence
  ENSG00000109323_4 (sequence is synthesized)
acgtgaactccattgagctgcgtttccagtcagcggtgttgtatgcagcacagcagagcaaagctcacactcgctaccaggttcccccagactgccctccacttgtgcagaagggtgaat

SEQ ID NO: 171889 - DNA, 120 bp, Artificial Sequence
  ENSG00000109323_5 (sequence is synthesized)
gccatgtcaactttgttcggaaggagcaatgttcctttagttgggactgggggccttcctttcctacccagggaatctggaaagatgttagaattgaagcctataatatttgtcacctga

SEQ ID NO: 171890 - DNA, 120 bp, Artificial Sequence
  ENSG00000109323_6 (sequence is synthesized)
actacttcacattttccccaatatatgataagagtgcccaggagtggaatctggaaatagagtctacatttgatgttgtcagctcaaagccagttggtggtcaagtgatcgtagccatcc

SEQ ID NO: 171891 - DNA, 120 bp, Artificial Sequence
  ENSG00000109323_7 (sequence is synthesized)
ctaagttgcaaacacaacagacatacagcattgaacttcaacctgggaaaaggattgttgagctatttgtgaacattagcaagaatattactgtagaaacttggtggcctcatggacatg

SEQ ID NO: 171892 - DNA, 120 bp, Artificial Sequence
  ENSG00000109323_8 (sequence is synthesized)
gaaaccagactgggtacaacatgactgttctttttgaactggatggaggcttaaatattgaaaaatcagctaaggtttattttaggacagtggaacttatagaagagcctataaaagggt

SEQ ID NO: 171893 - DNA, 120 bp, Artificial Sequence
  ENSG00000109323_9 (sequence is synthesized)
ctcctggtttgagtttctatttcaaaattaatggatttcccatatttctaaaaggctcaaactggatcccagcagattcattccaggaccgagtaacctctgagttgttacggctccttt

SEQ ID NO: 171894 - DNA, 120 bp, Artificial Sequence
  ENSG00000109323_10 (sequence is synthesized)
tacagtctgttgtggatgctaatatgaatactcttcgggtttggggaggaggaatttatgagcaggatgaattctatgaactctgtgatgaactaggaataatggtatggcaggatttta

SEQ ID NO: 171895 - DNA, 120 bp, Artificial Sequence
  ENSG00000109323_11 (sequence is synthesized)
tgtttgcctgtgccctttatccaactgatcagggcttcctggattcagtgacagcagaagttgcctaccagatcaagagactgaaatctcatccttctatcatcatatggagtggcaata

SEQ ID NO: 171896 - DNA, 120 bp, Artificial Sequence
  ENSG00000109323_12 (sequence is synthesized)
atgaaaatgaggaggcgctgatgatgaattggtatcatatcagtttcactgaccggccaatctacatcaaggactatgtgacactctatgtgaaaaacatcagagagctcgtactggcag

SEQ ID NO: 171897 - DNA, 120 bp, Artificial Sequence
  ENSG00000109323_13 (sequence is synthesized)
gagacaagagtcgtccttttattacgtccagtcctacaaatggggctgaaactgttgcagaagcctgggtctctcaaaaccctaatagcaattattttggtgatgtacatttttatgact

SEQ ID NO: 171898 - DNA, 120 bp, Artificial Sequence
  ENSG00000109323_14 (sequence is synthesized)
atatcagtgattgctggaactggaaagttttcccaaaagctcgatttgcatctgaatatggatatcagtcctggccgtccttcagtacattagaaaaggtctcgtctacagaggactggt

SEQ ID NO: 171899 - DNA, 120 bp, Artificial Sequence
  ENSG00000109323_15 (sequence is synthesized)
ctttcaatagcaagttttcacttcatcgacaacatcacgaaggtggtaacaaacaaatgctttatcaggctggacttcatttcaaactcccccaaagcacagatccattacgcacattta

SEQ ID NO: 171900 - DNA, 120 bp, Artificial Sequence
  ENSG00000109323_16 (sequence is synthesized)
gtcaaaacagaaactgaattctaccgccgtagtcgcagcgagatagtggatcagcaagggcacacgatgggggcactttattggcagttgaatgacatctggcaagctccttcctgggct

SEQ ID NO: 171901 - DNA, 120 bp, Artificial Sequence
  ENSG00000109323_17 (sequence is synthesized)
tctcttgagtacggaggaaagtggaaaatgcttcattactttgctcagaatttctttgctccactgttgccagtaggctttgagaatgaaaacacgttctatatctatggtgtgtcagat

SEQ ID NO: 171902 - DNA, 120 bp, Artificial Sequence
  ENSG00000109323_18 (sequence is synthesized)
cttcactcggattattcgatgacactcagtgtgagagtccatacatggagctccctggagcccgtgtgctctcgtgtgactgaacgttttgtgatgaaaggaggagaggctgtctgcctt

SEQ ID NO: 171903 - DNA, 120 bp, Artificial Sequence
  ENSG00000109323_19 (sequence is synthesized)
tatgaggagccagtgtctgaattgctgaggagatgtgggaattgcacacgggaaagctgtgtggtttccttttacctttcagctgaccatgaactcctgagcccgaccaactaccacttc

SEQ ID NO: 171904 - DNA, 120 bp, Artificial Sequence
  ENSG00000109323_20 (sequence is synthesized)
ttgtcctcaccgaaggaggccgtggggctctgcaaggcgcagatcactgccatcatctctcagcaaggtgacatatttgtttttgacctggagacctcagctgtcgctccctttgtttgg

SEQ ID NO: 171905 - DNA, 120 bp, Artificial Sequence
  ENSG00000109323_21 (sequence is synthesized)
ttggatgtaggaagcatcccagggagatttagtgacaatggtttcctcatgactgagaagacacgaactatattattttacccttgggagcccaccagcaagaatgagttggagcaatct

SEQ ID NO: 171906 - DNA, 120 bp, Artificial Sequence
  ENSG00000109323_22 (sequence is synthesized)
tttcatgtgacctccttaacagatatttactgaaggaatctaggttgtattttcagtggacaatgggaataaagcatttctaaagcaccgactggagaggaaggcaacagagacaaggag

SEQ ID NO: 171907 - DNA, 120 bp, Artificial Sequence
  ENSG00000109323_23 (sequence is synthesized)
agaagccgagagacatgtctgcgtgctgccacgcatttgagcgattgctctgtgaagagttgtacactgaacactttcaggggaggctgtttacccaggcaatgtcctcaaacaagcctg

SEQ ID NO: 171908 - DNA, 120 bp, Artificial Sequence
  ENSG00000109323_24 (sequence is synthesized)
tgccggggtgtcctggaatctgtgccaggactgtgtttttagcccttcacctctcagctttagcaggacatgaaccagttataacaagatggccctgcagctggttacaagaatgtgaca

SEQ ID NO: 171909 - DNA, 120 bp, Artificial Sequence
  ENSG00000109323_25 (sequence is synthesized)
tggcaggatctatggaaccaaatggaaggttttgaggtgatgtaggtctttcacagctagctttggggaatacggaatactcaaataaagtgctttgttattatttcagagggaatggcg

SEQ ID NO: 171910 - DNA, 120 bp, Artificial Sequence
  ENSG00000109323_26 (sequence is synthesized)
attgaaatgttacaacagagatttcttggtggtagctatttgggtaaaggtatatgggtatttttctgtacatgtgaaattatataaaaataaaagttatataaattacattgacaactt

SEQ ID NO: 171911 - DNA, 120 bp, Artificial Sequence
  ENSG00000109323_27 (sequence is synthesized)
gatatttcatctgtggcttatttaaccgttctataaatattcaattttgcccaatactgtgctggaccctaatttccatttagttctcgttattattctgcttggtaaactgggagagtt

SEQ ID NO: 171912 - DNA, 120 bp, Artificial Sequence
  ENSG00000109323_28 (sequence is synthesized)
tgaagaatctaaactaagacatgtgaaaggttttctctggaaacagtcatgtaattggttatagaatggaccagcaaagagtgtttggctttaaaattaagatattattagtggttttgg

SEQ ID NO: 171913 - DNA, 120 bp, Artificial Sequence
  ENSG00000109323_29 (sequence is synthesized)
ttggttttaaaaatgagaagcattatgttcagtgactctaaaagtaactacagacaatccagtcttcttcagtatctaagagtatcctcattttatatgtacacacacacacacacacac

SEQ ID NO: 171914 - DNA, 120 bp, Artificial Sequence
  ENSG00000109323_30 (sequence is synthesized)
acacacacacacacacacacacaaagccttatcaaggggataaggggacttagggctgggactccgtagagtcttacttggtaaatattatgtcatgttcttatgactattgtaaatcct

SEQ ID NO: 171915 - DNA, 120 bp, Artificial Sequence
  ENSG00000109323_31 (sequence is synthesized)
gttttagcaaagcattgctgcgaggcagggaggactgctcttcttgacacctgtgcatgttctgccaggggccctgagaaggggctttcaagctgatgagccagagtttactttgtagtt

SEQ ID NO: 171916 - DNA, 120 bp, Artificial Sequence
  ENSG00000109323_32 (sequence is synthesized)
tgcccttactagttctgtaaccttaatcaagttacttaacttcctgtgctcagttttcttgtggctaaatgggagtggtaacacccaccttgtaagtttgttttgaagaataaataaaat

SEQ ID NO: 171917 - DNA, 120 bp, Artificial Sequence
  ENSG00000109323_33 (sequence is synthesized)
atccaacgaagataaccagcataagcatgacaccagcatctctttcggccttggtcttggagcagcagaagctgatgctaccctggcagcttcctgggcaggctggcatgagccgcatga

SEQ ID NO: 171918 - DNA, 120 bp, Artificial Sequence
  ENSG00000109323_34 (sequence is synthesized)
tatttcataagaaaatgaaattcttctccagacacagccacgggataattggctctatctttttccttttcaaatgctcctctcccctcccagctggggctgggttggctgtggtccttc

SEQ ID NO: 171919 - DNA, 120 bp, Artificial Sequence
  ENSG00000109323_35 (sequence is synthesized)
tgaaataagaaccaaaagattatttgaaatattgtggagaatctttatctttttctaagttttcttcctgaagcgtgttcagaacttaggtaacagaaaaagaaaggaaaaatatgtggc

SEQ ID NO: 171920 - DNA, 120 bp, Artificial Sequence
  ENSG00000109323_36 (sequence is synthesized)
tgataatggaactttacaaattatttttttaacatttaagtttatcaaacttttcaccagattgtgaaaatgtattagtgattcttgtttctaggaagccctctgcaaatattagtatat

SEQ ID NO: 171921 - DNA, 120 bp, Artificial Sequence
  ENSG00000109323_37 (sequence is synthesized)
ttgatgatatgttcttgcatcttactgtcaggttctcataaaatctaacaaaaagataacaaagtccacaaaagtaattatttttcttagagtatgattccagtctaagaggacttggat

SEQ ID NO: 171922 - DNA, 120 bp, Artificial Sequence
  ENSG00000109323_38 (sequence is synthesized)
cccccatgcctatgccttcagctacaaaacaattcaattgctttttttttttggtccaaaataaaacctctgctagctctgccaacagctaaccttatagttacctgtttttttcaaatg

SEQ ID NO: 171923 - DNA, 120 bp, Artificial Sequence
  ENSG00000109323_39 (sequence is synthesized)
tgaaagatgggtattccgaaaaaccatacaaagagtccctctcttcaatctgcatccaaaaactcatgaaattagaaactgtccaaccacaggaaaacagcctggctaagattcaaagtg

SEQ ID NO: 171924 - DNA, 120 bp, Artificial Sequence
  ENSG00000109323_40 (sequence is synthesized)
taggcaaaagcctgcagagagtgaacagaatcctcatgggcccaaggagcatccagaaaagtcacttcaaagaggtgggaaagcagagcaacaggaaggaacagggtgcctgggcatttg

SEQ ID NO: 171925 - DNA, 120 bp, Artificial Sequence
  ENSG00000109323_41 (sequence is synthesized)
tggagaatgctgccaaagaaaaaaggctcaggagtccagccccaagggagctggaacagcctcacatagagcaggggcatgagaagttagcaggaaacgccatctataccaagccttcgt

SEQ ID NO: 171926 - DNA, 120 bp, Artificial Sequence
  ENSG00000109323_42 (sequence is synthesized)
tcaaccaagagcataaggcagcagtcttctctttgctgaaacccttctccatgggcgtgccttctatctccacccctgcaaaagccctacctgtggtcagaaacagattgaaagacttac

SEQ ID NO: 171927 - DNA, 120 bp, Artificial Sequence
  ENSG00000109323_43 (sequence is synthesized)
ccattttggttttagaaaatgcaaagttgagttaaaaccaatcgtacattccagaaaagttctctcagtagactttgcttgcaaagaggcctccattctctgcagtgaaaagcctcataa

SEQ ID NO: 171928 - DNA, 120 bp, Artificial Sequence
  ENSG00000109323_44 (sequence is synthesized)
atgccccttcacaaggggctttttcatctttaggagacctgagtcttcaggaaaatccttttccggaagtatttctccatcagaatgttttaaaagcaccactgcaagaaatgcctttga

SEQ ID NO: 171929 - DNA, 120 bp, Artificial Sequence
  ENSG00000109323_45 (sequence is synthesized)
aaggcaccatctctgaaaacacaacctacaaccatcctcctgagggagattctgctgagactgcgttcaacttagagaagactgtgaaacacaatgggaatacaacaacatgggcactgg

SEQ ID NO: 171930 - DNA, 120 bp, Artificial Sequence
  ENSG00000109323_46 (sequence is synthesized)
cctgtctcccgagcccaaaagcttcaattacccattgctctcgtccccaggtgatcagtttgaaattcagctaaaccagcagctacggcccctcatccccaataatgatgtgagaagact

SEQ ID NO: 171931 - DNA, 120 bp, Artificial Sequence
  ENSG00000109323_47 (sequence is synthesized)
catttctcatgttatctggaccttgaagatggagtgctctgagacccatgtgcaattggcctataccaagctcatctccaggacaggcctcctgattcatcagtgagcagcaagaagtaa

SEQ ID NO: 171932 - DNA, 120 bp, Artificial Sequence
  ENSG00000109323_48 (sequence is synthesized)
tgttccttccgaaggctctgggaaagaattcttccttgccccttccagtttctcatcattgctggcaatccttggcttgtagatgcatcactctgatctctgtctccaccatcatatagc

SEQ ID NO: 171933 - DNA, 120 bp, Artificial Sequence
  ENSG00000109323_49 (sequence is synthesized)
cctcccaggttcaagcgattctcatggtctcaccgtgttgctcaagctggtctcgatctcctgagctcaggcaatccgcccacctcggcctgtcaaagtgctgggattacaggtgtgagc

SEQ ID NO: 171934 - DNA, 120 bp, Artificial Sequence
  ENSG00000109323_50 (sequence is synthesized)
atgggtggcctctttaatatagatttataaggcccctttgttatatattttcaaaaattcaaattaaaactaaatccccaaatgtcccatttattaatgaagtattttgtcatatggatg

SEQ ID NO: 171935 - DNA, 120 bp, Artificial Sequence
  ENSG00000109323_51 (sequence is synthesized)
aggtatgttactacccttccaagaagaaataaaacaaataatatgttttagtattgccttttgttaaatcttgcttcattttggtttttgttctctactaaatcccatgaaaaattacac

SEQ ID NO: 171936 - DNA, 120 bp, Artificial Sequence
  ENSG00000109323_52 (sequence is synthesized)
agccaggtaattgacatcctaggtgattgtacccagtgtcatggctttaccatcatctattggctgatgactcccagatttatccccagtcctgatttctctgctgaattcctctttctt

SEQ ID NO: 171937 - DNA, 120 bp, Artificial Sequence
  ENSG00000109323_53 (sequence is synthesized)
atatccaactgcctacctggtgcctctgcttggaggtttaacaggcatctgaaatgtaacatgtacaaactaaacttatattgcaccccctccccaatcttgcttcttctgaagttttct

SEQ ID NO: 171938 - DNA, 120 bp, Artificial Sequence
  ENSG00000109323_54 (sequence is synthesized)
ccatctcagcaaacagcaacaccactgtttgaattgctcaggagaaagtttaaattgattattgattccttgatttattttagattccacatattgacatttatatttatattcacagat

SEQ ID NO: 171939 - DNA, 120 bp, Artificial Sequence
  ENSG00000109323_55 (sequence is synthesized)
atataaatgcaaggaagtgattatatgctttctctgcctactgaaaagatctagaaataatgcccaacgttgtagtgttgagtattcttatattgaagtaatctttcctgttaagagaaa

SEQ ID NO: 171940 - DNA, 120 bp, Artificial Sequence
  ENSG00000109323_56 (sequence is synthesized)
agcttcttagagaaatggccgactccaggtctggcacaggaaatatataaaatgatcctggatatcttcttttcacaaatggcaatggtgttaatataatattatcaactgataatttta

SEQ ID NO: 171941 - DNA, 120 bp, Artificial Sequence
  ENSG00000109323_57 (sequence is synthesized)
gccacagatctgaggtttatgagctgtgtgctgaatatacttatttttgcagcaaggtctgtttaggggatgatcatgctttgaaacacagattgcattatatttcctctcccctaaata

SEQ ID NO: 171942 - DNA, 120 bp, Artificial Sequence
  ENSG00000109323_58 (sequence is synthesized)
ttaagtgcatggcatgggtttccatgtagaatcagagtgggatgcttgtcaatacatgaaaattctgaattatgatgtactcccaaaatacagtttagaaaccaacttgtgagtgtatca

SEQ ID NO: 171943 - DNA, 120 bp, Artificial Sequence
  ENSG00000109323_59 (sequence is synthesized)
tatgctagtaaaatactactgaaacatcggactgattcattagcatccattggaaatgatcactgcaccaggagatcacccctaccttgtaaagagtttgcaagactgtggagacatatt

SEQ ID NO: 171944 - DNA, 120 bp, Artificial Sequence
  ENSG00000109323_60 (sequence is synthesized)
gagtttttatagtgctctgcaacatgttaaagaaggaaacaaatccattttctcggtaacctcaggtaaagctacaatgtggataattattgactctgatttcaatttctcatgtccaac

SEQ ID NO: 171945 - DNA, 120 bp, Artificial Sequence
  ENSG00000109323_61 (sequence is synthesized)
tgtctgccagattttttgtaatgttgatatacaaagaacaaatattttgatatttcttcttgaatggtgagtctgcaaccttagggaggtcactttacctcttgagcctcaatttctgta

SEQ ID NO: 171946 - DNA, 120 bp, Artificial Sequence
  ENSG00000109323_62 (sequence is synthesized)
tctataactctagtatgatgtcactcctcatgaaactgtttcaaaaattaaataggataatacgtgtaagtcatgcagttcaaaagaaataacaaataatagcagctgtcacactaactc

SEQ ID NO: 171947 - DNA, 120 bp, Artificial Sequence
  ENSG00000109323_63 (sequence is synthesized)
agcgtgtcttcaaagtacatctattatcttttccccagtgcactctttcaagatttttctttttagcaggaaatatgaaagtcattgatactttcttctttctcacctcccacatccatc

SEQ ID NO: 171948 - DNA, 120 bp, Artificial Sequence
  ENSG00000109323_64 (sequence is synthesized)
tggttttaagttgagacaattttttgatatcaatgttactagtatttgtatttactttctcacccccgtgcttactactctaattcaaatcctatttttccctctcctcaatcattgcat

SEQ ID NO: 171949 - DNA, 120 bp, Artificial Sequence
  ENSG00000109323_65 (sequence is synthesized)
ttgttttctgattggactccctagcattggtctctttcaatatgtgcatactcaacagagctgccaaagtcatcttccactgacacattttaagtcataccacattcctgctcagaaccc

SEQ ID NO: 171950 - DNA, 120 bp, Artificial Sequence
  ENSG00000109323_66 (sequence is synthesized)
tgatcctggaatatctcaacatgcagataacaaggaagctatcaaagttatgtcaaaaggattttgagagactctgaacaaccaaaagggggacaatttgagattcaataaagataagga

SEQ ID NO: 171951 - DNA, 120 bp, Artificial Sequence
  ENSG00000109323_67 (sequence is synthesized)
tgtcaatgaattgaatccatcaagtgtgttaaaatctagagttcatattatagtgtctgcagatgtatattttgtgaaaaaccatacagaaatgcaaggaagcgatttctattacactat

SEQ ID NO: 171952 - DNA, 120 bp, Artificial Sequence
  ENSG00000109323_68 (sequence is synthesized)
gatactctagatagtggttacttttggaaggaggaaggggctgtgattaggaagaggcacgtggatggcttccggcctggctgcactgggtggtggctacaagggtgattgccttatgat

SEQ ID NO: 171953 - DNA, 120 bp, Artificial Sequence
  ENSG00000109323_69 (sequence is synthesized)
aattgaccgtgtcataatttgttttctgtaactgtgtttcattttaaaataaaaggtttaaaaagtacaatcgaactccttccctagccaacacttcccctgaggtggcttcttgacctc

SEQ ID NO: 171954 - DNA, 120 bp, Artificial Sequence
  ENSG00000109323_70 (sequence is synthesized)
taaggtgtaagatcctcttaatgcgggactccggccagctggtgtctgcacctgttcaggcaccatctccatcttgctgtctatgtcctggaacatcttccccatccactgcccttgtga

SEQ ID NO: 171955 - DNA, 120 bp, Artificial Sequence
  ENSG00000109323_71 (sequence is synthesized)
gccacctcctttgttctcctttggcccctcttaccttaagcatgggaaaaatcttttgccttttgagacacacatcacactttgaattacttgttcaaggatttgtcacctctgcaagat

SEQ ID NO: 171956 - DNA, 120 bp, Artificial Sequence
  ENSG00000109323_72 (sequence is synthesized)
tgtcatctccctgaggcctaggactcattcccctctgcgtccccactctgtggattattcacaaagtggatagatgaatggatgaatgaataactgtaaacatattaattgtagttacac

SEQ ID NO: 171957 - DNA, 120 bp, Artificial Sequence
  ENSG00000109323_73 (sequence is synthesized)
aggttgcaagcatttcagttttatttttagttttctttcgtataaataattaaaatctaacatttatgtatcttcagttctttgatgcattattaaagataaggagagccattgcatgca

SEQ ID NO: 171958 - DNA, 120 bp, Artificial Sequence
  ENSG00000109323_74 (sequence is synthesized)
aagtttgttaaaattttaaagtaaagcttaccataaaactctaagtcagcttgagggttgtgtgtaacacggtgctactgaagctttttgccacttcaggatttatatttgtattttcat

SEQ ID NO: 171959 - DNA, 120 bp, Artificial Sequence
  ENSG00000109323_75 (sequence is synthesized)
cagtggcataaatatgtcagtcacagttggtagcagctgtccctttcttgggcatgtacaaagacaaaaaaaggaaatagtgtttatatggctggctgagaaaaacacaagacttaattt

SEQ ID NO: 171960 - DNA, 120 bp, Artificial Sequence
  ENSG00000109323_76 (sequence is synthesized)
ttttaaaaatgaaatatatctctttaatataccttcagtgcatctctatttcatctatgtgagtttctgagcttcttgaatggagaacacattgagagcatcagtggggggcaatcagtg

SEQ ID NO: 171961 - DNA, 120 bp, Artificial Sequence
  ENSG00000109323_77 (sequence is synthesized)
taatcatgcatcacagcgaaggtgaacctataaatatcaatgaggtaacattgccaaaacatgttccaaaagaatttttcttgaccattgactcactctgccattctcagaggaatttaa

SEQ ID NO: 171962 - DNA, 120 bp, Artificial Sequence
  ENSG00000109323_78 (sequence is synthesized)
ttgctctctactggggcacatgtcctagtgtattagaagaagggacatgtctgaatctgtccagtgcaaacataacacaagtggatccttttgtctttatgtagggccagcccagatgag

SEQ ID NO: 171963 - DNA, 120 bp, Artificial Sequence
  ENSG00000109323_79 (sequence is synthesized)
ctcagtttatgcaggcctcgtgtggcacggttttcaggtagattctctaattttcccttttatatttaggtacattcagtaacttaatgttagttgatttctcaggacacgacattgata

SEQ ID NO: 171964 - DNA, 120 bp, Artificial Sequence
  ENSG00000109323_80 (sequence is synthesized)
gttatttcaggagacatcaaccctgattgccctaatctgttttcctttagagtattccatatttgtctttaactgccagcatacctctagtactcacttgctttgtaaaaccttctctag

SEQ ID NO: 171965 - DNA, 120 bp, Artificial Sequence
  ENSG00000109323_81 (sequence is synthesized)
ttccccttctggttttctgatctcagtgaggactgcataggaacctccgtccttctttcagtggtagtgtttgctttgcttcatttatttcttcacacagaactccaatttgtccaattt

SEQ ID NO: 171966 - DNA, 120 bp, Artificial Sequence
  ENSG00000109323_82 (sequence is synthesized)
gctcttaagaaccaatccccaaaatataatgtctcctgccttttgtatttcctgaaagttttctttgtggcaatccacagagtgaagagtttattcattccccttttctttctctttcta

SEQ ID NO: 171967 - DNA, 120 bp, Artificial Sequence
  ENSG00000109323_83 (sequence is synthesized)
aaaaagggattatattatcttcagtttttatatagcagagaagagaaaccctatgtatcagtgtttataaaatctagttaaaaagaatctcagagatttcttaaaatgtattcctgcagc

SEQ ID NO: 171968 - DNA, 120 bp, Artificial Sequence
  ENSG00000109323_84 (sequence is synthesized)
taacatgactagccattttcaaattaggtttttggcacataagaatttatgtgcagaaatgcaagggctttaattttatgagtaattatagctctgaattttttatgttaactctttgaa

SEQ ID NO: 171969 - DNA, 120 bp, Artificial Sequence
  ENSG00000109323_85 (sequence is synthesized)
tatgaaactggagccacagaacaaacctcaaggtcttctctagtgtttaggatactttccaggtttgtcaggaacttatagaaaagtagttttactgccaactttcagatttctaattct

SEQ ID NO: 171970 - DNA, 120 bp, Artificial Sequence
  ENSG00000109323_86 (sequence is synthesized)
tttgaactggatggaggcttaaatattgaaaaatcagctaagctatgacaaataaatcaaaagagctggctataccctttgttgaacatgtatgtccaaagaagatcaattttgagaaag

SEQ ID NO: 171971 - DNA, 120 bp, Artificial Sequence
  ENSG00000109332_0 (sequence is synthesized)
agaatagctcgctgcgaggatagcaatacacatcaagtctcccttcctttatttccttccttttcccggccgcacctttggacagaaaccgaaagcagcccggcgtccgtccggagtctt

SEQ ID NO: 171972 - DNA, 120 bp, Artificial Sequence
  ENSG00000109332_1 (sequence is synthesized)
atgcttccccctccccccttgcctttctttgccctagtgacgccggtatagcgccgactaggccccggctcctcctctgctgggctccggaccctgccccgcacccacccctttctccta

SEQ ID NO: 171973 - DNA, 120 bp, Artificial Sequence
  ENSG00000109332_2 (sequence is synthesized)
cgcctcttcctctcccacccgggtctcttcctttctagaggccgggaagttaaacttgtagccaccacctccgctcttcccgtcaccctcgcccccacttcgggccgaaagcacggtaca

SEQ ID NO: 171974 - DNA, 120 bp, Artificial Sequence
  ENSG00000109332_3 (sequence is synthesized)
gaggctgttggtggctttgccacgccaccccacccaccccggatcgcggctgtcttaagggacctggattcatcaggggctcttcggggcctgtgcgagtgctgatctgctccgtttttg

SEQ ID NO: 171975 - DNA, 120 bp, Artificial Sequence
  ENSG00000109332_4 (sequence is synthesized)
caaaaggcgcctgtgtctggcagagctggtgtgagacgagacaatcctgccccgccgccgggataatcaagagttttggccggacctttgagcatacaccgagagagtgaggagccagac

SEQ ID NO: 171976 - DNA, 120 bp, Artificial Sequence
  ENSG00000109332_5 (sequence is synthesized)
gacaagcacacactatggcgctgaaacggattaataaggaacttagtgatttggcccgtgaccctccagcacaatgttctgcaggtccagttggggatgatatgtttcattggcaagcca

SEQ ID NO: 171977 - DNA, 120 bp, Artificial Sequence
  ENSG00000109332_6 (sequence is synthesized)
caattatgggacctaatgacagcccatatcaaggcggtgtattctttttgacaattcattttcctacagactaccccttcaaaccacctaaggttgcatttacaacaagaatttatcatc

SEQ ID NO: 171978 - DNA, 120 bp, Artificial Sequence
  ENSG00000109332_7 (sequence is synthesized)
caaatattaacagtaatggcagcatttgtctcgatattctaagatcacagtggtcgcctgctttaacaatttctaaagttcttttatccatttgttcactgctatgtgatccaaacccag

SEQ ID NO: 171979 - DNA, 120 bp, Artificial Sequence
  ENSG00000109332_8 (sequence is synthesized)
atgaccccctagtgccagagattgcacggatctataaaacagacagagataagtacaataggttagcaagagagtggacagagaaatacgctatgttgtagggtacaacagaatatctcg

SEQ ID NO: 171980 - DNA, 120 bp, Artificial Sequence
  ENSG00000109332_9 (sequence is synthesized)
gctgctcccctatcagacctcatcttttttaattttattttttgtttacctccctccattcattcacatgctcatctgagaagacttaagttcttccagctttggacaataactgctttt

SEQ ID NO: 171981 - DNA, 120 bp, Artificial Sequence
  ENSG00000109332_10 (sequence is synthesized)
agaaactgtaaagtagttacaagagaacagttgcccaagactcagaatttttaaaaaaaaaaatggagcatgtgtattatgtggccaatgtcttcactctaacttggttatgagactaaa

SEQ ID NO: 171982 - DNA, 120 bp, Artificial Sequence
  ENSG00000109332_11 (sequence is synthesized)
accattcctcactgctctaacatgctgaagaaatcatctgagggggagggagatggatgctcagttgtcacatcaaaggatacagcattattctagcagcatccattcttgtttaagcct

SEQ ID NO: 171983 - DNA, 120 bp, Artificial Sequence
  ENSG00000109332_12 (sequence is synthesized)
tccactgttagagatttgaggttacatgatatgctttatgctcataactgatgtggctggagaattggtattgaatttatagcatcagcagaacagaaaatgtgatgtattttatgcatg

SEQ ID NO: 171984 - DNA, 120 bp, Artificial Sequence
  ENSG00000109332_13 (sequence is synthesized)
tcaataaaggaatgacctgttcttgttctacagagaatggaaattggaagtcaaacaccctttgtattccaaaatagggtctcaaacattttgtaattttcatttaaattgttaggaggc

SEQ ID NO: 171985 - DNA, 120 bp, Artificial Sequence
  ENSG00000109332_14 (sequence is synthesized)
ttggagctattagttaatctatcttccaatacactgtttaatatagcactgaataaatgatgcaagttgtcaatggatgagtgatcaactaatagctctgctagtaattgatttattttt

SEQ ID NO: 171986 - DNA, 120 bp, Artificial Sequence
  ENSG00000109332_15 (sequence is synthesized)
cttcaataaagttgcataaaccaatgagttagctgcctggattaatcagtatgggaaacaatcttttgtaaatgcaaagctgttttttgtatatactgttgggatttgcttcattgtttg

SEQ ID NO: 171987 - DNA, 120 bp, Artificial Sequence
  ENSG00000109332_16 (sequence is synthesized)
acatcaaatgatgatgtaaagttcgaaagagtgaatattttgccatgttcagttaaagtgcacagtctgttacaggttgacacattgcttgacctgatttatgcagaattaataagctat

SEQ ID NO: 171988 - DNA, 120 bp, Artificial Sequence
  ENSG00000109332_17 (sequence is synthesized)
ttggatagtgtagctttaatgtgctgcacatgatactggcagccctagagttcatagatggacttttgggacccagcagttttgaaatgtgtttatggagtttaagaaatttattttcca

SEQ ID NO: 171989 - DNA, 120 bp, Artificial Sequence
  ENSG00000109332_18 (sequence is synthesized)
ggtgcagcccctgtctaactgaaatttctcttcaccttgtacacttgacagctgaaaaaaaacaacatgggagtaataatgggtcaaaatttgcaaaataaagtactgttttggtgtggg

SEQ ID NO: 171990 - DNA, 120 bp, Artificial Sequence
  ENSG00000109332_19 (sequence is synthesized)
gtagttccgtcagagcggacatcttgtggctgtgtcgtgcgcgtgagccccgtagggccggggaggcaccagctgccgcgcggggaggaggccgaggccgcagcttgagggaggccccgg

SEQ ID NO: 171991 - DNA, 120 bp, Artificial Sequence
  ENSG00000109332_20 (sequence is synthesized)
gggaactggcgggtagcgaggccctcctcggaatctcgtgtgaaggtggccctcctcttgggcctttaacgtctgtagatgctggagaccagcagaaaggatactgtgtgcgatgagata

SEQ ID NO: 171992 - DNA, 120 bp, Artificial Sequence
  ENSG00000109332_21 (sequence is synthesized)
ttgcacggatctataaaacagacagagataagtacaacagaatatctcgggaatggactcagaagtatgccatgtgatgctaccttaaagtcagaataacctgcattatagctggaataa

SEQ ID NO: 171993 - DNA, 120 bp, Artificial Sequence
  ENSG00000109332_22 (sequence is synthesized)
accaagtgaggaaactgggggacgctgtggggaggggcgtggggctggatcgcgcagcggctgcttcctttaccttcctcccatggtctccttccggttctcgatgcttctctgagccta

SEQ ID NO: 171994 - DNA, 120 bp, Artificial Sequence
  ENSG00000109332_23 (sequence is synthesized)
agggtttccgccactcgttcaccctccccccagctcatgatcctcctccctcccccgccctcctggtccaatctccgatctgtttagtaagaaggtgctgttccgagaagaaggaaaagg

SEQ ID NO: 171995 - DNA, 120 bp, Artificial Sequence
  ENSG00000109332_24 (sequence is synthesized)
gggatattgagtatccattgaaatggatttgttcagccatttacattaatgagcatttaaatgcaacagatatcatttcaggtgacttaacatgaatgaataaaagtcaatgctattgga

SEQ ID NO: 171996 - DNA, 120 bp, Artificial Sequence
  ENSG00000109332_25 (sequence is synthesized)
ccaaccaccggcataagcattcaggggcgttgctttcctggcagtggcccgccccagttcgagccggtgccttactgcgtctcgcgagaacttatgcattttggaggcggaaccccgtca

SEQ ID NO: 171997 - DNA, 120 bp, Artificial Sequence
  ENSG00000109332_26 (sequence is synthesized)
gcttgacacgtattcactcggccccggacgtgggaagcaagccgtctggcttcggcctcacatcggtcttgtgctcgggacggcggcgttggcggactgatccgcggcggtgaagagagg

SEQ ID NO: 171998 - DNA, 120 bp, Artificial Sequence
  ENSG00000109332_27 (sequence is synthesized)
ccactgatttaacttctgtagtaacaagggcattaccattcttcacctttcctaattctgatcccatagttttacatttttcctgtttattttgattttgttcactgctttatttcttaa

SEQ ID NO: 171999 - DNA, 120 bp, Artificial Sequence
  ENSG00000109332_28 (sequence is synthesized)
agttctagcacatctgtgactcctccacttccacatttttgcactgcttacacttacgtgcaatcttattccttgtctgcacacacatgtggaaagctagaaataaatgttaaaacttac

SEQ ID NO: 172000 - DNA, 120 bp, Artificial Sequence
  ENSG00000109332_29 (sequence is synthesized)
tttttataaacattttaatatgtagtttggacatgatttattgacttaaggttcttctctaaactggaagtgaaatgcatgccttctgaagatgttctggctttgttaattctgtaatca

SEQ ID NO: 172001 - DNA, 120 bp, Artificial Sequence
  ENSG00000109332_30 (sequence is synthesized)
tttcattggggaaaaaaccagctacgcagtttttccaatgagtgaattttttcattttgtgttttgcttaaaacggctccttcagggtagatgtcatactgcataacttttttggattca

SEQ ID NO: 172002 - DNA, 120 bp, Artificial Sequence
  ENSG00000109332_31 (sequence is synthesized)
aattatgaatgagaaattagttaacattctgctccacaaggtaagaaaaactgctctttggctctattttcaaaattacttctgagatgcatatagtctcaaaataacagctttagtagg

SEQ ID NO: 172003 - DNA, 120 bp, Artificial Sequence
  ENSG00000109332_32 (sequence is synthesized)
catatcacttcttgaaagccaaacatgagtgtaagacacttttatgaaacacggtggatccctaactggctttcaaattgacctttatagccttagacaacccttaggtatttacggaga

SEQ ID NO: 172004 - DNA, 120 bp, Artificial Sequence
  ENSG00000109332_33 (sequence is synthesized)
tgacttctttgattgtcataacaattagtggatgtgtccagttctctgtatctttgacttgatgctttatacatcatttcatttgttgcttctaagggaataagccatagaggcttctcc

SEQ ID NO: 172005 - DNA, 120 bp, Artificial Sequence
  ENSG00000109332_34 (sequence is synthesized)
aggtttaaaagaacagtaaagtacctggaaaaccaacatttttgaatgtatggacactggacatgagatatgtacaatgaaatcttaaaagaatctaagaatttgccctctttgccccac

SEQ ID NO: 172006 - DNA, 120 bp, Artificial Sequence
  ENSG00000109332_35 (sequence is synthesized)
tccacccagtaatttgacattactagtgccatgtataggacccaactgagtattagaatcagttttgactatgtctttgtatttcctaaatcttttaatgcataaaccgaattagggtcc

SEQ ID NO: 172007 - DNA, 120 bp, Artificial Sequence
  ENSG00000109332_36 (sequence is synthesized)
agttggcctgttaatggtaaatttacattttaaatgactcagtttgtttttcctgggcgagtttgcaatgtgataatcagattttttaaaactgattaatttgctttcttgtgtgggtgt

SEQ ID NO: 172008 - DNA, 120 bp, Artificial Sequence
  ENSG00000109332_37 (sequence is synthesized)
aaactgattaatttgctttcttgtgtgggtgtactcacattttaaagtatgaaccacagttaactagtggtctcaggggtagtgaaacactcacttttttttttgtttgtttttttttgt

SEQ ID NO: 172009 - DNA, 120 bp, Artificial Sequence
  ENSG00000109332_38 (sequence is synthesized)
ggtactgatcatgctgtgttagtaatttgggcggggaggggggtaactcagccatgttttgtgttggcataacaaaactgttaatgattgttgattacacttttaagtgaatttgtcttt

SEQ ID NO: 172010 - DNA, 120 bp, Artificial Sequence
  ENSG00000109332_39 (sequence is synthesized)
tatgaggaacccagtgcaagtcactaaatattgtctaatagtgacatctgcataagacttgtaatagctgaagttaattgagcttaaaggaattgttaccattaaagtctgtgtttaaag

SEQ ID NO: 172011 - DNA, 120 bp, Artificial Sequence
  ENSG00000109332_40 (sequence is synthesized)
tcaaaatctgttagtatagatttatgctttatttcaaaggaatagagcattcttggaagatagggttctgtgtaggctgtatatatatgttgaattgcactcatgtatagatgctgactc

SEQ ID NO: 172012 - DNA, 120 bp, Artificial Sequence
  ENSG00000109332_41 (sequence is synthesized)
ttaacctttggtttaaagagctagacctcagtttgagctttgtaaataggaataaggtttgccttttctttaatgttgcaagattcagaccatgtggaagcttccgccctcatctgtatt

SEQ ID NO: 172013 - DNA, 120 bp, Artificial Sequence
  ENSG00000109332_42 (sequence is synthesized)
attgttacacagattctgatttttgggcttttgttgtcttgtaagcatcaaatgtccaacttcaatttatatttgcacgtattgttacagcatatgcttattatgcttatagttttgtat

SEQ ID NO: 172014 - DNA, 120 bp, Artificial Sequence
  ENSG00000109332_43 (sequence is synthesized)
acgtaagtgtaaatttgtgaaaacttagagttgcttagtgcactggtttataggtattaaaagcatattatccttcacttttcagtcattaacataaattcaacctgtatgaataactag

SEQ ID NO: 172015 - DNA, 120 bp, Artificial Sequence
  ENSG00000109332_44 (sequence is synthesized)
taggtgcaatgtgatggtttccatttttgtgattcaagtttatgttttatgtacggtggaaatgcagactcaggtgtacctgtgtaacttaatgaaactttaaatgagatggtctacaaa

SEQ ID NO: 172016 - DNA, 120 bp, Artificial Sequence
  ENSG00000109332_45 (sequence is synthesized)
ttttggttacatccaaaagttagggcttttataaatgaatgtgttaaatacctttaaattgccctttgattcatgatatggtagggccacagtaacctttagaactttacatcatatgag

SEQ ID NO: 172017 - DNA, 120 bp, Artificial Sequence
  ENSG00000109332_46 (sequence is synthesized)
taatgaaatttttatccaaaagtttaggtttctgttgtaaaaagaggaggcagggggttgtggtcagattgtaaaaatcagtttctataatatttagaacttctatgctaatagatgaca

SEQ ID NO: 172018 - DNA, 120 bp, Artificial Sequence
  ENSG00000109332_47 (sequence is synthesized)
tttaaaaatagggtgaaagtaactgaaagcagtggactcatttgcttgttttcttaaattaagcttatgtgactcacccattttctgtcttggtgtaggaacttagtgatttggcccgtg

SEQ ID NO: 172019 - DNA, 120 bp, Artificial Sequence
  ENSG00000109332_48 (sequence is synthesized)
ccttttggctggagagtgggggtggataaggggtgcgatggcagtaagggaaagctaatagggtggagtgtttacagctaacttgaaaaaaatgtcatggaataaattcagccttactag

SEQ ID NO: 172020 - DNA, 120 bp, Artificial Sequence
  ENSG00000109332_49 (sequence is synthesized)
tcctttctatcctgggtagataagcaactatatgctggataattgaatattcagaattatggataccatctaagaatttcagagaattagagcgcactaaaacatcctgggaatgacagc

SEQ ID NO: 172021 - DNA, 120 bp, Artificial Sequence
  ENSG00000109332_50 (sequence is synthesized)
aagtattaagaatttttaaatttagttttaagtgaaaatccagcattgatttggttgtaatttttaacttggtctgtaggtttattttatcatatagttaattctattttggatattcca

SEQ ID NO: 172022 - DNA, 120 bp, Artificial Sequence
  ENSG00000109332_51 (sequence is synthesized)
tagttgtactgcatttgaaagaaaaaacataatgagttagtcatttgttacgtgtactttgtgtctatccctgtgttcacgttctagagtatagccatctctatgacctaccaaacatct

SEQ ID NO: 172023 - DNA, 120 bp, Artificial Sequence
  ENSG00000109332_52 (sequence is synthesized)
ttacttaatcttgttgaaagtagcacttttgaggttaataaggtttaaattaataacccccattgactgtagtctataatactataattttttaaatggcaaaatgccctctgggagcta

SEQ ID NO: 172024 - DNA, 120 bp, Artificial Sequence
  ENSG00000109332_53 (sequence is synthesized)
aggtgtcttaaaagcttagagcaaatcctgttaaatgggacaaagtctcaattcttttttaataagacaaaaacactttatgtagtctcttttctttttcagtgtttctcgaaatttcaa

SEQ ID NO: 172025 - DNA, 120 bp, Artificial Sequence
  ENSG00000109332_54 (sequence is synthesized)
ttttattccatgctgctacagaatacaaacttacccaataaaaatagcagctccattgaaagagctttcccacaaattgaaatatttaaagcacagttacaggcttgtgtactgttggtg

SEQ ID NO: 172026 - DNA, 120 bp, Artificial Sequence
  ENSG00000109332_55 (sequence is synthesized)
catacattgtttgatttgttcagttcctcagttttgcagggaaagatgtcaacattatctgatttttcaagctatctattcaatgattctaattttctaaaagacttggaagctgggttg

SEQ ID NO: 172027 - DNA, 120 bp, Artificial Sequence
  ENSG00000109332_56 (sequence is synthesized)
ttttttgttctggcccctcagtttgttgagagcctattttaaagatttccagtggatttaacaaaatgaacaaaatttagaggactcatttatttcccccaaccaagtcagtgccatagt

SEQ ID NO: 172028 - DNA, 120 bp, Artificial Sequence
  ENSG00000109332_57 (sequence is synthesized)
gggacccttacataaatttgtcactgtgtttaaatttgatgtagtgaatgaaaataatcatctgaagccagtataaaataggcattaaacattgttgtccaagctagagtgcagtggctc

SEQ ID NO: 172029 - DNA, 90 bp, Artificial Sequence
  ENSG00000109332_58 (sequence is synthesized)
ggcattaaacattgttgtccaagctagagtgcagtggctctccaccagcatgatcatttaacacacaaaaacctgaaacacctgggctta

SEQ ID NO: 172030 - DNA, 120 bp, Artificial Sequence
  ENSG00000109332_59 (sequence is synthesized)
gtagctcttcttcccattccctgcacccttctgagagagcttatactgaaagttctgcattttgtgtccttgattttgcacaggaaggcaaaagatcacagttgaggaaaaaaagttacc

SEQ ID NO: 172031 - DNA, 120 bp, Artificial Sequence
  ENSG00000109332_60 (sequence is synthesized)
cactttgaaaatctgtttccatttttaaattcctgtagttatagggaataagttgttctagtagaccaaaagaagattaatgtttttagttatacacggatgcattgatattgtggtaga

SEQ ID NO: 172032 - DNA, 120 bp, Artificial Sequence
  ENSG00000109332_61 (sequence is synthesized)
cagttgatactggctttatcgtaatttttttttctttttatggagaatggggtctcactatgttatccaagctggtctcgaactcctgcgctcaagctgtcctctcgcctctgcttctct

SEQ ID NO: 172033 - DNA, 120 bp, Artificial Sequence
  ENSG00000109332_62 (sequence is synthesized)
gttgtatcttttttatttaggcatcctttcttttgctttctagtacttggtcttttgtatatgagtacgttcagcttttctggggttttttttttgttgtttttgagacagtctcactct

SEQ ID NO: 172034 - DNA, 120 bp, Artificial Sequence
  ENSG00000109332_63 (sequence is synthesized)
ttgtttttgagacagtctcactcttttccccaggctggagtgcagtggcgcgatctgcagcctctccctcccaggttcaagtgattctcctgtatcatcctcccgagtagctgggattac

SEQ ID NO: 172035 - DNA, 120 bp, Artificial Sequence
  ENSG00000109332_64 (sequence is synthesized)
acgggcgtgagccactgtgcccagtctagcttttttggtcttgtttttttgtttctgagacaggattttgtgttttttttctgtctcaagacagctctgttgcccagactggagtgcagt

SEQ ID NO: 172036 - DNA, 120 bp, Artificial Sequence
  ENSG00000109332_65 (sequence is synthesized)
ggctcaagtgatcctcccacctcagtcttctgagtagctaggaccccaggcatgcaccaccatgcctagctaacattttcgaagagacgggggtctccctttgttgttcaggctggtctc

SEQ ID NO: 172037 - DNA, 120 bp, Artificial Sequence
  ENSG00000109332_66 (sequence is synthesized)
ccctttgttgttcaggctggtctcagtcaaactcctgggctcaagcgatccctgtctttgcctcccagggtgttaggattacaggcatgagccacgtacctagtggtcttctgctgttca

SEQ ID NO: 172038 - DNA, 120 bp, Artificial Sequence
  ENSG00000109332_67 (sequence is synthesized)
aatggaatcccaaaccttacccttctgtgttatttccgtgtttatatgagaaaggggatatagaagatatagtagtccctagacttaatgggtgtactgacttatgccatagactaaact

SEQ ID NO: 172039 - DNA, 120 bp, Artificial Sequence
  ENSG00000109332_68 (sequence is synthesized)
taagagaaactgttagtttgaaaatgttgaaggcagtaatgtattaacattggttctatttattgtcttttttttttaacttgtgattattagacattggttatatcattggtaagatgg

SEQ ID NO: 172040 - DNA, 120 bp, Artificial Sequence
  ENSG00000109332_69 (sequence is synthesized)
agctgtaccatcttaaaaatattctaataaactatattttcatagtagataattcatattgttatgcacaagtcatggaacagtgaactacatacttgttggaaataaaacgttcatatt

SEQ ID NO: 172041 - DNA, 120 bp, Artificial Sequence
  ENSG00000109332_70 (sequence is synthesized)
gaattgtgcagactatatgttaagagcaaacgtctttctacttacagaagtacgctcttcagggtcagaatttcaatcacgaggtcaggagatcgagacccatcctggttaacacagtga

SEQ ID NO: 172042 - DNA, 77 bp, Artificial Sequence
  ENSG00000109332_71 (sequence is synthesized)
cccagattgcgccactgcactgcagcctggagactccgtctcaaaaaaaaaaaaaatttcaatagttaaaaatggat

SEQ ID NO: 172043 - DNA, 120 bp, Artificial Sequence
  ENSG00000109332_72 (sequence is synthesized)
gtctcaaaaaaaaaaaaaatttcaatagttaaaaatggatgctgagtttaaaaaaaaaaaaaaaggttgagttgagagaataaggagattagaaaacaaaaaaggtacttagccccatga

SEQ ID NO: 172044 - DNA, 120 bp, Artificial Sequence
  ENSG00000109332_73 (sequence is synthesized)
gagtttttttggtttgttttcaggtagaaaatagagttagtggattggggaggaaggatggttcaggaagaacaaagaatttaagacagttgagggcctctgaaagtggtcttggaagtt

SEQ ID NO: 172045 - DNA, 120 bp, Artificial Sequence
  ENSG00000109332_74 (sequence is synthesized)
caacaaataacgtgaatgttgagctctctctggtctaagctcttaaactatgagaatatctaattatagctatttcggtttgtaagagattggcttttatgtaaataaaaaattttgtat

SEQ ID NO: 172046 - DNA, 120 bp, Artificial Sequence
  ENSG00000109332_75 (sequence is synthesized)
caatgtgtttgcatatatatttttacgaactctagctaagatgattgtctcagcatatgttcaggcatgttctctctcctaatggaatatattatttatgtgaattgtgatggagtgtgc

SEQ ID NO: 172047 - DNA, 120 bp, Artificial Sequence
  ENSG00000109332_76 (sequence is synthesized)
gctctaacttctatcccgcattttaagatggcggctgctttaactggttcaggctctttccggcatctcctttcgtaataatgtgaattaatatgatttgttaaatgttaacttttatat

SEQ ID NO: 172048 - DNA, 120 bp, Artificial Sequence
  ENSG00000109332_77 (sequence is synthesized)
cgcgttgtgcactgctctaagatcctctgctcaaaacttacctaaattcaaactcttaaactgtatttcccttttttgtgacttgtatttgtgtgatgtgtttggttgttgcacaatcga

SEQ ID NO: 172049 - DNA, 120 bp, Artificial Sequence
  ENSG00000109332_78 (sequence is synthesized)
agttgcagcttttcacccgaagctatttatccgagggacaccgggaactgatgtaaaaggcattctggaagctcccttttccttttggctggagagtgggggtggataaggggtgcgatg

SEQ ID NO: 172050 - DNA, 120 bp, Artificial Sequence
  ENSG00000109339_0 (sequence is synthesized)
agccagaggctcaggttggtgaccgagcggcagagttcctagcgcctgcagtgtggtgaactccaacttttaggccaagttgaaaatgcagccgacgacccccacacttctaacttcaga

SEQ ID NO: 172051 - DNA, 120 bp, Artificial Sequence
  ENSG00000109339_1 (sequence is synthesized)
atcaaaactatgaccctagggagtgaggaggagagtgaaaaatgcctttcccagtgcctccagcagccctcctcaaggacccctgtgaggccaggcagaaatggcgtggcaggggaccca

SEQ ID NO: 172052 - DNA, 120 bp, Artificial Sequence
  ENSG00000109339_2 (sequence is synthesized)
gcgagcccagagggattttgccgctgcttcctctacccctgtatttcacgcagctctctaaattgactcagctccaggtatttatgagcctccatttcttatactactgcagtgaaccaa

SEQ ID NO: 172053 - DNA, 120 bp, Artificial Sequence
  ENSG00000109339_3 (sequence is synthesized)
cattggatgtgaaaattgccttttgtcagggattcgataaacaagtggatgtgtcatatattgccaaacattacaacatgagcaaaagcaaagttgacaaccagttctacagtgtggaag

SEQ ID NO: 172054 - DNA, 120 bp, Artificial Sequence
  ENSG00000109339_4 (sequence is synthesized)
tgggagactcaaccttcacagttctcaagcgctaccagaatctaaagcctattggctctggggctcagggcatagtttgtgccgcgtatgatgctgtccttgacagaaatgtggccatta

SEQ ID NO: 172055 - DNA, 120 bp, Artificial Sequence
  ENSG00000109339_5 (sequence is synthesized)
agaagctcagcagaccctttcagaaccaaacacatgccaagagagcgtaccgggagctggtcctcatgaagtgtgtgaaccataaaaacattattagtttattaaatgtcttcacacccc

SEQ ID NO: 172056 - DNA, 120 bp, Artificial Sequence
  ENSG00000109339_6 (sequence is synthesized)
agaaaacgctggaggagttccaagatgtttacttagtaatggaactgatggatgccaacttatgtcaagtgattcagatggaattagaccatgagcgaatgtcttacctgctgtaccaaa

SEQ ID NO: 172057 - DNA, 120 bp, Artificial Sequence
  ENSG00000109339_7 (sequence is synthesized)
tgttgtgtggcattaagcacctccattctgctggaattattcacagggatttaaaaccaagtaacattgtagtcaagtctgattgcacattgaaaatcctggactttggactggccagga

SEQ ID NO: 172058 - DNA, 120 bp, Artificial Sequence
  ENSG00000109339_8 (sequence is synthesized)
tgacacgttattacagagcccctgaggtcatcctggggatgggctacaaggagaacgtggatatatggtctgtgggatgcattatgggagaaatggttcgccacaaaatcctctttccag

SEQ ID NO: 172059 - DNA, 120 bp, Artificial Sequence
  ENSG00000109339_9 (sequence is synthesized)
gaagggactatattgaccagtggaataaggtaattgaacaactaggaacaccatgtccagaattcatgaagaaattgcaacccacagtaagaaactatgtggagaatcggcccaagtatg

SEQ ID NO: 172060 - DNA, 120 bp, Artificial Sequence
  ENSG00000109339_10 (sequence is synthesized)
cgggactcaccttccccaaactcttcccagattccctcttcccagcggactccgagcacaataaactcaaagccagccaagccagggacttgttgtcaaagatgctagtgattgacccag

SEQ ID NO: 172061 - DNA, 120 bp, Artificial Sequence
  ENSG00000109339_11 (sequence is synthesized)
caaaaagaatatcagtggacgacgccttacagcatccctacatcaacgtctggtatgacccagccgaagtggaggcgcctccacctcagatatatgacaagcagttggatgaaagagaac

SEQ ID NO: 172062 - DNA, 120 bp, Artificial Sequence
  ENSG00000109339_12 (sequence is synthesized)
acacaattgaagaatggaaagaacttatctacaaggaagtaatgaattcagaagaaaagactaaaaatggtgtagtaaaaggacagccttctccttcaggtgcagcagtgaacagcagtg

SEQ ID NO: 172063 - DNA, 120 bp, Artificial Sequence
  ENSG00000109339_13 (sequence is synthesized)
agagtctccctccatcctcgtctgtcaatgacatctcctccatgtccaccgaccagaccctggcatctgacactgacagcagcctggaagcctcggcaggacccctgggttgttgcaggt

SEQ ID NO: 172064 - DNA, 120 bp, Artificial Sequence
  ENSG00000109339_14 (sequence is synthesized)
gactagccgcctgcctgcgaaacccagcgttcttcaggagatgatgtgatggaacacacacacacgcagacacacacacacacacaaatgcagacacacaacatcaagaaaacagcaagg

SEQ ID NO: 172065 - DNA, 120 bp, Artificial Sequence
  ENSG00000109339_15 (sequence is synthesized)
gagagaatccaagcctaaaattaaataaatctttcagcctgcttcttccccagggttctgtattgcagctaagctcaaatgtatatttaacttctagttgctcttgctttggtcttcttc

SEQ ID NO: 172066 - DNA, 120 bp, Artificial Sequence
  ENSG00000109339_16 (sequence is synthesized)
caatgatgcttactacagaaagcaaatcagacacaattagagaagccttttccataaagtgtaattttaatggctgcaaaaccggcaacctgtaactgcccttttaaatggcatgacaag

SEQ ID NO: 172067 - DNA, 120 bp, Artificial Sequence
  ENSG00000109339_17 (sequence is synthesized)
agcatcacgctgcacaatggtttccaggcagtgaaagagggtgattcagcaagccactcttcttctattttctttaacctccccttcactttttatttttatgggggtgggtggtgcttg

SEQ ID NO: 172068 - DNA, 120 bp, Artificial Sequence
  ENSG00000109339_18 (sequence is synthesized)
ctatatgcttacctttttcttttcttttttcatttttacaaatttccttttttgtcctcacccctcaattcctaggggcttgagtgagtttaagattgggttttcttggaaatcacctgt

SEQ ID NO: 172069 - DNA, 120 bp, Artificial Sequence
  ENSG00000109339_19 (sequence is synthesized)
ccatcgttaattttaaacaatctccatatctccaaagaatctcttccatgttagtctggaatgtggttaatgaaaaacaagtagggaggatttctggggcaaacactgccggatcaggat

SEQ ID NO: 172070 - DNA, 120 bp, Artificial Sequence
  ENSG00000109339_20 (sequence is synthesized)
cgtagttctcaggcacggaatgtctcttttaagcttttggttggacattgcaacaatcatgcagaaagaggcacggaagtgtccagtagtgacaagaatggagtacaatgctctatttgc

SEQ ID NO: 172071 - DNA, 120 bp, Artificial Sequence
  ENSG00000109339_21 (sequence is synthesized)
tgcaggactgctgagtgccttcctcctaccacacatgcatctattattgcaccttcttctgaggaccaaggacttgtggaaaaagttgggcctatagactagtaggggagatgcttactg

SEQ ID NO: 172072 - DNA, 120 bp, Artificial Sequence
  ENSG00000109339_22 (sequence is synthesized)
gtaaagaagaacagaatccatttgcttctttggcatattggatatatttattgcattacataagcctgagatgagacactgtactgctgattcagataaaaagatcatgctgcatattga

SEQ ID NO: 172073 - DNA, 120 bp, Artificial Sequence
  ENSG00000109339_23 (sequence is synthesized)
ttgtttaaaaaatgtaacttagaattggagcccatcttttcagaaacctggagaagctgtatttcttattgtgaatcttggtagaaactcttaagaggagacatcaggctagtgtgagaa

SEQ ID NO: 172074 - DNA, 120 bp, Artificial Sequence
  ENSG00000109339_24 (sequence is synthesized)
acaccaacagcaggcccatctcagatcttcactatggcaacttatgcaagaaactgttgaattagacccgtttcctatagatgagaaaccatacaagctgtggtatttatgagcctccat

SEQ ID NO: 172075 - DNA, 120 bp, Artificial Sequence
  ENSG00000109339_25 (sequence is synthesized)
ttcctctgctgttgcaaagtgtctttaatttgaggggctcctgttcttaaaaaatcctcacagtttcagtaaaacgattctggatagtgaggcagtaagaaattatatgtagagtgggaa

SEQ ID NO: 172076 - DNA, 120 bp, Artificial Sequence
  ENSG00000109339_26 (sequence is synthesized)
aatcagctgcctccagcttcctgcctgctagccccagaacagcatctgctgttgagaggagtgtgtttgccatgctggaaggggatgtttatgaacagatcccagaggggctgagtgtgt

SEQ ID NO: 172077 - DNA, 120 bp, Artificial Sequence
  ENSG00000109339_27 (sequence is synthesized)
ttgcatctacctgctccttggcctagtcagatggatgtagatacagatccgcatgtgtctgtattcatacagcactacttacttagagatgctactgtcagtgtcctcagggctctacca

SEQ ID NO: 172078 - DNA, 120 bp, Artificial Sequence
  ENSG00000109339_28 (sequence is synthesized)
agacataatgcactggggtaccacatggtccatttcatgtgatctattactctgacataaacccatctgtaatatattgccagtatataagctgtttagtttgttaattgattaaactgt

SEQ ID NO: 172079 - DNA, 120 bp, Artificial Sequence
  ENSG00000109339_29 (sequence is synthesized)
atgtcttataagaaaacatgtaaagggggaatatatggggggagtgagctctctcagacccttgaagatgtagcttccaaatttgaatggattaaatggcacctgtataccaatttgtag

SEQ ID NO: 172080 - DNA, 120 bp, Artificial Sequence
  ENSG00000109339_30 (sequence is synthesized)
aaagaacatatgtgatacttatgtaaagtgtggggcgagtgggtaacagttttcaggcacaaaatggtttggccttctgaaggcaggtgtgaataaaagctgagagtcttttctgtgaca

SEQ ID NO: 172081 - DNA, 120 bp, Artificial Sequence
  ENSG00000109339_31 (sequence is synthesized)
gtaaagagtaggagagactggagggtagtgtgtggtgtggactaagactgaaaggaggttattacccagatactaggagacactggtgtccctgttttagagatttggctctatacccat

SEQ ID NO: 172082 - DNA, 120 bp, Artificial Sequence
  ENSG00000109339_32 (sequence is synthesized)
ttgtcatttctcaattactggtcacaacaagaggccactggagaaagtggcaggtggtgaagcaaggttattgtgtgtgcttttgatgataagaatctctctctggaactgagcagaatt

SEQ ID NO: 172083 - DNA, 120 bp, Artificial Sequence
  ENSG00000109339_33 (sequence is synthesized)
gcctccatgtgaattccttcaacaaaaaaatgagcctgcctagactactttcagattgtggattgtgttttccatgtgtgggctgcttccctgattcatactctgccaaagttttatttt

SEQ ID NO: 172084 - DNA, 120 bp, Artificial Sequence
  ENSG00000109339_34 (sequence is synthesized)
gagaaataatattactttcctcttctgaaataaaataataataataataatgaaacccccaaaccacagtgtgagtctcaggttagcatttgaaaacatctccagagacattgttattcc

SEQ ID NO: 172085 - DNA, 120 bp, Artificial Sequence
  ENSG00000109339_35 (sequence is synthesized)
tcaggagtttccctgactccttaatgtggctgatgtttcatgtttatttatttattttaataagtatgagcaatcgaagggctgatcatctgagttttgtactgcagtagatgtaagagc

SEQ ID NO: 172086 - DNA, 120 bp, Artificial Sequence
  ENSG00000109339_36 (sequence is synthesized)
aataactctgcccataaatttactgctgccaaatagttttagcaatatgagtttgtcttaaaagccatgaagcattaatgtcaatgtttagcaaaatctccagaatttagcttaaattaa

SEQ ID NO: 172087 - DNA, 120 bp, Artificial Sequence
  ENSG00000109339_37 (sequence is synthesized)
attaaatgaaagtgctttcctgagcacttaaggaggcactgtgaaacatcttggttatgtacaaggcaataccaaggtgatctcagcaataatcaggcttcccttcttattcacttcgaa

SEQ ID NO: 172088 - DNA, 120 bp, Artificial Sequence
  ENSG00000109339_38 (sequence is synthesized)
gtatccatcacagttatttgcactctgaccatgttggtgctcactagagtggtgatatttcacctgaagaagtgaaagacaggaagtggatggttgatgagtgtgaactgattggcaaat

SEQ ID NO: 172089 - DNA, 120 bp, Artificial Sequence
  ENSG00000109339_39 (sequence is synthesized)
agaatatccccaaaacagagcaaacaagaatgccagtgctctgaaaactgccttaaatataataatagggaactttctttctctcttcaagcaatagagaccacagggaactgcacccac

SEQ ID NO: 172090 - DNA, 120 bp, Artificial Sequence
  ENSG00000109339_40 (sequence is synthesized)
ctgcaccatcgccatgccagtggtgctgccattctgagattatttcacacagtcagattcagtacacgcagtcatttgtttaaaataaatagaagaacattcctttgtgcagcttgtccc

SEQ ID NO: 172091 - DNA, 120 bp, Artificial Sequence
  ENSG00000109339_41 (sequence is synthesized)
ctggaataaaaatggcccattttctctattttgctaccattttttttctggttaatattgcagataacctgattgttaaaaatgcctcctcagtcacttgagctccctctctttcatatt

SEQ ID NO: 172092 - DNA, 120 bp, Artificial Sequence
  ENSG00000109339_42 (sequence is synthesized)
ggggagggggagaagaggagcagcatctcctcctcctcctcctcgcctcggaaacgctccccagcggcgatcccggccgactgcctgacccccgagcgctcaacgcacccccgccgccct

SEQ ID NO: 172093 - DNA, 120 bp, Artificial Sequence
  ENSG00000109339_43 (sequence is synthesized)
actgtgctcgacgcctctccaagagcttcgccaaaaccttctggcgcgggcggctcaactcctgtaggcgactctgaccgctgccgaggcggaccggggagctacggagcacggctcgcc

SEQ ID NO: 172094 - DNA, 120 bp, Artificial Sequence
  ENSG00000109339_44 (sequence is synthesized)
agcacgacggtctccaggggccgtgagcatggtgtgtcaccctcgcctcagcgtggccgctggagctactcgcaccactggggctccacctcgggcagccgcgccggctccgcccccccg

SEQ ID NO: 172095 - DNA, 120 bp, Artificial Sequence
  ENSG00000109339_45 (sequence is synthesized)
gtcctgtcactcaaccattccccggcactgggaggaccgcagatctcccaccccgagctcccctcgacctcattggcccgcctggcatccagctccacctcctccctagggacgaggtcg

SEQ ID NO: 172096 - DNA, 120 bp, Artificial Sequence
  ENSG00000109339_46 (sequence is synthesized)
tttctcttgatatatctgtggcttctcccctcccttactttataccacatgggattaagtgcggagagcaggaagctgctttaaagagagtctcaaggggaatttcatcagccgcaagat

SEQ ID NO: 172097 - DNA, 120 bp, Artificial Sequence
  ENSG00000109339_47 (sequence is synthesized)
gacatcacaagacagaaggaagtctccagccagcatcttcaaagtgcttgacaggctatctctcgtacctgcataagtggtgaatttccccctcagagtaaaccaggcaagaactagaca

SEQ ID NO: 172098 - DNA, 120 bp, Artificial Sequence
  ENSG00000109339_48 (sequence is synthesized)
gggcccctcccccgctgttagtaccttcccaaagctcaattagtcttacatcttctgtgcatggctcttgggagctggttagctttagccagatttcccttatggacaagagaaaaatgg

SEQ ID NO: 172099 - DNA, 120 bp, Artificial Sequence
  ENSG00000109339_49 (sequence is synthesized)
aacaaattccttgaatataagtatcatttacaaatagaggtaaggatttggcccccagaatttttgcaggatcagttttattaggtgattaaagcaaggcagatgatggaacaacaaaga

SEQ ID NO: 172100 - DNA, 120 bp, Artificial Sequence
  ENSG00000109339_50 (sequence is synthesized)
gaatcaccactgtaaaagccccccagtcctttgcccactaggtctgctttcctataatatgtctaggaggtgatgatattatcaaattcacagaatataatatgttctgcattcacttgt

SEQ ID NO: 172101 - DNA, 120 bp, Artificial Sequence
  ENSG00000109339_51 (sequence is synthesized)
acacacacacacacacacacaccccaaatatttcttaaatagtcacctgttatttcccaagaacatcccaacttttccggtaggcaagtgtcaagtcacctggacaatattcctgaaaaa

SEQ ID NO: 172102 - DNA, 120 bp, Artificial Sequence
  ENSG00000109339_52 (sequence is synthesized)
aagtcacctggacaatattcctgaaaaaaagtgaaggttctacctggggttggggctcattttggaacatgaagttggcactctgaggagcctaaccttctgttaggcttcctttggggc

SEQ ID NO: 172103 - DNA, 120 bp, Artificial Sequence
  ENSG00000109339_53 (sequence is synthesized)
agttggtttgcagtgatccttaataaaatagtttgcagtattttgtaggaaggatggctgtgtactcatgtgcagggaaaattaaactgctgcaagagtttggcaaaaccgccaccactt

SEQ ID NO: 172104 - DNA, 120 bp, Artificial Sequence
  ENSG00000109339_54 (sequence is synthesized)
tactattaatatgtctttactatttttatatgtgttttgtgggtcagcgtgttcaattttaaataggaatacactagccttacaacggaatttcttcttgtggaataaaaactgataata

SEQ ID NO: 172105 - DNA, 120 bp, Artificial Sequence
  ENSG00000109339_55 (sequence is synthesized)
gcagagcctgacagtgtctgtacagcagccctgcctgcttctggccatgttgatgataacttttatgaacaaactgcaaggaagcaggctaagtcatatgggatagactacagttcaggt

SEQ ID NO: 172106 - DNA, 120 bp, Artificial Sequence
  ENSG00000109339_56 (sequence is synthesized)
ggaaggaaaacgagtgtaagtgcaccaggcattgccagcacaacatccaatatctccttctatccctcatcggctagttgtcggaccctggaagataacacagaatgcttatcaacatat

SEQ ID NO: 172107 - DNA, 120 bp, Artificial Sequence
  ENSG00000109339_57 (sequence is synthesized)
agcctggccagttcccaccaattggagtaagctatttaattgagggttaagaagctcgatagttttttcaatctgttatcagaaaaatattatctaaagacactgatagcagctgactgg

SEQ ID NO: 172108 - DNA, 120 bp, Artificial Sequence
  ENSG00000109339_58 (sequence is synthesized)
taaaactgaaagttggccttagtaaatggaactagtaaaaaatagataaaaatatgtaaaaccttttatgtcctgtcaaggaaaaaaaaataagcaaacttgatttgttttaaaattgta

SEQ ID NO: 172109 - DNA, 120 bp, Artificial Sequence
  ENSG00000109339_59 (sequence is synthesized)
aatattcattgcaaaacctaaattatacaaaatctatttcgatttgaatctcttaacatatgaaaagccacatcttaagtgcattatgctctgtaaggcatgttattagccagctttgct

SEQ ID NO: 172110 - DNA, 120 bp, Artificial Sequence
  ENSG00000109339_60 (sequence is synthesized)
gaaaaatgtattcttctacagctcagaaagaggagtaaaattgctctagaaatttttgatctcagccactttgcatccaaagaggaacccaactccccactcacaatcccccacacacat

SEQ ID NO: 172111 - DNA, 120 bp, Artificial Sequence
  ENSG00000109339_61 (sequence is synthesized)
tttaattataagagttcaacattttccacagatatcattaagccaagcaaggaaactcctctctgtaaaaacaacaaaaaagttgcaatgtaaatagttattttagctattttctttgtg

SEQ ID NO: 172112 - DNA, 120 bp, Artificial Sequence
  ENSG00000109339_62 (sequence is synthesized)
attagaggataagattttgttatttcttttggtacttagtcctttaactatctgaaaatggctcactttgacctgtttctttggtcagccaaactgaagtgaggggcctctgtttatata

SEQ ID NO: 172113 - DNA, 120 bp, Artificial Sequence
  ENSG00000109339_63 (sequence is synthesized)
tagaatcttgtatatgtaactttacttatgtgggaccaatggccagtatattctaatggacacaaatctcccaatccttatgtaggattatctgttcaccttgccatgtccatcttgcaa

SEQ ID NO: 172114 - DNA, 120 bp, Artificial Sequence
  ENSG00000109339_64 (sequence is synthesized)
tgagacctaacttgcacctgcctgtttttctgcatgattggactccaaagactattaccaatgatgagaattgtcttgtgtcagtgtttataaaatggacttaaagcacacacacatgca

SEQ ID NO: 172115 - DNA, 120 bp, Artificial Sequence
  ENSG00000109339_65 (sequence is synthesized)
tacccacattcacatgcacccttacagttctagatcaaccctggaaggcaaaaccatgtacgtccagtttctttgcaaggtctgagcagtgagaactaaattcagtcagtctaatgggta

SEQ ID NO: 172116 - DNA, 120 bp, Artificial Sequence
  ENSG00000109339_66 (sequence is synthesized)
aaatgcaacctcagtgatgcttaataaggatttgaaatcgttcaagtcatttctgtgttctttctcacaccctttcctttctattttgtcttcttttattttcaaaatgtctgtggaaca

SEQ ID NO: 172117 - DNA, 120 bp, Artificial Sequence
  ENSG00000109339_67 (sequence is synthesized)
agaggatgaatcgggggagaacttctgcttcttttgactctttttaggtaatatggagtcaatatattatgatttctgtttcttatggattattaaaatcagaggaaatctgcttctctc

SEQ ID NO: 172118 - DNA, 120 bp, Artificial Sequence
  ENSG00000109339_68 (sequence is synthesized)
tgtggcggcttattcttgtaaccccagcactttgggaggctgaggagagaagattgcttgaggccaagagtgtgagaccagcctggaaaacatactgatatcctgtctctgtttaaaaaa

SEQ ID NO: 172119 - DNA, 120 bp, Artificial Sequence
  ENSG00000109339_69 (sequence is synthesized)
tgacaatggttatgatgctgctcgttgtcttgagttgcatgtaacgacagtagctctgaagggtgtcatgatttcattttggcaactggtaaaagaaacttgtagtgtggtctgattgtg

SEQ ID NO: 172120 - DNA, 120 bp, Artificial Sequence
  ENSG00000109339_70 (sequence is synthesized)
ccagggaataaataagaaataaggaatgacctactttctcaccttgggtcaagagtgtgtgatatgaatgtgaccatgtagaaatctgtgttttcatttgacactggtttcttctaaaac

SEQ ID NO: 172121 - DNA, 120 bp, Artificial Sequence
  ENSG00000109339_71 (sequence is synthesized)
tgaccttcatttctgtctgtagatactagttgtatatctgcaattcagtaatttctttttaaggtataaaatcaatgaagaaaaaaaagatcatcttttgggggggcattaggtaagtag

SEQ ID NO: 172122 - DNA, 120 bp, Artificial Sequence
  ENSG00000109339_72 (sequence is synthesized)
agcagggttaaatttcccagattaattatcagatttctattcattttaactattttccaagagaaaaggtaaaagcctttgtttagctacatgatatccaactttactatctcaaactcc

SEQ ID NO: 172123 - DNA, 120 bp, Artificial Sequence
  ENSG00000109339_73 (sequence is synthesized)
ttggagaattaaaaatatatatgattttgtggctggatgaagaggtcactgcacttgcattagtttactttgcagtgtttgaacagttgaggagtggctcttctatttctgtaaataatg

SEQ ID NO: 172124 - DNA, 120 bp, Artificial Sequence
  ENSG00000109339_74 (sequence is synthesized)
ttttatttaaccaattaactattagaaagcctggaagataaacatacacattattttgagttatcacatttatcgttttacctagttcctgttggaatatagaaagcaacagctttttgt

SEQ ID NO: 172125 - DNA, 120 bp, Artificial Sequence
  ENSG00000109339_75 (sequence is synthesized)
tatctctggaacagcttctatcctagtttaaatcacagatccttactctctttaaaaaaggtcaagcataggtacctaaaaatacccacaataataagaagggaaattgcattccacaag

SEQ ID NO: 172126 - DNA, 120 bp, Artificial Sequence
  ENSG00000109339_76 (sequence is synthesized)
atgattgctcttaaagagtcagaaggagttattggtgcattcctgataccataaatggttaccaaacatttggtaattttgaccaagttcacagtaaggagaaaaaagggtgttggactt

SEQ ID NO: 172127 - DNA, 120 bp, Artificial Sequence
  ENSG00000109339_77 (sequence is synthesized)
gcttttcttgaagattacttatggagcaaccaacctagaaggatgaatctacttgccaataacaacactggatcacagccaaggcagaggtttttgacattcccaattcatcatggtggt

SEQ ID NO: 172128 - DNA, 120 bp, Artificial Sequence
  ENSG00000109339_78 (sequence is synthesized)
gttttgtatttgtaacatgtcttttctccacagatgttgaaaggcatgcttggatgacacatgctaatagtgaaacacgctgaaagtcctgccatcacagatcactttatgttgggagcc

SEQ ID NO: 172129 - DNA, 120 bp, Artificial Sequence
  ENSG00000109339_79 (sequence is synthesized)
actctatgtggcaagtcatctgtcccagttccagactaaatttcaactgttcaaccatttacatcattgtagtctgtttaaggcactaaaaatgtgctgtagaaatttatatttctcaga

SEQ ID NO: 172130 - DNA, 120 bp, Artificial Sequence
  ENSG00000109339_80 (sequence is synthesized)
cacatgaaatgtggtgacacatccagcaacaagtcaaacactcctttgaaattttctaccttatgtcaaatatttcttacttttaaagacattcctatcctggtgtaaaatccaacataa

SEQ ID NO: 172131 - DNA, 120 bp, Artificial Sequence
  ENSG00000109339_81 (sequence is synthesized)
aataatttgagggaatttaaggaattcaaatttcactccgtggggtacgtggctttatttcttaatcactgaacttctagtaatgttcttcacctgatcttgtctgcgatgtttaaccaa

SEQ ID NO: 172132 - DNA, 120 bp, Artificial Sequence
  ENSG00000109339_82 (sequence is synthesized)
cagtccagatcatttgcaactcaaaagcaggtacaaaatgttatccatcttaaaaacccctcacatattccctagaagactgtcccacacataattcgccttccattaacacttgtgaac

SEQ ID NO: 172133 - DNA, 120 bp, Artificial Sequence
  ENSG00000109339_83 (sequence is synthesized)
ccatcctggtgaaaatattgcctatgaacaattataccaaaaaatcaatttttataatgcaaataatattttacacagaccaagagaattcataatattaaagtatttcttttataaaag

SEQ ID NO: 172134 - DNA, 120 bp, Artificial Sequence
  ENSG00000109339_84 (sequence is synthesized)
gaaggttttcagaaagcaatggcctattccttcatgttaatacattgcgaacttggatttggtgtaaatcaagccctgagaatattgctctgaatttctagcttaatttctgagcaacat

SEQ ID NO: 172135 - DNA, 120 bp, Artificial Sequence
  ENSG00000109339_85 (sequence is synthesized)
tctaaagcagttcattaatttactccaaaaacatttcttggacacttcggtgtaggagatatatattgcatggtccttaacctaaaaaattcagagttaataaatctttgtttaaaaaaa

SEQ ID NO: 172136 - DNA, 120 bp, Artificial Sequence
  ENSG00000109339_86 (sequence is synthesized)
gggcaagcaggaccgagtactttccccaggctacccgcctcccagctgtgaaaataaacagggctctccttcttccctgctctgttgagtctgcacactggattcatgccctccccctga

SEQ ID NO: 172137 - DNA, 120 bp, Artificial Sequence
  ENSG00000109339_87 (sequence is synthesized)
tgtgaattttctactttaggtgagcatatatgttacaaatatataacaaataaatatataagtatatcacaagcttctgactccacttcagaaccattagattttaggggctggatgctt

SEQ ID NO: 172138 - DNA, 120 bp, Artificial Sequence
  ENSG00000109339_88 (sequence is synthesized)
aggtattctgtgctgggatactgtgtcccctgcaaatgtcagagctcttttgaaaaaaaaatcagaaataagtatggcagtatatttgttagaatctatgtatttgtgccttcaacaaaa

SEQ ID NO: 172139 - DNA, 120 bp, Artificial Sequence
  ENSG00000109339_89 (sequence is synthesized)
taaatgtaatttactggaaaatctgtaagtaaatcaggctatagatattacaagaaaactatctatccatatatttttctcaccctccccaaacatttaaatctagagacctagtctctg

SEQ ID NO: 172140 - DNA, 120 bp, Artificial Sequence
  ENSG00000109339_90 (sequence is synthesized)
cttttacccccttaaacagataacttcccagggtactgcaatttagccacagaaaaagaatggcttatgccacagcagtaggctctgaagcaatcacaaggttgtttacatgggctgcct

SEQ ID NO: 172141 - DNA, 120 bp, Artificial Sequence
  ENSG00000109339_91 (sequence is synthesized)
cacccaggctggatggagtgcagtggcattatcatagctcattgcagccagaaactcctgtgcttgagtgatcctcctgcctcagccttcccaatggctgggactacaggtatttatgag

SEQ ID NO: 172142 - DNA, 120 bp, Artificial Sequence
  ENSG00000109339_92 (sequence is synthesized)
accctagggagtgaggaggagagtgaaaaatgcgtaagtgctggctcctcccttactcttcgctgcctctcagccttgtttctatattctcacggggcgctttggtctttgaaaggaaga

SEQ ID NO: 172143 - DNA, 120 bp, Artificial Sequence
  ENSG00000109339_93 (sequence is synthesized)
ggagaatgggggagaggaagagcatggctttgccagctccttgcagcaatatagcaacttagaaatggcggggtcaacgaaaaaagcccgctttcccagtgcctccagcagccctcctca

SEQ ID NO: 172144 - DNA, 120 bp, Artificial Sequence
  ENSG00000109339_94 (sequence is synthesized)
agaaccataattatcatgtgatctagacctgatacattgtagatgaagaaacatgtcgacagagccactatctgcccaacatctgatgggtagtcatagtcacagtggaactgagactaa

SEQ ID NO: 172145 - DNA, 82 bp, Artificial Sequence
  ENSG00000109339_95 (sequence is synthesized)
cgagcccagagggattttgccgctgcttcctctacccctgtatttcacgcagctctctaaattgactcagctccagggagtc

SEQ ID NO: 172146 - DNA, 120 bp, Artificial Sequence
  ENSG00000109339_96 (sequence is synthesized)
aagatggtcacaattggtgctagagagctggtatgagcaggatccaacatatttctggttggagaggagagagaagaggctcagagacaagtatttatgagcctccatttcttatactac

SEQ ID NO: 172147 - DNA, 120 bp, Artificial Sequence
  ENSG00000109339_97 (sequence is synthesized)
tcctggggatgggctacaaggagaacggtagggatgcttcgggagagcagcatcaaaaccatgaatgaaacgggtgcacgttgtagatagccaaggggaatgttctcttttatgtacatg

SEQ ID NO: 172148 - DNA, 120 bp, Artificial Sequence
  ENSG00000109339_98 (sequence is synthesized)
cttttataaagtagggctgccagatagcatattcagggttttttttaatactactggtaagaaacactcattaaaaatgtgaaggatgttattgagaagtcagttttgctagaagagcac

SEQ ID NO: 172149 - DNA, 120 bp, Artificial Sequence
  ENSG00000109339_99 (sequence is synthesized)
taaatgttaatagtgaaaaagaattgtaaatggagtctgattaaacagtcaagcggatgctgattagcacacgtgcctagatattgagaaaaattgctatttgggttgcagctcagctga

SEQ ID NO: 172150 - DNA, 120 bp, Artificial Sequence
  ENSG00000109339_100 (sequence is synthesized)
gcatgagtgtgaaagcagaaaggaatctaccacagttagccatgtggcttttatgttgtatctcagactgatggctgtagttctagaaaaagacaagcaaaaaagtgacacaaatcctta

SEQ ID NO: 172151 - DNA, 120 bp, Artificial Sequence
  ENSG00000109339_101 (sequence is synthesized)
gagtgaaaatcttcatagacaactttgaaataatccaaattatttaaactgaataagaatttctgtaataatttaagctgctctgtaagaaacatttagagtagcaattgcctaataaat

SEQ ID NO: 172152 - DNA, 120 bp, Artificial Sequence
  ENSG00000109339_102 (sequence is synthesized)
gcctattggctctggggctcagggcatagtttgggagatgcaaccccaaatatatttttaaaagttttcctttgggttcaccaaggacatcagaatatggatgggaagtgtgagccctgc

SEQ ID NO: 172153 - DNA, 120 bp, Artificial Sequence
  ENSG00000109339_103 (sequence is synthesized)
acaagaggactgagatgagggacttgtacgggcggaactccagcctgggctctacccgtggactctgatacgtggtcacctccgcctcgaggagctgctttttctcacacccacaccagt

SEQ ID NO: 172154 - DNA, 120 bp, Artificial Sequence
  ENSG00000109339_104 (sequence is synthesized)
agtgtagttgattaaaactaaggatttattaaatatgttagaaagcattgcaatgtattattttgatgagactatatcttacaagtaatgcaccatattgaaaacatattcaatatactt

SEQ ID NO: 172155 - DNA, 80 bp, Artificial Sequence
  ENSG00000109339_105 (sequence is synthesized)
tagtttttagcagtctgtattaataagttttataaaaataatcagtgtatttttatgtacaggtgctacagggtactttt

SEQ ID NO: 172156 - DNA, 120 bp, Artificial Sequence
  ENSG00000109339_106 (sequence is synthesized)
atcagtgtatttttatgtacaggtgctacagggtacttttgtgaaaattccctggccactgaagtttacagaaacttctttgtatactcttagattagaagacagataatgtatgtatgc

SEQ ID NO: 172157 - DNA, 120 bp, Artificial Sequence
  ENSG00000109339_107 (sequence is synthesized)
atttatacagaggaagttaaaaagtcacctcttacaaaggtcaggttcaccctggtgggcaatatcggagttctggtaccttttgactcagaagagatgaatctagccctccttgctagg

SEQ ID NO: 172158 - DNA, 120 bp, Artificial Sequence
  ENSG00000109339_108 (sequence is synthesized)
caataccacatctaatttattcagaaaagaagacatttttatactttcttcacgagttatttttaaaaagtcaaaggagaaacaaagtcaagaatcaagaatgtacaggagactgggggg

SEQ ID NO: 172159 - DNA, 120 bp, Artificial Sequence
  ENSG00000109339_109 (sequence is synthesized)
tggggcggtctgaatttgcctatttgggctttcagatcttggcactaccaatagctggtattaaaatccctttcccttccctcactagaaggaattgcaagttgctgccttaggtttttg

SEQ ID NO: 172160 - DNA, 120 bp, Artificial Sequence
  ENSG00000109339_110 (sequence is synthesized)
acttctctaagtccatggaggaggcctgcctagcaccctggtgctgccctcccaccaatgggaggaaggttatcatgcagaaaaacctgcttgctcccacatcaggcatgccctgctgtc

SEQ ID NO: 172161 - DNA, 120 bp, Artificial Sequence
  ENSG00000109339_111 (sequence is synthesized)
ccctgcacctagccccgccttccttccccatggaacaattcggccaaatgattctgcccaaaagttccctttgtccataatgaaaagcaagttggaaaggggtaaagattggtaagagaa

SEQ ID NO: 172162 - DNA, 120 bp, Artificial Sequence
  ENSG00000109339_112 (sequence is synthesized)
ggcaaagcatgttttcctaacaagtttgacaatttggaaataaatatatgtacataacaatttttaacacctttaatacttttttcactttccttccagatgactcctttatacatgtgc

SEQ ID NO: 172163 - DNA, 120 bp, Artificial Sequence
  ENSG00000109339_113 (sequence is synthesized)
taattcatcatatgtcttttttcttgaaatatttcaaatggaaactaaaactgatgtttatttacaagaataaacttctgaaggaaaagctaagtcccaaataccaggaattccaattct

SEQ ID NO: 172164 - DNA, 120 bp, Artificial Sequence
  ENSG00000109339_114 (sequence is synthesized)
tttgcctctaaaccatggttccagtcatttcctggtttattggatttggttgaatttatcttgttttgccccggccccctggccccctgaaaaaaaaggtggtctcttgttgccctattc

SEQ ID NO: 172165 - DNA, 120 bp, Artificial Sequence
  ENSG00000109339_115 (sequence is synthesized)
tctgtaactgaatagaatagaaaatgaaaatagccaactctacaagttaatattgttttctatgcatccggaaaatgacacagaaaaccctttggtggcttttagctgtcacctgccatg

SEQ ID NO: 172166 - DNA, 120 bp, Artificial Sequence
  ENSG00000109339_116 (sequence is synthesized)
gagatacttttggtttagctattgcttttctcagtcaccaatgtcaccactttgtggcactgctgagaggcaatgtaaggcacccacaaagtaatgggtttttaaacattaatttgagtt

SEQ ID NO: 172167 - DNA, 120 bp, Artificial Sequence
  ENSG00000109339_117 (sequence is synthesized)
ctcatactaaacactgtttatgtaatagcatagcgctggtttgaattcacattttggccaacttttggtgggaggtgaaaattgtacttttaatcaaactgttctttttcctcctccttc

SEQ ID NO: 172168 - DNA, 120 bp, Artificial Sequence
  ENSG00000109339_118 (sequence is synthesized)
agaagtcaattatcttagttaactttactttcctcccttttcttcactaccctctctctcctgttctagtggatatatggtctgtgggatgcattatgggagaaatggttcgccacaaaa

SEQ ID NO: 172169 - DNA, 120 bp, Artificial Sequence
  ENSG00000109339_119 (sequence is synthesized)
ttccttactataatagccatttttgaaaggtctgtgtcctaaaggggttgcatcactcttattgagtgactcttttagtttttcacaaaaactattgcttttggagtattggacggggta

SEQ ID NO: 172170 - DNA, 120 bp, Artificial Sequence
  ENSG00000109339_120 (sequence is synthesized)
gcaaaaacttgatagctcttctttgcgcttaaaccggtgccagccagtgtagcccctcagcctcctctttctctacctcatggtgatttatttttccaagagccttttttttttctttcc

SEQ ID NO: 172171 - DNA, 120 bp, Artificial Sequence
  ENSG00000109339_121 (sequence is synthesized)
atatcacttggcctgaattggagctaccctagccgccatggtagatctcccaaagcctaaatatcaggaagaagaggtcagagaatttatttgagattccactttccagtaggcacgcag

SEQ ID NO: 172172 - DNA, 120 bp, Artificial Sequence
  ENSG00000109339_122 (sequence is synthesized)
gccctctgtccgtctcctctggtaggttccacaatggtacaggcagcatcacgctgcacaatggtttccaggcagtgaaagaggtctggaatgtggttaatgaaaaacaagtagggagga

SEQ ID NO: 172173 - DNA, 120 bp, Artificial Sequence
  ENSG00000109339_123 (sequence is synthesized)
ctcatggagtctcaaagttcctatgtcaaatcgcctcgcaaaagcaaaactgagtggtgccaggggaagaattttaaaagcagctcaaaggttcctggtgattcgactgtattttataaa

SEQ ID NO: 172174 - DNA, 120 bp, Artificial Sequence
  ENSG00000109339_124 (sequence is synthesized)
actatttacatttctctttttggtcatgacaaagtctattggcacaaacagcacagccacaaagtattcttctgattttaataactcatatatttatatatatatttatatttttgctta

SEQ ID NO: 172175 - DNA, 120 bp, Artificial Sequence
  ENSG00000109339_125 (sequence is synthesized)
tcttcatttcctcagcaaaaaagggaaataaaaatattgatctataaaataagccgatgataacacaatgccaaaaatagcttatgttaagtgcaaggggtgaagcttgaaagcaagcta

SEQ ID NO: 172176 - DNA, 120 bp, Artificial Sequence
  ENSG00000109339_126 (sequence is synthesized)
aattgcaacaacatattgatttaacatttaaatacaagacttgcaataaaataattcttgaaatatgcttctcatttttagtttacttttgaaaaactactctatatacacatatccagt

SEQ ID NO: 172177 - DNA, 120 bp, Artificial Sequence
  ENSG00000109339_127 (sequence is synthesized)
tgtaacacttgacagtagcattatggggcatgatataactttggtacacattgcagatatggatgtttaatgtctgtaaatgatattccttcaccagttagacttctgtacatccaggtg

SEQ ID NO: 172178 - DNA, 120 bp, Artificial Sequence
  ENSG00000109339_128 (sequence is synthesized)
accagccacctggttctaagtcatatcccaccagaatccctggagtccttgccagagccatcagagacagcaggcgaaagcaggctcactgaatccatattgtgtttcctctctcggttc

SEQ ID NO: 172179 - DNA, 120 bp, Artificial Sequence
  ENSG00000109339_129 (sequence is synthesized)
tcctgggttccactgtcagttctccaaacgtggaaaaaaactgctccatttctttctgtagcatgtcatttcttttctcggcatcttcttttgctcgctcggcatttcgcatttttattt

SEQ ID NO: 172180 - DNA, 120 bp, Artificial Sequence
  ENSG00000109339_130 (sequence is synthesized)
ctatcattgtgaactttttcctctcctgatccagttcatcatggaggctcatcatttctgtttccaaagtcaagtttcgctgttctaagctacaaaggatgttggggggggtggggggtg

SEQ ID NO: 172181 - DNA, 120 bp, Artificial Sequence
  ENSG00000109339_131 (sequence is synthesized)
gggacgcaagagtaagagataaagtgattttattcacttgaaatgcaagagacatacaaatattttctaaactctttatgatgcttaggaaattggaataaagccctttcaatgatttaa

SEQ ID NO: 172182 - DNA, 120 bp, Artificial Sequence
  ENSG00000109339_132 (sequence is synthesized)
aggatgtaattttgttgtattattttactgtttgctaagatgatttactgtcaccttagtcattaggtcccaaggcctctcttggaagcagctgtcatttaatagtaaataagtgaatgc

SEQ ID NO: 172183 - DNA, 120 bp, Artificial Sequence
  ENSG00000109339_133 (sequence is synthesized)
cagcacagataagccagtaacacatgccgggcagacgaggcagaaagcttcctggacattaaattgtaaagttcactacactaaatgcagcaggaaagtctgatagttaacaaaaaaaaa

SEQ ID NO: 172184 - DNA, 120 bp, Artificial Sequence
  ENSG00000109339_134 (sequence is synthesized)
aaaaaaagagggcaataacatttgccttctataaaaggaaaaatagtgataggaaaatgtcattgttggttaagttcactgctaagaatggggtttttggcagcatatagagtcccatct

SEQ ID NO: 172185 - DNA, 120 bp, Artificial Sequence
  ENSG00000109339_135 (sequence is synthesized)
tataaaagagtacccaaagtaatgagcttacattgatacgagaggtaaagatcacatgtgttaaataagcactgcatctcatattttgtaaaaataaagcccattcctttccatccccaa

SEQ ID NO: 172186 - DNA, 120 bp, Artificial Sequence
  ENSG00000109339_136 (sequence is synthesized)
aagtgagttaatatgaaatgcatagcttttgaagaagattaataaatagacacacatatgctaccactcaggttaaaaaatagaccattaccaatactttcaaatatttttatgtgctcc

SEQ ID NO: 172187 - DNA, 120 bp, Artificial Sequence
  ENSG00000109339_137 (sequence is synthesized)
acctaccacaaccttccttttccacacagagttagccacagttctaaatatttctttttactatctctgtgactttccttatgtttttactacctgcatatttatccttaagcaatctat

SEQ ID NO: 172188 - DNA, 120 bp, Artificial Sequence
  ENSG00000109339_138 (sequence is synthesized)
ggtttagttttatttattttacataccatactgtcatcgttatcttgtgactcactttttaaaaaattaacattatattttttagatttattcctgttcatggactggacatagttaact

SEQ ID NO: 172189 - DNA, 120 bp, Artificial Sequence
  ENSG00000109339_139 (sequence is synthesized)
cattttcattgctgaatagtatttcagtctatgagtatctataactaacccattatcctataagtagactttggaatatatacggattttactgtttttttttttcttttataaaccatg

SEQ ID NO: 172190 - DNA, 120 bp, Artificial Sequence
  ENSG00000109339_140 (sequence is synthesized)
gtactataaatatatgcttataagagcacatgtgcaaggttttcttaataacaatgccaggggtcataggcatacacattttaaactttgctgtgtaacatcaaattgatttctagagta

SEQ ID NO: 172191 - DNA, 120 bp, Artificial Sequence
  ENSG00000109339_141 (sequence is synthesized)
gtatgtagctgtctgctccacatcctcatcaacttttgccattgtcatatttatttttaaatttgttaccaatcccttggatataaaatactatttcactggaggtttaatttacatttc

SEQ ID NO: 172192 - DNA, 120 bp, Artificial Sequence
  ENSG00000109339_142 (sequence is synthesized)
cttgtctacaagggaggctaaggatcttttcctgtgttcattggccactattattttcccttggtaaaatatcttttttataaacaaagaatgaacacatttttttctattgtgcttttt

SEQ ID NO: 172193 - DNA, 120 bp, Artificial Sequence
  ENSG00000109339_143 (sequence is synthesized)
ttttctgttgattagtagacattccttatataatttggcacctaatttttgtgagttttatgtgttgcaaatatcttcttgtatttggattattttcccattttattttataatagtttt

SEQ ID NO: 172194 - DNA, 120 bp, Artificial Sequence
  ENSG00000109339_144 (sequence is synthesized)
agaagttggcaatctgtcttttcctataatttatatgttttatgtcttaagaatccttttataacattatattgtgctataactttactggaaatattttaaagtttagtctcttacatt

SEQ ID NO: 172195 - DNA, 120 bp, Artificial Sequence
  ENSG00000109339_145 (sequence is synthesized)
taaaccattagtccacatggaattgatttttttgtgtatgtgtgaaagaaggacctactttattccagtttcatttattgactaacttactctttcttcacagatctataattctgtctc

SEQ ID NO: 172196 - DNA, 120 bp, Artificial Sequence
  ENSG00000109339_146 (sequence is synthesized)
tctaataagtttccacatatttgcagggggatgttaagtcctgggctgtatattctgttccactggtttgtttgtctatctctgcaccatgaacaccctttcttaatgaatataaatgta

SEQ ID NO: 172197 - DNA, 120 bp, Artificial Sequence
  ENSG00000109339_147 (sequence is synthesized)
tgctctgcacttatattaggtaaggtaaatacctttcatttttgtcatcttcagaattatcttgactcttaatgcaccattgctcttctattaagattttagaattggcttactaacttt

SEQ ID NO: 172198 - DNA, 120 bp, Artificial Sequence
  ENSG00000109339_148 (sequence is synthesized)
atgattcttttaatctttcttctcaacataaaaggatcttggcacatgttcatttagatagttgttgtcctgacttaaatatgctatcgatgttcagtattttagttttctttttaggct

SEQ ID NO: 172199 - DNA, 120 bp, Artificial Sequence
  ENSG00000109339_149 (sequence is synthesized)
cataaattgacaatattatgatttttttgcataaaggtagtttgtttagattcacccttatgattgccatttgtttggcttaccactacttcttacattttgaccttttattttgagatt

SEQ ID NO: 172200 - DNA, 120 bp, Artificial Sequence
  ENSG00000109339_150 (sequence is synthesized)
attatttttttctcccgaagtacgtattttggaagtatctttagtggagtccttgataataaaactcttatttttaattgaggttcccttacctgaaatatagtttagttagatatagaa

SEQ ID NO: 172201 - DNA, 120 bp, Artificial Sequence
  ENSG00000109339_151 (sequence is synthesized)
ttttacattgaaatttattttatttttggcatcttaaagatattattctacttgctttttgtttacagtattgctggtaaataaagagttgtcagtgtaatagtcattttaggagataat

SEQ ID NO: 172202 - DNA, 120 bp, Artificial Sequence
  ENSG00000109339_152 (sequence is synthesized)
ctgctcttttccttcatttgggatttttttttttggtctttgattatctgctgtttctctactacgagactaggcatggatttctttttatttatcttccttgagagtcattgtttccta

SEQ ID NO: 172203 - DNA, 120 bp, Artificial Sequence
  ENSG00000109339_153 (sequence is synthesized)
gattccaacctttattcaattactggaatttctcagctgtcgtttcttcgaatattttatttttttcattctttatattatgtgtgtacaaaactctggacataaaatagacattcattt

SEQ ID NO: 172204 - DNA, 120 bp, Artificial Sequence
  ENSG00000109339_154 (sequence is synthesized)
ataacataaatatttttgagtacctactatgtactgggtactttttgtctccagagatatattagtaaacaaaacagataaaaattcttattaccatgatacttacattaaaaggtgcag

SEQ ID NO: 172205 - DNA, 120 bp, Artificial Sequence
  ENSG00000109339_155 (sequence is synthesized)
aatactagaagaaggtgataatagctgcagagtaagagagaccaaaagaccaaaatgctagcatgggggcagggattacttctatcttcctttttaaatttaaatatcaaaagttttttc

SEQ ID NO: 172206 - DNA, 120 bp, Artificial Sequence
  ENSG00000109339_156 (sequence is synthesized)
agctatgctttaagtggcaggttttcttacctcatataagcttgattgcctcttcttaacttccattgtatgtagtgttatatacagaagtgaaagtatctttcccgatttggtcttaca

SEQ ID NO: 172207 - DNA, 120 bp, Artificial Sequence
  ENSG00000109339_157 (sequence is synthesized)
gaacagagtacagtgtccttaaatttctcttaagtagattctatatttctgttcgtgtaggctgtttgtatcagcttctttgtttataattatttaccaaattgaaaaggactttaatat

SEQ ID NO: 172208 - DNA, 120 bp, Artificial Sequence
  ENSG00000109339_158 (sequence is synthesized)
ttttcagctttaaaatagagatgccaaattacatgatctccaaggcctcttctcattttcaaaatactatcacaggctgagagaatcaaatccagcatttttgaggtcagaatatcatac

SEQ ID NO: 172209 - DNA, 120 bp, Artificial Sequence
  ENSG00000109339_159 (sequence is synthesized)
tatgacccagccgaagtggaggcgaaaacctgtgacgcattatgaggctcagagattctccctgctcactttagtctacggactgcatttgattatgagacacaaatcttgtgtccactt

SEQ ID NO: 172210 - DNA, 120 bp, Artificial Sequence
  ENSG00000109339_160 (sequence is synthesized)
tgattacaattcacaaatttctttgtcctgttctttaaaatcatagtatatgatatatctgtccagaaatcattgtattctaccaagaactagatgccattaaagattgagagaaaatca

SEQ ID NO: 172211 - DNA, 120 bp, Artificial Sequence
  ENSG00000109339_161 (sequence is synthesized)
cacgcagctctctaaattgactcagctccaggttcaaaccactaggacagcatttgccacattattgttccactaatgaaccacctcagtggtatttatgagcctccatttcttatacta

SEQ ID NO: 172212 - DNA, 120 bp, Artificial Sequence
  ENSG00000109339_162 (sequence is synthesized)
agttcctggtgtagcacctggcacacagatggcactctaaagtttataaatgaataatgtctgatgaaaacatcaaagctactttctagatttgtggagattgcccagataaatgaagtc

SEQ ID NO: 172213 - DNA, 120 bp, Artificial Sequence
  ENSG00000109339_163 (sequence is synthesized)
atctaaagcctattggctctggggctcagggcatagtttggtctcaagaaagcaccaacctgtgagccaaaggagccatcttaatgtctttaggtcattaattttatacatagcatgttc

SEQ ID NO: 172214 - DNA, 120 bp, Artificial Sequence
  ENSG00000109339_164 (sequence is synthesized)
tttactacaaggctactttgagagtcactgtgtcactgttgggcttctggcataaataaagttaacataatatactcaataaactctttcactccttagctaactccaacatcatccaga

SEQ ID NO: 172215 - DNA, 120 bp, Artificial Sequence
  ENSG00000109339_165 (sequence is synthesized)
cactgatgctcatccaagttgccatgtagatttataagaagaatcttgttaagataaaataactaaacataaataatactttaaattttattgccatgaaatggccaaaggtaggaatgt

SEQ ID NO: 172216 - DNA, 120 bp, Artificial Sequence
  ENSG00000109339_166 (sequence is synthesized)
cctcttcaaccagaagcacagtgcccttgagcagcaggggagcatatcacttatatctaaaagggaatattttgtcaatgaaagtacatgctaaaatatattatattgatggtcgtaaaa

SEQ ID NO: 172217 - DNA, 80 bp, Artificial Sequence
  ENSG00000109339_167 (sequence is synthesized)
atgaattgcctaattttttttaatgagaagaataattactgtggtacatctcatgtatattaatctgctgaaatttctga

SEQ ID NO: 172218 - DNA, 120 bp, Artificial Sequence
  ENSG00000109339_168 (sequence is synthesized)
tacatctcatgtatattaatctgctgaaatttctgatatttttctgaagtcagctttttaatatgaatttattattcttaagttttaatgaaacttctgggaatcttcaaaattgcttgt

SEQ ID NO: 172219 - DNA, 120 bp, Artificial Sequence
  ENSG00000109339_169 (sequence is synthesized)
tatggttaataaatttgaaatattgacacatttaatatatataacaatatttttatttgaaaaatgttctcaaaaggggcttaggtatctgctaagaacaaattttgctaaattgaaaat

SEQ ID NO: 172220 - DNA, 120 bp, Artificial Sequence
  ENSG00000109339_170 (sequence is synthesized)
attctttttattaattgaaaatatttttaattctaatgtatttttgcattgtaatgtaaaagtatttgagtccaaggtttttcacagacactgagctttcccccccttcatttagtgttc

SEQ ID NO: 172221 - DNA, 120 bp, Artificial Sequence
  ENSG00000109339_171 (sequence is synthesized)
cattatccaagaaataacttcataataccacacttgccaaatagattgcctaaatttatggcttttttaatggtttgccaaatttagatgcagaaaaattataggcctttaaaatcatat

SEQ ID NO: 172222 - DNA, 120 bp, Artificial Sequence
  ENSG00000109339_172 (sequence is synthesized)
ttcaatcctgcacagaatataaatatttggaaattagaaattacaccaggtgccacatagaatataaatagatcatacaattcagaactttatctaaagactgttctcacaaattaagat

SEQ ID NO: 172223 - DNA, 120 bp, Artificial Sequence
  ENSG00000109339_173 (sequence is synthesized)
attctaaagtatgattatggaatctcaaaatcaaatcttatcctgtctttgagaatgcattatttcatttgatttgttcagttaatttcttgctttagtccatttcagcacattcttgtg

SEQ ID NO: 172224 - DNA, 120 bp, Artificial Sequence
  ENSG00000109339_174 (sequence is synthesized)
ggcttcaagttgcaagttttgttaataataatagctattccttaaaagtttcaagagctgaatactgggatgctccatttgtgaaatactatgattaaacatttccaagtaaatttgcaa

SEQ ID NO: 172225 - DNA, 120 bp, Artificial Sequence
  ENSG00000109339_175 (sequence is synthesized)
aaaaaaagcacccaaagtttagaggacttatgtataaaaagttatttttcaatagtaagtatgagaaatgccaagaaaatatgccgattgctatgttaaagtattttcatttttttaatt

SEQ ID NO: 172226 - DNA, 120 bp, Artificial Sequence
  ENSG00000109339_176 (sequence is synthesized)
ttcgcaaactgcttggcagtaatttaacaacttaaagccaaggcccatgtcttgtcccttacgtttgtgtttgggtttatggtttagaactcctgtttattgcctacatgaaaatagact

SEQ ID NO: 172227 - DNA, 120 bp, Artificial Sequence
  ENSG00000109339_177 (sequence is synthesized)
tgaatggatcatccagcagaagtggctgcaggcaaggaggcatttattatagcgcaatagagggagtcatacagaagcaaatagttttcatctaatagtggtggactggttaacatttaa

SEQ ID NO: 172228 - DNA, 120 bp, Artificial Sequence
  ENSG00000109339_178 (sequence is synthesized)
caactatatttaaaaaaagaattgactagtagcacttaacaattcctgtggtataaatattctcactgtgaccaattttaagcaacaatgtaacatcaatggatgcagagttggaaagag

SEQ ID NO: 172229 - DNA, 120 bp, Artificial Sequence
  ENSG00000109339_179 (sequence is synthesized)
atgctaataattcgttctaagaagccactaaaagccagctccaggacaccatagacagtgcacggttctctcccaccatcacactggatagcaaggaaccattcccatgaaacaagcaga

SEQ ID NO: 172230 - DNA, 120 bp, Artificial Sequence
  ENSG00000109339_180 (sequence is synthesized)
tgtcatgggaacttttacaaaggaagcactgaagacttctcttaatgaatttgtgccatataaaatcagaagcaatagtctatggatccctagaaatacagctgataaagactttgatag

SEQ ID NO: 172231 - DNA, 120 bp, Artificial Sequence
  ENSG00000109339_181 (sequence is synthesized)
attttgaactttgagtagttgaacactaattatatttgcattcaacattgataaactagagggcaggaccattccaacacagaggataggaattagagagaagctgctgatgaacaaaag

SEQ ID NO: 172232 - DNA, 120 bp, Artificial Sequence
  ENSG00000109339_182 (sequence is synthesized)
gagaagaaagacaactgcaacaaagtgatttcctttggccaaaaatagcttaacagtttcactagttggaaagcaggaaggaacttgcttttcctcacagaacctatctagaagagtaca

SEQ ID NO: 172233 - DNA, 120 bp, Artificial Sequence
  ENSG00000109339_183 (sequence is synthesized)
cataagatactcaatactgttttgttaactcgaatacttactctgtgctactactcagcagtagacattgtggaagacaggagaaatgaagtataatgaaagcagtaaaaagaagcaggg

SEQ ID NO: 172234 - DNA, 120 bp, Artificial Sequence
  ENSG00000109339_184 (sequence is synthesized)
gaaatatatgcttgaggtaatccataacaaaactacatataataaggggctgactggtatggcataacactcggaatattccagaagtgtgctgaaaatatgctgattttgaaaataagt

SEQ ID NO: 172235 - DNA, 120 bp, Artificial Sequence
  ENSG00000109339_185 (sequence is synthesized)
gcagtaggagtgctgtgtgttttataagcatagcctgcagcacgatcctgtttatgaagagcttattaaaagctactttggcttttgttacatacattcaatattatttgtagatataaa

SEQ ID NO: 172236 - DNA, 120 bp, Artificial Sequence
  ENSG00000109339_186 (sequence is synthesized)
tttgtgttttggagaaatttcttcaatgctctttgtttaatttctctagctgccattgttgtgggtttgtgtttatttgtaaacatcaaattgttttactataagggagccttatttcag

SEQ ID NO: 172237 - DNA, 120 bp, Artificial Sequence
  ENSG00000109339_187 (sequence is synthesized)
ctaagacttatctcacccttatttgaatcattactcaactttaattgtgacaataagaatgtgtctacataatcaactccagccaggataggggaaaaagcctatctcaagagaagacca

SEQ ID NO: 172238 - DNA, 120 bp, Artificial Sequence
  ENSG00000109339_188 (sequence is synthesized)
gaagaccaagattattattaaagacttaaaaatactttttggtttgtattatgccacaattttattttaaaactttttaaagttttaaaactggttattttctcataaaaccagttattt

SEQ ID NO: 172239 - DNA, 120 bp, Artificial Sequence
  ENSG00000109339_189 (sequence is synthesized)
gaattattgctttggaagaaaacctcacatctccacaagaccttgcttcccaaataagacatgtcagaagatgctgataatcctcacttctgcattacaaatcgctcataggtgcatctg

SEQ ID NO: 172240 - DNA, 120 bp, Artificial Sequence
  ENSG00000109339_190 (sequence is synthesized)
caggatcttacttggatccagagtgctagctgcaaaagcttctgggaattgtacacttaactctgaagttttatctttaatataggaagtgccgcgtatgatgctgtccttgacagaaat

SEQ ID NO: 172241 - DNA, 120 bp, Artificial Sequence
  ENSG00000109339_191 (sequence is synthesized)
aaaatgtgtctgtacttgagtaagaaaggctttctttgctttgcaattcctgcctcttaagattgtttatcctgccaatatgctacattcgatttcattgtcctcatggtagctttctgc

SEQ ID NO: 172242 - DNA, 120 bp, Artificial Sequence
  ENSG00000109339_192 (sequence is synthesized)
ttaaaaatcacctaaaaaccatatgatgtggaagtgatgaattttataaatatttccctagttagaaaatttaccatatttggttatcttgctccaaattgagagcttcaagaaagaaac

SEQ ID NO: 172243 - DNA, 120 bp, Artificial Sequence
  ENSG00000109339_193 (sequence is synthesized)
aagacaagcaaagccaaaagccagaaaaaaaaaacctacaaagcaccatgctacatttctttataatttagatttaatttagatttataatttagatttaattgccaacggttgagtttt

SEQ ID NO: 172244 - DNA, 120 bp, Artificial Sequence
  ENSG00000109339_194 (sequence is synthesized)
gatccagcaattcttccctgaaccatataattttatacaggttgactctaaatatcacataataggcacttttcatcataagcattggctaaaaatttgatttttctttaaaaaaaacct

SEQ ID NO: 172245 - DNA, 120 bp, Artificial Sequence
  ENSG00000109339_195 (sequence is synthesized)
agggactttaaatataatatgtaaatgcaaaaatatatgtagatgacagcattctgtgcaatatagtttcaatttgtattttttgcaatgaataactttgtacatgtgtcattttgcatg

SEQ ID NO: 172246 - DNA, 120 bp, Artificial Sequence
  ENSG00000109339_196 (sequence is synthesized)
tttgaacatatctgtaagacacctgatgatttttgacaaatgtgtatactcctgaaaacaccacctaatcatgatatagaaaagtgacacttatgcctctttggagtcagttccctgccc

SEQ ID NO: 172247 - DNA, 120 bp, Artificial Sequence
  ENSG00000109339_197 (sequence is synthesized)
gtaactctggcccatagcatccttgatgtgctttctgtctctatagttttgcctttttttacaatttcatataaatggaataatacagtatgtagactttcatgtctaggtattttccac

SEQ ID NO: 172248 - DNA, 120 bp, Artificial Sequence
  ENSG00000109339_198 (sequence is synthesized)
ttagcataacacttttgacatttatgttgctacatgtagcagttcgttctttttattgtcaaatagtattacttgctgtagatgtgccacagtttatctattcactagctgatggagaat

SEQ ID NO: 172249 - DNA, 120 bp, Artificial Sequence
  ENSG00000109339_199 (sequence is synthesized)
tggtctgtttccagtttggggctaatatgaatagtgttgatatgaacatgtggctgcaagccttgggtgaacatatgttttctttttccttgggtaaatgtttagcacatggttctgctg

SEQ ID NO: 172250 - DNA, 120 bp, Artificial Sequence
  ENSG00000109339_200 (sequence is synthesized)
ggttttacggttactgcatatttaagttagtaagaacctacctaattcttttgtgaattggccctaacattttgtatttctagcagccaaacttggtatattttcagtcttaactttaca

SEQ ID NO: 172251 - DNA, 120 bp, Artificial Sequence
  ENSG00000109339_201 (sequence is synthesized)
ctttgtaagaaatgtgtagagacatctcattatggtttacattttagtttttctaatgactaaagatgctgagcatccttccatgtattatttgctatttgtgtatcttctttgatgatg

SEQ ID NO: 172252 - DNA, 120 bp, Artificial Sequence
  ENSG00000109339_202 (sequence is synthesized)
tgtatatttcaaatctttcgccactttttcattgagttgactgccttgttttgcatgagttctttacatattcttaaaacaagttatttatcagatagtgatttgcaaatgtagtctcca

SEQ ID NO: 172253 - DNA, 120 bp, Artificial Sequence
  ENSG00000109339_203 (sequence is synthesized)
tttccaaaaaggcttgactttttgaaaagtgtcaattttgacaaagtccaacttatcaaataattttttaaaaaaatatttttatagttagagccttttgtgtcctgagtcttcactagc

SEQ ID NO: 172254 - DNA, 120 bp, Artificial Sequence
  ENSG00000109339_204 (sequence is synthesized)
acaacgtcataagatttctttaaaattattttcttctatatatcttatacttttaactcctacatttaggtctgtgatccattttaagttttttgtatgtgatgtgaggcaaggattgag

SEQ ID NO: 172255 - DNA, 120 bp, Artificial Sequence
  ENSG00000109339_205 (sequence is synthesized)
gtaatttatttatattttttagggctatgaaattgttccagcatcatttggggaaatgaccttcccctttccattgaaataccgtggtacattggtcaaaaatcaaatgactacacatat

SEQ ID NO: 172256 - DNA, 120 bp, Artificial Sequence
  ENSG00000109339_206 (sequence is synthesized)
ttctggactatctgttctatttcattgatctgtgtgtccatctttatatcaatagcacacttttaattatgtgtgactttatactaagtcttgaaatcaagttgtatatattcaactgtt

SEQ ID NO: 172257 - DNA, 120 bp, Artificial Sequence
  ENSG00000109339_207 (sequence is synthesized)
atttcctttcaaattatttgtgctattctagatagcttttatttccctgtaaaacttataatcagattgtcaatctctacaaataaaaattctgatggaatatttttgtgacaattatat

SEQ ID NO: 172258 - DNA, 120 bp, Artificial Sequence
  ENSG00000109339_208 (sequence is synthesized)
taaaactataggtcaattttagaaaaattaatagcttaataatattgagtattctaatacatgagcagggtatatttccacatttatgtagttcttatttgtttgttagtgtttagtagt

SEQ ID NO: 172259 - DNA, 120 bp, Artificial Sequence
  ENSG00000109339_209 (sequence is synthesized)
tttcagagtgtgtcttatacatgctttcttaaatttctccctaaatattttaaatttatgagtgttgttctaaacaataattttatttcaattctaattgtccaatgtagtatgtagaaa

SEQ ID NO: 172260 - DNA, 120 bp, Artificial Sequence
  ENSG00000109339_210 (sequence is synthesized)
ctctctctcctgcgttgccgtggtaaggtgaacttgcttccccttcaccttctgccatgactggaagtttcctgaggcctcccagccatgcttctgtgcagcctgatgaactgtatttat

SEQ ID NO: 172261 - DNA, 120 bp, Artificial Sequence
  ENSG00000109339_211 (sequence is synthesized)
aatggatttgctgtatttttaaagggaacacaccgtgtgcaactactagacacaaacacacaaacaaacaaaatccccaaaataaatagcataatttgggagggaaaaataatcctactg

SEQ ID NO: 172262 - DNA, 120 bp, Artificial Sequence
  ENSG00000109339_212 (sequence is synthesized)
aagaaaaaaaaataacattatgagcattatgtttaatttgttatccacttgctaacaatatatacaacttggcttgtgacatgttttttttttggtcagagaaaaaaagttattacacaa

SEQ ID NO: 172263 - DNA, 120 bp, Artificial Sequence
  ENSG00000109339_213 (sequence is synthesized)
ttgtcacctttatcttctattttgatttgtagaatattgcaatttatttggacccaatgtgaattatatttgcaccacaacaaattcagagtccatttctactccatacatttcttattg

SEQ ID NO: 172264 - DNA, 120 bp, Artificial Sequence
  ENSG00000109339_214 (sequence is synthesized)
tgataagaatactgtttttagtgtaattatgttcagcaaaaattttttgtgtgttatcactgaaaaaataagtaacctatcttcaatgtcaacattttcaactaaaattgttatactttt

SEQ ID NO: 172265 - DNA, 120 bp, Artificial Sequence
  ENSG00000109339_215 (sequence is synthesized)
tacactattgtcagattttaaactttgatagaatgaccttccatagctttattttgagtcattgaattggattaaaaaatcaaactagtattgaaatatattaattttatgtttgaggca

SEQ ID NO: 172266 - DNA, 120 bp, Artificial Sequence
  ENSG00000109339_216 (sequence is synthesized)
tatgataaaatgaaataaagtagccataacttaaatgtttataaaattattttctgctagtagaggcagcacattaacaactgttgcttaacttatggtacatatatttaagaagttggg

SEQ ID NO: 172267 - DNA, 120 bp, Artificial Sequence
  ENSG00000109339_217 (sequence is synthesized)
agttgaatagaatgaacagcatgctttctgtcattcttaggttgttttgttctgactgacatgacctaaaagtaagtacatgtggaagaaggtcattatggaacttactggtaatttatt

SEQ ID NO: 172268 - DNA, 120 bp, Artificial Sequence
  ENSG00000109339_218 (sequence is synthesized)
gccccaaatgggtcaaaaccacctttaatgagaatcactggcatagattgtttaattttcagtcactgggattggggaggaacccacagaaaatgtgggtgcttaaaacctgaacaaaat

SEQ ID NO: 172269 - DNA, 120 bp, Artificial Sequence
  ENSG00000109339_219 (sequence is synthesized)
cagcaagaagggtgactgctgggaaggcatccaccagtgtatgccacaggaatgggctagatgatattctgtgaggtcccttctagctatagaattcttactatttatgtcataagtaca

SEQ ID NO: 172270 - DNA, 120 bp, Artificial Sequence
  ENSG00000109339_220 (sequence is synthesized)
gacacattcttttttcagcatttagggggagttgagagaagctatggcaagccatctcaccattaaatctcctctacaccactgctgccctggctcagacccttaccatctctcagggaa

SEQ ID NO: 172271 - DNA, 120 bp, Artificial Sequence
  ENSG00000109339_221 (sequence is synthesized)
gccattgcaattccttccctattggtcctccccacagtgtgacttatcagacacactgaaatcagagtaaattttctagaatagattagaccatatctcttccttgcttacatgcatcca

SEQ ID NO: 172272 - DNA, 120 bp, Artificial Sequence
  ENSG00000109339_222 (sequence is synthesized)
gtaggtacttccataaagccgacattttaaagcacagtagtcaagtcacatagtcttgccagcctcatcttctgcccctgtgaacccgagaccctgcttgttccccaaacaagccatgtt

SEQ ID NO: 172273 - DNA, 120 bp, Artificial Sequence
  ENSG00000109339_223 (sequence is synthesized)
ctttcatgtgtttccttttgactggaatgttctctacttgttaactccagcctctgactgggtaaggcacatacattttgcaatgtcattgcctctgtgaaggtcttcctggagtttccc

SEQ ID NO: 172274 - DNA, 120 bp, Artificial Sequence
  ENSG00000109339_224 (sequence is synthesized)
acacccaacaaaaatattgctgtattttcttggtcccagtagctctacaacatatctttattatagcccttaacatttattgtaattttgaaatgtctacttccctttgactgagaaatt

SEQ ID NO: 172275 - DNA, 120 bp, Artificial Sequence
  ENSG00000109339_225 (sequence is synthesized)
ctcaagggtaaggctgttttcttcttgctggtcctctgacatgctgcatgaacacagtatttatgagcctccatttcttatactactgcagtgaaccaacattggatgtgaaaattgcct

SEQ ID NO: 172276 - DNA, 120 bp, Artificial Sequence
  ENSG00000109339_226 (sequence is synthesized)
atgtggtgacacgttattacagagcccctgaggtcatcctggggatgggctacaaggagaacgggggatgttaagtcctgggctgtatattctgttccactggtttgtttgtctatctct

SEQ ID NO: 172277 - DNA, 120 bp, Artificial Sequence
  ENSG00000109339_227 (sequence is synthesized)
ttcaccggaaaacacagtagctgtagctgcacatagacgcttcctctttctgtttccccctcatccccctccctagacctctctgggctttgacgtcatgtgtgctcctttcggttgcca

SEQ ID NO: 172278 - DNA, 120 bp, Artificial Sequence
  ENSG00000109339_228 (sequence is synthesized)
gtcaggtgtgtgttccttacaggtaaaacaaggtacagtatattcccttgtatttccactttgacataccatttgcatacattccacaccaaagtcagtatttatatcatattaacagta

SEQ ID NO: 172279 - DNA, 120 bp, Artificial Sequence
  ENSG00000109339_229 (sequence is synthesized)
gtttagaattaggagctggcaagacggctgaatagaaacagccccagtctccagctcccagcaagatcaacgcagaagacgagtgatttctgcatttccacgtgaggtacctggttcatc

SEQ ID NO: 172280 - DNA, 77 bp, Artificial Sequence
  ENSG00000109339_230 (sequence is synthesized)
gagtgatttctgcatttccacgtgaggtacctggttcatctcactgggaaaggttagatgtcgcctcacccaggaag

SEQ ID NO: 172281 - DNA, 120 bp, Artificial Sequence
  ENSG00000109339_231 (sequence is synthesized)
ccatgaggaactgtgccatgaggaatggtgcactctggcgcagatgctacactttttcgatggtcttcgcaacctgcaggttccctcaggtgtctacaccgcaagggtcctgggtttcaa

SEQ ID NO: 172282 - DNA, 120 bp, Artificial Sequence
  ENSG00000109339_232 (sequence is synthesized)
gcacaaaatgggcggccgtttgggcagacaccaagctagctacaagagattcttttcataccccagtggtgcctggaacaccagcgagacagaaccattcaccccccctggaaagggggc

SEQ ID NO: 172283 - DNA, 79 bp, Artificial Sequence
  ENSG00000109339_233 (sequence is synthesized)
attctcactgacagcacagcagtatgaagtcgacctgggatgctcaagcttggttggggggaggggcgtctgccattac

SEQ ID NO: 172284 - DNA, 120 bp, Artificial Sequence
  ENSG00000109339_234 (sequence is synthesized)
atgctcaagcttggttggggggaggggcgtctgccattactgaggcttgagtagacggttttcccctcacagtgtaaacaaagatgctggaaagttcgaactgggcagaggccaccacag

SEQ ID NO: 172285 - DNA, 90 bp, Artificial Sequence
  ENSG00000109339_235 (sequence is synthesized)
aagatgctggaaagttcgaactgggcagaggccaccacagctcagcaaagccagtgtagccagactgcctctctagattctgcctgtctg

SEQ ID NO: 172286 - DNA, 81 bp, Artificial Sequence
  ENSG00000109339_236 (sequence is synthesized)
ggagcagcagatctcccagcacagcaatcaagctctgctaagggacagactatctcctcaagtgggtccctgaccccacac

SEQ ID NO: 172287 - DNA, 89 bp, Artificial Sequence
  ENSG00000109339_237 (sequence is synthesized)
gagcagcagatctcccagcacagcaatcaagctctgctaagggacagactatctcctcaagtgggtccctgaccccacacctcccagca

SEQ ID NO: 172288 - DNA, 120 bp, Artificial Sequence
  ENSG00000109339_238 (sequence is synthesized)
gacagaagtaggcttcagaaggtgggtaaaaacaaactcccccaagctaaaggagcatgttctaactcaatgcaaggaagttaagaaccttgaaaaaaggttaaaggaattcctaactag

SEQ ID NO: 172289 - DNA, 66 bp, Artificial Sequence
  ENSG00000109339_239 (sequence is synthesized)
aaaggagcatgttctaactcaatgcaaggaagttaagaaccttgaaaaaaggttaaaggaattcca

SEQ ID NO: 172290 - DNA, 74 bp, Artificial Sequence
  ENSG00000109339_240 (sequence is synthesized)
aggactatgtgaaaagaccaaacctatgtttgattgatgtacctgaaagtaacagggagaatggaaccaagttg

SEQ ID NO: 172291 - DNA, 79 bp, Artificial Sequence
  ENSG00000109339_241 (sequence is synthesized)
acattcatatcaccaaccccaagatatataatcatcaggttcaccaaggttaaaatgaaggaaaaaatggtaagggcag

SEQ ID NO: 172292 - DNA, 69 bp, Artificial Sequence
  ENSG00000109339_242 (sequence is synthesized)
ttacaagagctcctgaagggagcactaaatacggaaaggaacagttggtaccagccactgaaaaaacat

SEQ ID NO: 172293 - DNA, 120 bp, Artificial Sequence
  ENSG00000109339_243 (sequence is synthesized)
gggctaaatgccccaatcaaaagacacagactggcaaattggattgagttaaaattggatagagtcaagacccgtcggtgtgctgtattcaggatacccatctcacatgcaaagacacat

SEQ ID NO: 172294 - DNA, 120 bp, Artificial Sequence
  ENSG00000109339_244 (sequence is synthesized)
acacacacacacacacacacagagttgaaatcccttatactgctcaaagagaggtaagaggtggggtcaaatgaaaggggtccagtgatatgtaaagaagattctgtttgtggggttact

SEQ ID NO: 172295 - DNA, 120 bp, Artificial Sequence
  ENSG00000109339_245 (sequence is synthesized)
tgtggggttacttcctggaaagacattctgcctccttttggccttgtggctttatatactttgttgttccatgctcttggtcactcagggaaggcttatttatttatatttattaataga

SEQ ID NO: 172296 - DNA, 120 bp, Artificial Sequence
  ENSG00000109339_246 (sequence is synthesized)
gttgggacttcctaccaacaactgagcagtcagataacctctcaaactatgactatcagacacaaggctgagggctgattcaagttatttatcggcagaagaattacacaattttaagca

SEQ ID NO: 172297 - DNA, 120 bp, Artificial Sequence
  ENSG00000109339_247 (sequence is synthesized)
aaatagctatcaccatataattttataactgttactgcccacaaccataaaattaattatgataacctttacataatatagagtttctcattagtgtctggtgtagcattagactggctt

SEQ ID NO: 172298 - DNA, 120 bp, Artificial Sequence
  ENSG00000109339_248 (sequence is synthesized)
cagtctttaactactggatttcatcaagtcatgattccattgattaaaaatacctgatgattacagaatgttaaaataaaattcagtagttgaatgatattatttctatcacttcaattc

SEQ ID NO: 172299 - DNA, 120 bp, Artificial Sequence
  ENSG00000109339_249 (sequence is synthesized)
agtagttgaatgatattatttctatcacttcaattctttgattgtttttatgtatataagaaatttgtggctgggagcagtggctcactcctttaatcccagcattttgggaggctgagg

SEQ ID NO: 172300 - DNA, 88 bp, Artificial Sequence
  ENSG00000109339_250 (sequence is synthesized)
gaggtgggaggatctttgagcccagagttcgagaccagcttgggcaatgtagggagatcttatctttacaaaaaaaaagaaagaaaga

SEQ ID NO: 172301 - DNA, 120 bp, Artificial Sequence
  ENSG00000109339_251 (sequence is synthesized)
gaagctgggatgggaggatcctttgagcgcaggagttccaggctgcagtgagctgtgatcattccactacactccagcctggcaacagagggataccctgtctcaaaaataaataaataa

SEQ ID NO: 172302 - DNA, 120 bp, Artificial Sequence
  ENSG00000109339_252 (sequence is synthesized)
aagaaaaatttgtatgatacaaactcttaagtcaatttatatactaaaattctgataattccgttgtataaataagaatatagagacacacgtgttgattaacttcaaacagccgtccac

SEQ ID NO: 172303 - DNA, 120 bp, Artificial Sequence
  ENSG00000109339_253 (sequence is synthesized)
acatttgttgaacatcatgcatttgcactctgtgctctttattctgtttatcctatattcatgcaggttaccaaagaagatgactttgcttacataaactctccaggttgatacatttta

SEQ ID NO: 172304 - DNA, 120 bp, Artificial Sequence
  ENSG00000109339_254 (sequence is synthesized)
ctaagaagtttgcgtgaataattatatacccaaagtgttacaacccttggagagcctcagaatgaagccttaggcttagagacacaaagaaacaggtgtaaaatgcattttcttttccat

SEQ ID NO: 172305 - DNA, 120 bp, Artificial Sequence
  ENSG00000109339_255 (sequence is synthesized)
attctatggtatttcatgaaaaataaaaaggttgatttgatctcaattttttttatattgaggactagtactatggtctgttgagaaatataaacttttctttagggaaggtctaaaaat

SEQ ID NO: 172306 - DNA, 120 bp, Artificial Sequence
  ENSG00000109339_256 (sequence is synthesized)
agaacaaaatcttattagcctagaagaattttagcatggttctgttataaggcaagtgaatgaaggaaaagtagcttctgggccattgtaatcaagtgttttgtctgttttttaaaagac

SEQ ID NO: 172307 - DNA, 120 bp, Artificial Sequence
  ENSG00000109339_257 (sequence is synthesized)
cagtcattaattgcttaggcgtgggttctaaatcagaagatgtcggaaagtgagctctcgggatttgcgttctgctgcaaatattgcagcaatattgggtcagcagcaaatattgcaata

SEQ ID NO: 172308 - DNA, 120 bp, Artificial Sequence
  ENSG00000109339_258 (sequence is synthesized)
tgaatgaatcctccataagtttacaggaaaattttaacttctgaactactgtaatttcctcataacttatatacggttgaaatcaccgaaataaatgagggcaaggtattctcgtgcatt

SEQ ID NO: 172309 - DNA, 120 bp, Artificial Sequence
  ENSG00000109339_259 (sequence is synthesized)
ggaagacatcttttagtttggaagatggagtgacagccctatcattccctttgtgcgctctctgcctctcctgtgatggaatttaaatttatttaaaatatttgaccttgtcaagacatc

SEQ ID NO: 172310 - DNA, 120 bp, Artificial Sequence
  ENSG00000109339_260 (sequence is synthesized)
aaatgtgtagtagcacactacttaattaaataagcattatgtaggatattgaaataatgttgcccttcaaagacctgtattcaatacaagaatgaaacttataaatgtttaaacatttgc

SEQ ID NO: 172311 - DNA, 120 bp, Artificial Sequence
  ENSG00000109339_261 (sequence is synthesized)
aaaaaaaaaagatagtaattctgggggaagtgttggctagtacaagacagacattttactgtggcatggtggctcggactgaagaaaaaattcatattttttaaaaaatgagataaaagt

SEQ ID NO: 172312 - DNA, 120 bp, Artificial Sequence
  ENSG00000109339_262 (sequence is synthesized)
gagataattttttggggggtgagataatctgtgctaaaaaaaaattaaaggtatccctgtttggtaaacttcacttggaatattcaaagtctccaagatttgtaaaatttaatgaaatat

SEQ ID NO: 172313 - DNA, 87 bp, Artificial Sequence
  ENSG00000109339_263 (sequence is synthesized)
tattcaaagtctccaagatttgtaaaatttaatgaaatatttgactttaggctgggcacagcgtaaggtagggggatatcttgagcc

SEQ ID NO: 172314 - DNA, 120 bp, Artificial Sequence
  ENSG00000109339_264 (sequence is synthesized)
cagtgagccatgatcacatcactgtactccagtctgggcaacagagcgagatggattccctactaaatgaaataaaaagacttacagtccttgtatattacatgcattcctgctgcacag

SEQ ID NO: 172315 - DNA, 120 bp, Artificial Sequence
  ENSG00000109339_265 (sequence is synthesized)
atataaagaggctcttaaagttgatttaagaacactgaaagtaatataacaaggaacaaggttgttaaatacttacagtgtagatttaaaatcaagtaattgtgtgtattttctgcacca

SEQ ID NO: 172316 - DNA, 120 bp, Artificial Sequence
  ENSG00000109339_266 (sequence is synthesized)
ctggatgtttatacaattgttagcataaactgtgtgttccatttttcattagcaattttatctccctactgaatgctagacttttagttgttatttgttatagcttaatttgtttcccaa

SEQ ID NO: 172317 - DNA, 120 bp, Artificial Sequence
  ENSG00000109339_267 (sequence is synthesized)
cagtgaaaagagatatggacttgtagattttcagctatttcatcttacaaagctagtgtaacctgactacagatgactccaggggtatattactttaaaaggaatttggactattactca

SEQ ID NO: 172318 - DNA, 120 bp, Artificial Sequence
  ENSG00000109339_268 (sequence is synthesized)
gtgaacagtagaggaccgaggggcatgagacctgaggggcagttgaaacaccatcaaggcagagcctgtgataaaggctttaggttttattccagttgcagcaggaaaccagggaggcag

SEQ ID NO: 172319 - DNA, 120 bp, Artificial Sequence
  ENSG00000109339_269 (sequence is synthesized)
ggaagtgatatgctctgatttatggtttagaattgtcatttggttgctgtgtggacattaagactgagatagaaagcaactaggagcctcttgcaagaattcaggtgaaagatgataaag

SEQ ID NO: 172320 - DNA, 120 bp, Artificial Sequence
  ENSG00000109339_270 (sequence is synthesized)
gttggaatcaagatgtcacagtaaagatggtgagaagatggtgtgtatctttgtggtagagtggacatgacctgctgaagaatcctatgtggagtatgggggaagacaggaaccaaggat

SEQ ID NO: 172321 - DNA, 120 bp, Artificial Sequence
  ENSG00000109339_271 (sequence is synthesized)
agagagacagactctcagtctttgctaccagtgtctgaacttatcggtacatagttatcttgccggtagccccacattccaggtggtggaaaagcaaatatgcgaatcaagttccagaaa

SEQ ID NO: 172322 - DNA, 120 bp, Artificial Sequence
  ENSG00000109339_272 (sequence is synthesized)
taatcaatcttgatgatcccattgcttttaagagagacatgcaaggaatgctctacaaatatagcacatggaatgtggaagctgctctataaataataaatattttgtattgttctacaa

SEQ ID NO: 172323 - DNA, 120 bp, Artificial Sequence
  ENSG00000109339_273 (sequence is synthesized)
caagctgtggtagctttgggaatctttcttctaggtcagcagaatagatgcatcattcccccagtctattctaaactaagctaaaagcccgacgattcatcagtatttatgagcctccat

SEQ ID NO: 172324 - DNA, 120 bp, Artificial Sequence
  ENSG00000109339_274 (sequence is synthesized)
ttcttatactactgcagtgaaccaacattggatgtgaaaattgccttttgtcaggtgtgtgttccttacaggtaaaacaagagattcttttcataccccagtggtgcctggaacaccagc

SEQ ID NO: 172325 - DNA, 120 bp, Artificial Sequence
  ENSG00000109339_275 (sequence is synthesized)
tcactctccgtgaataaccaataaactagtacttgtgtaatttcttggcctttgtgtaggggttgcaagaaataacataacattgcttaaagagcagatggacaaatatcacatggttgt

SEQ ID NO: 172326 - DNA, 120 bp, Artificial Sequence
  ENSG00000109339_276 (sequence is synthesized)
gtccttataatgattttagttttatttcttttgatattcagtgtggcattcattctgattattctgatggtaatgatccagtacaaaaactttttcataaataattttaatagtaatgaa

SEQ ID NO: 172327 - DNA, 120 bp, Artificial Sequence
  ENSG00000109339_277 (sequence is synthesized)
tcctgaagaaaatgttaacatgggctaaagggtaaatgtgcctcatcaaaattcagagccataatgcccttttgaccatcaagtcaatgtggagctcagtaatcctttcagccgctacct

SEQ ID NO: 172328 - DNA, 120 bp, Artificial Sequence
  ENSG00000109339_278 (sequence is synthesized)
tgtgacaatagttgaaacatctaccaagatgggctccggttaaggtcagcttggaaaatttttcgtttgctagccacagaatctaatacacaattgtgcatatatattttttactgatcc

SEQ ID NO: 172329 - DNA, 120 bp, Artificial Sequence
  ENSG00000109339_279 (sequence is synthesized)
tagtaatgtgctttagtatgacttgagacaatttacttattaatgctaatatattttttcctaagacctatgctctcactataaagagttttagaaaatgtgatggtttattttcagctt

SEQ ID NO: 172330 - DNA, 120 bp, Artificial Sequence
  ENSG00000109339_280 (sequence is synthesized)
taaaaactacattcaactcctgctagcaaaaatgggggctacaaatgcctagttttgagaaaaactgattagggtgttgttttcctaaattattttaggaaaaaagatgtagaatgaaat

SEQ ID NO: 172331 - DNA, 120 bp, Artificial Sequence
  ENSG00000109339_281 (sequence is synthesized)
aattaatcaattattcatatcgatactactcttcgaataactaatttacaccccaaaccactatgatacccaaacagatgcaattcggttatgacatgcttttctcaccagtagacttga

SEQ ID NO: 172332 - DNA, 120 bp, Artificial Sequence
  ENSG00000109339_282 (sequence is synthesized)
aaaaatactcagttttatcccaagtttttcccttcctcaaagaaggttaagggaatcacaggagttgttttccataccaccctctctactcattcaccctcgcatacagattgacacagt

SEQ ID NO: 172333 - DNA, 120 bp, Artificial Sequence
  ENSG00000109339_283 (sequence is synthesized)
ccacagaagctgcttcaaactaatccacgtttggcctgttgctcattaaaaaacttgaagacagaatccaaaagcctcaagatgccacctgctaaggcagaatgactccttgttttaaga

SEQ ID NO: 172334 - DNA, 120 bp, Artificial Sequence
  ENSG00000109339_284 (sequence is synthesized)
attcctataatgaccagaacatattgtcatgtactcattaagcagcagaaataacagaatgtagccacgggtaacctagcatgttaggctgggcctggacaaattttagtagaacctatt

SEQ ID NO: 172335 - DNA, 120 bp, Artificial Sequence
  ENSG00000109339_285 (sequence is synthesized)
ctattcatcttcagttcaagttatcattacttcatttccttttcataccaccttatcccaaaagactttttatatcttcccaaataataggatctttcctttctataggtcctactagtc

SEQ ID NO: 172336 - DNA, 120 bp, Artificial Sequence
  ENSG00000109339_286 (sequence is synthesized)
cctgtatgttaaatatttgacctcttgtcttattatcccgtattgattgtaatttcattgagaagactgtatgcatttatctttgtgtcccatgtagtgcctgggtgctgtgccttgcac

SEQ ID NO: 172337 - DNA, 120 bp, Artificial Sequence
  ENSG00000109339_287 (sequence is synthesized)
atagtagtagctcagtaaatatatattaatttgaaaattgccactcaatttctccctcagcatatttcttagtactattccaaacacaaaattcaagacaagatcatgtaactttaatac

SEQ ID NO: 172338 - DNA, 120 bp, Artificial Sequence
  ENSG00000109339_288 (sequence is synthesized)
agtatactattcagcatgttcttacaccattattataaatatttattcactctattaatctccatgaagataaacaggccaagcataaagtatataaattcttgctattggcattttttc

SEQ ID NO: 172339 - DNA, 120 bp, Artificial Sequence
  ENSG00000109339_289 (sequence is synthesized)
atgcttcacataaaggtttgcagctttcaggtgtttgatttattcattttgggaaatatatattcatggatgttttgcaggcctgcttagtgtgttaatgattaattctaaaatatgcaa

SEQ ID NO: 172340 - DNA, 120 bp, Artificial Sequence
  ENSG00000109339_290 (sequence is synthesized)
cttaggctctacctgagtgagaaggctaagccactttttaaccattccaactaccttaacaattaaaaattatctatgtaatacatatgccctaaactatagttgactggcttaaccaat

SEQ ID NO: 172341 - DNA, 120 bp, Artificial Sequence
  ENSG00000109339_291 (sequence is synthesized)
ttatagttaaaatgattgtggattaaatctaggaaaaatattcatgacttagttataagtcatgtagtatgactttctctttcgtgagaaatcatatgtatgctacacattatgggatgc

SEQ ID NO: 172342 - DNA, 120 bp, Artificial Sequence
  ENSG00000109339_292 (sequence is synthesized)
atttctgtatgacatatttatgtgcatgatggagaggctctagggcagccatgtgctggcgctgactctaccagctcatgacggccaactctgtacctctcttcccaactatgcatttat

SEQ ID NO: 172343 - DNA, 120 bp, Artificial Sequence
  ENSG00000109339_293 (sequence is synthesized)
tgttggtgtgttggcaacgtgaaatcaggcacgaaggatttacaacatggaaattggcagaccctacaaatcagggcgtttttgttgccccctgcagagccaattgttaaatttttattg

SEQ ID NO: 172344 - DNA, 120 bp, Artificial Sequence
  ENSG00000109339_294 (sequence is synthesized)
gcgcaccactgtgtgtatgcgtttttgtgtgtataataaactatgctggaaagaaaaagcaattctaaaaaaaagtttgaaaagtcagcttttttgcattgttcattatattcagctttt

SEQ ID NO: 172345 - DNA, 120 bp, Artificial Sequence
  ENSG00000109339_295 (sequence is synthesized)
tttcattaatgttcacgtagcatattttattttgaaaatagctgtggtatttttataacacacactctgttagtattcagttatggcaatactgggaattctgcagcaagggagtaagtt

SEQ ID NO: 172346 - DNA, 120 bp, Artificial Sequence
  ENSG00000109339_296 (sequence is synthesized)
aatgcagtatctcaggggccaagtacttctaatacgaaacccatgttatgcgatgcttttaaaatgtaaataggaagttaaatgtgcatttgcagaataatttataggtttgaaatttat

SEQ ID NO: 172347 - DNA, 61 bp, Artificial Sequence
  ENSG00000109339_297 (sequence is synthesized)
aaaaaccccatctgaaggtcatcagcatcaaaaaccaaaggtagataaatccacaaagatg

SEQ ID NO: 172348 - DNA, 75 bp, Artificial Sequence
  ENSG00000109339_298 (sequence is synthesized)
cacgaaggtctgcagcttcactcctgaccccagtgagaccacgagcccactgggaggaacgaaaagctccagact

SEQ ID NO: 172349 - DNA, 85 bp, Artificial Sequence
  ENSG00000109339_299 (sequence is synthesized)
gtcagttcctcaagtgttaaagctagaattactctatgccccagcaattccacttctaggtgtatacccaagagaaatgaacaca

SEQ ID NO: 172350 - DNA, 120 bp, Artificial Sequence
  ENSG00000109339_300 (sequence is synthesized)
aattccacttctaggtgtatacccaagagaaatgaacacatgtccatacaaaactcgtgcatgaatgttcataacagcattatttgtaatagccaaaaagttgaaacaacctaaatatcc

SEQ ID NO: 172351 - DNA, 120 bp, Artificial Sequence
  ENSG00000109339_301 (sequence is synthesized)
atcaaatgcctatcaactaataaataaacaaaatgtgatgtatccatacaatggaatattatgcagccatacaaagatatgaaatacagatacatgccacagcatggataagccttaaaa

SEQ ID NO: 172352 - DNA, 120 bp, Artificial Sequence
  ENSG00000109339_302 (sequence is synthesized)
tttataaattgactgtgctttatgtgatctttatatatttgcgtattagttatattagttttatttgtcgattacaaagaattttcgacatagatgttcatgttgactgtgaataaagag

SEQ ID NO: 172353 - DNA, 120 bp, Artificial Sequence
  ENSG00000109339_303 (sequence is synthesized)
ttggatgtgaaaattgccttttgtcagtaggttaagaagaatgtccactttggttctgagttctaaaaccagttctaatctggagtgtatcattcaattcctcttttgttcatcttctct

SEQ ID NO: 172354 - DNA, 120 bp, Artificial Sequence
  ENSG00000109339_304 (sequence is synthesized)
gtttattatataaagaaacaattgaatatgttcttcctgaagtttagctgatgaattttatctttcctatgaattggtattatatattttatgagattaataaatcaaaacctgccactc

SEQ ID NO: 172355 - DNA, 120 bp, Artificial Sequence
  ENSG00000109339_305 (sequence is synthesized)
ggctatggagatgaaattagaggcgcagggttggtgtgtggagatgggtattgacagtcaattctcccagataatataacaggtatttatgagcctccatttcttatactactgcagtga

SEQ ID NO: 172356 - DNA, 120 bp, Artificial Sequence
  ENSG00000109339_306 (sequence is synthesized)
taatcattgagttataattgcaaagtaatattattctacattaggtagcattgggtagtgttgttatttctgttatatgacagaaaagggccttgagagcctatgttctcccctttccac

SEQ ID NO: 172357 - DNA, 120 bp, Artificial Sequence
  ENSG00000109339_307 (sequence is synthesized)
aatatcaaagctaagtatatgctaattgataccttgactacttccaggactctgcagaaatttcaaaaaacaatcagaggttctcatgtctttcacctagaattattcagagtaatttat

SEQ ID NO: 172358 - DNA, 120 bp, Artificial Sequence
  ENSG00000109339_308 (sequence is synthesized)
attaaattactttgaggctgaaaaatgatgtgataatactatcataataatcaacatttttcttctctcttcacagaacttttaaacttgaaccctaagcaaaaatagtaaaatgtcttg

SEQ ID NO: 172359 - DNA, 120 bp, Artificial Sequence
  ENSG00000109339_309 (sequence is synthesized)
aacttttaaacttgaaccctaagcaaaaatagtaaaatgtcttgacaaatcagagaatcttatgaaattgtcattgatgactgaagtttaactactttcccacattcaaactatctttgc

SEQ ID NO: 172360 - DNA, 120 bp, Artificial Sequence
  ENSG00000109339_310 (sequence is synthesized)
attttgagaaacatcgtgggggtttcttggtggttgatatgatctagatgatatcacagggaattgtcttggttactgaattagaatgttggcaaaataaaattgaacaaaataaacaat

SEQ ID NO: 172361 - DNA, 120 bp, Artificial Sequence
  ENSG00000109339_311 (sequence is synthesized)
ttcctccaactcttcttcatcctcctagcatgtagaatattcttatgccagtcactcatatctttacttaaagcctgattggcatgtgaccagagtagacagtatctaagattccgaaat

SEQ ID NO: 172362 - DNA, 120 bp, Artificial Sequence
  ENSG00000109339_312 (sequence is synthesized)
gacagtcatcatatgtaatgagcaagatcaagctatggtcagatgaataatttcgaaaaggcagcctgcaaaggacaaaagtacaggagagatgctggaacaaaacgcgctgggtaggat

SEQ ID NO: 172363 - DNA, 120 bp, Artificial Sequence
  ENSG00000109339_313 (sequence is synthesized)
gccttcatcaaaaggagcatcctgcattggcgatacgcactgaggatctggcaagaatgccaatgaggaacatgaagcccagataatgaggtcagactggttataatcaccagcccattc

SEQ ID NO: 172364 - DNA, 120 bp, Artificial Sequence
  ENSG00000109339_314 (sequence is synthesized)
gtgaaaatgataatacaattcttttctgggattaaaacactttccaaaaactaatagttaacttatttgtagcagtaatcatttgccttatttagagctctgtaggcaagggggacctca

SEQ ID NO: 172365 - DNA, 120 bp, Artificial Sequence
  ENSG00000109339_315 (sequence is synthesized)
tcagtgctactgcaaaatggctatgttgattgagtcaatggaaataacatttcacttgatactggcttttaattttttcccttatccttactgttaggatttaaaaccaagtaacattgt

SEQ ID NO: 172366 - DNA, 120 bp, Artificial Sequence
  ENSG00000109339_316 (sequence is synthesized)
atatattccaaaaatcgtaaaaaaggaaaatgtcaaatttgacactactgctttcataaagaaaacttaatgttcatgaacactttaaaatgaaggctatggaaggaatcttaaaaatgt

SEQ ID NO: 172367 - DNA, 120 bp, Artificial Sequence
  ENSG00000109339_317 (sequence is synthesized)
gttatagttacatactttaaggttcttatttggatgaggaaacacagtagttcctgtttacatagtgaagagaagttccatagagtcaatgtgagtcaatatgtaggatgcctttctaag

SEQ ID NO: 172368 - DNA, 120 bp, Artificial Sequence
  ENSG00000109339_318 (sequence is synthesized)
tggtttcaacaataaaatagattgcctagtgagtggtgagattcctccactggaaagatttctttattatagatgtaaatatataatataattatgtaaatttaaaataaataaaccttt

SEQ ID NO: 172369 - DNA, 120 bp, Artificial Sequence
  ENSG00000109339_319 (sequence is synthesized)
tccaaagatatttaattcccaaatataattttaatatattatttaatacatgatgatttgatatgtaaataatatttattggggacttgctatgtaccaggcagttgtgcaaggatcttt

SEQ ID NO: 172370 - DNA, 120 bp, Artificial Sequence
  ENSG00000109339_320 (sequence is synthesized)
atcagacataactttttcaagtcttttataaaactctacataataaatacagcttatcatcaatattttaggggataaaattgaggtttagagagaagtaacctggccaaggtcacatag

SEQ ID NO: 172371 - DNA, 120 bp, Artificial Sequence
  ENSG00000109339_321 (sequence is synthesized)
ttggaaagtaatagaattggttctctagcagaaaaagatgaatatattgccagagatattgtaaaaaacaattttatactaaatgagaaatagaaatagatgtttcctaagtcccagaca

SEQ ID NO: 172372 - DNA, 120 bp, Artificial Sequence
  ENSG00000109339_322 (sequence is synthesized)
acaatatctataaaatatagataatccataaatagcaatttagtcaaactggtctctttggacagtatgataggaatacttggaatttaaaaataaatatgttttccgtttttttcttta

SEQ ID NO: 172373 - DNA, 120 bp, Artificial Sequence
  ENSG00000109339_323 (sequence is synthesized)
atcaaagatttctcaataccatcctgttgtgagacagatattacttgaaattacaaacacgttaataataaagggatgcacaactgtttgctctatctttccctgatatttctgcatgtc

SEQ ID NO: 172374 - DNA, 120 bp, Artificial Sequence
  ENSG00000109339_324 (sequence is synthesized)
agttgctttcctaaactggaagcaaaacaaatttgcttctttgggtatgcttatcaccttcaaagccgtaaccgtttctttgcagtgatcactttgtttaggtgttaaatcaaacaatgg

SEQ ID NO: 172375 - DNA, 120 bp, Artificial Sequence
  ENSG00000109339_325 (sequence is synthesized)
aaactttgagtttaacccgagtgagattttcacattggaatgaatctcatgaggatctctttaaggtcactgccaaattacaagatgtaatttgaaaattgacatgtggtcagtagggtg

SEQ ID NO: 172376 - DNA, 120 bp, Artificial Sequence
  ENSG00000109339_326 (sequence is synthesized)
gaggagttccaagatgttgtcattgattttgtgcaaagtctacccagtagtgacaacagatggaggagaggaagtgattccctagcaccttgtctttaatacagatacattgaatttaat

SEQ ID NO: 172377 - DNA, 120 bp, Artificial Sequence
  ENSG00000109339_327 (sequence is synthesized)
ggaagaagctgtccttaatttttttcttatttgaaattataatattcacaaaagagttgagggaatacaggggaaagtgaaagcaaaattaagttacttagtaatggaactgatggatgc

SEQ ID NO: 172378 - DNA, 120 bp, Artificial Sequence
  ENSG00000109339_328 (sequence is synthesized)
cctatttctctgtgggaaggcagggctcagaaaaatgtgacaaacgtcacagtggaactgtgctgtgtcaaaccacaagtggtgcctccatacgaagggattcgataaacaagtggatgt

SEQ ID NO: 172379 - DNA, 120 bp, Artificial Sequence
  ENSG00000109381_0 (sequence is synthesized)
attgctcccagcgccaagctctgtgtcgccgccgtcgcctaggcggttgggggtcggtggggcggcgcgggcgggggtcgctgcgcggggcggcgagcctctgttttgtctccttctctc

SEQ ID NO: 172380 - DNA, 120 bp, Artificial Sequence
  ENSG00000109381_1 (sequence is synthesized)
cctgtggagcggctcgggctgctggggaggccccggctccctccggacgctcggccaacggcggcggctagtccgcggccctgctgagagggaaaaggacgccgcggtcttcccaggcgt

SEQ ID NO: 172381 - DNA, 120 bp, Artificial Sequence
  ENSG00000109381_2 (sequence is synthesized)
cgcggagagcagttccaaagaactactggttcagattttagctcttcccaagttgtgaaaatagtgaaggatgcttagactacttaacatacaaactgctttctggttaatcatctttag

SEQ ID NO: 172382 - DNA, 120 bp, Artificial Sequence
  ENSG00000109381_3 (sequence is synthesized)
aagactggatttctggatatctactccactccatctctattgacttttaaaacatgataatgcaaacctataacactggcaaccatcagtgaacctttaatttcattgattaatagcgtt

SEQ ID NO: 172383 - DNA, 120 bp, Artificial Sequence
  ENSG00000109381_4 (sequence is synthesized)
tgaagcttcctcagggaataacaatgacatcagcagtggttgacagtggaggtactattttggagctttccagcaatggagtagaaaatcaagaggaaagtgaaaaggtttctgaatatc

SEQ ID NO: 172384 - DNA, 120 bp, Artificial Sequence
  ENSG00000109381_5 (sequence is synthesized)
cagcagtgattgtggagccagttccaagtgccagattagagcagggctatgcagcccaggttctggtttatgatgatgagacttatatgatgcaagatgtggcagaagaacaagaagttg

SEQ ID NO: 172385 - DNA, 120 bp, Artificial Sequence
  ENSG00000109381_6 (sequence is synthesized)
agaccgagaatgtggaaacagtggaagcatcagttcacagcagtaatgcacactgtacagataagacaattgaagctgctgaagccctgcttcatatggaatctcctacctgcttgaggg

SEQ ID NO: 172386 - DNA, 120 bp, Artificial Sequence
  ENSG00000109381_7 (sequence is synthesized)
attcaagaagtcctgaattcatccatgctgctatgaggccagatgtcattacagaaactgtagtggaggtgtcaactgaagagtctgaacccatggatacctctcctattccaacatcac

SEQ ID NO: 172387 - DNA, 120 bp, Artificial Sequence
  ENSG00000109381_8 (sequence is synthesized)
cagatagccatgaaccaatgaaaaagaaaaaagttggccgtaaaccaaagacccagcaatcaccaatttccaatgggtctcctgagttaggtataaagaagaaaccaagagaaggaaaag

SEQ ID NO: 172388 - DNA, 120 bp, Artificial Sequence
  ENSG00000109381_9 (sequence is synthesized)
gaaacacaacctatttgtgggagtttcttttagatctacttcaagataaaaatacttgtcccaggtatattaaatggactcagagagaaaaaggcatattcaagctggtggattcaaagg

SEQ ID NO: 172389 - DNA, 120 bp, Artificial Sequence
  ENSG00000109381_10 (sequence is synthesized)
ctgtctctaagctttggggaaagcataagaacaaaccagacatgaactatgaaaccatgggacgagctttgagatactactaccaaaggggaattcttgcaaaggttgaaggacagaggc

SEQ ID NO: 172390 - DNA, 120 bp, Artificial Sequence
  ENSG00000109381_11 (sequence is synthesized)
ttgtatatcagttcaaggatatgccgaaaaacatagtggtcatagatgatgacaaaagtgaaacctgtaatgaagatttagcaggaactactgatgaaaaatcattagaacgagtgtcac

SEQ ID NO: 172391 - DNA, 120 bp, Artificial Sequence
  ENSG00000109381_12 (sequence is synthesized)
tgtctgcagaaagtctcctgaaagcagcatcctctgttcgcagtggaaaaaattcatcccctataaactgctccagagcagagaagggtgtagctagagttgtgaatatcacttcccctg

SEQ ID NO: 172392 - DNA, 120 bp, Artificial Sequence
  ENSG00000109381_13 (sequence is synthesized)
ggcacgatgcttcatccaggtctcctactaccactgcatctgtgtcagcaacagcagctccaaggacagttcgtgtggcaatgcaggtacctgttgtaatgacatcattgggtcagaaaa

SEQ ID NO: 172393 - DNA, 120 bp, Artificial Sequence
  ENSG00000109381_14 (sequence is synthesized)
tttcaactgtggcagttcagtcagttaatgcaggtgcaccattaataaccagcactagtccaacaacagcgacctctccaaaggtagtcattcagacaatccctactgtgatgccagctt

SEQ ID NO: 172394 - DNA, 120 bp, Artificial Sequence
  ENSG00000109381_15 (sequence is synthesized)
ctactgaaaatggagacaaaatcaccatgcagcctgccaaaattattaccatcccagctacacagcttgcacagtgtcaactgcagacaaagtcaaatctgactggatcaggaagcatta

SEQ ID NO: 172395 - DNA, 120 bp, Artificial Sequence
  ENSG00000109381_16 (sequence is synthesized)
ccatggtacacctgtaatgagactatcaatgcctactcagcaggcatctggccagactcctcctcgagttatcagtgcagtcataaaggggccagaggttaaatcggaagcagtggcaaa

SEQ ID NO: 172396 - DNA, 120 bp, Artificial Sequence
  ENSG00000109381_17 (sequence is synthesized)
aaagcaagaacatgatgtgaaaactttgcagctagtagaagaaaaaccagcagatggaaataagacagtgacccacgtagtggttgtcagtgcgccttcagctattgcccttcctgtaac

SEQ ID NO: 172397 - DNA, 120 bp, Artificial Sequence
  ENSG00000109381_18 (sequence is synthesized)
tatgaaaacagaaggactagtgacatgtgagaaataaaatagcagctccaccatggacttcaggctgttagtggcagtactgacataaacatttgcaagggaagtcatcaagaaaagtca

SEQ ID NO: 172398 - DNA, 120 bp, Artificial Sequence
  ENSG00000109381_19 (sequence is synthesized)
aagaagactttaaaacatttttaatgcatatacaaaaacaatcagacttactggaaataaattacctatcccatgtttcagtgggaaatgaactacatattgagatgctgacagaaaact

SEQ ID NO: 172399 - DNA, 120 bp, Artificial Sequence
  ENSG00000109381_20 (sequence is synthesized)
gcctcttacagtaggaaacaactgaacccatcaataagaaaaaggatcgaaagggaccaagcagctcactacgatatcaagttacactaagacttggaacactaacattctgtaagaggt

SEQ ID NO: 172400 - DNA, 120 bp, Artificial Sequence
  ENSG00000109381_21 (sequence is synthesized)
tatatagttttcagtgggaggggttgggatgggtaatctcattgttacatatagcaatttttgatgcattttatatgcataccagcaattattactgtgttcgcacagttctcacttaac

SEQ ID NO: 172401 - DNA, 120 bp, Artificial Sequence
  ENSG00000109381_22 (sequence is synthesized)
tggtgctatgtgaagactctgctaatataggtattttagaatgtgaattgaagaatggatcccaaaaacttcagaaagaggatagcaaaaaaagatctagtgcgattttatatatatata

SEQ ID NO: 172402 - DNA, 120 bp, Artificial Sequence
  ENSG00000109381_23 (sequence is synthesized)
tatatatatatacatacatatatatatatcatatagcttaagctgatttaaaacaaaggccttagactaattttcgattttctttcttgaaataagctaatggcttgtttgtgtaaagct

SEQ ID NO: 172403 - DNA, 120 bp, Artificial Sequence
  ENSG00000109381_24 (sequence is synthesized)
tttttattaaaagaaaaattttaaaaatcttgtacctagcacagtattgttatagaatatacatgtaacattttatatggtagtttaagtctgtcagtttcttaattgtggacaaattaa

SEQ ID NO: 172404 - DNA, 120 bp, Artificial Sequence
  ENSG00000109381_25 (sequence is synthesized)
cagttggctctggccttttgctgtaacatgcctgtgtcactcacttagccttggcatttgtgcagacataccattttcagttctgctgtcacttggaagttcaggctcagcatgaatttt

SEQ ID NO: 172405 - DNA, 120 bp, Artificial Sequence
  ENSG00000109381_26 (sequence is synthesized)
tctttgtttttttttcttttttttagttgaagtttatgagggaaataccagtgttcagttttgaactataatagtttgtatattcaacatttgaagtatattctattttgttgtactctt

SEQ ID NO: 172406 - DNA, 120 bp, Artificial Sequence
  ENSG00000109381_27 (sequence is synthesized)
gaagtatattctattttgttgtactcttgtttcaaagtgtattcaagtaggttttctgaaatatagaaatgaaatttatcttctgttttggtctctggtgatattttaaacaatatttaa

SEQ ID NO: 172407 - DNA, 120 bp, Artificial Sequence
  ENSG00000109381_28 (sequence is synthesized)
aagtcagtatagaagtgttttagttaggaagtgataaaacatctctcttctccttcccaactactgcatgaagaaattctacttccattatattaatatttggcaaatatctgcatgttg

SEQ ID NO: 172408 - DNA, 120 bp, Artificial Sequence
  ENSG00000109381_29 (sequence is synthesized)
ccagtttctttctaattatgatgaactataatgttctgcttaacgtaatgaatttagtattttagttggctgcacttaaagaatttatatttgtaaaacactttaaaccatttgtttcac

SEQ ID NO: 172409 - DNA, 120 bp, Artificial Sequence
  ENSG00000109381_30 (sequence is synthesized)
aatcagaccttttgtggattaaaaagaacaattactcttctagcccttttacagattaggaagttaaggtatctgaaggattacataaactatgtaattttactactgtctgtcactcca

SEQ ID NO: 172410 - DNA, 120 bp, Artificial Sequence
  ENSG00000109381_31 (sequence is synthesized)
tatcttaatgctctttctactacaaagaaaagttatctatttttacatgttttagaaatgtagatgaactcatacataatattttttgtcttttaattgatcacatactacttaggtcag

SEQ ID NO: 172411 - DNA, 120 bp, Artificial Sequence
  ENSG00000109381_32 (sequence is synthesized)
aaattgtttataacagttccctttgtaatcttttaaacttttccataaatatattgatgatacttttatacaaaagctcaaagaaaaactcacttgattattttcccatttgggagttac

SEQ ID NO: 172412 - DNA, 80 bp, Artificial Sequence
  ENSG00000109381_33 (sequence is synthesized)
cccctgcccctgccgcccctgcccctgccgttaggtggtggggtttctcagcccggcggcgggaggcgggccggcctcgg

SEQ ID NO: 172413 - DNA, 120 bp, Artificial Sequence
  ENSG00000109381_34 (sequence is synthesized)
ggcgggccggcctcggcttcctgtcggaggacgcgcaaggatccgggcgtcggagtgtgtgcgagtgcgtgagtgtgtgtcggtcgcacggcgtgtgtctccggccgcgggttccgcctc

SEQ ID NO: 172414 - DNA, 120 bp, Artificial Sequence
  ENSG00000109381_35 (sequence is synthesized)
ctcccctgccgccgctgctcacggtgtaagtcaatgtgaagcagcagctccagccccgggataaacatggcgacgtctctgcatgagggacccacgaaccagctggatctgctcatccgg

SEQ ID NO: 172415 - DNA, 120 bp, Artificial Sequence
  ENSG00000109381_36 (sequence is synthesized)
atataatttaggtaatagaaggtcaaggaaggtattgcagggcttacgtgaattgttggaacatacatatattagaatgaacttggagggaggaaaggaatggaaagaacactatagtat

SEQ ID NO: 172416 - DNA, 120 bp, Artificial Sequence
  ENSG00000109381_37 (sequence is synthesized)
tagttgagagttaaatttaaatccctcataaaacccattgtcttggattatactgtaggtatatactatgcccaaatacctaaattagattcattctaagttagaattttgtatgtgctt

SEQ ID NO: 172417 - DNA, 120 bp, Artificial Sequence
  ENSG00000109381_38 (sequence is synthesized)
tacttattatctttgtttcttgattattttatatctaaatcggtgtggagatccattgtattttaatctcatttaaacacgaatttagataattagtaagtcagaaaatgaattcagatt

SEQ ID NO: 172418 - DNA, 120 bp, Artificial Sequence
  ENSG00000109381_39 (sequence is synthesized)
ttgaaattttatgcgtgtaggattttgaatcattagcatatttggttattttgttattgataacattgaagaattagatgagaataaaaaaataacagtagtagaaataccggggcttct

SEQ ID NO: 172419 - DNA, 85 bp, Artificial Sequence
  ENSG00000109381_40 (sequence is synthesized)
agaataaaaaaataacagtagtagaaataccggggcttctaggtcctggcttctgttcttagcattcagtaaagagtgaatattg

SEQ ID NO: 172420 - DNA, 120 bp, Artificial Sequence
  ENSG00000109381_41 (sequence is synthesized)
gatcgacatgaaaaactggggatctgaaaacgagcccctatcctaggattacctgaaggtgaaacagattgagccagaaggaagacaatgctgagaccgggtttcactgtgttagccagg

SEQ ID NO: 172421 - DNA, 86 bp, Artificial Sequence
  ENSG00000109381_42 (sequence is synthesized)
tacttcttatatatggtgtttgacaagtctttcaggaaaatctgaatttttttccccatatgaccttttttctgatgtgtaatagt

SEQ ID NO: 172422 - DNA, 120 bp, Artificial Sequence
  ENSG00000109381_43 (sequence is synthesized)
tttttttccccatatgaccttttttctgatgtgtaatagttggaaaataaaggcaggatttagaataattactgagaatgaaaaacttcttttgaagaggaaaccaagaacttggttcaa

SEQ ID NO: 172423 - DNA, 120 bp, Artificial Sequence
  ENSG00000109381_44 (sequence is synthesized)
gaggagaaagaaattaaaaggtggtaatttctttttgagacatttactttcttgaataaacttgacatcccccccttttttttttttatctttttctttagggacattggtctatagtta

SEQ ID NO: 172424 - DNA, 120 bp, Artificial Sequence
  ENSG00000109381_45 (sequence is synthesized)
gtatctaggtttacaacattaagcttttttcattttgtttggaaaaacaaggctggcagaattacatttgtttttaattccattgctaatattacatacttaggaggctatcaggtgcaa

SEQ ID NO: 172425 - DNA, 120 bp, Artificial Sequence
  ENSG00000109381_46 (sequence is synthesized)
gttatttacttgagacaagaagcactgattattttggctaggcttcatctgaaggcctatgttctgggaagggaggcctccataaaaaaggaagaacctttagtgacctttatccttggg

SEQ ID NO: 172426 - DNA, 120 bp, Artificial Sequence
  ENSG00000109381_47 (sequence is synthesized)
aataaaagtaaagatcagaagccagtgcattcagtttaccgtcttacaaaaggagtcaagtattgtataggtcagagaccactattgtaagatcatataaatcctgtgtctaattttgtt

SEQ ID NO: 172427 - DNA, 120 bp, Artificial Sequence
  ENSG00000109381_48 (sequence is synthesized)
atagatatcaatggcttagagttagtcatgttattttatatttatttatttttcatttctctttcaggagtgaatatgtttatttcttagtaatatgttttagtcatgtgtttagtgtat

SEQ ID NO: 172428 - DNA, 120 bp, Artificial Sequence
  ENSG00000109381_49 (sequence is synthesized)
atttttgtatttgtaagaaaactatttctagtacatgcacatatgagaatactgtcgctggtaatagttcttaataagggatgtatcagcatcacgtggggagctttttcaaaatatctg

SEQ ID NO: 172429 - DNA, 120 bp, Artificial Sequence
  ENSG00000109381_50 (sequence is synthesized)
tgcccagttcctacaccacagagattctgtaaccatagttgtatcatgggggatatagggacttggaaaaagtccaaaggatgtctgatacatatcctccttaagaaccattgacttaca

SEQ ID NO: 172430 - DNA, 120 bp, Artificial Sequence
  ENSG00000109381_51 (sequence is synthesized)
ggataatagcacccatcctcatatatagctacccataattcaaaggggtttacaactaaaccttgtttctaataatttctttcttttcttatttttgtgagacagtgtcttgctctgttg

SEQ ID NO: 172431 - DNA, 120 bp, Artificial Sequence
  ENSG00000109381_52 (sequence is synthesized)
gttgcccaggctggtgtgtggtggtgtgatcatggcacattgcagccttgacctcctggtcttaagtaatctttccgcctcagccttctgagttgctgggaccacaggcacatgccacca

SEQ ID NO: 172432 - DNA, 120 bp, Artificial Sequence
  ENSG00000109381_53 (sequence is synthesized)
gtcattcaggcaggtcttaaactcctaggctcaagtgatccttctgcctcagcctctgaaagtgctgggactataggcatgagccactgcaactagcctgatacataacttcttaactgt

SEQ ID NO: 172433 - DNA, 120 bp, Artificial Sequence
  ENSG00000109381_54 (sequence is synthesized)
ttagaagaattcaaggtgagctaaatttaattttccaatcaataaatgtcagtcacatcagtcacaattcagaacaaaaccatgtttttgcttatttattgacttatttttacagacagg

SEQ ID NO: 172434 - DNA, 120 bp, Artificial Sequence
  ENSG00000109381_55 (sequence is synthesized)
gctagaatgcagtggcatgaccatacctcactgcagccttgcgctactgtgcttgtagcctcccaagtagctgggactacacgcacacaccaccgcacccagctaatttgtttttttttt

SEQ ID NO: 172435 - DNA, 120 bp, Artificial Sequence
  ENSG00000109381_56 (sequence is synthesized)
ttttaagagatgggggtcttgtgctttgttgcccaggcggatctcgaattcctagcttcaagagatcctccggcctcacactcccagagtgctgagattataagcgtgagccactgcccc

SEQ ID NO: 172436 - DNA, 120 bp, Artificial Sequence
  ENSG00000109381_57 (sequence is synthesized)
ttgcctatttttgctttagaatttgtgtatcctgattaaaaatgaaaacagcaccaaacctcccccattctgtgctttcctaatttgtggagtaagatgatttcaagtaacatttctttt

SEQ ID NO: 172437 - DNA, 120 bp, Artificial Sequence
  ENSG00000109381_58 (sequence is synthesized)
taaaattatttttattatcttttttttttaattttaaaatcttttgtagaaacagagtgcccctgttttgcccaggcttgtcccaaacccctcgcctcaagcgatcctcccatcttggcc

SEQ ID NO: 172438 - DNA, 120 bp, Artificial Sequence
  ENSG00000109381_59 (sequence is synthesized)
aaagtgttgggattatagacatgagccaccgtacctggcctttaattttcttgtcactcagattctgacagataaagtatcatttcagtagtggttttagatgtgttctgtctgcccatc

SEQ ID NO: 172439 - DNA, 120 bp, Artificial Sequence
  ENSG00000109381_60 (sequence is synthesized)
catctgataaccgaaaatttatcactttcatgaataagtgttttcagaccaatattcaatagttggataaattttacattaatatatttaaatttattctgtccttatcaggtggtttga

SEQ ID NO: 172440 - DNA, 120 bp, Artificial Sequence
  ENSG00000109381_61 (sequence is synthesized)
ttgatttaataattttaaataattaaaacagaaattaagtctagtttaaaaaaaattgtctccagtaagcctaccaagaaatttggtatttcattaggtcaaaaaaaaaaaaaaaaaaaa

SEQ ID NO: 172441 - DNA, 120 bp, Artificial Sequence
  ENSG00000109381_62 (sequence is synthesized)
aggtggcagtcacagaccagacaagaaagctgaagcgtcatccagacaagactgaaccataccttcagccaggacagactcatatggaaaagctctctaaagagaagggaatcccctcca

SEQ ID NO: 172442 - DNA, 120 bp, Artificial Sequence
  ENSG00000109381_63 (sequence is synthesized)
tgataaatgcttagtttaacatgttcgactggtgctcaattgtctattggctgacaaatcatttccacaagctgggcttttctagcacaatcctctgaaataaaaatgtgaaaaagcaaa

SEQ ID NO: 172443 - DNA, 120 bp, Artificial Sequence
  ENSG00000109381_64 (sequence is synthesized)
ttattttccttatgtagtttaaatcatatcgaatattcagcaaattaacttcttcagtattaagctcttatcctgctttgattaattcttaacacacctcgcctcttctaaatattgaac

SEQ ID NO: 172444 - DNA, 120 bp, Artificial Sequence
  ENSG00000109390_0 (sequence is synthesized)
agaaacgagaacaacggaggcagaggagctgaagactccagtatgcaactgactacaaggagatgcagtttcacatacagctgggtactccaagtgtacagttcccatcagctctaatat

SEQ ID NO: 172445 - DNA, 120 bp, Artificial Sequence
  ENSG00000109390_1 (sequence is synthesized)
gacagaaggctgaggccggggtgctagagaaccttgccgtgctggaattcacgttgacgcccccacggagctctgctgcagagccctcgagtcccgcacttccggccgccaggtggcgct

SEQ ID NO: 172446 - DNA, 120 bp, Artificial Sequence
  ENSG00000109390_2 (sequence is synthesized)
gctcccgagcggcccttcagtgcgatcaaagttctacgtgcgagagccgccgaatgccaaacctgactggctgaaagttgggttcaccttgggcaccactgtcttcttgtggatctatct

SEQ ID NO: 172447 - DNA, 120 bp, Artificial Sequence
  ENSG00000109390_3 (sequence is synthesized)
catcaaacaacacaatgaagatattttagagtacaaaagaagaaatgggctggaataaacttttgaaacactaatgtagtatgctccgtatagtgattgtagctgttcctctggattcac

SEQ ID NO: 172448 - DNA, 120 bp, Artificial Sequence
  ENSG00000109390_4 (sequence is synthesized)
catctgttgagttgtaaatgtgagagaaaaagttatatgtgaatatatatcaagccagcatttgtattttgcatcattaaataaaaagaaataaaaatacttctgtattcttcagataaa

SEQ ID NO: 172449 - DNA, 120 bp, Artificial Sequence
  ENSG00000109390_5 (sequence is synthesized)
cctcccgagaagagtgacggggtggggctgtttcccgctcggaaactaagaaataaatgcctcatccctactccagaaacgagaacaacggaggcagaggagctgaagactccagtatgc

SEQ ID NO: 172450 - DNA, 120 bp, Artificial Sequence
  ENSG00000109390_6 (sequence is synthesized)
ctcgcacactgtgtgatcatcgtttgagcccaaagtgctaaaatacaggtgtaggtgtttgagaagcgctgtagttgattatggacgaaatgcctaatttaaggagcagaggcggagtgg

SEQ ID NO: 172451 - DNA, 120 bp, Artificial Sequence
  ENSG00000109390_7 (sequence is synthesized)
aaaatgaaaaaagcttcaccgcagtggagacttgttaacagccctggggagaaaggggcttaacagagtctggaaatcgtgaaagagcttgaccgatgaaatgggcctggctgtcgtatc

SEQ ID NO: 172452 - DNA, 120 bp, Artificial Sequence
  ENSG00000109390_8 (sequence is synthesized)
tcgttgttgaggccatataatgcagagttgacggaccgaccttatgagtcaccttggagcggagtagtggagacttaaagacagactaccctggagctggcttcaaactagttcttaata

SEQ ID NO: 172453 - DNA, 120 bp, Artificial Sequence
  ENSG00000109390_9 (sequence is synthesized)
ttgtgactcgaactccccatccccagaaattctcagatcttagaagccaaagactggcaaggatactagagggaactactcgagtaggcgaggtcagactacataccgaataggagtcct

SEQ ID NO: 172454 - DNA, 120 bp, Artificial Sequence
  ENSG00000109390_10 (sequence is synthesized)
catctctgcgccggatgtcatctaacagattccctggatcatctggatcaaatatgatttattatctggttgtaggcgtcacagtcagtgctggtggatattatgcttacaagacagtca

SEQ ID NO: 172455 - DNA, 120 bp, Artificial Sequence
  ENSG00000109390_11 (sequence is synthesized)
catcagaccaagccaaacacacagaacataaaacaaatttgaaagaaaaaacaaaagcagagatacatccatttcaaggtgaaaaggagaatgttgcggaaactgagaaagcaagttcag

SEQ ID NO: 172456 - DNA, 120 bp, Artificial Sequence
  ENSG00000109390_12 (sequence is synthesized)
aagccccagaagaacttatagtggaagctgaggtggtagatgctgaagaaagtcccagtgctacagttgtggtcataaaagaggcatctgcctgtccaggtcacgtggaggctgctccgg

SEQ ID NO: 172457 - DNA, 120 bp, Artificial Sequence
  ENSG00000109390_13 (sequence is synthesized)
gggtttcggagcttgccgggaaacctggaggctggcctgcctgtggaggccgggagggtcggggcaggccccgcccatcatttcagtgcgtggtaccctcgaagcgcccgcggagctacg

SEQ ID NO: 172458 - DNA, 120 bp, Artificial Sequence
  ENSG00000109424_0 (sequence is synthesized)
agagggtcctgctggcgcgagggtgggtaggaggggacgcggggactcggcccccaacaccgcgctccgtctgcagccgccgcctctgcaccgccgctgcccggcggtcggttcaaaaaa

SEQ ID NO: 172459 - DNA, 120 bp, Artificial Sequence
  ENSG00000109424_1 (sequence is synthesized)
cagaaatcgggtttgctgcccggcggacaggcgtgaagagcaagggaaaggaacttcctccaccttcggggctggagcccttttcctctgcatctccagtctctgagtgaagatgggggg

SEQ ID NO: 172460 - DNA, 120 bp, Artificial Sequence
  ENSG00000109424_2 (sequence is synthesized)
cctgacagcctcggacgtacacccgaccctgggggtccagctcttctcagctggaatagcggcgtgcttggcggacgtgatcaccttcccgctggacacggccaaagtccggctccaggt

SEQ ID NO: 172461 - DNA, 120 bp, Artificial Sequence
  ENSG00000109424_3 (sequence is synthesized)
ccaaggtgaatgcccgacgtccagtgttattaggtataaaggtgtcctgggaacaatcaccgctgtggtaaaaacagaagggcggatgaaactctacagcgggctgcctgcggggcttca

SEQ ID NO: 172462 - DNA, 120 bp, Artificial Sequence
  ENSG00000109424_4 (sequence is synthesized)
gcggcaaatcagctccgcctctctcaggatcggcctctacgacacggtccaggagttcctcaccgcagggaaagaaacagcacctagtttaggaagcaagattttagctggtctaacgac

SEQ ID NO: 172463 - DNA, 120 bp, Artificial Sequence
  ENSG00000109424_5 (sequence is synthesized)
tggaggagtggcagtattcattgggcaacccacagaggtcgtgaaagtcagacttcaagcacagagccatctccacggaatcaaacctcgctacacggggacttataatgcgtacagaat

SEQ ID NO: 172464 - DNA, 120 bp, Artificial Sequence
  ENSG00000109424_6 (sequence is synthesized)
agtgtcatcatcaattgtacagagctagtaacatatgatctaatgaaggaggcctttgtgaaaaacaacatattagcagatgacgtcccctgccacttggtgtcggctcttatcgctgga

SEQ ID NO: 172465 - DNA, 120 bp, Artificial Sequence
  ENSG00000109424_7 (sequence is synthesized)
ttttgcgcaacagctatgtcctccccggtggatgtagtaaaaaccagatttattaattctccaccaggacagtacaaaagtgtgcccaactgtgcaatgaaagtgttcactaacgaagga

SEQ ID NO: 172466 - DNA, 120 bp, Artificial Sequence
  ENSG00000109424_8 (sequence is synthesized)
ccaacggctttcttcaaggggttggtaccttccttcttgcgacttggatcctggaacgtcattatgtttgtgtgctttgaacaactgaaacgagaactgtcaaagtcaaggcagactatg

SEQ ID NO: 172467 - DNA, 120 bp, Artificial Sequence
  ENSG00000109424_9 (sequence is synthesized)
gactgtgccacataatcagcttcaagaaaatgatgtaacataccagtgggaatcttgctgactggatcataaaaacaaacaaaacttattcacttattttaacctaaaaagataaaggaa

SEQ ID NO: 172468 - DNA, 120 bp, Artificial Sequence
  ENSG00000109424_10 (sequence is synthesized)
ttttggcagagaattttggacttttttatataaaaaagaggaaaattaatgcctatttcatataactttttttttttctcagtgtcttaagaaggggaaagcaaaacattcagcatatac

SEQ ID NO: 172469 - DNA, 120 bp, Artificial Sequence
  ENSG00000109424_11 (sequence is synthesized)
cctggcaaatgtaatgcagataagctactgcatttgaccatttctggagtgcaattgtgtgaatgaatgtgaagaactttaacatgttttaattacaattccaactggtggaaaagaaac

SEQ ID NO: 172470 - DNA, 120 bp, Artificial Sequence
  ENSG00000109424_12 (sequence is synthesized)
ccaactggtggaaaagaaactgagtgaaatgcagtttatatttataaatacttaaaaatgaagttattaaaaatattagtttttattaaccacagttgtcagttaatatattcaataaag

SEQ ID NO: 172471 - DNA, 80 bp, Artificial Sequence
  ENSG00000109436_0 (sequence is synthesized)
gggctgcagagtgccaggccgggcgtctgcggccgcgggctctcgcggggcggcgacgccgcggggaggatgctgcttgc

SEQ ID NO: 172472 - DNA, 120 bp, Artificial Sequence
  ENSG00000109436_1 (sequence is synthesized)
gcgacgccgcggggaggatgctgcttgccgcgcccgcgtcctcaccgtcctcccgggccgcctgctggggctttgttgtggcccggacgccgcgggccaccccctgaagtcgcctgccgc

SEQ ID NO: 172473 - DNA, 120 bp, Artificial Sequence
  ENSG00000109436_2 (sequence is synthesized)
ggcgggcgcgcgtgtgcccaggagtgcgcgcctgtcgcggtggtgggtgcaggactggacccacgggcccattgtgcgcccgcccgcggcagccaggaccatgtgggtgaacccggagga

SEQ ID NO: 172474 - DNA, 120 bp, Artificial Sequence
  ENSG00000109436_3 (sequence is synthesized)
ggtgttgctggccaacgcgctgtggatcaccgagagggccaacccatacttcatcctgcagcggaggaagggccacgccggcgatggaggcggcggcggcggactggcgggcctgctggt

SEQ ID NO: 172475 - DNA, 120 bp, Artificial Sequence
  ENSG00000109436_4 (sequence is synthesized)
gggtacccttgatgttgtgttggactccagcgcccgggtcgctccttaccgaatcttgtaccagactccagactccctggtctactggaccatcgcctgtggtggttccaggaaagaaat

SEQ ID NO: 172476 - DNA, 120 bp, Artificial Sequence
  ENSG00000109436_5 (sequence is synthesized)
cactgaacactgggaatggcttgagcaaaatctcttgcagacactctccatctttgaaaatgagaatgatatcaccacatttgtgagaggaaaaatacagggcatcattgcagaatacaa

SEQ ID NO: 172477 - DNA, 120 bp, Artificial Sequence
  ENSG00000109436_6 (sequence is synthesized)
caaaatcaatgatgtaaaggaagatgatgacacggagaagtttaaagaagccattgtgaaatttcataggctgtttgggatgccagaggaagagaaactcgtcaactattactcttgcag

SEQ ID NO: 172478 - DNA, 120 bp, Artificial Sequence
  ENSG00000109436_7 (sequence is synthesized)
ctattggaaggggaaggtcccccgtcagggttggatgtacctcagcattaaccacctttgcttttattcttttcttatgggaagggaagcgaaactggtcatccggtgggtagacatcac

SEQ ID NO: 172479 - DNA, 120 bp, Artificial Sequence
  ENSG00000109436_8 (sequence is synthesized)
tcagcttgagaagaatgccaccctgcttctgcctgatgtgatcaaagtgagcacacggtccagtgagcatttcttctctgtattcctcaacatcaacgagaccttcaagttaatggagca

SEQ ID NO: 172480 - DNA, 120 bp, Artificial Sequence
  ENSG00000109436_9 (sequence is synthesized)
gcttgccaacatagccatgaggcaactcttagacaatgagggatttgaacaagatcgatccctgcccaaactcaaaaggaaatctcctaaaaaagtgtctgctctaaaacgtgatcttga

SEQ ID NO: 172481 - DNA, 120 bp, Artificial Sequence
  ENSG00000109436_10 (sequence is synthesized)
tgccagggcaaagagtgagagataccgtgcacttttccggctgcccaaagatgaaaaattagatggccacacagactgcactctctggactccatttaacaaaatgcacattttggggca

SEQ ID NO: 172482 - DNA, 120 bp, Artificial Sequence
  ENSG00000109436_11 (sequence is synthesized)
gatgtttgtgtccacaaattacatctgttttaccagcaaggaggagaacttatgtagcctcattatcccgctccgtgaggtgacaattgtggaaaaggcagacagctccagtgtgctccc

SEQ ID NO: 172483 - DNA, 120 bp, Artificial Sequence
  ENSG00000109436_12 (sequence is synthesized)
cagtcccttatccatcagcacccgaaacaggatgaccttcctatttgccaacttgaaagatagagactttctagtgcagaggatctcagatttcctgcaacagactacttccaaaatata

SEQ ID NO: 172484 - DNA, 120 bp, Artificial Sequence
  ENSG00000109436_13 (sequence is synthesized)
ttctgacaaggagtttgcaggaagttacaacagttcagatgatgaggtgtactctcgacccagcagcctcgtctcctccagcccccagagaagcacgagctctgatgctgatggagagcg

SEQ ID NO: 172485 - DNA, 120 bp, Artificial Sequence
  ENSG00000109436_14 (sequence is synthesized)
ccagtttaacctaaatggcaacagcgtccccacagccacacagaccctgatgaccatgtatcggcggcggtctcccgaggagttcaacccgaaattggccaaagagtttctgaaagagca

SEQ ID NO: 172486 - DNA, 120 bp, Artificial Sequence
  ENSG00000109436_15 (sequence is synthesized)
agcctggaagattcactttgctgagtatgggcaagggatctgcatgtaccgcacagagaaaacgcgggagctggtgttgaagggcatcccggagagcatgcgtggggagctctggctgct

SEQ ID NO: 172487 - DNA, 120 bp, Artificial Sequence
  ENSG00000109436_16 (sequence is synthesized)
gctgtcaggtgccatcaatgagaaggccacacatcctgggtactatgaagacctagtggagaagtccatggggaagtataatctcgccacggaggagattgagagggatttacaccgctc

SEQ ID NO: 172488 - DNA, 120 bp, Artificial Sequence
  ENSG00000109436_17 (sequence is synthesized)
ccttccagaacacccagcttttcagaatgaaatgggcattgctgcactaaggagagtcttaacagcttatgcttttcgaaatcccaacatagggtattgccaggccatgaatattgtcac

SEQ ID NO: 172489 - DNA, 120 bp, Artificial Sequence
  ENSG00000109436_18 (sequence is synthesized)
ttcagtgctgctgctttatgccaaagaggaggaagctttctggctgcttgtggctttgtgtgagcgcatgctcccagattactacaacaccagagttgtgggtgcactggtggaccaagg

SEQ ID NO: 172490 - DNA, 120 bp, Artificial Sequence
  ENSG00000109436_19 (sequence is synthesized)
tgtctttgaggagctagcacgagactacgtcccacagctgtacgactgcatgcaagacctgggcgtgatttccaccatctccctgtcttggttcctcacactatttctcagtgtgatgcc

SEQ ID NO: 172491 - DNA, 120 bp, Artificial Sequence
  ENSG00000109436_20 (sequence is synthesized)
ttttgagagtgcagttgtggttgttgactgtttcttctatgaaggaattaaagtgatattccagttggccctagctgtgctggatgcaaatgtggacaaactgttgaactgcaaggatga

SEQ ID NO: 172492 - DNA, 120 bp, Artificial Sequence
  ENSG00000109436_21 (sequence is synthesized)
tggggaggccatgaccgttttgggaaggtatttagacagtgtgaccaataaagacagcacactgcctcccattcctcacctccactccttgctcagcgatgatgtggaaccttaccctga

SEQ ID NO: 172493 - DNA, 120 bp, Artificial Sequence
  ENSG00000109436_22 (sequence is synthesized)
ggtagacatctttagactcatcagaacttcctacgagaaattcggaactatccgggcagatttgattgaacagatgagattcaaacagagactgaaagtgatccagacgctggaggatac

SEQ ID NO: 172494 - DNA, 120 bp, Artificial Sequence
  ENSG00000109436_23 (sequence is synthesized)
gaaacttcctttaccattgatgagctggaagaactttatgctcttttcaaggcagaacatctcaccagctgctactggggcgggagcagcaacgcgctggaccggcatgaccccagcctg

SEQ ID NO: 172495 - DNA, 120 bp, Artificial Sequence
  ENSG00000109436_24 (sequence is synthesized)
ccctacctggaacagtatcgcattgacttcgagcagttcaagggaatgtttgctcttctctttccttgggcatgtggaactcactctgacgttctggcctcccgcttgttccagttatta

SEQ ID NO: 172496 - DNA, 120 bp, Artificial Sequence
  ENSG00000109436_25 (sequence is synthesized)
gatgaaaatggagactctttgattaacttccgggagtttgtctctgggctaagtgctgcatgccatggggacctcacagagaagctcaaactcctgtacaaaatgcacgtcttgcctgag

SEQ ID NO: 172497 - DNA, 120 bp, Artificial Sequence
  ENSG00000109436_26 (sequence is synthesized)
ccatcctctgatcaagatgaaccagattctgcttttgaagcaactcagtacttctttgaagatattaccccagaatgtacacatgttgttggattggatagcagaagcaaacagggtgca

SEQ ID NO: 172498 - DNA, 120 bp, Artificial Sequence
  ENSG00000109436_27 (sequence is synthesized)
gatgatggctttgttacggtgagcctaaagccagacaaagggaagagagcaaattcccaagaaaatcgtaattatttgagactgtggactccagaaaataaatctaagtcaaagaatgca

SEQ ID NO: 172499 - DNA, 120 bp, Artificial Sequence
  ENSG00000109436_28 (sequence is synthesized)
aaggatttacccaaattaaatcaggggcagttcattgaactgtgtaagacaatgtataacatgttcagcgaagaccccaatgagcaggagctgtaccacgccacggcagcagtgaccagc

SEQ ID NO: 172500 - DNA, 120 bp, Artificial Sequence
  ENSG00000109436_29 (sequence is synthesized)
ctcctgctggagattggggaggtcggcaagttgttcgtggcccagcctgcaaaggagggcgggagcggaggcagtgggccgtcctgccaccagggcatcccaggcgtgctcttccccaag

SEQ ID NO: 172501 - DNA, 120 bp, Artificial Sequence
  ENSG00000109436_30 (sequence is synthesized)
aaagggccaggccagccttacgtggtggagtctgttgagcccctgccggccagcctggcccccgacagcgaggaacactcccttggaggacaaatggaggacatcaagctggaggactcc

SEQ ID NO: 172502 - DNA, 120 bp, Artificial Sequence
  ENSG00000109436_31 (sequence is synthesized)
tcgccccgggacaacggggcctgctcctccatgctgatctctgacgacgacaccaaggacgacagctccatgtcctcatactcggtgctgagtgccggctcccacgaggaggacaagctg

SEQ ID NO: 172503 - DNA, 120 bp, Artificial Sequence
  ENSG00000109436_32 (sequence is synthesized)
cactgcgaggacatcggagaggacacggtcctggtgcggagcggccagggcacggcggcactgccccggagcaccagcctggaccgggactgggccatcaccttcgagcagttcctggcc

SEQ ID NO: 172504 - DNA, 120 bp, Artificial Sequence
  ENSG00000109436_33 (sequence is synthesized)
tccctcttaactgagcctgccctggtcaagtactttgacaagcccgtgtgcatgatggccaggattaccagtgcaaaaaacatccggatgatgggcaagcccctcacctcggccagtgac

SEQ ID NO: 172505 - DNA, 120 bp, Artificial Sequence
  ENSG00000109436_34 (sequence is synthesized)
tatgaaatctcggccatgtccggctgacacgggcgccttcccgggggagtgggaggagagggaggggagggattttttatgttcttctgtgttgagttttttctttctttcttttaaatt

SEQ ID NO: 172506 - DNA, 120 bp, Artificial Sequence
  ENSG00000109436_35 (sequence is synthesized)
aaatatttattagtacctggcttgaagcctagtgttttcataatgtaattcaatgaaaactgttggagaaatatttaaacacctcaatgtaggtacattacactcttgttgcggggaggg

SEQ ID NO: 172507 - DNA, 120 bp, Artificial Sequence
  ENSG00000109436_36 (sequence is synthesized)
gatttaccagaatacagtttatttcgtgaattctaaaaaacaaaaagatgaatctgtcagtgatatgtgtgtattataacttattaatcttgctgttgagctgtatacatggtttaaaaa

SEQ ID NO: 172508 - DNA, 120 bp, Artificial Sequence
  ENSG00000109436_37 (sequence is synthesized)
atagtactgtttaatgctaagtaaggcagcagtcatttgtgtattcaggctttttaaataaaattagagctgtaaggaaaatgaaaagccacaaatgcaagactgttcttaaatggaagg

SEQ ID NO: 172509 - DNA, 120 bp, Artificial Sequence
  ENSG00000109436_38 (sequence is synthesized)
catagtcagcgagggtaaatcctataccactttaggaagtattaaaaatatttttaagatttgaaatatatttcatagaagtcctctattcaaaatcatattccacagatgttccccttc

SEQ ID NO: 172510 - DNA, 120 bp, Artificial Sequence
  ENSG00000109436_39 (sequence is synthesized)
aaagggaaaacatttggggttctaaacagttatgaaagtaagtgatttttacatgattccagaataacacttgtattgaccaatttagacagataccagaccaattttgcatttaagaaa

SEQ ID NO: 172511 - DNA, 120 bp, Artificial Sequence
  ENSG00000109436_40 (sequence is synthesized)
ttgttctgattatttacgtcaactcattagaattcagtgaaaagtaacagtcttttgtcacagagaatctgaaagtagcagcaaagacagagggctcatgacaggtttttgcttttgctt

SEQ ID NO: 172512 - DNA, 120 bp, Artificial Sequence
  ENSG00000109436_41 (sequence is synthesized)
tgcttttgtttttgaaagagtaaaagtactgatgcttctgatactggatgtttagcttcttactgcaaaaacataagtaaaacagtcaactttaccatttccgtattctccatagattga

SEQ ID NO: 172513 - DNA, 120 bp, Artificial Sequence
  ENSG00000109436_42 (sequence is synthesized)
agaaatttataccacatatcgcatatgaccatctttccatcaaatcaatgtagagataatgtaaactgaaaaaaaatctgcaagataatgtaactgaatgttttaaaaacagaacttgtc

SEQ ID NO: 172514 - DNA, 120 bp, Artificial Sequence
  ENSG00000109436_43 (sequence is synthesized)
actttatataaaagaatagtatgctctatttcctgaatggatgtggaaatgaaagctagcgcacctgcactttgaattcttgcttcttttttattactgttatgattttgctttttacag

SEQ ID NO: 172515 - DNA, 120 bp, Artificial Sequence
  ENSG00000109436_44 (sequence is synthesized)
atgttggacgattttttcttctgattgttgaattcataatcatggtctcatttcctttgcttctttggaatatttctttcaacacattcctttattttattatacattgtgtcctttttt

SEQ ID NO: 172516 - DNA, 120 bp, Artificial Sequence
  ENSG00000109436_45 (sequence is synthesized)
tagctattgctgctgttgttttttattctatttacaggatgatttttaaactgtcaaatgaagtagtgttaacctcaaataggctaaatgtgaacaaataaaatacagcaaatactcaga

SEQ ID NO: 172517 - DNA, 120 bp, Artificial Sequence
  ENSG00000109436_46 (sequence is synthesized)
gggagacacctgaaagtatttttggtttatcctgttcctgtgcccaagtgtgttcagttccttgcccattttgtttgatcttcaagctttgcgtctgacgcccaaagcaatatctcagca

SEQ ID NO: 172518 - DNA, 120 bp, Artificial Sequence
  ENSG00000109436_47 (sequence is synthesized)
ttttagagaggtgccagccagaacactatttctggtcaccataagccaaaagagtttcagactactccagtttttcaaaatggaaatgagagaggttgaataaatataggttgtatacaa

SEQ ID NO: 172519 - DNA, 120 bp, Artificial Sequence
  ENSG00000109445_0 (sequence is synthesized)
gctgtcgtaaaaggacgtccggtccgtctcctagtgtccggaatcggctgtcagcctccctggctgttagtaccttctttcccggagtcctggtccacgagttggatttactgctgtcgc

SEQ ID NO: 172520 - DNA, 120 bp, Artificial Sequence
  ENSG00000109445_1 (sequence is synthesized)
gggtgggcctcacgccattccctgtccctcggccccctgagtgagtccggtctcccggcgaaagtgagcgaggtttgcccggagcgcgcacgaggggaaaatgcctaaaaaaaagactgg

SEQ ID NO: 172521 - DNA, 120 bp, Artificial Sequence
  ENSG00000109445_2 (sequence is synthesized)
tgcgaggaagaaggctgagaaccgccgagaacgtgaaaaacaactaagagcatcaagaagcactatagatttagctaaacatccatgtaatgcctcaatggaatgtgacaagtgtcagag

SEQ ID NO: 172522 - DNA, 120 bp, Artificial Sequence
  ENSG00000109445_3 (sequence is synthesized)
gcggcagaagaatagagcattttgctacttttgtaattctgtacagaagttaccaatttgtgcacagtgtgggaaaacaaagtgcatgatgaagtcttcagactgtgtcataaagcatgc

SEQ ID NO: 172523 - DNA, 120 bp, Artificial Sequence
  ENSG00000109445_4 (sequence is synthesized)
tggtgtatacagtactggccttgcaatggtgggtgcaatatgtgacttctgtgaagcttgggtttgccatggtaggaaatgtctcagtacacatgcttgtgcctgccctcttaccgatgc

SEQ ID NO: 172524 - DNA, 120 bp, Artificial Sequence
  ENSG00000109445_5 (sequence is synthesized)
tgagtgtgttgaatgtgaacgaggcgtgtgggaccatggaggcagaatattcagttgttctttttgccataactttctctgtgaagatgatcaatttgagcatcaagccagctgccaggt

SEQ ID NO: 172525 - DNA, 120 bp, Artificial Sequence
  ENSG00000109445_6 (sequence is synthesized)
tttagaggcagaaacatttaaatgtgtttcatgcaatcggcttggtcagcactcatgtctccgttgtaaggcttgtttctgtgatgatcatacaaggagcaaagtgtttaagcaagaaaa

SEQ ID NO: 172526 - DNA, 120 bp, Artificial Sequence
  ENSG00000109445_7 (sequence is synthesized)
cagactggaggtgaagagggagatggagcttctgggtatgatgcttattggaagaacctttcatctgataagtatggtgataccagctaccacgatgaggaggaggatgagtatgaagca

SEQ ID NO: 172527 - DNA, 120 bp, Artificial Sequence
  ENSG00000109445_8 (sequence is synthesized)
gaggatgatgaagaggaagaagatgaaggcagaaaggattcagatactgagtcatcagatttgtttactaatttgaatttaggaaggacctatgctagtggctatgctcactatgaggaa

SEQ ID NO: 172528 - DNA, 120 bp, Artificial Sequence
  ENSG00000109445_9 (sequence is synthesized)
caagagaactaggggagctgctctggtggccgtgtgtgagaggagcaggagtgagtgtgtgtgcttgatgaattgtgtgtggttgttcaaaagtaccttagccacttagccttgtgcaga

SEQ ID NO: 172529 - DNA, 120 bp, Artificial Sequence
  ENSG00000109445_10 (sequence is synthesized)
agactagttacacttaatgggccaagcaatagggtgtagcgtttttatagaactgataatcaggcttatggcataagaaaaatgagtttcaaatttaagatgtttattgatcgaagcaat

SEQ ID NO: 172530 - DNA, 120 bp, Artificial Sequence
  ENSG00000109445_11 (sequence is synthesized)
tgaagtatcatggattggattgttactgatttcagtaaagtatgttttgccaattagatacatatatacaagataaaggaataggatggtaatatatttgtttgaaattaaattactgtt

SEQ ID NO: 172531 - DNA, 120 bp, Artificial Sequence
  ENSG00000109445_12 (sequence is synthesized)
tttattaaaaaatactgcttcattgggctgattttgtaaaatgtaatgagtaaaatgaattactgtatttttccttttatgtccacagaatgagagtcatatgttgttatattctaaatt

SEQ ID NO: 172532 - DNA, 120 bp, Artificial Sequence
  ENSG00000109445_13 (sequence is synthesized)
ttcattaaatattcatgtcaccttgagttgtcatgataagtatgttttagtatttgacttattcttctctttcttcacaatgtatgtcctcagtggtacctattattgatgccttaaatg

SEQ ID NO: 172533 - DNA, 120 bp, Artificial Sequence
  ENSG00000109445_14 (sequence is synthesized)
tattgataaggtgactagttagccatttttcagagatacagtatcagaaatagtattattacagaagctttacccaggacattttatttctctttgaataaatctattatttcacttaaa

SEQ ID NO: 172534 - DNA, 120 bp, Artificial Sequence
  ENSG00000109445_15 (sequence is synthesized)
ggtagttggaaaaactatatactattttatctgacgtatacctgaataaaattttagtgaagacagtgtttttgcatatagtttgttgctgaatttagtatctctggcacgtctgttgat

SEQ ID NO: 172535 - DNA, 120 bp, Artificial Sequence
  ENSG00000109445_16 (sequence is synthesized)
ttcactgagtggcagtgattgttgttggattttatattattataaaacctagcatattactttacatactgttggtgataaaggtagatattggacaagaatagataatagaaactttca

SEQ ID NO: 172536 - DNA, 120 bp, Artificial Sequence
  ENSG00000109445_17 (sequence is synthesized)
tcttccagtttctttaatgccttagtcttattgggttttcatcatattttcttagcaattctttcatttctcttttctgaacttcctacttaacatctgttggcttcccattctattacc

SEQ ID NO: 172537 - DNA, 120 bp, Artificial Sequence
  ENSG00000109445_18 (sequence is synthesized)
gataaagttggctgtgtgtggaaggggtacacttcacagaagaggtgggattttcaccagaactttcaacaggtaggaggcacttttcagggaaaagtgttcgaataagtaaagacatgg

SEQ ID NO: 172538 - DNA, 120 bp, Artificial Sequence
  ENSG00000109445_19 (sequence is synthesized)
agaagagagaatataagacatatttggagaatggctgaccattagtgacttgagtctaaaaagaataggccaagaaggtttggaaagtgattaggggccagattgtggagagcttttaaa

SEQ ID NO: 172539 - DNA, 120 bp, Artificial Sequence
  ENSG00000109452_0 (sequence is synthesized)
gacttctttccattttgttttttgcagagccttgaaaccagcgaaacaataatcaaagagcagttctgtcaaagaaaacaacataaatcaggtacagaatttcagagtgggatatcagat

SEQ ID NO: 172540 - DNA, 120 bp, Artificial Sequence
  ENSG00000109452_1 (sequence is synthesized)
ctttagtgtgaagatacatctacattaaaccaggaatcactagaactgacatttggacaagaaaatttggaaaattttaaaactgtgaaggttgatcatggaaattaaagaggaaggggc

SEQ ID NO: 172541 - DNA, 120 bp, Artificial Sequence
  ENSG00000109452_2 (sequence is synthesized)
atcagaagaagggcagcactttcttcctacagcccaggccaatgatcccggggactgtcagttcacaagtatccagaagactccaaatgaaccgcagttggaattcatccttgcatgcaa

SEQ ID NO: 172542 - DNA, 120 bp, Artificial Sequence
  ENSG00000109452_3 (sequence is synthesized)
ggatctcgtggctcctgtccgtgatcgtaaactgaatacactggtgcagatctccgtaatccaccccgtggagcagagtctgacaagatactccagcaccgaaattgtggagggaacaag

SEQ ID NO: 172543 - DNA, 120 bp, Artificial Sequence
  ENSG00000109452_4 (sequence is synthesized)
ggacccactgtttttgactggtgtcacattcccatctgagtatcccatctatgaggagaccaaaataaaactaacagtctatgatgtcaaggataagtctcatgacaccgttcgaaccag

SEQ ID NO: 172544 - DNA, 120 bp, Artificial Sequence
  ENSG00000109452_5 (sequence is synthesized)
tgtcctaccagaacataaggatcccccgccagaagttgggcgaagtttcttgggctatgccagttttaaagtgggagagctgctgaagtcaaaggagcaattgctggtcctgagcctgag

SEQ ID NO: 172545 - DNA, 120 bp, Artificial Sequence
  ENSG00000109452_6 (sequence is synthesized)
aacttcagatggtggcaaagtggttggcaccatagaagtcagtgtcgtgaagatgggggagattgaggatggggaagccgaccacatcaccacagatgtacagggacaaaagtgtgccct

SEQ ID NO: 172546 - DNA, 120 bp, Artificial Sequence
  ENSG00000109452_7 (sequence is synthesized)
ggtatgtgaatgtacagccccggaaagtgtgagcggaaaagataacttaccttttttgaattcagtgttaaagaacccagtatgtaaattatatagatttcccacatctgacaataagtg

SEQ ID NO: 172547 - DNA, 120 bp, Artificial Sequence
  ENSG00000109452_8 (sequence is synthesized)
gatgcgaattcgagagcagatgtcagagagcattctttcctttcatattcctaaggaattgatttcccttcacattaaagaagatttgtgcagaaaccaggagataaaagaacttggtga

SEQ ID NO: 172548 - DNA, 120 bp, Artificial Sequence
  ENSG00000109452_9 (sequence is synthesized)
gctttctccacattgggacaatctgcgaaaaaatgtccttactcactgtgatcaaatggtgaatatgtaccaagacattctgacagaacttagcaaggaaacagggtcctctttcaaatc

SEQ ID NO: 172549 - DNA, 120 bp, Artificial Sequence
  ENSG00000109452_10 (sequence is synthesized)
aagcagcagcaaaggagagaaaacattagaatttgttccaataaatctacatctgcaaagaatgcaggtacacagccctcacttgaaagatgctctctacgatgtcatcactgtgggagc

SEQ ID NO: 172550 - DNA, 120 bp, Artificial Sequence
  ENSG00000109452_11 (sequence is synthesized)
cccagctgcccattttcagggatttaagaatggtggtcttcggaagctactccatagatttgaaacagaaagaagaaataccggataccagtttatttactattcacctgaaaacacagc

SEQ ID NO: 172551 - DNA, 120 bp, Artificial Sequence
  ENSG00000109452_12 (sequence is synthesized)
caaagcaaaggaagttctcagcaacatcaatcaactacaacctcttatagcaacccatgcagacctactgcttaattctgcaagccagcattctccagacagcttgaagaattctttaaa

SEQ ID NO: 172552 - DNA, 120 bp, Artificial Sequence
  ENSG00000109452_13 (sequence is synthesized)
gatgctttcagaaaaaacagagctttttgtacatgccttcaaggatcaacttgtcaggagtgctcttttagcactctacactgcaaggccaggaggcattcttaagaagccaccctctcc

SEQ ID NO: 172553 - DNA, 120 bp, Artificial Sequence
  ENSG00000109452_14 (sequence is synthesized)
taagagcagcacagaggagagcagtccccaagaccaacccccagtgatgagagggcaggactccataccacatcattcagactatgatgaggaagagtgggacagggtgtgggccaatgt

SEQ ID NO: 172554 - DNA, 120 bp, Artificial Sequence
  ENSG00000109452_15 (sequence is synthesized)
tattgctatggtggacaaactgattgaaagagatggtggcagtgaaggcagtggcggcaacaatgatggagaaaaggaaccttcattaacagatgccattccctctcacccaagagagga

SEQ ID NO: 172555 - DNA, 120 bp, Artificial Sequence
  ENSG00000109452_16 (sequence is synthesized)
ctggtatgaacagttgtatcccctcatccttaccctgaaggactgcatgggagaagtggtgaaccgagccaagcagtccctgacatttgtgctccttcaggaacttgcgtacagcttgcc

SEQ ID NO: 172556 - DNA, 120 bp, Artificial Sequence
  ENSG00000109452_17 (sequence is synthesized)
ccagtgtctgatgctgacgctaagaagagacatcgtcttcagccaagcacttgctggattggtttgtggttttatcatcaaattacagacaagtctgtatgacccaggcttcctacagca

SEQ ID NO: 172557 - DNA, 120 bp, Artificial Sequence
  ENSG00000109452_18 (sequence is synthesized)
gcttcacacagtggggttgatagtacaatatgaaggactgctaagtacatacagcgatgaaattggaatgctagaggacatggccgttggcatttccgatttaaagaaagttgcatttaa

SEQ ID NO: 172558 - DNA, 120 bp, Artificial Sequence
  ENSG00000109452_19 (sequence is synthesized)
aataattgaagccaaatccaatgatgtgttgccagttataacaggaagacgagaacattacgtggtagaggtcaagcttccagccagaatgtttgagtcactacctctacagattaaaga

SEQ ID NO: 172559 - DNA, 120 bp, Artificial Sequence
  ENSG00000109452_20 (sequence is synthesized)
aggacagttgcttcatgtgtatccagtactttttaatgttggaatcaatgaacagcaaactctggctgaaaggtttggagatgtctctttgcaagaaagtattaatcaggaaaacttcga

SEQ ID NO: 172560 - DNA, 120 bp, Artificial Sequence
  ENSG00000109452_21 (sequence is synthesized)
acttctacaagaatattacaagatatttatggaaaagatgcctcctgattatatttcacattttcaggaacaaaatgatttaaaagcattgctagaaaatctccttcaaaatatccaatc

SEQ ID NO: 172561 - DNA, 120 bp, Artificial Sequence
  ENSG00000109452_22 (sequence is synthesized)
caaaaaaagaaagaatgtagaaattatgtggctggctgcaacgatttgccgcaaactgaatggtattcgtttcacctgttgtaaaagtgccaaagacaggacatcgatgtcagtgacact

SEQ ID NO: 172562 - DNA, 120 bp, Artificial Sequence
  ENSG00000109452_23 (sequence is synthesized)
tgaacaatgctcaatcttgagagatgagcaccagttacacaaggacttctttatccgagcgctggattgcatgagaagagaaggatgccgcatagagaatgtactgaagaatatcaaatg

SEQ ID NO: 172563 - DNA, 120 bp, Artificial Sequence
  ENSG00000109452_24 (sequence is synthesized)
cagaaagtatgctttcaacatgctacagctgatggctttccccaagtactacagacctccagaggggacttatggaaaagctgacacctaagtttaccaacatgttaataaacaggaaca

SEQ ID NO: 172564 - DNA, 120 bp, Artificial Sequence
  ENSG00000109452_25 (sequence is synthesized)
caaatacatttcagttggataatcttcaccttggtcttttttgtttgtttttattgtcatgaatttgtggtgggggagatgatcacagatgtttcccaaaatctaggaactacttcaatt

SEQ ID NO: 172565 - DNA, 120 bp, Artificial Sequence
  ENSG00000109452_26 (sequence is synthesized)
catcatcagcatattgctctgaaagaaatccattttaaaaaatcttacatgattcagtactgtcatttctagttctaagcttctatgtgttgagcctagctgattgagattggttcacaa

SEQ ID NO: 172566 - DNA, 120 bp, Artificial Sequence
  ENSG00000109452_27 (sequence is synthesized)
agtgtaaatttcattcatgagtatttaaatgtttctgaggaaacatggatcatttcaataggactaggggtgattcacagagcaccactctccaaccaaatggaagagaggagaggggga

SEQ ID NO: 172567 - DNA, 120 bp, Artificial Sequence
  ENSG00000109452_28 (sequence is synthesized)
aaaggaacatattttttttgtgatacaacttaatagcctatgagaacacagtcaacctgagaatcaatgtaagggatttaaaaaaaatgtgtagccactcaattaggtagagttaactca

SEQ ID NO: 172568 - DNA, 120 bp, Artificial Sequence
  ENSG00000109452_29 (sequence is synthesized)
tgatctggaatactgaggcagtttgcaggtatgttccacaatgatctctatcatccagtcaaggtgtgactcctcccttgcaacaggcatatgcatggagtgagtaaagtggtcaacaga

SEQ ID NO: 172569 - DNA, 120 bp, Artificial Sequence
  ENSG00000109452_30 (sequence is synthesized)
cctttcaaaaccatggcatcttttcagaactctgacttgggttgtgtgatctagctgtgaatgtagcaatatagaacgtttaatagaatgataagcaaaacactgcaatgatctaaaatt

SEQ ID NO: 172570 - DNA, 120 bp, Artificial Sequence
  ENSG00000109452_31 (sequence is synthesized)
cccaagaggggtcttactcatccttttccattttggagaggttctgctgactctacattaagcccagacagggtggtgtcctgctttgctcctttctgctctctgcgttcctctgctgcc

SEQ ID NO: 172571 - DNA, 120 bp, Artificial Sequence
  ENSG00000109452_32 (sequence is synthesized)
cacacgctcgcaagcgaacgcaggaaagtcaggctaaaagtgtctgctgctgctgccgccccccactccgcctccgggagagaatacaaagaaatggtgttacctggcaagaggtcttct

SEQ ID NO: 172572 - DNA, 120 bp, Artificial Sequence
  ENSG00000109452_33 (sequence is synthesized)
gtcttttatgaaaaattagacaaaggctttacaggaggcatagtactggaaatctgctcctgatgaggtctcagaaagcttccactcgtggtggaaggcaaaggaggagcaggcacatca

SEQ ID NO: 172573 - DNA, 120 bp, Artificial Sequence
  ENSG00000109452_34 (sequence is synthesized)
aaataaaataaaaatgaacaacattttgatacccaaaatgaaaattcccatcagcctgaactttatgttgtgaagttcatgaatgtcagtgaggtatctctgagatgtttcttagcagtc

SEQ ID NO: 172574 - DNA, 120 bp, Artificial Sequence
  ENSG00000109452_35 (sequence is synthesized)
atcctggtgtaagcatgcagttatggcataggtttgtgtgtgttaataagcctttaaaacatatgcaaccacaacaaatgataaagtaaaacaattattttctgttgccctgaatatcaa

SEQ ID NO: 172575 - DNA, 120 bp, Artificial Sequence
  ENSG00000109452_36 (sequence is synthesized)
acttgcccttgcccttactcagcaaaataacatttataagttttccaaaatcccaaagtagaagtttccttaaaaaaatcatcttgtataataccagtattcaaacatgggtaaggttaa

SEQ ID NO: 172576 - DNA, 120 bp, Artificial Sequence
  ENSG00000109452_37 (sequence is synthesized)
cttgtcacttctccaaattgccatgctaaatatgcatgaaaattgagggagaatgctagttaaaaagaaattaggatttatcactggaattgaaactaagagtacaaaagtctgaacgaa

SEQ ID NO: 172577 - DNA, 120 bp, Artificial Sequence
  ENSG00000109452_38 (sequence is synthesized)
tgaaacttttctccaaattttacaaattcttgttcctttctcattagaagagcatgctatccaaagcataaatctcccttgaaaataacagaggcttcttaagccctctcttagctatga

SEQ ID NO: 172578 - DNA, 120 bp, Artificial Sequence
  ENSG00000109452_39 (sequence is synthesized)
tcaatggatgatattatgcttcccatagctaatgtgatagctccttgcctaggattcctgttgaaataaggattctagccccatgttaagtttttcaaattactacaaattttagataag

SEQ ID NO: 172579 - DNA, 120 bp, Artificial Sequence
  ENSG00000109452_40 (sequence is synthesized)
catttggagctttttatactagaattatcaattttttattttagctaattacctgtgggcattatacttgaggcaggtaccaaactacttacagcctttttaatgaaaatgtgctgtgta

SEQ ID NO: 172580 - DNA, 120 bp, Artificial Sequence
  ENSG00000109452_41 (sequence is synthesized)
ctttgaatccattcatagacaaaattaccttgatgttctcttaactcattctttattttagtgattaaatacaacctttgagttgttcaatatcatttgaaaatggtaggatttgtggtt

SEQ ID NO: 172581 - DNA, 120 bp, Artificial Sequence
  ENSG00000109452_42 (sequence is synthesized)
attttcattaccctattagatttaagataggctgggatgacagaggcctccttgaatagctatgaagcctcattcagcatatcaaatggtagtctgagttctaagaaaccttaagtaatt

SEQ ID NO: 172582 - DNA, 120 bp, Artificial Sequence
  ENSG00000109452_43 (sequence is synthesized)
tatcattctgtaaatactcttataagcaataatttttatttgtatttttgaaaacaaactacttaaatatggaaaaatattaactggaaagccagcagtagggttttctatttttaaaag

SEQ ID NO: 172583 - DNA, 120 bp, Artificial Sequence
  ENSG00000109452_44 (sequence is synthesized)
agtagggttttctatttttaaaagacatttcaaggatttcctgtaatcccagcactttgggagccaaggtggatagatcacctgaggtcaggaattggagatcagcctggccaacatggt

SEQ ID NO: 172584 - DNA, 120 bp, Artificial Sequence
  ENSG00000109452_45 (sequence is synthesized)
actccagcctgggtgaaaagagcgaaactccatctttaaataagtaaataaatgaataatatagaagtctcaaattatagtgcttactgtaatacaaatgcttatgaattttcattcatt

SEQ ID NO: 172585 - DNA, 120 bp, Artificial Sequence
  ENSG00000109452_46 (sequence is synthesized)
accatagtcatctgcatttccttatagaaagcctgtactggtgcaaacttctaaaagtggatttcatcaagaaaatgtgtttcatagagacaacaatattgcttttttcctgagaggcag

SEQ ID NO: 172586 - DNA, 120 bp, Artificial Sequence
  ENSG00000109452_47 (sequence is synthesized)
ttcattcttaaacaaccacttcactatttcttaagttattaaggctaaatcaaagagcaaatgttaaagtgtttaaatctctcttgaacaaacacagccacagtcatgctattctatcta

SEQ ID NO: 172587 - DNA, 120 bp, Artificial Sequence
  ENSG00000109452_48 (sequence is synthesized)
tattttcacttaaaagatacaccagcagacctattttaggaggtcatattgagccaaaaaatgaactgagcaaatgacatttccaaactctttttttgctcaaaaataatatgttcccct

SEQ ID NO: 172588 - DNA, 120 bp, Artificial Sequence
  ENSG00000109452_49 (sequence is synthesized)
ttgatattaaatgcagatatcaattctggattagctatttactgagccctaggaaaaacatatttaaagacaaggaaaccattcatttacatctcatatcattgctttttgcttttaaat

SEQ ID NO: 172589 - DNA, 120 bp, Artificial Sequence
  ENSG00000109452_50 (sequence is synthesized)
atcgccttgaggtttgtctacactctgccaaaacaatccctgaacataagtttggtcagcctcataattcagtgagtcgagcaaccatttgttccaagtgataaattgtactaaatgaca

SEQ ID NO: 172590 - DNA, 120 bp, Artificial Sequence
  ENSG00000109452_51 (sequence is synthesized)
aactgcccaatcagggcagagctccatggacccagcctccagcccttattttataagactaacccctcttctgaaaaactctgaaggcttaaaagctagcatttggatggaggatacttc

SEQ ID NO: 172591 - DNA, 120 bp, Artificial Sequence
  ENSG00000109452_52 (sequence is synthesized)
ctttttatccttcagctatgtatggcactttacataaaataagaggtaaaaaaggagagaaactgatgtgtataaagtaatgcctttcttcccaagcaaatcaaacctctccctatgtaa

SEQ ID NO: 172592 - DNA, 120 bp, Artificial Sequence
  ENSG00000109452_53 (sequence is synthesized)
aagttgatagtgtaccaagagacacaataccactggtgggctggaactagctcgttctgatgcataaaagttgataattaaagtaccagaaattttgtaagctagttgttaaacattacc

SEQ ID NO: 172593 - DNA, 120 bp, Artificial Sequence
  ENSG00000109452_54 (sequence is synthesized)
attattaaatatgaaattataaaacacagtggaatacattaaaaaccaatgtaataatcaaaacataccacttcccaattattttactaccttatactatttattagtactcttgagtct

SEQ ID NO: 172594 - DNA, 120 bp, Artificial Sequence
  ENSG00000109452_55 (sequence is synthesized)
atttaggtctattacatctttacagtgaaaacaggatacaatattgtgctactgtgggtctcttcctgactgcagattcagtaacatggtgttcgtagcttgaaactgtccacagtggga

SEQ ID NO: 172595 - DNA, 120 bp, Artificial Sequence
  ENSG00000109452_56 (sequence is synthesized)
gtatttaacaccatagaaactggctggcaaatgctacaaactagcaattttaattcctggaaaggcaattgttgagcatttaccagcacacaatgaatgccatattcttttttttttatt

SEQ ID NO: 172596 - DNA, 120 bp, Artificial Sequence
  ENSG00000109452_57 (sequence is synthesized)
aggaaataaattattggaggcagtataaaattatttaaaaagtatcaaatgcaatcccttatcttcagatggctataattttggttatataaatgttttggtttttaccttctttaaaga

SEQ ID NO: 172597 - DNA, 120 bp, Artificial Sequence
  ENSG00000109452_58 (sequence is synthesized)
ctcctattaggttaaaagtcatatttgatgactatattttattcataattaaattattaaatcaccttttctcctgataatgctttgccagagaattcttagcaattcaactgtagtcta

SEQ ID NO: 172598 - DNA, 120 bp, Artificial Sequence
  ENSG00000109452_59 (sequence is synthesized)
agcaataactcagggctaaattcagggaactgttagcccaatcagatatcactaaaaatgtacttcaccatctattttggagtttataattttggcatttgctaaaagtaggaaaaacag

SEQ ID NO: 172599 - DNA, 120 bp, Artificial Sequence
  ENSG00000109452_60 (sequence is synthesized)
taacatattactgtgcccagattctaataaatatagctcaattgaaaccaaaactgttacattaaacaaattacactctggcactatgctaaatcaccacagatgttttaggtgtttgat

SEQ ID NO: 172600 - DNA, 120 bp, Artificial Sequence
  ENSG00000109452_61 (sequence is synthesized)
ttccaagcaggatggtatatcatttgtttggttcaatatatgaggcaccatttgtagtcttttaggaaataaattagcttttatcacagatttaggaaacttgtctaaaaaaactgtgat

SEQ ID NO: 172601 - DNA, 120 bp, Artificial Sequence
  ENSG00000109452_62 (sequence is synthesized)
catcagttacagagggaaggaaacatattgaacacaaggcatcatagtagctggaggccttaaaaattatgcacgaccaaaaagaatgatttggtgagagatgtgtagctgattgacaat

SEQ ID NO: 172602 - DNA, 120 bp, Artificial Sequence
  ENSG00000109452_63 (sequence is synthesized)
tttagtgtgaattcatattcatttaacccagcagcaatctacataagctatgctttttcccacctgtatttatgtttcttagcttataaagtcccaatatattatatcttttgttgcttt

SEQ ID NO: 172603 - DNA, 120 bp, Artificial Sequence
  ENSG00000109452_64 (sequence is synthesized)
ggcagttttaatttagagctctgcgttcacagagatgccacctatagcaaaaactatctttaagaattggaaaataaaatgaatgttttagataaaatattgcaagccattatgtgtaga

SEQ ID NO: 172604 - DNA, 120 bp, Artificial Sequence
  ENSG00000109452_65 (sequence is synthesized)
gttaatgtatggaaatttgcatttgtttttctgaatcatggtgtacattaatcactcattgaattctatttctaagcaaataagagaatcaaacatttctaaaaggaacatatgtcttgc

SEQ ID NO: 172605 - DNA, 120 bp, Artificial Sequence
  ENSG00000109452_66 (sequence is synthesized)
tattaataacaaggagacaggaaaaatagtaaggtaatataagcaaaaaaaaaaatgtaatgaatttagctatcctaaattggaatttttacagattgcatgcatacttagaattttaaa

SEQ ID NO: 172606 - DNA, 120 bp, Artificial Sequence
  ENSG00000109452_67 (sequence is synthesized)
tttttaaaagatttacaattgagtatggtacccacagagagtgagtaccaagggaaggaagacctaatacaagtgatgttgcctgataaatcacatcttgccaaaaaaaatatattttag

SEQ ID NO: 172607 - DNA, 120 bp, Artificial Sequence
  ENSG00000109452_68 (sequence is synthesized)
taaatacagttctttaggaagaaaaatgttgccctttcacactcacagtgtaaatacattcataatattccttcaatcatctaaattaccgccaggtcatgaaaggacgcgatcaatgat

SEQ ID NO: 172608 - DNA, 120 bp, Artificial Sequence
  ENSG00000109452_69 (sequence is synthesized)
gacctattgcactcacaggtaacattgactcaaattttggcaatattgctatattatctagataattcttgtgatgtttttatgtcactatcaacattaaaaatattttgttaaacaact

SEQ ID NO: 172609 - DNA, 120 bp, Artificial Sequence
  ENSG00000109452_70 (sequence is synthesized)
atgaaactttcaaaagtttgcatataactgtatgggcactctcatttcactgcatacatacaatactttgtatacacatacttctcgtgtggatattttataattttatttaatctaaca

SEQ ID NO: 172610 - DNA, 120 bp, Artificial Sequence
  ENSG00000109452_71 (sequence is synthesized)
tttaacttttaggtttttgtggtactcatctgaaaggttggcatttgttttctttttatgttatatatgtattttagatgaatcaataatgtgtattcctagaaattttttctaggcata

SEQ ID NO: 172611 - DNA, 120 bp, Artificial Sequence
  ENSG00000109452_72 (sequence is synthesized)
aatagatcattttatgttggcatttaagagatatcatttttgttttattgttctgtgtaaaccatattcattgtacactgtgtgtatatttttgtttaaataaatgatttttatttttta

SEQ ID NO: 172612 - DNA, 120 bp, Artificial Sequence
  ENSG00000109452_73 (sequence is synthesized)
atccgatgatcctgaaacaggctgtctaactgataacaagccaacttctcgacacttctatcctgtcgccttgctgcttgtcagctcacacctgctagttgtgtggcttattttaagtct

SEQ ID NO: 172613 - DNA, 120 bp, Artificial Sequence
  ENSG00000109452_74 (sequence is synthesized)
ggcgttactcttagccaaataccaataagttttatgttgtattcctttttcttttctacaaatgacaatgaactttaaattatggggacaatgctgtaatatttttacattttcaaattc

SEQ ID NO: 172614 - DNA, 120 bp, Artificial Sequence
  ENSG00000109452_75 (sequence is synthesized)
acagaatttaaaaaatgttaaattgtgtttagtttgtttttcctaaaatctaaaaaacaaaaagtactatgcattaggtggattattttgctcttttgttcatggaaaggtgtttcccac

SEQ ID NO: 172615 - DNA, 120 bp, Artificial Sequence
  ENSG00000109452_76 (sequence is synthesized)
tgttaactagctcaagaagaatttttaaattactgtctttggaataagacaaagaacagaatcctgaaagcttgaagttctgaacctcctgtcctcatcccactaaatttattaaagaaa

SEQ ID NO: 172616 - DNA, 120 bp, Artificial Sequence
  ENSG00000109452_77 (sequence is synthesized)
ttaagactgaaatttgcacaaacactgaaaccctgagacaagttctagagatgtgggaggttgcagactttatttccactgtgctaatatcatagatgccatctgctgatagaaattttt

SEQ ID NO: 172617 - DNA, 120 bp, Artificial Sequence
  ENSG00000109452_78 (sequence is synthesized)
tttaacctgttttacttctttgctgcaattaactcttttctgtcaagtaactttatggagagaatggctatttatgttttgtaattaaattacctgtttgtatctcttgtttgggttgat

SEQ ID NO: 172618 - DNA, 120 bp, Artificial Sequence
  ENSG00000109452_79 (sequence is synthesized)
ttggctttcagaggacttttctattctttttaacaaggtcttgtttgtgtcttgatgtaccattcccagcacttgtgacttttgtactgtccgtggacaagcactcttcctttataaagc

SEQ ID NO: 172619 - DNA, 120 bp, Artificial Sequence
  ENSG00000109452_80 (sequence is synthesized)
tgagacttggcccaggctgttcagaaagccattttctctcttccttgcacagctaaaataataaaatagagatgaaatttttctttaaaaatctatagggccagacttaataaattaaat

SEQ ID NO: 172620 - DNA, 120 bp, Artificial Sequence
  ENSG00000109452_81 (sequence is synthesized)
gccttatttctagaacctgcatccttagggctacatatagattttaatgtgttttaaagagactgagaaattaatttgtggaaatgttataaaaaggcagatatatttatgaaactaaag

SEQ ID NO: 172621 - DNA, 120 bp, Artificial Sequence
  ENSG00000109452_82 (sequence is synthesized)
tggagctgtattgtggagcaaattatatttaaagagtttattaaattttaaatgttaagagtaaagagacttaagtcatctctttcagagggcaataatggtattgggcctggcctagga

SEQ ID NO: 172622 - DNA, 120 bp, Artificial Sequence
  ENSG00000109452_83 (sequence is synthesized)
tttaattttgtaagatgtatcatcacttgtggaaaaaaaaaatgtagagttgaatctttgttatttttacttggatggttgctgcaactctgcattaaacaaataaagcatatttattta

SEQ ID NO: 172623 - DNA, 120 bp, Artificial Sequence
  ENSG00000109452_84 (sequence is synthesized)
ccacagatgcacaggagctgtaatttcagatgctggtgtcatctctggatcctctggggttaaaaatccatggacacaatctctaaatcctattccagttccagcctcctatggtcttag

SEQ ID NO: 172624 - DNA, 120 bp, Artificial Sequence
  ENSG00000109452_85 (sequence is synthesized)
tgtaagccaccacttgtagaaggtctgttttttttctatggaagcggatgattgtaaaaagtgtcatgtggatatgcaattcagtatacatctgtaccagcatgcaaggatctcgtggct

SEQ ID NO: 172625 - DNA, 89 bp, Artificial Sequence
  ENSG00000109452_86 (sequence is synthesized)
agcttttgggccccccagccttcgaccacagattgaaggctacactgttggcctccctacttttgaggttttggaacttggactggctt

SEQ ID NO: 172626 - DNA, 120 bp, Artificial Sequence
  ENSG00000109452_87 (sequence is synthesized)
ggcctccctacttttgaggttttggaacttggactggcttccttgctcctcagtttgcagacagcctattgtggaacttcaccttgtgatcgtagccttgaaaccagcgaaacaataatc

SEQ ID NO: 172627 - DNA, 120 bp, Artificial Sequence
  ENSG00000109452_88 (sequence is synthesized)
tggatgctgctgaacatctacatgcaaggatctcgtggctcctgtccgtgatcgtaaactgaatacactggtgcagatctccgtaatccaccccgtggagcagagtctgacaagatactc

SEQ ID NO: 172628 - DNA, 120 bp, Artificial Sequence
  ENSG00000109452_89 (sequence is synthesized)
tcatctctggatcctctggggttaaaaatccatggacacaatctctaaatcctattccagttccagcctcctatggtcttagaatacaaagaaatggtgttacctggcaagaggtcttct

SEQ ID NO: 172629 - DNA, 120 bp, Artificial Sequence
  ENSG00000109452_90 (sequence is synthesized)
gggttcccggcagaaggggccatcttcagaggctctggttgcatgactgtttggagtttgatggcctgaagatggaagaagctattcagggaaggagtgacttccagctttgaaacaaga

SEQ ID NO: 172630 - DNA, 120 bp, Artificial Sequence
  ENSG00000109452_91 (sequence is synthesized)
actttagaaacttcagaagcatacggaaaaggaaacaagaaaaatgtaatcaagcaagcctcttgaaatgatacaataatataatagcagaattagatccacagaatttatacaattaaa

SEQ ID NO: 172631 - DNA, 120 bp, Artificial Sequence
  ENSG00000109452_92 (sequence is synthesized)
tggaaaagatgcctcctgattattctactactcacgaaagattggctggcctcccagtataccagtctagtaagtctgcacataatggcatgaaatcaaaagacataaattcaattgaaa

SEQ ID NO: 172632 - DNA, 120 bp, Artificial Sequence
  ENSG00000109452_93 (sequence is synthesized)
atatgcagagaaaattatagttagtgaaacaactctgggtgctgtattttacctcttgttattttctagcctgttggtctcttttcttttagggaaaatgatacattttcaccctttaat

SEQ ID NO: 172633 - DNA, 120 bp, Artificial Sequence
  ENSG00000109452_94 (sequence is synthesized)
cttgagacaacttgctcagtcacctgttcaaatgtctgcaggatggttggccaagtgcaagacatcacatgagcttcttgacagctgcacgatggtaacttaatgagacacaacagtttt

SEQ ID NO: 172634 - DNA, 120 bp, Artificial Sequence
  ENSG00000109452_95 (sequence is synthesized)
cttgtgaaatagctggacatgcagagaggtcacatgaataataagctcacacctgtgttcccgccacccggatattattcaaagcacaaaacatcataaataaagtcaaggtcctctata

SEQ ID NO: 172635 - DNA, 120 bp, Artificial Sequence
  ENSG00000109452_96 (sequence is synthesized)
gagtatcccatctatgaggagaccaaaataaaactaacagtctatgatgtcaaggataagtctcatgacaccttcaggatcaacagattaacttcactgtgaattttttgacccctgagg

SEQ ID NO: 172636 - DNA, 120 bp, Artificial Sequence
  ENSG00000109452_97 (sequence is synthesized)
caagtgttcaaaccagtattgacttggcttcttccaaccttcattttatgtgtcagctgtgatgcaatacttcaagtgcttcataaagataagggctgcacttttccctcagagcactgg

SEQ ID NO: 172637 - DNA, 120 bp, Artificial Sequence
  ENSG00000109452_98 (sequence is synthesized)
aaagcgcagatggggagagtcatttgccccacaccctacacagcccggaataaccaggaatacaaagaaatggtgttacctggcaagaggtcttctgtcttttatgaaaaattagacaaa

SEQ ID NO: 172638 - DNA, 120 bp, Artificial Sequence
  ENSG00000109452_99 (sequence is synthesized)
ataaatagcaggttacagctcctcctgggcgcgcacacgctcacacgctcgcaagcgaacgcaggaaagtcaggctaaaagtgtctgctgctgctgccgccccccactccgcctccggga

SEQ ID NO: 172639 - DNA, 120 bp, Artificial Sequence
  ENSG00000109452_100 (sequence is synthesized)
gagcctcgtgaagggaatcctgttaaaattcattttacaaactgaaaaacagctttaaaaaggaaaagttatcagcccaaggacattaagaggaacttacaacagcactatctctttgct

SEQ ID NO: 172640 - DNA, 120 bp, Artificial Sequence
  ENSG00000109452_101 (sequence is synthesized)
caggttaagaaagagaacaattgcctttgaagcttctccagtgcccatccggttggcatctgtctgttcttcctaagacataaatactattttgaagtttgtggctacagtttccttgct

SEQ ID NO: 172641 - DNA, 120 bp, Artificial Sequence
  ENSG00000109452_102 (sequence is synthesized)
ttttctttagagtttatctgtatttctttatcctaaagaatatcttttttggtttttcatgcatttaaagttatataaatgaaatcattatgtttgtcaaattcttctataacttgcatt

SEQ ID NO: 172642 - DNA, 120 bp, Artificial Sequence
  ENSG00000109452_103 (sequence is synthesized)
caaccacagatgcacaggagctgagaattctcccaagccaaatacctgcatccaagatcttgtcatgttctattttggagaaacccaaatgaagatgtattcttccttgagtaatttcag

SEQ ID NO: 172643 - DNA, 120 bp, Artificial Sequence
  ENSG00000109452_104 (sequence is synthesized)
ctcattaagtgagaatctaatgggctggaaaaattcaacagactaacctcagatgaagtaatatatttattgaaaaaaatagcaccttgttagctggaaaataatgatacattgacttac

SEQ ID NO: 172644 - DNA, 120 bp, Artificial Sequence
  ENSG00000109452_105 (sequence is synthesized)
aaattaaagtcgagatggacctgaggaagaccacatgagggctgatggggaagaggcatttgaagctatttgccagtttataattctgtctcctcaaagagtagccttgaaaccagcgaa

SEQ ID NO: 172645 - DNA, 120 bp, Artificial Sequence
  ENSG00000109452_106 (sequence is synthesized)
agacagcagaaggatcactgggctggaagctctaacaggcattgccagcctagctacctgcagtttgaggcaagggcagggtcacttaccctgctgtctgaatgtctcctgggacaacag

SEQ ID NO: 172646 - DNA, 120 bp, Artificial Sequence
  ENSG00000109452_107 (sequence is synthesized)
atatatttttaaaatatactaagaaacaacaacagataattttatcttgtcaaatggcaagaaatgcttgatgagcgaacacaagtttactaaaaaaatattatttcaagtcatcatgga

SEQ ID NO: 172647 - DNA, 120 bp, Artificial Sequence
  ENSG00000109452_108 (sequence is synthesized)
caactacaccatttcttgaagaattttttaaaaactactctttcaagggtattacagataaacccgtggatgttttactgtccatttttgtcatttttttctttgagattttttaattcc

SEQ ID NO: 172648 - DNA, 120 bp, Artificial Sequence
  ENSG00000109452_109 (sequence is synthesized)
acaaatcctccgacgtcacctattattgtatgagtaacttctattcatttcccaatgaaagaataatagcttcttaaatatttttatcatgtttaagggtgtgcatatttatttaatcag

SEQ ID NO: 172649 - DNA, 120 bp, Artificial Sequence
  ENSG00000109452_110 (sequence is synthesized)
aagtaaaacaagaacaaattctaggaaaaagaaattcagtaaggaagagggctttttcgtctaattttaactaaatctttgatatttgattctctactcttaaccaaagtattcaaatta

SEQ ID NO: 172650 - DNA, 120 bp, Artificial Sequence
  ENSG00000109452_111 (sequence is synthesized)
tttaggaatttcaatgaccttgctttctaaattaggaaaacagccacaccaatcaatttgctaggtgccatattgctttgtataagttattttccatcaaggatttgtgtctgctttgtg

SEQ ID NO: 172651 - DNA, 120 bp, Artificial Sequence
  ENSG00000109452_112 (sequence is synthesized)
tgctgctatataataattatgtcttgctgaagttcttctgcttattgaattcctctactgaagttccttacttattcaaataagtaaggtaggaggtacttagtcaattgagcagctaat

SEQ ID NO: 172652 - DNA, 120 bp, Artificial Sequence
  ENSG00000109452_113 (sequence is synthesized)
tggctaaaagtgtcttgagcacaagataagcatgtactgaaaaactgagtatctcttgtccattgttaactgtatttctaatggttgattgcatttaaattaaataattcacccctacaa

SEQ ID NO: 172653 - DNA, 120 bp, Artificial Sequence
  ENSG00000109458_0 (sequence is synthesized)
gtgtgtgtgtgtgtgtgtgagcagcgctgtgtctgtttcggaaagcgctctggggaggtcttgtccctagggggcggagcgcaaaggacagaagctccggcaccgagtcggggcagagtc

SEQ ID NO: 172654 - DNA, 120 bp, Artificial Sequence
  ENSG00000109458_1 (sequence is synthesized)
ccgctgagtccgagcgctgctgaggcagctggcgagacggcacgtctggaggcgaggcgggcgcactgaaaggaggccggcgcgcccgcggccccggctcgcgttctgttcaggttcgtg

SEQ ID NO: 172655 - DNA, 120 bp, Artificial Sequence
  ENSG00000109458_2 (sequence is synthesized)
ggcctgcagaggagagactcgaactcgtggaacccgcgcaccgtggagtctgtccgcccagtccgtccggggtgcgcgaccaggagagctaggttctcgccactgcgcgctcggcaggcg

SEQ ID NO: 172656 - DNA, 120 bp, Artificial Sequence
  ENSG00000109458_3 (sequence is synthesized)
tcggctgtgtcgggagcgcgcccgccgcccctcagctgcccggcccggagcccgagacgcgcgcaccatgagcggtggtgaagtggtctgctccggatggctccgcaagtcccccccgga

SEQ ID NO: 172657 - DNA, 120 bp, Artificial Sequence
  ENSG00000109458_4 (sequence is synthesized)
gaaaaagttgaagcgttatgcatggaagaggagatggttcgtgttacgcagtggccgtttaactggagatccagatgttttggaatattacaaaaatgatcatgccaagaagcctattcg

SEQ ID NO: 172658 - DNA, 120 bp, Artificial Sequence
  ENSG00000109458_5 (sequence is synthesized)
tattattgatttaaatttatgtcaacaagtagatgctggattgacatttaacaaaaaagagtttgaaaacagctacatttttgatatcaacactattgaccggattttctacttggtagc

SEQ ID NO: 172659 - DNA, 120 bp, Artificial Sequence
  ENSG00000109458_6 (sequence is synthesized)
agacagcgaggaggagatgaataagtgggttcgttgtatttgtgacatctgtgggtttaatccaacagaagaagatcctgtgaagccacctggcagctctttacaagcaccagctgattt

SEQ ID NO: 172660 - DNA, 120 bp, Artificial Sequence
  ENSG00000109458_7 (sequence is synthesized)
acctttagctataaatacagcaccaccatccacccaggcagattcatcctctgctactctacctcctccatatcagctaatcaatgttccaccacacctggaaactcttggcattcagga

SEQ ID NO: 172661 - DNA, 120 bp, Artificial Sequence
  ENSG00000109458_8 (sequence is synthesized)
ggatcctcaagactacctgttgctcatcaactgtcaaagcaagaagcccgaacccaccagaacgcatgctgattctgcaaaatccacctcttctgaaacagactgcaatgataacgtccc

SEQ ID NO: 172662 - DNA, 120 bp, Artificial Sequence
  ENSG00000109458_9 (sequence is synthesized)
ttctcataaaaatcctgcttcctcccagagcaaacatggaatgaatggcttttttcagcagcaaatgatatacgactctccaccttcacgtgccccatctgcttcagttgactccagcct

SEQ ID NO: 172663 - DNA, 120 bp, Artificial Sequence
  ENSG00000109458_10 (sequence is synthesized)
ttataacctgcccaggagttattcccatgatgttttaccaaaggtgtctccatcaagtactgaagcagatggagaactctatgtttttaataccccatctgggacatcgagtgtagagac

SEQ ID NO: 172664 - DNA, 120 bp, Artificial Sequence
  ENSG00000109458_11 (sequence is synthesized)
tcaaatgaggcatgtatctattagttatgacattcctccaacacctggtaatacttatcagattccacgaacatttccagaaggaaccttgggacagacatcaaagctagacactattcc

SEQ ID NO: 172665 - DNA, 120 bp, Artificial Sequence
  ENSG00000109458_12 (sequence is synthesized)
agatattcctccacctcggccaccgaaaccacatccagctcatgaccgatctcctgtggaaacgtgtagtatcccacgcaccgcctcagacactgacagtagttactgtatccctacagc

SEQ ID NO: 172666 - DNA, 120 bp, Artificial Sequence
  ENSG00000109458_13 (sequence is synthesized)
agggatgtcgccttcacgtagtaataccatttccactgtggatttaaacaaattgcgaaaagatgctagttctcaagactgctatgatattccacgagcatttccaagtgatagatctag

SEQ ID NO: 172667 - DNA, 120 bp, Artificial Sequence
  ENSG00000109458_14 (sequence is synthesized)
ttcacttgaaggcttccataaccactttaaagtcaaaaatgtgttgacagtgggaagtgtttcaagtgaagaactggatgaaaattacgtcccaatgaatcccaattcaccaccacgaca

SEQ ID NO: 172668 - DNA, 120 bp, Artificial Sequence
  ENSG00000109458_15 (sequence is synthesized)
acattccagcagttttacagaaccaattcaggaagcaaattatgtgccaatgactccaggaacatttgatttttcctcatttggaatgcaagttcctcctcctgctcatatgggcttcag

SEQ ID NO: 172669 - DNA, 120 bp, Artificial Sequence
  ENSG00000109458_16 (sequence is synthesized)
gtccagcccaaaaacccctcccagaaggccagttcctgttgcagactgtgaaccaccccccgtggataggaacctcaagccagacagaaaaggtcaaagtcctaaaattttaagactcaa

SEQ ID NO: 172670 - DNA, 120 bp, Artificial Sequence
  ENSG00000109458_17 (sequence is synthesized)
accccatggtttagagcgaactgattcacaaaccataggtgactttgctacaagaagaaaggtcaagccagcgcctttagaaataaaacctttgccagaatgggaagaattacaagcccc

SEQ ID NO: 172671 - DNA, 120 bp, Artificial Sequence
  ENSG00000109458_18 (sequence is synthesized)
agttagatctcccatcactaggagttttgctcgagactcttccaggtttcccatgtccccccgaccagattcagtgcatagcacaacttcaagcagtgactcacacgacagtgaagagaa

SEQ ID NO: 172672 - DNA, 120 bp, Artificial Sequence
  ENSG00000109458_19 (sequence is synthesized)
ttatgttcccatgaacccaaacctgtccagtgaagacccaaatctctttggcagtaacagtcttgatggaggaagcagccctatgatcaagcccaaaggagacaaacaggtggaatactt

SEQ ID NO: 172673 - DNA, 120 bp, Artificial Sequence
  ENSG00000109458_20 (sequence is synthesized)
agatctcgacttagattctgggaaatccacaccaccacgtaagcaaaagagcagtggctcaggcagcagtgtagcagatgagagagtggattatgttgttgttgaccaacagaagacctt

SEQ ID NO: 172674 - DNA, 120 bp, Artificial Sequence
  ENSG00000109458_21 (sequence is synthesized)
ggctctaaagagtacccgggaagcctggacagatgggagacagtccacagaatcagaaacgccagcgaagagtgtgaaatgaaaatattgccttgccatttctgaacaaaagaaaactga

SEQ ID NO: 172675 - DNA, 120 bp, Artificial Sequence
  ENSG00000109458_22 (sequence is synthesized)
attgtaaagataaatcccttttgaagaatgacttgacacttccactctaggtagatcctcaaatgagtagagttgaagtcaaaggacctttctgacataatcaagcaatttagacttaag

SEQ ID NO: 172676 - DNA, 120 bp, Artificial Sequence
  ENSG00000109458_23 (sequence is synthesized)
tggtgctttgtggtatctgaacaattcataacatgtaaataatgtgggaaaatagtattgtttagctcccagagaaacatttgttccacagttaacacactcgtagtattactgtattta

SEQ ID NO: 172677 - DNA, 120 bp, Artificial Sequence
  ENSG00000109458_24 (sequence is synthesized)
tgcactttttcatctaaaacattgttctgggttttcccaatgtaccttaccataattcctttgggagttcttgttttttgtcacactactttatataacaatactaagtcaactaagcta

SEQ ID NO: 172678 - DNA, 120 bp, Artificial Sequence
  ENSG00000109458_25 (sequence is synthesized)
cttttagatttggaaattgctgtttacagtctaacaacattaaaatgagaggtagattcacaagttagctttctacctgaagcttcaggtgataaccattagcttatacttggactcatc

SEQ ID NO: 172679 - DNA, 120 bp, Artificial Sequence
  ENSG00000109458_26 (sequence is synthesized)
atttgttgccttccaaaatgctgaggataatgtatgtactggtgtcaggacctagttctctggttaatgtacatttagtttttaatggtggaactttgttatattttgttaattacagtg

SEQ ID NO: 172680 - DNA, 120 bp, Artificial Sequence
  ENSG00000109458_27 (sequence is synthesized)
tttttggttcattgagtgaagattctgccgggtgggatcttgcacctttgaaagactgaataattacactaccaagtaagcctgcaaatcattgatggcatgcagtgatgatgtgctctt

SEQ ID NO: 172681 - DNA, 120 bp, Artificial Sequence
  ENSG00000109458_28 (sequence is synthesized)
acacttgttaacatgtattaagtgttatttgcaaaaggtagattatgtaaccaatcaggtacgtaccaggcagtgatgtgctaatacactgatcaggtttagacaatgagctttggttgt

SEQ ID NO: 172682 - DNA, 120 bp, Artificial Sequence
  ENSG00000109458_29 (sequence is synthesized)
gttcttgttagtcctaatattggttttcagtttggaattaataaagcagttgacattcactgttagttacagcaacatactgtgatttttaattagatagtaattcagatttattactct

SEQ ID NO: 172683 - DNA, 120 bp, Artificial Sequence
  ENSG00000109458_30 (sequence is synthesized)
atgaaattctgtcttttgacaccatagtgccctttctatgattttttttacttaatattcttcttggccttatatttaattccctatgcaattaatattttatatctgcatttttttaaa

SEQ ID NO: 172684 - DNA, 120 bp, Artificial Sequence
  ENSG00000109458_31 (sequence is synthesized)
aaaaatagatgttatataagtgattctcgtatgtagcacctgttgcttttccactgaaagaattacggattttgtactgtgatttatattcactgccccaattcaagaaatattggagcc

SEQ ID NO: 172685 - DNA, 120 bp, Artificial Sequence
  ENSG00000109458_32 (sequence is synthesized)
ttgctacaatgtgaaatgttatagtcatggactccttccaaccagatttctgaaaacaccagagggatggtataattctgtctcacctataacatggtcctgtgacatagatattaagac

SEQ ID NO: 172686 - DNA, 120 bp, Artificial Sequence
  ENSG00000109458_33 (sequence is synthesized)
aagcacgtatagttgttttttaaccaagttacatacaatctcatgtactgatttgagacttataacaatttttggagggggcatagagaaaggagtgcccacagttgaggcatgaccccc

SEQ ID NO: 172687 - DNA, 120 bp, Artificial Sequence
  ENSG00000109458_34 (sequence is synthesized)
tccattcagacctctaactgttgcctgagtacacagatgtgccctgatttctggcccattggccatagtactgtgcctaatcaatgtaataggtttattttcccaatcctcaaactaaaa

SEQ ID NO: 172688 - DNA, 120 bp, Artificial Sequence
  ENSG00000109458_35 (sequence is synthesized)
atgttcataacaagatgaattgtagactagtaacatttgatgcttttaaatatttgcttctttttaaacaaaaactaaaacccagaagtgaatttttaggtggatttttaaataaaaaag

SEQ ID NO: 172689 - DNA, 120 bp, Artificial Sequence
  ENSG00000109458_36 (sequence is synthesized)
attgattgagtttggtgtgcaagctgttttataatgaaacaacaaaatgaaatctaaaatcctgaaatgtgcctaaactatcaaaacacacgatacagctaatgtgtaaagatgctaaat

SEQ ID NO: 172690 - DNA, 120 bp, Artificial Sequence
  ENSG00000109458_37 (sequence is synthesized)
tctgttacttggaggatgaatatatttaagatttaaaacacaataataaatacatgattaattcaaaaataaaaatctttacagctgcctatcaagggtctaaagcacttaatgaatgtt

SEQ ID NO: 172691 - DNA, 120 bp, Artificial Sequence
  ENSG00000109458_38 (sequence is synthesized)
tttagtctaacttatcattaactttttacaagtcaccatatttgaagatctgtagcactctgattttcagaaaatttttcattctgaataatttaaaaatggtgatgtattagaaaggca

SEQ ID NO: 172692 - DNA, 120 bp, Artificial Sequence
  ENSG00000109458_39 (sequence is synthesized)
gtttgctttagaaaactaaatcacattgaacattgtattagagaattaaattaaaagtttcttacagagcagtattttccaaacatttttagcactagaatctttttagatgaaatttta

SEQ ID NO: 172693 - DNA, 120 bp, Artificial Sequence
  ENSG00000109458_40 (sequence is synthesized)
tgtataaccccaatacataaagcctgaaaactcaattttatcaatataaatgtattttgggttcacatttatgcttattcattttggctcattactaagcataataagattctgagttat

SEQ ID NO: 172694 - DNA, 120 bp, Artificial Sequence
  ENSG00000109458_41 (sequence is synthesized)
ttctgaataacacaaatgtggagttatacatagttgatgaaaccagcagccaatttatagctatgccctgttttatttgtatactatcaagaaaattttgattcacacaaatgtaagcaa

SEQ ID NO: 172695 - DNA, 120 bp, Artificial Sequence
  ENSG00000109458_42 (sequence is synthesized)
aaataataggttttaaacatacatctcaggaaattctttaattagagatagctaaagttattcaaggtctatacaaaaataagttatcctggtagtggaagttaatacataagcagtctc

SEQ ID NO: 172696 - DNA, 120 bp, Artificial Sequence
  ENSG00000109458_43 (sequence is synthesized)
cagtgtggtaaagtagggtatgtaacacatcagaatgtgcgtttttattaggttttaaaatatgcacgtataaaaactaaatttgaatcaaacccttttaactcacctccaagaagctag

SEQ ID NO: 172697 - DNA, 120 bp, Artificial Sequence
  ENSG00000109458_44 (sequence is synthesized)
actttggccaggaatgggctaaaaaccactggttaacgatgtgacagttatgatcttggagattggaaatctttcttccacattagagttctttaccttaattccttattctgaaaaatt

SEQ ID NO: 172698 - DNA, 120 bp, Artificial Sequence
  ENSG00000109458_45 (sequence is synthesized)
gtaagattttatgaaggtttgaatactgaagcacagttctgctttcaaaaattaaaattcaaacttgaaaaagctgtttaacccatggaagatatcatttagtaagatgtaaaagatttt

SEQ ID NO: 172699 - DNA, 120 bp, Artificial Sequence
  ENSG00000109458_46 (sequence is synthesized)
ttaaatctacacttcagtttatacatctttatcattatcaatactatataagttactgtgagcattttagagaattccataaaggtactatgagtgtgtctgtatgtgtgtgtatatata

SEQ ID NO: 172700 - DNA, 120 bp, Artificial Sequence
  ENSG00000109458_47 (sequence is synthesized)
gcattgtatttaatcatagactaaatttaatttgatatagaaatactactttacttgtacattaaggtcataatttctgctggactcttttatatttaattaatggggattatagtcttc

SEQ ID NO: 172701 - DNA, 120 bp, Artificial Sequence
  ENSG00000109458_48 (sequence is synthesized)
cttcataaatgcatttaaacctgaaattgaacaccagtgtttttctttttctacttatgggaagttgtctgcttccccctttagagaaaacagtatttttatattttgttaaaatattaa

SEQ ID NO: 172702 - DNA, 120 bp, Artificial Sequence
  ENSG00000109458_49 (sequence is synthesized)
ctactttatgcctacacactatgctgtagatactgatcataattcttgggtgttcacaaacactcctagtgcctcttttttggcccgttgaaagtgttggtattactactttcactacag

SEQ ID NO: 172703 - DNA, 120 bp, Artificial Sequence
  ENSG00000109458_50 (sequence is synthesized)
agcctttggccctctaataatgctgaggtgggctgatccttcccatttctgtcttcgggtcattctggtaggtcttctcctccactgtcaagtaagcaatcaggtccgtgacagggattg

SEQ ID NO: 172704 - DNA, 120 bp, Artificial Sequence
  ENSG00000109458_51 (sequence is synthesized)
gacatatgaacaaattaagtggatacacacagtgagaaagatacatgcattctatggtaacaactactgtcaataacatctgatgttacatgcacatttatatatatataattttaaaaa

SEQ ID NO: 172705 - DNA, 120 bp, Artificial Sequence
  ENSG00000109458_52 (sequence is synthesized)
ctgaactatgagaagccatggtataaatgaatattgtggacatcatggacttgatatgatagaaatcaattgtcagcttgagaaagttgtttttaatctgtctaaatagttcatgcatta

SEQ ID NO: 172706 - DNA, 120 bp, Artificial Sequence
  ENSG00000109458_53 (sequence is synthesized)
ctacagttaaaaatagtttcatttgtcttctatagacttaattttattccggttcagtataatctctgttaacagagtttcagcaaactgattggtcaaggtattaacatagcttctact

SEQ ID NO: 172707 - DNA, 120 bp, Artificial Sequence
  ENSG00000109458_54 (sequence is synthesized)
tcctttacttaaaaagatgtggttttatgtaagttcttgattactgatgatcatcccaaattttgacaacaaaatcatatgtataaatttatttctcccctcttgttcatcatcttttgt

SEQ ID NO: 172708 - DNA, 120 bp, Artificial Sequence
  ENSG00000109458_55 (sequence is synthesized)
aaaggtcccattgtagatcttttctgctaccaaataaaacttttcaaacaatttggtttcaagaccttaaatagacaagttggatactaagattgtgaactgataaggacatataaattt

SEQ ID NO: 172709 - DNA, 120 bp, Artificial Sequence
  ENSG00000109458_56 (sequence is synthesized)
atatttccagcccttccttagagtctttatctgcatcaaaaacccaattctgccattaactgtgcttcccagtcccacctctatatgtcactcattttctgcaacaaagatctcactaaa

SEQ ID NO: 172710 - DNA, 120 bp, Artificial Sequence
  ENSG00000109458_57 (sequence is synthesized)
tcatgttgaaacacaagtcatgatcctctctaagtaaatagaaaaagctccctggaaaaactctgttgccacatgcacgtgccctgttactcctccagccagccagtgctgccagcattt

SEQ ID NO: 172711 - DNA, 120 bp, Artificial Sequence
  ENSG00000109458_58 (sequence is synthesized)
tattgtgtaaaagtccaaataaataagggcctgcatgcaacctttatcttcagaaactaggttttatatgtaaaatgtgacttgggaaatgattctgtttattaactggctgggattttt

SEQ ID NO: 172712 - DNA, 120 bp, Artificial Sequence
  ENSG00000109458_59 (sequence is synthesized)
catttctatgaaagtttcaaacatctccagtactttataaaatcccaacaattgctgtaagtcagcactttggtccactcagcccacccagcccacttgcaactctgactcttcactgaa

SEQ ID NO: 172713 - DNA, 120 bp, Artificial Sequence
  ENSG00000109458_60 (sequence is synthesized)
tcatatttgggaagtttgggtagggtgaggctatcttcttcaagattattttctcatatgtctgtctgtcaccttgtaaaccatgagactcctgggtatttgcatgtaacttctttgagg

SEQ ID NO: 172714 - DNA, 120 bp, Artificial Sequence
  ENSG00000109458_61 (sequence is synthesized)
aagttaccaccatctctgatatagacacactttttgagttgcagtttctgttagaattttttggagactaacttgccaattctgtgaatgttattgaatatttaaaaagctgggtctgta

SEQ ID NO: 172715 - DNA, 120 bp, Artificial Sequence
  ENSG00000109458_62 (sequence is synthesized)
atgggaggcattttattagctgttgtgattgggtaacatgtccccttagatttcctgatttaaaattatacaaaattactatttttgataaaataaaggaacacctacagaaaattaagt

SEQ ID NO: 172716 - DNA, 120 bp, Artificial Sequence
  ENSG00000109458_63 (sequence is synthesized)
ttctaagatgtttctatacttcattagaaaagattttattactattacttatggttattggtgattaacacttaatgcgtctcctctgattttgtgttccatgaggtgcttggaacattt

SEQ ID NO: 172717 - DNA, 120 bp, Artificial Sequence
  ENSG00000109458_64 (sequence is synthesized)
ggagtgctctgtgcgagggacatacagtgatataggaaatttaaaaattaaaataatacccaaaacccactttatcagatatggtattgtgatggttaatattatgtgtcaacttggtga

SEQ ID NO: 172718 - DNA, 120 bp, Artificial Sequence
  ENSG00000109458_65 (sequence is synthesized)
ggctatggcgcccatgtgtttggtcaaacactagcctagatgttgctgtgaatatattttgtagatgtgattaacatttacaatcagttgattttaagtaaagcagattctcatccataa

SEQ ID NO: 172719 - DNA, 120 bp, Artificial Sequence
  ENSG00000109458_66 (sequence is synthesized)
tatgtcctcttgaaagcaaatatttaggcttccgtagatgttcaacagtacgagtggtatgtctggtgaatgtctgaccgttgattttgttgtctaatactttcagaatctctttggcag

SEQ ID NO: 172720 - DNA, 120 bp, Artificial Sequence
  ENSG00000109458_67 (sequence is synthesized)
caaggacaaagtacactggcttctgaagaaactttttcttgggagcaaggacttgggggtaacaaaatgaggagtaagtgaagaaagaagaaggcacagcttgtcgagattgatggaccg

SEQ ID NO: 172721 - DNA, 120 bp, Artificial Sequence
  ENSG00000109458_68 (sequence is synthesized)
ccccccgcccccgggagagcagcgtaggaaattgcaggatgaaatttgtgtgccagtcttgtcagcacccattcctgttgaaggagagggcatatggatgaggcatggaagaggagatgg

SEQ ID NO: 172722 - DNA, 120 bp, Artificial Sequence
  ENSG00000109458_69 (sequence is synthesized)
ttttaaaattctgtgtgtgtgcatgtgtgtatgcatatgtataatgagagaaagataataggtcatcccaatgaccctgagagctggcaaagatgggaataaatgttgatagtttgttct

SEQ ID NO: 172723 - DNA, 120 bp, Artificial Sequence
  ENSG00000109458_70 (sequence is synthesized)
aaaaattatagaggatctgcagactgagacgcattgggactgaaattaggcaattcagagtttctcatgcatagtctcactgtgttgcccagattggtcttgaactcctggcctcaagtg

SEQ ID NO: 172724 - DNA, 120 bp, Artificial Sequence
  ENSG00000109458_71 (sequence is synthesized)
attgaccttggcatcatcaagtgtatttcattgtctaaatcttcataattagtgccatgagactaagtgatatcatgaaataaaagtacgctgagatccatatgaatgagtgtgacttac

SEQ ID NO: 172725 - DNA, 120 bp, Artificial Sequence
  ENSG00000109458_72 (sequence is synthesized)
actttcctagactctagtcatgaacaggatgttggaagtcagaggtacagagaagctgcctttttaggccgctcacatgaaagccagccatctgggcaacaagaaaggcttactacagtt

SEQ ID NO: 172726 - DNA, 120 bp, Artificial Sequence
  ENSG00000109458_73 (sequence is synthesized)
agataaatttaaccccttctctgacctggcaaggacaaagtacactggcttctgaagaaactttttcttgggagcaaggtagttatttcaaagcacagaaaaaggcggcggggggcacag

SEQ ID NO: 172727 - DNA, 120 bp, Artificial Sequence
  ENSG00000109458_74 (sequence is synthesized)
agaagcacagagaagcgggggcagttgcacaggttgtttattctgttgatggatattggactggagtgatgagtgttctaggatgggtatttgatgatgccaggggactcaagtaatggc

SEQ ID NO: 172728 - DNA, 120 bp, Artificial Sequence
  ENSG00000109458_75 (sequence is synthesized)
tttgcatgaagattacacagtaaagctgcacattgattacctcatcttattagctgatggagatgtttgagaggacaagattgcagggctttcaagcctgtacagctaccaggatttgat

SEQ ID NO: 172729 - DNA, 120 bp, Artificial Sequence
  ENSG00000109458_76 (sequence is synthesized)
atgtcttttgaattgtttagataaggttaggactttcagatcaacttgagttttaatttttagcatttatagaattctaaaattaatcctgtttgtttttgtcttcctccactaaaattt

SEQ ID NO: 172730 - DNA, 120 bp, Artificial Sequence
  ENSG00000109458_77 (sequence is synthesized)
aagtttgctgaggtagacagttttgtttctggaaccactatccctccagcggctagaacagtggaacatgttcaataaatattcaataaatatttttgaataagtgaatgaatgaacagg

SEQ ID NO: 172731 - DNA, 120 bp, Artificial Sequence
  ENSG00000109458_78 (sequence is synthesized)
ttaaatgtaatctttattttttaatgaactatcctttccagagacatacaaattgccagttgatggcattttttatttctttttgtaaaaagagtattttaaaatttgaatgagttctat

SEQ ID NO: 172732 - DNA, 120 bp, Artificial Sequence
  ENSG00000109458_79 (sequence is synthesized)
ctaacagataacacagttgagtacattaaaagggaccttgaacacaaaatccatgttttcgtggattagtatttttgcagcttaaatggtgaacgataggattgttagatgcaaataact

SEQ ID NO: 172733 - DNA, 120 bp, Artificial Sequence
  ENSG00000109458_80 (sequence is synthesized)
ctggaaattaaagacctttagttgtaactctccctaaaatgtttgtgagagcttgtaaaatgttgttcactttattctattataaaagggcattataataaatatgaagttttgaaacca

SEQ ID NO: 172734 - DNA, 120 bp, Artificial Sequence
  ENSG00000109458_81 (sequence is synthesized)
gggtcatcttttgtttctgaagaaggagaggaataccttctactagaagattttgaaagcaaaacgattccattgcaaacgcatgctgattctgcaaaatccacctcttctgaaacagac

SEQ ID NO: 172735 - DNA, 80 bp, Artificial Sequence
  ENSG00000109466_0 (sequence is synthesized)
gaagtggccgagcccgcgcgcccgccggtcccgtcgccgccgccccgcactcgggcgagcgcgggagccgcgcagtagac

SEQ ID NO: 172736 - DNA, 80 bp, Artificial Sequence
  ENSG00000109466_1 (sequence is synthesized)
cgcaggtggtggcgcgcggtgaggagagcgcggcgccccctccggggcggatggaacgcggctcggcgggcgggcagtgc

SEQ ID NO: 172737 - DNA, 120 bp, Artificial Sequence
  ENSG00000109466_2 (sequence is synthesized)
gtgccggcgtccgcggctggaatggtgctggctgtgttggtcggtgcctgcgttctgaagcccgagaggagccacaatggagacgccgccgctgcctcccgcatgcacaaagcagggtca

SEQ ID NO: 172738 - DNA, 120 bp, Artificial Sequence
  ENSG00000109466_3 (sequence is synthesized)
tcagaagcctctcgattcaaaagatgataataccgaaaaacactgcccagtgacagtgaatccttggcatatgaagaaagctttcaaagtcatgaacgaattaagaagtcaaaatttgct

SEQ ID NO: 172739 - DNA, 120 bp, Artificial Sequence
  ENSG00000109466_4 (sequence is synthesized)
gtgcgatgtcacaattgtggcagaagacatggaaatttctgctcatagagtggtgctggccgcctgtagtccttattttcatgccatgtttacaggtgagatgagtgagagccgagcaaa

SEQ ID NO: 172740 - DNA, 120 bp, Artificial Sequence
  ENSG00000109466_5 (sequence is synthesized)
gagagttagaataaaagaggtagatggctggaccctgaggatgctaattgattatgtttacactgcagaaattcaggttacagaagaaaatgtacaggtacttctcccagcagctggtct

SEQ ID NO: 172741 - DNA, 120 bp, Artificial Sequence
  ENSG00000109466_6 (sequence is synthesized)
cttacagttacaggatgtgaagaagacttgttgtgaatttttggaatcccagcttcaccctgtcaactgcttaggaatccgggcttttgctgatatgcatgcatgtaccgaccttctgaa

SEQ ID NO: 172742 - DNA, 120 bp, Artificial Sequence
  ENSG00000109466_7 (sequence is synthesized)
caaggccaacacctatgcagagcaacattttgcagatgttgtacttagtgaagaatttctcaatcttggcatcgaacaagtgtgcagcttaatctcaagtgacaaacttaccatttcttc

SEQ ID NO: 172743 - DNA, 120 bp, Artificial Sequence
  ENSG00000109466_8 (sequence is synthesized)
agaagagaaggtatttgaagcagtaatagcatgggtgaaccatgacaaggatgtgaggcaagagtttatggcccgactgatggaacatgtacggttacctttgcttcctcgggaatattt

SEQ ID NO: 172744 - DNA, 120 bp, Artificial Sequence
  ENSG00000109466_9 (sequence is synthesized)
agttcagagggttgaagaggaagcattggtcaagaatagcagtgcttgcaaagattacctcattgaagcaatgaagtaccatttgctgccaacagagcagcgtatattaatgaagagtgt

SEQ ID NO: 172745 - DNA, 120 bp, Artificial Sequence
  ENSG00000109466_10 (sequence is synthesized)
ccggacccggctgaggacacccatgaaccttcccaaattgatggtggtggttgggggccaagcaccaaaggctatccggagtgtggaatgctatgactttaaagaagaaaggtggcacca

SEQ ID NO: 172746 - DNA, 120 bp, Artificial Sequence
  ENSG00000109466_11 (sequence is synthesized)
agtagcagagttgccttccaggaggtgcagggcaggcatggtctacatggctggacttgtttttgctgttggtggctttaatggctcattaagagttcgcactgtagattcctacgaccc

SEQ ID NO: 172747 - DNA, 120 bp, Artificial Sequence
  ENSG00000109466_12 (sequence is synthesized)
tgtgaaggaccagtggaccagcgttgctaacatgagagaccggagaagcactttgggagctgctgtgttaaatggattattatacgctgtgggaggctttgatgggagtacaggtttgtc

SEQ ID NO: 172748 - DNA, 120 bp, Artificial Sequence
  ENSG00000109466_13 (sequence is synthesized)
ggagcagtgttggtgtgggtgttgttggaggtttgctctatgctgtaggaggttatgatggagcatcacgtcagtgtcttagcacagtagaatgctataatgctacaacaaatgagtgga

SEQ ID NO: 172749 - DNA, 120 bp, Artificial Sequence
  ENSG00000109466_14 (sequence is synthesized)
cctatatagcagaaatgagcaccaggcggagtggagcaggtgttggtgtgttaaacaatttattgtatgctgtaggaggtcatgatggccctttagtacgaaaaagtgttgaagtatatg

SEQ ID NO: 172750 - DNA, 120 bp, Artificial Sequence
  ENSG00000109466_15 (sequence is synthesized)
atcccaccactaacgcatggagacaggttgcagatatgaacatgtgcagaagaaatgcaggagtttgtgcagttaatggtctgttatatgttgttggaggggatgatggttcctgtaact

SEQ ID NO: 172751 - DNA, 120 bp, Artificial Sequence
  ENSG00000109466_16 (sequence is synthesized)
tggcgtcagtagaatattataacccaacaaccgataaatggacagttgtgtcatcgtgtatgagcacagggagaagttatgcaggggtcacagttattgataaaccattatgagcctgaa

SEQ ID NO: 172752 - DNA, 120 bp, Artificial Sequence
  ENSG00000109466_17 (sequence is synthesized)
ggacattttcagcatatttatacatgagaaacagccttcaacaagtatttgtgaagtgactgagaatctagcacttctccacttgtagctgcactttaagtctcagcagaagatacgatc

SEQ ID NO: 172753 - DNA, 120 bp, Artificial Sequence
  ENSG00000109466_18 (sequence is synthesized)
gtctgcctttataggcctcagatactgaagattatttttggtagaagcaccgtgtaggctttttctgcaatgagcagcagctgactgaattttcataagaaacttggactgcaggactta

SEQ ID NO: 172754 - DNA, 120 bp, Artificial Sequence
  ENSG00000109466_19 (sequence is synthesized)
atctgtagtctttagacaacagttgctttcataaagactagttcttatcaaccttgaatgactacagattattttgtgaaggaggatgaagtaatgtgtgttcttgtaaaattaaatttt

SEQ ID NO: 172755 - DNA, 120 bp, Artificial Sequence
  ENSG00000109466_20 (sequence is synthesized)
atctttatttcttctaaaaatctgtataccaggaactgaaaatctttgaacagatattaaaatctacgtaagtatacaaactagttgagggatacactgtttgcttttataaaataactt

SEQ ID NO: 172756 - DNA, 120 bp, Artificial Sequence
  ENSG00000109466_21 (sequence is synthesized)
tgattacatgaatataataaattatgtgcatataaatgtgtgtctatatgctttcctttaaatatgtttgaaaagatgtttgaaacttgattatactatttataattggcacagtacttt

SEQ ID NO: 172757 - DNA, 120 bp, Artificial Sequence
  ENSG00000109466_22 (sequence is synthesized)
gaattatgccagtactacattgtaaaacagagttgtattttttgatatttaacaatgcttaacactttaaatgccacttctgaggaatggacctggtgtaacacacttgaatatgtgtga

SEQ ID NO: 172758 - DNA, 120 bp, Artificial Sequence
  ENSG00000109466_23 (sequence is synthesized)
tgccaaactttttaaaatacaatataaattatgcttatttattattttctttagtttaatcttggtcatgttttggtgtgtatttttaatttttttcttaaattaacactttggcatgaa

SEQ ID NO: 172759 - DNA, 120 bp, Artificial Sequence
  ENSG00000109466_24 (sequence is synthesized)
cattactgcaggtttttgatgaatataatgaatgtatggaattcaattgaatttgcatggtcttcggaattttttctgtgtgtataaatttagctgctattaacagaagagagaactttc

SEQ ID NO: 172760 - DNA, 120 bp, Artificial Sequence
  ENSG00000109466_25 (sequence is synthesized)
tgtgagtagccatgtgtgttgatcagatacagtttttctgagatcttcaattaatctcactttaaaaatgaccaaaacatgtctttcttgaattaactttgaataaaagtttgtatatta

SEQ ID NO: 172761 - DNA, 120 bp, Artificial Sequence
  ENSG00000109466_26 (sequence is synthesized)
actgccagagctgggctagaacagaggccagtggaaactattaggaagactcagcttttcatgaagttagatttttagcctgagctttaagtcaaagaaagatgacctggacttaaagtg

SEQ ID NO: 172762 - DNA, 120 bp, Artificial Sequence
  ENSG00000109466_27 (sequence is synthesized)
ttcgtttttacttttggaacagagggagctaaaggaaagaacaagggaatacttagaatgcagttttatttggagatatctgctaagccacttctgctgaatattctgtgttgatctttg

SEQ ID NO: 172763 - DNA, 120 bp, Artificial Sequence
  ENSG00000109466_28 (sequence is synthesized)
gtgtatgagcacagggagaagttatgcagcctgctcaatgtgaagagacaaggatgaagaccttgatgatgatccacttccccttaatgaatagggtcacagttattgataaaccattat

SEQ ID NO: 172764 - DNA, 120 bp, Artificial Sequence
  ENSG00000109466_29 (sequence is synthesized)
gcacttgttaagacatgctatcgattgttccatgtgaaatactggcagtagtaaggcctcctggtgatctttcccagatggcctcattagcttttgcttagaagttccagttgtgaggta

SEQ ID NO: 172765 - DNA, 120 bp, Artificial Sequence
  ENSG00000109466_30 (sequence is synthesized)
tttttttccttgccaccccttggcctgtttgcctccactcccattaacatccctccaccatggatcccgtgtgccggatttgagacttgcaggcagtgtctttaggaaggaactttaccg

SEQ ID NO: 172766 - DNA, 120 bp, Artificial Sequence
  ENSG00000109471_0 (sequence is synthesized)
ctatcacctaagtgtgggctaatgtaacaaagagggatttcacctacatccattcagtcagtctttgggggtttaaagaaattccaaagagtcatcagaagaggaaaaatgaaggtaatg

SEQ ID NO: 172767 - DNA, 120 bp, Artificial Sequence
  ENSG00000109471_1 (sequence is synthesized)
ttttttcagacaggtaaagtctttgaaaatatgtgtaatatgtaaaacattttgacacccccataatatttttccagaattaacagtataaattgcatctcttgttcaagagttccctat

SEQ ID NO: 172768 - DNA, 120 bp, Artificial Sequence
  ENSG00000109471_2 (sequence is synthesized)
cactctctttaatcactactcacagtaacctcaactcctgccacaatgtacaggatgcaactcctgtcttgcattgcactaagtcttgcacttgtcacaaacagtgcacctacttcaagt

SEQ ID NO: 172769 - DNA, 120 bp, Artificial Sequence
  ENSG00000109471_3 (sequence is synthesized)
tctacaaagaaaacacagctacaactggagcatttactgctggatttacagatgattttgaatggaattaataattacaagaatcccaaactcaccaggatgctcacatttaagttttac

SEQ ID NO: 172770 - DNA, 120 bp, Artificial Sequence
  ENSG00000109471_4 (sequence is synthesized)
gtgctaaatttagctcaaagcaaaaactttcacttaagacccagggacttaatcagcaatatcaacgtaatagttctggaactaaagggatctgaaacaacattcatgtgtgaatatgct

SEQ ID NO: 172771 - DNA, 120 bp, Artificial Sequence
  ENSG00000109471_5 (sequence is synthesized)
gatgagacagcaaccattgtagaatttctgaacagatggattaccttttgtcaaagcatcatctcaacactgacttgataattaagtgcttcccacttaaaacatatcaggccttctatt

SEQ ID NO: 172772 - DNA, 120 bp, Artificial Sequence
  ENSG00000109471_6 (sequence is synthesized)
tatttaaattttatatttattgttgaatgtatggtttgctacctattgtaactattattcttaatcttaaaactataaatatggatcttttatgattctttttgtaagccctaggggctc

SEQ ID NO: 172773 - DNA, 120 bp, Artificial Sequence
  ENSG00000109471_7 (sequence is synthesized)
ccctaggggctctaaaatggtttcacttatttatcccaaaatatttattattatgttgaatgttaaatatagtatctatgtagattggttagtaaaactatttaataaatttgataaata

SEQ ID NO: 172774 - DNA, 120 bp, Artificial Sequence
  ENSG00000109471_8 (sequence is synthesized)
ttacagatgattttgaatggaattaatgtaagtatatttcctttcttactaaaattattacatttagtaatctagctggagatcatttcttaataacaatgcattatactttcttagaat

SEQ ID NO: 172775 - DNA, 120 bp, Artificial Sequence
  ENSG00000109472_0 (sequence is synthesized)
agtagtgcagcccgtggagccgcggctttgcccgtctcctctgggtggccccagtgcgcgggctgacactcattcagccggggaaggtgaggcgagtagaggctggtgcggaacttgccg

SEQ ID NO: 172776 - DNA, 120 bp, Artificial Sequence
  ENSG00000109472_1 (sequence is synthesized)
cggaacttgccgcccccagcagcgccggcgggctaagcccagggccgggcagacaaaagaggccgcccgcgtaggaaggcacggccggcggcggcggagcgcagcgatggccgggcgagg

SEQ ID NO: 172777 - DNA, 120 bp, Artificial Sequence
  ENSG00000109472_2 (sequence is synthesized)
cggggcactggctgcctgcgggtggctcctgggcgccgaagcccaggagcccggggcgcccgcggcgggcatgaggcggcgccggcggctgcagcaagaggacggcatctccttcgagta

SEQ ID NO: 172778 - DNA, 120 bp, Artificial Sequence
  ENSG00000109472_3 (sequence is synthesized)
ctccttcgagtaccaccgctaccccgagctgcgcgaggcgctcgtgtccgtgtggctgcagtgcaccgccatcagcaggatttacacggtggggcgcagcttcgagggccgggagctcct

SEQ ID NO: 172779 - DNA, 120 bp, Artificial Sequence
  ENSG00000109472_4 (sequence is synthesized)
ggtcatcgagctgtccgacaaccctggcgtccatgagcctggtgagcctgaatttaaatacattgggaatatgcatgggaatgaggctgttggacgagaactgctcattttcttggccca

SEQ ID NO: 172780 - DNA, 120 bp, Artificial Sequence
  ENSG00000109472_5 (sequence is synthesized)
gtacctatgcaacgaataccagaaggggaacgagacaattgtcaacctgatccacagtacccgcattcacatcatgccttccctgaacccagatggctttgagaaggcagcgtctcagcc

SEQ ID NO: 172781 - DNA, 120 bp, Artificial Sequence
  ENSG00000109472_6 (sequence is synthesized)
tggtgaactcaaggactggtttgtgggtcgaagcaatgcccagggaatagatctgaaccggaactttccagacctggataggatagtgtacgtgaatgagaaagaaggtggtccaaataa

SEQ ID NO: 172782 - DNA, 120 bp, Artificial Sequence
  ENSG00000109472_7 (sequence is synthesized)
tcatctgttgaaaaatatgaagaaaattgtggatcaaaacacaaagcttgctcctgagaccaaggctgtcattcattggattatggatattccttttgtgctttctgccaatctccatgg

SEQ ID NO: 172783 - DNA, 120 bp, Artificial Sequence
  ENSG00000109472_8 (sequence is synthesized)
aggagaccttgtggccaattatccatatgatgagacgcggagtggtagtgctcacgaatacagctcctccccagatgacgccattttccaaagcttggcccgggcatactcttctttcaa

SEQ ID NO: 172784 - DNA, 120 bp, Artificial Sequence
  ENSG00000109472_9 (sequence is synthesized)
cccggccatgtctgaccccaatcggccaccatgtcgcaagaatgatgatgacagcagctttgtagatggaaccaccaacggtggtgcttggtacagcgtacctggagggatgcaagactt

SEQ ID NO: 172785 - DNA, 120 bp, Artificial Sequence
  ENSG00000109472_10 (sequence is synthesized)
ctgaagagactctgaagacctactgggaggataacaaaaactccctcattagctaccttgagcagatacaccgaggagttaaaggatttgtccgagaccttcaaggtaacccaattgcga

SEQ ID NO: 172786 - DNA, 120 bp, Artificial Sequence
  ENSG00000109472_11 (sequence is synthesized)
atgccaccatctccgtggaaggaatagaccacgatgttacatccgcaaaggatggtgattactggagattgcttatacctggaaactataaacttacagcctcagctccaggctatctgg

SEQ ID NO: 172787 - DNA, 120 bp, Artificial Sequence
  ENSG00000109472_12 (sequence is synthesized)
caataacaaagaaagtggcagttccttacagccctgctgctggggttgattttgaactggagtcattttctgaaaggaaagaagaggagaaggaagaattgatggaatggtggaaaatga

SEQ ID NO: 172788 - DNA, 120 bp, Artificial Sequence
  ENSG00000109472_13 (sequence is synthesized)
tgtcagaaactttaaatttttaaaaaggcttctagttagctgctttaaatctatctatataatgtagtatgatgtaatgtggtcttttttttagattttgtgcagttaatacttaacatt

SEQ ID NO: 172789 - DNA, 120 bp, Artificial Sequence
  ENSG00000109472_14 (sequence is synthesized)
tattacacaaaaaagtatagaaaagatttaagtaattttgccatcctaggcttaaatgcaatattcctggtattatttacaatgcagaattttttgagtaattctagctttcaaaaatta

SEQ ID NO: 172790 - DNA, 120 bp, Artificial Sequence
  ENSG00000109472_15 (sequence is synthesized)
gtgaagttcttttactgtaattggtgacaatgtcacataatgaatgctattgaaaaggttaacagatacagctcggagttgtgagcactctactgcaagacttaaatagttcagtataaa

SEQ ID NO: 172791 - DNA, 120 bp, Artificial Sequence
  ENSG00000109472_16 (sequence is synthesized)
ttgtcgtttttttcttgtgctgactaactataagcatgatcttgttaatgcatttttgatgggaagaaaaggtacatgtttacaaagaggttttatgaaaagaataaaaattgacttctt

SEQ ID NO: 172792 - DNA, 120 bp, Artificial Sequence
  ENSG00000109472_17 (sequence is synthesized)
gcttgtacatataggagcaatactattatattatgtagtccgttaacactacttaaaagtttagggttttctcttggttgtagagtggcccagaattgcattctgaatgaataaaggtta

SEQ ID NO: 172793 - DNA, 120 bp, Artificial Sequence
  ENSG00000109472_18 (sequence is synthesized)
aaaaaaaatccccagtgcatgtatttcagttctctaagatttttggtctggcattgtggtcttatgatgaaaacatgtatcctcttaatggcggcttctcatatattcatcctgtacatt

SEQ ID NO: 172794 - DNA, 120 bp, Artificial Sequence
  ENSG00000109472_19 (sequence is synthesized)
ttaaaatttgttaagcaactactgtgtgctaagcactgcatagcctctatgtatgttattgtggcaggcaaaaggttctgattttgggcacaacctttatataaataacacaaaaattaa

SEQ ID NO: 172795 - DNA, 120 bp, Artificial Sequence
  ENSG00000109472_20 (sequence is synthesized)
atatgataaatagtacctggagcgcctacttcacaagaaagcctgagagagtccagttgtactcaaggagagggagaagtagccaggagacagatccggtaggactgtgaaagccatggt

SEQ ID NO: 172796 - DNA, 120 bp, Artificial Sequence
  ENSG00000109472_21 (sequence is synthesized)
ataaatagatataattaatgaaaatgttaatagtgccggtctccagaatatctctagatcactgaccttctgattggtggaaaaacctttggagaatgatctttacaggattccatggca

SEQ ID NO: 172797 - DNA, 120 bp, Artificial Sequence
  ENSG00000109472_22 (sequence is synthesized)
acattatgaaataatctacattatggaaaaatactgaatatgcagtgtggaaaaaatgaatccatcaatagctgcataacacagtgtattaaaataaaatgttttattcttcatacattc

SEQ ID NO: 172798 - DNA, 120 bp, Artificial Sequence
  ENSG00000109475_0 (sequence is synthesized)
gttgtctgcaggtatggatgttgttctcttttccctgtctttatttccttaccaatcggctgccatccgaggagctgaggaagcctagagctctcagaagcagtcctttgagctggtgta

SEQ ID NO: 172799 - DNA, 120 bp, Artificial Sequence
  ENSG00000109475_1 (sequence is synthesized)
ggggcactcagaatggtccagcgtttgacataccgacgtaggctttcctacaatacagcctctaacaaaactaggctgtcccgaacccctggtaatagaattgtttacctttataccaag

SEQ ID NO: 172800 - DNA, 120 bp, Artificial Sequence
  ENSG00000109475_2 (sequence is synthesized)
ttcgaggggttcgtgctgtaagacctaaagttcttatgagattgtccaaaacaaagaaacatgtcagcagggcctatggtggttccatgtgtgctaaatgtgttcgtgacaggatcaagc

SEQ ID NO: 172801 - DNA, 120 bp, Artificial Sequence
  ENSG00000109475_3 (sequence is synthesized)
gtgctttccttatcgaggagcagaaaatcgttgtgaaagtgttgaaggcacaagcacagagtcagaaagctaaataaaaaaatgaaacttttttgagtaataaaaatgaaaagacgctgt

SEQ ID NO: 172802 - DNA, 120 bp, Artificial Sequence
  ENSG00000109475_4 (sequence is synthesized)
cctcacctcagcttgagagagccagttgtgtgcatctctttccagttttgcatccagtgacgtctgcttggcatcttgagattgttatggtgagagtatttacacctcagcaaatgctgc

SEQ ID NO: 172803 - DNA, 120 bp, Artificial Sequence
  ENSG00000109475_5 (sequence is synthesized)
aaaatcctgttttcccccagagagctggaggttaaatactaccagcacatccctagatactactcaagttacagtatatgatcactaatatagtatgctcttggtaccaggagctctgat

SEQ ID NO: 172804 - DNA, 120 bp, Artificial Sequence
  ENSG00000109475_6 (sequence is synthesized)
atatatctggtacatgtttgataatgacttgattgttattataagtacttattaatacttcgattctgtaaagagtttagggtttgattttataaaatccaaaatgagccttttattgaa

SEQ ID NO: 172805 - DNA, 71 bp, Artificial Sequence
  ENSG00000109475_7 (sequence is synthesized)
tgaaacttttttgagtaataaaaatgaaaagacgctgctggagtacaatggcaggatctcggctcaccgca

SEQ ID NO: 172806 - DNA, 120 bp, Artificial Sequence
  ENSG00000109475_8 (sequence is synthesized)
tttccttaccaatcggctgccatccgaggagctgaggaagcctagagctctcagaagcagtcctttgagctggtgtagggcggtgtttctccaactgggctcgtggcacttttctggaca

SEQ ID NO: 172807 - DNA, 120 bp, Artificial Sequence
  ENSG00000109475_9 (sequence is synthesized)
gtctttatttccttaccaatcggctgccatccgaggagctgaggaagcctagagctctcagaagcagtcctttgagctggtgtaggggtaaggggcacaacagggaggttggtggtgagg

SEQ ID NO: 172808 - DNA, 120 bp, Artificial Sequence
  ENSG00000109475_10 (sequence is synthesized)
aagttccttactttgatctttggaaatcccttgttcctggtggcacctccaaagccgtgagtagccacagctcaccacccgggactttgctgcattccaagtgtagcgtttggagactaa

SEQ ID NO: 172809 - DNA, 120 bp, Artificial Sequence
  ENSG00000109475_11 (sequence is synthesized)
cgagttgtggtttggcggtttgagtctggaaaatcgccaaacgttttcatattttacacccacgttttcacagcacgcctgtacgtgtccttagtctttgggagggcagggtccggcgag

SEQ ID NO: 172810 - DNA, 120 bp, Artificial Sequence
  ENSG00000109475_12 (sequence is synthesized)
ttcgggtggtttcgctatttggcttctgcgtccaaggcccatgtcaaggaagagaaaaatgtgttagaagtttctgtcttgcttttggagatgcaaacagaataatggcttcataaatca

SEQ ID NO: 172811 - DNA, 120 bp, Artificial Sequence
  ENSG00000109475_13 (sequence is synthesized)
ctcgcactggttttacgtgtcaagttttggtgtctggtaattctgttttagtttaattttagtgagaggcttgtgacaacaaatgaggtggttacaaggggtggaatgggaagattaaat

SEQ ID NO: 172812 - DNA, 120 bp, Artificial Sequence
  ENSG00000109475_14 (sequence is synthesized)
tagttcaagtattgattatgttttacgttgggtagttcccttaacgaagttgctcgtatgcatatctgtataaccgatttgctaaataacatcacgatgtttccagaagtgggaagaaag

SEQ ID NO: 172813 - DNA, 120 bp, Artificial Sequence
  ENSG00000109475_15 (sequence is synthesized)
caggtgccataacccaaagaaacttgtgtaatatcaaaattagtattaaagggtatgcctttacgcaggtggtgctttagggcaagacattgaaccctgatatgtgccaggcattgtgtt

SEQ ID NO: 172814 - DNA, 120 bp, Artificial Sequence
  ENSG00000109475_16 (sequence is synthesized)
gggacggatagcccacgtcgtttaatcctaatgacagctgtataaagtagacagaattcccatgttagagataaggaggctagctccttgccctttatattcccagtaaatggcatagct

SEQ ID NO: 172815 - DNA, 120 bp, Artificial Sequence
  ENSG00000109475_17 (sequence is synthesized)
aaggattcgacttcagagctcactttttgtgctctttgtttaaagcggtgtttctccaactgggctcgtggcacttttctggacaccactccaaacaaaattagactctgagtaaggagc

SEQ ID NO: 172816 - DNA, 120 bp, Artificial Sequence
  ENSG00000109475_18 (sequence is synthesized)
ctggtcatcagaacgttaaggaagtgccacgtttgattaccatcaggaaagctaacattcttggcctcttgtttatcagtcacctttaaatacaagtagttttaaaatgtggaataatac

SEQ ID NO: 172817 - DNA, 120 bp, Artificial Sequence
  ENSG00000109475_19 (sequence is synthesized)
gagctttcatcccttgacgatggaatgaatcaaggagaggttaccactaagagggttcagaattactaaacattcatgagccaaatctgccacgaacatagactttttaaaccaatctga

SEQ ID NO: 172818 - DNA, 120 bp, Artificial Sequence
  ENSG00000109475_20 (sequence is synthesized)
gaaatgcagtgaaatgcctttcagataaatgagtacaccatttccctttgtaacctactttaaacttgcccttaacacttaacaaaatttagggaaatttctgttaaagcatcacaaaaa

SEQ ID NO: 172819 - DNA, 120 bp, Artificial Sequence
  ENSG00000109475_21 (sequence is synthesized)
tgacaggtaagttaaatgcttaaatgggctttccttagcaaattattgtgtgtgttatactgtctgctgatcagtacaatggtgaagcaactcattttaaaccagttgcatgctttagaa

SEQ ID NO: 172820 - DNA, 120 bp, Artificial Sequence
  ENSG00000109475_22 (sequence is synthesized)
ccctttctttgctatggataattgatgctgcacaaagcaggaaatgatattcaaagtaataatttgggggcatatttatgctagatgtggagattaaaaggaacttggttttgttcagga

SEQ ID NO: 172821 - DNA, 120 bp, Artificial Sequence
  ENSG00000109475_23 (sequence is synthesized)
ggtgggtaagaaagtctctgttagtggtttggacaaagatagatggagtgtggaaggtgttaaaagtgtaggaacagaagagttgtgtattctcatgtgcggaaggtgttaaaagtgtag

SEQ ID NO: 172822 - DNA, 120 bp, Artificial Sequence
  ENSG00000109475_24 (sequence is synthesized)
gaacagaagagttgtgtattctcatgagcatagggttgcaggagatgatggacaacaaaggtagaaaagccagattatggccaggtgtggtggcttatgcctgaaatcccaacactttgg

SEQ ID NO: 172823 - DNA, 85 bp, Artificial Sequence
  ENSG00000109475_25 (sequence is synthesized)
ccaggtgtggtggcttatgcctgaaatcccaacactttgggaggcggaggcaggcagatacctgaggttgggagtttgagaccag

SEQ ID NO: 172824 - DNA, 88 bp, Artificial Sequence
  ENSG00000109475_26 (sequence is synthesized)
gtggcgcatgcctgtgatcccagctactcagagactgaggcaggagaattgctggaagctgggaggcagaggttgtggtgagctgcgg

SEQ ID NO: 172825 - DNA, 120 bp, Artificial Sequence
  ENSG00000109475_27 (sequence is synthesized)
tttaagtatatattgtcatttactctacaaaatgctgacctactgactgtttcactttctaggtcccgaacccctggtaatagaattgtttacctttataccaagaaggttgggaaagca

SEQ ID NO: 172826 - DNA, 120 bp, Artificial Sequence
  ENSG00000109501_0 (sequence is synthesized)
gtgcagaaggccgcgctagccggctcttcagcagcgagtgcagattgctcccccgcggccgcagatctcccgtttgcgccgcgttcagctgctcccgaacaacttttctgccggcccaga

SEQ ID NO: 172827 - DNA, 120 bp, Artificial Sequence
  ENSG00000109501_1 (sequence is synthesized)
cagaggccccagggcgtcgcagcgccgcgtgcggcccactcacgggccggcaggatggactccaacactgctccgctgggcccctcctgcccacagcccccgccagcaccgcagccccag

SEQ ID NO: 172828 - DNA, 120 bp, Artificial Sequence
  ENSG00000109501_2 (sequence is synthesized)
gttcccgactcaatgccacagcctcgttggagcaggagaggagcgaaaggccccgagcacccggaccccaggctggccctggccctggtgttagagacgcagcggcccccgctgaacccc

SEQ ID NO: 172829 - DNA, 120 bp, Artificial Sequence
  ENSG00000109501_3 (sequence is synthesized)
aggcccagcataccaggagccgggaaagagcagacggcaccgggcctacaaagggagacatggaaatcccctttgaagaagtcctggagagggccaaggccggggaccccaaggcacaga

SEQ ID NO: 172830 - DNA, 120 bp, Artificial Sequence
  ENSG00000109501_4 (sequence is synthesized)
ctgaggtggggaagcactacctgcagttggccggcgacacggatgaagaactcaacagctgcaccgctgtggactggctggtcctcgccgcgaagcagggccgtcgcgaggctgtgaagc

SEQ ID NO: 172831 - DNA, 120 bp, Artificial Sequence
  ENSG00000109501_5 (sequence is synthesized)
tgcttcgccggtgcttggcggacagaagaggcatcacgtccgagaacgaacgggaggtgaggcagctctcctccgagaccgacctggagagggccgtgcgcaaggcagccctggtcatgt

SEQ ID NO: 172832 - DNA, 120 bp, Artificial Sequence
  ENSG00000109501_6 (sequence is synthesized)
actggaagctcaaccccaagaagaagaagcaggtggccgtggcggagctgctggagaatgtcggccaggtcaacgagcacgatggaggggcgcagccaggccccgtgcccaagtccctgc

SEQ ID NO: 172833 - DNA, 120 bp, Artificial Sequence
  ENSG00000109501_7 (sequence is synthesized)
agaagcagaggcgcatgctggagcgcctggtcagcagcgagtccaagaactacatcgcgctggatgactttgtggagatcactaagaagtacgccaagggcgtcatccccagcagcctgt

SEQ ID NO: 172834 - DNA, 120 bp, Artificial Sequence
  ENSG00000109501_8 (sequence is synthesized)
tcctgcaggacgacgaagatgatgacgagctggcggggaagagccctgaggacctgccactgcgtctgaaggtggtcaagtaccccctgcacgccatcatggagatcaaggagtacctga

SEQ ID NO: 172835 - DNA, 120 bp, Artificial Sequence
  ENSG00000109501_9 (sequence is synthesized)
ttgacatggcctccagggcaggcatgcactggctgtccaccatcatccccacgcaccacatcaacgcgctcatcttcttcttcatcgtcagcaacctcaccatcgacttcttcgccttct

SEQ ID NO: 172836 - DNA, 120 bp, Artificial Sequence
  ENSG00000109501_10 (sequence is synthesized)
tcatcccgctggtcatcttctacctgtccttcatctccatggtgatctgcaccctcaaggtgttccaggacagcaaggcctgggagaacttccgcaccctcaccgacctgctgctgcgct

SEQ ID NO: 172837 - DNA, 120 bp, Artificial Sequence
  ENSG00000109501_11 (sequence is synthesized)
tcgagcccaacctggatgtggagcaggccgaggtcaacttcggctggaaccacctggagccctatgcccatttcctgctctctgtcttcttcgtcatcttctccttccccatcgccagca

SEQ ID NO: 172838 - DNA, 120 bp, Artificial Sequence
  ENSG00000109501_12 (sequence is synthesized)
aggactgcatcccctgctcggagctggctgtcatcaccggcttctttaccgtgaccagctacctgagcctgagcacccatgcagagccctacacgcgcagggccctggccaccgaggtca

SEQ ID NO: 172839 - DNA, 120 bp, Artificial Sequence
  ENSG00000109501_13 (sequence is synthesized)
ccgccggcctgctatcgctgctgccctccatgcccttgaattggccctacctgaaggtccttggccagaccttcatcaccgtgcctgtcggccacctggtcgtcctcaacgtcagcgtcc

SEQ ID NO: 172840 - DNA, 120 bp, Artificial Sequence
  ENSG00000109501_14 (sequence is synthesized)
cgtgcctgctctatgtctacctgctctatctcttcttccgcatggcacagctgaggaatttcaagggcacctactgctaccttgtgccctacctggtgtgcttcatgtggtgtgagctct

SEQ ID NO: 172841 - DNA, 120 bp, Artificial Sequence
  ENSG00000109501_15 (sequence is synthesized)
ccgcgcctccatcggctacttcctcttcctctttgccctccccatcctggtggccggcctggccctggtgggcgtgctgcagttcgcccggtggttcacgtctctggagctcaccaagat

SEQ ID NO: 172842 - DNA, 120 bp, Artificial Sequence
  ENSG00000109501_16 (sequence is synthesized)
cgcagtcaccgtggcggtctgtagtgtgcccctgctgttgcgctggtggaccaaggccagcttctctgtggtggggatggtgaagtccctgacgcggagctccatggtcaagctcatcct

SEQ ID NO: 172843 - DNA, 120 bp, Artificial Sequence
  ENSG00000109501_17 (sequence is synthesized)
ggtgtggctcacggccatcgtgctgttctgctggttctatgtgtaccgctcagagggcatgaaggtctacaactccacactgacctggcagcagtatggtgcgctgtgcgggccacgcgc

SEQ ID NO: 172844 - DNA, 120 bp, Artificial Sequence
  ENSG00000109501_18 (sequence is synthesized)
ctggaaggagaccaacatggcgcgcacccagatcctctgcagccacctggagggccacagggtcacgtggaccggccgcttcaagtacgtccgcgtgactgacatcgacaacagcgccga

SEQ ID NO: 172845 - DNA, 120 bp, Artificial Sequence
  ENSG00000109501_19 (sequence is synthesized)
gtctgccatcaacatgctcccgttcttcatcggcgactggatgcgctgcctctacggcgaggcctaccctgcctgcagccctggcaacacctccacggccgaggaggagctctgtcgcct

SEQ ID NO: 172846 - DNA, 120 bp, Artificial Sequence
  ENSG00000109501_20 (sequence is synthesized)
taagctgctggccaagcacccctgccacatcaagaagttcgaccgctacaagtttgagattaccgtgggcatgccattcagcagcggcgctgacggctcgcgcagccgcgaggaggacga

SEQ ID NO: 172847 - DNA, 120 bp, Artificial Sequence
  ENSG00000109501_21 (sequence is synthesized)
cgtcaccaaggacatcgtgctgcgggccagcagcgagttcaagagcgtgctgctcagcctgcgccagggcagcctcatcgagttcagcaccatcctggagggccgcctgggcagcaagtg

SEQ ID NO: 172848 - DNA, 120 bp, Artificial Sequence
  ENSG00000109501_22 (sequence is synthesized)
gcctgtcttcgagctcaaggccatcagctgcctcaactgcatggcccagctctcacccaccaggcggcacgtgaagatcgagcacgactggcgcagcaccgtgcatggcgccgtgaagtt

SEQ ID NO: 172849 - DNA, 120 bp, Artificial Sequence
  ENSG00000109501_23 (sequence is synthesized)
cgccttcgacttctttttcttcccattcctgtcggcggcctgaggatggtccgccacgaggagcttccagtgcatgttgccatgaggcctttccccagtgtggccccagcccgacaggca

SEQ ID NO: 172850 - DNA, 120 bp, Artificial Sequence
  ENSG00000109501_24 (sequence is synthesized)
tgcaccagtgccgcctgtgcccacgtgtgcagactgtggctgcagagaccttgcgaccatgtgtagattgcgtggaccccgacaaagggaaggctgctgtgtagctctgtccactctgaa

SEQ ID NO: 172851 - DNA, 120 bp, Artificial Sequence
  ENSG00000109501_25 (sequence is synthesized)
taccaagtgtgttgggaattgcatgccatctccaccctgagcctgacctttctgagtgacatgggtgtgccaggctagactaggaggttccggtgtctggaaaagcactttacagatgag

SEQ ID NO: 172852 - DNA, 120 bp, Artificial Sequence
  ENSG00000109501_26 (sequence is synthesized)
attccctctcctcccccaccttcaagcaccctgttccctctttctttcttttgtgttggatttgtttaaaaaccaaataagcatctgtgtaacctccacagtagcatttcttatttgttt

SEQ ID NO: 172853 - DNA, 120 bp, Artificial Sequence
  ENSG00000109501_27 (sequence is synthesized)
ggtcactgctacaccttagcagctcttcccctttcctgggggatgtgcacggcagcttgagcctgtcacgtggtcaaggcccggccccatcagaggctgggggaggcggcacattggcag

SEQ ID NO: 172854 - DNA, 120 bp, Artificial Sequence
  ENSG00000109501_28 (sequence is synthesized)
tgtgtcacactgagctgggcaccacaggctgcctcatgaccctcctgtccagcaggtagtgggtgaatgtgtgaaggtcttgcctgaatccatcaggacttgggaaacagagaaccctgt

SEQ ID NO: 172855 - DNA, 120 bp, Artificial Sequence
  ENSG00000109501_29 (sequence is synthesized)
gggggcggctgtgggggaggtccctgccagtgtttagaagagcctgactgtgttcagtgccttggagcagaaagccagggtcctgagtggctgaaataaaagcctctggtggaacctgca

SEQ ID NO: 172856 - DNA, 120 bp, Artificial Sequence
  ENSG00000109501_30 (sequence is synthesized)
cgtaaaagcagcatggacaacatgtaaatgaatggttatggttgtatttcaataaaactttatttgcaaaaacaggcagtgggccagtgctaacccttggttagctggcgtctctccagc

SEQ ID NO: 172857 - DNA, 120 bp, Artificial Sequence
  ENSG00000109501_31 (sequence is synthesized)
cctggctttctatggtcccctgactgttttgagaggtgtaaaggacccagtcatggttctgatttccatgcattgatggtgagccttggcaggcaggagcaactcaaggaagagaacctg

SEQ ID NO: 172858 - DNA, 120 bp, Artificial Sequence
  ENSG00000109501_32 (sequence is synthesized)
taccagtaccagtcggagcccgtgtctccctcgccgtgtggatggggtggccacaccttcctcaccgtgttttgaggagcgagtggccggaggctcagtagggcctagcctagtggacat

SEQ ID NO: 172859 - DNA, 120 bp, Artificial Sequence
  ENSG00000109501_33 (sequence is synthesized)
gcctggtgtgaccccatttctgccccttccttcctggcctgggtgacaaagggaagtgggtgaaaggaggtgggctggcagggagcatggggtgggagagggtcggagaatctggaggct

SEQ ID NO: 172860 - DNA, 120 bp, Artificial Sequence
  ENSG00000109501_34 (sequence is synthesized)
gcagagagggacacttggggtgggggacagcacacccaggggccgggggccaggagtggaggctggcacttggcaaacctgcccccttcctcctcacccagcctggtcctcaaccctcag

SEQ ID NO: 172861 - DNA, 120 bp, Artificial Sequence
  ENSG00000109501_35 (sequence is synthesized)
gccgcccagggaagggtttcctccacctgaacccactcagctcctttcttagcttggccccacgccaccgtccccagcccattgctctgtgtgagggtggcagtggggctgcagtgtggg

SEQ ID NO: 172862 - DNA, 120 bp, Artificial Sequence
  ENSG00000109511_0 (sequence is synthesized)
atccagatttgcttttacattttcttgcctgagtctgaggtgaacagtgaacatatttacatttgatttaacagtgaaccttaattctttctggcttcacagtgaaacaagtttatgcaa

SEQ ID NO: 172863 - DNA, 120 bp, Artificial Sequence
  ENSG00000109511_1 (sequence is synthesized)
tcgatcaaatattttcatccctgaggttaacaattaccatcaaaatgttttgtggagactatgtgcaaggaaccatcttcccagctcccaatttcaatcccataatggatgcccaaatgc

SEQ ID NO: 172864 - DNA, 120 bp, Artificial Sequence
  ENSG00000109511_2 (sequence is synthesized)
taggaggagcactccaaggatttgactgtgacaaagacatgctgatcaacattctgactcagcgctgcaatgcacaaaggatgatgattgcagaggcataccagagcatgtatggccggg

SEQ ID NO: 172865 - DNA, 120 bp, Artificial Sequence
  ENSG00000109511_3 (sequence is synthesized)
acctgattggggatatgagggagcagctttcggatcacttcaaagatgtgatggctggcctcatgtacccaccaccactgtatgatgctcatgagctctggcatgccatgaagggagtag

SEQ ID NO: 172866 - DNA, 120 bp, Artificial Sequence
  ENSG00000109511_4 (sequence is synthesized)
gcactgatgagaattgcctcattgaaatactagcttcaagaacaaatggagaaattttccagatgcgagaagcctactgcttgcaatacagcaataacctccaagaggacatttattcag

SEQ ID NO: 172867 - DNA, 120 bp, Artificial Sequence
  ENSG00000109511_5 (sequence is synthesized)
agacctcaggacacttcagagatactctcatgaacttggtccaggggaccagagaggaaggatatacagaccctgcgatggctgctcaggatgcaatggtcctatgggaagcctgtcagc

SEQ ID NO: 172868 - DNA, 120 bp, Artificial Sequence
  ENSG00000109511_6 (sequence is synthesized)
gaagacgggggagcacaaaaccatgctgcaaatgatcctgtgcaacaagagctaccagcagctgcggctggttttccaggaatttcaaaatatttctgggcaagatatggtagatgccat

SEQ ID NO: 172869 - DNA, 120 bp, Artificial Sequence
  ENSG00000109511_7 (sequence is synthesized)
taatgaatgttatgatggatactttcaggagctgctggttgcaattgttctctgtgttcgagacaaaccagcctattttgcttatagattatatagtgcaattcatgactttggtttcca

SEQ ID NO: 172870 - DNA, 120 bp, Artificial Sequence
  ENSG00000109511_8 (sequence is synthesized)
taataaaactgtaatcaggattctcattgccagaagtgaaatagacctgctgaccataaggaaacgatacaaagagcgatatggaaaatccctatttcatgatatcagaaattttgcttc

SEQ ID NO: 172871 - DNA, 120 bp, Artificial Sequence
  ENSG00000109511_9 (sequence is synthesized)
agggcattataagaaagcactgcttgccatctgtgctggtgatgctgaggactactaaaatgaagaggacttggagtactgtgcactcctctttctagacacttccaaatagagattttc

SEQ ID NO: 172872 - DNA, 120 bp, Artificial Sequence
  ENSG00000109511_10 (sequence is synthesized)
tcacaaatttgtactgttcatggcactattaacaaaactatacaatcatattttctcttctatctttgaaattattctaagccaaagaaaactatgaatgaaagtatatgatactgaatt

SEQ ID NO: 172873 - DNA, 120 bp, Artificial Sequence
  ENSG00000109511_11 (sequence is synthesized)
tgcctactatcctgaatttgcctactatctaatcagcaattaaataaattgtgcatgatggaataatagaaaaattgcattggaatagattttatttaaatgtgaaccatcaacaaccta

SEQ ID NO: 172874 - DNA, 120 bp, Artificial Sequence
  ENSG00000109511_12 (sequence is synthesized)
gaaatagcggaaagtcagttatctcaaaggtacttattttgaattttgtttataagatgtgccttatttaatgacattactaaggaataaatatttccttaatattttttccaataactt

SEQ ID NO: 172875 - DNA, 120 bp, Artificial Sequence
  ENSG00000109511_13 (sequence is synthesized)
tcaaaaactgagcattttaaaaataatctctgtatttgatggagtacttattcaaatatattagctgtttcctattaggtatattatatgttgtcttgcaaaatgcatagtaaatatagt

SEQ ID NO: 172876 - DNA, 120 bp, Artificial Sequence
  ENSG00000109519_0 (sequence is synthesized)
gtgcgcggcgactgcgacgggcagtggcagtcatggcggctcagtgcgtgaggttggcgcggcgcagtcttcctgctttggcgttgtctctcaggccatctccccggttgttgtgcacag

SEQ ID NO: 172877 - DNA, 120 bp, Artificial Sequence
  ENSG00000109519_1 (sequence is synthesized)
ccacgaaacaaaagaacagtggccagaacctggaagaggacatgggtcagagtgaacagaaggcagatcctcctgctacagagaagaccctcctggaagagaaggtcaagttggaggaac

SEQ ID NO: 172878 - DNA, 120 bp, Artificial Sequence
  ENSG00000109519_2 (sequence is synthesized)
agctgaaggagactgtggaaaaatataaacgagctttggcagacactgagaacttacggcagaggagccagaaattggtggaggaggcaaaattatacggcattcaagccttctgcaagg

SEQ ID NO: 172879 - DNA, 120 bp, Artificial Sequence
  ENSG00000109519_3 (sequence is synthesized)
acttgttggaggtggcagacgttctggagaaggcaacacagtgtgttccaaaagaagaaattaaagacgataaccctcacctgaagaacctctatgaggggctggtcatgactgaagtcc

SEQ ID NO: 172880 - DNA, 120 bp, Artificial Sequence
  ENSG00000109519_4 (sequence is synthesized)
agatccagaaggtgttcacaaagcatggcttgctcaagttgaaccctgtcggagccaagttcgacccttatgaacatgaggccttgttccacacaccggttgaggggaaggagccaggca

SEQ ID NO: 172881 - DNA, 120 bp, Artificial Sequence
  ENSG00000109519_5 (sequence is synthesized)
cagtggccctagttagcaaagtggggtacaagctgcatgggcgcactctgagacccgccctggtgggggtggtgaaggaagcttagctgctgttgatggggtgggtgtttttaaactcac

SEQ ID NO: 172882 - DNA, 120 bp, Artificial Sequence
  ENSG00000109519_6 (sequence is synthesized)
ttgatgtaactctcaaggctggttcattgtttctcatctatgagtacgtgtgaccttttcccaaaccttattggaaaccttaagtaaccagtggctaaacagaaaagccggttgcccaac

SEQ ID NO: 172883 - DNA, 120 bp, Artificial Sequence
  ENSG00000109519_7 (sequence is synthesized)
tgcattaatgaactctaattcgggagtctgttcccttttagtgccacgcgttgaatagttccacatactttcagaagagctcagcagggccctgcctggtctcccgagcatcatgagtaa

SEQ ID NO: 172884 - DNA, 120 bp, Artificial Sequence
  ENSG00000109519_8 (sequence is synthesized)
cgtgtctgctcagactctgctgacaccaaagtattttaaacaaataaaaggtcttggggaattctgtttggctacctgggcacgccagtctgcaccatgtgtccctgcggcgcatgagtg

SEQ ID NO: 172885 - DNA, 120 bp, Artificial Sequence
  ENSG00000109519_9 (sequence is synthesized)
actggcgtatttagcccgtcacatttcattcgctgaaggaaaggcaagagagttgaaacatttttcttacttaaaaaaaatgatctttgtgaagaacatagtgagttcgtttgtcttcag

SEQ ID NO: 172886 - DNA, 120 bp, Artificial Sequence
  ENSG00000109519_10 (sequence is synthesized)
tcaacagcggctgaaactgaccactgagaaatgggtgtgggcactgacagttctcccccattatttggccaggaattgagcttggcttggcaaagttccttttaccctgttctgttcatc

SEQ ID NO: 172887 - DNA, 120 bp, Artificial Sequence
  ENSG00000109519_11 (sequence is synthesized)
atttaaatcatattcaactagttactaatgacctcaagttgtattccctggcaaaatggactttctcaaaataggactgcacgcttggtgtactttaaatgttaatgtttaatttaaaat

SEQ ID NO: 172888 - DNA, 120 bp, Artificial Sequence
  ENSG00000109519_12 (sequence is synthesized)
ttttatttaagaggattaaagccctaatgtttattttcctactttctgaaaacaattttgtgtcctctcatggagatccttgccgctgaggcaagcatggcttagccttcccattctcta

SEQ ID NO: 172889 - DNA, 120 bp, Artificial Sequence
  ENSG00000109519_13 (sequence is synthesized)
ctccagcccagaagctgtcagcttgacacgtgcgtgcgtgcacattcacgtacacacatatacaggcttctacacagaaagggagagccacactcccccagtgcagctgcagcccgtccg

SEQ ID NO: 172890 - DNA, 120 bp, Artificial Sequence
  ENSG00000109519_14 (sequence is synthesized)
gtaagaatacgaaacacccaggagccacagcaagggcacaggatttgcaaaatcatcttgccaaagggctgttcctcatttacacggtcatccagggcttagaaaaaggctgaatgattg

SEQ ID NO: 172891 - DNA, 120 bp, Artificial Sequence
  ENSG00000109519_15 (sequence is synthesized)
gcgtctgttacaaaaaagagaaaagaacctttcgctgcctttgcttctagaatggaagatacttgtgaaagccatttgctgcacaggaaagatggggcagtttatttcacttctaatttt

SEQ ID NO: 172892 - DNA, 120 bp, Artificial Sequence
  ENSG00000109519_16 (sequence is synthesized)
aaaagacgcaagtaatggtcccataatacttcatcttgggataccattcccaaacatgttccacctttaagatgccttaagttaatttggtcagaaacaactaaaggcagcatcgtgtat

SEQ ID NO: 172893 - DNA, 120 bp, Artificial Sequence
  ENSG00000109519_17 (sequence is synthesized)
tgaagaaaacatgactgggagctccagcgctgcctgttttcacgctgtggggttgtgagtgcatcatcacccctggagctcccgagttaaatggaggctaagaaaagtaatttatcaact

SEQ ID NO: 172894 - DNA, 120 bp, Artificial Sequence
  ENSG00000109519_18 (sequence is synthesized)
catttctgtgaatgtttgcagtctcctaccgtctcaactacagctgcagttgctaaaaagcacttaactcgtaacctagaggcaatatagcttaagtagcaaaatatttttttacagtaa

SEQ ID NO: 172895 - DNA, 120 bp, Artificial Sequence
  ENSG00000109519_19 (sequence is synthesized)
gcttcagtcatccatagtcactataagttggttatcatctgaaatgcttagaaccagaattgtttcaaacttggggggttttcggattttggaatatagtcaagcatggcttaaccacag

SEQ ID NO: 172896 - DNA, 120 bp, Artificial Sequence
  ENSG00000109519_20 (sequence is synthesized)
ggatgtgttctgagaaatgcgctgtcaggcagtttttcctgtgaacaccatgtgtacctacatggacctaaaaaacaggtggtggagcctcctccacacctaggctatatggtgtatgta

SEQ ID NO: 172897 - DNA, 120 bp, Artificial Sequence
  ENSG00000109519_21 (sequence is synthesized)
gcctgttgctctagactggagggcacgttactgtactgatactgtaggcaactgttaacacaatggtatctgtgtatctgaacataacatagtaaaggtacagtgcaaactgtgttctaa

SEQ ID NO: 172898 - DNA, 120 bp, Artificial Sequence
  ENSG00000109519_22 (sequence is synthesized)
tttctccccaagtaatagtaaatagtttgaagctattttaagtttctaaagtcatacatctgactttaataagcacaaaaactaagtcttcgtttctcacgtgtggacttccctgtaggc

SEQ ID NO: 172899 - DNA, 120 bp, Artificial Sequence
  ENSG00000109519_23 (sequence is synthesized)
ggccgagccgggccgggtgtgccctgggcaggagctgtggttactcatttccgtgccgcagctcgaggccggggccacagcggtgctcgggaaacttcgtgtcgcaaggccatctccccg

SEQ ID NO: 172900 - DNA, 120 bp, Artificial Sequence
  ENSG00000109519_24 (sequence is synthesized)
gttgattccggaaagaagataatggggtggggaaggggaaggccatgcatacggaagtgtcagagagcaaggctgtggggtggggggtccagctgttgcatcccctgcatttttttttat

SEQ ID NO: 172901 - DNA, 120 bp, Artificial Sequence
  ENSG00000109519_25 (sequence is synthesized)
gatggctcaacagcaaaggtgtctggaggagcagaaatcaagtagctgagactagcatgaagaattgtaaataggtgtgtcctcccccacgcagagaccttggtgggaacctgcagcagg

SEQ ID NO: 172902 - DNA, 120 bp, Artificial Sequence
  ENSG00000109519_26 (sequence is synthesized)
tcagcctctgatgcccatccccttagccctccggaagtaacactggcatcacttcagaactcccagcatgctatatgcattgccacctttggatgtttttgttactgtccttcccatttt

SEQ ID NO: 172903 - DNA, 120 bp, Artificial Sequence
  ENSG00000109519_27 (sequence is synthesized)
acagttgagatcattgaggtttagtcacctgccacacatcacaaagctggtacgtaaccccaggctcccagctccacaggctggttgtttgagtgctggctctggatctctgcgtgactg

SEQ ID NO: 172904 - DNA, 120 bp, Artificial Sequence
  ENSG00000109519_28 (sequence is synthesized)
acagtgggtattagagatgtggaacctaaggctcgagggagggtaaatggccttgcctgggtcagacggtgagaggccacatggaaactaagagctagagtctctgtcgcattcacagag

SEQ ID NO: 172905 - DNA, 120 bp, Artificial Sequence
  ENSG00000109519_29 (sequence is synthesized)
actgaggcgctcattgaaacactttttttcctggatactgtggcctgtttcttggtattccgcctctctttgtggtaatgtgctttgttggttcttaccctttccgacctgtaaatgcct

SEQ ID NO: 172906 - DNA, 120 bp, Artificial Sequence
  ENSG00000109519_30 (sequence is synthesized)
cccttgctgtgctccctgggtgacttacatactcttacgggcttagtggcatccacacacaagtctcagcttcaaactcggatcttccgagttccagtcccctaaatcttactgcttgct

SEQ ID NO: 172907 - DNA, 120 bp, Artificial Sequence
  ENSG00000109519_31 (sequence is synthesized)
tgacatctgggcttggatgtctcaagggtattttcccctctactgcactcctttcttcacattttagtgaattctaaatttagtaaattctgggtctcatcccacaagtagcttttgaga

SEQ ID NO: 172908 - DNA, 120 bp, Artificial Sequence
  ENSG00000109519_32 (sequence is synthesized)
gttttgtgttgttttttaaagttattgagccattggaattctgaggcgattgatttgacaagttactaaatagcctccacatcaggtcagcagtgctcagtttggaattgccctgtgcgg

SEQ ID NO: 172909 - DNA, 120 bp, Artificial Sequence
  ENSG00000109534_0 (sequence is synthesized)
gggtgtgtgcgcaaggccagggccagaggggcacgtggcgccgggaggagagagaatgtcttttcgaggcggaggtcgtggaggctttaatcgaggtggtggaggtggcggcttcaaccg

SEQ ID NO: 172910 - DNA, 120 bp, Artificial Sequence
  ENSG00000109534_1 (sequence is synthesized)
aggtggcagcagcaaccacttccgaggtggaggcggcggtggaggcggcggcaatttcagaggcggcggcaggggaggatttggacgagggggtggccgcggaggctttaacaaaggcca

SEQ ID NO: 172911 - DNA, 120 bp, Artificial Sequence
  ENSG00000109534_2 (sequence is synthesized)
agaccaaggacctccagaacgtgtagtcttattaggagagttcctgcatccctgtgaagatgacatagtttgtaaatgtaccacagatgaaaataaggtgccttatttcaatgctcctgt

SEQ ID NO: 172912 - DNA, 120 bp, Artificial Sequence
  ENSG00000109534_3 (sequence is synthesized)
ttacttagaaaacaaagaacaaattggaaaagtggatgaaatatttggacaactcagagatttttatttttcagttaagttgtcagaaaacatgaaggcttcatcctttaaaaaactaca

SEQ ID NO: 172913 - DNA, 120 bp, Artificial Sequence
  ENSG00000109534_4 (sequence is synthesized)
cctccaggtgagaaaggacctccaagaggtggtggcaggggaggccgaggaggaggaagaggaggaggtggcagaggtggtggcagaggcggtggttttagaggtggaagaggaggtgga

SEQ ID NO: 172914 - DNA, 120 bp, Artificial Sequence
  ENSG00000109534_5 (sequence is synthesized)
ggtgggggcttcagaggaggaagaggtggtggtttcagagggagaggacattaagtgaaacagttgacagacatcaccagttgacttctgcattaacctgcatgatctgtttctactatg

SEQ ID NO: 172915 - DNA, 120 bp, Artificial Sequence
  ENSG00000109534_6 (sequence is synthesized)
gattggaaacttgtttcttgaacaagtcttgaagatcttggtcattttatgacaatggatctaaaatgtcagcatcatgcaaagtgcaacggaatagtgaattttgctctaaaagagcat

SEQ ID NO: 172916 - DNA, 120 bp, Artificial Sequence
  ENSG00000109534_7 (sequence is synthesized)
gaacaagtctttctaatgttttgtacagtgcctggcactctgtgggtgctcaataaatggataggagttttcatttgaagcatatttgaatttttaaaataaagtgttttattcccttaa

SEQ ID NO: 172917 - DNA, 120 bp, Artificial Sequence
  ENSG00000109534_8 (sequence is synthesized)
gatttgaaaatgctggacgtggaacccaactgccggagggagggaggaaggaaggggatgcggtgcgaagaccttgctgtctgtagggggaggagatactaatcatggggcggcaagggt

SEQ ID NO: 172918 - DNA, 120 bp, Artificial Sequence
  ENSG00000109534_9 (sequence is synthesized)
gacctatcttaggaaagtcctacttggagcacttgagactttcccaacatatcactagtaaagctcttaaattgaaatgttccatgctataaatattgaacacactaatctttaaaagtg

SEQ ID NO: 172919 - DNA, 120 bp, Artificial Sequence
  ENSG00000109534_10 (sequence is synthesized)
atttatttgatacagcctttagaaagtaaaaattacaacttttgctcatattaccaaaatctgtaaactgctagagtaagagttttttgtttatgtaaaactctcttattgaaaagcttt

SEQ ID NO: 172920 - DNA, 120 bp, Artificial Sequence
  ENSG00000109534_11 (sequence is synthesized)
catgaccaaacattctaggtagaatcttaatttgtaaaacttacgttatttgagaggcggtaggtactaagtgatttcacaagaacttcaataacatgatatatgctatgaaggaaaaat

SEQ ID NO: 172921 - DNA, 120 bp, Artificial Sequence
  ENSG00000109534_12 (sequence is synthesized)
acaggttgccatgagaagctttgtagtgccaccagctttttaagtctgtagtgtttcctgaaaaagtgagcttgaagctgaggcctgattgttgactaacagtgatttccacacctggtt

SEQ ID NO: 172922 - DNA, 120 bp, Artificial Sequence
  ENSG00000109534_13 (sequence is synthesized)
tgcttgttccgcgggtgattggcttttttttttggcaaaccagttattcaagtttctggtctttaaaaaactctgtggcggtacggtaaccgaggaggttccagcgcggcggaagtaccc

SEQ ID NO: 172923 - DNA, 120 bp, Artificial Sequence
  ENSG00000109536_0 (sequence is synthesized)
gggttctacagagacgtaggctgtcagggagtgtttatttcgcgtccgcttctgtttctccgcgcccctgtgctgccccgactcacatactcgtccagaaccggcctcagcctctccgcg

SEQ ID NO: 172924 - DNA, 120 bp, Artificial Sequence
  ENSG00000109536_1 (sequence is synthesized)
cagaagtttcccggagccatggccgagtactcctacgtgaagtctaccaagctcgtgctcaagggaaccaagacgaagagtaagaagaaaaagagcaaagataagaaaagaaaaagagaa

SEQ ID NO: 172925 - DNA, 120 bp, Artificial Sequence
  ENSG00000109536_2 (sequence is synthesized)
gaagatgaagaaacccagcttgatattgttggaatctggtggacagtaacaaactttggtgaaatttcaggaaccatagccattgaaatggataagggaacctatatacatgcactcgac

SEQ ID NO: 172926 - DNA, 120 bp, Artificial Sequence
  ENSG00000109536_3 (sequence is synthesized)
aatggtctttttaccctgggagctccacacaaagaagttgatgagggccctagtcctccagagcagtttacggctgtcaaattatctgattccagaatcgccctgaagtctggctatgga

SEQ ID NO: 172927 - DNA, 120 bp, Artificial Sequence
  ENSG00000109536_4 (sequence is synthesized)
tcagatggacttgttgttgggcgttcagatgcaattggaccaagagaacaatgggaaccagtctttcaaaatgggaaaatggctttgttggcctcaaatagctgctttattagatgcaat

SEQ ID NO: 172928 - DNA, 120 bp, Artificial Sequence
  ENSG00000109536_5 (sequence is synthesized)
ggctttgttggcctcaaatagctgctttattagatgcaatgaagcaggggacatagaagcaaaaagtaaaacagcaggagaagaagaaatgatcaagattagatcctgtgctgaaagaga

SEQ ID NO: 172929 - DNA, 120 bp, Artificial Sequence
  ENSG00000109536_6 (sequence is synthesized)
agagcttccaagaccacaaacttaaaataagtaaagaagacagtaaaattcttaaaaaggctcggaaagatggatttttgcatgagacgcttctggacaggagagccaaattgaaagccg

SEQ ID NO: 172930 - DNA, 120 bp, Artificial Sequence
  ENSG00000109536_7 (sequence is synthesized)
catgagacgcttctggacaggagagccaaattgaaagccgacagatactgcaagtgactgggatttttgtttctgccttatctttctgtgtttttttctgaataaaatattcagaggaaa

SEQ ID NO: 172931 - DNA, 82 bp, Artificial Sequence
  ENSG00000109536_8 (sequence is synthesized)
ctcaaatagctgctttattagatgcaatgaagcaggggacatagaagcaaaaagtaaaacagcaggagaagaagaaatgatc

SEQ ID NO: 172932 - DNA, 75 bp, Artificial Sequence
  ENSG00000109536_9 (sequence is synthesized)
gctttcaaaataaattacctacttagctgggcatggtggtacatgcctataggcccagctactcgggaggctgag

SEQ ID NO: 172933 - DNA, 120 bp, Artificial Sequence
  ENSG00000109536_10 (sequence is synthesized)
ccgtgtctgaaaaaatgaaactgatggacaagaagagacgacacaatgtagcctctaggacagagcactgagctaaatgcttttcttttcttgaggcttcagttttcctaatcatcctac

SEQ ID NO: 172934 - DNA, 120 bp, Artificial Sequence
  ENSG00000109536_11 (sequence is synthesized)
ggacaagaagagacgacacaatgtagcctctaggacagagcactgagctaaatgcttttcttttcttgaggcttcagttttcctaatcatcctaccacctcccaaagctagtcactcaga

SEQ ID NO: 172935 - DNA, 120 bp, Artificial Sequence
  ENSG00000109536_12 (sequence is synthesized)
ctgtgctgaaagagaaaccaagaaaaaagatgacattccagaagaagacaaaggaaatgtaaaacaatgtgaaatcaattatgtatggagtctcgctctctcccccagactagagtgcca

SEQ ID NO: 172936 - DNA, 120 bp, Artificial Sequence
  ENSG00000109572_0 (sequence is synthesized)
gtcacgcgtcgacgctggggcgtacctttcgggctcctgactcctgccgcttctcttccccttccgtgggtcagggccggtccggtccggaacctgcagcccctttcccagtgttctagt

SEQ ID NO: 172937 - DNA, 120 bp, Artificial Sequence
  ENSG00000109572_1 (sequence is synthesized)
tcgcccgtgacccggaataatgagcaaggagggtgtggtgggttgaaagccatcctactttactcccgagttagagcatggattcagttttagtcttaagggggaagtgagattggagat

SEQ ID NO: 172938 - DNA, 120 bp, Artificial Sequence
  ENSG00000109572_2 (sequence is synthesized)
ttttatttttaattttgggcagaagcaggttgactctagggatctccagagcgagaggatttaacttcatgttgctcccgtgtttgaaggaggacaataaaagtcccaccgggcaaaatt

SEQ ID NO: 172939 - DNA, 120 bp, Artificial Sequence
  ENSG00000109572_3 (sequence is synthesized)
ttcgtaacctctgcggtagaaaacgtcaggtatcttttaaatcgcgatagttttcgctgtgtcaggctttcttcggtggagctccgagggtagctaggttctaggtttgaaacagatgca

SEQ ID NO: 172940 - DNA, 120 bp, Artificial Sequence
  ENSG00000109572_4 (sequence is synthesized)
gaatccaaaggcagcgcaaaaaacagccaccgattttgctatgtctctgagctgcgagataatcagacagctaaatggagtctgagcagctgttccatagaggctactatagaaacagct

SEQ ID NO: 172941 - DNA, 120 bp, Artificial Sequence
  ENSG00000109572_5 (sequence is synthesized)
acaacagtataacaagtgcaagtagtgatgaggaacttttagatggagcaggtgttattatggactttcaaacatctgaagatgacaatttattagatggtgacactgcagttggaactc

SEQ ID NO: 172942 - DNA, 120 bp, Artificial Sequence
  ENSG00000109572_6 (sequence is synthesized)
attatacaatgacaaatggaggcagcattaacagttctacacatttactggatcttttggatgaaccaattccaggtgttggtacatatgatgatttccatactattgattgggtgcgag

SEQ ID NO: 172943 - DNA, 120 bp, Artificial Sequence
  ENSG00000109572_7 (sequence is synthesized)
aaaaatgtaaagacagagaaaggcatagacggatcaacagcaaaaagaaagaatcagcatgggaaatgacaaaaagtttgtatgatgcgtggtcaggatggctagtagtaacactaacag

SEQ ID NO: 172944 - DNA, 120 bp, Artificial Sequence
  ENSG00000109572_8 (sequence is synthesized)
gattggcatcaggggcactggccggattaatagacattgctgccgattggatgactgacctaaaggagggcatttgccttagtgcgttgtggtacaaccacgaacagtgctgttggggat

SEQ ID NO: 172945 - DNA, 120 bp, Artificial Sequence
  ENSG00000109572_9 (sequence is synthesized)
ctaatgaaacaacatttgaagagagggataaatgtccacagtggaaaacatgggcagaattaatcataggtcaagcagagggtcctggttcttatatcatgaactacataatgtacatct

SEQ ID NO: 172946 - DNA, 120 bp, Artificial Sequence
  ENSG00000109572_10 (sequence is synthesized)
tctgggccttgagttttgcctttcttgcagtttccctggtaaaggtatttgctccatatgcctgtggctctggaattccagagattaaaactattttaagtggattcatcatcagaggtt

SEQ ID NO: 172947 - DNA, 120 bp, Artificial Sequence
  ENSG00000109572_11 (sequence is synthesized)
acttgggaaaatggactttaatgattaaaaccatcacattagtcctggctgtggcatcaggtttgagtttaggaaaagaaggtcccctggtacatgttgcctgttgctgcggaaatatct

SEQ ID NO: 172948 - DNA, 120 bp, Artificial Sequence
  ENSG00000109572_12 (sequence is synthesized)
tttcctacctctttccaaagtatagcacaaacgaagctaaaaaaagggaggtgctatcagctgcctcagctgcaggggtttctgtagcttttggtgcaccaattggaggagttcttttta

SEQ ID NO: 172949 - DNA, 120 bp, Artificial Sequence
  ENSG00000109572_13 (sequence is synthesized)
gcctggaagaggttagctattattttcctctcaaaactttatggagatcattttttgctgctttagtggctgcatttgttttgaggtccatcaatccatttggtaacagccgtctggtcc

SEQ ID NO: 172950 - DNA, 120 bp, Artificial Sequence
  ENSG00000109572_14 (sequence is synthesized)
ttttttatgtggagtatcatacaccatggtacctttttgaactgtttccttttattcttctaggggtatttggagggctttggggagcctttttcattagggcaaatattgcctggtgtc

SEQ ID NO: 172951 - DNA, 120 bp, Artificial Sequence
  ENSG00000109572_15 (sequence is synthesized)
gttctggaagtcattattgttgcagccattactgctgtgatagccttccctaatccatacactaggctaaacaccagtgaactgatcaaagagctttttacagactgtggtcccctggaa

SEQ ID NO: 172952 - DNA, 120 bp, Artificial Sequence
  ENSG00000109572_16 (sequence is synthesized)
tcctcttctctttgtgactacagaaatgacatgaatgccagtaaaattgtcgatgacattcctgatcgtccagcaggcattggagtatattcagctatatggcagttatgcctggcactc

SEQ ID NO: 172953 - DNA, 120 bp, Artificial Sequence
  ENSG00000109572_17 (sequence is synthesized)
atatttaaaatcataatgacagtattcacttttggcatcaaggttccatcaggcttgttcatccccagcatggccattggagcgatcgcaggaaggattgtggggattgcggtggagcag

SEQ ID NO: 172954 - DNA, 120 bp, Artificial Sequence
  ENSG00000109572_18 (sequence is synthesized)
cttgcctactatcaccacgactggtttatctttaaggagtggtgtgaggtcggggctgattgcattacacctggcctttatgccatggttggtgctgctgcatgcttaggtggtgtgaca

SEQ ID NO: 172955 - DNA, 120 bp, Artificial Sequence
  ENSG00000109572_19 (sequence is synthesized)
agaatgactgtctccctggtggttattgtttttgagcttactggaggcttggaatatattgttccccttatggctgcagtcatgaccagtaaatgggttggagatgcctttggcagggaa

SEQ ID NO: 172956 - DNA, 120 bp, Artificial Sequence
  ENSG00000109572_20 (sequence is synthesized)
ggcatttatgaagcacacatccgattaaatggataccctttcttggatgcaaaagaagaattcactcataccaccctggctgctgacgttatgagacctcgaaggaatgatcctccctta

SEQ ID NO: 172957 - DNA, 120 bp, Artificial Sequence
  ENSG00000109572_21 (sequence is synthesized)
gctgtcctgacacaggacaatatgacagtggatgatatagaaaacatgattaatgaaaccagctacaatggatttcctgtcataatgtcaaaagaatctcagagattagtgggatttgcc

SEQ ID NO: 172958 - DNA, 120 bp, Artificial Sequence
  ENSG00000109572_22 (sequence is synthesized)
ctcagaagagacctgacaattgcaatagaaagtgccaggaaaaaacaagaaggtatcgttggcagttctcgggtgtgttttgcacagcacaccccatctcttccagcagaaagtcctcgg

SEQ ID NO: 172959 - DNA, 120 bp, Artificial Sequence
  ENSG00000109572_23 (sequence is synthesized)
ccattgaagcttcgaagcattcttgacatgagcccttttacagtgacagaccacaccccaatggagatcgtggtggatattttccgaaagctgggactgaggcagtgccttgtaactcac

SEQ ID NO: 172960 - DNA, 120 bp, Artificial Sequence
  ENSG00000109572_24 (sequence is synthesized)
aatgggattgtcttggggatcatcacaaagaagaacatattagagcatctcgagcaactaaagcagcacgtcgaacccttggcgcctccttggcattataacaaaaaaagatatcctccg

SEQ ID NO: 172961 - DNA, 120 bp, Artificial Sequence
  ENSG00000109572_25 (sequence is synthesized)
gcatatggcccagacggcaaaccaagaccccgcttcaataatgttcaactgaatctcacagatgaggagagagaagaaacggaagaggaagtttatttgttgaatagcacaactctttaa

SEQ ID NO: 172962 - DNA, 120 bp, Artificial Sequence
  ENSG00000109572_26 (sequence is synthesized)
cctgagggagtcatctacttttttttcctcctttacaaaaaaagaaaggaaatataaaagccgggtttttgcaacatggtttgcaaataatgctggtggaatggaggagttgtttgggga

SEQ ID NO: 172963 - DNA, 120 bp, Artificial Sequence
  ENSG00000109572_27 (sequence is synthesized)
gggaaaggagagagaaggaaaggagtgaggtatttcccgtctaacagaaagcagcgtatcaactcctattgttctgcactggatgcattcagctgaggatgtgcctgatagtgcaggctt

SEQ ID NO: 172964 - DNA, 120 bp, Artificial Sequence
  ENSG00000109572_28 (sequence is synthesized)
gcgcctcaacagagatgacagcagagtcctcgagcacctggcctgttgctccaacattgcaaagacacattatcagtccctatttctagagggattactttgaattgagccatctataaa

SEQ ID NO: 172965 - DNA, 120 bp, Artificial Sequence
  ENSG00000109572_29 (sequence is synthesized)
actgcaaggtcttgcccttttttttaatcaaaactgttctgtttaattcatgaattgtatagttaagcattacctttctacattccagaagagcctttatttctctctctctctctctct

SEQ ID NO: 172966 - DNA, 120 bp, Artificial Sequence
  ENSG00000109572_30 (sequence is synthesized)
ctctctactgagctgtaacaaagcctctttaaatcggtgtatccttttgaagcagtcctttctcatattgagatgtactgtgattttactgaggtttcatcacaagaagggagtgtttct

SEQ ID NO: 172967 - DNA, 120 bp, Artificial Sequence
  ENSG00000109572_31 (sequence is synthesized)
tgtgccattaaccatgtagtttgtaccatcactaaatgcttggaacagtacacatgcaccacaacaaaggctcatcaaacaggtaaagtctcgaaggaagcgagaacgaaatctctcatt

SEQ ID NO: 172968 - DNA, 120 bp, Artificial Sequence
  ENSG00000109572_32 (sequence is synthesized)
gtgtgccgtgtggctcaaaaccgaaaacaatgaagcttggttttaaaggataaagttttcttttttgttttcctctcagactttatggataatgtgaccgggtcttatgcaaattttcta

SEQ ID NO: 172969 - DNA, 120 bp, Artificial Sequence
  ENSG00000109572_33 (sequence is synthesized)
tttctaaaactactactatgatatacaagtgctgttgagcataattaaataaaatgctgctgctttgacagtaaagagaaggaagtattctgattagctgtatctggtattaattgcatg

SEQ ID NO: 172970 - DNA, 120 bp, Artificial Sequence
  ENSG00000109572_34 (sequence is synthesized)
ttaaaacactggaatttttaaaattgaaattagatcagtcattcttttcttttctcaagatatctcatggctgacactgaagaagaaatgtaattcataacttgcactaaatgtatattt

SEQ ID NO: 172971 - DNA, 120 bp, Artificial Sequence
  ENSG00000109572_35 (sequence is synthesized)
ttcagacttacaaatacagagatatgaacaaagtttacagtgggaacaaaggtttaaaaaaaggttgtggttctctctctgtgatccagtgtgcacataaacctttctctgatctttcac

SEQ ID NO: 172972 - DNA, 120 bp, Artificial Sequence
  ENSG00000109572_36 (sequence is synthesized)
tgccatcctctggattatgtcttctgacctgtccattttgacccattaactggaaagttgaaaaactacattaactggaaagttgaaaaactacattactttggagaataaaaccgaaag

SEQ ID NO: 172973 - DNA, 120 bp, Artificial Sequence
  ENSG00000109572_37 (sequence is synthesized)
ttcgtgtataccttcttaaaaaaaaaatcaaaccaaaaatgtgaaaacaatagaattgcaaagatagcagttaaaattttaatctgaaaataacctttgaatctcgggctaggttacgtc

SEQ ID NO: 172974 - DNA, 120 bp, Artificial Sequence
  ENSG00000109572_38 (sequence is synthesized)
catatttgaagtggtcagtgatggtttgaacattttttgcaggatgagtgaaaatgcactggattatatttgggatttttgtttttggaattgtctgttttaatcacagccttaattcac

SEQ ID NO: 172975 - DNA, 120 bp, Artificial Sequence
  ENSG00000109572_39 (sequence is synthesized)
aattggcaaaggcagtttactcaaaggactgggctaaatattctgtaattatgcatttttgataggaaaatgaaatttttgcaaacagacattttctttttttttggctggagtgcagtg

SEQ ID NO: 172976 - DNA, 120 bp, Artificial Sequence
  ENSG00000109572_40 (sequence is synthesized)
gtgcagtggggcatggtcttggctcactgcagcgttgaccacctgggctcaagtgatactcccgcctcagccacccaagtagctggcactacgggcacacgccaccatgcccagctaatt

SEQ ID NO: 172977 - DNA, 120 bp, Artificial Sequence
  ENSG00000109572_41 (sequence is synthesized)
ggttttgccatgctgcccaggctggtctcaactcctcagctcaagcaatctgcctgcgtgagcctcccaaagtggtggaattacaggcgtgggccactgcgcctggcccagacagacatt

SEQ ID NO: 172978 - DNA, 120 bp, Artificial Sequence
  ENSG00000109572_42 (sequence is synthesized)
ggcccagacagacattttctgaaacacaactggcaatgagctgtttttacattttgaaagtgattcttcacttcctagttcttaattatagtatacctattaagatctgtaagatcctga

SEQ ID NO: 172979 - DNA, 120 bp, Artificial Sequence
  ENSG00000109572_43 (sequence is synthesized)
agacataagatcatgaagccatataagaatgaggattgaaagttgagcaaaattttcgggattttgggaaacattcttagctgtgctatctgcctaaaattattccttattacttctctc

SEQ ID NO: 172980 - DNA, 120 bp, Artificial Sequence
  ENSG00000109572_44 (sequence is synthesized)
ctttgacagacttcaagttttcttcatagccctttcaaagttttttgagccatccagagtaaaatcatttctaaatgatagttctgtatatctccaactcgtcttaagtgtatttgcctg

SEQ ID NO: 172981 - DNA, 120 bp, Artificial Sequence
  ENSG00000109572_45 (sequence is synthesized)
tgtgcaacgtattgctagactatgaactcctcagcatggctgctggataacttaattgtcctgagttaatagccttcaaaggacaaatcggtttctttgcagatagcttcgtaaaacttc

SEQ ID NO: 172982 - DNA, 120 bp, Artificial Sequence
  ENSG00000109572_46 (sequence is synthesized)
acatggagtttattttatcatatttcccttttttatttctgctcctcctttaattgcccatcttgcttcagagactgacatttcagggtggatattaattaaagcattaattttgttttt

SEQ ID NO: 172983 - DNA, 120 bp, Artificial Sequence
  ENSG00000109572_47 (sequence is synthesized)
tggtatatttctatccctagtatttctatcttactgctaaaatacaggaaaagtgccgtatttttaatgcatttagtggttttctttggtgttatctgttccatttttctttttcataca

SEQ ID NO: 172984 - DNA, 120 bp, Artificial Sequence
  ENSG00000109572_48 (sequence is synthesized)
ttgaagtgtgtctccttttcaaccaaaataatgaaatagtggagaccatgaaattgttgtgcctggctaattggcaaattaatttaccaatataataagtgtagcgccttgtttgaatac

SEQ ID NO: 172985 - DNA, 120 bp, Artificial Sequence
  ENSG00000109572_49 (sequence is synthesized)
cctttttgagaaggtatgatgagaatgggcaagggtgtcagcatctcttcttcttaataattaattgttttcagttttggttcacgaagaatgcttagttaatctgtaatgttgcctaga

SEQ ID NO: 172986 - DNA, 120 bp, Artificial Sequence
  ENSG00000109572_50 (sequence is synthesized)
gctgtatttatctgtttttatttatactagtgtagtaaagctgcatatcattacagtaaaaacgactactgtgatgagttaatcagaaaatctattaaaatctatatgacaatgtgtggt

SEQ ID NO: 172987 - DNA, 120 bp, Artificial Sequence
  ENSG00000109572_51 (sequence is synthesized)
ttggcctttaattatatctgtaacagtcctccctcttcactgctgccctacgcagtgtaggccgatatgcctggcacagggagccccaaaaaggtaataattataatgcttctctcaggt

SEQ ID NO: 172988 - DNA, 120 bp, Artificial Sequence
  ENSG00000109572_52 (sequence is synthesized)
tacaaagcatttctacactttgcaagcaaggagcaatagaagagtagatagatgctggattgacagcaggatgttcataccaccagcaatggtttagcgcccccatttgtcagtgaaagc

SEQ ID NO: 172989 - DNA, 120 bp, Artificial Sequence
  ENSG00000109572_53 (sequence is synthesized)
tgcaggtccacagaaaactgatttcatttcagctcactttcaaaagtgatttttttttttttcgcaagaaaaattacgctatttgcatgaaaagaggtaaaacgatttatttacatgtct

SEQ ID NO: 172990 - DNA, 120 bp, Artificial Sequence
  ENSG00000109572_54 (sequence is synthesized)
ttaaaaaatcaccttggacatttgctaatagaactgccaaaagagggtggtaagtaacaacctttgattaagatgtggtcttttactattaagcttttagtaaaaaggaacacactaaaa

SEQ ID NO: 172991 - DNA, 120 bp, Artificial Sequence
  ENSG00000109572_55 (sequence is synthesized)
agttttgtgtgttgtacttggagcttagtcattgtcatacgtagcaggacctgattaagaaggctgtgccgcctctaagccttgctagattgtagccactagcaaccaggctgcaataat

SEQ ID NO: 172992 - DNA, 120 bp, Artificial Sequence
  ENSG00000109572_56 (sequence is synthesized)
ttccctttgatgacatcatccactgtggaagaacccagttgcttcagcgagtcgaactacagttttaacctcatcaaatatggcatctcccttgcttgctgcagcagggatggaagaaat

SEQ ID NO: 172993 - DNA, 120 bp, Artificial Sequence
  ENSG00000109572_57 (sequence is synthesized)
gtcactttctttttaagctagcaagctttttctttttctttttcttcttctatttaaaaattctaatcatggatgcttcttccgacccttatttgccttatgacgggggaggagacagta

SEQ ID NO: 172994 - DNA, 120 bp, Artificial Sequence
  ENSG00000109572_58 (sequence is synthesized)
acagagaaaggcatagacggtttacttataccctgtaactttccagaaaggatttcaggtagctaaaaaacaaagaaatacaataagaagacaaaataagaaggaaagggaaaaatacag

SEQ ID NO: 172995 - DNA, 120 bp, Artificial Sequence
  ENSG00000109572_59 (sequence is synthesized)
gggaagaacaagccaagttccagatatggaggtcagcatgattttgggctttgagcagcccaccagctaaggcaaaaaaggaaactcattgcatagctcttacctatggaaaaagaagaa

SEQ ID NO: 172996 - DNA, 120 bp, Artificial Sequence
  ENSG00000109572_60 (sequence is synthesized)
atctactgggggcagatggtcttgtgggattttgctgttttcttttatctcctttcccagcatttgattctgagatatttctcaatttggctcccaaataaagcttattgagtgttgtaa

SEQ ID NO: 172997 - DNA, 120 bp, Artificial Sequence
  ENSG00000109572_61 (sequence is synthesized)
ataacaagtgcaagtagtgatgaggaacttttagatggagcaggtgttattatggactttcaaacatctgaagatgacaatttattagatggtgacactgcagttgagacggggtttctc

SEQ ID NO: 172998 - DNA, 120 bp, Artificial Sequence
  ENSG00000109572_62 (sequence is synthesized)
catgttgctcaggctggtctgcaactcctgggctcaagcaatctacctgccttggcctttcaaagtgctgggactacaggcgtaagccaccgtgcccgtcctcacagggcttttattatt

SEQ ID NO: 172999 - DNA, 120 bp, Artificial Sequence
  ENSG00000109572_63 (sequence is synthesized)
tctggtaggattcataggtgtattttagactatcttcgaatagatggactgtatagagagtttcaggaggtcatcaatgtatattttttctgaggtttgatatatattaggtaacagtga

SEQ ID NO: 173000 - DNA, 120 bp, Artificial Sequence
  ENSG00000109572_64 (sequence is synthesized)
ttttagaattataacagagctatattataaaagagtatattatttacatttagctagtttttctttagcaacagaacacaacccagctgaatgtaagactgaatagaagccaccagaagt

SEQ ID NO: 173001 - DNA, 120 bp, Artificial Sequence
  ENSG00000109576_0 (sequence is synthesized)
aggagcgcgtgcggcgtggactttgccgggctcgccacacagccccagacccgtttaggaccgggagaccgaacgcagcgtccagccggggagtttcggcggcgttctccgggcaccgcg

SEQ ID NO: 173002 - DNA, 120 bp, Artificial Sequence
  ENSG00000109576_1 (sequence is synthesized)
cgcgggaagccagacgcagcggggggacacatctcgcggtggcgttgccagagtgaggagttagcaggcaggacttgacgaggctctttggtttttctagtcctcaaccactgaagaaga

SEQ ID NO: 173003 - DNA, 120 bp, Artificial Sequence
  ENSG00000109576_2 (sequence is synthesized)
agcttgatgcttggctgtcagaagacatgaattacgcacggttcatcacggcagcgagcgcagccagaaacccttctcccatccggaccatgactgacatattgagcagaggaccaaaat

SEQ ID NO: 173004 - DNA, 120 bp, Artificial Sequence
  ENSG00000109576_3 (sequence is synthesized)
cgatgatctccttggctggtggcttaccaaatccaaacatgtttccttttaagactgccgtaatcactgtagaaaatggaaagaccatccaatttggagaagagatgatgaagagagcac

SEQ ID NO: 173005 - DNA, 120 bp, Artificial Sequence
  ENSG00000109576_4 (sequence is synthesized)
ttcagtattctccgagtgctggaattccagagcttttgtcctggctaaaacagttacaaataaaattgcataatcctcctaccatccattacccacccagtcaaggacaaatggatctat

SEQ ID NO: 173006 - DNA, 120 bp, Artificial Sequence
  ENSG00000109576_5 (sequence is synthesized)
gtgtcacatctggcagccaacaaggtctttgtaaggtgtttgaaatgatcattaatcctggagataatgtcctcctagatgaacctgcttattcaggaactcttcaaagtctgcacccac

SEQ ID NO: 173007 - DNA, 120 bp, Artificial Sequence
  ENSG00000109576_6 (sequence is synthesized)
tgggctgcaacattattaatgttgccagtgatgaaagtgggattgttccagattccctaagagacatactttccagatggaaaccagaagatgcaaagaatccccagaaaaacaccccca

SEQ ID NO: 173008 - DNA, 120 bp, Artificial Sequence
  ENSG00000109576_7 (sequence is synthesized)
aatttctttatactgttccaaatggcaacaaccctactggaaactcattaaccagtgaacgcaaaaaggaaatctatgagcttgcaagaaaatatgatttcctcataatagaagatgatc

SEQ ID NO: 173009 - DNA, 120 bp, Artificial Sequence
  ENSG00000109576_8 (sequence is synthesized)
cttactattttctccagtttaacaagttcagggtaccaacatttctttccatggatgttgatggacgtgtcatcagagctgactctttttcaaaaatcatttcctctgggttgagaatag

SEQ ID NO: 173010 - DNA, 120 bp, Artificial Sequence
  ENSG00000109576_9 (sequence is synthesized)
tgatatcacagcttctacacgaatggggagaagaaggtttcatggctcatgtagacagggttattgatttctatagtaaccagaaggatgcaatactggcagctgcagacaagtggttaa

SEQ ID NO: 173011 - DNA, 120 bp, Artificial Sequence
  ENSG00000109576_10 (sequence is synthesized)
ctggtttggcagaatggcatgttcctgctgctggaatgtttttatggattaaagttaaaggcattaatgatgtaaaagaactgattgaagaaaaggccgttaagatgggggtattaatgc

SEQ ID NO: 173012 - DNA, 120 bp, Artificial Sequence
  ENSG00000109576_11 (sequence is synthesized)
tccctggaaatgctttctacgtcgatagctcagctcctagcccttacttgagagcatccttctcttcagcttctccagaacagatggatgtggccttccaggtattagcacaacttataa

SEQ ID NO: 173013 - DNA, 77 bp, Artificial Sequence
  ENSG00000109576_12 (sequence is synthesized)
aggatcacttgaacccaggaattcaaggctgcagtaagctacgatcacaccactgcactctggcctgcatgcactct

SEQ ID NO: 173014 - DNA, 120 bp, Artificial Sequence
  ENSG00000109576_13 (sequence is synthesized)
gctacgatcacaccactgcactctggcctgcatgcactctggcctgcatggcagaacaagaccctgtctctaaaaaaagagaaagaaatcaaactaatcatgctgctcatggatttttcc

SEQ ID NO: 173015 - DNA, 120 bp, Artificial Sequence
  ENSG00000109576_14 (sequence is synthesized)
aataaatttcttgttttggcaggaagaaatgaacactggtattagacttaaagattaaatttcctcaaacatgtcctatctgtagtagttcaactagacaccttttaaagtgcctctaaa

SEQ ID NO: 173016 - DNA, 120 bp, Artificial Sequence
  ENSG00000109576_15 (sequence is synthesized)
ttcatcagatggccaaactgtatttataatccacttaggcattttgaaaaactttcaacctgtaaaaagttacttttatcttggatttattatgaagaactttgtagttgctttgtaatt

SEQ ID NO: 173017 - DNA, 120 bp, Artificial Sequence
  ENSG00000109576_16 (sequence is synthesized)
tcccataaattgtctttgaaactaacattttacactgaattattttgagattttaaagaagtaattaagtgcaaaatggtatataatgtgtactttttctacttttaggaaaatttaatg

SEQ ID NO: 173018 - DNA, 120 bp, Artificial Sequence
  ENSG00000109576_17 (sequence is synthesized)
agagcttattgcaaaaattgttataatttggtcattataagtgacttttagtaaaagtaccataaaccttatgttatgccacagaaattcctttaaaataaaattcttaaactaaacata

SEQ ID NO: 173019 - DNA, 120 bp, Artificial Sequence
  ENSG00000109576_18 (sequence is synthesized)
aaaatgcacagtcccagtgactgagaggaggccagcggagcgcgcgggaacgagggtggggccgctcccggctgggcgcagctcgggagccccctgcagtggacccaagtcgccgccaga

SEQ ID NO: 173020 - DNA, 120 bp, Artificial Sequence
  ENSG00000109576_19 (sequence is synthesized)
gtttaacaaggtaagtgattatgtgaacttacttcactattagaagataagttgttttaagttactgcactgtgttgggtattaggctgactgctgagtcagaactaatccacttttaca

SEQ ID NO: 173021 - DNA, 120 bp, Artificial Sequence
  ENSG00000109576_20 (sequence is synthesized)
ccctgcagtggacccaagtcgccgccagatggttcccgaggattaggatcacgggcacttccggtcccctcggtcagcccctgggctagcctctgggccggcgcctaggccggccaacgc

SEQ ID NO: 173022 - DNA, 120 bp, Artificial Sequence
  ENSG00000109576_21 (sequence is synthesized)
actcaggagcccagctggcttcccccagtggagccggcactggggccacaggtggagctgcctgccagtcccgggctgtgagcccgcactcctcagcccttgggcgaactccatcgtcac

SEQ ID NO: 173023 - DNA, 120 bp, Artificial Sequence
  ENSG00000109576_22 (sequence is synthesized)
tccaaaatgctgagatcttcgagaaagtgatgttgaaattcgtcttggtcgccgggatgcttcccaggagagtgcccagagtttcactaacgaaagatggtcctcaaccactgaagaaga

SEQ ID NO: 173024 - DNA, 120 bp, Artificial Sequence
  ENSG00000109576_23 (sequence is synthesized)
agtagagagaggcgcagactgctgtggggcacggccttggaagggagggggcgtgctatcaagaaaggctcttcctgggaagctgagaaggggcatgcacagcgtgcagatgggtgtaca

SEQ ID NO: 173025 - DNA, 120 bp, Artificial Sequence
  ENSG00000109586_0 (sequence is synthesized)
gtgagtctctcgccgccggaggaagatgaggctgaagattgggttcatcttacgcagtttgctggtggtgggaagcttcctggggctagtggtcctctggtcttccctgaccccgcggcc

SEQ ID NO: 173026 - DNA, 120 bp, Artificial Sequence
  ENSG00000109586_1 (sequence is synthesized)
ggacgacccaagcccgctgagcaggatgagggaagacagagatgtcaatgaccccatgcccaaccgaggcggcaatggactagctcctggggaggacagattcaaacctgtggtaccatg

SEQ ID NO: 173027 - DNA, 120 bp, Artificial Sequence
  ENSG00000109586_2 (sequence is synthesized)
gcctcatgttgaaggagtagaagtggacttagagtctattagaagaataaacaaggccaaaaatgaacaagagcaccatgctggaggagattcccagaaagatatcatgcagaggcagta

SEQ ID NO: 173028 - DNA, 120 bp, Artificial Sequence
  ENSG00000109586_3 (sequence is synthesized)
tctcacatttaagcctcagacattcacctaccatgatcctgtgcttcgcccagggatcctcggtaactttgaacccaaagaacctgagcctcctggagtggttggtggccctggagagaa

SEQ ID NO: 173029 - DNA, 120 bp, Artificial Sequence
  ENSG00000109586_4 (sequence is synthesized)
agccaagccattggttttgggaccagaattcaaacaagcaattcaagccagcattaaagagtttggatttaacatggtggcaagtgacatgatctcactggaccgcagcgtcaatgactt

SEQ ID NO: 173030 - DNA, 120 bp, Artificial Sequence
  ENSG00000109586_5 (sequence is synthesized)
acgccaagaagaatgcaagtattggcattatgatgaaaacttgctcacttcgagcgttgtcattgtcttccataatgaaggatggtcaaccctcatgagaacagtccacagtgtaattaa

SEQ ID NO: 173031 - DNA, 120 bp, Artificial Sequence
  ENSG00000109586_6 (sequence is synthesized)
aaggactccaaggaaatatttagcagaaattgtgttaattgacgatttcagtaataaagaacacttaaaagaaaaactggatgaatatattaagctgtggaatggcctagtgaaggtatt

SEQ ID NO: 173032 - DNA, 120 bp, Artificial Sequence
  ENSG00000109586_7 (sequence is synthesized)
tcgaaatgaaagaagggaaggtttaattcaagcacgaagtattggtgctcagaaggctaaacttggacaggttttgatataccttgatgcccactgtgaggtggcagttaactggtatgc

SEQ ID NO: 173033 - DNA, 120 bp, Artificial Sequence
  ENSG00000109586_8 (sequence is synthesized)
accacttgtagctcccatatctaaggacagaaccatttgcactgtgccgcttatagatgtcataaatggcaacacatatgaaattataccccaagggggtggtgatgaagatgggtatgc

SEQ ID NO: 173034 - DNA, 120 bp, Artificial Sequence
  ENSG00000109586_9 (sequence is synthesized)
ccgaggagcatgggattggagtatgctctggaaacgggtgcctctgacccctcaagagaagagactgagaaagacaaaaactgaaccgtatcggtccccagccatggctgggggattatt

SEQ ID NO: 173035 - DNA, 120 bp, Artificial Sequence
  ENSG00000109586_10 (sequence is synthesized)
tgccattgaacgagagttcttctttgaattgggtctctatgatccaggtctccagatttggggtggtgaaaactttgagatctcatacaagatatggcagtgtggtggcaaattattatt

SEQ ID NO: 173036 - DNA, 120 bp, Artificial Sequence
  ENSG00000109586_11 (sequence is synthesized)
tgttccttgttctcgtgttggacatatctaccgtcttgagggctggcaaggaaatcctccgcccatttatgttgggtcttctccaactctgaagaattatgttagagttgtggaggtttg

SEQ ID NO: 173037 - DNA, 120 bp, Artificial Sequence
  ENSG00000109586_12 (sequence is synthesized)
gtgggatgaatataaagactacttctatgctagtcgtcctgaatcgcaggcattaccatatggggatatatcggagctgaaaaaatttcgagaagatcacaactgcaaaagttttaagtg

SEQ ID NO: 173038 - DNA, 120 bp, Artificial Sequence
  ENSG00000109586_13 (sequence is synthesized)
gttcatggaagaaatagcttatgatatcacctcacactaccctttgccacccaaaaatgttgactggggagaaatcagaggcttcgaaactgcttactgcattgatagcatgggaaaaac

SEQ ID NO: 173039 - DNA, 120 bp, Artificial Sequence
  ENSG00000109586_14 (sequence is synthesized)
aaatggaggctttgttgaactaggaccctgccacaggatgggagggaatcagcttttcagaatcaatgaagcaaatcaactcatgcagtatgaccagtgtttgacaaagggagctgatgg

SEQ ID NO: 173040 - DNA, 120 bp, Artificial Sequence
  ENSG00000109586_15 (sequence is synthesized)
atcaaaagttatgattacacactgtaatctaaatgaatttaaggaatggcagtacttcaagaacctgcacagatttactcatattccttcaggaaagtgtttagatcgctcagaggtcct

SEQ ID NO: 173041 - DNA, 120 bp, Artificial Sequence
  ENSG00000109586_16 (sequence is synthesized)
gcatcaagtattcatctccaattgtgactccagtaaaacgactcaaaaatgggaaatgaataacatccatagtgtttagagagaaaaaaataaaccaataacctacctactgacaagtaa

SEQ ID NO: 173042 - DNA, 120 bp, Artificial Sequence
  ENSG00000109586_17 (sequence is synthesized)
taactctgtatagctccaaacctggaacctcctgatcagtttgaaggacattgataaactgtgattttacaataacattatcatctgcagttactgtttacaagactgcttttaccttaa

SEQ ID NO: 173043 - DNA, 120 bp, Artificial Sequence
  ENSG00000109586_18 (sequence is synthesized)
actttgtagatgtttacatctttttgttgtgttttaagatgatgttggtaatttgtgcctttagctctgttttattagacagagttaaagcatgttgtcttctttgggattacactcagg

SEQ ID NO: 173044 - DNA, 120 bp, Artificial Sequence
  ENSG00000109586_19 (sequence is synthesized)
ggtctgaaaggcagtttgatttttatttttaacacacttgaaaaaaggttggagtagccagactttcatatataacttggtgattatcaacctgttgtgtctttatttaattttacatct

SEQ ID NO: 173045 - DNA, 120 bp, Artificial Sequence
  ENSG00000109586_20 (sequence is synthesized)
ttttgaagcactgccacaggttattagccaaggtggccttccttcacagtcatgctgcttttttgaaaggtgaatttcaacacatttagtgcctctttcatttctcagtatatatttcaa

SEQ ID NO: 173046 - DNA, 120 bp, Artificial Sequence
  ENSG00000109586_21 (sequence is synthesized)
gagcttgtgatgaaatctataggatggtaatgatggacttgtcacctgtatggggaatacttttactactcagaaatgaatttatgtgctgccatttgctataaagttgaactttgtatg

SEQ ID NO: 173047 - DNA, 120 bp, Artificial Sequence
  ENSG00000109586_22 (sequence is synthesized)
gcttgaaaaagaaatgacaatatggaacatcccaaggctgtcccatagggttggaagttgtgtagcattcactcccttacctactggcattcccagtgccctctgtccatacctacttct

SEQ ID NO: 173048 - DNA, 120 bp, Artificial Sequence
  ENSG00000109586_23 (sequence is synthesized)
aggattgcaaaggagtcttccaactagagaaaaattgtccactgacatttgggatttacttttctccaatacctgccaatacagaaaactattatcagttgttattgttatcccttgaaa

SEQ ID NO: 173049 - DNA, 120 bp, Artificial Sequence
  ENSG00000109586_24 (sequence is synthesized)
gcgagggtgacaaaaacaacaaaacaccgttataaacacatcaaaggttcattctgactgaggtaagactttccaagcccttgttagattaggccttataaaacttgtgtgcattataac

SEQ ID NO: 173050 - DNA, 120 bp, Artificial Sequence
  ENSG00000109586_25 (sequence is synthesized)
ctaagctgtgcaacctgtgaagccaagagtgaactgatgtttcatttatattttcatccaaatgacattatctgcacgtttttaaaatttaaaaacaaaggactatttaaaaatacagtt

SEQ ID NO: 173051 - DNA, 120 bp, Artificial Sequence
  ENSG00000109586_26 (sequence is synthesized)
tattaacaaacgtgaactactttctgttacattaggtgttccctagtgtttcttaatttctttttagaaagtgtatttttattagtatttttccggtgaacagaagatttgtttggattt

SEQ ID NO: 173052 - DNA, 120 bp, Artificial Sequence
  ENSG00000109586_27 (sequence is synthesized)
aaacatttactaagacagtacctattaggaaaaccaaatattgcaaatggtcaattcgattttaatttctcaaaagatactctgttatccagaagattaaaatgcctacattgagtgctt

SEQ ID NO: 173053 - DNA, 120 bp, Artificial Sequence
  ENSG00000109586_28 (sequence is synthesized)
aaaaaaaaaaaaacaactgtgatgatgtgagcagaatggcaagtaagttaagcatttttgatcctgtaatcatggtatcattacaatgaaaggaattcacaaactactgccagaggaagt

SEQ ID NO: 173054 - DNA, 120 bp, Artificial Sequence
  ENSG00000109586_29 (sequence is synthesized)
ttgttttttaatttaagagggaaatataacctataaatttgtttcttccaagcttagctcttaaatttggagactcaaagttaaacatcctcaacagagttttatttataattttgaatt

SEQ ID NO: 173055 - DNA, 120 bp, Artificial Sequence
  ENSG00000109586_30 (sequence is synthesized)
gtcaatttgtattttgctactgatctgtgatcaaccattttaactttcatctctagggatgtttaacatttataattgcaaaataaaccaactataaaaaaagaaactaagagagaattg

SEQ ID NO: 173056 - DNA, 120 bp, Artificial Sequence
  ENSG00000109586_31 (sequence is synthesized)
gtactttaattacttgtgtgtttgcaaataggctccattttccatgttgagtagattataaccttattaactatgcataggcctaagaaaggtggcaatgaactgtgcatgtaaatttta

SEQ ID NO: 173057 - DNA, 120 bp, Artificial Sequence
  ENSG00000109586_32 (sequence is synthesized)
aatgggtactttgtgcaattcgttaaaagaagatactctatgaatatgattctatatattgaaatcagaaaacctaccaaacaaaaacatcagaagctgctgccataatgactattttct

SEQ ID NO: 173058 - DNA, 120 bp, Artificial Sequence
  ENSG00000109586_33 (sequence is synthesized)
actgtaggctgctttggaaataattcccatatccttgctttgtaagttggtaatatcactatgcatttctacacattttataaatttgatttatgcagattttgatacactgtatgtttc

SEQ ID NO: 173059 - DNA, 120 bp, Artificial Sequence
  ENSG00000109586_34 (sequence is synthesized)
tgtagaaattgtataaatattcaaaattttattaggataaatttgagaaacttacgtatatcttaattctgggttgcttgttttttaggtgacaaaaataaaatattgtattttaattca

SEQ ID NO: 173060 - DNA, 120 bp, Artificial Sequence
  ENSG00000109586_35 (sequence is synthesized)
ggaatggcagtacttcaaggtattctgcattttaacttctgaaatattatatgcttttcattttcagtaacatctagcatgtggaatttagataaataaatcttaaaacctgcattcaaa

SEQ ID NO: 173061 - DNA, 120 bp, Artificial Sequence
  ENSG00000109586_36 (sequence is synthesized)
catgtactgtgcctctaatagattacatagatgggaatgattattccattgaaccacagcaaggtggggatgaagatggttttgccagaggggcctgggactggagtttactatggaaac

SEQ ID NO: 173062 - DNA, 120 bp, Artificial Sequence
  ENSG00000109586_37 (sequence is synthesized)
tcctatctcctccccccaacccatctttgctgatttcttggtcaaaaactttggagtcttccatgaatcctgtctttgtctcgcacttcatatctagttccagaatctgatcccttgttg

SEQ ID NO: 173063 - DNA, 120 bp, Artificial Sequence
  ENSG00000109586_38 (sequence is synthesized)
cctggtctaagccaccatcatctctcactgagactaacttgttgactctcctacagcctatttcaaatacagcagtcagagtgactgttttaaaataaaggcaaatcatgtccttcttct

SEQ ID NO: 173064 - DNA, 120 bp, Artificial Sequence
  ENSG00000109586_39 (sequence is synthesized)
gctagaaaccctgcaccttcacctatgagtgaagacaaagtcctttctggtagtctccaagatccacaacatctgtccccattcctctctggcctcacctgctactgctctccccactcc

SEQ ID NO: 173065 - DNA, 120 bp, Artificial Sequence
  ENSG00000109586_40 (sequence is synthesized)
actccagccccatgtccttactggtcctcagactccctccaggcatgtgcctgcctgtgctgttccctctgccaggaatgcttccttgcagatacacgcatgcatggccagctctcacac

SEQ ID NO: 173066 - DNA, 120 bp, Artificial Sequence
  ENSG00000109586_41 (sequence is synthesized)
ctccttcaagtctgctgacctaccacttctcagtgaggtccaccttgttacttcccaacgccctagctcccaccctaacttcctcttcttttcctttttttcaccacacttatcaccttt

SEQ ID NO: 173067 - DNA, 120 bp, Artificial Sequence
  ENSG00000109586_42 (sequence is synthesized)
tgccataacagacaaattgtctactatgttttttaacttatattctgtcttttttcccttacattcccagagtgaatggaggcaggggcccacattcactgtggcatgcccattactggg

SEQ ID NO: 173068 - DNA, 120 bp, Artificial Sequence
  ENSG00000109586_43 (sequence is synthesized)
gtaggtgtctttattttgttcactagtgtttcagagcctacaacatgcctggcacacatcaggtacttaatatttgatgattgaataaatacatgaatgaataaatggaattttctgtcc

SEQ ID NO: 173069 - DNA, 120 bp, Artificial Sequence
  ENSG00000109586_44 (sequence is synthesized)
tccttttactgtctcactcccaagtatatcttcagtttaacctcttcccattctgacatctgcactttatacttcatttctcggcatttccttaacattccagggtaaacccctacctgt

SEQ ID NO: 173070 - DNA, 120 bp, Artificial Sequence
  ENSG00000109586_45 (sequence is synthesized)
tttaaaggtgtctcttggggcagtctttggagctcctccaggcagggtgagcagctcttcctctgtacattcacacctctgtcctgactggtccactacccctctgtctctctacaggcg

SEQ ID NO: 173071 - DNA, 120 bp, Artificial Sequence
  ENSG00000109586_46 (sequence is synthesized)
gtgaggaccatgacttgcacctcttcatatcctcaaaacctgttatcattataggtgcacagtccatatttgctgactgaatgcaagaataaaacattttatccaaatagtatagcgatt

SEQ ID NO: 173072 - DNA, 120 bp, Artificial Sequence
  ENSG00000109586_47 (sequence is synthesized)
tataattcagagaaataaatggcttttccaaaaatagttcttttcatacaaaatgtacattccaaagatggaaacctgtgtttgcttttcatctacgtttatagagaaaagcctcactgc

SEQ ID NO: 173073 - DNA, 120 bp, Artificial Sequence
  ENSG00000109586_48 (sequence is synthesized)
ctggtcatgtgccatgcatggcctatgcaccctagacccctacaggcagctaccaaaagtgctgcatagccatttgggagaggtcccttacaaatccagtctgttctagatatctagggc

SEQ ID NO: 173074 - DNA, 120 bp, Artificial Sequence
  ENSG00000109586_49 (sequence is synthesized)
caggccagtgtttattaccactgtggttaggttctctatttgcttctcattcacatgaattactgtgattctgaaattgcaattaatggtaactttttttttctctgtggtattttacgg

SEQ ID NO: 173075 - DNA, 120 bp, Artificial Sequence
  ENSG00000109586_50 (sequence is synthesized)
aaatgtatagtcctttgctcttagagaaagaacccattccagtgttgacttcaagaccataagttatttcaaaactatgtaaagattgacaatccagtaataacctgtcactacacatac

SEQ ID NO: 173076 - DNA, 120 bp, Artificial Sequence
  ENSG00000109586_51 (sequence is synthesized)
ggacaggtaggaagcatttgatatctacaatgtcaacattttgggtttggtaactaaatcatacacatttttaatcattcttcagtttttttaattgaaatgagaatgctggcttaaaca

SEQ ID NO: 173077 - DNA, 120 bp, Artificial Sequence
  ENSG00000109586_52 (sequence is synthesized)
gataacttatgtgtcagaattgactataatgctaatttttattagcatctaattttaaattgtgtgtaatatatgatgtaacgtatatgaggagtattctttcacctgcctctttttttt

SEQ ID NO: 173078 - DNA, 120 bp, Artificial Sequence
  ENSG00000109586_53 (sequence is synthesized)
gtttatctaagttcttttttttttcttccccatgaactcgtataaatgtgtgggtccatacatacgcttccatttgatctttgctgccatcaacacaatacagaaccatttgcactgtgc

SEQ ID NO: 173079 - DNA, 120 bp, Artificial Sequence
  ENSG00000109606_0 (sequence is synthesized)
ctcgtcgccgccgccattttagctgttggttccggccgcaccgtgtgggctgtagtagcgggaggggtgggggtcctccagagttaagtggctgtcctcgactgtgcccatacagcagcc

SEQ ID NO: 173080 - DNA, 120 bp, Artificial Sequence
  ENSG00000109606_1 (sequence is synthesized)
agctttcttccttaataactgcccgttcgaagagtgcgaggatgtccaagcggcaccggttggacctaggggaggattacccctctggcaagaagcgtgcggggaccgatgggaaggatc

SEQ ID NO: 173081 - DNA, 120 bp, Artificial Sequence
  ENSG00000109606_2 (sequence is synthesized)
gagatcgagaccgggatcgtgaagatcggtctaaagatcgagaccgagaacgtgatagaggagatagagagcgagagagggagaaagaaaaggagaaggagttgcgagcttcaacaaatg

SEQ ID NO: 173082 - DNA, 120 bp, Artificial Sequence
  ENSG00000109606_3 (sequence is synthesized)
ctatgcttatcagtgctggattaccacctttgaaagcttcccattcagctcactcaacccactcagcacattcaacgcattcaacacattctgctcattcaacgcatgccggacatgcag

SEQ ID NO: 173083 - DNA, 120 bp, Artificial Sequence
  ENSG00000109606_4 (sequence is synthesized)
gtcacacgtcacttccacagtgcattaatccgttcaccaacttaccccatactcctcgatactatgatattctaaagaaacgtcttcagctccctgtttgggaatacaaggataggttta

SEQ ID NO: 173084 - DNA, 120 bp, Artificial Sequence
  ENSG00000109606_5 (sequence is synthesized)
cagatattctggttagacatcagtcctttgtactggttggtgagactgggtctggtaaaacaacacagattccacagtggtgtgtggagtacatgcgatcattaccaggacccaagagag

SEQ ID NO: 173085 - DNA, 120 bp, Artificial Sequence
  ENSG00000109606_6 (sequence is synthesized)
gagttgcctgtacccaacccaggagagtggctgcaatgagtgtggctcagagagttgctgatgagatggatgtgatgttgggccaggaagttggttactccattcgatttgaagactgca

SEQ ID NO: 173086 - DNA, 120 bp, Artificial Sequence
  ENSG00000109606_7 (sequence is synthesized)
gtagtgcaaaaaccattcttaagtatatgactgatgggatgttacttcgtgaagctatgaatgatcccctcctggagcgttatggtgtaataattcttgatgaggctcatgagaggacac

SEQ ID NO: 173087 - DNA, 120 bp, Artificial Sequence
  ENSG00000109606_8 (sequence is synthesized)
tggctacagatattctaatgggtgttctgaaggaagttgtaagacagagatcagatttaaaggttatagttatgagcgctactctagatgcaggaaaattccagatttactttgataact

SEQ ID NO: 173088 - DNA, 120 bp, Artificial Sequence
  ENSG00000109606_9 (sequence is synthesized)
gtcctctcctaactattcctgggcgtacacatcctgttgagatcttctatactccagaaccagagagagattatcttgaagcagcaattcgaacagttatccagattcatatgtgtgaag

SEQ ID NO: 173089 - DNA, 120 bp, Artificial Sequence
  ENSG00000109606_10 (sequence is synthesized)
aggaagagggagatcttcttcttttcttaactggtcaagaggaaattgatgaagcctgtaagagaataaagcgtgaagttgatgatttgggccctgaagttggtgacattaaaatcattc

SEQ ID NO: 173090 - DNA, 120 bp, Artificial Sequence
  ENSG00000109606_11 (sequence is synthesized)
cattgtattctacacttccacctcagcagcagcaacgcatttttgagcctccacctcccaaaaaacagaatggagcaattggaagaaaggtagttgtgtcaactaacatagcagagacgt

SEQ ID NO: 173091 - DNA, 120 bp, Artificial Sequence
  ENSG00000109606_12 (sequence is synthesized)
tcagcaaagggctggtcgagctggacgtaccagacctggaaaatgcttcagactttacacagagaaagcttataaaacagaaatgcaggataacacctatcctgagattttgcgttctaa

SEQ ID NO: 173092 - DNA, 120 bp, Artificial Sequence
  ENSG00000109606_13 (sequence is synthesized)
tttaggatcagttgtgttacaattgaagaaacttggtattgatgacttggtacattttgattttatggatccaccagctcctgaaactctgatgagagccctggaacttttgaattacct

SEQ ID NO: 173093 - DNA, 120 bp, Artificial Sequence
  ENSG00000109606_14 (sequence is synthesized)
ggctgctttaaatgatgatggagatctgactgaattgggatccatgatggcagagtttcctctagatccacagctcgcaaaaatggttattgcaagttgtgactacaactgttctaatga

SEQ ID NO: 173094 - DNA, 120 bp, Artificial Sequence
  ENSG00000109606_15 (sequence is synthesized)
ggtcctatctattactgctatgttgtcagtcccacagtgttttgttcgccccacggaggccaagaaagccgcagatgaggccaagatgagatttgcccacatagatggagatcatctgac

SEQ ID NO: 173095 - DNA, 120 bp, Artificial Sequence
  ENSG00000109606_16 (sequence is synthesized)
actgctgaacgtctaccatgcttttaaacaaaatcatgaatcggttcagtggtgttatgacaacttcattaactacaggtccctgatgtccgcagacaatgtacgccagcagctatctcg

SEQ ID NO: 173096 - DNA, 120 bp, Artificial Sequence
  ENSG00000109606_17 (sequence is synthesized)
aattatggacagatttaatttgcctcgtcgaagtactgactttacaagcagggactattatattaatataagaaaagctttggttactgggtattttatgcaggtggcacatttagaacg

SEQ ID NO: 173097 - DNA, 120 bp, Artificial Sequence
  ENSG00000109606_18 (sequence is synthesized)
aacagggcattacttaactgtgaaagataaccaggtggttcagttgcatccctctactgttcttgaccacaaacctgaatgggtgctttataatgagtttgttctaacaacaaagaatta

SEQ ID NO: 173098 - DNA, 120 bp, Artificial Sequence
  ENSG00000109606_19 (sequence is synthesized)
catccggacatgtacagatatcaagccagaatggttggtgaaaattgcccctcaatattatgacatgagcaatttcccacagtgtgaagcaaagagacagttggaccgcatcattgccaa

SEQ ID NO: 173099 - DNA, 120 bp, Artificial Sequence
  ENSG00000109606_20 (sequence is synthesized)
acttcaatccaaggaatattcacagtactgaattcagtgcttagaactgaagttattgagaggacagctttaaaagatgaatgaactcaaaagttcgagttgtgctcttcacgttggttc

SEQ ID NO: 173100 - DNA, 120 bp, Artificial Sequence
  ENSG00000109606_21 (sequence is synthesized)
gataatggcctttatttgaaagctttttaatttttctttacagtaaatattccattctgatttcataaattaaacatttatgcctcccttttgtgttgacactgtagctcatactggaaa

SEQ ID NO: 173101 - DNA, 120 bp, Artificial Sequence
  ENSG00000109606_22 (sequence is synthesized)
agtcgatcaatgttttgcagtttattgaaagtagttctatatataacaatgttataagcatttctttagaaatggttgaaaatgcttctaaaatgtgattatcgaccatggtatgcatga

SEQ ID NO: 173102 - DNA, 120 bp, Artificial Sequence
  ENSG00000109606_23 (sequence is synthesized)
tcgttgtaattgttgacattccttttagaagttgtgaaatgttacaacttgtgcttatgtagacacaatcttctgtctcagtacagaggcactgacttcaataaagtctatttatactaa

SEQ ID NO: 173103 - DNA, 120 bp, Artificial Sequence
  ENSG00000109606_24 (sequence is synthesized)
gttggggtcctggcagggagcgggccggggctggcctggccgagcgggtcctggagcccgagcctttgtttctctctgggctgggttcactagcggcgggtagttttccacttgttgcta

SEQ ID NO: 173104 - DNA, 120 bp, Artificial Sequence
  ENSG00000109606_25 (sequence is synthesized)
ttttataaatgagaagtttgatgaacatccttatacatacgtatttgcacacatccttgagaggttcctggaaataagattgacggataaaaagcagtgcttattgccgggtgtgatggc

SEQ ID NO: 173105 - DNA, 120 bp, Artificial Sequence
  ENSG00000109606_26 (sequence is synthesized)
gtgtgaattttttatttaagaagtagctaaaatgttttcttgcagagttatgactgatcagactcagagcagatgggcagggcagtattgagtcactttaattaaattgtagcttcattt

SEQ ID NO: 173106 - DNA, 120 bp, Artificial Sequence
  ENSG00000109606_27 (sequence is synthesized)
gcggaggtggtggtaggttgttgtctgcctttcttatatgttgttttatagattctcccagttgtacttctcccaagattttagtttttagagaaagtgtggggcaagaactaatggatt

SEQ ID NO: 173107 - DNA, 120 bp, Artificial Sequence
  ENSG00000109606_28 (sequence is synthesized)
gtgtacttacttgtctatctgcctagtttttatttctctaggttctcttatcagatatacttacatgattactgttgtttgagtttagaatattagctctttaagaagtttgttgttgtg

SEQ ID NO: 173108 - DNA, 120 bp, Artificial Sequence
  ENSG00000109606_29 (sequence is synthesized)
atgtagttgtaatcttccaactacatctcagttttatttgtaattaaaaaaaacttatttttatttattacaaataaaaacctttagtttgtcaggagaatgagcatttatgtgcagcaa

SEQ ID NO: 173109 - DNA, 120 bp, Artificial Sequence
  ENSG00000109606_30 (sequence is synthesized)
tgtaaatggactgtttttaaatggtccatttataggaaaagtgttgaaataagaggcaagtaagaagtcagggaataaaaaatagtttgctgagcttgtaatgctttgtttgacattaaa

SEQ ID NO: 173110 - DNA, 120 bp, Artificial Sequence
  ENSG00000109606_31 (sequence is synthesized)
atagtttttgaagttttgaggtcctgatactaacagtgcaaatctagaggcctttgagagcactacttatttattcccacttaactctagtggctagttcacattaaaattcacagctgt

SEQ ID NO: 173111 - DNA, 120 bp, Artificial Sequence
  ENSG00000109606_32 (sequence is synthesized)
gagaagtttgtgtgcttttatgaattaccttgcttcaattaaattaagcaagagttttaatatttattatgatcatgttttgttgtcactatttggctattttggcatctttttaaaggg

SEQ ID NO: 173112 - DNA, 120 bp, Artificial Sequence
  ENSG00000109606_33 (sequence is synthesized)
gaaactgtatgggaaagagtaatatgatactgtattttatcttgttgttgattattcccattatcttctatccgaaccgataatttatgaattttttcattgacaaggttttaagagctt

SEQ ID NO: 173113 - DNA, 120 bp, Artificial Sequence
  ENSG00000109606_34 (sequence is synthesized)
ttaaaatgtgttgaaaaagtcccaagctgttaagtatttttattttcatactgcttttatgactatggaattgctaaactgaattaaggaaagttgtatttcaaaaaatgtagtacatgc

SEQ ID NO: 173114 - DNA, 120 bp, Artificial Sequence
  ENSG00000109606_35 (sequence is synthesized)
tttgtaacaatttaaagttttatgtgaattaatattgaggctctaaacaaataactgtagttacatatcttgatgacccttgatatgattgtttcagactaattgtcaacttttgaaata

SEQ ID NO: 173115 - DNA, 120 bp, Artificial Sequence
  ENSG00000109606_36 (sequence is synthesized)
ttggactttgcttttatattgaggttttgattcaaataagtttgttttttttcttttttaaatttgggactttattttctaatccttttgttaaaatgctgaaacactaggctgaatatc

SEQ ID NO: 173116 - DNA, 120 bp, Artificial Sequence
  ENSG00000109606_37 (sequence is synthesized)
ccagcctttttgaattttcttaattcaaaggcggtttaaccttccaccactactgctatcatccaaacccaagaattcttgatatttttatgtttacatatgcttctgctcaccggtgct

SEQ ID NO: 173117 - DNA, 120 bp, Artificial Sequence
  ENSG00000109606_38 (sequence is synthesized)
ccacagtattagggaaaaaattctgatagaaacatggcagtagactggtttcaaagttgttgttagctctgcagtgggcaagcatagcttcctaactttcacagccattcagtagattta

SEQ ID NO: 173118 - DNA, 120 bp, Artificial Sequence
  ENSG00000109606_39 (sequence is synthesized)
gtggatgcccttttgaaaaattacagttagctaaaaggcaattgacaccgttattctggttattggtagagctatcagcactggtttttttaaataagttgagctttttagtatcctgat

SEQ ID NO: 173119 - DNA, 120 bp, Artificial Sequence
  ENSG00000109606_40 (sequence is synthesized)
ggccttcagaatagctgttttgatgcctacttttagatctagttaaaataatcaggtactctgtagctttgaaaccctcttgtcttacagatgtggttaggtgttgatgtaccaaatcaa

SEQ ID NO: 173120 - DNA, 120 bp, Artificial Sequence
  ENSG00000109606_41 (sequence is synthesized)
ggtagtaaacaatccaagatgcagttggaggccatcctgccctgccctatgctctgtgaactgacctagctaggccttgttcctctatctgtgaatgcgtgactcatcgatatgggcgtt

SEQ ID NO: 173121 - DNA, 120 bp, Artificial Sequence
  ENSG00000109606_42 (sequence is synthesized)
tttgatttaaatgtcaatggcttcagatggttaacttttatttctcattccagatggattaattaatgggtgttctaatatgttattgtattctttaattcaaaaatctatttcctatct

SEQ ID NO: 173122 - DNA, 120 bp, Artificial Sequence
  ENSG00000109606_43 (sequence is synthesized)
ccacctcacccatccttaatttctgaaatggggatgcattttgtaatggataaaaatgtacttatatatttgttatgtctaaaaaacattaaggcagagttatacactataactggtaga

SEQ ID NO: 173123 - DNA, 120 bp, Artificial Sequence
  ENSG00000109606_44 (sequence is synthesized)
atcctagaaccaaagagaaaagagtatgctgaagataagcatacatcacagtagcaagagaaggatcaacagttttaatttttgttttctctctcccatttcacaataaccctgttagtt

SEQ ID NO: 173124 - DNA, 120 bp, Artificial Sequence
  ENSG00000109606_45 (sequence is synthesized)
ttatttatcaaaggtcctctgaaataaataatgcaattctttgccatgactgtctttggcacatgaaagatgtcactgtaaaatttctttcatgatgctacaggttgagctctttaagtg

SEQ ID NO: 173125 - DNA, 120 bp, Artificial Sequence
  ENSG00000109606_46 (sequence is synthesized)
agcaacactaggctagttggaagcttatcaaggattcatcagtggagaaatatccttttgataatacatgtaataaaattacttgaagtgcttagacttaggtcttgtttattaaacatg

SEQ ID NO: 173126 - DNA, 120 bp, Artificial Sequence
  ENSG00000109606_47 (sequence is synthesized)
agtggaggtttcgggcatccttgtaaactttcttctgtttcaggacttgctcataaattgctgagagacacgtgtgtcgcaataaaactttgccgtctttaagtctgaggtgctctgtgt

SEQ ID NO: 173127 - DNA, 120 bp, Artificial Sequence
  ENSG00000109606_48 (sequence is synthesized)
caggcataaagaacaatacacaacaattgtttgcagttatcttaatctaaagctgtagtttcattgaaaatgaacaggccatgacttttaccaaatacttccagccttcccttatctgat

SEQ ID NO: 173128 - DNA, 120 bp, Artificial Sequence
  ENSG00000109606_49 (sequence is synthesized)
agaccatcttttggaaacaaccaggtggatgttaatgggagaagtaattcactaaaaacagttaattcaaaagcattgttttggcatccaaatccaaaagccttgttactgtttctaatg

SEQ ID NO: 173129 - DNA, 120 bp, Artificial Sequence
  ENSG00000109606_50 (sequence is synthesized)
ggtaacattgcagttcatttaaagaaaatgttgtgggtaaatctcctttctggtttatttagcttattctttataacaatttttttaattagagaacattcctgtgtgggtgattcatgg

SEQ ID NO: 173130 - DNA, 120 bp, Artificial Sequence
  ENSG00000109606_51 (sequence is synthesized)
ggatactgaagtttgaattttacatgctactcatgcttcacggaatgttttttgtatgatattttttctttctaattaaagataaataaaccattttggattcacagaccttacaaatag

SEQ ID NO: 173131 - DNA, 120 bp, Artificial Sequence
  ENSG00000109606_52 (sequence is synthesized)
aggctatgagttggatttggcccacaggcagcagtttgcttatctctgcttttatcagacagtgataaataagtatagccatagaatgaaaagtaaaagggaggcctgcctcttcctaat

SEQ ID NO: 173132 - DNA, 120 bp, Artificial Sequence
  ENSG00000109606_53 (sequence is synthesized)
ggacatgtacagatatcaagccagaatggttccattctacatcaaaaggtatttggaaaatgtctttcactgtatgtgtacatggagaaccataacctataattgtatgtaaatctagtg

SEQ ID NO: 173133 - DNA, 120 bp, Artificial Sequence
  ENSG00000109606_54 (sequence is synthesized)
attgtgaaaaacaagaaacttgcagacacatattaacagttggtgacttatcgccagttggtgacttacttacctacccctgcctctcaaatcttgttataacaattaaacagttcgtat

SEQ ID NO: 173134 - DNA, 120 bp, Artificial Sequence
  ENSG00000109606_55 (sequence is synthesized)
attatagtacctgacacctaataggtgtttagtaaatatttcgaatgaaattgagtttcttttctattattcatgctcattctttaagcacagaatattagaattggaaagggagaactg

SEQ ID NO: 173135 - DNA, 120 bp, Artificial Sequence
  ENSG00000109606_56 (sequence is synthesized)
tccattttgatgagtatcaccagtcaaggtgttaccaaaaaaagaaatgagagggaagcacgtgcaagctcttttttttttcccatttttattttcctgtctttgtaggttacctttttc

SEQ ID NO: 173136 - DNA, 120 bp, Artificial Sequence
  ENSG00000109606_57 (sequence is synthesized)
gtaggttacctttttcttttcctctttgccctctttagttttctaccttattttttattctatttctttattttcttttttgaaatggagcctctcggtctgtcgcccaggctggagtgc

SEQ ID NO: 173137 - DNA, 76 bp, Artificial Sequence
  ENSG00000109606_58 (sequence is synthesized)
tgcacctggctttagttttctaccttagacatgaatgttctggtaattgtctgctcatagttggcgcccagtgctg

SEQ ID NO: 173138 - DNA, 120 bp, Artificial Sequence
  ENSG00000109606_59 (sequence is synthesized)
gttctggtaattgtctgctcatagttggcgcccagtgctgaagagcctgctctagatggtctcaggcaggaaagatcagatagtaaatgttgggctctgtggacccatgaagtccttgtc

SEQ ID NO: 173139 - DNA, 120 bp, Artificial Sequence
  ENSG00000109606_60 (sequence is synthesized)
aaagtttgggtggacttcacttttgtttttgttttttaatttttagtatgatagtggattttatagatggttttaaggaattaattttgttttctaaataccttgtaaatagcttcgtaa

SEQ ID NO: 173140 - DNA, 120 bp, Artificial Sequence
  ENSG00000109606_61 (sequence is synthesized)
tgacatagtgcttacaaaagtaaagtaagtcattgtgcacaaaagataagtaaagcattggctctcttgagtgctaataaaaattgcagtaagtttgagcacagttgtaactgaattctt

SEQ ID NO: 173141 - DNA, 120 bp, Artificial Sequence
  ENSG00000109606_62 (sequence is synthesized)
tggttaaaggtccatcactgctatctttgtggtttttttgttttttgttttttactgcaagtacaggaagaactttgctctagtacttagctctattaagtgtgcctgtgacaaactgaa

SEQ ID NO: 173142 - DNA, 120 bp, Artificial Sequence
  ENSG00000109610_0 (sequence is synthesized)
agggacagcctgcgttcctgggctggctgggtgcagctctcttttcaggagagaaagctctcttggaggagctggaaaggtgcccgactccagccatgctggcgctactgtgttcctgcc

SEQ ID NO: 173143 - DNA, 120 bp, Artificial Sequence
  ENSG00000109610_1 (sequence is synthesized)
tgctcctggcagccggtgcctcggacgcctggacgggcgaggactcggcggagcccaactctgactcggcggagtggatccgagacatgtacgccaaggtcacggagatctggcaggagg

SEQ ID NO: 173144 - DNA, 120 bp, Artificial Sequence
  ENSG00000109610_2 (sequence is synthesized)
tcatgcagcggcgggacgacgacggcgcgctccacgccgcctgccaggtgcagccgtcggccacgctggacgccgcgcagccccgggtgaccggcgtcgtcctcttccggcagcttgcgc

SEQ ID NO: 173145 - DNA, 120 bp, Artificial Sequence
  ENSG00000109610_3 (sequence is synthesized)
cccgcgccaagctcgacgccttcttcgccctggagggcttcccgaccgagccgaacagctccagccgcgccatccacgtgcaccagttcggggacctgagccagggctgcgagtccaccg

SEQ ID NO: 173146 - DNA, 120 bp, Artificial Sequence
  ENSG00000109610_4 (sequence is synthesized)
ggccccactacaacccgctggccgtgccgcacccgcagcacccgggcgacttcggcaacttcgcggtccgcgacggcagcctctggaggtaccgcgccggcctggccgcctcgctcgcgg

SEQ ID NO: 173147 - DNA, 120 bp, Artificial Sequence
  ENSG00000109610_5 (sequence is synthesized)
aacgcgggccggcggctggcctgctgcgtggtgggcgtgtgcgggcccgggctctgggagcgccaggcgcgggagcactcagagcgcaagaagcggcggcgcgagagcgagtgcaaggcc

SEQ ID NO: 173148 - DNA, 120 bp, Artificial Sequence
  ENSG00000109610_6 (sequence is synthesized)
gagcgcggcccccacccggcggcggccagggacccccgaggcccccctctgcctttgagcttctcctctgctccaacagacaccctccactctgaggtctcaccttcgcctttgctgaag

SEQ ID NO: 173149 - DNA, 120 bp, Artificial Sequence
  ENSG00000109610_7 (sequence is synthesized)
tctccccgcagccctctccacccagaggtctccctataccgagacccaccatccttccatcctgaggaccgccccaaccctcggagccccccactcagtaggtctgaaggcctccatttg

SEQ ID NO: 173150 - DNA, 120 bp, Artificial Sequence
  ENSG00000109610_8 (sequence is synthesized)
taccgaaacaccccgctcacgctgacagcctcctaggctccctgaggtacctttccacccagaccctccttccccaccccataagccctgagactcccgcctttgacctgacgatcttcc

SEQ ID NO: 173151 - DNA, 120 bp, Artificial Sequence
  ENSG00000109610_9 (sequence is synthesized)
cccttcccgccttcaggttcctcctaggcgctcagaggccgctctggggggttgcctcgagtccccccacccctccccacccaccaccgctcccgcgggaagccagcccgtgcaacggaa

SEQ ID NO: 173152 - DNA, 120 bp, Artificial Sequence
  ENSG00000109610_10 (sequence is synthesized)
gccaggccaactgccccgcgtcttcagctgtttcgcatccaccgccaccccactgagagctgctcctttgggggaatgtttggcaacctttgtgttacagattaaaaattcagcaattca

SEQ ID NO: 173153 - DNA, 120 bp, Artificial Sequence
  ENSG00000109610_11 (sequence is synthesized)
gacccaggaacactatgaggagatgctggttctcctgtagctgctcctctttaggtgaccctggtgagtgatggtggtttggggactatgatggaagctatgacccacttcatttaaaat

SEQ ID NO: 173154 - DNA, 120 bp, Artificial Sequence
  ENSG00000109610_12 (sequence is synthesized)
catccctgaagattggccagaaccattctggattcatttctgagtgagacacatggcggctgccctattttcttccctaggccttggatctgaggcctctttttgaatcctgtcagccct

SEQ ID NO: 173155 - DNA, 120 bp, Artificial Sequence
  ENSG00000109610_13 (sequence is synthesized)
aattttctaaaattccaagagtagtctgtctcacctctgtcctcagattctgttttctacatgtggcaatggcaatgtctgtgcattttacacagctccttggagaacttccgcccatct

SEQ ID NO: 173156 - DNA, 120 bp, Artificial Sequence
  ENSG00000109610_14 (sequence is synthesized)
tttctattagtttgttcattctgggagtatggaggaaaggggctgggccaagctggctttcagagtggggagagtacttctttctcatggtgaaattgcagggtgtgtgtgtgacggggt

SEQ ID NO: 173157 - DNA, 120 bp, Artificial Sequence
  ENSG00000109610_15 (sequence is synthesized)
agaagggcaagatggagtctgcacagctgggccatgacccaggaacactatgaggagatgctggttctcctgtagctgctcctctttaggtgaccctggtgcccgactccagccatgctg

SEQ ID NO: 173158 - DNA, 120 bp, Artificial Sequence
  ENSG00000109618_0 (sequence is synthesized)
gagttgcattctggttccgtcgtgtgtctggcgtgtggagctagtgctcccgcttattcgccactgtcgccaccgctgtcatgaaccgcgagagcttcgcggcgggagagcggctggtgt

SEQ ID NO: 173159 - DNA, 120 bp, Artificial Sequence
  ENSG00000109618_1 (sequence is synthesized)
cgccggcttacgtgcggcagggctgtgaggcccgccgctcgcatgagcacctcatacggctgcttctggagaagggcaagtgtccagagaatggctgggatgaaagtacacttgaactct

SEQ ID NO: 173160 - DNA, 120 bp, Artificial Sequence
  ENSG00000109618_2 (sequence is synthesized)
ttttacatgaacttgcaatcatggacagcaacaatttcttaggcaattgtggtgtgggagaaagggaagggagagtggcatccgcactggttgctcgtcgtcattacaggttcattcatg

SEQ ID NO: 173161 - DNA, 120 bp, Artificial Sequence
  ENSG00000109618_3 (sequence is synthesized)
gcattggacgatccggtgatatttctgctgtgcaaccaaaagctgcaggctctagccttttgaacaaaattaccaattctttggtcctggacattataaagctggctggtgtccatacag

SEQ ID NO: 173162 - DNA, 120 bp, Artificial Sequence
  ENSG00000109618_4 (sequence is synthesized)
tagccaactgctttgtagttcctatggcaactggtatgagtctaactctgtgtttcttaacattacgacacaaaagaccaaaggcaaagtatattatatggccacgaatagaccagaagt

SEQ ID NO: 173163 - DNA, 120 bp, Artificial Sequence
  ENSG00000109618_5 (sequence is synthesized)
cctgctttaaatccatgatcactgcaggttttgagcctgtggtgatagaaaatgttttggaaggtgacgagctgcgtacagacctgaaagcagtggaggctaaagtccaggaacttgggc

SEQ ID NO: 173164 - DNA, 120 bp, Artificial Sequence
  ENSG00000109618_6 (sequence is synthesized)
ctgattgcattctgtgtattcattctactacatcctgttttgctccaagggtgcctgatagattagaagaactggctgtgatttgtgctaattatgacattccacatatagttaataatg

SEQ ID NO: 173165 - DNA, 120 bp, Artificial Sequence
  ENSG00000109618_7 (sequence is synthesized)
cttatggagtgcagtcttcaaagtgtatgcatctcattcagcagggggctcgagttggtagaatagatgcttttgttcagagcttggacaaaaattttatggttccagtaggtggtgcta

SEQ ID NO: 173166 - DNA, 120 bp, Artificial Sequence
  ENSG00000109618_8 (sequence is synthesized)
taattgctggctttaatgattcattcattcaggaaatcagcaagatgtatccaggaagagcttcagcttcaccttctttagatgtccttattactttattgtcacttggatcaaatggct

SEQ ID NO: 173167 - DNA, 120 bp, Artificial Sequence
  ENSG00000109618_9 (sequence is synthesized)
ataagaagctactaaaagaaagaaaggaaatgttttcatatttgtccaaccaaataaagaagttgtcagaagcctacaatgaaagactgttgcatacacctcacaatcccatatctttag

SEQ ID NO: 173168 - DNA, 120 bp, Artificial Sequence
  ENSG00000109618_10 (sequence is synthesized)
ctatgacacttaaaacactagatgaacaccgtgacaaagctgtcactcagcttggctcgatgctttttaccagacaggtttctggagccagggttgtgcctcttgggtccatgcaaactg

SEQ ID NO: 173169 - DNA, 120 bp, Artificial Sequence
  ENSG00000109618_11 (sequence is synthesized)
tgagtggctatactttcagaggctttatgtcacatacaaataattacccttgtgcttacctcaatgctgcatcagccatcggaatgaagatgcaggatgtggacctgttcataaagagac

SEQ ID NO: 173170 - DNA, 120 bp, Artificial Sequence
  ENSG00000109618_12 (sequence is synthesized)
ttgacaggtgtttaaaggcagtaagaaaagaacgaagtaaagagagtgatgacaattatgacaaaactgaagatgtggatattgaagaaatggctttaaaactagataatgtacttcttg

SEQ ID NO: 173171 - DNA, 120 bp, Artificial Sequence
  ENSG00000109618_13 (sequence is synthesized)
acacataccaggatgcttcttcatgacatgcgaagggtttcttcttgatcatttgaaagaaatgataaggctgtagtacaagcaagcagtttaaagataagacttgagatttttgaattg

SEQ ID NO: 173172 - DNA, 120 bp, Artificial Sequence
  ENSG00000109618_14 (sequence is synthesized)
agaatttcatgggaatattcagtcaaggagcagactttggtctgaactagccattgatgattgttaagtttcccattcttagactgcatcaatccttgtgatccttaacaggttataata

SEQ ID NO: 173173 - DNA, 120 bp, Artificial Sequence
  ENSG00000109618_15 (sequence is synthesized)
tacaattagcatttttctaattgttagaatatctgtcaattaagcatcatgactcagataatttttactagtgtaatgacagtaaaattacttcaattctctttgaaatgtagagtgctt

SEQ ID NO: 173174 - DNA, 120 bp, Artificial Sequence
  ENSG00000109618_16 (sequence is synthesized)
cctcctaaccattctttaccgtttctgatcacacagaattgagaaagatctcttaggccactagttactagttgtttgttgagatgtgtaagtcacagtgtgcctgtaaaatgggcattc

SEQ ID NO: 173175 - DNA, 120 bp, Artificial Sequence
  ENSG00000109618_17 (sequence is synthesized)
cccaaggaagcagagtcaaggtataaactttcgttttgactcaaaagcagtgggtctcaactggggatgattcgcttatctgaacagcatctgcagacatttttggttgtcacaactggt

SEQ ID NO: 173176 - DNA, 120 bp, Artificial Sequence
  ENSG00000109618_18 (sequence is synthesized)
gggatgctgttaacatctagaggatagaggccagggtgctactcaacatcctacaatgcatgggacaactcccacaacaaagaattatccagcccaaaatgtcattagtgctgaggttga

SEQ ID NO: 173177 - DNA, 120 bp, Artificial Sequence
  ENSG00000109618_19 (sequence is synthesized)
gaaatactcctctaaagtagataaactccttgagtaaagagaagtttaccatagcaactttcagtagtacttcaaagaagatagctgtataaatgtcatcaaactatactatatagagaa

SEQ ID NO: 173178 - DNA, 120 bp, Artificial Sequence
  ENSG00000109618_20 (sequence is synthesized)
tcttaagtgataaccagggtcacggattccaaacatgtcattataaattgttttatatggtgctcactggtgcatttttccttttggataagggaaaacattattccacttactgttttt

SEQ ID NO: 173179 - DNA, 120 bp, Artificial Sequence
  ENSG00000109618_21 (sequence is synthesized)
gctttaagcagcctgcatatattggttagtttgttcagatgttgtgcacagacatcatcaaaattagctaacatgggtatttttgaacatatttttgccaggaagatgaaaatcacatag

SEQ ID NO: 173180 - DNA, 120 bp, Artificial Sequence
  ENSG00000109618_22 (sequence is synthesized)
aagaaatagacttacttaagactattttaagaaatagagatgtcatagcctgaagatttactgaagcttctgaacatgccaccatgccaaagctatgtttctcaaacccagctctgtgga

SEQ ID NO: 173181 - DNA, 120 bp, Artificial Sequence
  ENSG00000109618_23 (sequence is synthesized)
tcatgttcctaaaagatgctcatggggagaaaatgtttacagacaaataattttgggagctgcctttgcaaacctgcctgttggcatattgaaggctctaagaattccttcactaaataa

SEQ ID NO: 173182 - DNA, 120 bp, Artificial Sequence
  ENSG00000109618_24 (sequence is synthesized)
cccagttttaatatatccttatccaaagagaaactcatttttttaaagtgaaatatttgttaacagcccattgaacatacttttaaaaacactatggtagagaatgctgtgttgccttct

SEQ ID NO: 173183 - DNA, 120 bp, Artificial Sequence
  ENSG00000109618_25 (sequence is synthesized)
gggctgcatttttcttattgatttggaattgtaacctatgtatgagaaagggattttctggtattttggtgacgttgtacattgtcccagactgtttgtaaacatgaggtcagacatgtg

SEQ ID NO: 173184 - DNA, 120 bp, Artificial Sequence
  ENSG00000109618_26 (sequence is synthesized)
taaggtagacgcctatggccactggcttgaccaccttggaagtcaatgactattttgagatgaagtatttaactatgaatatcatgaaggttatttaaaaatgtatttattttatctttg

SEQ ID NO: 173185 - DNA, 120 bp, Artificial Sequence
  ENSG00000109618_27 (sequence is synthesized)
gggttcaaacattaaaaaaatttacataggtgtagtaactcatttcaagggaataaatgctggattaaaaagtgtaaatttttcatgagaatttgggactaaattgctgaaccaataaag

SEQ ID NO: 173186 - DNA, 120 bp, Artificial Sequence
  ENSG00000109618_28 (sequence is synthesized)
ctgaagagttgcaacctctagagtcaaaaaagggattgaaatgttgttgcaaatgtaaatgctggcagtgcagcttgctatacatgtaagccaaaattgttttatagaacaagtgatcta

SEQ ID NO: 173187 - DNA, 120 bp, Artificial Sequence
  ENSG00000109618_29 (sequence is synthesized)
tattgttgtgatcatcatttagcttaagaaaggccagagctgggagagtagcaaatgttttctcatctgcagtgtatcagcagttcttgggcttcagctgctgaatagataataattcta

SEQ ID NO: 173188 - DNA, 120 bp, Artificial Sequence
  ENSG00000109618_30 (sequence is synthesized)
attgaacataaattacatgaactcacatgtgaatgatagatatgttacaatatttcattcctgatgcagaaaatcagctgtggtttttattattaaccctttctttttcagtggttttgg

SEQ ID NO: 173189 - DNA, 120 bp, Artificial Sequence
  ENSG00000109618_31 (sequence is synthesized)
aattctagctctattcctcctggcttaaaatttgagggcatagaattcacaagagtttttgaagagttctgtctattcaggctttcctttgtccccaccctagtgtcattttcactcact

SEQ ID NO: 173190 - DNA, 120 bp, Artificial Sequence
  ENSG00000109618_32 (sequence is synthesized)
cccatttctacacataagtattaaaaaggatgtatttattataattcgctagtactgattggtaagcctcataattggcctttgttatctttgtactgtgacgaaggcagtggatgatac

SEQ ID NO: 173191 - DNA, 120 bp, Artificial Sequence
  ENSG00000109618_33 (sequence is synthesized)
attaccaatcattgccgaagataacctcttctatctttttgacccaactacccttattaaaactatcaggtaaaatattggagttaggtttttaaagtcattgggctgtggcagtgtgct

SEQ ID NO: 173192 - DNA, 120 bp, Artificial Sequence
  ENSG00000109618_34 (sequence is synthesized)
tagaaaagaaaatggtggaacatagaatattcttttggtcactacacaatgtgttacttatacatggcagggaagggaattttaaatcaaactcgcagtttggttcttaggtcctctgct

SEQ ID NO: 173193 - DNA, 120 bp, Artificial Sequence
  ENSG00000109618_35 (sequence is synthesized)
gatgaattctcgctctatcagggaatgatatgtgacgccagccttaggaacctggtgttcaactgtaaatctttctatttagctttttgtattagttgaatgaagttatagaatatgaat

SEQ ID NO: 173194 - DNA, 120 bp, Artificial Sequence
  ENSG00000109618_36 (sequence is synthesized)
tattgaatacagttctgttcagccaataggcacttgatatacagaatggtaaatttaaatataaattaaatttttctaatattatgatcagcacttcactgtggttctgtgtctttaacc

SEQ ID NO: 173195 - DNA, 120 bp, Artificial Sequence
  ENSG00000109618_37 (sequence is synthesized)
acctcataataagaactgttattgaggactgggctacagaatgtgcttagactacatctatggcttccatagattttagtaaaatttaaacagataatttgtgtttactgctgatgttac

SEQ ID NO: 173196 - DNA, 120 bp, Artificial Sequence
  ENSG00000109618_38 (sequence is synthesized)
tttaatattgaattagtagttcatcctgagagttatatttcacagaggaaaataaccaacagctgaaaacaacaataataaagctctggtgagtctgactcatactcggagaaagttttt

SEQ ID NO: 173197 - DNA, 120 bp, Artificial Sequence
  ENSG00000109618_39 (sequence is synthesized)
ggaatacatacacatttggtgcatataagagttgggtttccttttcccactttctgagatgtactaacctctgccagacccttaaatgattttgttatgttttgcatttttgaggccaac

SEQ ID NO: 173198 - DNA, 120 bp, Artificial Sequence
  ENSG00000109618_40 (sequence is synthesized)
cttattttgtaactgaaaaaagtccagttttgcatacacagaaatttggtcattttagaagtctcacaacctgaataatttgataataattgaatatgctattaacagctttttaagaaa

SEQ ID NO: 173199 - DNA, 120 bp, Artificial Sequence
  ENSG00000109618_41 (sequence is synthesized)
aggttctattagtcagttttttccttgtctgtcatattatgttggttaatgtctcttatggccaatcttagtaaacagacctaacactcactgcatccttttgtgccttactttttactt

SEQ ID NO: 173200 - DNA, 120 bp, Artificial Sequence
  ENSG00000109618_42 (sequence is synthesized)
tccttttgcccttttggtatgtgcgcatgtaagatggtaagtttaaggctaatgaatatatgtttgtaatttcctactcactactctgcagttaaagctaaggccttaggcaaaatctag

SEQ ID NO: 173201 - DNA, 120 bp, Artificial Sequence
  ENSG00000109618_43 (sequence is synthesized)
aaatgtttatattgttttgttttttatcaagtggtgtcaacttgagaaatacaaagaaaggctatgcttaactgtataaccgtgggggattttagccatgagaatatgaagctgatgtca

SEQ ID NO: 173202 - DNA, 120 bp, Artificial Sequence
  ENSG00000109618_44 (sequence is synthesized)
gcctgctaacctgttttaccaaaaggaaaagatgtttccaaaaatgttttcggtgtagactgtttaaagatgaaaataaattatataatttattatatgaaataaatttttgataagtca

SEQ ID NO: 173203 - DNA, 120 bp, Artificial Sequence
  ENSG00000109618_45 (sequence is synthesized)
gggctgtgaggcccgccgctcgcatgagcacctcatacggctgcttctggagaagagtctcgctctttcgcccaggctggaatgcagtgtgacgatctcggctcactgcagcctccgcct

SEQ ID NO: 173204 - DNA, 120 bp, Artificial Sequence
  ENSG00000109618_46 (sequence is synthesized)
aggtttctggagccaggtaagtatgtttaagatagatatgggtttatttgtcttttcaaacttaactccagtaaaatacctttcctcaacaatagtcccccaagtatatcctgaactata

SEQ ID NO: 173205 - DNA, 120 bp, Artificial Sequence
  ENSG00000109618_47 (sequence is synthesized)
ggctactgtatgcccacctgtggactgcttatgcctgaaatagtcacaaaaagacatgaatcttgtttgttttcatagatgtacagaaccaaagttttattacctctctacatagatttt

SEQ ID NO: 173206 - DNA, 120 bp, Artificial Sequence
  ENSG00000109618_48 (sequence is synthesized)
tttctttatttcctttgttagatgatcttcagcaagtcacattatggtattagagataagccatcttcatcactaaattgaagtgaaagtgttcttaaggaaaagccttcttcctaaact

SEQ ID NO: 173207 - DNA, 120 bp, Artificial Sequence
  ENSG00000109618_49 (sequence is synthesized)
atctcaaactcctgacttcaagtgatcggccattcttggccttccaaagtgctcggattacaggcggcaagtgtccagagaatggctgggatgaaagtacacttgaactctttttacatg

SEQ ID NO: 173208 - DNA, 120 bp, Artificial Sequence
  ENSG00000109625_0 (sequence is synthesized)
agcgagcgcagagccccggccccgcgcggcccgagtgccacatcactgcgctggccgtccaaggtccgccgccccaccatgccgcccccgctgccgctgctgctccttacagtcctggtc

SEQ ID NO: 173209 - DNA, 120 bp, Artificial Sequence
  ENSG00000109625_1 (sequence is synthesized)
gtcgccgctgcccggccggggtgcgagtttgagcggaaccccgccgccacctgcgtggacctgcagctcaggacctgcagcgatgccgcctacaaccacaccaccttccccaacctgctt

SEQ ID NO: 173210 - DNA, 120 bp, Artificial Sequence
  ENSG00000109625_2 (sequence is synthesized)
cagcaccggtcgtgggaggtggtggaggccagctccgagtacatcctgctgagcgttctacaccagctcctggaaggccagtgcaacccggacctgcggctgctgggctgtgctgtgctg

SEQ ID NO: 173211 - DNA, 120 bp, Artificial Sequence
  ENSG00000109625_3 (sequence is synthesized)
gccccccggtgtgagggcggctgggtgcgcagaccctgccggcacatctgcgagggcctgcgggaggtctgccagcccgccttcgacgccattgacatggcctggccctacttccttgac

SEQ ID NO: 173212 - DNA, 120 bp, Artificial Sequence
  ENSG00000109625_4 (sequence is synthesized)
tgccaccgctacttcacgagagaggacgagggctgctatgacccgctggagaagcttcggggaggcctggaggctgacgaggcactgccctcagggctgccgcccaccttcatccgcttc

SEQ ID NO: 173213 - DNA, 120 bp, Artificial Sequence
  ENSG00000109625_5 (sequence is synthesized)
agccaccactcctacgcccagatggtgcgtgtgctgaggcggacggcctcccgctgcgcccacgtggccaggacctacagcatcgggcgcagcttcgacggcagggagctgctggtcatc

SEQ ID NO: 173214 - DNA, 120 bp, Artificial Sequence
  ENSG00000109625_6 (sequence is synthesized)
gagttctccagccgccccggccagcacgagctgatggagcccgaggtgaagctcatcggcaacattcatggcaacgaggtggcgggccgggagatgctcatctacctagcccagtacctg

SEQ ID NO: 173215 - DNA, 120 bp, Artificial Sequence
  ENSG00000109625_7 (sequence is synthesized)
tgctctgagtacctgcttggtaacccccgcatccagcgcctgctcaacaccacccgcatccacctgctgccctccatgaaccctgacggctatgaggtggcagctgccgagggtgccggc

SEQ ID NO: 173216 - DNA, 120 bp, Artificial Sequence
  ENSG00000109625_8 (sequence is synthesized)
acccgcggcgcacgcagcgaccacatccccatcccccagcactactggtggggtaaggtggccccggagacaaaggcaatcatgaagtggatgcagaccataccctttgtgctctcagcc

SEQ ID NO: 173217 - DNA, 120 bp, Artificial Sequence
  ENSG00000109625_9 (sequence is synthesized)
agccttcatgggggcgacctggtggtgtcctaccccttcgacttctccaagcacccccaggaggagaagatgttttctcccacgcccgacgagaagatgttcaagctgctgtccagagcc

SEQ ID NO: 173218 - DNA, 120 bp, Artificial Sequence
  ENSG00000109625_10 (sequence is synthesized)
tacgctgacgtccaccccatgatgatggacaggtcggagaataggtgtggaggcaatttcctgaagagggggagcatcatcaacggggcggactggtacagcttcacgggaggcatgtcc

SEQ ID NO: 173219 - DNA, 120 bp, Artificial Sequence
  ENSG00000109625_11 (sequence is synthesized)
gatttcaactacctgcacaccaactgctttgagatcacggtagagctgggctgtgtgaagttcccccccgaggaggccctgtacatactctggcagcacaacaaggagtcactcctgaat

SEQ ID NO: 173220 - DNA, 120 bp, Artificial Sequence
  ENSG00000109625_12 (sequence is synthesized)
ttcgtggagacggtgcaccggggcatcaaaggtgtggtgacagataaattcggcaagccagtcaaaaacgcccggatctcagtcaaaggcattcgccacgacatcaccacagccccagat

SEQ ID NO: 173221 - DNA, 120 bp, Artificial Sequence
  ENSG00000109625_13 (sequence is synthesized)
ggtgactactggagactgctgcccccaggtatccacattgtcattgcccaagcccctggctacgccaaagtcatcaagaaagtcatcatccccgcccggatgaagagggctggccgtgtg

SEQ ID NO: 173222 - DNA, 120 bp, Artificial Sequence
  ENSG00000109625_14 (sequence is synthesized)
gacttcattctgcaacctctggggatgggacccaagaactttattcatgggctgcggaggactgggccccacgacccactgggaggtgccagctctttgggggaggccacggagcccgac

SEQ ID NO: 173223 - DNA, 120 bp, Artificial Sequence
  ENSG00000109625_15 (sequence is synthesized)
ccgctccgggcgcgcaggcagccctcggccgacgggagtaagccctggtggtggtcctacttcacatcgctgagcacccacaggccacgctggctgctcaagtactagccccggccccag

SEQ ID NO: 173224 - DNA, 120 bp, Artificial Sequence
  ENSG00000109625_16 (sequence is synthesized)
cacccgccaggatgtggagaccgaggcccatctccgcatcccgggctcctggctcttgattttgtctgccacagacatcccacaaagccgctgccattttattaaagtgttttgatccac

SEQ ID NO: 173225 - DNA, 120 bp, Artificial Sequence
  ENSG00000109625_17 (sequence is synthesized)
ggcagggaaggaatgccgatcaggcagaagagtggcaggaaagggttctctgctcaatgcccatagagatggagtcagccaggcctcgggtgagatgcagggtcattcaaaagcccagaa

SEQ ID NO: 173226 - DNA, 120 bp, Artificial Sequence
  ENSG00000109625_18 (sequence is synthesized)
cgtgctcgggtcaattgccagggaggaaactgaggcccagagaggggagtgactgactcgttaaagatggcagagcgagggctggcagagtggggctctgtggggtagttccccctagat

SEQ ID NO: 173227 - DNA, 120 bp, Artificial Sequence
  ENSG00000109625_19 (sequence is synthesized)
cgccggtgaatgccacaggccaccagctgcagacagcggtacagtaccgggacctccctggcttctgttctgtaggagggctgcagcccccacactgtcagagcactttaggcagctgaa

SEQ ID NO: 173228 - DNA, 120 bp, Artificial Sequence
  ENSG00000109625_20 (sequence is synthesized)
tgcagagatgtcctctccatccctctccagtccccactgcagtcacacgtcctgcatttgggccttgtccacatgcatttcatggtcactggctctgtgccgggcccctgctgagtctgg

SEQ ID NO: 173229 - DNA, 120 bp, Artificial Sequence
  ENSG00000109625_21 (sequence is synthesized)
ggtttgggtgagtcacctcccccgccaggccccgatttcctccttgtgacaggaggagtgctgaacgaatcttgtgagatggtttcaaaagtgacgtgggagccaaccaatgtgaagtgc

SEQ ID NO: 173230 - DNA, 120 bp, Artificial Sequence
  ENSG00000109625_22 (sequence is synthesized)
gtcccctacgtaaatgtctgatgcgtgacggtcagggccactgcaggagggactgacctgccgaccctgcctccccagccacctgcgtggacctgcagctcaggacctgcagcgatgccg

SEQ ID NO: 173231 - DNA, 120 bp, Artificial Sequence
  ENSG00000109625_23 (sequence is synthesized)
ctggaccatgaaggcctgggagtcacgtgagggtgccagggagggtgtctggacagtctcacgcccacaggcccgtgacagtcatccagggggactcaagctcctctgtgctcatcccag

SEQ ID NO: 173232 - DNA, 120 bp, Artificial Sequence
  ENSG00000109654_0 (sequence is synthesized)
ggcagcttgatgactataatgggcccagttgtctgcgggctgcggggagctaagtccccagattggaggaggctggctctggtcttcgatgcacaggagtggccgttatggaacgcagca

SEQ ID NO: 173233 - DNA, 120 bp, Artificial Sequence
  ENSG00000109654_1 (sequence is synthesized)
gcagcgtgcagggtcaaagacagccggccccccatgtcagtggtctaggatggccagtgaaggcaccaacatcccaagtcctgtggtgcgccagattgacaagcagtttctgatttgcag

SEQ ID NO: 173234 - DNA, 120 bp, Artificial Sequence
  ENSG00000109654_2 (sequence is synthesized)
tatatgcctggaacggtacaagaatcccaaggttctcccctgtctgcacactttctgcgagaggtgcctgcagaactacattcctgcccacagtttaaccctctcctgcccagtgtgccg

SEQ ID NO: 173235 - DNA, 120 bp, Artificial Sequence
  ENSG00000109654_3 (sequence is synthesized)
ccagacctccatcctgcccgagaaaggggtggccgcgctccagaacaatttcttcatcacaaacctgatggacgtgctgcagcgaactccaggcagcaacgctgaggagtcttccatcct

SEQ ID NO: 173236 - DNA, 120 bp, Artificial Sequence
  ENSG00000109654_4 (sequence is synthesized)
ggagacagtcactgctgtggctgcgggaaagcctctctcttgcccaaaccacgatgggaatgtgatggaattttactgccagtcctgtgagactgccatgtgtcgggagtgcacggaggg

SEQ ID NO: 173237 - DNA, 120 bp, Artificial Sequence
  ENSG00000109654_5 (sequence is synthesized)
ggagcacgcagagcaccccacagttccactcaaggatgtggtggaacagcacaaggcctcgctccaggtccagctggatgctgtcaacaaaaggctcccagaaatagattctgctcttca

SEQ ID NO: 173238 - DNA, 120 bp, Artificial Sequence
  ENSG00000109654_6 (sequence is synthesized)
gttcatctctgaaatcattcatcagttaaccaaccaaaaggccagcatcgtggatgacattcattccacctttgatgagctccagaagactttaaatgtgcgcaagagtgtgctgcttat

SEQ ID NO: 173239 - DNA, 120 bp, Artificial Sequence
  ENSG00000109654_7 (sequence is synthesized)
ggaattggaggtcaactatggcctcaaacacaaagtcctccagtcgcagctggatactctgctccaggggcaggagagcattaagagctgcagcaacttcacagcgcaggccctcaacca

SEQ ID NO: 173240 - DNA, 120 bp, Artificial Sequence
  ENSG00000109654_8 (sequence is synthesized)
tggcacggagaccgaggtcctactggtgaagaagcagatgagcgagaagctgaacgagctggccgaccaggacttccccttgcacccgcgggagaacgaccagctggatttcatcgtgga

SEQ ID NO: 173241 - DNA, 120 bp, Artificial Sequence
  ENSG00000109654_9 (sequence is synthesized)
aaccgaggggctgaagaagtccatccacaacctcgggacgatcttaaccaccaacgccgttgcctcagagacagtggccacgggcgaggggctgcggcagaccatcatcgggcagcccat

SEQ ID NO: 173242 - DNA, 120 bp, Artificial Sequence
  ENSG00000109654_10 (sequence is synthesized)
gtccgtcaccatcaccaccaaggacaaagacggtgagctgtgcaaaaccggcaacgcctacctcaccgccgaactgagcacccccgacgggagcgtggcagacggggagatcctggacaa

SEQ ID NO: 173243 - DNA, 120 bp, Artificial Sequence
  ENSG00000109654_11 (sequence is synthesized)
caagaacggcacctatgagtttttgtacactgtccagaaggaaggggactttaccctgtctctgagactctatgaccagcacatccgaggcagcccgtttaagctgaaagtgatccgatc

SEQ ID NO: 173244 - DNA, 120 bp, Artificial Sequence
  ENSG00000109654_12 (sequence is synthesized)
cgctgatgtgtctcccaccacagaaggcgtgaagaggcgcgttaagtccccggggagcggccacgtcaagcagaaagctgtgaaaagacccgcaagcatgtacagcactggaaaacgaaa

SEQ ID NO: 173245 - DNA, 120 bp, Artificial Sequence
  ENSG00000109654_13 (sequence is synthesized)
agagaatcccatcgaagacgatttgatctttcgagtgggtaccaaaggaagaaataaaggagagtttacaaatcttcagggggtagctgcatctacaaatggaaagatattaattgcaga

SEQ ID NO: 173246 - DNA, 120 bp, Artificial Sequence
  ENSG00000109654_14 (sequence is synthesized)
cagtaacaaccaatgtgtgcagatattttccaatgatggccagttcaaaagtcgttttggcatacggggacgctctccggggcagctgcagcggcccacaggagtggctgtacatcccag

SEQ ID NO: 173247 - DNA, 120 bp, Artificial Sequence
  ENSG00000109654_15 (sequence is synthesized)
tggggacataatcattgccgattatgataataaatgggtcagcattttctcctccgatgggaaatttaagacaaaaattggatcaggaaagctgatgggacccaaaggagtttctgtgga

SEQ ID NO: 173248 - DNA, 120 bp, Artificial Sequence
  ENSG00000109654_16 (sequence is synthesized)
ccgcaatgggcacattattgttgtggacaacaaggcgtgctgcgtgtttatcttccagccaaacgggaaaatagtcaccaggtttggtagccgaggaaatggggacaggcagtttgcagg

SEQ ID NO: 173249 - DNA, 120 bp, Artificial Sequence
  ENSG00000109654_17 (sequence is synthesized)
tccccattttgcagctgtaaatagcaataatgagattattattacagatttccataatcattctgtcaaggtgtttaatcaggaaggagaattcatgttgaagtttggctcaaatggaga

SEQ ID NO: 173250 - DNA, 120 bp, Artificial Sequence
  ENSG00000109654_18 (sequence is synthesized)
aggaaatgggcagtttaatgctccaacaggtgtagcagtggattcaaatggaaacatcattgtggccgactggggaaacagcaggatccaggtttttgatgggagtggatcatttttgtc

SEQ ID NO: 173251 - DNA, 120 bp, Artificial Sequence
  ENSG00000109654_19 (sequence is synthesized)
ctacattaacacatctgctgacccactctatggcccccaaggcctggccctaacttcagatggtcatgttgtggttgcagactctggaaatcactgtttcaaagtctatcgatacttaca

SEQ ID NO: 173252 - DNA, 120 bp, Artificial Sequence
  ENSG00000109654_20 (sequence is synthesized)
gtaatggtgggcaggtggatacccgcttccatggtcttgcactataaactggaatggatttctcaatgcgggaccagattatgactagagtttttatgccagaaggaatcattggtgaac

SEQ ID NO: 173253 - DNA, 120 bp, Artificial Sequence
  ENSG00000109654_21 (sequence is synthesized)
tttccaaggttatttctgaatgtaacaatttccttaaaaatgacttatccaatttctgtatttcacctttagggttaaaaaaaactcttctactgaatctataaaaactgcagttttaca

SEQ ID NO: 173254 - DNA, 120 bp, Artificial Sequence
  ENSG00000109654_22 (sequence is synthesized)
tctgtgaactatggcttaagggacaggatttatgtagctaaactaattttgcaaatcaaacagacacttaaaaaactagcatatgtaaaggtattcgttaatcctgtgaatggtagcttt

SEQ ID NO: 173255 - DNA, 120 bp, Artificial Sequence
  ENSG00000109654_23 (sequence is synthesized)
tgcacagaacttccaaaagcaaaacaaaaacaaaatctattgtagttatatacttcatttaacctaggtcacaagacccagggaatcttctaacctcacttttacagtaggtattactct

SEQ ID NO: 173256 - DNA, 120 bp, Artificial Sequence
  ENSG00000109654_24 (sequence is synthesized)
tgtgacatttttttggttatcaacaactaaatataaattactttggaaaaagtaaggctgtcttgcaaaatgatcccagctctgattagcagccctctggagttcagaacttaagtatca

SEQ ID NO: 173257 - DNA, 120 bp, Artificial Sequence
  ENSG00000109654_25 (sequence is synthesized)
gtgcaaatttctcaacctttctgggttagacaaagatccttttttgtgtgttcttttcaccacccctttggctcaccttgtatcagcaaacaaagtacttcttcagggaaacctgaaatt

SEQ ID NO: 173258 - DNA, 120 bp, Artificial Sequence
  ENSG00000109654_26 (sequence is synthesized)
tctaatgccttgaaaagcatattacaaaagtaatgctaccttttgggaaacaaactgccccgttaactccagatcattgcactggaatgtaatcaagaaagttagtcatgttttatgtac

SEQ ID NO: 173259 - DNA, 120 bp, Artificial Sequence
  ENSG00000109654_27 (sequence is synthesized)
catgttttcacacgtgtctcttctcttcgacttcctgaaagcgaaagctttacctcctgcaaatgtcagcacatgtagtaggacaccagtatcctaggacagagagccataagtagccct

SEQ ID NO: 173260 - DNA, 120 bp, Artificial Sequence
  ENSG00000109654_28 (sequence is synthesized)
ttgattaatgattcccccttagaaagcaagtgttaccaaagttgtgttatcttgaaagcattacaggtaagggcatgttatggttatttatcattgtttaatgaatagtagaggtgtcaa

SEQ ID NO: 173261 - DNA, 85 bp, Artificial Sequence
  ENSG00000109654_29 (sequence is synthesized)
gctgaatctttggtgtattgaaataggcagcactctgaaagacagaagcttcgtccagccactcttcagcacattcctttactaa

SEQ ID NO: 173262 - DNA, 120 bp, Artificial Sequence
  ENSG00000109654_30 (sequence is synthesized)
aagcttcgtccagccactcttcagcacattcctttactaagcagtttaaagccgtcctagtggagcaagccctaaagcagatttaatttttgccattttccaagaatgacggtggtggct

SEQ ID NO: 173263 - DNA, 120 bp, Artificial Sequence
  ENSG00000109654_31 (sequence is synthesized)
tttagtcagaaaatggccttctgtgctttcaaaaaaaaaaacaaaaaaaaaaccacacacacacataaaaaacccaacaggtcaaaataaaagttgaacttgagttacatttaatttaaa

SEQ ID NO: 173264 - DNA, 120 bp, Artificial Sequence
  ENSG00000109654_32 (sequence is synthesized)
tataaatgcattttgagaaatgttaagaacaatttagtcaatcgttcatctgtcattggtactgtaaaataagctgtggtctatttccactgtttaattttctactcagttctaccaaat

SEQ ID NO: 173265 - DNA, 120 bp, Artificial Sequence
  ENSG00000109654_33 (sequence is synthesized)
aggatgtcatgtttgacatttttgatagtgactttggggtcttcttcactgaaagcaccttagaactgtactataagaaaacatttcccctatgtataattatatgaatgtgatgtttat

SEQ ID NO: 173266 - DNA, 120 bp, Artificial Sequence
  ENSG00000109654_34 (sequence is synthesized)
tgcttattaatttataattcagtcattctctatataggacttcttaaaatttagaagggaaatctagctacttcaaattgtctgttaaatttattatgcccaaatcaacctctgaaaaaa

SEQ ID NO: 173267 - DNA, 120 bp, Artificial Sequence
  ENSG00000109654_35 (sequence is synthesized)
ggtttttccaggaagatttacatttaggtttaatatttttttagttaggtagagttttaaaaaatacttgagcctgtccgtgataaagctataaaattcaataactttttagaatgttaa

SEQ ID NO: 173268 - DNA, 120 bp, Artificial Sequence
  ENSG00000109654_36 (sequence is synthesized)
atgaagacactgtttcctaacatcagtgagatacatctttgaatttaaacattcatatttactgagtacctactaggtaccaagtactcttttaggcactggaaatacagtgatggacaa

SEQ ID NO: 173269 - DNA, 120 bp, Artificial Sequence
  ENSG00000109654_37 (sequence is synthesized)
aacaggtaaaaaatcgctgccccctcagagctgacattctggggtgggaatttcattttgccacgtactaacgttctgcacaaaagacaggctagactcttgtctagattgtttaaaaga

SEQ ID NO: 173270 - DNA, 120 bp, Artificial Sequence
  ENSG00000109654_38 (sequence is synthesized)
aacttttcaaattggttacattaattttagtttattttcacaagtaaaaatggctttttatttagattctttctgtcccaggctgttgatcttaaaactagttgatttaaagagtttttt

SEQ ID NO: 173271 - DNA, 120 bp, Artificial Sequence
  ENSG00000109654_39 (sequence is synthesized)
tgcacaacatttcaattatatttgtgaacttagaaattaacttacaatctaaccagccatcatatcatatcctatcaggctagatatctcaatagtagactgaatacaaagctaattttt

SEQ ID NO: 173272 - DNA, 120 bp, Artificial Sequence
  ENSG00000109654_40 (sequence is synthesized)
tttacatgtcaatattggcacaaactggaatgaaagaatagtttgattcagacctgctccactatgtgttgctaaaacacatgctatgagcactccaggaaacactatattttttccaaa

SEQ ID NO: 173273 - DNA, 120 bp, Artificial Sequence
  ENSG00000109654_41 (sequence is synthesized)
aaatatgtgattatatatgttaaagtatagataacatttcacacttggatacatatgtgcatttactgtatttcttggtaagcatatttttgggggaaagtgctgctgatatgatacaag

SEQ ID NO: 173274 - DNA, 120 bp, Artificial Sequence
  ENSG00000109654_42 (sequence is synthesized)
tagacaaaatttaaatgaaattttgtcacattctatggaaaatggtttctggtaaactgagaaggatattaaaataagtggcttttttctgggctaccattattgtttgatttctctttg

SEQ ID NO: 173275 - DNA, 120 bp, Artificial Sequence
  ENSG00000109654_43 (sequence is synthesized)
tcaagtgtatagaacctgtcatacattcatgataagtagcactgaaaaattactcattcaaatttcccctgggcacgtaaggcaaaatattgccggttgggatttcaaggtcagtgacga

SEQ ID NO: 173276 - DNA, 120 bp, Artificial Sequence
  ENSG00000109654_44 (sequence is synthesized)
cgcatttcctcccagtacagaccccccagccccccttgctggacatggggaggcagagagtcacttgaccatccagaaatacatgactacaagtcctttatgactgtttgccattttttt

SEQ ID NO: 173277 - DNA, 120 bp, Artificial Sequence
  ENSG00000109654_45 (sequence is synthesized)
taatggtacttagtattttgatcaaactttagtctccagaactaaacaagtccctaagtttccttattttaatttactgtgactagatttgaagcaaataaatactccagatccatgcag

SEQ ID NO: 173278 - DNA, 120 bp, Artificial Sequence
  ENSG00000109654_46 (sequence is synthesized)
ctagaacacacttgcttccactactaaatatacagggtatgtcctaacatggagttaactggaatagcagtacactagcaagtatctgtgaatccttagcactgacgggttaacagaaat

SEQ ID NO: 173279 - DNA, 120 bp, Artificial Sequence
  ENSG00000109654_47 (sequence is synthesized)
gctttggtaatacctacttagttaattggaggaagtagtaaataaacattaggtaatctgcagattacttcaaatgggaaaaatctttttgtagactctatagtaccctctctattcact

SEQ ID NO: 173280 - DNA, 120 bp, Artificial Sequence
  ENSG00000109654_48 (sequence is synthesized)
agcttctgaaaagggaggagtatttttagtttgacaatttaataatttaaaaacaagacatctccaggtaggaaaaaatgaaagctatttcatgcaaacattatctaatttagcttaaaa

SEQ ID NO: 173281 - DNA, 120 bp, Artificial Sequence
  ENSG00000109654_49 (sequence is synthesized)
gtgaaagtggtaatactgttggtttctgtaaatgttgcagggttttaaactttataattactttaatatttttgataactagaaatctagtattgccataaaggaaactaagtgcccatc

SEQ ID NO: 173282 - DNA, 120 bp, Artificial Sequence
  ENSG00000109654_50 (sequence is synthesized)
aaagatttgtttggtataaataaagaattatttgttttgttttcaatgacagtaagctacaaatcatgatgcttaaaaactttctaaagatgaattgtgtggcagtgattggtctgtttg

SEQ ID NO: 173283 - DNA, 120 bp, Artificial Sequence
  ENSG00000109654_51 (sequence is synthesized)
tggagaatgtatgaaagctattaatattctagaatagattaataaattggctatgttgttccaatgaatgtacagcacttccattaacttttgaaagcaacacagccttaaactcaatgc

SEQ ID NO: 173284 - DNA, 120 bp, Artificial Sequence
  ENSG00000109654_52 (sequence is synthesized)
ttttgctttatgacatgggaatgttctgtcatcaatggagtgtattcttgtaatagaattctttatatcgttctcaattctatagactttcaagcctatgtatgaatatgaaggggtttt

SEQ ID NO: 173285 - DNA, 120 bp, Artificial Sequence
  ENSG00000109654_53 (sequence is synthesized)
ttttttttgctttgttttctttttagattttgtacattccatctttataggtctgtttcatatgttttatgtatagaacactaagtcttgcactctctgacattgatactgatatattct

SEQ ID NO: 173286 - DNA, 120 bp, Artificial Sequence
  ENSG00000109654_54 (sequence is synthesized)
cgtcatttgttcttttatgaatcaaaatgttgactgcctatttaaagaaaagaatgaacgctgtgcatcaaagtgtttgtatgttcgtagctacatacgtaccacagtattttggatgct

SEQ ID NO: 173287 - DNA, 120 bp, Artificial Sequence
  ENSG00000109654_55 (sequence is synthesized)
ttagtctacaatgaaactttcaattaattctgtcttgaaacataggagaaacaggattcatgtgtatctctttaccatgcacaaaatctcaaatcattataataaagcttgttttctcca

SEQ ID NO: 173288 - DNA, 120 bp, Artificial Sequence
  ENSG00000109654_56 (sequence is synthesized)
agcattttgagtgagcttgcagaaaatgaggggctttcagctggtcgcctgcttgtcacctctcgctgcctgaaaggcagctctcagagccctttcctgtccttctaattacagcggcgg

SEQ ID NO: 173289 - DNA, 120 bp, Artificial Sequence
  ENSG00000109654_57 (sequence is synthesized)
agcttgatgactataatgggcccagttgtctgcgggctgcggggagctaagtccccagattggaggaggctggctctggtcttcgatgcacaggagtggccgttatggaacgcaggagct

SEQ ID NO: 173290 - DNA, 120 bp, Artificial Sequence
  ENSG00000109654_58 (sequence is synthesized)
gtgcttgcttataatgaactgtcatgatggaggccggcccgtttcagctctctcagccccgtcaagctgaactcacttcccctgaaaggacagtgtttgcatttgtgtttacgggactgg

SEQ ID NO: 173291 - DNA, 120 bp, Artificial Sequence
  ENSG00000109654_59 (sequence is synthesized)
tgctgcgattggcccatcttggaggctggctgcaggagcctttagtcatcgcacagggaaatctttctggaaccgggcaccaacttgcgtgtttgttttcatgctctttgtgcggggatt

SEQ ID NO: 173292 - DNA, 120 bp, Artificial Sequence
  ENSG00000109654_60 (sequence is synthesized)
agctgtcgtgccgggcctgaaaatgctgcgagcgccgggcgacatctaatccaggatttgcctctgcctcgcggttgatggaaaacagatgtcttactgctctgggcctgagcacagaat

SEQ ID NO: 173293 - DNA, 120 bp, Artificial Sequence
  ENSG00000109654_61 (sequence is synthesized)
agatactgcccgggagcatgactactgtggccttggggaggctttgggtacatcagagattacagattgaaacagaactccatgtggaaaaatcagtaattaaaaaagatttttaccagc

SEQ ID NO: 173294 - DNA, 120 bp, Artificial Sequence
  ENSG00000109654_62 (sequence is synthesized)
aaaagatgtcctgtaagatcaagaccgattggtgtgaatactgaagggggtcttccacttgttaatgacccagaaacattcctgccgacttccagccttctctcatttcctccatttttc

SEQ ID NO: 173295 - DNA, 120 bp, Artificial Sequence
  ENSG00000109654_63 (sequence is synthesized)
taaccagcagagtagactttgttctgctcaaagatgccggttttaacttggacttacagaccttggaaagtcaggaaattgaataaaatgtggtggcaataagttgcttaatttgaaact

SEQ ID NO: 173296 - DNA, 120 bp, Artificial Sequence
  ENSG00000109654_64 (sequence is synthesized)
ggtgcaaatgaagaggacttgaaaattaaattttaaaaagcaattcgttgaacttagaggcagaactttctgaagcttaatgttttgtggctagtcaataaattaaaatcactttttcaa

SEQ ID NO: 173297 - DNA, 87 bp, Artificial Sequence
  ENSG00000109654_65 (sequence is synthesized)
atcccatcgaagacgatttgatctttcgagtggatggagtcttgcaggctgaagtacagtggcatgatctcagcccactgcaaccag

SEQ ID NO: 173298 - DNA, 120 bp, Artificial Sequence
  ENSG00000109654_66 (sequence is synthesized)
acaggtgtaagccattgtgcccggccagcattaatttcatattaagttggagtgggtggtgagaggaaatctgcatttattgatcccctatttcagtctaagggttcaccttatgtaatc

SEQ ID NO: 173299 - DNA, 120 bp, Artificial Sequence
  ENSG00000109654_67 (sequence is synthesized)
ttcctggaggggtaggtggaagtgaccaggaagaatatgggtgagaagctgttgaattaaaaattcattttgtgcttcataggctagacttgcatctggaaaaacaaaatgatttaatta

SEQ ID NO: 173300 - DNA, 120 bp, Artificial Sequence
  ENSG00000109654_68 (sequence is synthesized)
aggctagacttgcatctggaaaaacaaaatgatttaattatggaattatagaataattgttaaattgattataattactttaaaaattcttgttattcattctactagctaatatgtaac

SEQ ID NO: 173301 - DNA, 66 bp, Artificial Sequence
  ENSG00000109654_69 (sequence is synthesized)
cctggggcgtggtcgccgggctgccgtgcgctcgggatcagtctttttatattataaaattctaac

SEQ ID NO: 173302 - DNA, 120 bp, Artificial Sequence
  ENSG00000109654_70 (sequence is synthesized)
ttcggtggagtactttactttgatattccacttgcaaaacagaaccactgattccttcctgcttgacaagattgagtcgctatcaaggagctgcccgtgctttggaaatggtccaaatcg

SEQ ID NO: 173303 - DNA, 120 bp, Artificial Sequence
  ENSG00000109654_71 (sequence is synthesized)
tctctaagccacacaagccacggagtatagtatgtctccatcaccaaagaggagcaatcgacacctctctgcatagacaagactatcttgaccagaggcactgacagccttccagggtgg

SEQ ID NO: 173304 - DNA, 120 bp, Artificial Sequence
  ENSG00000109654_72 (sequence is synthesized)
cagagagacctgtgtgtgcaaggtggcagagatgtggcgcagaagagatgggcacttactccagtgctgatacacagaagccagctttgttcaaaacagtgttgtttagcaaggttgcac

SEQ ID NO: 173305 - DNA, 120 bp, Artificial Sequence
  ENSG00000109654_73 (sequence is synthesized)
ctgttctgtgcatgaactggcacatcactacttagagcagaagatatgctgggcttctgatgatggctgcactgcatggtgcctgcagaactacattcctgcccacagtttaaccctctc

SEQ ID NO: 173306 - DNA, 120 bp, Artificial Sequence
  ENSG00000109667_0 (sequence is synthesized)
actcacggaaatgccttggcagagtctggggtccctggactgagccatcagctgggtcactgagacccatggcaaggaaacaaaataggaattccaaggaactgggcctagttcccctca

SEQ ID NO: 173307 - DNA, 120 bp, Artificial Sequence
  ENSG00000109667_1 (sequence is synthesized)
cagatgacaccagccacgccgggcctccagggccagggagggcactgctggagtgtgaccacctgaggagtggggtgccaggtggaaggagaagaaaggactggtcctgctcgctcctcg

SEQ ID NO: 173308 - DNA, 120 bp, Artificial Sequence
  ENSG00000109667_2 (sequence is synthesized)
tggcctccctcgcgggcgccttcggctcctccttcctctacggctacaacctgtcggtggtgaatgcccccaccccgtacatcaaggccttttacaatgagtcatgggaaagaaggcatg

SEQ ID NO: 173309 - DNA, 120 bp, Artificial Sequence
  ENSG00000109667_3 (sequence is synthesized)
gacgtccaatagacccagacactctgactttgctctggtctgtgactgtgtccatattcgccatcggtggacttgtggggacgttaattgtgaagatgattggaaaggttcttgggagga

SEQ ID NO: 173310 - DNA, 120 bp, Artificial Sequence
  ENSG00000109667_4 (sequence is synthesized)
agcacactttgctggccaataatgggtttgcaatttctgctgcattgctgatggcctgctcgctccaggcaggagcctttgaaatgctcatcgtgggacgcttcatcatgggcatagatg

SEQ ID NO: 173311 - DNA, 120 bp, Artificial Sequence
  ENSG00000109667_5 (sequence is synthesized)
gaggcgtcgccctcagtgtgctccccatgtaccttagtgagatctcacccaaggagatccgtggctctctggggcaggtgactgccatctttatctgcattggcgtgttcactgggcagc

SEQ ID NO: 173312 - DNA, 120 bp, Artificial Sequence
  ENSG00000109667_6 (sequence is synthesized)
ttctgggcctgcccgagctgctgggaaaggagagtacctggccatacctgtttggagtgattgtggtccctgccgttgtccagctgctgagccttccctttctcccggacagcccacgct

SEQ ID NO: 173313 - DNA, 120 bp, Artificial Sequence
  ENSG00000109667_7 (sequence is synthesized)
agcagacgtttcccaagaggtagaggaggtcctggctgagagccgcgtgcagaggagcatccgcctggtgtccgtgctggagctgctgagagctccctacgtccgctggcaggtggtcac

SEQ ID NO: 173314 - DNA, 120 bp, Artificial Sequence
  ENSG00000109667_8 (sequence is synthesized)
cgtgattgtcaccatggcctgctaccagctctgtggcctcaatgcaatttggttctataccaacagcatctttggaaaagctgggatccctccggcaaagatcccatacgtcaccttgag

SEQ ID NO: 173315 - DNA, 120 bp, Artificial Sequence
  ENSG00000109667_9 (sequence is synthesized)
tacagggggcatcgagactttggctgccgtcttctctggtttggtcattgagcacctgggacggagacccctcctcattggtggctttgggctcatgggcctcttctttgggaccctcac

SEQ ID NO: 173316 - DNA, 120 bp, Artificial Sequence
  ENSG00000109667_10 (sequence is synthesized)
catcacgctgaccctgcaggaccacgccccctgggtcccctacctgagtatcgtgggcattctggccatcatcgcctctttctgcagtgggccaggtggcatcccgttcatcttgactgg

SEQ ID NO: 173317 - DNA, 120 bp, Artificial Sequence
  ENSG00000109667_11 (sequence is synthesized)
tgagttcttccagcaatctcagcggccggctgccttcatcattgcaggcaccgtcaactggctctccaactttgctgttgggctcctcttcccattcattcagaaaagtctggacaccta

SEQ ID NO: 173318 - DNA, 120 bp, Artificial Sequence
  ENSG00000109667_12 (sequence is synthesized)
ctgtttcctagtctttgctacaatttgtatcacaggtgctatctacctgtattttgtgctgcctgagaccaaaaacagaacctatgcagaaatcagccaggcattttccaaaaggaacaa

SEQ ID NO: 173319 - DNA, 120 bp, Artificial Sequence
  ENSG00000109667_13 (sequence is synthesized)
agcatacccaccagaagagaaaatcgactcagctgtcactgatggtaagataaatggaaggccttaacaagtttcctcctccacgttggacaattatgtcaaaaacaggattgtctacat

SEQ ID NO: 173320 - DNA, 120 bp, Artificial Sequence
  ENSG00000109667_14 (sequence is synthesized)
ggatgatctcacttttcaggaaacttaaaatttacccattattgggaagcttaaatgaattgaagctatgcaagtcttttatattattaaatatttaaaagtaaacctgtactaatctaa

SEQ ID NO: 173321 - DNA, 120 bp, Artificial Sequence
  ENSG00000109667_15 (sequence is synthesized)
gttggctctagggctggcaccaggcactggaattaaacattctggactccagaggggcatgaaaactcttcctgaaggagatgcagaggaagattcgaactggaggaaaaccctaaaata

SEQ ID NO: 173322 - DNA, 120 bp, Artificial Sequence
  ENSG00000109667_16 (sequence is synthesized)
aacaataacaacaaaagttcaaaacctgaaaagtgaaccatgaagctcagtaaaaaggaccgaggagaagatgaagaaagtgattcagcgaaaaagaaattggactggtcctgctcgctc

SEQ ID NO: 173323 - DNA, 120 bp, Artificial Sequence
  ENSG00000109667_17 (sequence is synthesized)
aaaatcgactcagctgtcactgatgcagctcaaaggaactaagacaaagatcatggagaccatcgggtgagtctcaagacttcccccagctctgcttggctggtctcctgctggtatttt

SEQ ID NO: 173324 - DNA, 120 bp, Artificial Sequence
  ENSG00000109667_18 (sequence is synthesized)
tagagaggaacaagaacttccattttatcttgcttacctgcacttatgaaaagtcaaactgagtcatgctgagagccagggaacataggagtcagttcttctgcagcagcactcagccag

SEQ ID NO: 173325 - DNA, 120 bp, Artificial Sequence
  ENSG00000109667_19 (sequence is synthesized)
ttgaaggcaatgtggagtgatggaaggagagcagtgatgcagtgatgctggcaccaactcctttactatggcatccattgtaccagctgccatacaccaggcaacttctacactttatct

SEQ ID NO: 173326 - DNA, 120 bp, Artificial Sequence
  ENSG00000109667_20 (sequence is synthesized)
ctaatcatcctagaataagtattagtttccccatcttctagaaaggaaaactcagacccagagacactaagcaagtagctcaacatcacacacgttatctgtgattaagcctgagttaga

SEQ ID NO: 173327 - DNA, 120 bp, Artificial Sequence
  ENSG00000109667_21 (sequence is synthesized)
aatggagccttggatttccacatttatgctcttttcatgaagctacctgactttgatactcaagtttgtccatctacaacacgggactgctggactagaaatctctaagtcccctttacc

SEQ ID NO: 173328 - DNA, 120 bp, Artificial Sequence
  ENSG00000109667_22 (sequence is synthesized)
atttggttctataccaacagcatctttggaaaagctgggatccctccggcaaagatcccatacgtcaccttgagtacagggggcatcgagactttggctgccgtcttctctgtggcatcc

SEQ ID NO: 173329 - DNA, 120 bp, Artificial Sequence
  ENSG00000109667_23 (sequence is synthesized)
ctttctgtttctttgcttggcattacccgatgattaattttgaaaagttactcaaacaattacaattcaacttggtcaacatcagttctcacaaatagaagctgactgtcatttattcac

SEQ ID NO: 173330 - DNA, 120 bp, Artificial Sequence
  ENSG00000109667_24 (sequence is synthesized)
ggccatctgcaagctggagaccctgggattctggcagcacggctcagtccaaatccagaagcttcagcaccaggaaagccaatggtaattctcagtctgacgccaaaggcctgagaacca

SEQ ID NO: 173331 - DNA, 120 bp, Artificial Sequence
  ENSG00000109667_25 (sequence is synthesized)
gagcagtggatgggacgctggtgcaagtcctaaagtccaaaggtcagggagctcggagttctgaccttcaagagcaggagaagaagagtatcccagctccaggagagagacagacagaga

SEQ ID NO: 173332 - DNA, 120 bp, Artificial Sequence
  ENSG00000109667_26 (sequence is synthesized)
aacaaaacaaaacaaaacaaacaaacaaaagaaatgcctttttttctgcccattttgtttgatctagaccaccagtcaatggatggtgcctgccccccactggagggcagatctgctccc

SEQ ID NO: 173333 - DNA, 120 bp, Artificial Sequence
  ENSG00000109667_27 (sequence is synthesized)
ttcagtccacagactcccacaccagtctcctccagaaacgccgtcacagacacaccccaaagtgaggcttgaccagctttctagggattctttaattcaggcacctgaaattaagcatca

SEQ ID NO: 173334 - DNA, 120 bp, Artificial Sequence
  ENSG00000109667_28 (sequence is synthesized)
cacccaggatccatgcaggtatcccttcagccagcccatgaggtggggttcattgcccttattccaccttcgagatgcagaaggtgaagtctggaatcgttcaattatggctcagtgcca

SEQ ID NO: 173335 - DNA, 120 bp, Artificial Sequence
  ENSG00000109667_29 (sequence is synthesized)
agcaaccagcattgagaggagctgggatgcctgtgggtggcccaggatgagctcctgaacatcttagtcccccaggaggccagagcatccctgatctgagagtgaacagaaggcctggca

SEQ ID NO: 173336 - DNA, 120 bp, Artificial Sequence
  ENSG00000109667_30 (sequence is synthesized)
aggcaaagaggacttcgctccacttctgttgagaagtgttctttgtacccaatggtacaaagaccagggattttggtgacacagcagcccgagcccagcctgggtgcctaggatgcagct

SEQ ID NO: 173337 - DNA, 120 bp, Artificial Sequence
  ENSG00000109667_31 (sequence is synthesized)
tagctggtcaactgtcagtactaccaggacttggcccttggaaacctgcggggtggcagtgctctaccaggagggggccaactcgacaaaaccagaaagggtgaaacgtcctgcaccaga

SEQ ID NO: 173338 - DNA, 120 bp, Artificial Sequence
  ENSG00000109667_32 (sequence is synthesized)
gagtttcagacatcagcgatggactggttgattggtagtgtttttgctgagactgatggtggactccccatctgagagatcccagattccttcaggtcaaaggtcagcagctacactgga

SEQ ID NO: 173339 - DNA, 120 bp, Artificial Sequence
  ENSG00000109667_33 (sequence is synthesized)
gctttcctgacccccatgtccaggtacaaagaaaacccatcacctgagagccaatggcctccagagctagtgtggcagagggggcttggctcacgtgtcatcctgcttctttcttgctgt

SEQ ID NO: 173340 - DNA, 120 bp, Artificial Sequence
  ENSG00000109667_34 (sequence is synthesized)
gtgactttgggctagtagcttcacctctctgagctttgattcccccactgatgatcaaacatttctagtgccaggtgctgttctaggagctgtgtacctactgtttcaatcctcataaca

SEQ ID NO: 173341 - DNA, 120 bp, Artificial Sequence
  ENSG00000109667_35 (sequence is synthesized)
ctcctgtgaggctggcatcattgtctgcacacctgtttacagatgaggacacagaagccccatgagtggaagggatttgcctcacgccacagtgaacaaggggaagaggcaggatcagaa

SEQ ID NO: 173342 - DNA, 120 bp, Artificial Sequence
  ENSG00000109667_36 (sequence is synthesized)
ctcagggagcctggccgcgagtcctgcactgctcacaacaggctccagctgccctcgtatgaagacaagagctgtaaggatgaaggcacacaaaatgccaagtgagagctctggctacag

SEQ ID NO: 173343 - DNA, 120 bp, Artificial Sequence
  ENSG00000109667_37 (sequence is synthesized)
tccctctcaccatctcccaaggcaaaccctgcggctgtggccttggctttgccagaaactgattccatgctgctcccccaggggacctcgaaactgcaggtgtgccaggacattcctggc

SEQ ID NO: 173344 - DNA, 120 bp, Artificial Sequence
  ENSG00000109667_38 (sequence is synthesized)
tgacaagtgcggggtcgcaggagggctggacggcgtgcctctgtgtccatcagctccttgcgtgggtgcgctcatgtacggggtttaatgaatgaaatgattaaaacctggaaaaatgtg

SEQ ID NO: 173345 - DNA, 120 bp, Artificial Sequence
  ENSG00000109667_39 (sequence is synthesized)
gtgaaattcagatgccctgccccatctcagatccattaaatgagaattccaagagttgagcctagaaaatctatgtcctcgtcagccaacctcgtcctagtcgtctggaaggcattcagg

SEQ ID NO: 173346 - DNA, 120 bp, Artificial Sequence
  ENSG00000109667_40 (sequence is synthesized)
agccgctcatcttacaaaggtcaaggccacacccagttaaaaacagagacaccctgtggatctgtccaatagaggagactgggcagatgtcagccctctgaggatgtcatcaggcatttg

SEQ ID NO: 173347 - DNA, 120 bp, Artificial Sequence
  ENSG00000109667_41 (sequence is synthesized)
aagctcagtaaaaaggaccgaggagaagatgaagaaagtgattcagcgaaaaagaaattggtcagtccttttttttttctgtctcccttacatgattattccggtcacccagggggtagt

SEQ ID NO: 173348 - DNA, 120 bp, Artificial Sequence
  ENSG00000109667_42 (sequence is synthesized)
acccctttcccctgggtcagtgggaggctgttaaggtgaagctgggcagagaaaagagtgagcagcagctgaaagccaagttctatgggaaggagccatggggattgtagagtgtctggg

SEQ ID NO: 173349 - DNA, 120 bp, Artificial Sequence
  ENSG00000109667_43 (sequence is synthesized)
cacatcaatctgatggggccagaacattcgtgtcttaacttgaatcatgtgtcttccacttactagctgtgtgcccttggccaaatcatttaatttatttgagcctcaattttcttatct

SEQ ID NO: 173350 - DNA, 120 bp, Artificial Sequence
  ENSG00000109667_44 (sequence is synthesized)
gtaaaatagggatgatagtttctacctgcagggaatgttacaagagttagaccaaatgaatggaaggagaatggccatgagttgtagctgaataaataaaaattcttgtcattgaccaca

SEQ ID NO: 173351 - DNA, 120 bp, Artificial Sequence
  ENSG00000109667_45 (sequence is synthesized)
ggccgctaaacctgagggcgcccggcctgcgcacgcggacctggactggaaccctacttgcaggtccccaacttgcgtctcttctctctgtctctaccccagccaaggacaaagacttct

SEQ ID NO: 173352 - DNA, 120 bp, Artificial Sequence
  ENSG00000109667_46 (sequence is synthesized)
ctttaaatgctgggctccccatcagtgtctatgggactccctggagggaaggccacctgcacctcccaatcccagatcacctgtcagcccctgccctccgcttcctcaatccatcttcaa

SEQ ID NO: 173353 - DNA, 120 bp, Artificial Sequence
  ENSG00000109667_47 (sequence is synthesized)
ccccctgtgttgacccagcacctgggcctcgctggctagcaatgactttagccacaagatggaccagggtttagaagcttcatttaaactcacattgagagtgtacagtttaaagcctca

SEQ ID NO: 173354 - DNA, 120 bp, Artificial Sequence
  ENSG00000109667_48 (sequence is synthesized)
aatcgactcagctgtcactgatgtgacctcatgtcaagaaggcagacctgcagaaatgaatgtgcctggatacctgagtcaccaggtgaaggaaactcccattgacctgcatcacactcc

SEQ ID NO: 173355 - DNA, 120 bp, Artificial Sequence
  ENSG00000109667_49 (sequence is synthesized)
agatatgaaacccttctttttctgcactgtcactgaggttagggattattactcactgcagcttagcctagcattaagttgcttgactaatataagtttcaataaatgttgctccatttc

SEQ ID NO: 173356 - DNA, 120 bp, Artificial Sequence
  ENSG00000109667_50 (sequence is synthesized)
cactactccgaatacagcctggattcaagctgccgccaccaccaccgccaccaaaaaagaacacccattgtaaacggtcatgtggtatttcctcaacctggaatgaccttcccctatctt

SEQ ID NO: 173357 - DNA, 120 bp, Artificial Sequence
  ENSG00000109667_51 (sequence is synthesized)
cttctcctggagaacaccaagtcatgatgtcagacaagagcttggattttggagacatgggtttgaattccagtcattcattcttttattcagcaaatatttaacaagtactgacatgtc

SEQ ID NO: 173358 - DNA, 120 bp, Artificial Sequence
  ENSG00000109670_0 (sequence is synthesized)
agtcaaggctttgacagggcatagtctcctccaataatcttctccgttctctctcattattccctcgagttcttctcagtcaagctgcatgtatgtatgtgtgtcccgagaagcggtttg

SEQ ID NO: 173359 - DNA, 120 bp, Artificial Sequence
  ENSG00000109670_1 (sequence is synthesized)
atactgagctgcatttgcctttactgtggagttttgttgccggttctgctccctaatcttccttttctgacgtgcctgagcatgtccacattagaatctgtgacatacctacctgaaaaa

SEQ ID NO: 173360 - DNA, 120 bp, Artificial Sequence
  ENSG00000109670_2 (sequence is synthesized)
ggtttatattgtcagagactgccaagcagccggacacacgggggcacagaatcactgaaggggaaaaatacagaaaatatgggtttctacggcacattaaaaatgattttttacaaaatg

SEQ ID NO: 173361 - DNA, 120 bp, Artificial Sequence
  ENSG00000109670_3 (sequence is synthesized)
aaaagaaagttggaccatggttctgaggtccgctctttttctttgggaaagaaaccatgcaaagtctcagaatatacaagtaccactgggcttgtaccatgttcagcaacaccaacaact

SEQ ID NO: 173362 - DNA, 120 bp, Artificial Sequence
  ENSG00000109670_4 (sequence is synthesized)
tttggggacctcagagcagccaatggccaagggcaacaacgacgccgaattacatctgtccagccacctacaggcctccaggaatggctaaaaatgtttcagagctggagtggaccagag

SEQ ID NO: 173363 - DNA, 120 bp, Artificial Sequence
  ENSG00000109670_5 (sequence is synthesized)
aaattgcttgctttagatgaactcattgatagttgtgaaccaacacaagtaaaacatatgatgcaagtgatagaaccccagtttcaacgagacttcatttcattgctccctaaagagttg

SEQ ID NO: 173364 - DNA, 120 bp, Artificial Sequence
  ENSG00000109670_6 (sequence is synthesized)
gcactctatgtgctttcattcctggaacccaaagacctgctacaagcagctcagacatgtcgctactggagaattttggctgaagacaaccttctctggagagagaaatgcaaagaagag

SEQ ID NO: 173365 - DNA, 120 bp, Artificial Sequence
  ENSG00000109670_7 (sequence is synthesized)
gggattgatgaaccattgcacatcaagagaagaaaagtaataaaaccaggtttcatacacagtccatggaaaagtgcatacatcagacagcacagaattgatactaactggaggcgagga

SEQ ID NO: 173366 - DNA, 120 bp, Artificial Sequence
  ENSG00000109670_8 (sequence is synthesized)
gaactcaaatctcctaaggtgctgaaaggacatgatgatcatgtgatcacatgcttacagttttgtggtaaccgaatagttagtggttctgatgacaacactttaaaagtttggtcagca

SEQ ID NO: 173367 - DNA, 120 bp, Artificial Sequence
  ENSG00000109670_9 (sequence is synthesized)
gtcacaggcaaatgtctgagaacattagtgggacatacaggtggagtatggtcatcacaaatgagagacaacatcatcattagtggatctacagatcggacactcaaagtgtggaatgca

SEQ ID NO: 173368 - DNA, 120 bp, Artificial Sequence
  ENSG00000109670_10 (sequence is synthesized)
gagactggagaatgtatacacaccttatatgggcatacttccactgtgcgttgtatgcatcttcatgaaaaaagagttgttagcggttctcgagatgccactcttagggtttgggatatt

SEQ ID NO: 173369 - DNA, 120 bp, Artificial Sequence
  ENSG00000109670_11 (sequence is synthesized)
gagacaggccagtgtttacatgttttgatgggtcatgttgcagcagtccgctgtgttcaatatgatggcaggagggttgttagtggagcatatgattttatggtaaaggtgtgggatcca

SEQ ID NO: 173370 - DNA, 120 bp, Artificial Sequence
  ENSG00000109670_12 (sequence is synthesized)
gagactgaaacctgtctacacacgttgcaggggcatactaatagagtctattcattacagtttgatggtatccatgtggtgagtggatctcttgatacatcaatccgtgtttgggatgtg

SEQ ID NO: 173371 - DNA, 120 bp, Artificial Sequence
  ENSG00000109670_13 (sequence is synthesized)
gagacagggaattgcattcacacgttaacagggcaccagtcgttaacaagtggaatggaactcaaagacaatattcttgtctctgggaatgcagattctacagttaaaatctgggatatc

SEQ ID NO: 173372 - DNA, 120 bp, Artificial Sequence
  ENSG00000109670_14 (sequence is synthesized)
aaaacaggacagtgtttacaaacattgcaaggtcccaacaagcatcagagtgctgtgacctgtttacagttcaacaagaactttgtaattaccagctcagatgatggaactgtaaaacta

SEQ ID NO: 173373 - DNA, 120 bp, Artificial Sequence
  ENSG00000109670_15 (sequence is synthesized)
tgggacttgaaaacgggtgaatttattcgaaacctagtcacattggagagtggggggagtgggggagttgtgtggcggatcagagcctcaaacacaaagctggtgtgtgcagttgggagt

SEQ ID NO: 173374 - DNA, 120 bp, Artificial Sequence
  ENSG00000109670_16 (sequence is synthesized)
cggaatgggactgaagaaaccaagctgctggtgctggactttgatgtggacatgaagtgaagagcagaaaagatgaatttgtccaattgtgtagacgatatactccctgcccttccccct

SEQ ID NO: 173375 - DNA, 120 bp, Artificial Sequence
  ENSG00000109670_17 (sequence is synthesized)
atgacaaaccataactgacaagagaggcgtctgctgtctcatcacataaaaggcttcacttttgactgagggcagctttgcaaaatgagactttctaaatcaaaccaggtgcaattattt

SEQ ID NO: 173376 - DNA, 120 bp, Artificial Sequence
  ENSG00000109670_18 (sequence is synthesized)
ctttattttcttctccagtggtcattgggcagtgttaatgctgaaacatcattacagattctgctagcctgttcttttaccactgacagctagacacctagaaaggaactgcaataatat

SEQ ID NO: 173377 - DNA, 120 bp, Artificial Sequence
  ENSG00000109670_19 (sequence is synthesized)
caaaacaagtactggttgactttctaattagagagcatctgcaacaaaaagtcatttttctggagtggaaaagcttaaaaaaattactgtgaattgtttttgtacagttatcatgaaaag

SEQ ID NO: 173378 - DNA, 120 bp, Artificial Sequence
  ENSG00000109670_20 (sequence is synthesized)
cttttttttttttttttttgccaaccattgccaatgtcaatcaatcacagtattagcctctgttaatctatttactgttgcttccatatacattcttcaatgcatatgttgctcaaaggt

SEQ ID NO: 173379 - DNA, 120 bp, Artificial Sequence
  ENSG00000109670_21 (sequence is synthesized)
ggcaagttgtcctgggttctgtgagtcctgagatggatttaattcttgatgctggtgctagaagtaggtcttcaaatatgggattgttgtcccaaccctgtactgtactcccagtggcca

SEQ ID NO: 173380 - DNA, 120 bp, Artificial Sequence
  ENSG00000109670_22 (sequence is synthesized)
aacttatttatgctgctaaatgaaagaaagaaaaaagcaaattatttttttttattttttttctgctgtgacgttttagtcccagactgaattccaaatttgctctagtttggttatgga

SEQ ID NO: 173381 - DNA, 120 bp, Artificial Sequence
  ENSG00000109670_23 (sequence is synthesized)
aaaaagactttttgccactgaaacttgagccatctgtgcctctaagaggctgagaatggaagagtttcagataataaagagtgaagtttgcctgcaagtaaagaattgagagtgtgtgca

SEQ ID NO: 173382 - DNA, 120 bp, Artificial Sequence
  ENSG00000109670_24 (sequence is synthesized)
aagcttattttcttttatctgggcaaaaattaaaacacattccttggaacagagctattacttgcctgttctgtggagaaacttttctttttgagggctgtggtgaatggatgaacgtac

SEQ ID NO: 173383 - DNA, 120 bp, Artificial Sequence
  ENSG00000109670_25 (sequence is synthesized)
atcgtaaaactgacaaaatattttaaaaatatataaaacacaaaattaaaataaagttgctggtcagtcttagtgttttacagtatttgggaaaacaactgttacagttttattgctctg

SEQ ID NO: 173384 - DNA, 120 bp, Artificial Sequence
  ENSG00000109670_26 (sequence is synthesized)
agtaactgacaaagcagaaactattcagtttttgtagtaaaggcgtcacatgcaaacaaacaaaatgaatgaaacagtcaaatggtttgcctcattctccaagagccacaactcaagctg

SEQ ID NO: 173385 - DNA, 120 bp, Artificial Sequence
  ENSG00000109670_27 (sequence is synthesized)
aactgtgaaagtggtttaacactgtatcctaggcgatcttttttcctccttctgtttatttttttgtttgttttatttatagtctgatttaaaacaatcagattcaagttggttaatttt

SEQ ID NO: 173386 - DNA, 120 bp, Artificial Sequence
  ENSG00000109670_28 (sequence is synthesized)
agttatgtaacaacctgacatgatggaggaaaacaacctttaaagggattgtgtctatggtttgattcacttagaaattttattttcttataacttaagtgcaataaaatgtgttttttc

SEQ ID NO: 173387 - DNA, 120 bp, Artificial Sequence
  ENSG00000109670_29 (sequence is synthesized)
atgttagtatgcctgtttcttccactgaagtaataatccttcattataagtatttaggatttgtctataatatttaaataagcaaaatcttggtttctttgcatcctgctgtgtgacata

SEQ ID NO: 173388 - DNA, 120 bp, Artificial Sequence
  ENSG00000109670_30 (sequence is synthesized)
gaaatcaatacttcaagcctgttttataccgcgaaagtaaggataatgtgctgcaactgcaaattttatttctctcctagactatgaaggaggacactccactgtgctcatctctgtaga

SEQ ID NO: 173389 - DNA, 120 bp, Artificial Sequence
  ENSG00000109670_31 (sequence is synthesized)
ttgcattggggtgtataaatatgaaatctggttccctcaaagaatccacaaaacttttgtgataattacaactagaagccttataaataacaaattcattttgaaattttgaccacatat

SEQ ID NO: 173390 - DNA, 120 bp, Artificial Sequence
  ENSG00000109670_32 (sequence is synthesized)
taagtgcttaccctcgatactttctgttcattctctcttaagctcccactatccctgagaagtaggcactattatctcccatcttaaagacgagcaaaaatctgcagctgagactggtta

SEQ ID NO: 173391 - DNA, 120 bp, Artificial Sequence
  ENSG00000109670_33 (sequence is synthesized)
ggcaatttgtcaaatcatagaactagcggaatgccagaactcaaacccatatttccaaagactaaatacatgctgctctttaagaaagtttgacagactaaagcaaggtttgagagggaa

SEQ ID NO: 173392 - DNA, 120 bp, Artificial Sequence
  ENSG00000109670_34 (sequence is synthesized)
ataagccatttttctggtactttctgactgttctgtagccgttttgttcaacaaatctaaattttataaaatctaaattttatgatgtaaggggaaaaaataaagttgtttttgaaacta

SEQ ID NO: 173393 - DNA, 120 bp, Artificial Sequence
  ENSG00000109670_35 (sequence is synthesized)
gcacttcaccaagcctcagacaggtcaggacatttggtaggggaaggttgaaagacaaaagcagcaggccttgggttctcagccttttaaaaactattattaaatatatatttttaaaat

SEQ ID NO: 173394 - DNA, 120 bp, Artificial Sequence
  ENSG00000109670_36 (sequence is synthesized)
ttagtggttagagcttttagtaatgtgcctgtattacatgtagagagtattcgtcaaccaagaggagttttaaaatgtcaaaaccgggaaaacctactctaaaccatggcttggttcctg

SEQ ID NO: 173395 - DNA, 120 bp, Artificial Sequence
  ENSG00000109670_37 (sequence is synthesized)
ctgcagaatgtgaaaacctttgcatcttctgatagtctagccaaggtccaagaagtagcaagctggcttttggaaatgaatcaggaactgctctctgtgggcagcaaaagacgacgaact

SEQ ID NO: 173396 - DNA, 120 bp, Artificial Sequence
  ENSG00000109670_38 (sequence is synthesized)
ggaggctctctgagaggtaacccttcctcaagccaggtagatgaagaacagatgaatcgtgtggtagaggaggaacagcaacagcaactcagacaacaagaggaggagcacactgcaagg

SEQ ID NO: 173397 - DNA, 120 bp, Artificial Sequence
  ENSG00000109670_39 (sequence is synthesized)
aatggtgaagttgttggagtagaacctagacctggaggccaaaatgattcccagcaaggacagttggaagaaaacaataatagatttatttcggtagatgaggactcctcaggaaaccaa

SEQ ID NO: 173398 - DNA, 120 bp, Artificial Sequence
  ENSG00000109670_40 (sequence is synthesized)
gaagaacaagaggaagatgaagaacatgctggtgaacaagatgaggaggatgaggaggaggaggagatggaccaggagagtgacgattttgatcagtctgatgatagtagcagagaagat

SEQ ID NO: 173399 - DNA, 120 bp, Artificial Sequence
  ENSG00000109670_41 (sequence is synthesized)
ttttcatgaattaagtaattgccacctaaaaaataacagaagagagtatgaaaacaaaaaaaaatccatgtcttttaaaatgtcttttaccatgttgcttcttggcaagtatcttataaa

SEQ ID NO: 173400 - DNA, 120 bp, Artificial Sequence
  ENSG00000109670_42 (sequence is synthesized)
tattccaagtcagatgttaaaattttttaaagcagctttatatttccatagtgtaatattagtttgggatttattacagggctttaatgtctgtctttacttgtctagaagtagcttcac

SEQ ID NO: 173401 - DNA, 120 bp, Artificial Sequence
  ENSG00000109670_43 (sequence is synthesized)
tggctcctaactactgccctggggcagattcagatgaaatgtggtatgtagccacacccaatactgttggcatactttcattgaatctattcccatggaagaaacccagttgcaatttca

SEQ ID NO: 173402 - DNA, 120 bp, Artificial Sequence
  ENSG00000109670_44 (sequence is synthesized)
gtattatttcatcaaagaggccaggccagagctatcataactgctttcatgtcgtgtttcctttttattatatcatgttttatatcatatgtttgctttctacatactacatacacaatt

SEQ ID NO: 173403 - DNA, 120 bp, Artificial Sequence
  ENSG00000109670_45 (sequence is synthesized)
gcttgtgcttatataaatttataatgcttttgaataaacaaaacaataaatagtgatgggatcattttatacggatgtaatattttctgaagagccaaacaaattaaataagtaacttta

SEQ ID NO: 173404 - DNA, 120 bp, Artificial Sequence
  ENSG00000109670_46 (sequence is synthesized)
tattcattacaggtaagatctcttatctctcccttaaatgctctcctgatgaatcataaggttgttttactcagataatcactgtcaaattgctgatccagtacagtccaaaaaagatta

SEQ ID NO: 173405 - DNA, 120 bp, Artificial Sequence
  ENSG00000109670_47 (sequence is synthesized)
atcagattattctgctgtttttatatacgttaaaattggcatgaagaaagtgtaaatttcaaaattatttaaatgctttcaattttctgtgatctatttctcctctaaatacaaatattt

SEQ ID NO: 173406 - DNA, 120 bp, Artificial Sequence
  ENSG00000109670_48 (sequence is synthesized)
gttttgcaacctgacactttggggctctaagttttgctatgttaattaatggttaaatagtctcataggagagtaacctggattttaagaaactcctttgcagaagattaatatggccaa

SEQ ID NO: 173407 - DNA, 120 bp, Artificial Sequence
  ENSG00000109670_49 (sequence is synthesized)
aagctgcccctttgctttgatagctgaaagttgatggaccatgtaattgtgattccatccccattcaaagtggaaatagatcctttctgcataaagcactctactgtcccaggcccactg

SEQ ID NO: 173408 - DNA, 120 bp, Artificial Sequence
  ENSG00000109670_50 (sequence is synthesized)
atttgtagtcataaagaagtaaagttgactaaaccgatttcttttttttggtttatatttcaagcccatatccttgaaaacattgccatattttgagatcattaactagatgaataggaa

SEQ ID NO: 173409 - DNA, 120 bp, Artificial Sequence
  ENSG00000109670_51 (sequence is synthesized)
gtttagaatatgaatcttgttttatttccagaaaggcaacatttttaatgtaaaaatatttcctatagcttatatagtttatttaccagttattacccattaatgttcagcaaattagta

SEQ ID NO: 173410 - DNA, 120 bp, Artificial Sequence
  ENSG00000109670_52 (sequence is synthesized)
cataatcttagtactgtcaattctgttcttaggatatttgtttctttgtcaaagggatattgtccatgtcatgaaatattgacaatatgataaaaatgtttgctaaattagaaaaggtga

SEQ ID NO: 173411 - DNA, 120 bp, Artificial Sequence
  ENSG00000109670_53 (sequence is synthesized)
tgaatttggaggaaggggaattggctgcacctgtttctgatatgttcagaagcttaatgaatataatattctaatttaaataaactgtttgattgagaaaagaggtagccacattattgt

SEQ ID NO: 173412 - DNA, 120 bp, Artificial Sequence
  ENSG00000109670_54 (sequence is synthesized)
tcaaaatgccacctcttctgattccagatacaattatcttttggcacatttcctaattagcattaggttcttataaatgaaattttattttacacacagtttttaatggaacttactttt

SEQ ID NO: 173413 - DNA, 120 bp, Artificial Sequence
  ENSG00000109670_55 (sequence is synthesized)
gaacatcacgaaagttatctctagcccttttcatgccttaggtgctgataagcattccgtttatcataagctatgtcattagtctcagcttcctagtgggaagtaaaactcatagcaatt

SEQ ID NO: 173414 - DNA, 120 bp, Artificial Sequence
  ENSG00000109670_56 (sequence is synthesized)
ctctcagtcatccatgatatatagctaggtggggccagatgatttgaaaattaacatattgttcattttaggtgctttgttttcattttaagttgtttctgcatctagtttgaagctgct

SEQ ID NO: 173415 - DNA, 120 bp, Artificial Sequence
  ENSG00000109670_57 (sequence is synthesized)
tggcataaagatgagcctttctgatagaagtgtgtgagaacatacattgtagagttgcttgatggcatgcactttatcctcattgccactttatcttagtacctcattttgttcctggca

SEQ ID NO: 173416 - DNA, 120 bp, Artificial Sequence
  ENSG00000109670_58 (sequence is synthesized)
ttacctgtttcccatcctcttccccctttcctactaggattaaggtcagtaattgataggaagagtatccatacttctattctaataaactgtgtcttttgtagtttgatggtatccatg

SEQ ID NO: 173417 - DNA, 120 bp, Artificial Sequence
  ENSG00000109670_59 (sequence is synthesized)
ttattcaagagaaatatggagccttagcatcacaaaaagagtcaacctcatacagaatggttacttcagaaaagtttatgaatattttcaccctgacttacagaactagtctactcttga

SEQ ID NO: 173418 - DNA, 120 bp, Artificial Sequence
  ENSG00000109670_60 (sequence is synthesized)
ggaaatgttttaaactgtgtttttaatatgtaatataaaattgtttaatcacttcctgcatgttcaattgactctacttaacctttaagaacagtgagaagaaagatcttggctatatca

SEQ ID NO: 173419 - DNA, 120 bp, Artificial Sequence
  ENSG00000109670_61 (sequence is synthesized)
tagaagcaacgtactcattatattttttgattgaccattgcattttgaatttgtagtccaattttaaagggctaccttattgaaaaaaacaacagcatccttgatagaaaatttatttgg

SEQ ID NO: 173420 - DNA, 120 bp, Artificial Sequence
  ENSG00000109670_62 (sequence is synthesized)
cctccacttagtcacgtgcttaactggaatggagaggaataatagtgcctactaaagtagagaaagaaacaagtgaaaatcactaatattagatgaggtacagcagtgcctcatgattaa

SEQ ID NO: 173421 - DNA, 120 bp, Artificial Sequence
  ENSG00000109670_63 (sequence is synthesized)
ctttttctatttgttatagcccttagaaagtgtttttttcagtggggccatctgataggcaacattgcagctttttactcattggttttgtctctcctcagagttttggaatagtgactg

SEQ ID NO: 173422 - DNA, 120 bp, Artificial Sequence
  ENSG00000109670_64 (sequence is synthesized)
ttcagctttgagtggttcatggtggtggggtaatagatctcttagtgctcatttgtccatcagcagaaggtatgaagttgcactatctacatcctcaccaaggaatgctgtcgttcacac

SEQ ID NO: 173423 - DNA, 120 bp, Artificial Sequence
  ENSG00000109670_65 (sequence is synthesized)
agccagaaaataagatgtttgtctggtagctaaccaagcttcttggaagacagacctcttgaaagttaatgtttcagttacaaatcactaccagattttcttacatccatgctgatccta

SEQ ID NO: 173424 - DNA, 120 bp, Artificial Sequence
  ENSG00000109670_66 (sequence is synthesized)
aaatactgaggacatgggtttctaaatatgtatcatttcaaatgttgcatttattgtatgttctaaagtagaagtctacaaattataatgtaactaactcatagccattatttctaacca

SEQ ID NO: 173425 - DNA, 120 bp, Artificial Sequence
  ENSG00000109670_67 (sequence is synthesized)
aggtgacatatctaaacatagtacttgaaatgcctcacttaattgctgcaaaataagggattattcatccgtaaaaaaagaaggaaacactgttacatagtatactgtggatgaattttg

SEQ ID NO: 173426 - DNA, 120 bp, Artificial Sequence
  ENSG00000109670_68 (sequence is synthesized)
attttgcttttcccttctagtcatgataaagtatttcttggatgagaaatttgcatttaatgttaaactaactgttaatgctattttttaaatgtatcagtcttctattaatatggctga

SEQ ID NO: 173427 - DNA, 120 bp, Artificial Sequence
  ENSG00000109670_69 (sequence is synthesized)
ctctctggagtgaggcgagagccccgcacagagcgagggagacagcgagctgagctccgggcgctgccgctgccgctgccgccgccgccgccgctgagactgagagcgaaggagcatccg

SEQ ID NO: 173428 - DNA, 120 bp, Artificial Sequence
  ENSG00000109670_70 (sequence is synthesized)
agagatccagtccccctgcactggccgccgccgagaccttcgctctcacctgggccagcgggagccgcggccgcactcctttccccccctcaccttcccggccggcagcggcggctgcac

SEQ ID NO: 173429 - DNA, 120 bp, Artificial Sequence
  ENSG00000109670_71 (sequence is synthesized)
acgccggagccggagccagagccggagcccgagcctgagccggagccggcggcttggggggcagggaggcggctaccacgggccgggagtgggtagctgctccgcggtgagagaacgctg

SEQ ID NO: 173430 - DNA, 120 bp, Artificial Sequence
  ENSG00000109670_72 (sequence is synthesized)
aggaggcgccagagcttctgcctcgtcccgtggggcgtggggcgagacccccaaggtgtagggaggggggtcccagccgcagcgacacatgcgggagccgggagcgggggcggcgccgag

SEQ ID NO: 173431 - DNA, 120 bp, Artificial Sequence
  ENSG00000109670_73 (sequence is synthesized)
cggagccggccgggtccctcgccttgccgccgactcggccacccgcccggggccgtagcatcttgccccggagtgtatgaaccggggccccaaccaagctcggcaaccaccccccggccg

SEQ ID NO: 173432 - DNA, 120 bp, Artificial Sequence
  ENSG00000109670_74 (sequence is synthesized)
ggggggcggggaccccgatgtgaagcggcggctggggcggcggagagaacaggaccgacgccgccgtcctttcctcaccttccccctcccctcagccccctccgggggtcttctcccttg

SEQ ID NO: 173433 - DNA, 120 bp, Artificial Sequence
  ENSG00000109670_75 (sequence is synthesized)
ctccttggctggactccgggaggagttcctagagcccccctcccccgccccagtcccgagggcggcggggccgggggggacccggggggccggccgcagcctccacccagaggaaacttt

SEQ ID NO: 173434 - DNA, 120 bp, Artificial Sequence
  ENSG00000109670_76 (sequence is synthesized)
ctccacccagaggaaactttacaaaaacaaaatccggagtctcccaaacctgactgtcccgggagaagtggccctggacgggcagaagccgcagcctgaaaagacccaggaagaggaaaa

SEQ ID NO: 173435 - DNA, 120 bp, Artificial Sequence
  ENSG00000109670_77 (sequence is synthesized)
gaggagtaccgcgccggagccttccgcagctgccgcttcagtccgaaggaggaagggaaccaacccactttctcggcgccgcggctcttttctaaaagtgattacttccttaggatagat

SEQ ID NO: 173436 - DNA, 120 bp, Artificial Sequence
  ENSG00000109670_78 (sequence is synthesized)
tcccctggcagcgcggaagagacccgggttgccgcctggtttagcgacacgagcaccgcttcttcctcagtaccgcgccggagccttccgcagctgccgcttcagtccgaaggaggaagg

SEQ ID NO: 173437 - DNA, 120 bp, Artificial Sequence
  ENSG00000109670_79 (sequence is synthesized)
aacctgagaaactttacatatctattttaattgtaatgaaactttcctcacagtctttgtattactaaaaattaatcttaagatgtgtaataataaaatgaactagttttttgtcttaca

SEQ ID NO: 173438 - DNA, 120 bp, Artificial Sequence
  ENSG00000109670_80 (sequence is synthesized)
ggccgaagtttttggactcctggtatagacaactgccaaatccaccaacaaacagtatgagctttattacactacaaagccaggactggctatttttggtggtctttgttttctagatga

SEQ ID NO: 173439 - DNA, 120 bp, Artificial Sequence
  ENSG00000109670_81 (sequence is synthesized)
cataaagcacatactctactgtacaaaatacttttgccttcatggtgatgaaaactatggattgagggtcggggtgataccatctttaaagggatgcagctaaaaagtagggactacctg

SEQ ID NO: 173440 - DNA, 120 bp, Artificial Sequence
  ENSG00000109670_82 (sequence is synthesized)
catttcttatctaaagataaccacagttggcatttagtgatatactggctttgtatcatggccaaaagtatctgtaaagaagcttgtgggcatacttttgaaaccttctgaaaataaatg

SEQ ID NO: 173441 - DNA, 120 bp, Artificial Sequence
  ENSG00000109670_83 (sequence is synthesized)
taaagcatttacttcgtgtgtaaaattagaagtgtctatggttggtttgaataatatgagtcaaattataagagcattaaagtttgatactgctatctattaaagtcttaatctcttgca

SEQ ID NO: 173442 - DNA, 120 bp, Artificial Sequence
  ENSG00000109670_84 (sequence is synthesized)
tttttatctttattttttgctttcgtggataaactgcagtgagcatcctctgtataaattttttttttctgttttaggattacttccttaggatagattgccagaagtggagttactggg

SEQ ID NO: 173443 - DNA, 120 bp, Artificial Sequence
  ENSG00000109670_85 (sequence is synthesized)
ggaaactttacaaaaacaaaatccggagtctcccaaacctgactgtcccgggagaagtggccctggacgggcagaagccgcagcctgaaaagacccaggaagaggaaaagaggaggatta

SEQ ID NO: 173444 - DNA, 120 bp, Artificial Sequence
  ENSG00000109674_0 (sequence is synthesized)
agtgcccgcgcagcgttgagttgcacagcggtattctcaccaggccctgcaatcggtgggccacagtgccggccacagagatggtggaaggaccaggctgtactctgaatggagagaaga

SEQ ID NO: 173445 - DNA, 120 bp, Artificial Sequence
  ENSG00000109674_1 (sequence is synthesized)
ttcgcgcgcgggtgctcccgggccaggcggtgaccggcgtgcggggaagcgctctgcggagtctgcagggccgcgccttgcggctcgcagcctccacggttgtggtctccccgcaggctg

SEQ ID NO: 173446 - DNA, 120 bp, Artificial Sequence
  ENSG00000109674_2 (sequence is synthesized)
ctgcactgaataatgattccagccagaatgtcttgagcctgtttaatggatatgtttacagtggcgtggaaactttggggaaggagctctttatgtactttggaccaaaagctttacgga

SEQ ID NO: 173447 - DNA, 120 bp, Artificial Sequence
  ENSG00000109674_3 (sequence is synthesized)
ttcatttcggaatgaaaggcttcatcatgattaatccacttgagtataaatataaaaatggagcttctcctgttttggaagtgcagctcaccaaagatttgatttgtttctttgactcat

SEQ ID NO: 173448 - DNA, 120 bp, Artificial Sequence
  ENSG00000109674_4 (sequence is synthesized)
cagtagaactcagaaactcaatggaaagccaacagagaataagaatgatgaaagaattagatgtatgttcacctgaatttagtttcttgagagcagaaagtgaagttaaaaaacagaaag

SEQ ID NO: 173449 - DNA, 120 bp, Artificial Sequence
  ENSG00000109674_5 (sequence is synthesized)
gccggatgctaggtgatgtgctaatggatcagaacgtattgcctggagtagggaacatcatcaaaaatgaagctctctttgacagtggtctccacccagctgttaaagtttgtcaattaa

SEQ ID NO: 173450 - DNA, 120 bp, Artificial Sequence
  ENSG00000109674_6 (sequence is synthesized)
cagatgaacagatccatcacctcatgaaaatgatacgtgatttcagcattctcttttacaggtgccgtaaagcaggacttgctctctctaaacactataaggtttacaagcgtcctaatt

SEQ ID NO: 173451 - DNA, 120 bp, Artificial Sequence
  ENSG00000109674_7 (sequence is synthesized)
gtggtcagtgccactgcagaataactgtgtgccgctttggggacaataacagaatgacatatttctgtcctcactgtcaaaaagaaaatcctcaacatgttgacatatgcaagctaccga

SEQ ID NO: 173452 - DNA, 120 bp, Artificial Sequence
  ENSG00000109674_8 (sequence is synthesized)
ctagaaatactataatcagttggacatctagcagggtggatcatgttatggactccgtggctcggaagtcggaagagcactggacctgtgtggtgtgtactttaatcaataagccctctt

SEQ ID NO: 173453 - DNA, 120 bp, Artificial Sequence
  ENSG00000109674_9 (sequence is synthesized)
ttaatgaagtacccgtgtaatacttttggaaaacctcatacagaagtcaagatcaacagaaaaactgcatttggaactacaactcttgtcttgactgattttagcaataaatccagtact

SEQ ID NO: 173454 - DNA, 120 bp, Artificial Sequence
  ENSG00000109674_10 (sequence is synthesized)
ttggaaagaaaaacaaagcaaaaccagatactagatgaggagtttcaaaactctcctcctgctagtgtttgtttgaatgatatacagcacccctccaagaagacaacaaacgatataact

SEQ ID NO: 173455 - DNA, 120 bp, Artificial Sequence
  ENSG00000109674_11 (sequence is synthesized)
caaccatccagcaaagtaaacatatcacctacaatcagttcagaatctaaattatttagtccagcacataaaaaaccgaaaacagcccaatactcatcaccagagcttaaaagctgcaac

SEQ ID NO: 173456 - DNA, 120 bp, Artificial Sequence
  ENSG00000109674_12 (sequence is synthesized)
cctggatattctaacagtgaacttcaaattaatatgacagatggccctcgtaccttaaatcctgacagccctcgctgcagtaaacacaaccgcctctgcattctccgagttgtggggaag

SEQ ID NO: 173457 - DNA, 120 bp, Artificial Sequence
  ENSG00000109674_13 (sequence is synthesized)
gatggggaaaacaagggcaggcagttttatgcctgtcctctacctagagaagcacaatgtggattttttgaatgggcagatttgtccttcccattctgcaaccatggcaagcgttccacc

SEQ ID NO: 173458 - DNA, 120 bp, Artificial Sequence
  ENSG00000109674_14 (sequence is synthesized)
atgaaaacagtattgaagattggacctaacaatggaaagaatttttttgtgtgtcctcttgggaaggaaaaacaatgcaattttttccagtgggcagaaaatgggccaggaataaaaatt

SEQ ID NO: 173459 - DNA, 120 bp, Artificial Sequence
  ENSG00000109674_15 (sequence is synthesized)
attcctggatgctaatatctgtagattctctggcatttagtctcttcaaactgtgtataatgtttggtcctcctctgtttcatagaaaagtcatagaatatctatgatacattgaaaagt

SEQ ID NO: 173460 - DNA, 120 bp, Artificial Sequence
  ENSG00000109674_16 (sequence is synthesized)
tactgcaatatttgagaactgttctttttttttcttgtgtgtgccatctttccattgttggctacgtcttttcttttgccttgatgaacgttctatgtatttcatcggatatacagcata

SEQ ID NO: 173461 - DNA, 120 bp, Artificial Sequence
  ENSG00000109674_17 (sequence is synthesized)
ttccatttaggatgtgtatttaatgcatttagtaatgacgataaagtgtttttagtatgcttttagtctcttgtaactggggagaagcagtgttttttttttaggaaaggattatgcgac

SEQ ID NO: 173462 - DNA, 120 bp, Artificial Sequence
  ENSG00000109674_18 (sequence is synthesized)
ttttttaggaaaggattatgcgacacaataaaataagatattctgtctgtagtgaatacatttctcatgtactaacactatttataatatatgattaaagatatttcttgttttattaaa

SEQ ID NO: 173463 - DNA, 84 bp, Artificial Sequence
  ENSG00000109674_19 (sequence is synthesized)
tctcaagttatctgcccacctccgcctctcaaggtgctgggatttacaggcttgagccaccatgcccggctggttgcattaagt

SEQ ID NO: 173464 - DNA, 120 bp, Artificial Sequence
  ENSG00000109674_20 (sequence is synthesized)
tacaggcttgagccaccatgcccggctggttgcattaagttttaagaagacagaaattgtcccttggtaaggaagttgaattacttttggtaacatgaatcaaaccctaaaagactatta

SEQ ID NO: 173465 - DNA, 120 bp, Artificial Sequence
  ENSG00000109674_21 (sequence is synthesized)
tagtagtctgtctcccttcccttctctagattataatgttagagaagggaaggaaatgaaaaacgtaatttcctacatgtatgaaaagttgggttttttttttttctgacaataaccata

SEQ ID NO: 173466 - DNA, 120 bp, Artificial Sequence
  ENSG00000109680_0 (sequence is synthesized)
agtgtaataaggtcccggagaagtgtcactggccctgagtgggacccggtagcccgttcgctccgcgccggcggcctgtccccgcggcttggcgggctagggcaggggaaatgttgcagg

SEQ ID NO: 173467 - DNA, 120 bp, Artificial Sequence
  ENSG00000109680_1 (sequence is synthesized)
aggagtcggacctctctctcattattgcccagatagtccaaaagctcaagggctccaatttgtactctcagctggaacggcaggcctgggccagtcttcagagacctgagattaaacttg

SEQ ID NO: 173468 - DNA, 120 bp, Artificial Sequence
  ENSG00000109680_2 (sequence is synthesized)
aatcactgaaagaagatattaaggaattctttaaaatatcaggttgggagaagaaacttcagaatgctgtttatagtgaactgagtgtgtttcctttacctagtcatcctgctgcacctc

SEQ ID NO: 173469 - DNA, 120 bp, Artificial Sequence
  ENSG00000109680_3 (sequence is synthesized)
ctgaacatcttaaagaacctttggtatacatgaggaaagcacagggaagttgggaaaaaagaattttgaagagtttaaatagtatgtgcactgaactgagtatcccactggcacgaaaga

SEQ ID NO: 173470 - DNA, 120 bp, Artificial Sequence
  ENSG00000109680_4 (sequence is synthesized)
ggccagttggagaacagaaagaacttcttaataaatggaatgaaatgggaactgatgaaccagatttaagccttttcagacctgtttatgcacctaaggattttcttgaggtattaatta

SEQ ID NO: 173471 - DNA, 120 bp, Artificial Sequence
  ENSG00000109680_5 (sequence is synthesized)
atcttcgcaacccaaattatgaaaacggtgattctcttagtttcaggactcatttgggtttaattcaagttccactgaaagtaaaagacatccctgaattgaaagaatgctttgtggaac

SEQ ID NO: 173472 - DNA, 120 bp, Artificial Sequence
  ENSG00000109680_6 (sequence is synthesized)
ttggcttaaatataggacaactgggtatagatgattctacacaagtgcctcctgaactttttgaaaatgaacatgtacgtattgggcaaaaagttctagcagaacaagatagtgctgctg

SEQ ID NO: 173473 - DNA, 120 bp, Artificial Sequence
  ENSG00000109680_7 (sequence is synthesized)
ctcaacagtacatcagacaaggaagtcccacggcactgagagctgaattgtgggctctcattttgaatatttccagccaacctgaggatgtcttgtattatgagcagcttaagaccaatg

SEQ ID NO: 173474 - DNA, 120 bp, Artificial Sequence
  ENSG00000109680_8 (sequence is synthesized)
tgatacaacatgaccttttggtggacagtctaatctataaagatgtgaagttgacagcaagcaatgatgattattattttgtatttgaagattatttatatcaggtattactttgttttt

SEQ ID NO: 173475 - DNA, 120 bp, Artificial Sequence
  ENSG00000109680_9 (sequence is synthesized)
cccgggatacatctgtgttgagtcactttgcattcaacagtgcctcgccaccaaaatcatacataagaggaaaactaggactggaagaatatgctgtcttttacccaccaaatggtgtta

SEQ ID NO: 173476 - DNA, 120 bp, Artificial Sequence
  ENSG00000109680_10 (sequence is synthesized)
tcccttttcatggattttcaatgtatgttgcaccactttgttttctataccatgaaccttccaaattgtatcagatattccgtgagatgtatgtgcgttttttcttcagactccattcca

SEQ ID NO: 173477 - DNA, 120 bp, Artificial Sequence
  ENSG00000109680_11 (sequence is synthesized)
tctcttctcatccttctggtattgtgtcactctgtctgctgtttgaaactcttcttcaaacttatcttccccaactcttttatcatctacgagaaattggggctcaaccacttcgcatat

SEQ ID NO: 173478 - DNA, 120 bp, Artificial Sequence
  ENSG00000109680_12 (sequence is synthesized)
ctctggaaattcttgctgtgctggcagctgccgtgtttgctttccgagcagtgaacctgatggaggtgacatcactggctgcagctgaagcagttcttgctgacctttctactttaaaag

SEQ ID NO: 173479 - DNA, 120 bp, Artificial Sequence
  ENSG00000109680_13 (sequence is synthesized)
ttatgcctcttcttcagatttttctgtttgctactgtcacctgatcttcttcacagtcactggcaacacatctagtttttcattagaaacaaatcatgaactatgcaaactctgcataaa

SEQ ID NO: 173480 - DNA, 120 bp, Artificial Sequence
  ENSG00000109680_14 (sequence is synthesized)
accaaaatgaaactttgcatataagccaataaagatcatgttccctcttcagttaaacctaagtagtttctcactttttgaaacaataactctgcaccaaatattgcatcgcatgctgct

SEQ ID NO: 173481 - DNA, 120 bp, Artificial Sequence
  ENSG00000109680_15 (sequence is synthesized)
gattttcaagagagaagcaataaacacaacttctgctaaattgagcattatatatataatattataatatatatataatcctgacttgtcaatggcatgtaataatatatgcaataagaa

SEQ ID NO: 173482 - DNA, 120 bp, Artificial Sequence
  ENSG00000109680_16 (sequence is synthesized)
ctaaagatactgtaataaacttcaagaggtaatgtagcttcttggataattcttttatgtcagtttataaatttatctctagataatgtattgttttgtctcataaattgctcctcacta

SEQ ID NO: 173483 - DNA, 120 bp, Artificial Sequence
  ENSG00000109680_17 (sequence is synthesized)
agagccaggggtggggtagggtgtgagaacacttgaaaaagataatgtttttaagtaggaattcaaaagttgcttaaatggtgttttaagcaactttttacaccccagggattttctaca

SEQ ID NO: 173484 - DNA, 120 bp, Artificial Sequence
  ENSG00000109680_18 (sequence is synthesized)
tttctctccattttatttctctctttaaacatctctactggggaaggtcgaatacaattgtctccatttgacaatattttatgcttgactctctgaaagtcagaaaattataggtgatcc

SEQ ID NO: 173485 - DNA, 120 bp, Artificial Sequence
  ENSG00000109680_19 (sequence is synthesized)
cttttcacttctcaaccttccttctcttgcttagaagacttgacattgccgatgcttgttgccagcttctgttactttgtaactatacaaggaagacacccaagagaatgaggagtcaaa

SEQ ID NO: 173486 - DNA, 120 bp, Artificial Sequence
  ENSG00000109680_20 (sequence is synthesized)
accccattcacttttgctgaagcttggtttaacaagatttacttctagggcagagcagctgagagagattaaaagtaggtagtaggcattcattctaaactgcagacattatgcaaggca

SEQ ID NO: 173487 - DNA, 120 bp, Artificial Sequence
  ENSG00000109680_21 (sequence is synthesized)
tcagccttattttgggctttattataagtgaagggtcttattttgtattacttcctaaagacctaccatttctgtaatatggaataatagtatgtggggtaaaaagtccaaaaactattg

SEQ ID NO: 173488 - DNA, 120 bp, Artificial Sequence
  ENSG00000109680_22 (sequence is synthesized)
tcctttgattttagtttcaaatttaagatgctgatcacttcactaaaactgtaaatcagtagattgatacgcttattgattgcctagaattttattcagttttacccaaatgtattttat

SEQ ID NO: 173489 - DNA, 120 bp, Artificial Sequence
  ENSG00000109680_23 (sequence is synthesized)
gagtcttttattttggcagtatgtattaggaaaaatgcttgttgatttactaagagctgaataataatttattccatgattgattcttaataaaccccattttattgcttttgaaggtga

SEQ ID NO: 173490 - DNA, 120 bp, Artificial Sequence
  ENSG00000109680_24 (sequence is synthesized)
agcagagaattcacggacagaagaacaacacagcagggcagagagccacagagccactagcagatgtcagggagatgaagagaggggccacagtaaaataagactctgggatgaaggcca

SEQ ID NO: 173491 - DNA, 120 bp, Artificial Sequence
  ENSG00000109680_25 (sequence is synthesized)
tgacatcactggctgcagctgaagtaaggataagtttcactcagatgggatggaaatagtttctgagagattgccaggctgtcattttagtgtctgttgcataggacacgcgttacttgt

SEQ ID NO: 173492 - DNA, 120 bp, Artificial Sequence
  ENSG00000109680_26 (sequence is synthesized)
agccaggttttttaactcgggtaaaacctgttaagttctgagctaataatacttaaggattcaaatttctttaattacttgagaaaagtcttcttatgaaggagtaataaacaagattat

SEQ ID NO: 173493 - DNA, 120 bp, Artificial Sequence
  ENSG00000109680_27 (sequence is synthesized)
tataggaaaccattataaccatatgggaaaccagatacctggtaattttaatggaaacaattggggtttatgttgcatttttttatcgttcatgtccatgcattattttcacagaagaaa

SEQ ID NO: 173494 - DNA, 120 bp, Artificial Sequence
  ENSG00000109680_28 (sequence is synthesized)
gagtttcccagaaatgatagtaaagagaagttccaggacaaaggctgtacaactggactgaaacacaacaatcctagattggagcaggaggttggaaggttccaggatggatgcctgcaa

SEQ ID NO: 173495 - DNA, 120 bp, Artificial Sequence
  ENSG00000109680_29 (sequence is synthesized)
ccaggggctgcagtttgattttgccacctttccttttcgttaacaaaagtgctatttgacatatattttatgtgtagttccatgaactaaacttcattttgtttggggaatctggaaaga

SEQ ID NO: 173496 - DNA, 120 bp, Artificial Sequence
  ENSG00000109680_30 (sequence is synthesized)
atctcacactttgtttgaggctctacacaacaaatcactggattgaaattcctgcggggggggcattctggaagggactttggaccccgctcaagaagtcagtccccaagagtggagtcc

SEQ ID NO: 173497 - DNA, 120 bp, Artificial Sequence
  ENSG00000109680_31 (sequence is synthesized)
ggacagaagaacaacacagcagggcagagagccacagagccactagcagatgtcagggagatgaagagaggggccacagtaaaataagactctgggatgaaggtatgaccaggacaaggg

SEQ ID NO: 173498 - DNA, 120 bp, Artificial Sequence
  ENSG00000109680_32 (sequence is synthesized)
ttttgttgatatttcagtagttctgttcctttttattgctgagtaatatttcagtgtttgaatgtacaatggcttgtttattcatcattgtgtgaagggcattgggttgctttctggttt

SEQ ID NO: 173499 - DNA, 120 bp, Artificial Sequence
  ENSG00000109680_33 (sequence is synthesized)
tagagattataagtaaagctgatatatacattctagtatacgattttgcttggatatttgtttctttttttcttggataaatacctaggattggaattgctgacttgtatggccagtctt

SEQ ID NO: 173500 - DNA, 120 bp, Artificial Sequence
  ENSG00000109684_0 (sequence is synthesized)
cttactaatttccagtgccccaaggtctctgcactgccgcccctcctcacaggagacggacacctcagcctagatcccttggtgctctccacgctgttcaggctgaattgaagatccctc

SEQ ID NO: 173501 - DNA, 120 bp, Artificial Sequence
  ENSG00000109684_1 (sequence is synthesized)
ttacccgccaggtgccaagaactatgaacaggcagggcaatagaaagacaactaaagaaggatccaacgatttgaaattccagaacttcagtctgccaaaaaacaggtcatggcctcgca

SEQ ID NO: 173502 - DNA, 120 bp, Artificial Sequence
  ENSG00000109684_2 (sequence is synthesized)
tcaatagtgccacaggccagtaccagaggatgaacaagcctcttctagactgggaaagaaactttgctgcagtcctggatggagcaaaaggccacagtgatgatgactatgatgaccctg

SEQ ID NO: 173503 - DNA, 120 bp, Artificial Sequence
  ENSG00000109684_3 (sequence is synthesized)
agcttcggatggaagagacatggcagtcgattaaaattttaccagcccggcctataaaggaatctgaatatgcagatacacactatttcaaggttgcaatggacactccccttccgttag

SEQ ID NO: 173504 - DNA, 120 bp, Artificial Sequence
  ENSG00000109684_4 (sequence is synthesized)
acaccaggacctctatctccattggacagccgacctggaacacacagacgaggttggaaagagtggacaaacccatttccaaggacgtcagaagccaaaacattaaaggagatgcatccg

SEQ ID NO: 173505 - DNA, 120 bp, Artificial Sequence
  ENSG00000109684_5 (sequence is synthesized)
taagaaagaacaagattcctttaccacctcctcggcctctcataacacttccgaagaagtaccaacccttgccccctgagccggagagcagcaggccacctttatctcagagacacacct

SEQ ID NO: 173506 - DNA, 120 bp, Artificial Sequence
  ENSG00000109684_6 (sequence is synthesized)
ttccagaagtccagagaatgcccagtcagataagcttaagggacttaagtgaggtccttgaagcagaaaaagttcctcataaccagaggaagcctgaatcaactcatctgttagaaaacc

SEQ ID NO: 173507 - DNA, 120 bp, Artificial Sequence
  ENSG00000109684_7 (sequence is synthesized)
aaaatactcaagagattccacttgccattagcagttcttcattcacgacaagcaaccacagtgtgcaaaacagagatcatagaggaggcatgcagccctgttctcctcagagatgccagc

SEQ ID NO: 173508 - DNA, 120 bp, Artificial Sequence
  ENSG00000109684_8 (sequence is synthesized)
ctccagccagctgcagccctcacgaaaatatactgccctataaatacacaagctggagaccacctttccccaaaaggtctgatagaaaggatgtccagcacaatgaatggtacattggag

SEQ ID NO: 173509 - DNA, 120 bp, Artificial Sequence
  ENSG00000109684_9 (sequence is synthesized)
aatacagccgccaggcagtggaagaggcattcatgaaggagaacaaggatggtagtttcttggtccgagattgttccacaaaatccaaggaagagccctatgttttggctgtgttttatg

SEQ ID NO: 173510 - DNA, 120 bp, Artificial Sequence
  ENSG00000109684_10 (sequence is synthesized)
agaacaaagtctacaatgtaaaaatacgcttcctggagaggaatcagcagtttgccctggggacaggactcagaggagatgagaagtttgattcagtagaagacatcatcgaacactaca

SEQ ID NO: 173511 - DNA, 120 bp, Artificial Sequence
  ENSG00000109684_11 (sequence is synthesized)
agaattttcccattatactaattgatgggaaagataaaactggggtccacaggaaacagtgtcacctcactcagccactccctctcaccagacacctcttgcctctgtagcctggtcttt

SEQ ID NO: 173512 - DNA, 120 bp, Artificial Sequence
  ENSG00000109684_12 (sequence is synthesized)
gtgttatctttggtttactggattcagcgcttccattgttttcattgatttcaaaagtttattttctgtgccttcaagggacaacttttttaactttggagaaaagaaaaacactctata

SEQ ID NO: 173513 - DNA, 120 bp, Artificial Sequence
  ENSG00000109684_13 (sequence is synthesized)
acagagagtggaaaatcactcacggttttgaaagttcaaaccacagagaaaatatttataacatgcaaaaaataaaaacattctagtaactggccactggaaaataaataaaaataaaaa

SEQ ID NO: 173514 - DNA, 120 bp, Artificial Sequence
  ENSG00000109684_14 (sequence is synthesized)
ctagggttttaaaagtatcttctaaaaaacaacaacaaaaaatactataaacatagccattatgctcatgatacaggcgagcagcaaagggcaccagaagctgttgcttaaatgtttgca

SEQ ID NO: 173515 - DNA, 120 bp, Artificial Sequence
  ENSG00000109684_15 (sequence is synthesized)
gtcagtgcaagacaagtctatgggaaattcccaaatctgtgctctttacaggacactgcgctgcctttatgtcagttgttgggccttacatatatacaatgtgtggatgatttcttacac

SEQ ID NO: 173516 - DNA, 120 bp, Artificial Sequence
  ENSG00000109684_16 (sequence is synthesized)
cgaaatcgcgccactgcactccaatccagcctggggacagagagactccgtctcaaaaaaaaaaaaaggtgttgggttggtgaatattagctctcttttattgtaatcctagaaattcaa

SEQ ID NO: 173517 - DNA, 120 bp, Artificial Sequence
  ENSG00000109684_17 (sequence is synthesized)
gtatagggaagaaatgtggtatggaaaaccagcaattgtgaatgtcaccttgaagacagaaactgaaaatcctctgactagggtgtgaaacggtcatgggaccagcctccagcatcatct

SEQ ID NO: 173518 - DNA, 120 bp, Artificial Sequence
  ENSG00000109684_18 (sequence is synthesized)
gcttcaagtagctttaagtcaaatggaattaacacattcatagtacagagctcagattatatcctacactagccttcaggcaagcatatgtctgagggaaactaaaaattgtattaacaa

SEQ ID NO: 173519 - DNA, 120 bp, Artificial Sequence
  ENSG00000109684_19 (sequence is synthesized)
ttccaattatggacttccattcaaagacagagaaaaactgtcctcaaattagtgctaattcttgcagtaacgttgcacaggccatgatattattccctgtagaggttaagaggatttaat

SEQ ID NO: 173520 - DNA, 120 bp, Artificial Sequence
  ENSG00000109684_20 (sequence is synthesized)
ggctccatgcaagctcatcttcccaggtacattctctgcgctgtgacattttacaatcaagttgaaaagctaatttaaaaaaaaagagagagagagagagaaagatagaaacaatttgaa

SEQ ID NO: 173521 - DNA, 120 bp, Artificial Sequence
  ENSG00000109684_21 (sequence is synthesized)
aatacagatttaccaccttaaaataaataaactcttctagtgggaataagcttttttaaaaaacatactgtctgtcgaaaataacagtatatcatgatgtcaaatgctaccaaagcttac

SEQ ID NO: 173522 - DNA, 120 bp, Artificial Sequence
  ENSG00000109684_22 (sequence is synthesized)
aaaggaaattcatagagtatttatgtaattgtagcattgatgcagaaagaaaaccaaaaataattaaaaggcaatagaagcaaatgaaaacaataaaaacaatgtgcaggattatctctt

SEQ ID NO: 173523 - DNA, 120 bp, Artificial Sequence
  ENSG00000109684_23 (sequence is synthesized)
ttgtaagacagcagacaatgagctctctgggaaaagctcttagcatctacccactatccaaatacctgctcaggtgttctcctttcacaaggtcaatgtgaagtgatgcctataagttac

SEQ ID NO: 173524 - DNA, 120 bp, Artificial Sequence
  ENSG00000109684_24 (sequence is synthesized)
atcaggagcatttaatgaagaagctatttgtaaagctggaacttttgagacccagctgagcctatcgtagagtatgcctgcagaggattacatagaaccaagagacaagagtgtttaaat

SEQ ID NO: 173525 - DNA, 120 bp, Artificial Sequence
  ENSG00000109684_25 (sequence is synthesized)
tggagcttggatacgaaagaactcactggtccggtcaaagctaaaagctgtatggttgctggtcattctctactggaattcaacaagccagggacagtatggaaacaaggactttacaga

SEQ ID NO: 173526 - DNA, 120 bp, Artificial Sequence
  ENSG00000109684_26 (sequence is synthesized)
agagctccaggctcacattaagaaggaatctgaccctcaccctaaaaagctattgggagattactgatacctccaactcactgattcattgaggccatgccattcaatgctatgttctca

SEQ ID NO: 173527 - DNA, 120 bp, Artificial Sequence
  ENSG00000109684_27 (sequence is synthesized)
agaaatgtctatgagtcctctcaaccattgctgttgataaaataggtgaatgtcaagtgggggttagcatttgataaggtgtacgtttgaaataatattttatcgtctcttgttcacaaa

SEQ ID NO: 173528 - DNA, 120 bp, Artificial Sequence
  ENSG00000109684_28 (sequence is synthesized)
tacaacatataattccaagaagaaaaaagaagtagaaattcagcatccttaagatgacagcaagaatgaggggaaaaggaagaaaaaaaagaaattaaacatcttgcaataaaaagctta

SEQ ID NO: 173529 - DNA, 120 bp, Artificial Sequence
  ENSG00000109684_29 (sequence is synthesized)
caatatttttgtgtatttgaacacttctgtaaaaaatataaaatggaaaatactgacatgggctgcttctggtgattggggtttgagggattgggtgtcgggttttctagaactcagaca

SEQ ID NO: 173530 - DNA, 120 bp, Artificial Sequence
  ENSG00000109684_30 (sequence is synthesized)
ccaggacaaagttagaagtgcaaacactgattggaggttaatgtttgagaaagataaaagggagaagaaacagaagtatgggtatggggtgggctttcaggctcccacctgtgagaggga

SEQ ID NO: 173531 - DNA, 120 bp, Artificial Sequence
  ENSG00000109684_31 (sequence is synthesized)
agaggggaggtgtggggagtgaggagaaaaagcatgagattcagacacagctctgggagagttttggccagctcatagtgaggcccaaagcaaagtttgcccagagaggagacagtgtta

SEQ ID NO: 173532 - DNA, 120 bp, Artificial Sequence
  ENSG00000109684_32 (sequence is synthesized)
tgctgggcagtaatgtctgggtcttagtgccccatcctgttaagtcattgtctggggctatcctgggaaaaagaaaaacaacaaaaaaaaaagacctgcaaatgctgtggccaatccaga

SEQ ID NO: 173533 - DNA, 120 bp, Artificial Sequence
  ENSG00000109684_33 (sequence is synthesized)
aggcgcagctggacgctgtccactaacttgctggccagcaagttatttcaatggagactcaagagacccacctctggcctgccacagcaacatcctgaattcactgttttcagtgttgat

SEQ ID NO: 173534 - DNA, 120 bp, Artificial Sequence
  ENSG00000109684_34 (sequence is synthesized)
tgtagtaaggacaatcacatttacattttgcttgtaatggatgattaaataataagagtatataaattcgattgtatttgtttcttacaacacttctgtaaagaagagagggcagctatt

SEQ ID NO: 173535 - DNA, 120 bp, Artificial Sequence
  ENSG00000109684_35 (sequence is synthesized)
tctaatgcattttataattgaggaaattgtacctcattggccaaaatctcacagtgacatagtcgcgactggaaccaaggtctccatatgcaattatcctattcatggtctacctgcttt

SEQ ID NO: 173536 - DNA, 120 bp, Artificial Sequence
  ENSG00000109684_36 (sequence is synthesized)
attagatctgtaattgaatattcaatgatttggatttggcatgcccaaattccagtgttttaatcccttttcaaccattacctcacgtttagtttaaaagtatcacttgatatctgattt

SEQ ID NO: 173537 - DNA, 120 bp, Artificial Sequence
  ENSG00000109684_37 (sequence is synthesized)
caatagagtaatagaattttagctttatccaattacagcatttatgctttccagatattttttggactaaataattctcattctgtataaatgtgcatagccctcatcattagtcatata

SEQ ID NO: 173538 - DNA, 120 bp, Artificial Sequence
  ENSG00000109684_38 (sequence is synthesized)
ttgtgttagcacctttgtgtactgcatgtgtattcattactaagcactattgtagatgttgaaaatagagcagtgaataagagagatagatgacaaataaatatacaaacaaataagata

SEQ ID NO: 173539 - DNA, 120 bp, Artificial Sequence
  ENSG00000109684_39 (sequence is synthesized)
atctaagtcagtttcccattactggattggatttctattttaacacttatttctgagtacttgtggggtgatgccaacattaaatgttttgaggaagctcctttgagatggctttgaaaa

SEQ ID NO: 173540 - DNA, 120 bp, Artificial Sequence
  ENSG00000109684_40 (sequence is synthesized)
gtcctaagtgagaaaatttaaaattttcccaaacttatttatgtggggtgtgcatgtgtgtgcctgtgcctgtgtgcgtgtgtgtgtgtgtgtttttaagtaaccgcatcatggctgtaa

SEQ ID NO: 173541 - DNA, 120 bp, Artificial Sequence
  ENSG00000109684_41 (sequence is synthesized)
tcagttaagtctcctgttctaattactacggaggaatcaaatgaaccccattgtcgaatgtagccaattatgtatgtgtgtacacaaatacaaatttttatgatagcctatattgtatat

SEQ ID NO: 173542 - DNA, 120 bp, Artificial Sequence
  ENSG00000109684_42 (sequence is synthesized)
tagcattatatttgtatatcttttttattctgagcaatatttgttctagctaagcacatttacattcataatttacagccttactaatgtaaataaaagtaaatatgtaattgaatgtta

SEQ ID NO: 173543 - DNA, 120 bp, Artificial Sequence
  ENSG00000109684_43 (sequence is synthesized)
gacaaagtcatgccagtccttccatactggcagttttaatttttacgaaaccacattcttcacgatgcctgatgctgtgcagaagagcgtagtctagaagaaagaacacggattttggag

SEQ ID NO: 173544 - DNA, 68 bp, Artificial Sequence
  ENSG00000109684_44 (sequence is synthesized)
tttccagaagtccagagaatgcccagtcagataagcttaagggacttaagtgagccataaaataggga

SEQ ID NO: 173545 - DNA, 75 bp, Artificial Sequence
  ENSG00000109685_0 (sequence is synthesized)
tagaaccactggtaactcttaactgtgttctaagaacggaagcatctgggctggatggaatttagcatcaagcag

SEQ ID NO: 173546 - DNA, 120 bp, Artificial Sequence
  ENSG00000109685_1 (sequence is synthesized)
acggaagcatctgggctggatggaatttagcatcaagcagagtcccctttctgttcagagtgttgtaaagtgcataaagatgaagcaggcaccagaaatcctcggcagtgccaacgggaa

SEQ ID NO: 173547 - DNA, 120 bp, Artificial Sequence
  ENSG00000109685_2 (sequence is synthesized)
gactccgagctgcgaggtgaaccgcgagtgttctgtgttcctcagcaaagcccagctctccagtagcctgcaggagggggtcatgcagaagtttaacggccacgacgccctgccctttat

SEQ ID NO: 173548 - DNA, 120 bp, Artificial Sequence
  ENSG00000109685_3 (sequence is synthesized)
tccagccgacaagctgaaagatcttacttcccgggtgtttaatggagaacccggcgcacacgatgccaaactgcgttttgagtcccaggaaatgaaagggattgggacaccccctaacac

SEQ ID NO: 173549 - DNA, 120 bp, Artificial Sequence
  ENSG00000109685_4 (sequence is synthesized)
tacccctatcaaaaatggctctccagaaattaagctgaaaatcaccaaaacatacatgaatgggaagcctctctttgaatcttccatttgtggtgacagtgctgctgatgtgtctcagtc

SEQ ID NO: 173550 - DNA, 120 bp, Artificial Sequence
  ENSG00000109685_5 (sequence is synthesized)
agaagaaaatggacaaaaaccagaaaacaaggcgagaaggaacaggaagaggagcataaaatatgactccttgctggagcagggccttgtcgaagcagctcttgtgtctaagatctcaag

SEQ ID NO: 173551 - DNA, 120 bp, Artificial Sequence
  ENSG00000109685_6 (sequence is synthesized)
tccttcagataaaaagattccagctaagaaagagtcttgtccaaacactggaagagacaaagaccacctgttgaaatacaacgttggtgatttggtgtggtccaaagtgtcgggttaccc

SEQ ID NO: 173552 - DNA, 120 bp, Artificial Sequence
  ENSG00000109685_7 (sequence is synthesized)
ttggtggccttgcatggtttctgcagatccactccttcacagctataccaaacttaaaggtcagaaaaagagtgcacgccagtatcacgtacagttctttggtgacgccccagaaagagc

SEQ ID NO: 173553 - DNA, 120 bp, Artificial Sequence
  ENSG00000109685_8 (sequence is synthesized)
ttggatatttgagaagagcctcgtagcttttgaaggagaaggacagtttgaaaaattatgccaggaaagtgccaagcaggcacccacgaaagctgagaaaattaagctattgaaaccaat

SEQ ID NO: 173554 - DNA, 120 bp, Artificial Sequence
  ENSG00000109685_9 (sequence is synthesized)
ttcagggaaattgagggcccagtgggaaatgggcattgttcaagcagaagaagctgcaagcatgtcagtggaggagcggaaagccaagttcacctttctctatgtgggggaccagcttca

SEQ ID NO: 173555 - DNA, 120 bp, Artificial Sequence
  ENSG00000109685_10 (sequence is synthesized)
tctcaaccctcaagtagccaaggaggctggcattgctgcagagtctttgggagaaatggcagaatcctcaggagtcagtgaagaagctgctgaaaaccccaagtctgtgagagaagagtg

SEQ ID NO: 173556 - DNA, 120 bp, Artificial Sequence
  ENSG00000109685_11 (sequence is synthesized)
cattcccatgaagagaaggcggagggccaaactgtgtagctctgcagagaccctggagagtcaccccgacatagggaagagtactcctcaaaagacggcagaggctgaccccagaagagg

SEQ ID NO: 173557 - DNA, 120 bp, Artificial Sequence
  ENSG00000109685_12 (sequence is synthesized)
agtagggtctcctcctgggaggaagaagaccacagtctccatgccacgaagcaggaagggagatgcagcatcccagtttttggtcttctgtcaaaaacacagggatgaggtggtagctga

SEQ ID NO: 173558 - DNA, 120 bp, Artificial Sequence
  ENSG00000109685_13 (sequence is synthesized)
gcacccagatgcttcaggtgaggagattgaagagctgctcaggtcacagtggagtctgctgagtgagaagcagagagcacgctacaacaccaagtttgccctggtggcccctgtccaggc

SEQ ID NO: 173559 - DNA, 120 bp, Artificial Sequence
  ENSG00000109685_14 (sequence is synthesized)
tgaagaagactctggtaatgtaaatgggaaaaaaagaaaccacacaaagaggatacaggaccctacagaagatgctgaagctgaggacacacccaggaaaagactcaggacggacaagca

SEQ ID NO: 173560 - DNA, 120 bp, Artificial Sequence
  ENSG00000109685_15 (sequence is synthesized)
cagtcttcggaagagagacacaatcactgacaaaacggccagaacaagctcttacaaggccatggaggcagcctcctcgctcaagagccaggcagcaacgaaaaatctgtctgatgcatg

SEQ ID NO: 173561 - DNA, 120 bp, Artificial Sequence
  ENSG00000109685_16 (sequence is synthesized)
taaaccactgaagaagcgaaatcgggcttccacggcagcatcttcagctcttgggtttagcaaaagttcatctccttctgcatccttaactgagaatgaggtctcggacagcccgggaga

SEQ ID NO: 173562 - DNA, 120 bp, Artificial Sequence
  ENSG00000109685_17 (sequence is synthesized)
cgagccctcggagtccccatacgaaagtgcagacgaaacacaaactgaagtatctgtctcatccaaaaagtctgagcgaggagtgactgccaaaaaggagtatgtgtgccagctgtgtga

SEQ ID NO: 173563 - DNA, 120 bp, Artificial Sequence
  ENSG00000109685_18 (sequence is synthesized)
gaagccgggcagcctcctgctctgtgaaggaccctgctgcggagctttccacctcgcctgccttgggctttcccggaggccagaagggaggttcacctgcagcgagtgtgcctcagggat

SEQ ID NO: 173564 - DNA, 120 bp, Artificial Sequence
  ENSG00000109685_19 (sequence is synthesized)
tcactcatgtttcgtgtgtaaagagagcaagacagatgttaagcgctgtgtggtaactcagtgtggaaaattttaccatgaggcttgtgtgaaaaaataccctctgactgtatttgagag

SEQ ID NO: 173565 - DNA, 120 bp, Artificial Sequence
  ENSG00000109685_20 (sequence is synthesized)
ccgaggtttccgctgccccctccacagctgtgtgagctgccatgcttccaacccttcaaacccaaggccgtcaaaaggtaaaatgatgcggtgtgtccgctgccccgttgcctatcacag

SEQ ID NO: 173566 - DNA, 120 bp, Artificial Sequence
  ENSG00000109685_21 (sequence is synthesized)
cggggatgcttgtctggcagcaggatgctcagtgatcgcctccaacagcatcatctgcactgcccacttcactgctcggaaggggaagcgacaccacgcccacgtcaacgtgagctggtg

SEQ ID NO: 173567 - DNA, 120 bp, Artificial Sequence
  ENSG00000109685_22 (sequence is synthesized)
cttcgtgtgctccaaaggggggagccttctgtgctgtgagtcctgcccagcggccttccaccctgactgcctgaacatcgagatgcctgacggcagctggttctgcaatgactgcagggc

SEQ ID NO: 173568 - DNA, 120 bp, Artificial Sequence
  ENSG00000109685_23 (sequence is synthesized)
tgggaagaagctgcacttccaggatatcatttgggtgaaacttgggaactacagatggtggccggcagaagtttgccatcccaaaaatgttcccccaaatattcagaaaatgaagcacga

SEQ ID NO: 173569 - DNA, 120 bp, Artificial Sequence
  ENSG00000109685_24 (sequence is synthesized)
gattggagaattccctgtgtttttctttgggtctaaagattattactggacgcatcaggcgcgagtgttcccgtacatggagggggaccggggcagccgctaccagggggtcagagggat

SEQ ID NO: 173570 - DNA, 120 bp, Artificial Sequence
  ENSG00000109685_25 (sequence is synthesized)
cggaagagtcttcaaaaacgcactgcaagaagctgaagctcgttttcgtgaaattaagcttcagagggaagcccgagaaacacaggagagcgagcgcaagcccccaccatacaagcacat

SEQ ID NO: 173571 - DNA, 120 bp, Artificial Sequence
  ENSG00000109685_26 (sequence is synthesized)
caaggtgaataagccttacgggaaagtccagatctacacagcggatatttcagaaatccctaagtgcaactgcaagcccacagatgagaatccttgtggctttgattcggagtgtctgaa

SEQ ID NO: 173572 - DNA, 120 bp, Artificial Sequence
  ENSG00000109685_27 (sequence is synthesized)
caggatgctgatgtttgagtgccacccgcaggtgtgtcccgcgggcgagttctgccagaaccagtgcttcaccaagcgccagtacccagagaccaagatcatcaagacagatggcaaagg

SEQ ID NO: 173573 - DNA, 120 bp, Artificial Sequence
  ENSG00000109685_28 (sequence is synthesized)
gtggggcctggtcgccaagagggacatcagaaagggagaatttgttaacgagtacgttggggagctgatcgacgaggaggagtgcatggcgagaatcaagcacgcacacgagaacgacat

SEQ ID NO: 173574 - DNA, 120 bp, Artificial Sequence
  ENSG00000109685_29 (sequence is synthesized)
cacccacttctacatgctcactatagacaaggaccgtataatagacgctggccccaaaggaaactactctcgatttatgaatcacagctgccagcccaactgtgagaccctcaagtggac

SEQ ID NO: 173575 - DNA, 120 bp, Artificial Sequence
  ENSG00000109685_30 (sequence is synthesized)
agtgaatggggacactcgtgtgggcctgtttgccgtctgtgacattcctgcagggacggagctgacttttaactacaacctcgattgtctgggcaatgaaaaaacggtctgccggtgtgg

SEQ ID NO: 173576 - DNA, 120 bp, Artificial Sequence
  ENSG00000109685_31 (sequence is synthesized)
aggcggcgcagagcaaaaggggaagggaagaggcagtcagaggacgagtgcttccgctgcggtgatggcgggcagctggtgctgtgtgaccgcaagttctgcaccaaggcctaccacctg

SEQ ID NO: 173577 - DNA, 120 bp, Artificial Sequence
  ENSG00000109685_32 (sequence is synthesized)
tcctgcctgggccttggcaagcggcccttcgggaagtgggaatgtccttggcatcattgtgacgtgtgtggcaaaccttcgacttcattttgccacctctgccccaattcgttctgtaag

SEQ ID NO: 173578 - DNA, 120 bp, Artificial Sequence
  ENSG00000109685_33 (sequence is synthesized)
gagcaccaggacgggacagccttcagctgcaccccggacgggcggtcctactgctgtgagcatgacttaggggcggcatcggtcagaagcaccaagactgagaagccccccccagagcca

SEQ ID NO: 173579 - DNA, 120 bp, Artificial Sequence
  ENSG00000109685_34 (sequence is synthesized)
gggaagccgaaggggaagaggcggcggcggaggggctggcggagagtcacagagggcaaatagcgccaggcggccgcttggccggatccaggggcggtgcagggcggccggccctgcctg

SEQ ID NO: 173580 - DNA, 120 bp, Artificial Sequence
  ENSG00000109685_35 (sequence is synthesized)
cgggagagggcgagcatgaactggcccggaggacccagctcgagccgccaggacacagacgtacaggcctcctcgggagggagcgcctccccaccactgagccatcctcagcagcgtccg

SEQ ID NO: 173581 - DNA, 120 bp, Artificial Sequence
  ENSG00000109685_36 (sequence is synthesized)
ctgcgtctgcactgatgaccgtctgagcccagctcagcgttcctggacaaacagcctcactcctcagcgttaccgccacacttgaatttctccgaatgtcaaggttccctcccactctat

SEQ ID NO: 173582 - DNA, 120 bp, Artificial Sequence
  ENSG00000109685_37 (sequence is synthesized)
ttttttaggttaaagttaattggcatatggaatgttttaatctcctctgaaatgtgtagcgtaggcttttcccaagggtcgctagaaactcgtcttcgcgttgccccctttctggctctc

SEQ ID NO: 173583 - DNA, 120 bp, Artificial Sequence
  ENSG00000109685_38 (sequence is synthesized)
agcgccgtcgccactcgggagaggctgggtgaggcccgtgtgaggactgaccctggattcctcgaaactgccattgtgatcattactctgctctttggaaatggctgtatcatttttttg

SEQ ID NO: 173584 - DNA, 120 bp, Artificial Sequence
  ENSG00000109685_39 (sequence is synthesized)
tactaatgtgaattgttcctcagaaacgcttcttttccatcctagtgagaagctggccctgcaggtggtggcagcaatggtgttgtaagatttcctcccgtagttttttctcctcatgga

SEQ ID NO: 173585 - DNA, 120 bp, Artificial Sequence
  ENSG00000109685_40 (sequence is synthesized)
tttgaatgaaatgccaataacacgtccactttcaacgtgtagtttacgcggagcactttcgaggcctggccgggttgggcctacttctcacctgggcctatcttctgaactcgctaggtt

SEQ ID NO: 173586 - DNA, 120 bp, Artificial Sequence
  ENSG00000109685_41 (sequence is synthesized)
cttatcaacatttgggggataactttgtatatttttttcatttggcttttctttaccagtttctgatttttattctcaatatatttttgctaaacctatttcacaaatcaccaccgactg

SEQ ID NO: 173587 - DNA, 120 bp, Artificial Sequence
  ENSG00000109685_42 (sequence is synthesized)
aagtgtgtgtttactgatgcggccctgagctccatggcgaaaggagtgactttgcagggcgtgagaccgcagtctgcttagagcacaggaagtgacaacttagggagccccgtagggcgc

SEQ ID NO: 173588 - DNA, 120 bp, Artificial Sequence
  ENSG00000109685_43 (sequence is synthesized)
tgcaggccccggggaccccagcacgtgggtctaaagagagacggagtctagctctcctgccacccagagtggcttccatctcagcactctgtgggtctggtgatggaagatgcagtctct

SEQ ID NO: 173589 - DNA, 120 bp, Artificial Sequence
  ENSG00000109685_44 (sequence is synthesized)
gctgatcacatgtgccctctgccagggcacctactgagaggtgcggtcctgggggtggaggcctgcctggcaggtgtgcgtgcctcgtacgtgtgttatgggcactggtctaggccaggt

SEQ ID NO: 173590 - DNA, 120 bp, Artificial Sequence
  ENSG00000109685_45 (sequence is synthesized)
atgacacccactctcctgtgagatttcactttagtttttaaaaggtccagttctacagagtgagacctatctatctgagtactacatatgttttaagacttggttctttttttgagggat

SEQ ID NO: 173591 - DNA, 120 bp, Artificial Sequence
  ENSG00000109685_46 (sequence is synthesized)
ccttgaccctgggaagtctggagcaccctgagaagggggcaccatgtgtgcctttgcccacgtgtcctgaggggctgcttgtctgggagggagggagagaacattcagcagcaggtgctt

SEQ ID NO: 173592 - DNA, 120 bp, Artificial Sequence
  ENSG00000109685_47 (sequence is synthesized)
ttttatggccttttcttaaaataacctaagggggacacatccatcttgcagagaagtttacagaactccccttgaaaactgctgctgaggctcctgttaaattttctgtggcatctttta

SEQ ID NO: 173593 - DNA, 120 bp, Artificial Sequence
  ENSG00000109685_48 (sequence is synthesized)
tgccttggtaaaaactgcagtgtctttggacctgagagtggctactccgtggttttgtgacctgtaagcgtggggttcaggggtgtgtggccctgcagggtcccacgcctccctgagcac

SEQ ID NO: 173594 - DNA, 120 bp, Artificial Sequence
  ENSG00000109685_49 (sequence is synthesized)
tgactggaagtttcactggctggtggctgtcccttctcccatcagggtccccagcaaagttaactacacagaggacccaggggaaacgagctgtgtagccactgacttgctcgcgcggcc

SEQ ID NO: 173595 - DNA, 120 bp, Artificial Sequence
  ENSG00000109685_50 (sequence is synthesized)
gtggcctctgaggggcactcgccggttaagacagggtgggagtagtgctttccagttcagactctaacttctcccaaagtgtcctaagaaaatactggatcggctcatagatttatgctc

SEQ ID NO: 173596 - DNA, 120 bp, Artificial Sequence
  ENSG00000109685_51 (sequence is synthesized)
cttatgatgccctaacttggaaggttgttctagggacaggccgggcagtgtccccacacacaccttagagtcgaaggccccagggccccgctgtcacttgcccaaaagatcccttccggc

SEQ ID NO: 173597 - DNA, 120 bp, Artificial Sequence
  ENSG00000109685_52 (sequence is synthesized)
aggtaagggactaccaatgcttacgtcaaaacagcagaatcggctttgcagtgcactttggggagcagatattaacttatttttgtgttggacagtagtgaaatcttgtgatttttaatc

SEQ ID NO: 173598 - DNA, 120 bp, Artificial Sequence
  ENSG00000109685_53 (sequence is synthesized)
gctttgataatacttccaaattttatgatttttctgaaggaaataatgcaaacattttaaatatgtttctccccctttccaaaaactgttaaactaatgagcaagtaacactaactttga

SEQ ID NO: 173599 - DNA, 120 bp, Artificial Sequence
  ENSG00000109685_54 (sequence is synthesized)
atgtctctacaatacccgttgataactcagtggagccaggctttggggtagcggccctgagcttgcagggtttctcgccactggggctgaccacgcccccagctgtgaccgtgggtgtgg

SEQ ID NO: 173600 - DNA, 120 bp, Artificial Sequence
  ENSG00000109685_55 (sequence is synthesized)
ctggctctcggccctgcccagctttgttctgaggacgtggtgacttcctgaacatcagcttcaatcctccatcattaatgtgaagcaaaacacaaaaaccgccccaatccctcaggattc

SEQ ID NO: 173601 - DNA, 120 bp, Artificial Sequence
  ENSG00000109685_56 (sequence is synthesized)
cttggcatccgaaaccagcatctgcacctaaacccatacccacccgtgtgcgcccacagggggatgtgtccgaatgggcagcttaaaatgtggtcacctgtgggggaaactcttcaggca

SEQ ID NO: 173602 - DNA, 120 bp, Artificial Sequence
  ENSG00000109685_57 (sequence is synthesized)
cctgaagtgagaacccagctgtccgtcctcaggccggcctttcttccggcgacacccgtccatggctggctgggtccccttcgcagtgtttgtctgtcttgacatctaaaccccggcgtg

SEQ ID NO: 173603 - DNA, 120 bp, Artificial Sequence
  ENSG00000109685_58 (sequence is synthesized)
tgcagtgcccatcttccaggactaccttattttccagaattaaacctgttttataattcaagttaatgcaaatgactgtcagttgccaaatatcttgatcctatgagtgtagttgatgac

SEQ ID NO: 173604 - DNA, 120 bp, Artificial Sequence
  ENSG00000109685_59 (sequence is synthesized)
tgtttgttagtcagtagagtaaaatgctgtgtccacggggtgtcacagcctcaccataccctgttgaggtgtgaaatgccccgtcagaaattaaatacaaacttaaatgtgcctattggt

SEQ ID NO: 173605 - DNA, 120 bp, Artificial Sequence
  ENSG00000109685_60 (sequence is synthesized)
gtctaaacttcatacaatgtaaggtcagattccttttaggaatactgggtgctgtcaccaggtttgatagttagacttaaaaacttgaaattcactttttggggggagggatatactgaa

SEQ ID NO: 173606 - DNA, 120 bp, Artificial Sequence
  ENSG00000109685_61 (sequence is synthesized)
atagagagttgagacttgccagttgggggaaaatagcatttaaaatggaaagctgtgtttggaaaattgtgtatgagtatttttgtattaaaaacattttaaaggcttttttcttaactt

SEQ ID NO: 173607 - DNA, 75 bp, Artificial Sequence
  ENSG00000109685_62 (sequence is synthesized)
tagaaccactggtaactcttaactgctgtctgcttttctgtggagactgcgggttgcagacaccagcagccccct

SEQ ID NO: 173608 - DNA, 120 bp, Artificial Sequence
  ENSG00000109685_63 (sequence is synthesized)
ttctgtggagactgcgggttgcagacaccagcagccccctattgctgcacgtcaggtgtcctccacctcagtactgtggacatctcgggccgcatagccctgttgcgcgggcatcctgtg

SEQ ID NO: 173609 - DNA, 75 bp, Artificial Sequence
  ENSG00000109685_64 (sequence is synthesized)
ttaactgagacaagagatctacctgcctcgtcctcccaaagtgttggaattgcaggtgtgagccactgcacccgg

SEQ ID NO: 173610 - DNA, 80 bp, Artificial Sequence
  ENSG00000109685_65 (sequence is synthesized)
cctaccgccgcacggccccggccccctcccagcctgccgctccggagagccgcccgccgaggatgcgacgcaccgcagtg

SEQ ID NO: 173611 - DNA, 120 bp, Artificial Sequence
  ENSG00000109685_66 (sequence is synthesized)
gagtagcattgtggttatatgtaagactttatgtttagagatttgtgctaaacttcttatggatgaaatgatatgtctgggatttgcttcagaataatctggcagggggacgtggaacca

SEQ ID NO: 173612 - DNA, 120 bp, Artificial Sequence
  ENSG00000109685_67 (sequence is synthesized)
ggtatggatagagccacgctggccccaggttgatgtttttgggggccaagtagcgaggacatggggttcattgtacagtttgtctgcttttgtttatgttcagatttttccatgatagaa

SEQ ID NO: 173613 - DNA, 120 bp, Artificial Sequence
  ENSG00000109685_68 (sequence is synthesized)
agttaagccagaaggacaaaggaattcagaagattcatctttagaacttcacttatttgaggggtaatttttaagcagtaaaaagatcaagggtttatgatttgaaactttacaaaccaa

SEQ ID NO: 173614 - DNA, 120 bp, Artificial Sequence
  ENSG00000109685_69 (sequence is synthesized)
ctcttagtgttgggcacctgcagagatctctgaagttcctggagtgtagctcgctcttctgccctatttgcttcagcctgtgtaattctttccggtgatctgtgcttaattcttgactct

SEQ ID NO: 173615 - DNA, 88 bp, Artificial Sequence
  ENSG00000109685_70 (sequence is synthesized)
ggtcttgctcccttgcgcaggcgagagtacagtggcacgatcatagctcactgttacttcaggctaccaaagtgctgggattacaggt

SEQ ID NO: 173616 - DNA, 120 bp, Artificial Sequence
  ENSG00000109685_71 (sequence is synthesized)
ttatcaggagactctaacatgagccttgcatagattttagatctaataaataagtattagggaacagccattctgacccttgagggaaaagatactcgacttgcactctggggtcttaaa

SEQ ID NO: 173617 - DNA, 87 bp, Artificial Sequence
  ENSG00000109685_72 (sequence is synthesized)
tgagggaaaagatactcgacttgcactctggggtcttaaaatatccttcctaatgtggataagaagataccgagatcagtactttgg

SEQ ID NO: 173618 - DNA, 71 bp, Artificial Sequence
  ENSG00000109685_73 (sequence is synthesized)
actgagacaggaggatcccttgagtcctggaggcaggaggatcccttgagtcctgaaggtggggtttgcag

SEQ ID NO: 173619 - DNA, 120 bp, Artificial Sequence
  ENSG00000109685_74 (sequence is synthesized)
ttgagtcctggaggcaggaggatcccttgagtcctgaaggtggggtttgcagtgagtcgtgatggcatcactgcaccgtagcctgggtgacagcagagcgagactgtgtctcaaaaaaaa

SEQ ID NO: 173620 - DNA, 120 bp, Artificial Sequence
  ENSG00000109685_75 (sequence is synthesized)
acttcctgggtcaggaagacacctggagagtctcccaggccatggcagccccacagcagcacctcacttatgggagtgtctgtctgcctgcccagaatgataagtgactgctccaccact

SEQ ID NO: 173621 - DNA, 120 bp, Artificial Sequence
  ENSG00000109685_76 (sequence is synthesized)
ggccagctgctctcaaggaggaaaggcctcttttcataggagccccttctttcaagcttcttgccagttagactgggcctccccagccaggctgcctagtaagattctcctgtatttcag

SEQ ID NO: 173622 - DNA, 120 bp, Artificial Sequence
  ENSG00000109685_77 (sequence is synthesized)
gtgaagctggagctcagatcgcagcaaggtaatccttgatggctggatctttttgctggagaatgcttggactagtgagcaaggttggaaacagggccaggtgctttagcagcatggctg

SEQ ID NO: 173623 - DNA, 120 bp, Artificial Sequence
  ENSG00000109685_78 (sequence is synthesized)
agcccacaccagtcaagttggatttgaacccagctgctctgtactgcacttagaatgatgtaatattccaggatgctgctgcaggtggcgtatcatcgtacacactcagtgacatttcta

SEQ ID NO: 173624 - DNA, 120 bp, Artificial Sequence
  ENSG00000109685_79 (sequence is synthesized)
tcacaatcattttatggaagatgtgtgataatctgtttttactggtattaataaacacatacaatgaagaaaacagataacaaattttaagaccaaggtaagataactaatcaaggccat

SEQ ID NO: 173625 - DNA, 120 bp, Artificial Sequence
  ENSG00000109685_80 (sequence is synthesized)
ttaatccgtcacattcatctcataatagaaacacgttcatattccagtggtcaatgtagatttcaagttgaaaggcagtccctttagttgggggctgtccagagctgcagcagggctttg

SEQ ID NO: 173626 - DNA, 120 bp, Artificial Sequence
  ENSG00000109685_81 (sequence is synthesized)
cacggaaggggtggccctgttagagttgcttctcctctagtttgtaacttactggacttttgtggaaaatatcagcgtcgctaccctcagaaacaaactaacagcacacgttaggaggag

SEQ ID NO: 173627 - DNA, 120 bp, Artificial Sequence
  ENSG00000109685_82 (sequence is synthesized)
tcctcatcagctgttctcattgccagtgagatatattcagtattgtagatactacactaatttccaacataagaggcaggaagagttttgattctatccttttttactaaacagttttat

SEQ ID NO: 173628 - DNA, 120 bp, Artificial Sequence
  ENSG00000109685_83 (sequence is synthesized)
tatgacactagatacagtaaatttttagaaaaaaataccatttacagtattattgtgaaccatttaacccttttgatccaaggccccggaccaaggggatactgtaatcaggttatgtac

SEQ ID NO: 173629 - DNA, 120 bp, Artificial Sequence
  ENSG00000109685_84 (sequence is synthesized)
accaacctctgcatcagttgcttctatagagcatcagccctcatgtttcattgtcttaatgtcggggagcagcctggtgtcctgccccaggtgtccgcatttttgcatggtaaggaaaag

SEQ ID NO: 173630 - DNA, 120 bp, Artificial Sequence
  ENSG00000109685_85 (sequence is synthesized)
gcttacttgcccttcagctcataaaagcagaaggtgtgctattcacagtaccatgcgagtagcccacagttaattcccggcagattctttggctgtgttttatctttaatgaacgtttct

SEQ ID NO: 173631 - DNA, 120 bp, Artificial Sequence
  ENSG00000109685_86 (sequence is synthesized)
gactaatattttgttgtaaaccattaagtaatgtaacgcatgtaagatgcttagggtgcctggccaggactccgtggtttcctgttgtgacagtaataatggttataataataaaaatga

SEQ ID NO: 173632 - DNA, 120 bp, Artificial Sequence
  ENSG00000109685_87 (sequence is synthesized)
taaaattgccatcattctatttttatccaaaagtataaattttgctttggcatgaaaagtggtcctcttgactgcattatgcatgcgaggatgaaataaacctagaagtggcagaacact

SEQ ID NO: 173633 - DNA, 120 bp, Artificial Sequence
  ENSG00000109685_88 (sequence is synthesized)
ggatttgtgtgtgtggcgctttagggtgctggactgtatggctgagggctggttgggttcctctattggctctgctcaaatgttgcaggatacatagccccaaagatggtctaggagcaa

SEQ ID NO: 173634 - DNA, 120 bp, Artificial Sequence
  ENSG00000109685_89 (sequence is synthesized)
tctaagctgtgttactccaaaggacatgaaaaagctcaagagtaaaattaaaattctcaaaaaaaaaccccacgaaatttaaagatggggaaaaaaagatggtataaaaatggctctggt

SEQ ID NO: 173635 - DNA, 120 bp, Artificial Sequence
  ENSG00000109685_90 (sequence is synthesized)
tcaataagcagtcacccaaagtaaagactctatcttgaaaggcttttggtgaaaatgaagggatttcatttgaaattacagcatgatgaattttgcatgggtggccagccagctagccca

SEQ ID NO: 173636 - DNA, 120 bp, Artificial Sequence
  ENSG00000109685_91 (sequence is synthesized)
taactgatagatgcattagaagtcagccagcgcataggtgctccctctatattatggagaaagcaaaaccctgcaaatgaccaaatggtgtccaaagagcagcatgacattggcatcagc

SEQ ID NO: 173637 - DNA, 120 bp, Artificial Sequence
  ENSG00000109685_92 (sequence is synthesized)
tgaataaccaggggcacatgggggaacgtggatgggaatgatagtgtatctcagcggggggtggggtgacatcgttccctggggacattgggaaggtgggcaggggcaagtgaactcagc

SEQ ID NO: 173638 - DNA, 120 bp, Artificial Sequence
  ENSG00000109685_93 (sequence is synthesized)
actctgcagtgagagggacagtcccatgtgtggcagcattgtcccacttcagatgccaggagtgggctcatcctagaggagcggagttttccgagaggaccatctcctggtttcctgaag

SEQ ID NO: 173639 - DNA, 120 bp, Artificial Sequence
  ENSG00000109685_94 (sequence is synthesized)
gaggtgggtggaaacggctcttgtttgaaagaacttagggaggaccattggcttgccaagagtacagaaattcattatgctgctaatttaacgtggaattccttcatttcataagaacct

SEQ ID NO: 173640 - DNA, 120 bp, Artificial Sequence
  ENSG00000109685_95 (sequence is synthesized)
caaaataatggtgatacattctagccttaagacatttgaattgccggttgttgaggtgaattttgtttgtcatacatggaaccattttagtcccatttgactcacttcagaccatcttcc

SEQ ID NO: 173641 - DNA, 120 bp, Artificial Sequence
  ENSG00000109685_96 (sequence is synthesized)
ttctaaaaacgtaagtactccattgtaatagggtggcatcttcaggtagtgcacatattggcaatagaggtcctgaattgtttttctaagactgatctgagagccattgggccatcaagc

SEQ ID NO: 173642 - DNA, 120 bp, Artificial Sequence
  ENSG00000109685_97 (sequence is synthesized)
ctttatatatctgcttctaaaattgccccacctgctctagatggatctttgggcctttcctcagtgttcatgcaaaaattaaatgtcttttttcagcatactgactccaggtgtagttac

SEQ ID NO: 173643 - DNA, 120 bp, Artificial Sequence
  ENSG00000109685_98 (sequence is synthesized)
atctcagtgctgtcttgagtatatattttatctcttatacctgtatctcccaactagaaacagctccagtgtttttaagagaatgtttcttaaaaccaataggaaacttaagcgaggttt

SEQ ID NO: 173644 - DNA, 120 bp, Artificial Sequence
  ENSG00000109685_99 (sequence is synthesized)
catgacacaacctttcatgtcgtgaaaggcagagggtgactgtgtgtgatgtgcagagtccttggacaggagtcgggggctcctctgtcccactgctgcttcttgagtgggtggagtggt

SEQ ID NO: 173645 - DNA, 120 bp, Artificial Sequence
  ENSG00000109685_100 (sequence is synthesized)
gcttagaggatctccgagaggtccccgcagctctagggagatctgattttgtgttttttgtttaagtacttcacacagaagcctaggtagatttaaaatggggtgctcagggactgggga

SEQ ID NO: 173646 - DNA, 120 bp, Artificial Sequence
  ENSG00000109685_101 (sequence is synthesized)
acaagacggggtggggtggggagatgggcatttggagagtctcatgtagctggagacgttaagagctgagcacaccacaggaaaggagggaggatgctgtgtgagagccatgctgtcagg

SEQ ID NO: 173647 - DNA, 120 bp, Artificial Sequence
  ENSG00000109685_102 (sequence is synthesized)
agcaagcttgctgctcctgtgctgccctggccctggccttgcttgcccatggtgtgtgtgtccagaggtgtgtgtgaggctgccagaacaagtgctgggtctgtcacagagaagtttaaa

SEQ ID NO: 173648 - DNA, 120 bp, Artificial Sequence
  ENSG00000109685_103 (sequence is synthesized)
aaagaaaactaagattataaattagcatctagttccaaaaccaaaaaaagtgcctgtggatgtatataaaattaagatgataagaaagtgctcctgagaaggctcttgccagaagcctga

SEQ ID NO: 173649 - DNA, 120 bp, Artificial Sequence
  ENSG00000109685_104 (sequence is synthesized)
tgtgagtgtgtggcacctgtgatggcagggctgtgagctgggcttctgtcctcctctgtgtcccggcatggaagccagtataagcatttccaaatgagggaaaagtccttggctcgtttg

SEQ ID NO: 173650 - DNA, 120 bp, Artificial Sequence
  ENSG00000109685_105 (sequence is synthesized)
atccagttgagttgaaagggttgccttggcagcagaggctcctctgatggctgacatcagtcactgcgtctgggcctgagacgtgcatggagggctgtaaagccacggattcccctcgct

SEQ ID NO: 173651 - DNA, 120 bp, Artificial Sequence
  ENSG00000109685_106 (sequence is synthesized)
ggagaggctcctgtctgatagcggtagatgaaaaataaggtcgttatgactttggcaacttgcttcatttctttttcatttgacttacaacacacttctctaacatctagcccttttaaa

SEQ ID NO: 173652 - DNA, 120 bp, Artificial Sequence
  ENSG00000109685_107 (sequence is synthesized)
tttttaattaatttcaaagcttcctctggccaggtagacttttgtatacagaccaggtgagagcccttttgccttagtgtgaaaatgtaacattttatgcttttaaaatcaatagattca

SEQ ID NO: 173653 - DNA, 120 bp, Artificial Sequence
  ENSG00000109685_108 (sequence is synthesized)
tcaccttagttttttaaaaaaaatctataaatagggtaattgctgaggtgtgcggtttatctttgagatgataaagctaaattatagtcttttgccagagaaactgaggtaactgtcatt

SEQ ID NO: 173654 - DNA, 120 bp, Artificial Sequence
  ENSG00000109685_109 (sequence is synthesized)
gtaactgtcattagaaaaggtttcttaaaatactcacaaagctgttattggcttcttaacttctaaaatttggggggtcttgcatttatttattatttatttatttatttatttagagac

SEQ ID NO: 173655 - DNA, 81 bp, Artificial Sequence
  ENSG00000109685_110 (sequence is synthesized)
ttatttatttatttagagacagagtctcaccctgttggccaggctggagtgcagttggttccagcaattcttctgcctcag

SEQ ID NO: 173656 - DNA, 120 bp, Artificial Sequence
  ENSG00000109685_111 (sequence is synthesized)
gattacaggcgtaagccactgcacctggcggggtcttgcttattttaaaagaaatattctgattcatattttaggactttttgtcaacgaaattggttttgatccctttgggtaccattt

SEQ ID NO: 173657 - DNA, 120 bp, Artificial Sequence
  ENSG00000109685_112 (sequence is synthesized)
ttattgttttatgtagaatgttagaaattaccactaatttacctggcagtgatgtcaaattgactgtaattagcaggtagaaaattatttgtattatattcatctgattcctatactgga

SEQ ID NO: 173658 - DNA, 120 bp, Artificial Sequence
  ENSG00000109685_113 (sequence is synthesized)
tgagcaaggagcatgcttcctttgggacattcttacagcagggtgtctctccaacagcccgacaggcctcatctttttggttggatacctttgaactccatggttacgtgttaggtccac

SEQ ID NO: 173659 - DNA, 120 bp, Artificial Sequence
  ENSG00000109685_114 (sequence is synthesized)
atttgtgtttttttctagcctacctatagttgttggcctttttgcatataactctcgggtaatattttgaagcatgctgaccatccaggcatatagtattttcaagaaatgactgaggta

SEQ ID NO: 173660 - DNA, 120 bp, Artificial Sequence
  ENSG00000109685_115 (sequence is synthesized)
ggggtgggggtcctggtccggctgatgggggtttgctcagcactgtgccagtggaagcaggtgtattgtgggcagttttgtcattgtcctcaagtccttcgcagacagtgcacagcctgc

SEQ ID NO: 173661 - DNA, 120 bp, Artificial Sequence
  ENSG00000109685_116 (sequence is synthesized)
tgtctgcagtcggccagaccaggctcctccccagcacactccctgtgggatggccgctgctcaggacacagtgggacaaagttgggttgataggatattttagattcattttacctttga

SEQ ID NO: 173662 - DNA, 120 bp, Artificial Sequence
  ENSG00000109685_117 (sequence is synthesized)
caagggcaggccttgaattgggagcagcagccacctggcctcactctggccacaggtgacacttggtccttgctgccacctgcttggggctatgtggctacggctacacaaaagcctgtg

SEQ ID NO: 173663 - DNA, 120 bp, Artificial Sequence
  ENSG00000109685_118 (sequence is synthesized)
caggttagaagacgactgtggtgtgcagtggtgctctgggagtggagacttcctctgttctcagagactcacccccagccctgaccctagaatttagggatagccaggaagtttctagtt

SEQ ID NO: 173664 - DNA, 120 bp, Artificial Sequence
  ENSG00000109685_119 (sequence is synthesized)
tgtgtaacctagaagggtcactttaataaaaattgttatgaactatagtattttagatgatgagtgacttattttaattccactttaacattttactgtgctgttaacttggaagacctg

SEQ ID NO: 173665 - DNA, 120 bp, Artificial Sequence
  ENSG00000109685_120 (sequence is synthesized)
tttgaaattagtcttgatttcacactcatttaatctgctgagcacagggctgttgtcatttgtaaacgcaaacactgtggaggtacttctcgccatcagcttccttctttacaaaaccat

SEQ ID NO: 173666 - DNA, 120 bp, Artificial Sequence
  ENSG00000109685_121 (sequence is synthesized)
catttcaacatgaaaattatgtcagtttatagaaatatttattgttcaaggtctgtaattgtatttcaaaaacgatgtcgtattcaagttgtgaagggatttgttttgtcaaaaaattaa

SEQ ID NO: 173667 - DNA, 120 bp, Artificial Sequence
  ENSG00000109685_122 (sequence is synthesized)
aaactcaatgtgtatgacgccactctgaagagtaggtgagcgctttgcagtcacagaaggtggcatctgactgcggctcatacaggtcaccctgaagggccacgtgcttttagcagttgg

SEQ ID NO: 173668 - DNA, 120 bp, Artificial Sequence
  ENSG00000109685_123 (sequence is synthesized)
ctggaatgtgttcactaggttccgttatgtttggtaatatcatcttgaaaagtccctgtaatagatcaaggagactgcattccctgccctgaaggaatgtatttctaaggcaaataggca

SEQ ID NO: 173669 - DNA, 120 bp, Artificial Sequence
  ENSG00000109685_124 (sequence is synthesized)
acttggtactatcttattctgagtagagagtggagaaagtattttcagactgaagaaaactttgaaaagtcaggagctaagctgctcggagctcagtgccgcagcatggctgtggtggac

SEQ ID NO: 173670 - DNA, 120 bp, Artificial Sequence
  ENSG00000109685_125 (sequence is synthesized)
gcgggaaacaacgggaaagttcttgacagagtctgtgtccgctcagtccctgcacttttcctttccaaatgcatctcgttggatatggaatagatcgtagatgttgtagactgagatttg

SEQ ID NO: 173671 - DNA, 120 bp, Artificial Sequence
  ENSG00000109685_126 (sequence is synthesized)
ggactatgttgggaccgtacaggtgaatgtgccacctccacaaatggcttctccgagtgagtcacgtcacctggtgcgtggaggtggagcctgcggctggagtaaggcttgctgtgggac

SEQ ID NO: 173672 - DNA, 120 bp, Artificial Sequence
  ENSG00000109685_127 (sequence is synthesized)
gccctcgtactttgctctccttgcgggtggttgccgagccgagagcattggatcctccccgactgtggctagttgtctgtccggtggctgggagggggtgtggtgggaaaaagtcggaat

SEQ ID NO: 173673 - DNA, 120 bp, Artificial Sequence
  ENSG00000109685_128 (sequence is synthesized)
ctctgcaatctgtgtcatggactgtactattgtaaggtctatattctgtatgtgggtcccagaccctgatcaggaaatgagcctcatgtgtgtcgttaacatttatatatttccattcaa

SEQ ID NO: 173674 - DNA, 120 bp, Artificial Sequence
  ENSG00000109685_129 (sequence is synthesized)
aatatgtattcagtgtttatttcctcaaaacagactttgttaatgtaggaaatctctccaagtggaaacgtgctaactttttctgtaaatctgaaataaaaggtgctgttccttcctctg

SEQ ID NO: 173675 - DNA, 120 bp, Artificial Sequence
  ENSG00000109685_130 (sequence is synthesized)
ctgtggcgccctccttccccccaggctctgtgttggcattttgcactcctggagacctgtgtcccccgtgaacagcggcttcctccaggctggcttgttgccgggacaggtgggagcaag

SEQ ID NO: 173676 - DNA, 120 bp, Artificial Sequence
  ENSG00000109685_131 (sequence is synthesized)
ttccctgctgtgggctggggaggatggctctcaacaaaggccagtggttaagagttcctcactgaacgtgtttcctggggctgccagaacaatgcctcacagacgcgtggtttcgcagtt

SEQ ID NO: 173677 - DNA, 120 bp, Artificial Sequence
  ENSG00000109685_132 (sequence is synthesized)
ccagcaaaatgggattttctgccactggagacagaagcagacggcttcccttgtggtaagaggtgcagaagggactgccgggcgctgcttacccgcctgctctgcccccgcagctgtgtg

SEQ ID NO: 173678 - DNA, 120 bp, Artificial Sequence
  ENSG00000109685_133 (sequence is synthesized)
cactccttcacagctataccaaacttaaaggtattttcaaatcaaagaagtttgaacacttaaaaacaagtcaaattgtactgaaagattaatagtgaaaaatcatcccctgccttcctc

SEQ ID NO: 173679 - DNA, 78 bp, Artificial Sequence
  ENSG00000109685_134 (sequence is synthesized)
gtcaaaagagacgaggtctcactgttgtgttgcccaagctggtcttcaactcttgggttcaaagaatcctcccacctg

SEQ ID NO: 173680 - DNA, 120 bp, Artificial Sequence
  ENSG00000109685_135 (sequence is synthesized)
ttaaaactgatgtttataagttaaggctgtaataagtgtagactgtgaagcactgaatctgggctgagccatagcagacaggctaagcctggccgcctcgccctcctcttgcagggggga

SEQ ID NO: 173681 - DNA, 120 bp, Artificial Sequence
  ENSG00000109685_136 (sequence is synthesized)
ataagcgcagcattggtgctcactgccagtgcagatgttttagggcctcttggctaactcagattcatgaaatggacaaacagtgcactatgttagtttatttgagcactttttatacac

SEQ ID NO: 173682 - DNA, 120 bp, Artificial Sequence
  ENSG00000109685_137 (sequence is synthesized)
ctgtctgaagaatgttgtgttctgtgtagccctcacactgtaagagttcacatggaagtaagtctgcgttggttctgaaagggcacagtgtcagttgagctgacatatactgggtggggt

SEQ ID NO: 173683 - DNA, 120 bp, Artificial Sequence
  ENSG00000109685_138 (sequence is synthesized)
ggaaggcgactcacacaccacacctgattcctgttgcttccagacctaggctcatggaggaagccaaagatttctttgttctcatgcatttcatggctttggtcctttaaattctggcac

SEQ ID NO: 173684 - DNA, 120 bp, Artificial Sequence
  ENSG00000109685_139 (sequence is synthesized)
atttttagttacttgagtgttgaggtgagtcagaactaccattgtaatatgactcctgtgttctggacttgcagagtacatgatagcaaaataaagccatttggggctgctgcctgccat

SEQ ID NO: 173685 - DNA, 120 bp, Artificial Sequence
  ENSG00000109685_140 (sequence is synthesized)
cattgtaacatgacacttagactttattatcaaacctaaattttttgccgttgccaaaaacaacaaatagccacagaacgtaggtgtgacacttttttgttcggaggtagttttggtttc

SEQ ID NO: 173686 - DNA, 120 bp, Artificial Sequence
  ENSG00000109685_141 (sequence is synthesized)
ctgatttttagggattaccttcatagagctttggagttttaatttcttgttatttggttctccgtgatgctgtttttctcattgtagacatgggtcctgtttttgtcatgtttatgagga

SEQ ID NO: 173687 - DNA, 120 bp, Artificial Sequence
  ENSG00000109685_142 (sequence is synthesized)
gatgataactgggggcccttttggaacagggtagtgaggcaagggttggacaggccccttactcttgctgagtcagaaggcggcacttctggccaggtctctgccatggtccccaggaag

SEQ ID NO: 173688 - DNA, 120 bp, Artificial Sequence
  ENSG00000109685_143 (sequence is synthesized)
gatggggtgtgcctcagttgtttccactcattagaggagtgtaggccttccagtgcaggaaggtcagggacctaggcaacctgggcggggctcatagagctctgcggcttgccactctga

SEQ ID NO: 173689 - DNA, 120 bp, Artificial Sequence
  ENSG00000109685_144 (sequence is synthesized)
atcctcagcgaccactcctccgagtgggattttctgcagggactcaaaccaactcagtggtggtcgagacctgttcacggatggtgggactggggctgctttacagtttgatacgtgtag

SEQ ID NO: 173690 - DNA, 120 bp, Artificial Sequence
  ENSG00000109685_145 (sequence is synthesized)
ataattaagcattttgtgatgtttggacacactggagaaaaggcagtaagaattatttactgaaacatctaggagcttactgaaatatgaaaaggcaaattttatacaaattatttttcc

SEQ ID NO: 173691 - DNA, 120 bp, Artificial Sequence
  ENSG00000109685_146 (sequence is synthesized)
tttttcctttctttcttgtccaagttcaggttaaaatcttagaaaattaaatgaaaggtcatttacagttccaaagaagaatattaaacatttttcacttaagttgagatttttgcttta

SEQ ID NO: 173692 - DNA, 120 bp, Artificial Sequence
  ENSG00000109685_147 (sequence is synthesized)
aagagcttttaatgagtttttctgttatcataattttggtccggttattcacttgagttgttgcttatactgttgtcaggtacagtagagagaacatggagcctgctgagatcttctctg

SEQ ID NO: 173693 - DNA, 120 bp, Artificial Sequence
  ENSG00000109685_148 (sequence is synthesized)
ttattcctgatcctaagtcatgtatatcgaaggctttgatttagagtaatgcatgaggccagtgtagcggggtcgaggcctgcccatgagtcaggggagctcagtctccctggcctaggc

SEQ ID NO: 173694 - DNA, 120 bp, Artificial Sequence
  ENSG00000109685_149 (sequence is synthesized)
agttgtcctgaccttgagaagacatagatgaagcattttatcatcattagacttaaattttaattcttcagaatgtcagaagttgataggttgttaaatacatttatataatacattaaa

SEQ ID NO: 173695 - DNA, 120 bp, Artificial Sequence
  ENSG00000109685_150 (sequence is synthesized)
tatgtgaaattaatacaccttcctacattttgaaggtgatgcatagatcccatagtgtgcatcatgttccttatatgaaaacgtttaaattactgggtcttttccattaaactacttttg

SEQ ID NO: 173696 - DNA, 120 bp, Artificial Sequence
  ENSG00000109685_151 (sequence is synthesized)
tatggcttagataaatcttccattagtgttcatttttatagaattatgctgttaaaactactttaggtgaacaaataaacttgtctattatatattaacgcgactgaactacagtaaatg

SEQ ID NO: 173697 - DNA, 120 bp, Artificial Sequence
  ENSG00000109685_152 (sequence is synthesized)
tttgtgatgtttccaatgctgaatgcctgttagcatatgaggcaaagtgtagtgttataaaaaacagcctgttgactgctgggcccgattctgatatgagttaggtgaccatgagaattg

SEQ ID NO: 173698 - DNA, 120 bp, Artificial Sequence
  ENSG00000109685_153 (sequence is synthesized)
ctgtttgaggtccacactgacacacacccattgggtcacaccccctttgcatgtttgtatttcctccctttcatcacatttgtttgaaataaggtacttttatagggttggtatttcaga

SEQ ID NO: 173699 - DNA, 120 bp, Artificial Sequence
  ENSG00000109685_154 (sequence is synthesized)
acactttaggtcatgttgtagtttaaattcttcttgaaaaaggtatatgtgataaataaaaatttttattggaataattattacatggtactacatcaccctgaggaagagaataaatta

SEQ ID NO: 173700 - DNA, 120 bp, Artificial Sequence
  ENSG00000109685_155 (sequence is synthesized)
aaattacacacttgcatgacaaaggcctgtgaaggaattaatgtgatttaagtgttttgtaacttcattttttattcctttagtagagcaaattcttatttttttcgccttcactggtaa

SEQ ID NO: 173701 - DNA, 120 bp, Artificial Sequence
  ENSG00000109685_156 (sequence is synthesized)
gccccctccccgcctgggccctaccgccgcacggccccggccccctcccagcctgccgctccggagagccgcccgccgaggatgcgacgcaccgcagagatgggtctcgccatcaccatg

SEQ ID NO: 173702 - DNA, 66 bp, Artificial Sequence
  ENSG00000109685_157 (sequence is synthesized)
ccgcccgccgaggatgcgacgcaccgcagagatgggtctcgccatcaccatgttgcccagtctggt

SEQ ID NO: 173703 - DNA, 120 bp, Artificial Sequence
  ENSG00000109686_0 (sequence is synthesized)
tcatttttccccctccccattctgttagaagcttctgccaaccatgattcatggaatgatttttttgagctgagtaatctgtggctttgcagtttccttgctttctttccttagctaaat

SEQ ID NO: 173704 - DNA, 120 bp, Artificial Sequence
  ENSG00000109686_1 (sequence is synthesized)
ctcttctagtgttagcaaagtatttagcacaggaaagatcttataaaatgaaataatgcatgtaatgatgcattttccaagtagatgattttaacaaaccgtaagcttttatgcctgtcc

SEQ ID NO: 173705 - DNA, 120 bp, Artificial Sequence
  ENSG00000109686_2 (sequence is synthesized)
ttcattgtgtcttttctgcctctgtcaggcgaactgtgatgaagagccttatacttaggaagacacaactacctttgaacagtcctttgtgaaatctaatgatcgcaacgaacgaaataa

SEQ ID NO: 173706 - DNA, 120 bp, Artificial Sequence
  ENSG00000109686_3 (sequence is synthesized)
accagaacatcgttcttcaagccaaggacccttgtcatccattagagcggtaatcaagagatcttctcggacttctattcagagtgaacttcatcgagatagaaggcgcccagagatcac

SEQ ID NO: 173707 - DNA, 120 bp, Artificial Sequence
  ENSG00000109686_4 (sequence is synthesized)
cattgtggcagctgagccactgaggccagcctcgtggtttccaggaaccccacccccaggactgggatttcctacatcatctgcagcaggctcttggaggcctaatgagctggttcctgc

SEQ ID NO: 173708 - DNA, 120 bp, Artificial Sequence
  ENSG00000109686_5 (sequence is synthesized)
tgagctcccaccatcttatgaacaagttataaaagaaatcaaccaagttcaagttaatactacaaataataataatgctgctgctactccaaggcacactattacttctgcaactcagac

SEQ ID NO: 173709 - DNA, 120 bp, Artificial Sequence
  ENSG00000109686_6 (sequence is synthesized)
tgacttttcagaagaaatagacaacgatctgcctcaaagttttgttttggtctcgtcagcactacaggcacctctcaagcctcttcagcctttctcagcagtctcgtctggcaatcttcc

SEQ ID NO: 173710 - DNA, 120 bp, Artificial Sequence
  ENSG00000109686_7 (sequence is synthesized)
aacaaatgtggcacctttaatcgtctttgatatttctgaagaaccgaattgtccagaaaaccccagtgctacaagatgtccagtgccaaaaccaagatcaaaaagcaacctcagaccaat

SEQ ID NO: 173711 - DNA, 120 bp, Artificial Sequence
  ENSG00000109686_8 (sequence is synthesized)
acccagagattctcacattaaagagcaaagtcaacagaaaatcagcccagcagccgtaggagaggagtcatccccaggccggccccagtctctgctggacaacgctagcacctcagacag

SEQ ID NO: 173712 - DNA, 120 bp, Artificial Sequence
  ENSG00000109686_9 (sequence is synthesized)
tcaggcagtgatgaacattatgaacacagaacaaagccaaaatagtattgtttccagaattaaagtgtttgagggtcagacaaacatagaaacctcaggactgcccaagaaaccagaaat

SEQ ID NO: 173713 - DNA, 120 bp, Artificial Sequence
  ENSG00000109686_10 (sequence is synthesized)
tactccacgttcacttcctccaaagcctactgtttcctcagggaaaccttctgtagctcccaaaccagctgctaacagagcttctggagagtgggactctgggactgagaacagactcaa

SEQ ID NO: 173714 - DNA, 120 bp, Artificial Sequence
  ENSG00000109686_11 (sequence is synthesized)
ggtgacctccaaggaaggactcaccccataccctcccctgcaagaagcgggaagcatcccagtaaccaaacctgaattgccaaagaaaccaaaccctggccttatacgaagtgttaatcc

SEQ ID NO: 173715 - DNA, 120 bp, Artificial Sequence
  ENSG00000109686_12 (sequence is synthesized)
tgagattccgggaagagggcccctggctgagagctctgatagtgggaagaaagtgccaactcctgccccgcggcctttgctgctgaagaaatctgtttcctcagaaaaccccacctaccc

SEQ ID NO: 173716 - DNA, 120 bp, Artificial Sequence
  ENSG00000109686_13 (sequence is synthesized)
ttcagctccactgaaacctgtcactgttcctccccgactcgcaggggcatcacaagccaaagcatacaagtcactgggagaagggcccccagccaaccccccagttccagttctgcagag

SEQ ID NO: 173717 - DNA, 120 bp, Artificial Sequence
  ENSG00000109686_14 (sequence is synthesized)
caagcccttggtggacatcgatctcatcagctttgatgatgatgttttgcccaccccatcggggaacctggctgaagaatctgttggttcagagatggttctagatccctttcagctccc

SEQ ID NO: 173718 - DNA, 120 bp, Artificial Sequence
  ENSG00000109686_15 (sequence is synthesized)
tgcaaaaacagaaccaataaaagaacgagcagttcaaccagcacccaccaggaagcccactgtaattcgaattccagccaaaccaggaaaatgtttacatgaggatccacaaagtccacc

SEQ ID NO: 173719 - DNA, 120 bp, Artificial Sequence
  ENSG00000109686_16 (sequence is synthesized)
tcctctccctgctgaaaaacctattggaaacactttcagtacagtatctggaaagctcagtaatgttgagagaactagaaacttggaatccaaccacccaggtcaaacaggaggttttgt

SEQ ID NO: 173720 - DNA, 120 bp, Artificial Sequence
  ENSG00000109686_17 (sequence is synthesized)
gcgagtacccccaaggttgccaccgagacctgtgaatggaaaaaccattccaactcaacagcctccaaccaaggtgccccctgagagaccacctcccccaaagctttctgcaaccagaag

SEQ ID NO: 173721 - DNA, 120 bp, Artificial Sequence
  ENSG00000109686_18 (sequence is synthesized)
atctaataagaaactgccttttaatcgatcctcttctgacatggatcttcagaaaaaacaaagtaacttggcaactggactctcaaaagccaagagtcaagtttttaaaaatcaagatcc

SEQ ID NO: 173722 - DNA, 120 bp, Artificial Sequence
  ENSG00000109686_19 (sequence is synthesized)
ggtgctaccccctcgtcccaaaccaggacaccctctctacagtaaatacatgctgtctgtgcctcatggaattgccaatgaagatattgtctctcaaaaccccggagaactctcttgtaa

SEQ ID NO: 173723 - DNA, 120 bp, Artificial Sequence
  ENSG00000109686_20 (sequence is synthesized)
gcgtggggatgtacttgtgatgctgaagcagacggaaaataattacttggagtgccaaaagggagaagacactggcagagttcacctgtctcaaatgaagattatcactccacttgatga

SEQ ID NO: 173724 - DNA, 120 bp, Artificial Sequence
  ENSG00000109686_21 (sequence is synthesized)
acctcacttctggagaaattgtttatcttctggagaagatagatacagattggtacagagggaactgtagaaaccagattggcatatttcctgccaactatgtcaaagtgattattgata

SEQ ID NO: 173725 - DNA, 120 bp, Artificial Sequence
  ENSG00000109686_22 (sequence is synthesized)
tcccagaaggaggaaatgggaaaagagaatgtgtttcatctcattgtgttaaaggctcaagatgtgttgctcggtttgaatatattggagagcagaaggatgagttgagtttctcagagg

SEQ ID NO: 173726 - DNA, 120 bp, Artificial Sequence
  ENSG00000109686_23 (sequence is synthesized)
gagaaattattattcttaaagagtatgtgaatgaggaatgggccagaggagaagttcgaggcagaactgggattttccccctgaactttgtggagcctgttgaggattatcccacctctg

SEQ ID NO: 173727 - DNA, 120 bp, Artificial Sequence
  ENSG00000109686_24 (sequence is synthesized)
gtgcaaatgttttaagcacaaaggtaccactgaaaaccaaaaaagaagattctggctcaaactctcaggttaacagtcttccggcagaatggtgtgaagctcttcacagttttacagcag

SEQ ID NO: 173728 - DNA, 120 bp, Artificial Sequence
  ENSG00000109686_25 (sequence is synthesized)
agaccagtgatgacttatcattcaagaggggagaccggatccagattctggaacgtctggattctgactggtgcaggggcagactgcaggacagggaggggatcttcccagcagtgtttg

SEQ ID NO: 173729 - DNA, 120 bp, Artificial Sequence
  ENSG00000109686_26 (sequence is synthesized)
tgaggccctgcccagctgaggcaaaaagtatgttggccatagtaccgaaggggaggaaggccaaagccttatatgatttccgaggggagaatgaagatgaactttccttcaaggctggag

SEQ ID NO: 173730 - DNA, 120 bp, Artificial Sequence
  ENSG00000109686_27 (sequence is synthesized)
atataataacagagctggaatctgtagatgatgactggatgagtggagaacttatgggaaaatctggaatatttcccaaaaactacatacagtttctacagatcagctagaggagaagct

SEQ ID NO: 173731 - DNA, 120 bp, Artificial Sequence
  ENSG00000109686_28 (sequence is synthesized)
tgtctgtgttccttggcacaagaactcacttgaactatcaccttgactatcagatatgtttttgcactattttttttaactgaaaaagaaatatctaagctgtacatggtacactagaat

SEQ ID NO: 173732 - DNA, 120 bp, Artificial Sequence
  ENSG00000109686_29 (sequence is synthesized)
tttctgaaagcagaaaacgttcagattttgtagttaattttcattacaatagaaacatgcacatggaaacccatgagctaggattctaccgaggaaaacatctagtgggattagcaaggt

SEQ ID NO: 173733 - DNA, 120 bp, Artificial Sequence
  ENSG00000109686_30 (sequence is synthesized)
gaagggaaagcatctggtggcatggcagcatggggaggctcacacacagaagttgcacgtggacatctgttttaatcagcacaagtgaattaaccatgcttcttcatttttttactttag

SEQ ID NO: 173734 - DNA, 120 bp, Artificial Sequence
  ENSG00000109686_31 (sequence is synthesized)
ttaaaaaagaggacatttaatattctacatgctgtaactatcaggacatggttagcaatctcaatttcatttttgatattcaaattaattcttacagcttgagcatatcagccttattac

SEQ ID NO: 173735 - DNA, 120 bp, Artificial Sequence
  ENSG00000109686_32 (sequence is synthesized)
cagagcaaatccttccttcagatgggatagtttactgactagttggagcatttgtaagcacatggtgaaatcagcccctgcccaccaaaataatctttatgttaccaagtgattcccatt

SEQ ID NO: 173736 - DNA, 120 bp, Artificial Sequence
  ENSG00000109686_33 (sequence is synthesized)
tgtctaaggatttgaagggggtctaaattggatgtatcttacttagtctaaagaaccaaaaccatccctgaaatgccttgctaatacaactaatccttccatatatgtgccatacttatt

SEQ ID NO: 173737 - DNA, 120 bp, Artificial Sequence
  ENSG00000109686_34 (sequence is synthesized)
tttttcctcagtgtatactttatgttaacagggttattacaaagcacattttctgaatctgcaatcattcctttgacaattactggacccaaaggaaaattcattttctttgcattattc

SEQ ID NO: 173738 - DNA, 120 bp, Artificial Sequence
  ENSG00000109686_35 (sequence is synthesized)
cagtaatatataaaaactgtgtcttgttatagtagtacattatgaatcacatataaaatcttacaatacagaacaactgttaagatggaaaacagtgccaaacctccacagctcatttct

SEQ ID NO: 173739 - DNA, 120 bp, Artificial Sequence
  ENSG00000109686_36 (sequence is synthesized)
ttgtaatataatcagaatgaaaaataatttaagaggacagaagactggtacttttttgttttattttttctctagcttatccctgcacaattattagagtgaatgaaaaaccactttcct

SEQ ID NO: 173740 - DNA, 120 bp, Artificial Sequence
  ENSG00000109686_37 (sequence is synthesized)
gctttccattgttataaattctaagcttaagataaaagtggttctttacatgactgaatcaattacaatttatgggctagagccaaataggttgaagacaatcatccaaacagatcaatg

SEQ ID NO: 173741 - DNA, 120 bp, Artificial Sequence
  ENSG00000109686_38 (sequence is synthesized)
gaatagaatttcattggaaatgtaaaacactttcccaacaatggtcatgactttcttctgtttttgagaagagtttcatatgctggaccacattttagcttttattgttttttttttccc

SEQ ID NO: 173742 - DNA, 120 bp, Artificial Sequence
  ENSG00000109686_39 (sequence is synthesized)
attgtccaaaaagttaagcaacaagtggccacacttttacgtgactacaacctggagttctgcaaagaaggtaatatttacttggtctttgactaaagttatctccccattctatggtta

SEQ ID NO: 173743 - DNA, 120 bp, Artificial Sequence
  ENSG00000109686_40 (sequence is synthesized)
cattttattttggactatggggacttctaatacgttttggtaaagaagagagtataaagaaaattcttgtcaaatttcactcaaaagtaatttcatgagaaatcaatgatttaaagcatt

SEQ ID NO: 173744 - DNA, 120 bp, Artificial Sequence
  ENSG00000109686_41 (sequence is synthesized)
atccaaattaaattatcatttgcagcaaactgtacaacagcaggaaggatatggaatggaacatgaggtatatatctttgcctttataattttaacatcttatattgaagattctgaaaa

SEQ ID NO: 173745 - DNA, 120 bp, Artificial Sequence
  ENSG00000109686_42 (sequence is synthesized)
cctatctttattagaggaaaatctcaatcttcagttttggccttctgtcagcagaatgataagtgcaatagttgtaaatctacttgacactgtaataaactgaactgaactttcaaagtc

SEQ ID NO: 173746 - DNA, 120 bp, Artificial Sequence
  ENSG00000109686_43 (sequence is synthesized)
agccatttgcttcctgagtggccacattccagctgtgcagactggtcatagcacatctgccaatcagaacaggccctggagggaagcccttggatactgagtcttgtttacatgcatcgt

SEQ ID NO: 173747 - DNA, 120 bp, Artificial Sequence
  ENSG00000109686_44 (sequence is synthesized)
gactctgtttctcccttcctcttgtgtgttgtaccactaggaagattagtggggaaatttgctattacatgcctaagtaaactatgtaactaggatcacagccacaggaaatgatgttct

SEQ ID NO: 173748 - DNA, 120 bp, Artificial Sequence
  ENSG00000109686_45 (sequence is synthesized)
agagcgggagtgggagtgggaaaggccagggattaagaggccgccgggacgccgcaaggaggcggggaatcggctcggcccgcgccctgccgctgcccggccggctgcaggtggagttcg

SEQ ID NO: 173749 - DNA, 120 bp, Artificial Sequence
  ENSG00000109686_46 (sequence is synthesized)
aggtggagttcgcggaggtggccatttccacagccgccgccgacgcctcctctccgggagccgccttccccccggcccgagggcggtggcgtggggcgccgggtgcaggcgttctggggc

SEQ ID NO: 173750 - DNA, 120 bp, Artificial Sequence
  ENSG00000109686_47 (sequence is synthesized)
gctcgctggccatcccgcggctgcgccccgcgcctcgcccatggctgagggccggcggcgggaggacgaggaggaagagctacgcgagcgccgcgaacttggtggccagcgccgcgcccg

SEQ ID NO: 173751 - DNA, 120 bp, Artificial Sequence
  ENSG00000109686_48 (sequence is synthesized)
tttaacaagagagttaatcaataatctttttaaaagagctgaacataagcataattaggctgaaagaaactgggagaattatctcttgtcgtctttgccacttctgaagaactgcttccc

SEQ ID NO: 173752 - DNA, 120 bp, Artificial Sequence
  ENSG00000109686_49 (sequence is synthesized)
ccaatgaccctcagattctgataagtaaaaatttttaaaataataaaatagtgatttatctaaatggttatattattcaaggttacaaatagaagctacttgttatgaactaaatatgcc

SEQ ID NO: 173753 - DNA, 120 bp, Artificial Sequence
  ENSG00000109686_50 (sequence is synthesized)
tttagctgctggagaaggtgcactttaggcacacacatgccaaattcctaaatgatcagcaacttaagaggaggttatttgattgtgaataagccttttattggtttacgtttaagctgt

SEQ ID NO: 173754 - DNA, 120 bp, Artificial Sequence
  ENSG00000109686_51 (sequence is synthesized)
ctgtgcctcatggaattgccaatgaagatattgtctctcaaaaccccggagaactctcttgtaaggtaaagtagagctctttccttactggttaatgtaaaaaaaaaattactggcctct

SEQ ID NO: 173755 - DNA, 120 bp, Artificial Sequence
  ENSG00000109686_52 (sequence is synthesized)
cacacttttacgtgactacaacctggagttctgcaaagaaggaataatccaatactcaaggttgtgttgtgtgaggaagcaaagaaacacttacaatttattgaccacttctttcaagtc

SEQ ID NO: 173756 - DNA, 120 bp, Artificial Sequence
  ENSG00000109686_53 (sequence is synthesized)
gtgctgagcataagaggtcttccgtatctgattgttgcgttttttagtaaaaccaacacagaacagacgaagcaagtaaccatcggtagtcttgacatcaacgtgagcttcaatcattgt

SEQ ID NO: 173757 - DNA, 120 bp, Artificial Sequence
  ENSG00000109686_54 (sequence is synthesized)
ctggagaaaaaagataccgtcagatttaacaggttttacgttatccatttatccctcaagttctaattttaaaaagctggattgtcaaacactcattattaaatataaagtatcctaaca

SEQ ID NO: 173758 - DNA, 120 bp, Artificial Sequence
  ENSG00000109686_55 (sequence is synthesized)
gattccatgctgactatcctccgtcttaatcctggttttcttcaaccagtgcataatactgttgattagatttaaactttcatcggtacgatctcattcctagtacgttgccttaagatt

SEQ ID NO: 173759 - DNA, 120 bp, Artificial Sequence
  ENSG00000109686_56 (sequence is synthesized)
tcggttaagatggaggaatgccgagtcatatatccttcccccaaaattaaatatttgaagggatatgtcttattttatttctgggatagaatgtttttcattttcatgttactgaagtgt

SEQ ID NO: 173760 - DNA, 120 bp, Artificial Sequence
  ENSG00000109686_57 (sequence is synthesized)
agttttactaaactactaaatcggagactgctaagcaccttccctgtgccaggcacagcactgggtagggtgagggccctgggagtaaatattctgggacaggcacagggggtgtacagg

SEQ ID NO: 173761 - DNA, 120 bp, Artificial Sequence
  ENSG00000109686_58 (sequence is synthesized)
gaaagagtctttcctctctgtggcatctgggaggctttaggatgtgggaaagatggtctcctcatctcagttgcccctcattttcaggcagacacgtatgaaatgattacactcccctga

SEQ ID NO: 173762 - DNA, 120 bp, Artificial Sequence
  ENSG00000109686_59 (sequence is synthesized)
aagatcagcttctacataattcaagatcatcctcaatctctctcatcagagaggaagaaaagccgcatgaattatttacagaacactaagttatttccttttatgagctccaactttgtt

SEQ ID NO: 173763 - DNA, 120 bp, Artificial Sequence
  ENSG00000109686_60 (sequence is synthesized)
tttgtctctgcaaactgagattttgtttatccatgaatagtttccccaggggcatgaaaaatatgactcttaaattatgaatgaggttttttgtttcagtccatgttaactaaaacatgc

SEQ ID NO: 173764 - DNA, 120 bp, Artificial Sequence
  ENSG00000109689_0 (sequence is synthesized)
gaggcgggggattggtatgcgagcgaatgtgcgaggggagggaggcgtcccggcggagcgtggtactacgaccagcgcgggccggagggggcggggggatgcgccgcggcggcggcggcg

SEQ ID NO: 173765 - DNA, 120 bp, Artificial Sequence
  ENSG00000109689_1 (sequence is synthesized)
cgggagctggggttggtgtttggcggcgccagagcagcggatcccggtctcgccgcagcagcagcgcgggtgtcgtgcaccgcctgaagacgccgtacctttctaccccccacctttttt

SEQ ID NO: 173766 - DNA, 120 bp, Artificial Sequence
  ENSG00000109689_2 (sequence is synthesized)
ttttttttttttaaataaccggaaccaatgaacgcagccgggatcagagctccggaggccgccggtgccgatgggaccaggctggcgcccggcgggagcccgtgtctgaggcggcggggg

SEQ ID NO: 173767 - DNA, 120 bp, Artificial Sequence
  ENSG00000109689_3 (sequence is synthesized)
cggaggagtcgccggcggcggtggtggcgcctcgcggagccggcgagctgcaggcggccggggcgccgctgcgctttcacccggcttctcctcggcgccttcatcccgcctcgactcctg

SEQ ID NO: 173768 - DNA, 120 bp, Artificial Sequence
  ENSG00000109689_4 (sequence is synthesized)
gactcctggcccagcgtggggctggctgctgcggcggcggcgctgggctgcgttgctggtgctcgggctgctggtagccggagcggcggacggatgcgagcttgtgccccggcacctccg

SEQ ID NO: 173769 - DNA, 120 bp, Artificial Sequence
  ENSG00000109689_5 (sequence is synthesized)
cggcgggcgactggctctgccgcaactgccgcctcctctcccgccgcggcggccggcgatagcccggcgctcatgacagatccctgcatgtcactgagtccaccatgctttacagaagaa

SEQ ID NO: 173770 - DNA, 120 bp, Artificial Sequence
  ENSG00000109689_6 (sequence is synthesized)
gacagatttagtctggaagctcttcaaacaatacataaacaaatggatgatgacaaagatggtggaattgaagtagaggaaagtgatgaattcatcagagaagatatgaaatataaagat

SEQ ID NO: 173771 - DNA, 120 bp, Artificial Sequence
  ENSG00000109689_7 (sequence is synthesized)
gctactaataaacacagccatctgcacagagaagataaacatataacgattgaggatttatggaaacgatggaaaacatcagaagttcataattggacccttgaagacactcttcagtgg

SEQ ID NO: 173772 - DNA, 120 bp, Artificial Sequence
  ENSG00000109689_8 (sequence is synthesized)
ttgatagagtttgttgaactaccccaatatgagaagaattttagagacaacaatgtcaaaggaacgacacttcccaggatagcagtgcacgaaccttcatttatgatctcccagttgaaa

SEQ ID NO: 173773 - DNA, 120 bp, Artificial Sequence
  ENSG00000109689_9 (sequence is synthesized)
atcagtgaccggagtcacagacaaaaacttcagctcaaggcattggatgtggttttgtttggacctctaacacgcccacctcataactggatgaaagattttatcctcacagtttctata

SEQ ID NO: 173774 - DNA, 120 bp, Artificial Sequence
  ENSG00000109689_10 (sequence is synthesized)
gtaattggtgttggaggctgctggtttgcttatacgcagaataagacatcaaaagaacatgttgcaaaaatgatgaaagatttagagagcttacaaactgcagagcaaagtctaatggac

SEQ ID NO: 173775 - DNA, 120 bp, Artificial Sequence
  ENSG00000109689_11 (sequence is synthesized)
ttacaggagaggcttgaaaaggcacaggaagaaaacagaaatgttgctgtagaaaagcaaaatttagagcgcaaaatgatggatgaaatcaattatgcaaaggaggaggcttgtcggctg

SEQ ID NO: 173776 - DNA, 120 bp, Artificial Sequence
  ENSG00000109689_12 (sequence is synthesized)
agagagctaagggagggagctgaatgtgaattgagtagacgtcagtatgcagaacaggaattggaacaggttcgcatggctctgaaaaaggccgaaaaagaatttgaactgagaagcagt

SEQ ID NO: 173777 - DNA, 120 bp, Artificial Sequence
  ENSG00000109689_13 (sequence is synthesized)
tggtctgttccagatgcacttcagaaatggcttcagttaacacatgaagtagaagtgcaatactacaatattaaaagacaaaacgctgaaatgcagctagctattgctaaagatgaggca

SEQ ID NO: 173778 - DNA, 120 bp, Artificial Sequence
  ENSG00000109689_14 (sequence is synthesized)
gaaaaaattaaaaagaagagaagcacagtctttgggactctgcacgttgcacacagctcctccctagatgaggtagaccacaaaattctggaagcaaagaaagctctctctgagttgaca

SEQ ID NO: 173779 - DNA, 120 bp, Artificial Sequence
  ENSG00000109689_15 (sequence is synthesized)
acttgtttacgagaacgactttttcgctggcaacaaattgagaagatctgtggctttcagatagcccataactcaggactccccagcctgacctcttccctttattctgatcacagctgg

SEQ ID NO: 173780 - DNA, 120 bp, Artificial Sequence
  ENSG00000109689_16 (sequence is synthesized)
gtggtgatgcccagagtctccattccaccctatccaattgctggaggagttgatgacttagatgaagacacacccccaatagtgtcacaatttcccgggaccatggctaaacctcctgga

SEQ ID NO: 173781 - DNA, 120 bp, Artificial Sequence
  ENSG00000109689_17 (sequence is synthesized)
tcattagccagaagcagcagcctgtgccgttcacgccgcagcattgtgccgtcctcgcctcagcctcagcgagctcagcttgctccacacgccccccacccgtcacaccctcggcaccct

SEQ ID NO: 173782 - DNA, 120 bp, Artificial Sequence
  ENSG00000109689_18 (sequence is synthesized)
caccacccgcaacacacaccacactccttgccttcccctgatccagatatcctctcagtgtcaagttgccctgcgctttatcgaaatgaagaggaggaagaggccatttacttctctgct

SEQ ID NO: 173783 - DNA, 120 bp, Artificial Sequence
  ENSG00000109689_19 (sequence is synthesized)
gaaaagcaatgggaagtgccagacacagcttcagaatgtgactccttaaattcttccattggaaggaaacagtctcctcctttaagcctcgagatataccaaacattatctccgcgaaag

SEQ ID NO: 173784 - DNA, 120 bp, Artificial Sequence
  ENSG00000109689_20 (sequence is synthesized)
atatcaagagatgaggtgtccctagaggattcctcccgaggggattcgcctgtaactgtggatgtgtcttggggttctcccgactgtgtaggtctgacagaaactaagagtatgatcttc

SEQ ID NO: 173785 - DNA, 120 bp, Artificial Sequence
  ENSG00000109689_21 (sequence is synthesized)
aacgacagtaaaccagttcaggaagccccaagtgttgccagaataagcagcatcccacatgacctttgtcataatggagagaaaagcaaaaagccatcaaaaatcaaaagcctttttaag

SEQ ID NO: 173786 - DNA, 120 bp, Artificial Sequence
  ENSG00000109689_22 (sequence is synthesized)
aagaaatctaagtgaactggctgacttgatggaatcatgttcaagtggcatctgtaaactattatcccccaccctccactccccaccttttttttggtttaattttaggaatgtaactcc

SEQ ID NO: 173787 - DNA, 120 bp, Artificial Sequence
  ENSG00000109689_23 (sequence is synthesized)
attggggctttccaggccggatgccatagtggaacatccagaagggcaactgtctactgtctgcttatttaagtgactatatataatcaattcatcaagccagttattactgaaaaatca

SEQ ID NO: 173788 - DNA, 120 bp, Artificial Sequence
  ENSG00000109689_24 (sequence is synthesized)
ttgaaatgagacagtttacagtcatttctgcctatttatttctgctttgttctcagtgatgtatatgcaacattttgttgaaagccacgatggacttacaagctttaatggactcgtaag

SEQ ID NO: 173789 - DNA, 120 bp, Artificial Sequence
  ENSG00000109689_25 (sequence is synthesized)
ccagcatgggcttgcaaaaatttcttgtttaccagagcatcttcttatctttccacagagctatttacatcctggactatataacttaaaagaagtaaaacgtaattgcactactgtttt

SEQ ID NO: 173790 - DNA, 120 bp, Artificial Sequence
  ENSG00000109689_26 (sequence is synthesized)
ccagactggaaaaaaaaaaaatctctgcaagtgaaactgtatagagtttataaaatgactatggataggggactgttttcacttttagatcaaaatgggtttttaagtagaacctagggt

SEQ ID NO: 173791 - DNA, 120 bp, Artificial Sequence
  ENSG00000109689_27 (sequence is synthesized)
ttctaattgacttgatttctggaaatgaaaacccgcgcttttattatgggaagcttcttgaactgcatttactattgtgaagtttcaagtcccgctgtaaagatcatgttgttttgtttt

SEQ ID NO: 173792 - DNA, 120 bp, Artificial Sequence
  ENSG00000109689_28 (sequence is synthesized)
ccccagggctttcactgtgatttactgcattgcaggctgtatgataaaacacacataatttaaagagagaaggctcttgattccttatgcaagtggaagagttgaaacttgattgaagga

SEQ ID NO: 173793 - DNA, 120 bp, Artificial Sequence
  ENSG00000109689_29 (sequence is synthesized)
cttaaaacattcacaaccttaagccgaggtggggggatatggggattcaggcaattgtttacacactttgaataactgcaaaggatttacggtttgtgaaaaatgtgtactgtggaaaag

SEQ ID NO: 173794 - DNA, 120 bp, Artificial Sequence
  ENSG00000109689_30 (sequence is synthesized)
ataataaattgaagacattattgtgtgggattgtgctgatttttgttgataacacaaaaaacactatgttttctggagagctgtgtaagctgtcttgttgcttagttgcaatataagaaa

SEQ ID NO: 173795 - DNA, 120 bp, Artificial Sequence
  ENSG00000109689_31 (sequence is synthesized)
tagtgatgttttggacgtaagttgtcaacaaatttctattttatattgttatatttttatgtagtttgaaatgtaaaaatgttctaatatcaagattaacaaatataaatttatggtgca

SEQ ID NO: 173796 - DNA, 120 bp, Artificial Sequence
  ENSG00000109689_32 (sequence is synthesized)
tttagattgcgttgtattaatttataaagtatggtgttcattaaattggtgggttgtataagggtagcttttgttgttaaaaaaacagtagagagttaagttccatatagcaacaaagta

SEQ ID NO: 173797 - DNA, 120 bp, Artificial Sequence
  ENSG00000109689_33 (sequence is synthesized)
tgttaacatctagggagtttctgcttataccactttaaaaatatgcaatcataagtgatttggttactgcaatgcagatggatgtttggatgaacaactgatacattttagttagaatgc

SEQ ID NO: 173798 - DNA, 120 bp, Artificial Sequence
  ENSG00000109689_34 (sequence is synthesized)
tttttcagcattatggctaaaatatatgtctaacccagtgctatttaggtgaaaatgctaattgataaaccagaagtttcttttgagatttgctttaaagaaatgctttagtaagaatat

SEQ ID NO: 173799 - DNA, 120 bp, Artificial Sequence
  ENSG00000109689_35 (sequence is synthesized)
gaacaatttcctgatgtctcctataaattgtgattgtttattctattactattgttaaaaacttgaatggtatttatattggctgatatttatatacttaatagattgagttctgtaagg

SEQ ID NO: 173800 - DNA, 120 bp, Artificial Sequence
  ENSG00000109689_36 (sequence is synthesized)
gcaaaaacggattgaaatgaacatagcgttttgcactaatgataagataacctgagaggtagggttgaggaacacagggttgaaagctgttggagaggggaaaagttgtgcataaagaac

SEQ ID NO: 173801 - DNA, 120 bp, Artificial Sequence
  ENSG00000109689_37 (sequence is synthesized)
tgaaaagggttctggagtgttcattcagagtgaagggaaaactttatccttctatttcttataaccagacaggaggagttcttccctttgaaaattgcaaaaggaatgagaactttgcag

SEQ ID NO: 173802 - DNA, 120 bp, Artificial Sequence
  ENSG00000109689_38 (sequence is synthesized)
ttggatgaatagagaagggaaaagttgctggagcacggagtgaagatgggaggagctgttagcaaggcccactgctgctcctgggtgagaagggagctctggagcaggaccagctggggg

SEQ ID NO: 173803 - DNA, 120 bp, Artificial Sequence
  ENSG00000109689_39 (sequence is synthesized)
ccggcactgctgcttagagtggaggaggctggccaaagagactgtgggctgttttcagtcagggagcatgtgcattgtttgtgctcaatttcagacactcatttataaacaaattcaacc

SEQ ID NO: 173804 - DNA, 120 bp, Artificial Sequence
  ENSG00000109689_40 (sequence is synthesized)
aagggatatttactgctttatgttgcttatgataattattttgcattaatacagtatacacatttgtaaattcaacaggaaattattgagttttggaaagctacagtaatttctgtatta

SEQ ID NO: 173805 - DNA, 120 bp, Artificial Sequence
  ENSG00000109689_41 (sequence is synthesized)
catcatttatatgtgaaaagttggacatttctgtaagtttttaaaattatccatttgttactttaacattttaaaattatggtgttttcctgattttaaaagcaatattttccttactgt

SEQ ID NO: 173806 - DNA, 120 bp, Artificial Sequence
  ENSG00000109689_42 (sequence is synthesized)
atatcattttaggttttggtaagttttggggttgcaaacaaagacaggtaaaaggaaagagaatgctgtttcagacaaggtggttagggcaggcagcagtaacctgcgtaccctggagaa

SEQ ID NO: 173807 - DNA, 120 bp, Artificial Sequence
  ENSG00000109689_43 (sequence is synthesized)
gggcgggcagcggcgcgcggcgtcccggaacccagcagcttgagaactcgcgcacctgggggaagccggcaggaggcagcgggtttgcctgattctagagctcaatgctgcccatcaggt

SEQ ID NO: 173808 - DNA, 120 bp, Artificial Sequence
  ENSG00000109689_44 (sequence is synthesized)
gtttgaagtcatgatttggtgaaaatgggacagtgaagacgttctgaaaaaaaaaaaaggcatatgatgaggtttggacattgagaggtataggctggctgtaggagtcggatccctgca

SEQ ID NO: 173809 - DNA, 120 bp, Artificial Sequence
  ENSG00000109689_45 (sequence is synthesized)
gtttctggaaatcagaaggaaaactcgagagctgcactgtctaataaaacttcctgcattgatggaacgttcagttctcatttcaatagcaatgtcaaagtttcatagctagctctcata

SEQ ID NO: 173810 - DNA, 120 bp, Artificial Sequence
  ENSG00000109689_46 (sequence is synthesized)
aataagagaatgatttgaatttggaaaacttttcttcctcttcattttcagtctctcctctattgaaccaccagaatccttacaaaataataatgttgaatatttactgatttttttttt

SEQ ID NO: 173811 - DNA, 120 bp, Artificial Sequence
  ENSG00000109689_47 (sequence is synthesized)
ttatgagacggagtctcgctctgttggaatgttctatgccttatgcacatatatgctcatttaaacctcattttgagttttcttacatgtgaattcaactccatgtcactctggggaaaa

SEQ ID NO: 173812 - DNA, 120 bp, Artificial Sequence
  ENSG00000109689_48 (sequence is synthesized)
aaagaaatagaaaaaaatagcataagtggtacagatagttcaacattccaaagagtatgtactctgcaagaaaataaaatttgaacttgtattatgtcttattatccaagtcagattagt

SEQ ID NO: 173813 - DNA, 120 bp, Artificial Sequence
  ENSG00000109689_49 (sequence is synthesized)
aaatgttagaactagaaggtaacattagtgattaatcaaattttcttactttaacagataggaaaattgagacctcaagagatcaagtgatttactgaggcttttacaactgattaatgg

SEQ ID NO: 173814 - DNA, 120 bp, Artificial Sequence
  ENSG00000109689_50 (sequence is synthesized)
taggaccatcttaggaacccaagtctcctgacttaaatcagtattcttttcacacattgtttagagtttagaggctagtttttaaaatacttttagcctagcttagaatttcacacacaa

SEQ ID NO: 173815 - DNA, 120 bp, Artificial Sequence
  ENSG00000109689_51 (sequence is synthesized)
tgcagcaaagccacataacagaagagaaaatattcataaaattataactgaatcagcttctgactttggaagctgaacagcttcagggaacagtgatatattctgttcaattaatggaca

SEQ ID NO: 173816 - DNA, 120 bp, Artificial Sequence
  ENSG00000109689_52 (sequence is synthesized)
gccattccaaaaaaggctttgcagaaatgcctctatcaatgattgatttctgagtctgatcatttcctcatatctgaactgcttcttgctttctgttagcactacccattattgaattat

SEQ ID NO: 173817 - DNA, 120 bp, Artificial Sequence
  ENSG00000109689_53 (sequence is synthesized)
aaaagcatttgagaattatgcagcacacgtaggtgtattatgtgaaaccattaggtcgttatttaggggattttgtacctttcgagagcttgtagtgcagtaaagacgatcttcatagac

SEQ ID NO: 173818 - DNA, 120 bp, Artificial Sequence
  ENSG00000109689_54 (sequence is synthesized)
atatgtgagtaaagtacatagaaatgactaaattcagcaatctgaatatgtatctaaaatgtggtattaacatagaatattcatcaaaattaagtgccagacctccagtaaatgtgtaca

SEQ ID NO: 173819 - DNA, 120 bp, Artificial Sequence
  ENSG00000109689_55 (sequence is synthesized)
tcagtaacatgaaaatgatattaatcataggccatctaaggtaagagatcatttagtttattcattttgtaaatatgaatttagtccttgctatgagaggtgcatttgcctataacatga

SEQ ID NO: 173820 - DNA, 120 bp, Artificial Sequence
  ENSG00000109689_56 (sequence is synthesized)
gctgccaagacaagtgagacaaggacctggcctagttccagctgctgggttataatcatatgtgctcttgcctttctgttctgccttcagctctgttcccttctcacactgtatttcttt

SEQ ID NO: 173821 - DNA, 120 bp, Artificial Sequence
  ENSG00000109689_57 (sequence is synthesized)
tgccactttttaccttgactctccctttcatttctcaatcatttcctttcatggagtgaacagtattcaccttgggctcggtgcgtgcaaaagtgaatgagactaagtagtaaagctctc

SEQ ID NO: 173822 - DNA, 120 bp, Artificial Sequence
  ENSG00000109689_58 (sequence is synthesized)
tgatttggtgaaaatgggacagtgaagacgttctgaaaaaaaaaaaaggcatatgatgaggtttggacattgagaggtataggctggctgtaggagtcgggtttatgctgtgatgcacag

SEQ ID NO: 173823 - DNA, 120 bp, Artificial Sequence
  ENSG00000109689_59 (sequence is synthesized)
ttaacagctggaaagttctatatctgtggcaaagatgatctgcggtggagggtttattcctggcccctggccttcctggccttggtcttttgagtgcttgccggatccctagttcctttc

SEQ ID NO: 173824 - DNA, 120 bp, Artificial Sequence
  ENSG00000109689_60 (sequence is synthesized)
cggttccagtagtgagaggaataaacacttaaaactccagtccaatacactctcaatgtcaataccctccctatctttaaaagaagaaaaaaaaatactaaatcatctttgtttaaagaa

SEQ ID NO: 173825 - DNA, 120 bp, Artificial Sequence
  ENSG00000109689_61 (sequence is synthesized)
agcgggcatgcgcggggctgcggtggcgcaggcgccctgccgcgcccgccagtcgggaaccggttctccgagtccgagctggcggcgcgctgtttgcctgattctagagctcaatgctgc

SEQ ID NO: 173826 - DNA, 120 bp, Artificial Sequence
  ENSG00000109689_62 (sequence is synthesized)
gctattccgcggctccggccagggcgcgatgcggagccctgcctgctgcttcgtcgcggtcccctgcactccggacgtctttccttttcaccccgacaccccgccctcgccgagcctctc

SEQ ID NO: 173827 - DNA, 120 bp, Artificial Sequence
  ENSG00000109689_63 (sequence is synthesized)
gacggcactgattcccctcccttcagtcgggctctccgatcttccaagctgagcaatgcggtggtttctctttcgtgctgcagaagtgccagcagggatatagcaacaaggtgccacctg

SEQ ID NO: 173828 - DNA, 120 bp, Artificial Sequence
  ENSG00000109689_64 (sequence is synthesized)
caaacaacatgggcaaagtgcgatgcgtttatcctaagccaagaacacgcttagaatgcacgcccagagccagttctccccaagggatggcaacgcacctgtgtgccgggctccgcgcaa

SEQ ID NO: 173829 - DNA, 120 bp, Artificial Sequence
  ENSG00000109689_65 (sequence is synthesized)
gggctttccctgtttattctcccgccgccgctaacaaccttgtggggcgggcatggttggatccccaatttaaaagtggggaaactgaggacagattaacctgtctgcacgtaacacagc

SEQ ID NO: 173830 - DNA, 120 bp, Artificial Sequence
  ENSG00000109705_0 (sequence is synthesized)
gccgccggcgctctctgtcccgctcggagctgctcggcgccccagctgcccgccccgccggccgctcctgcccgcggcgcagatggctgtgcgcggcgccaacaccttgacgtccttctc

SEQ ID NO: 173831 - DNA, 120 bp, Artificial Sequence
  ENSG00000109705_1 (sequence is synthesized)
gacgtccttctccatccaggcgatcctcaacaagaaagaggagcgcggcgggctggccgcgccagaggggcgcccggcgcccgggggcacagcggcatcggtggccgcggctcccgctgt

SEQ ID NO: 173832 - DNA, 120 bp, Artificial Sequence
  ENSG00000109705_2 (sequence is synthesized)
ctgctgttggcggctctttggggagagggacgcgggcgcgttggggggcgccgaggactctctgctggcgtctcctgccggtaccagaacagctgcggggcggactgcggagagcccgga

SEQ ID NO: 173833 - DNA, 120 bp, Artificial Sequence
  ENSG00000109705_3 (sequence is synthesized)
aggctgggactcggactccgcgctcagcgaggagaacgagagcaggcggcgctgcgcggacgcgcggggggccagcggggccggccttgcggggggatccttgagcctcggccagccggt

SEQ ID NO: 173834 - DNA, 120 bp, Artificial Sequence
  ENSG00000109705_4 (sequence is synthesized)
ctgtgagctggccgcttccaaagacctagaggaggaagccgcgggccggagcgacagcgagatgtccgccagcgtctcaggcgaccgcagcccaaggaccgaggacgacggtgttggccc

SEQ ID NO: 173835 - DNA, 120 bp, Artificial Sequence
  ENSG00000109705_5 (sequence is synthesized)
caaggaccgaggacgacggtgttggccccagaggtgcacacgtgtccgcgctgtgcagcggggccggcggcgggggcggcagcgggccggcaggcgtcgcggaggaggaggaggagccgg

SEQ ID NO: 173836 - DNA, 120 bp, Artificial Sequence
  ENSG00000109705_6 (sequence is synthesized)
gcgggccgctttctcccacgcgcaggtcttcgagctggagcgccgctttaaccaccagcgctacctgtccgggcccgagcgcgcagacctggccgcgtcgctgaagctcaccgagacgca

SEQ ID NO: 173837 - DNA, 120 bp, Artificial Sequence
  ENSG00000109705_7 (sequence is synthesized)
ggtgaaaatctggttccagaaccgtcgctacaagacaaagcgccggcagatggcagccgacctgctggcctcggcgcccgccgccaagaaggtggccgtaaaggtgctggtgcgcgacga

SEQ ID NO: 173838 - DNA, 120 bp, Artificial Sequence
  ENSG00000109705_8 (sequence is synthesized)
ccagagacaatacctgcccggcgaagtgctgcggccaccctcgcttctgccactgcagccctcctactattacccgtactactgcctcccaggctgggcgctctccacctgcgcagctgc

SEQ ID NO: 173839 - DNA, 120 bp, Artificial Sequence
  ENSG00000109705_9 (sequence is synthesized)
ggcgccccgccaaggaggcacctggaggtgaaacccagctccagctcccgttagccaggacttgtcccctggcagctgggctgagtctgccctgagggggcgcctttttctaatttgaac

SEQ ID NO: 173840 - DNA, 120 bp, Artificial Sequence
  ENSG00000109705_10 (sequence is synthesized)
agaggcaccctatggcctaggggccctgatcgcccacctgcctggaagcccctgggctctatttattatcatgacaatgttggaattaaattttgattcgaatatgtctgcctgggggtg

SEQ ID NO: 173841 - DNA, 120 bp, Artificial Sequence
  ENSG00000109705_11 (sequence is synthesized)
gggttttccctgagcggcaactcctggagaccacatagcctgaatcctcagaatttcaggcctgctgggagctttctgcactaggccacactagttcatggtatccatgctaccaatcta

SEQ ID NO: 173842 - DNA, 120 bp, Artificial Sequence
  ENSG00000109705_12 (sequence is synthesized)
tgtgtatctacatatcttttatttttggaaattgcatttgtaaccaaggggtgcgaaaccctggcagtcccaggcagcaccaggccaggggttgatttgaaacgtgaaggattgggtttt

SEQ ID NO: 173843 - DNA, 120 bp, Artificial Sequence
  ENSG00000109705_13 (sequence is synthesized)
caggccctctgctccacccctcctgtgtgtcagagctagggtgggggtgcccgattcgggtgctgaatgtaaggaggggagcctccaagtgtggtgcaagccgggggtctccacatcttc

SEQ ID NO: 173844 - DNA, 120 bp, Artificial Sequence
  ENSG00000109705_14 (sequence is synthesized)
cttctctgaagtccaggtacctgcacaagcaggaagcgcctgggagtcccggaaggaggagagcgcacacccaggcagccctctgcggaaactttccttggtttctttttatttgtgtaa

SEQ ID NO: 173845 - DNA, 120 bp, Artificial Sequence
  ENSG00000109705_15 (sequence is synthesized)
aggaggttaagacgtgtcgcacttttcagttgtttgtattcaaatgacgattatttttctactcaatgtgaatatccctggccagcctttccacggcgcccaccgcagtgccgctgcctg

SEQ ID NO: 173846 - DNA, 120 bp, Artificial Sequence
  ENSG00000109705_16 (sequence is synthesized)
gccctcagtgtctaccttctgccctctgcgactccagtgctctggcccgggactcccctatccgcccctcacttacccttaaacaggtgatcccacctgtcttgtcaacctcgccgcttt

SEQ ID NO: 173847 - DNA, 120 bp, Artificial Sequence
  ENSG00000109705_17 (sequence is synthesized)
tcgcctccttaatggcactgtgcactcaactagagtattaactgtaaaaagatttgtgaagtttggaagctctattcgctgtattttttctttaatttataaacttttagtttaacatgc

SEQ ID NO: 173848 - DNA, 120 bp, Artificial Sequence
  ENSG00000109736_0 (sequence is synthesized)
ggacgcacgcgggatggcggagtgggaggcgcgcggggttgggggtgctcctgcgtccggtgtgcaccccatggcccccgccagggagaccgagtccgggccaggggccggaatcgcggg

SEQ ID NO: 173849 - DNA, 120 bp, Artificial Sequence
  ENSG00000109736_1 (sequence is synthesized)
gcgcgggccggggctggggttggggttgggatcgggatcgggatcgggatcgggatccgggttccccgcggcttcaagttttctctcgctgttacgagggcgtgggaggcgcggccgtgg

SEQ ID NO: 173850 - DNA, 120 bp, Artificial Sequence
  ENSG00000109736_2 (sequence is synthesized)
ggtggggtggggccaggtccgcgatgtgctcaccctggtctctcaggaccgttgcctttgcggctattttttgtgcaatccccgaagcctgcgtttcctgctgcctgggttcggggcggg

SEQ ID NO: 173851 - DNA, 120 bp, Artificial Sequence
  ENSG00000109736_3 (sequence is synthesized)
ggcatcgcgcaggccagaacggcccctgcgtccgtaggccagagcccctgccatcagcccctttagggtgctcgccggctgtcgggtgtgggggtatgccaggccccggaggactcggct

SEQ ID NO: 173852 - DNA, 120 bp, Artificial Sequence
  ENSG00000109736_4 (sequence is synthesized)
tccccgctaacccgacccgccgcaccccacccaggccaggtcagagcagcccaccatgggatggggagggggtggaggctgcaccccgcgcccacccatccaccagcagccgccggagcg

SEQ ID NO: 173853 - DNA, 120 bp, Artificial Sequence
  ENSG00000109736_5 (sequence is synthesized)
ccgcgtggtcaccgttgtctttctcggcctcctgctggacctcctggccttcacgctgctgctgcccctgctgcccgggctgttggagagccacggccgtgcccacgaccccctctatgg

SEQ ID NO: 173854 - DNA, 120 bp, Artificial Sequence
  ENSG00000109736_6 (sequence is synthesized)
ctcctggcagggcggggtggactggtttgccaccgccatcgggatgccagtggagaagaggtacaacagtgtcctgttcggaggtctcattggctcggcattctctgtcctgcagtttct

SEQ ID NO: 173855 - DNA, 120 bp, Artificial Sequence
  ENSG00000109736_7 (sequence is synthesized)
gtgtgcgccactcactggggccacctctgactgcttggggaggcgcccggtgatgctgctgtgcctgatgggtgtggccacctcatatgcagtctgggccacctctcggagctttgcggc

SEQ ID NO: 173856 - DNA, 120 bp, Artificial Sequence
  ENSG00000109736_8 (sequence is synthesized)
cttcctggcctccaggctgattgggggcatcagcaaagggaacgtcagcctctccacggccatcgttgctgacctgggctcgcctctggcccgcagtcaaggcatggcggtcattggggt

SEQ ID NO: 173857 - DNA, 120 bp, Artificial Sequence
  ENSG00000109736_9 (sequence is synthesized)
ggcttcaccctgggccctatgctcggagcctccctgcccctggaaatggcaccctggtttgccctgctcttcgcagcctccgacctgctgttcatcttctgcttcctgccagagacgctg

SEQ ID NO: 173858 - DNA, 120 bp, Artificial Sequence
  ENSG00000109736_10 (sequence is synthesized)
cccctggagaaacgggcgccctctatcgccctggggttccgtgatgcggctgatctgctcagccccctggccctgctgcgcttctcggctgtcgctcgtggccaggacccaccctctgga

SEQ ID NO: 173859 - DNA, 120 bp, Artificial Sequence
  ENSG00000109736_11 (sequence is synthesized)
gacaggctcagcagcctgcgccgcctgggcctagtctacttcctctacctcttcctgttctcgggcctggagtacacgctgagcttcctcacacaccagcgcttccagttcagtagccta

SEQ ID NO: 173860 - DNA, 120 bp, Artificial Sequence
  ENSG00000109736_12 (sequence is synthesized)
cagcaggggaagatgtttttcctcatcggcctcaccatggccaccatccagggtgcctatgcccggcggatccaccctggcggggaagttgctgccgtgaagcgggccctcctgctgctg

SEQ ID NO: 173861 - DNA, 120 bp, Artificial Sequence
  ENSG00000109736_13 (sequence is synthesized)
gtgcccgccttcctcctcatcggctggggacgttctctgcccgtgctgggcctggggctgctgctctactcctttgccgccgccgttgtggtgccctgcctgtcctccgtggtcgctggc

SEQ ID NO: 173862 - DNA, 120 bp, Artificial Sequence
  ENSG00000109736_14 (sequence is synthesized)
tatggctcaccagggcagaagggcacggtcatgggtacactgcgcagcctaggtgctctggccagggccgcggggcccctggtggccgcttcagtgtactggctggccggggcccaggcc

SEQ ID NO: 173863 - DNA, 120 bp, Artificial Sequence
  ENSG00000109736_15 (sequence is synthesized)
tgcttcaccacgtggtccgggctctttttgctccccttcttcctcctgcagaagctgagttacccggcacagacgctcaaggctgagtagctgagccactgtgcccaggctgtgggcacc

SEQ ID NO: 173864 - DNA, 120 bp, Artificial Sequence
  ENSG00000109736_16 (sequence is synthesized)
aggcagagtgggagcctaggtcaggcccctgcccactgcctgacccccaccccccgccagtccagggagaccctgtgggtgggggccggcccctaagcaggaagctcaggcagctcctcc

SEQ ID NO: 173865 - DNA, 120 bp, Artificial Sequence
  ENSG00000109736_17 (sequence is synthesized)
agacttacttactccttcagtgactccgagctgcagcactccaaggctgtcagggcttctgtttgttttttaaactatgcaccaggtttctgatgatgaaataaagcacctgtttgtttt

SEQ ID NO: 173866 - DNA, 120 bp, Artificial Sequence
  ENSG00000109736_18 (sequence is synthesized)
gggcccctggtggccgcttcaggtgagggcgcgggatggtgctggggcaggctgggggccaagcacctgccctcgcctcccaagtgccagccccctcggggactgggtgacgccaccgtc

SEQ ID NO: 173867 - DNA, 120 bp, Artificial Sequence
  ENSG00000109736_19 (sequence is synthesized)
agtaaggactcgaccaacccaagcgtggagcctgctctcccctgggcttccccgggcggcgcccttccctgctgtggtcgccttctcagcacgcgccacctctccccagggctcagcagc

SEQ ID NO: 173868 - DNA, 120 bp, Artificial Sequence
  ENSG00000109736_20 (sequence is synthesized)
tcctgttccagagccaggctttcaaggagctgctcctggcccctaggaaggcactgagaacgcaagtggccctcagatgcttcgaaatagggcagggttgaggggtgttgtctgggttgc

SEQ ID NO: 173869 - DNA, 120 bp, Artificial Sequence
  ENSG00000109736_21 (sequence is synthesized)
caagccctactctgagccactcctggccttaagcgaccgcccctgcctcttggcccctgcccctgggcagatgggtgtggccacctcatatgcagtctgggccacctctcggagctttgc

SEQ ID NO: 173870 - DNA, 120 bp, Artificial Sequence
  ENSG00000109736_22 (sequence is synthesized)
ctgttctcgggcctggagtacacgctgagcttcctcacacaccagcgcttccagttcagtaggtgggtccccatctggcgacggcctgctgtctccctgaaataacgcccctgcttcagg

SEQ ID NO: 173871 - DNA, 120 bp, Artificial Sequence
  ENSG00000109738_0 (sequence is synthesized)
cagccgagctcggcggtggcgcgggcggctgggacgcagctgcccccgctcggcgcccgctgcacccttagcagccactgccacctgggcccggagcctccacgatctcgcccggcgatt

SEQ ID NO: 173872 - DNA, 120 bp, Artificial Sequence
  ENSG00000109738_1 (sequence is synthesized)
cggcgattgtgggcaggggcgcctccggatcgatcttctgaaattcaagttttcaagatgaagtttttattgacaactgcctttttaattttaatttccttgtgggtggaagaagcctat

SEQ ID NO: 173873 - DNA, 120 bp, Artificial Sequence
  ENSG00000109738_2 (sequence is synthesized)
tctaaggaaaagtcttcaaagaaagggaaggggaaaaagaagcagtatctatgcccatctcagcagtcagcagaggaccttgcccgagtacctgccaactccactagcaatatcttgaac

SEQ ID NO: 173874 - DNA, 120 bp, Artificial Sequence
  ENSG00000109738_3 (sequence is synthesized)
aggttattggtcagttatgatcccaggataagaccaaacttcaaaggcattcctgttgatgtagtagtcaacatttttattaacagttttggatccattcaagaaacaacaatggactat

SEQ ID NO: 173875 - DNA, 120 bp, Artificial Sequence
  ENSG00000109738_4 (sequence is synthesized)
agagttaacatcttcctgagacaaaaatggaatgaccccaggctgaagctccccagtgattttaggggttcagatgcactgacagtggatccaacaatgtacaagtgtttatggaaacct

SEQ ID NO: 173876 - DNA, 120 bp, Artificial Sequence
  ENSG00000109738_5 (sequence is synthesized)
gatttattttttgcaaatgaaaaaagtgccaattttcatgatgtgacccaggaaaacatcctcctctttatttttcgtgatggagatgtccttgtcagcatgaggttatctattactctt

SEQ ID NO: 173877 - DNA, 120 bp, Artificial Sequence
  ENSG00000109738_6 (sequence is synthesized)
tcatgccctttggacttgacattgtttcccatggatacacaacgttgcaagatgcaactggagagctttggttacacaactgatgatttacgatttatctggcagtcaggagatcctgtg

SEQ ID NO: 173878 - DNA, 120 bp, Artificial Sequence
  ENSG00000109738_7 (sequence is synthesized)
caattagaaaaaattgccttgcctcaatttgatatcaaaaaggaagatattgaatatggtaactgtacaaaatactataaaggcacgggctactacacatgcgtggaagtcatcttcacc

SEQ ID NO: 173879 - DNA, 120 bp, Artificial Sequence
  ENSG00000109738_8 (sequence is synthesized)
ctgaggaggcaggtcggcttttacatgatgggggtctacgccccaactctgctcattgttgttctctcctggctttccttctggatcaacccggacgcgagtgctgccagagtgcccctg

SEQ ID NO: 173880 - DNA, 120 bp, Artificial Sequence
  ENSG00000109738_9 (sequence is synthesized)
ggtatcttctcagtcctcagcttggcctctgagtgcacaacccttgccgctgagcttcccaaagtttcctatgtgaaggctcttgatgtttggcttattgcttgccttctctttgggttt

SEQ ID NO: 173881 - DNA, 120 bp, Artificial Sequence
  ENSG00000109738_10 (sequence is synthesized)
gcttccctggtggagtatgcagttgtccaggtgatgctgaacaaccccaaaagggttgaagctgaaaaagccagaattgctaaggctgagcaagcagatggaaaaggtggaaatgtggct

SEQ ID NO: 173882 - DNA, 120 bp, Artificial Sequence
  ENSG00000109738_11 (sequence is synthesized)
aaaaagaatactgtgaatggaacagggactcctgttcatattagcactttgcaggttggtgagaccagatgcaaaaaagtttgtacttctaagtctgatctgagatctaatgacttcagc

SEQ ID NO: 173883 - DNA, 120 bp, Artificial Sequence
  ENSG00000109738_12 (sequence is synthesized)
tccaattatgactgctatggaaaacccattgaagttaacaacggacttgggaaatctcaggctaagaacaacaagaagcctccccctgcgaaacctgttattccaacagcagcaaagcga

SEQ ID NO: 173884 - DNA, 120 bp, Artificial Sequence
  ENSG00000109738_13 (sequence is synthesized)
attgatctttatgcaagagcattgtttcctttctgcttcttgttcttcaatgttatatattggtctatatatttatgataaatcttttccatttgtacaaaataaaattccatttcattg

SEQ ID NO: 173885 - DNA, 120 bp, Artificial Sequence
  ENSG00000109738_14 (sequence is synthesized)
tgacctactcctttcataaatgccaatctgtgagaacttttgaattttcatagcaacattgcattttggatgccatttgattgtaataaaactgtggcaccttaattttgaatggcagca

SEQ ID NO: 173886 - DNA, 120 bp, Artificial Sequence
  ENSG00000109738_15 (sequence is synthesized)
tgatcatgtaatatctgtgctctaataacgatgtatatatgtatagtgaacatattgcttagtaacaaatgaaggacaagcatactacataatataatccatacaattctcttcagttag

SEQ ID NO: 173887 - DNA, 120 bp, Artificial Sequence
  ENSG00000109738_16 (sequence is synthesized)
tgtaaactgcaaatactacagataattctgataataaaatgatatgcacgctgaatcctgctatggtcaccattctaatgtatgtagtatttcaaatttccttccttgtaactttcaaag

SEQ ID NO: 173888 - DNA, 120 bp, Artificial Sequence
  ENSG00000109738_17 (sequence is synthesized)
aaagccatcttattcttgtaaaattttagatggtattatcacagatttaaaaaggttgtattacatattgtttaaactttgtaagtagaaatatatctgttataattatacaggctctgt

SEQ ID NO: 173889 - DNA, 120 bp, Artificial Sequence
  ENSG00000109738_18 (sequence is synthesized)
ggagaaataaagttcaaaatatattaatttgtaaaatcagctcgttttaaagtgtgcttgtgttgtcaaaaatatcagatagtaatacacagtgagcatttttaaacaaagggaaaccta

SEQ ID NO: 173890 - DNA, 120 bp, Artificial Sequence
  ENSG00000109738_19 (sequence is synthesized)
tatttatgtaactgtatactgaattctgacaaaataaaaaaagataccttattgacgaaatatttaggataaacaaaattctatttaatccaccttaaaacctaaatgtattttcatgga

SEQ ID NO: 173891 - DNA, 120 bp, Artificial Sequence
  ENSG00000109738_20 (sequence is synthesized)
tttcatttgttggtacatattacacaaaacattgtgccttaaaatgagtcatacatcttttaaattggaatgcagtaatagatatgtgattttacatcatttttaagaaaccaaggggaa

SEQ ID NO: 173892 - DNA, 120 bp, Artificial Sequence
  ENSG00000109738_21 (sequence is synthesized)
aagaaaccaaggggaagtaataagttgaaaaagaaatccataactattaaaagattttaacttttttattttattaaaatgcttgcatattttaagtaaaattaaaaatgtttactgaat

SEQ ID NO: 173893 - DNA, 120 bp, Artificial Sequence
  ENSG00000109738_22 (sequence is synthesized)
atattttgggattagttacaaaatatttagagattaaataaataatagctttgtttgtgttagacttcacttctacttgtattttctttcttgttaaaagtctagacaactgagatttac

SEQ ID NO: 173894 - DNA, 120 bp, Artificial Sequence
  ENSG00000109738_23 (sequence is synthesized)
ttactttgaacttgttccaatccaaaagtaagcactaagtctcattttatgagaccaccatttcttaatatcacatccagtgcacctttgtctttctgccatatctgaaataaaactatc

SEQ ID NO: 173895 - DNA, 120 bp, Artificial Sequence
  ENSG00000109738_24 (sequence is synthesized)
agtaattcacatagataaacataagactaaagaagtatatttacattatctggagagttttgttgcagctacgagtttgtatggcaaattcaataataaagtattgtttatgcaaattgc

SEQ ID NO: 173896 - DNA, 80 bp, Artificial Sequence
  ENSG00000109738_25 (sequence is synthesized)
gaggggcgcggggcgcctggcagcggcagccgggtccccgctgcggtggcgcccgcggagacgctccgggtggagagatg

SEQ ID NO: 173897 - DNA, 120 bp, Artificial Sequence
  ENSG00000109738_26 (sequence is synthesized)
ccatcagagagattgtaccattgaatgacagcattttcatacttcagtctgtatgtactaagaaggtcagcagtcagcagaggaccttgcccgagtacctgccaactccactagcaatat

SEQ ID NO: 173898 - DNA, 120 bp, Artificial Sequence
  ENSG00000109743_0 (sequence is synthesized)
atcagtttgcggaaccgccttggtagaaggagagaaggggagtggaggaagcacgggactggagggaccaaagttccccgatggcggcccaggggtgcgcggcatcgcggctgctccagc

SEQ ID NO: 173899 - DNA, 120 bp, Artificial Sequence
  ENSG00000109743_1 (sequence is synthesized)
tgctgctgcagcttctgcttctactgttgctgctggcggcgggcggggcgcgcgcgcggtggcgcggggagggcaccagcgcacacttgcgggacatcttcctgggccgctgcgccgagt

SEQ ID NO: 173900 - DNA, 120 bp, Artificial Sequence
  ENSG00000109743_2 (sequence is synthesized)
accgcgcactgctgagtcccgagcagcggaacaagaactgcacagccatctgggaagcctttaaagtggcgctggacaaggatccctgctccgtgctgccctcagactatgaccttttta

SEQ ID NO: 173901 - DNA, 120 bp, Artificial Sequence
  ENSG00000109743_3 (sequence is synthesized)
ttaacttgtccaggcactctattcccagagataagtccctgttctgggaaaatagccacctccttgttaacagctttgcagacaacacccgtcgttttatgcccctgagcgatgttctgt

SEQ ID NO: 173902 - DNA, 120 bp, Artificial Sequence
  ENSG00000109743_4 (sequence is synthesized)
atggcagggttgcagatttcttgagctggtgtcgacagaaaaatgactctggactcgattaccaatcctgccctacatcagaagactgtgaaaataatcctgtggattccttttggaaaa

SEQ ID NO: 173903 - DNA, 120 bp, Artificial Sequence
  ENSG00000109743_5 (sequence is synthesized)
gggcatccatccagtattccaaggatagttctggggtgatccacgtcatgctgaatggttcagagccaacaggagcctatcccatcaaaggtttttttgcagattatgaaattccaaacc

SEQ ID NO: 173904 - DNA, 120 bp, Artificial Sequence
  ENSG00000109743_6 (sequence is synthesized)
tccagaaggaaaaaattacacgaatcgagatctgggttatgcatgaaattgggggacccaatgtggaatcctgcggggaaggcagcatgaaagtcctggaaaagaggctgaaggacatgg

SEQ ID NO: 173905 - DNA, 120 bp, Artificial Sequence
  ENSG00000109743_7 (sequence is synthesized)
ggttccagtacagctgtattaatgattaccgaccagtgaagctcttacagtgcgtggaccacagcacccatcctgactgtgccttaaagtcggcagcagccgctactcaaagaaaagccc

SEQ ID NO: 173906 - DNA, 120 bp, Artificial Sequence
  ENSG00000109743_8 (sequence is synthesized)
tccaggactcaactgtaactggaaactgtgttgctctaaccctcctccagccctgcagcctccccttgcagtcatcattcgtgttctgtgtataccaaatgattctgttatctaaagaag

SEQ ID NO: 173907 - DNA, 120 bp, Artificial Sequence
  ENSG00000109743_9 (sequence is synthesized)
ctttttgctgggaaaacgatgtcctgaaaatggtatttcaatgaggcatatgttcaggatttcagaaacaagaagttagttctatttagcaggttaaaaaatgctgcattagaattaaag

SEQ ID NO: 173908 - DNA, 120 bp, Artificial Sequence
  ENSG00000109743_10 (sequence is synthesized)
caagttattttcttatttgtataatgacacaaagcattgggagtcagactgcttgtatattatcaaacattttaagagaattctaataaagctgtattttacatcatctatattttccta

SEQ ID NO: 173909 - DNA, 120 bp, Artificial Sequence
  ENSG00000109743_11 (sequence is synthesized)
tatctccagcagcacggacactgcatgcttgttgattgcttaagacatatgtatactatataaatgtatgcatatatggtctgcaaagttttcatttttcatttatttggtataaagatg

SEQ ID NO: 173910 - DNA, 120 bp, Artificial Sequence
  ENSG00000109743_12 (sequence is synthesized)
ttcagttaatggttcctttttgttttgagagacagagtttcgctcctttgcccaggctggagtgaggtggggagatctcagctcactgcaacctctgcttccaggattcaagcgattctc

SEQ ID NO: 173911 - DNA, 120 bp, Artificial Sequence
  ENSG00000109743_13 (sequence is synthesized)
gattacaggcgtgagccaccacatccagccataatagttacttataatgagggaaaaacccaaaatatccagtaatatttacatatttactgaaactgtttggaacttgtattagtttgt

SEQ ID NO: 173912 - DNA, 120 bp, Artificial Sequence
  ENSG00000109743_14 (sequence is synthesized)
acatatttactgaaactgtttggaacttgtattagtttgttcttgcattgctataaagaactgcccgagactgggtaatttacaaaaataaaaataaaaaagaggtttaattgactcaca

SEQ ID NO: 173913 - DNA, 60 bp, Artificial Sequence
  ENSG00000109743_15 (sequence is synthesized)
cttacagtgcgtggaccacagcacccatcctgactgtgccttaaagtttccttggcctcc

SEQ ID NO: 173914 - DNA, 120 bp, Artificial Sequence
  ENSG00000109743_16 (sequence is synthesized)
ccacaccaccttttatgtaatcctttctgagtcatgggctggcttggttgtatgttgttatagtagttgttttgctattataaacaatgctgaaatataatccttgattatatactttaa

SEQ ID NO: 173915 - DNA, 120 bp, Artificial Sequence
  ENSG00000109743_17 (sequence is synthesized)
caagcttcagaggaaacaggataaaatggactcccaaatatttagggtggtgaaaatactctgcatgatactagaattgtggatacaggtgattatatatgtgtccaaacctacagaagg

SEQ ID NO: 173916 - DNA, 120 bp, Artificial Sequence
  ENSG00000109743_18 (sequence is synthesized)
tacaacaccaagggtgaaccctcaggtaaactacagaggctgggtgaccatgatgtttcaatgtcggttcattagttgtgacaaatgcaccactccaccactctggtggggatgctgcca

SEQ ID NO: 173917 - DNA, 120 bp, Artificial Sequence
  ENSG00000109743_19 (sequence is synthesized)
gtgggggaggctatgtatgtgtggggacagagcgtatgtgggaagctctgtactttctgctcaaatttgctgtgaacctaaaactgctctaaacattaaagcctattcaaaaaaatgaaa

SEQ ID NO: 173918 - DNA, 120 bp, Artificial Sequence
  ENSG00000109743_20 (sequence is synthesized)
gagtccaaagatgtaaatgccttccactcccacagcaaggaagccgaaatctccagaggctctggcaagagttgagtcaattgcatgcctgcctagtccagctccgtccacatgaatgct

SEQ ID NO: 173919 - DNA, 88 bp, Artificial Sequence
  ENSG00000109756_0 (sequence is synthesized)
ctctccttttcttttgcctcttgttcttcaatctcagaaatgatcttgttctcttggaagactgagagctgtgtgaggttttctcagt

SEQ ID NO: 173920 - DNA, 120 bp, Artificial Sequence
  ENSG00000109756_1 (sequence is synthesized)
ttctcttggaagactgagagctgtgtgaggttttctcagtcttgtcatagcctaggatggttagagtttcaatgttataaaaatggagacgaacactgttgttcggattccttttctggt

SEQ ID NO: 173921 - DNA, 120 bp, Artificial Sequence
  ENSG00000109756_2 (sequence is synthesized)
ctacaagtgtgaagggtttttaagcttaccagtagtgacactttaagctgcagcttggttttccctcctccctttttttttttcctttttcttttaatttaatgctgtagagggtgactt

SEQ ID NO: 173922 - DNA, 120 bp, Artificial Sequence
  ENSG00000109756_3 (sequence is synthesized)
gccatcgtgagagattggtacatgatgtgtaaattcagttcagcatatgtttcttcattatgaaaccactagcaatcccagctaaccatggagttatgggccagcaggagaaacactcac

SEQ ID NO: 173923 - DNA, 120 bp, Artificial Sequence
  ENSG00000109756_4 (sequence is synthesized)
ttcctgcagatttcacaaaactgcatcttactgacagtctccacccacaggtgacccacgtttcttctagccattcaggatgtagtatcactagtgattctgggagcagcagtctttctg

SEQ ID NO: 173924 - DNA, 120 bp, Artificial Sequence
  ENSG00000109756_5 (sequence is synthesized)
atatctaccaggccacagaaagcgaggctggtgatatggacctgagtgggttgccagaaacagcagtggattccgaagacgacgacgatgaagaagacattgagagagcatcagatcctc

SEQ ID NO: 173925 - DNA, 120 bp, Artificial Sequence
  ENSG00000109756_6 (sequence is synthesized)
tgatgagcagggacattgtgagagactgcctagagaaggacccaattgaccggacagatgatgacattgaacaactcttggaatttatgcaccagttgcctgcttttgccaatatgacaa

SEQ ID NO: 173926 - DNA, 120 bp, Artificial Sequence
  ENSG00000109756_7 (sequence is synthesized)
tgtcagtgaggcgagaactctgtgctgtgatggtgttcgcagtggtggaaagagcagggaccatagtgttaaatgatggtgaagagctggactcctggtcagtgattctcaatggatctg

SEQ ID NO: 173927 - DNA, 120 bp, Artificial Sequence
  ENSG00000109756_8 (sequence is synthesized)
tggaagtgacttatccagatggaaaagcagaaatactgtgcatgggaaatagttttggtgtctctcctaccatggacaaagaatacatgaaaggagtgatgagaacaaaggtggatgact

SEQ ID NO: 173928 - DNA, 120 bp, Artificial Sequence
  ENSG00000109756_9 (sequence is synthesized)
gccagtttgtctgcatagcccagcaagattactgccgtattctcaatcaagtagaaaagaacatgcaaaaagttgaagaggaaggagagattgttatggtgaaagaacaccgagaacttg

SEQ ID NO: 173929 - DNA, 120 bp, Artificial Sequence
  ENSG00000109756_10 (sequence is synthesized)
atcgaactggaacaagaaagggacacattgtcatcaagggtacctcagaaaggttaacaatgcatttggtggaagagcattcagtagtagatccaacattcatagaagactttctgttga

SEQ ID NO: 173930 - DNA, 120 bp, Artificial Sequence
  ENSG00000109756_11 (sequence is synthesized)
cctataggacttttctttctagcccaatggaagtgggcaaaaagttattggagtggtttaatgacccgagcctcagggataaggttacacgggtagtattattgtgggtaaataatcact

SEQ ID NO: 173931 - DNA, 120 bp, Artificial Sequence
  ENSG00000109756_12 (sequence is synthesized)
tcaatgactttgaaggagatcctgcaatgactcgatttttagaagaatttgaaaacaatctggaaagagagaaaatgggtggacacctaaggctgttgaatatcgcgtgtgctgctaaag

SEQ ID NO: 173932 - DNA, 120 bp, Artificial Sequence
  ENSG00000109756_13 (sequence is synthesized)
caaaaagaagattgatgacgttaacaaaaccatcccgagaagctcctttgccttttatcttacttggaggctctgagaagggatttggaatctttgttgacagtgtagattcaggtagca

SEQ ID NO: 173933 - DNA, 120 bp, Artificial Sequence
  ENSG00000109756_14 (sequence is synthesized)
aagcaactgaagcaggcttgaaacggggggatcagatattagaagtaaatggccaaaactttgaaaacattcagctgtcaaaagctatggaaattcttagaaataacacacatttatcta

SEQ ID NO: 173934 - DNA, 120 bp, Artificial Sequence
  ENSG00000109756_15 (sequence is synthesized)
tcactgtgaaaaccaatttatttgtatttaaagaacttctaacaagattgtcagaagagaaaagaaatggtgccccccaccttcctaaaattggtgacattaaaaaggccagtcgctact

SEQ ID NO: 173935 - DNA, 120 bp, Artificial Sequence
  ENSG00000109756_16 (sequence is synthesized)
ccattccagatcttgctgtagatgtagaacaggtgataggacttgaaaaagtgaacaaaaaaagtaaagccaacactgtgggaggaaggaacaagctgaaaaagatactcgacaagactc

SEQ ID NO: 173936 - DNA, 120 bp, Artificial Sequence
  ENSG00000109756_17 (sequence is synthesized)
ggatcagtatcttgccacagaaaccatacaatgatattgggattggtcagtctcaagatgacagcatagtaggattaaggcagacaaagcacatcccaactgcattgcctgtcagtggaa

SEQ ID NO: 173937 - DNA, 120 bp, Artificial Sequence
  ENSG00000109756_18 (sequence is synthesized)
ccttatcatccagtaatcctgatttattgcagtcacatcatcgcattttagacttcagtgctactcctgacttgccagatcaagtgctaagggtttttaaggctgatcagcaaagccgct

SEQ ID NO: 173938 - DNA, 120 bp, Artificial Sequence
  ENSG00000109756_19 (sequence is synthesized)
acatcatgatcagtaaggacactacagcaaaggaagtggtcattcaggctatcagggagtttgctgttactgccaccccggatcaatattcactatgtgaggtctctgtcacacctgagg

SEQ ID NO: 173939 - DNA, 120 bp, Artificial Sequence
  ENSG00000109756_20 (sequence is synthesized)
gagtaatcaaacaaagaagacttccagatcagctttccaaacttgcagacagaatacaactgagtggaaggtattatctgaaaaacaacatggaaacagaaactctttgttcagatgaag

SEQ ID NO: 173940 - DNA, 120 bp, Artificial Sequence
  ENSG00000109756_21 (sequence is synthesized)
atgctcaggagttgttgagagagagtcaaatttccctccttcagctcagcactgtggaagttgcaacacagctctctatgcgaaattttgaactctttcgcaacattgaacctactgaat

SEQ ID NO: 173941 - DNA, 120 bp, Artificial Sequence
  ENSG00000109756_22 (sequence is synthesized)
atatagatgatttatttaaactcagatcaaaaaccagctgtgccaacctgaagagatttgaagaagtcattaaccaggaaacattttgggtagcatctgaaattctcagagaaacaaacc

SEQ ID NO: 173942 - DNA, 120 bp, Artificial Sequence
  ENSG00000109756_23 (sequence is synthesized)
agctgaagaggatgaagatcattaagcatttcatcaagatagcactgcactgtagggaatgcaagaattttaactcaatgtttgcaatcatcagtggcctaaacctggcaccagtggcaa

SEQ ID NO: 173943 - DNA, 120 bp, Artificial Sequence
  ENSG00000109756_24 (sequence is synthesized)
gactgcgaacgacctgggagaaacttcccaataaatacgaaaaactatttcaagatctccaagacctgtttgatccttccagaaacatggcaaaatatcgtaatgttctcaatagtcaaa

SEQ ID NO: 173944 - DNA, 120 bp, Artificial Sequence
  ENSG00000109756_25 (sequence is synthesized)
atctacaacctcccataatccctctattcccagttatcaaaaaggatctcaccttccttcacgaaggaaatgactcaaaagtagacgggctggtcaattttgagaagctaaggatgattg

SEQ ID NO: 173945 - DNA, 120 bp, Artificial Sequence
  ENSG00000109756_26 (sequence is synthesized)
caaaagaaattcgtcacgttggccgaatggcttcagtgaacatggaccctgccctcatgttcaggactcggaagaagaaatggcggagtttggggtctctcagccagggtagtacaaatg

SEQ ID NO: 173946 - DNA, 120 bp, Artificial Sequence
  ENSG00000109756_27 (sequence is synthesized)
caacagtgctagatgttgctcagacaggtggtcataaaaagcgggtacgtcgtagttcctttctcaatgccaaaaagctttatgaagatgcccaaatggctcgaaaagtgaagcagtacc

SEQ ID NO: 173947 - DNA, 120 bp, Artificial Sequence
  ENSG00000109756_28 (sequence is synthesized)
caaatccgagacctctccagtagctccaagggcagggtcacaacagaaagctcagtccctgccacagccccagcagcagccaccaccagcacataaaatcaaccagggactacaggttcc

SEQ ID NO: 173948 - DNA, 120 bp, Artificial Sequence
  ENSG00000109756_29 (sequence is synthesized)
cgccgtgtccctttatccttcacggaagaaagtgcccgtaaaggatctcccaccttttggcataaactctccacaagctttaaaaaaaattctttctttgtctgaagaaggaagtttgga

SEQ ID NO: 173949 - DNA, 120 bp, Artificial Sequence
  ENSG00000109756_30 (sequence is synthesized)
acgtcacaagaaacaggctgaagatacaatatcaaatgcatcttcgcagctttcttctcctcctacttctccacagagttctccaaggaaaggctatactttggctcccagtggtactgt

SEQ ID NO: 173950 - DNA, 120 bp, Artificial Sequence
  ENSG00000109756_31 (sequence is synthesized)
ggataatttttcagattctggtcacagtgaaatttcttcacgatccagtattgttagcaattcgtcttttgactcagtgccagtctcactgcacgatgagaggcgccagaggcattctgt

SEQ ID NO: 173951 - DNA, 120 bp, Artificial Sequence
  ENSG00000109756_32 (sequence is synthesized)
cagcatcgtggaaacaaacctagggatgggcaggatggagaggcggaccatgattgaacctgatcagtatagcttggggtcctatgcaccaatgtccgagggccgaggcttatatgctac

SEQ ID NO: 173952 - DNA, 120 bp, Artificial Sequence
  ENSG00000109756_33 (sequence is synthesized)
agctacagtaatttcttctccaagcacagaggaactttcccaggatcagggggatcgcgcgtcacttgatgctgctgacagtggccgtgggagctggacgtcatgctcaagtggctccca

SEQ ID NO: 173953 - DNA, 120 bp, Artificial Sequence
  ENSG00000109756_34 (sequence is synthesized)
tgataatatacagacgatccagcaccagagaagctgggagactcttccattcgggcatactcactttgattattcaggggatcctgcaggtttatgggcatcaagcagccatatggacca

SEQ ID NO: 173954 - DNA, 120 bp, Artificial Sequence
  ENSG00000109756_35 (sequence is synthesized)
aattatgttttctgatcatagcacaaagtataacaggcaaaatcaaagtagagagagccttgaacaagcccagtcccgagcaagctgggcgtcttccacaggttactggggagaagactc

SEQ ID NO: 173955 - DNA, 120 bp, Artificial Sequence
  ENSG00000109756_36 (sequence is synthesized)
agaaggtgacacaggcacaataaagcggaggggtggaaaggatgtttccattgaagccgaaagcagtagcctaacgtctgtgactacggaagaaaccaagcctgtccccatgcctgccca

SEQ ID NO: 173956 - DNA, 120 bp, Artificial Sequence
  ENSG00000109756_37 (sequence is synthesized)
catagctgtggcatcaagtactacaaaggggctcattgcacgaaaggagggcaggtatcgagagcccccgcccacccctcccggctacattggaattcccattactgactttccagaagg

SEQ ID NO: 173957 - DNA, 120 bp, Artificial Sequence
  ENSG00000109756_38 (sequence is synthesized)
gcactcccatccagccaggaaaccgccggactacaacgtggcccttcagagatcgcggatggtcgcacgatcctccgacacagctgggccttcatccgtacagcagccacatgggcatcc

SEQ ID NO: 173958 - DNA, 120 bp, Artificial Sequence
  ENSG00000109756_39 (sequence is synthesized)
caccagcagcaggcctgtgaacaaacctcagtggcataaaccgaacgagtctgacccgcgcctcgccccctatcagtcccaagggttttccaccgaggaggatgaagatgaacaagtttc

SEQ ID NO: 173959 - DNA, 120 bp, Artificial Sequence
  ENSG00000109756_40 (sequence is synthesized)
tgctgtttgaggcacagacttttctggaagcagagcgagccacctgaaaggagagcacaagaagacgtcctgagcattggagccttggaactcacattctgaggacggtggaccagtttg

SEQ ID NO: 173960 - DNA, 120 bp, Artificial Sequence
  ENSG00000109756_41 (sequence is synthesized)
cctccttccctgccttaaaagcagcatggggcttcttctccccttcttcctttcccctttgcatgtgaaatactgtgaagaaattgccctggcacttttcagactttgttgcttgaaatg

SEQ ID NO: 173961 - DNA, 120 bp, Artificial Sequence
  ENSG00000109756_42 (sequence is synthesized)
cacagtgcagcaatcttcgagctcccactgttgctgcctgccacatcacacagtatcattccaaattccaagatcatcacaacaagatgattcactctggctgcacttctcaatgcctgg

SEQ ID NO: 173962 - DNA, 120 bp, Artificial Sequence
  ENSG00000109756_43 (sequence is synthesized)
aaggattttttttaatcttccttttagatttcaatccagtcctagcacttgatctcattgggataatgagaaaagctagccattgaactacttggggcctttaacccaccaaggaagaca

SEQ ID NO: 173963 - DNA, 120 bp, Artificial Sequence
  ENSG00000109756_44 (sequence is synthesized)
aagaaaaacaatgaaatcctttgagtacagtgcttgtccacttgtttacaatgtcctccttttaaaaaaaaaaaatgagtttaaagattttgttcagagagtaaatatatatccatttaa

SEQ ID NO: 173964 - DNA, 120 bp, Artificial Sequence
  ENSG00000109756_45 (sequence is synthesized)
tgattacagtattattttaaaccttaagtagggttgccagcctggtttctgaaaaaccaaatatgccggacagggtgtggccacaccaagaagacgggaagacctggcttgtgaccctgg

SEQ ID NO: 173965 - DNA, 120 bp, Artificial Sequence
  ENSG00000109756_46 (sequence is synthesized)
cttcccatgtccttctggtctcacccgcgaagtgccctatcctggaagtatgaaatgttagccaattaataccaagacacctcatctgctccttccccagtggatggggttcttctgtaa

SEQ ID NO: 173966 - DNA, 120 bp, Artificial Sequence
  ENSG00000109756_47 (sequence is synthesized)
aactgtttgcacatggccaggggagggaactaggacccttgtgtcctgtctgagccttatggaggcaggacggtgtcattggcggatgtgtcctgctccattgagatggatggcaaaccc

SEQ ID NO: 173967 - DNA, 87 bp, Artificial Sequence
  ENSG00000109756_48 (sequence is synthesized)
ggcggatgtgtcctgctccattgagatggatggcaaaccccatttttaagttatatttctttgatttttgttaatttagaggtgtag

SEQ ID NO: 173968 - DNA, 120 bp, Artificial Sequence
  ENSG00000109756_49 (sequence is synthesized)
ttgggatgttggagctaatgccagctgtttatactgctctttcaagacagcctccctttattgaattggcattagggaataaacaagcctttaaacgtgataaaagatcaaaaacctggt

SEQ ID NO: 173969 - DNA, 120 bp, Artificial Sequence
  ENSG00000109756_50 (sequence is synthesized)
tagacatgccagcctttgcaaggcaggttagtcaccaaagactaacctccaagtggctttatggacgctgcatatagagaaggcctaagtgtagcaaccatctgctcacagctgctatta

SEQ ID NO: 173970 - DNA, 120 bp, Artificial Sequence
  ENSG00000109756_51 (sequence is synthesized)
accctataatgactgaaatgacccctccactctatttttgtgttgttttgcacagactccggaaaagtgaaggctgccaatctgagtagtactcaaatgtgaggaactgctggtcttgga

SEQ ID NO: 173971 - DNA, 120 bp, Artificial Sequence
  ENSG00000109756_52 (sequence is synthesized)
ttttttttccattaaattcagctgatcatattgatcagtagataaacgtaaatagcttcaaattttaaaagtggaattgcagtgttttttcactgtatcaaacaatgtcagtgctttatt

SEQ ID NO: 173972 - DNA, 120 bp, Artificial Sequence
  ENSG00000109756_53 (sequence is synthesized)
taataattctcttctgtatcatggcatttgtctacttgcttattacattgtcaattatgcatttgtaattttacatgtaatatgcattatttgccagttttattatataggctatggacc

SEQ ID NO: 173973 - DNA, 120 bp, Artificial Sequence
  ENSG00000109756_54 (sequence is synthesized)
tcatgtgcatatagaaagacagaaatctagctctaccacaagttgcacaaatgttatctaagcattaagtaattgtagaacataggactgctaatctcagttcgctctgtgatgtcaagt

SEQ ID NO: 173974 - DNA, 120 bp, Artificial Sequence
  ENSG00000109756_55 (sequence is synthesized)
gcagaatgtacaattaactggtgatttcctcatacttttgatactacttgtacctgtatgtcttttagaaagacattggtggagtctgtatcccttttgtatttttaatacaataattgt

SEQ ID NO: 173975 - DNA, 120 bp, Artificial Sequence
  ENSG00000109756_56 (sequence is synthesized)
acatattggttatatttttgttgaagatggtagaaatgtactatgtttatgcttctacatccagtttgtacaagctggaaaataaataaatataacataaagccttgcctatattcttaa

SEQ ID NO: 173976 - DNA, 120 bp, Artificial Sequence
  ENSG00000109756_57 (sequence is synthesized)
gctgtcactcattcctcaccatggttgcagcacaaagcaacaagccccagaggccgcttcctccctgaggagcggctccggcggccggagaaggcgcaggaggaggaagaggcggaggaa

SEQ ID NO: 173977 - DNA, 120 bp, Artificial Sequence
  ENSG00000109756_58 (sequence is synthesized)
gaggaggggaatcgccgcttcccaaacactctctccgagggggctgtgcgcggctctcggctttcggccctcggacgcccgcgccgggagtccgaacccgggctgtccgcggccccctct

SEQ ID NO: 173978 - DNA, 120 bp, Artificial Sequence
  ENSG00000109756_59 (sequence is synthesized)
ctcttccccctcctccgccccgcgcagacgaggaacaaagttgccgagagcgactgggccggagggctgcagcccgggccgggtgctctggccgcggcggcgccggcgccggggcagctc

SEQ ID NO: 173979 - DNA, 120 bp, Artificial Sequence
  ENSG00000109756_60 (sequence is synthesized)
gcggcggagcccacagcggcggcccgagcagcagaggcggcggcggcggcggctgggcggcccgaggggatgcagcagcagtcgggagggacggccgagcccagtagacagagaccagga

SEQ ID NO: 173980 - DNA, 120 bp, Artificial Sequence
  ENSG00000109756_61 (sequence is synthesized)
ggccgagcccagtagacagagaccaggagcggcggccgaggcgatcgggcttcgcagcgcccggacctgagccagacccacctggtccgtcctcccgaccggcggccgaggcgcccgagg

SEQ ID NO: 173981 - DNA, 120 bp, Artificial Sequence
  ENSG00000109756_62 (sequence is synthesized)
actggggacgcggaagatccaagtgattctcggagacccctgggcggcggctgcgcaagcccctgagaggagggggcgaccctcagcgccgtgggggaggaggctccgcctgcccacagc

SEQ ID NO: 173982 - DNA, 120 bp, Artificial Sequence
  ENSG00000109756_63 (sequence is synthesized)
cctccccactgccactcgtacctccctaaaaataactcgggcccgctggggccaggaggagccgccactgtcccccgagtggagccggggaggcgtgtcgagccagggccggaggaagcc

SEQ ID NO: 173983 - DNA, 120 bp, Artificial Sequence
  ENSG00000109756_64 (sequence is synthesized)
ggcggagcggcgaggaagaggaggaggaggaggaaggggagttccgcctgcgggccgcatcgcacggcagcctaggggcgccgcgaccctcccggctgcgtccagcccctcgcgcctgta

SEQ ID NO: 173984 - DNA, 80 bp, Artificial Sequence
  ENSG00000109756_65 (sequence is synthesized)
cgccgccgcggtttggctgattagtcgcgggcgggcgggcgggcgcagcgcgcagggcggaggcagcagcggcgctgggc

SEQ ID NO: 173985 - DNA, 120 bp, Artificial Sequence
  ENSG00000109756_66 (sequence is synthesized)
agcagcggcgctgggccgggaggaggccggccagggtgcggagcggccccggcccgctcccagaggggagatggcgtcctacgtagataacagcttccgccaggcggtgatgaagaatcc

SEQ ID NO: 173986 - DNA, 120 bp, Artificial Sequence
  ENSG00000109756_67 (sequence is synthesized)
ccccgaaaggaccccccaggatctggaaatagtatattcctatttacatggtatggaagccttatcaaacttgagggagcatcaacttaggttaatgtgtgaaactgtgagatatgagag

SEQ ID NO: 173987 - DNA, 120 bp, Artificial Sequence
  ENSG00000109756_68 (sequence is synthesized)
acacgaagcaaatgaagttttatactaccctgatgatattgggacctgctggtatatccttctttctggttccgtgttcatcaaggaatccatgtttcttccaagaagcagttttggcaa

SEQ ID NO: 173988 - DNA, 120 bp, Artificial Sequence
  ENSG00000109756_69 (sequence is synthesized)
gcgttctgcaggaagttttaggcgtggctgtgaatgcattgttttagagccttctgaaatgattgtggtggactatatggatgaaaatgaagaatattttcagcggcaagcttcccatag

SEQ ID NO: 173989 - DNA, 120 bp, Artificial Sequence
  ENSG00000109756_70 (sequence is synthesized)
ctcaaaaccagttagttccagagaagttcagagacacttgaagtttgtctagatagttttctacagatgtctttgcaagatgattgaatatgggttatctgtggactatatggatgaaaa

SEQ ID NO: 173990 - DNA, 120 bp, Artificial Sequence
  ENSG00000109756_71 (sequence is synthesized)
tgtgaaaggacaaagttcagagcttgatatacacaccctatgataccaggcaattggtaatggttttccattacccacatgtacctctttcttttctttttcccttctcctgttgccctt

SEQ ID NO: 173991 - DNA, 120 bp, Artificial Sequence
  ENSG00000109756_72 (sequence is synthesized)
tctttatttcctcttttaccctcttactccctttattcttttcccttgttttcttctccactgcctgtgtcttaggcctgccagtgacacccaggcattgcttagccctgccctccaccc

SEQ ID NO: 173992 - DNA, 120 bp, Artificial Sequence
  ENSG00000109756_73 (sequence is synthesized)
ttcaagtggggaatgaacacttggatacccatgtgcacaattaggtatgaatttccctcacagactgcaaagtgccagtttaaatagatctcacctgttaaagcaaatctatgttagact

SEQ ID NO: 173993 - DNA, 120 bp, Artificial Sequence
  ENSG00000109756_74 (sequence is synthesized)
cacctcttcctggaatcataggctctaatagcacttagaatgtaagaaacagttttggatgagaatacagtttgctgtggataaattgaaaattgattacactatatgtggtttgaagtt

SEQ ID NO: 173994 - DNA, 120 bp, Artificial Sequence
  ENSG00000109756_75 (sequence is synthesized)
taattttatttcattcatcatctgtaatgttttacttaaatacaaattataatgtcatgcccaaaggaaaataatcctatgatataaactgtcattgacttttataagtgaattcttact

SEQ ID NO: 173995 - DNA, 120 bp, Artificial Sequence
  ENSG00000109756_76 (sequence is synthesized)
tgaatttttattttatactagggtactgagatcatatagtactttcatgggcttacagcaatttgaaacccatgagatttacagaaacttaaaacctcagtaaagcaattcagagatttt

SEQ ID NO: 173996 - DNA, 74 bp, Artificial Sequence
  ENSG00000109756_77 (sequence is synthesized)
cgtctgtactaaaaatacaaaaaaattacctgggcatggtggtgcgcacctgtacaggagccagaggttgcagt

SEQ ID NO: 173997 - DNA, 120 bp, Artificial Sequence
  ENSG00000109756_78 (sequence is synthesized)
ccctccagcctgggcgatagagtgagattctctcaaaaaaaaaaaaaactcaaagattttcaactgacttcatcatattagttaaaattaaatgttacctgtggatttcatattagatct

SEQ ID NO: 173998 - DNA, 120 bp, Artificial Sequence
  ENSG00000109756_79 (sequence is synthesized)
ataaatttgttatagcaaaaataagttgcttatttaaaaaagataaatattttcaagtaaaatgtatttcttttaaggtaccagttctatatgaccatattagaaattcagtttgggatt

SEQ ID NO: 173999 - DNA, 120 bp, Artificial Sequence
  ENSG00000109756_80 (sequence is synthesized)
tttttttttttcctttttggatggtgttccagcttgctatagaataaatgccaaaatgtctgtctagacactaagaatttcaaatcaaatgtattctaatttaaaaaagtctgtagtcaa

SEQ ID NO: 174000 - DNA, 120 bp, Artificial Sequence
  ENSG00000109756_81 (sequence is synthesized)
gattaattttagtacatttctcttcataaagcatttttcccttatatctacttattcagttgaattcagggatgtatttcttttttagaagataaatgagaaaatgagtatttaattatg

SEQ ID NO: 174001 - DNA, 120 bp, Artificial Sequence
  ENSG00000109756_82 (sequence is synthesized)
ttctctaaaactgagcacaagaaagaacacctagaattatttggaaataaaaccattctaaatctcttatatgtatttgggaataattttgctgctgtgtacaaagaaataaaatatttt

SEQ ID NO: 174002 - DNA, 120 bp, Artificial Sequence
  ENSG00000109756_83 (sequence is synthesized)
ttagataagaaactaaggatcatgtattttgaaacattacacacctgtggtcagtgttaaggaaattgctcagaaataatgttaacagtttatttataaaattaatgtgatactataagc

SEQ ID NO: 174003 - DNA, 120 bp, Artificial Sequence
  ENSG00000109756_84 (sequence is synthesized)
aagcaatatttttaaaaatgtaatatcagagctctaaaggtatttttaatataattaaagtatgcataattactagtacaaaaaaagcctatatcttttgatttttaactttttgcttca

SEQ ID NO: 174004 - DNA, 120 bp, Artificial Sequence
  ENSG00000109756_85 (sequence is synthesized)
tatgaactgctgcttctacttaaaatctattgattatgcggaaagcatgaaaaatatagaaagatactaaaatgaaagtcgctcataatttgcattgctcagaaataatattaacagttt

SEQ ID NO: 174005 - DNA, 120 bp, Artificial Sequence
  ENSG00000109756_86 (sequence is synthesized)
atttccctccaagattttgatgtgcatgtataatttattttaaaatggccagcatgtagttatgagacatcaggctgtttactcatctgtacagtggggataatagcaccttcctcatgg

SEQ ID NO: 174006 - DNA, 120 bp, Artificial Sequence
  ENSG00000109756_87 (sequence is synthesized)
tttgattaggaggatgaattgaaaaagttccataaggctgccacagtgtgatggtgatggtggtgatgatgatgttgtcattatgattatcgtaatatttagtatagtatcttttttaaa

SEQ ID NO: 174007 - DNA, 120 bp, Artificial Sequence
  ENSG00000109756_88 (sequence is synthesized)
aaattaatatgagcaatataaaaagaataatgtattatcagagctctaaatgccctatgaaatcatgatttcaggtggttgcatcatattttatcttatttacaatataatttaaccacc

SEQ ID NO: 174008 - DNA, 120 bp, Artificial Sequence
  ENSG00000109756_89 (sequence is synthesized)
tcctttttcatcttcttcacattaaaggaggaaaagaaataccatgcttctttccatttccgaatgatctcttgtctcctcactgacctctagttaatttctataataagtgatttctat

SEQ ID NO: 174009 - DNA, 120 bp, Artificial Sequence
  ENSG00000109756_90 (sequence is synthesized)
cattcattcttaactttctttaaaacttctaagaaatgtaatttcttaagtggtttgccctaagctctgaaattttttatatttggggtcagggagagtaatgacttcatatgcagattt

SEQ ID NO: 174010 - DNA, 120 bp, Artificial Sequence
  ENSG00000109756_91 (sequence is synthesized)
ttagctttttctttaagagcaaggattacccttaataccagttataaggataatgttttgagctataacacatatgtggtttgtgttttgaccttctttgaacaagctttctaaaatggt

SEQ ID NO: 174011 - DNA, 120 bp, Artificial Sequence
  ENSG00000109756_92 (sequence is synthesized)
gtttcatcaatataattagcaaattaatatatctactccataggtatctttgagtgtctgtatctttcattaaaatcattctcattcaaaaattgttgcttcttcaaattcttttaattc

SEQ ID NO: 174012 - DNA, 120 bp, Artificial Sequence
  ENSG00000109756_93 (sequence is synthesized)
actagatgataattaagtttttacatctattctcctacaattccactccccctactgcagtgttttttaattgtgaaagaagcatgaaaaagctatcttctaattatgtcttttgatttt

SEQ ID NO: 174013 - DNA, 120 bp, Artificial Sequence
  ENSG00000109756_94 (sequence is synthesized)
taaaattattaggattttgaatgtaaaatacatataagtattctaaaaatgaaacttttcttgaccaaggaagaaatacattaaaagtagagaagtctgattaaggttcattacagcatt

SEQ ID NO: 174014 - DNA, 120 bp, Artificial Sequence
  ENSG00000109756_95 (sequence is synthesized)
aatttagaaagtatgggaaagacagggaaaaatgtcagttttaaataattaaaacactgaattattagtactgctaggtcttttgcaagcactttatcattaacatgtgacttatgtttt

SEQ ID NO: 174015 - DNA, 120 bp, Artificial Sequence
  ENSG00000109756_96 (sequence is synthesized)
tatgaaatgtaaacctaaagatactttaatgtgtatatttgtcacagcaattatgtccagattaatgtaatgaaataggagaatgtaattctgaagcaaaaaaaaacaaaaaaacaaaaa

SEQ ID NO: 174016 - DNA, 120 bp, Artificial Sequence
  ENSG00000109756_97 (sequence is synthesized)
attagggacactgatagaagaggcttctatgctctgtgactgcctttcgtggaaagctcacactggcagaaagtgctcttgacccaacttgggagaggagaatgtggtcacagaaacttc

SEQ ID NO: 174017 - DNA, 120 bp, Artificial Sequence
  ENSG00000109756_98 (sequence is synthesized)
gtaggatactttcttttttcctctctaaacttcgattaaacaacttaagcttcattagaataaaacatttgtctcttagtcatgtggtctctacaagtgaaatggggtttttctccccac

SEQ ID NO: 174018 - DNA, 120 bp, Artificial Sequence
  ENSG00000109756_99 (sequence is synthesized)
ttaagagatatctatgcctgcattttatttttgcttctatttggtagacttccctttgatgttataaacctagagagtctaattaatacggttgtatttctcatgcaggctatactttgg

SEQ ID NO: 174019 - DNA, 120 bp, Artificial Sequence
  ENSG00000109756_100 (sequence is synthesized)
agactacagtgtcttgctttctgcaggaagcagcaatgccgtttgtttcctaagaggaattttttatttagaaaaggaagctttctatccaggaaatggctttccttgtgcgttgctatg

SEQ ID NO: 174020 - DNA, 120 bp, Artificial Sequence
  ENSG00000109756_101 (sequence is synthesized)
gaacagcaatctgacgtctttagaggagacatcagttcattatgtggatacaaattctatgctttcggcttttatacaccaagtcttaatttaaatctgtttttcttgccttttctaacg

SEQ ID NO: 174021 - DNA, 120 bp, Artificial Sequence
  ENSG00000109756_102 (sequence is synthesized)
tgttaaaatgatatgcaaagatagtgatgtaattaatgtttgcatgagtctgaaaactgttctaggtttttatgactgagctattttggaagcagtattaaacaatcaaatttgttttaa

SEQ ID NO: 174022 - DNA, 120 bp, Artificial Sequence
  ENSG00000109758_0 (sequence is synthesized)
ggcccgcctgacgtgggaggcagccagggttaatcatttccacgaagccttgaccccacctgccttggccgctctgctcccgcctcccactgcccctcaggccagctcaggagccatggg

SEQ ID NO: 174023 - DNA, 120 bp, Artificial Sequence
  ENSG00000109758_1 (sequence is synthesized)
gcgctgggcctgggtccccagcccctggcccccaccggggctgggccccttcctcctcctcctcctgctgctgctgctgctgccacgggggttccagccccagcctggcgggaaccgtac

SEQ ID NO: 174024 - DNA, 120 bp, Artificial Sequence
  ENSG00000109758_2 (sequence is synthesized)
ggagtccccagaacctaatgccacagcgacccctgcgatccccactatcctggtgacctctgtgacctctgagaccccagcaacaagtgctccagaggcagagggaccccaaagtggggg

SEQ ID NO: 174025 - DNA, 120 bp, Artificial Sequence
  ENSG00000109758_3 (sequence is synthesized)
gctcccgcccccgcccagggcagttccctcgagcagtagcccccaggcccaagcactcaccgaggacgggaggccctgcaggttccccttccgctacgggggccgcatgctgcatgcctg

SEQ ID NO: 174026 - DNA, 120 bp, Artificial Sequence
  ENSG00000109758_4 (sequence is synthesized)
cacttcggagggcagtgcacacaggaagtggtgtgccacaactcacaactacgaccgggacagggcctggggctactgtgtggaggccaccccgcctccagggggcccagctgccctgga

SEQ ID NO: 174027 - DNA, 120 bp, Artificial Sequence
  ENSG00000109758_5 (sequence is synthesized)
tccctgtgcctccggcccctgcctcaatggaggctcctgctccaatacccaggacccccagtcctatcactgcagctgcccccgggccttcaccggcaaggactgcggcacagagaaatg

SEQ ID NO: 174028 - DNA, 120 bp, Artificial Sequence
  ENSG00000109758_6 (sequence is synthesized)
ctttgatgagacccgctacgagtacctggaggggggcgaccgctgggcccgcgtgcgccagggccacgtggaacagtgcgagtgcttcgggggccggacctggtgcgaaggcacccgaca

SEQ ID NO: 174029 - DNA, 120 bp, Artificial Sequence
  ENSG00000109758_7 (sequence is synthesized)
tacagcttgtctgagcagcccttgcctgaacgggggcacctgccacctgatcgtggccaccgggaccaccgtgtgtgcctgcccaccaggcttcgctggacggctctgcaacatcgagcc

SEQ ID NO: 174030 - DNA, 120 bp, Artificial Sequence
  ENSG00000109758_8 (sequence is synthesized)
actccgtgggcgccgcggccctgctgggcctgggcccccatgcctactgccggaatccggacaatgacgagaggccctggtgctacgtggtgaaggacagcgcgctctcctgggagtact

SEQ ID NO: 174031 - DNA, 120 bp, Artificial Sequence
  ENSG00000109758_9 (sequence is synthesized)
gccgcctggaggcctgcgaatccctcaccagagtccaactgtcaccggatctcctggcgaccctgcctgagccagcctccccggggcgccaggcctgcggcaggaggcacaagaagagga

SEQ ID NO: 174032 - DNA, 120 bp, Artificial Sequence
  ENSG00000109758_10 (sequence is synthesized)
cgttcctgcggccacgtatcatcggcggctcctcctcgctgcccggctcgcacccctggctggccgccatctacatcggggacagcttctgcgccgggagcctggtccacacctgctggg

SEQ ID NO: 174033 - DNA, 120 bp, Artificial Sequence
  ENSG00000109758_11 (sequence is synthesized)
tggtgtcggccgcccactgcttctcccacagcccccccagggacagcgtctccgtggtgctgggccagcacttcttcaaccgcacgacggacgtgacgcagaccttcggcatcgagaagt

SEQ ID NO: 174034 - DNA, 120 bp, Artificial Sequence
  ENSG00000109758_12 (sequence is synthesized)
acatcccgtacaccctgtactcggtgttcaaccccagcgaccacgacctcgtcctgatccggctgaagaagaaaggggaccgctgtgccacacgctcgcagttcgtgcagcccatctgcc

SEQ ID NO: 174035 - DNA, 120 bp, Artificial Sequence
  ENSG00000109758_13 (sequence is synthesized)
tgcccgagcccggcagcaccttccccgcaggacacaagtgccagattgcgggctggggccacttggatgagaacgtgagcggctactccagctccctgcgggaggccctggtccccctgg

SEQ ID NO: 174036 - DNA, 120 bp, Artificial Sequence
  ENSG00000109758_14 (sequence is synthesized)
tcgccgaccacaagtgcagcagccctgaggtctacggcgccgacatcagccccaacatgctctgtgccggctacttcgactgcaagtccgacgcctgccagggggactcaggggggcccc

SEQ ID NO: 174037 - DNA, 120 bp, Artificial Sequence
  ENSG00000109758_15 (sequence is synthesized)
tggcctgcgagaagaacggcgtggcttacctctacggcatcatcagctggggtgacggctgcgggcggctccacaagccgggggtctacacccgcgtggccaactatgtggactggatca

SEQ ID NO: 174038 - DNA, 120 bp, Artificial Sequence
  ENSG00000109758_16 (sequence is synthesized)
acgaccggatacggcctcccaggcggcttgtggctccctcctgaccctccagcgggacaccctggttcccaccattccctgccttgctgacaataaagatatttccaagaacccggccca

SEQ ID NO: 174039 - DNA, 120 bp, Artificial Sequence
  ENSG00000109758_17 (sequence is synthesized)
agtgggcgccagggcctgagcagcgtggacagggggtccggccatggccctctgcagcgcctcctgccgggtagggcctgtgtgtggaagggggctggccctgtgaaccccaggggtgtg

SEQ ID NO: 174040 - DNA, 120 bp, Artificial Sequence
  ENSG00000109758_18 (sequence is synthesized)
gggggtgctgccttgggccccaccgaggtcacagcagttttccccgtgatcctcctagcccctccgcacacctggctactgcatctctgacaaatggggaaactggagctcacgggatca

SEQ ID NO: 174041 - DNA, 120 bp, Artificial Sequence
  ENSG00000109758_19 (sequence is synthesized)
ggctggtccaaggtcacgcagtgggtcggtactggggtcacagtggggaagcagcccgctgcagggggctggtcaccaggcgacggcctcggggtggcacctgcccagcctggaccatgc

SEQ ID NO: 174042 - DNA, 120 bp, Artificial Sequence
  ENSG00000109758_20 (sequence is synthesized)
ccaggatggccgcagaagcctttcagggaggtgcagggagggcagcgtgcaggccccccagaggccacctgcttcctgccctggggagaggccccccggctccctaggaccccggcgggg

SEQ ID NO: 174043 - DNA, 120 bp, Artificial Sequence
  ENSG00000109762_0 (sequence is synthesized)
gatcctgtttgccctcgtctgccggagcccgcgcgcccagccgcccgacttcgccgccgcctggagccggctggccgcgacctcagccgcccgccgcccgccggggagtcctgtgtatgg

SEQ ID NO: 174044 - DNA, 120 bp, Artificial Sequence
  ENSG00000109762_1 (sequence is synthesized)
ccggggagtcctgtgtatggaaactcacatgagtcagctcagtctagaagggtagtaatttctcataatatggataaagctctgaaagaagtgttcgactacagttatagagattacatt

SEQ ID NO: 174045 - DNA, 120 bp, Artificial Sequence
  ENSG00000109762_2 (sequence is synthesized)
ctgtcctggtatggaaacctcagcagagatgagggacaactttaccatctgctcttggaagacttttgggaaattgccagacagctgcaccacagactgagtcacgtggatgtggttaaa

SEQ ID NO: 174046 - DNA, 120 bp, Artificial Sequence
  ENSG00000109762_3 (sequence is synthesized)
gttgtctgcaatgatgttgtgaggactttactcactcatttctgtgacctgaaagctgccaatgccagacatgaagaacagccaagaccttttgtgttgcacgcatgcttgaggaactca

SEQ ID NO: 174047 - DNA, 120 bp, Artificial Sequence
  ENSG00000109762_4 (sequence is synthesized)
gatgatgaagtaagatttctacaaacgtgttctcgggttctggtgttttgtctcctcccctcaaaggatgtgcagtctctcagcttacgtataatgcttgcagaaattctcacaacaaaa

SEQ ID NO: 174048 - DNA, 120 bp, Artificial Sequence
  ENSG00000109762_5 (sequence is synthesized)
gtcttgaagccggtagtggagttactgagtaatccagattacattaaccaaatgctgcttgcccagctggcgtacagagagcaaatgaatgagcatcacaagagagcctacacctatgcc

SEQ ID NO: 174049 - DNA, 120 bp, Artificial Sequence
  ENSG00000109762_6 (sequence is synthesized)
ccctcttacgaggacttcatcaagctcattaacagcaactctgatgtggagttcttgaagcaactaaggtatcaaattgtagtggaaataatccaggcgactacaattagcagctttccc

SEQ ID NO: 174050 - DNA, 120 bp, Artificial Sequence
  ENSG00000109762_7 (sequence is synthesized)
caactgaagaggcacaaaggtaaagaaactgcggcaatgaaagctgatctcctgagggccaggaacatgaagaggtacatcaaccaactgactgtggcaaagaagcagtgtgagaagaga

SEQ ID NO: 174051 - DNA, 120 bp, Artificial Sequence
  ENSG00000109762_8 (sequence is synthesized)
atccgaatcctgggaggccctgcctatgaccagcaagaggatggggccctggatgagggggaagggcctcaaagccagaagattcttcagtttgaagatatcttggccaatacgttctac

SEQ ID NO: 174052 - DNA, 120 bp, Artificial Sequence
  ENSG00000109762_9 (sequence is synthesized)
cgagagcactttggaatgtacatggaaaggatggacaaaagagctctgattagtttttgggaatctgtggaacatttaaagaatgctaacaagaatgaaattccacaattagttggtgaa

SEQ ID NO: 174053 - DNA, 120 bp, Artificial Sequence
  ENSG00000109762_10 (sequence is synthesized)
atttatcagaatttctttgtggagagcaaagaaatatctgtggaaaaatcactttacaaagaaattcagcagtgtcttgtaggaaataaaggtattgaagtattctacaaaatccaggaa

SEQ ID NO: 174054 - DNA, 120 bp, Artificial Sequence
  ENSG00000109762_11 (sequence is synthesized)
gatgtttatgagaccctaaaggataggtattacccttcatttattgtcagtgacctgtatgagaaattgttgataaaagaggaagaaaaacatgcctcacagatgatttccaacaaggat

SEQ ID NO: 174055 - DNA, 120 bp, Artificial Sequence
  ENSG00000109762_12 (sequence is synthesized)
gagatgggcccaagagatgaggctggtgaggaagccgtggatgatggtaccaatcagatcaatgaacaagccagttttgctgtaaacaaactgcgagaactaaatgagaaacttgaatat

SEQ ID NO: 174056 - DNA, 120 bp, Artificial Sequence
  ENSG00000109762_13 (sequence is synthesized)
taatagagaaagaacgcacagaccttcagctgcacatggcaagaacggattggtggtgtgaaaaccttggcatgtggaaagcctccatcaccagtggagaggttacagaagagaatggtg

SEQ ID NO: 174057 - DNA, 120 bp, Artificial Sequence
  ENSG00000109762_14 (sequence is synthesized)
agcaattgccatgttactttgtcatggtaagcctacaagaagttggaggagttgaaactaagaactggacggtccccagaaggctcagcgagtttcagaatttacaccggaaactcagtg

SEQ ID NO: 174058 - DNA, 120 bp, Artificial Sequence
  ENSG00000109762_15 (sequence is synthesized)
agtgcgtcccttctttaaaaaaagtccagttgccttctcttagcaagctgcctttcaaatctatagatcaaaagtttatggaaaagtcgaagaatcaattaaataagtttttacagaatc

SEQ ID NO: 174059 - DNA, 120 bp, Artificial Sequence
  ENSG00000109762_16 (sequence is synthesized)
tgctttcagatgaaagactgtgtcagagtgaagcactttatgccttcttgagcccttctcctgactacctcaaggttatcgacgtgcaggggaaaaaaaattctttttcattatcctcat

SEQ ID NO: 174060 - DNA, 120 bp, Artificial Sequence
  ENSG00000109762_17 (sequence is synthesized)
ttttggaaagacttcctcgcgacttcttctcccaccaggaggaggagacagaggaggacagtgacctgtcagattatggtgatgatgtggatgggaggaaagacgccttggctgaaccat

SEQ ID NO: 174061 - DNA, 120 bp, Artificial Sequence
  ENSG00000109762_18 (sequence is synthesized)
gtttcatgttgattggggagatttttgaacttcgaggaatgtttaaatgggtgagaagaacattaattgccctcgttcaggtcacttttggaagaaccatcaacaaacaaatccgggaca

SEQ ID NO: 174062 - DNA, 120 bp, Artificial Sequence
  ENSG00000109762_19 (sequence is synthesized)
cagtcagctggattttcagtgagcaaatgttggtttactacatcaatattttccgggatgctttttggccaaatgggaagttggcaccaccgaccacaatcagaagcaaagagcaaagtc

SEQ ID NO: 174063 - DNA, 120 bp, Artificial Sequence
  ENSG00000109762_20 (sequence is synthesized)
aggaaacaaaacagagagcacagcaaaagctgcttgaaaacattccagatatgcttcagagccttgttggacagcaaaatgcccgccacggtataataaaaatattcaatgcactgcaag

SEQ ID NO: 174064 - DNA, 120 bp, Artificial Sequence
  ENSG00000109762_21 (sequence is synthesized)
aaacaagagccaacaagcatctgttatatgcgctgatggaactgctgctaattgaactgtgtcctgagctgagagttcatttagatcaacttaaagctggccaagtttgagactacacaa

SEQ ID NO: 174065 - DNA, 120 bp, Artificial Sequence
  ENSG00000109762_22 (sequence is synthesized)
ataaaccaccagaaaaatgtctgtgtaataatagacatgaaacattttcctcttttccacagagggcttaactgagaaccgtattgatttttattttagttacctccctctagttttatg

SEQ ID NO: 174066 - DNA, 120 bp, Artificial Sequence
  ENSG00000109762_23 (sequence is synthesized)
tgaaattagtagaatcagggaggacgggacttatgctgtggtaggcaacagaaaaaaacttctattgattttaatttaatatgaatactttaaagatcaacataccgattgaaatacaaa
